United States Patent Application Publication US 2020/0163878 A1 - sequence listing, part 45

SEQ ID NO: 168629 - RNA, 1701 nt, Artificial Sequence
  derived and/or modified CDS sequence (opt4) from hemagglutinin__InfluenzaA__AFG99270
augaagaccaucaucgcccugagcuacaucuucugccugguguucgcccagaagcugcccggcaacgacaacagcaccgccacccugugccugggccaccacgccgugcccaacggcacccuggugaagaccaucaccaacgaccagaucgaggugaccaacgccaccgagcuggugcagagcagcagcaccggcagaaucugcgacagcccccacagaauccuggacggcaagaacugcacccugaucgacgcccugcugggcgacccccacugcgacggcuuccagaacaaggagugggaccuguucguggagagaagcaaggccuacagcaacugcuaccccuacgacgugcccgacuacgccagccugagaagccugguggccagcagcggcacccuggaguucaucaacgaggacuucaacuggaccggcguggcccagagcggcggcagcuacgccugcaagagaggcagcgugaacagcuucuucagcagacugaacuggcugcacaagagcgaguacaaguaccccgcccugaacgugaccaugcccaacaacggcaaguucgacaagcuguacaucuggggcgugcaccaccccagcaccgacagagagcagaccaaccuguacgugagagccagcggcagagugaccgugagcaccaagagaagccagcagaccgugauccccaacaucggcagcagacccugggugagaggccugagcagcagaaucagcaucuacuggaccaucgugaagcccggcgacauccugcugaucaacagcaccggcaaccugaucgcccccagaggcuacuucaagaucagaaccggcaagagcagcaucaugagaagcgacgcccccaucggcaccugcagcagcgagugcaucacccccaacggcagcauccccaacgacaagcccuuccagaacgugaacagaaucaccuacggcgccugccccagauacgugaagcagaacacccugaagcuggccaccggcaugagaaacgugcccgagaagcagaccagaggcaucuucggcgccaucgccggcuucaucgagaacggcugggagggcaugguggacggcugguacggcuucagacaccacaacagcgagggcaccggccaggccgccgaccugaagagcacccaggccgccaucgaccagaucaacggcaagcugaacagacugaucgagaagaccaacgagaaguuccaccagaucgagaaggaguucagcgagguggagggcagaauccaggaccuggagaaguacguggaggacaccaagaucgaccuguggagcuacaacgccgagcugcugguggcccuggagaaccagcacaccaucgaccugaccgacagcgagaugaacaagcuguucgagaagaccagaaagcagcugagagagaacgccgaggacaugggcaacggcugcuucaagaucuaccacaagugcgacaacgccugcaucggcagcaucagaaacggcaccuacgaccacgacguguacagagacgaggcccugaacaacagauuccagaucaagggcguggagcugaagagcggcuacaaggacuggauccuguggaucagcuucgccaucagcugcuuccugcugugcguggugcugcugggcuucaucaugugggccugccagaagggcaacaucagaugcaacaucugcaucuga

SEQ ID NO: 168630 - RNA, 1701 nt, Artificial Sequence
  derived and/or modified CDS sequence (opt4) from hemagglutinin__InfluenzaA__AFG99281
augaagaccaucaucgcccugagcuacaucuucugccugguguucgcccagaagcugcccggcaacgacaacagcaccgccacccugugccugggccaccacgccgugcccaacggcacccuggugaagaccaucaccaacgaccagaucgaggugaccaacgccaccgagcuggugcagagcagcagcaccggcagaaucugcgacagcccccacagaauccuggacggcaagaacugcacccugaucgacgcccugcugggcgacccccacugcgacggcuuccagaacgagaagugggaccuguucguggagagaagcaaggccuucagcaacugcuaccccuacgacgugcccgacuacgccagccugagaagccugguggccagcagcggcacccuggaguucaucaacgaggaguucaacuggaccggcgugacccagagcggcggcagcuacgccugcaagagaggcagcgugaacagcuucuucagcagacugaacuggcugcacaagagcgaguacaaguaccccgcccugaacgugaccaugcccaacaacggcagauucgacaagcuguacaucuggggcgugcaccaccccagcaccgacagagagcagaccaaccuguacgugagagccagcggcagagugaccgugagcaccaagagaagccagcagaccgugauccccaacaucggccccagacccugggugagaggccugagcagcagaaucagcaucuacuggaccaucgugaagcccggcgacauccugcugaucaacagcaccggcaaccugaucgcccccagaggcuacuucaagauccacaccggcaagagcagcaucaugagaagcgacgcccccaucggcaccugcagcagcgagugcaucacccccaacggcagcauccccaacgacaagcccuuccagaacgugaacaagaucaccuacggcgccugccccagauacgugaagcagaacacccugaagcuggccaccggcaugagaaacgugcccgacaagcagaccagaggcaucuucggcgccaucgccggcuucaucgagaacggcugggagggcaugguggacggcugguacggcuucagacaccagaacagcgagggcaccggccaggccgccgaccugaagagcacccaggccgccaucgaccagaucaacggcaagcugaacagacugaucgagaagaccaacgagaaguuccaccagaucgagaaggaguucagcgagguggagggcagaauccaggaccuggagaaguacguggaggacaccaagaucgaccuguggagcuacaacgccgagcugcugguggcccuggagaaccagcacaccaucgaccugaccgacagcgagaugaacaagcuguucgagaagaccagaaagcagcugagagagaacgccgaggacaugggcaacggcugcuucaagaucuaccacaagugcgacaacgccugcaucggcagcaucagaaacggcaccuacgaccacgacguguacagagacgaggcccugaacaacagauuccagaucaagggcguggagcugaagagcggcuacaaggacuggauccuguggaucagcuucgccaucagcugcuuccugcugugcguggugcugcugggcuucaucaugugggccugccagaagggcaacaucagaugcaacaucugcaucuga

SEQ ID NO: 168631 - RNA, 1701 nt, Artificial Sequence
  derived and/or modified CDS sequence (opt4) from hemagglutinin__InfluenzaA__AFG99292
augaagaccaucaucgcccugagcuacaucuucugccugguguucgcccagaagcugcccggcaacgacaacagcaccgccacccugugccugggccaccacgccgugcccaacggcacccuggugaagaccaucaccaacgaccagguggaggugaccaacgccaccgagcuggugcagagcagcagcaccggcagaaucugcgacagcccccacagaauccuggacggcaagaacugcacccugaucgacgcccugcugggcgacccccacugcgacggcuuccagaacgagaagugggaccuguucguggagagaagcaaggccuacagcaacugcuaccccuacgacgugcccgacuacgccagccugagaagccugguggccagcagcggcacccuggaguucaucaacgaggacuucaacuggaccggcgugacccagagcggcggcagcuacgccugcaagagaggcagcgugaacagcuucuucagcagacugaacuggcugcacgagagcgaguacaaguaccccgcccugaacgugaccaugcccaacaacggcaaguucgacaagcuguacaucuggggcgugcaccaccccagcaccgacagagagcagaccaaccuguacgugagagccagcggcagagugaccgugagcaccaagagaagccagcagaccgugauccccaacaucggcagcagacccugggugagaggccugagcagcagaaucagcaucuacuggaccaucgugaagcccggcgacauccugcugaucaacagcaccggcaaccugaucgcccccagaggcuacuucaagaucagaaccggcaagagcagcaucaugagaagcgacgcccccaucggcaccugcagcagcgagugcaucacccccaacggcagcauccccaacgacaagcccuuccagaacgugaacaagaucaccuacggcgccugccccagauacgugaagcagaacacccugaagcuggccaccggcaugagaaacgugcccgagaagcagaccagaggcaucuucggcgccaucgccggcuucaucgagaacggcugggagggcaugguggacggcugguacggcuucagacaccagaacagcgagggcaccggccaggccgccgaccugaagagcacccaggccgccaucgaccagaucaacggcaagcugaacagacugaucgagaagaccaacgagaaguuccaccagaucgagaaggaguucagcgagguggagggcagaauccaggaccuggagaaguacguggaggacaccaagaucgaccuguggagcuacaacgccgagcugcugguggcccuggagaaccagcacaccaucgaccugaccgacagcgagaugaacaagcuguucgagaagaccagaaagcagcugagagagaacgccgaggacaugggcaacggcugcuucaagaucuaccacaagugcgacaacgccugcaucggcagcaucagaaacggcaccuacgaccacgacguguacagagacgaggcccugaacaacagauuccagaucaagggcguggagcugaagagcggcuacaaggacuggauccuguggaucagcuucgccaucagcugcuuccugcugugcguggugcugcugggcuucaucaugugggccugccagaagggcaacaucagaugcaacaucugcaucuga

SEQ ID NO: 168632 - RNA, 1701 nt, Artificial Sequence
  derived and/or modified CDS sequence (opt4) from hemagglutinin__InfluenzaA__AFG99303
augaagaccaucaucgcccugagcuacaucuucugccuggugguggcccagaagcugcccggcaacgacaacagcaccgccacccugugccugggccaccacgccgugcccaacggcacccuggugaagaccaucaccaacgaccagaucgaggugaccaacgccaccgagcuggugcagagcagcagcaccggcagaaucugcgacagcccccacagaauccuggacggcaagaacugcacccugaucgacgcccugcugggcgacccccacugcgacggcuuccagaacaaggagugggaccuguucguggagagaagcaaggccuacagcaacugcuaccccuacgacgugcccgacuacgccagccugagaagccugguggccagcagcggcacccuggaguucaucaacgaggacuucaacuggaccggcguggcccagagcggcggcagcuacgccugcaagagaggcagcgugaacagcuucuucagcagacugaacuggcugcacgagagcgaguacaaguaccccgcccugaacgugaccaugcccaacaacggcaaguucgacaagcuguacaucuggggcgugcaccaccccagcaccgacagagagcagaccaaccuguacgugagagccagcggcagagugaccgugagcaccaagagaagccagcagaccgugauccccaacaucggcagcagacccugggugagaggccugagcagcagaaucagcaucuacuggaccaucgugaagcccggcgacauccugcugaucaacagcaccggcaaccugaucgcccccagaggcuacuucaagaucagaaccggcaagagcagcaucaugagaagcgacgcccccaucggcaccugcagcagcgagugcaucacccccaacggcagcaucagcaacgacaagcccuuccagaacgugaacagaaucaccuacggcgccugccccagauacgugaagcagaacacccugaagcuggccaccggcaugagaaacgugcccgagaagcagaccagaggcaucuucggcgccaucgccggcuucaucgagaacggcugggagggcaugguggacggcugguacggcuucagacaccagaacagcgagggcaccggccaggccgccgaccugaagagcacccaggccgccaucgaccagaucaacggcaagcugaacagacugaucgagaagaccaacgagaaguuccaccagaucgagaaggaguucagcgagguggagggcagaauccaggaccuggagaaguacguggaggacaccaagaucgaccuguggagcuacaacgccgagcugcugguggcccuggagaaccagcacaccaucgaccugaccgacagcgagaugaacaagcuguucgagaagaccagaaagcagcugagagagaacgccgaggacaugggcaacggcugcuucaagaucuaccacaagugcgacaacgccugcaucggcagcaucagaaacggcaccuacgaccacgacguguacagagacgaggcccugaacaacagauuccagaucaagggcguggagcugaagagcggcuacaaggacuggauccuguggaucagcuucgccaucagcugcuuccugcugugcguggugcugcugggcuucaucaugugggccugccagaagggcaacaucagaugcaacaucugcaucuga

SEQ ID NO: 168633 - RNA, 1701 nt, Artificial Sequence
  derived and/or modified CDS sequence (opt4) from hemagglutinin__InfluenzaA__AFG99314
augaagaccaucaucgcccugagcuacaucuucugccugguguucgcccagaagcugcccggcaacgacaacagcaccgccacccugugccugggccaccacgccgugcccaacggcacccuggugaagaccaucaccaacgaccagaucgaggugaccaacgccaccgagcuggugcagagcagcagcaccggcagaaucugcgacagcccccacagaauccuggacggcaagaacugcacccugaucgacgcccugcugggcgacccccacugcgacagcuuccagaacgagaagugggaccuguucguggagagaagcaaggccuacagcaacugcuaccccuacgacgugcccgacuacgccagccugagaagccugguggccagcagcggcacccuggaguucaucaacgaggacuucaacuggaccggcgugacccagagcggcggcagcuacgccugcaagagaggcagcgugaacagcuucuucagcagacugaacuggcugcacgagagcgaguacaaguaccccgcccugaacgugaccaugcccaacaacggcaaguucgacaagcuguacaucuggggcauccaccaccccagcaccgacagagagcagaccaaccuguacgugagagccagcggcagagugaccgugagcaccaagagaagccagcagaccgugauccccaacaucggcagcagacccugggugagaggccugagcagcagaaucagcaucuacuggaccaucgugaagcccggcgacauccugcugaucaacagcaccggcaaccugaucgcccccagaggcuacuucaagcugagaaccggcaagagcagcaucaugagaagcgacgcccccaucggcaccugcagcagcgagugcaucacccccaacggcagcauccccaacgacaagcccuuccagaacgugaacaagaucaccuacggcgccugccccagauacgugaagcagaacacccugaagcuggccaccggcaugagaaacgugcccgagaagcagaccagaggcaucuucggcgccaucgccggcuucaucgagaacggcugggagggcaugguggacggcugguacggcuucagacaccagaacagcgagggcaccggccaggccgccgaccugaagagcacccaggccgccaucgaccagaucaacggcaagcugaacagacugaucgagaagaccaacgagaaguuccaccagaucgagaaggaguucagcgagguggagggcagaauccaggaccuggagaaguacguggaggacaccaagaucgaccuguggagcuacaacgccgagcugcugguggcccuggagaaccagcacaccaucgaccugaccgacagcgagaugaacaagcuguucgagaagaccagaaagcagcugagagagaacgccgaggacaugggcaacggcugcuucaagaucuaccacaagugcgacaacgccugcaucggcagcaucagaaacggcaccuacgaccacgacguguacagagacgaggcccugaacaacagauuccagaucaagggcguggagcugaagagcggcuacaaggacuggauccuguggaucagcuucgccaucagcugcuuccugcugugcguggugcugcugggcuucaucaugugggccugccagaagggcaacaucagaugcaacaucugcaucuga

SEQ ID NO: 168634 - RNA, 1701 nt, Artificial Sequence
  derived and/or modified CDS sequence (opt4) from hemagglutinin__InfluenzaA__AFG99336
augaagaccaucaucgcccugagcuacaucuucugccugguguucgcccagaagcugcccggcaacgacaacagcaccgccacccugugccugggccaccacgccgugcccaacggcacccuggugaagaccaucaccaacgaccagaucgaggugaccaacgccaccgagcuggugcagagcagcagcaccggcagaaucugcgacagcccccacagaauccuggacggcaagaacugcacccugaucgacgcccugcugggcgacccccacugcgacggcuuccagaacaaggagugggaccuguucguggagagaagcaaggccuacagcaacugcuaccccuacgacgugcccgacuacgccagccugagaagccugguggccagcagcggcacccuggaguucaucaacgaggacuucaacuggaccggcguggcccagagcggcggcagcuacgccugcaagagaggcagcgugaacagcuucuucagcagacugaacuggcugcacaagagcgaguacaaguaccccgcccugaacgugaccaugcccaacaacggcaaguucgacaagcuguacaucuggggcgugcaccaccccagcaccgacagagagcagaccaaccuguacgugagagccagcggcagagugaccgugagcaccaagagaagccagcagaccgugauccccaacaucggcagcagacccugggugagaggccugagcagcagaaucagcaucuacuggaccaucgugaagcccggcgacauccugcugaucaacagcaccggcaaccugaucgcccccagaggcuacuucaagaucagaaccggcaagagcagcaucaugagaagcgacgcccccaucggcaccugcagcagcgagugcaucacccccaacggcagcauccccaacgacaagcccuuccagaacgugaacagaaucaccuacggcgccugccccagauacgugaagcagaacacccugaagcuggccaccggcaugagaaacgugcccgagaagcagaccagaggcaucuucggcgccaucgccggcuucaucgagaacggcugggagggcaugguggacggcugguacggcuucagacaccagaacagcgagggcaccggccaggccgccgaccugaagagcacccaggccgccaucgaccagaucaacggcaagcugaacagacugaucgagaagaccaacgagaaguuccaccagaucgagaaggaguucagcgagguggagggcagaauccaggaccuggagaaguacguggaggacaccaagaucgaccuguggagcuacaacgccgagcugcugguggcccuggagaaccagcacaccaucgaccugaccgacagcgagaugaacaagcuguucgagaagaccagaaagcagcugagagagaacgccgaggacaugggcaacggcugcuucaagaucuaccacaagugcgacaacgccugcaucggcagcaucagaaacggcaccuacgaccacgacguguacagagacgaggcccugaacaacagauuccagaucaagggcguggagcugaagagcggcuacaaggacuggauccuguggaucagcuucgccaucagcugcuuccugcugugcguggugcugcugggcuucaucaugugggccugccagaagggcaacaucagaugcaacaucugcaucuga

SEQ ID NO: 168635 - RNA, 1701 nt, Artificial Sequence
  derived and/or modified CDS sequence (opt4) from hemagglutinin__InfluenzaA__AFG99347
augaagaccaucaucgcccugagcuacaucuucugccugguguucgcccagaagcugcccggcaacgacaacagcaccgccacccugugccugggccaccacgccgugcccaacggcacccuggugaagaccaucaccaacgaccagaucgaggugaccaacgccaccgagcuggugcagagcagcagcaccggcagaaucugcgacagcccccacagaauccuggacggcaagaacugcacccugaucgacgcccugcugggcgacccccacugcgacggcuuccagaacaaggagugggaccuguucguggagagaagcaaggccuacagcaacugcuaccccuacgacgugcccgacuacgccagccugagaagccugguggccagcagcggcacccuggaguucaucaacgaggacuucaacuggaccggcguggcccagagcggcggcagcuacgccugcaagagaggcagcgugaacagcuucuucagcagacugaacuggcugcacaagcccgaguacaaguaccccgcccugaacgugaccaugcccaacaacggcaaguucgacaagcuguacaucuggggcgugcaccaccccagcaccgacagagagcagaccaaccuguacgugagagccagcggcagagugaccgugagcaccaagagaagccagcagaccgugauccccaacaucggcagcagacccugggugagaggccugagcagcagaaucagcaucuacuggaccaucgugaagcccggcgacauccugcugaucaacagcaccggcaaccugaucgcccccagaggcuacuucaagaucagaaccggcaagagcagcaucaugagaagcgacgcccccaucggcaccugcagcagcgagugcaucacccccaacggcagcauccccaacgacaagcccuuccagaacgugaacagaaucaccuacggcgccugccccagauacgugaagcagaacacccugaagcuggccaccggcaugagaaacgugcccgagaagcagaccagaggcaucuucggcgccaucgccggcuucaucgagaacggcugggagggcaugguggacggcugguacggcuucagacaccagaacagcgagggcaccggccaggccgccgaccugaagagcacccaggccgccaucgaccagaucaacggcaagcugaacagacugaucgacaagaccaacgagaaguuccaccagaucgagaaggaguucagcgagguggagggcagaauccaggaccuggagaaguacguggaggacaccaagaucgaccuguggagcuacaacgccgagcugcugguggcccuggagaaccagcacaccaucgaccugaccgacagcgagaugaacaagcuguucgagaagaccagaaagcagcugagagagaacgccgaggacaugggcaacggcugcuucaagaucuaccacaagugcgacaacgccugcaucggcagcaucagaaacggcaccuacgaccacgacguguacagagacgaggcccugaacaacagauuccagaucaagggcguggagcugaagagcggcuacaaggacuggauccuguggaucagcuucgccaucagcugcuuccugcugugcguggugcugcugggcuucaucaugugggccugccagaagggcaacaucagaugcaacaucugcaucuga

SEQ ID NO: 168636 - RNA, 1701 nt, Artificial Sequence
  derived and/or modified CDS sequence (opt4) from hemagglutinin__InfluenzaA__AFG99358
augaagaccaucaucgcccugagccacauccugugccugguguucgcccagaagcugcccggcaacgacaacagcaccgccacccugugccugggccaccacgccgugcccaacggcacccuggugaagaccaucaccaacgaccagaucgaggugaccaacgccaccgagcuggugcagagcagcagcaccggcagaaucugcgacagcccccacagaauccuggacggcaagaacugcacccugaucgacgcccugcugggcgacccccacugcgacggcuuccagaacaaggagugggaccuguucguggagagaagcaaggccuacagcaacugcuaccccuacgacgugcccgacuacgccagccugagaagccugguggccagcagcggcacccuggaguucaucaacgaggacuucaacuggaccggcguggcccaggacggcggcagcuacgccugcaagagaggcagcgugaacagcuucuucagcagacugaacuggcugcacaagcuggaguacaaguaccccgcccugaacgugaccaugcccaacaacggcaaguucgacaagcuguacaucuggggcgugcaccaccccagcaccgacagcgaccagaccagccuguacgugagagccagcggcagagugaccgugagcaccaagagaagccagcagaccgugacccccaacaucggcagcagacccugggugagaggccugagcagcagaaucagcaucuacuggaccaucgugaagcccggcgacauccugcugaucaacagcaucggcaaccugaucgcccccagaggcuacuucaagaucagaaacggcaagagcagcaucaugagaagcgacgugcccaucggcaacugcagcagcgagugcaucacccccaacggcagcauccccaacgacaagcccuuccagaacgugaacagaaucaccuacggcgccugccccagauacgugaagcagaacacccugaagcuggccaccggcaugagaaacgugcccgagaagcagaccagaggcaucuucggcgccaucgccggcuucaucgagaacggcugggagggcaugguggacggcugguacggcuucagacaccagaacagcgagggcaccggccaggccgccgaccugaagagcacccaggccgccaucgaccagaucaacggcaagcugaacagacugaucgagaagaccaacgagaaguuccaccagaucgagaaggaguucagcgagguggagggcagaauccaggaccuggagaaguacguggaggacaccaagaucgaccuguggagcuacaacgccgagcugcugguggcccuggagaaccagcacaccaucgaccugaccgacagcgagaugaacaagcuguucgagaagaccagaaagcagcugagagagaacgccgaggacaugggcaacggcugcuucaagaucuaccacaagugcgacaacgccugcaucggcagcaucagaaacggcaccuacgaccacgacguguacagagacgaggcccugaacaacagauuccagaucaagggcguggagcugaagagcggcuacaaggacuggauccuguggaucagcuucgccaucagcugcuuccugcugugcguggugcugcugggcuucaucaugugggccugccagaagggcaacaucagaugcaacaucugcaucuga

SEQ ID NO: 168637 - RNA, 1701 nt, Artificial Sequence
  derived and/or modified CDS sequence (opt4) from hemagglutinin__InfluenzaA__AFG99369
augaagaccaucaucgcccugagcuacaucuucugccugguguucgcccagaagcugcccggcaacgacaacagcaccgccacccugugccugggccaccacgccgugcccaacggcacccuggugaagaccaucaccaacgaccagaucgaggugaccaacgccaccgagcuggugcagagcagcagcaccggcagaaucugcgacagcccccacagaauccuggacggcaagaacugcacccugaucgacgcccugcugggcgacccccacugcgacggcuuccagaacaaggagugggaccuguucguggagagaagcaaggccuacagcaacugcuaccccuacgacgugcccgacuacgccagccugagaagccugguggccagcagcggcacccuggaguucaucaacgaggacuucaacugggccggcguggcccagagcggcggcagcuacgccugcaagagaggcagcgugaacagcuucuucagcagacugaacuggcugcacgagagcgaguacaaguaccccgcccugaacgugaccaugcccaacaacggcaaguucgacaagcuguacaucuggggcgugcaccaccccagcaccgacagagagcagaccaaccuguacgugagagccagcggcagagugaccgugagcaccaagagaagccagcagaccgugauccccaacaucggcagcagacccugggugagaggccugagcagcagaaucagcaucuacuggaccaucgugaagcccggcgacauccugcugaucaacagcaccggcaaccugaucgcccccagaggcuacuucaagaucagaaccggcaagagcagcaucaugagaagcgacgcccccaucggcaccugcagcagcgagugcaucacccccaacggcagcauccccaacgacaagcccuuccagaacgugaacagaaucaccuacggcgccugccccagauacgugaagcagaacacccugaagcuggccaccggcaugagaaacgugcccgagaagcagaccagaggcaucuucggcgccaucgccggcuucaucgagaacggcugggagggcaugguggacggcugguacggcuucagacaccagaacagcgagggcaccggccaggccgccgaccugaagagcacccaggccgccaucgaccagaucaacggcaagcugaacagacugaucgagaagaccaacgagaaguuccaccagaucgagaaggaguucagcgagguggagggcagaauccaggaccuggagaaguacguggaggacaccaagaucgaccuguggagcuacaacgccgagcugcugguggcccuggagaaccagcacaccaucgaccugaccgacagcgagaugaacaagcuguucgagaagaccagaaagcagcugagagagaacgccgaggacaugggcaacggcugcuucaagaucuaccacaagugcgacaacgccugcaucggcagcaucagaaacggcaccuacgaccacgacguguacagagacgaggcccugaacaacagauuccagaucaagggcguggagcugaagagcggcuacaaggacuggauccuguggaucagcuucgccaccagcugcuuccugcugugcguggugcugcugggcuucaucaugugggccugccagaagggcaacaucagaugcaacaucugcaucuga

SEQ ID NO: 168638 - RNA, 1701 nt, Artificial Sequence
  derived and/or modified CDS sequence (opt4) from hemagglutinin__InfluenzaA__AFG99380
augaagaccaucaucgcccugagcuacaucuucugccugguguucgcccagaagcugcccggcaacgacaacagcaccgccacccugugccugggccaccacgccgugcccaacggcacccuggugaagaccaucaccaacgaccagaucgaggugaccaacgccaccgagcuggugcagagcagcagcaccggcagaaucugcgacagcccccacagaauccuggacggcaagaacugcacccugaucgacgcccugcugggcgacccccacugcgacggcuuccagaacaaggagugggaccuguucguggagagaagcaaggccuacagcaacugcuaccccuacgacgugcccgacuacgccagccugagaagccugguggccagcagcggcacccuggaguucaucaacgaggacuucaacuggaccggcguggcccagagcggcggcagcuacgccugcaagagaggcagcgugaacagcuucuucagcagacugaacuggcugcacgagagcgaguacaaguaccccgcccugaacgugaccaugcccaacaacggcaaguucgacaagcuguacaucuggggcgugcaccaccccagcaccgacagagagcagaccaaccuguacgugagagccagcggcagagugaccgugagcaccaagagaagccagcagaccgugauccccaacaucggcagcagacccugggugagaggccugagcagcagaaucagcaucuacuggaccaucgugaagcccggcgacauccugcugaucaacagcaccggcaaccugaucgcccccagaggcuacuucaagaucagaaccggcaagagcagcaucaugagaagcgacgcccccaucggcaccugcagcagcgagugcaucacccccaacggcagcauccccaacgacaagcccuuccagaacgugaacagaaucaccuacggcgccugccccagauacgugaagcagaacacccugaagcuggccaccggcaugagaaacgugcccgagaagcagaccagaggcaucuucggcgccaucgccggcuucaucgagaacggcugggagggcaugguggacggcugguacggcuucagacaccagaacagcgagggcaccggccaggccgccgaccugaagagcacccaggccgccaucgaccagaucaacggcaagcugaacagacugaucgagaagaccaacgagaaguuccaccagaucgagaaggaguucagcgagguggagggcagaauccaggaccuggagaaguacguggaggacaccaagaucgaccuguggagcuacaacgccgagcugcugguggcccuggagaaccagcacaccaucgaccugaccgacagcgagaugaacaagcuguucgagaagaccagaaagcagcugagagagaacgccgaggacaugggcaacggcugcuucaagaucuaccacaagugcgacaacgccugcaucggcagcaucagaaacggcaccuacgaccacgacguguacagagacgaggcccugaacaacagauuccagaucaagggcguggagcugaagagcggcuacaaggacuggauccuguggaucagcuucgccaucagcugcuuccugcugugcguggugcugcugggcuucaucaugugggccugccagaagggcaacaucagaugcaacaucugcaucuga

SEQ ID NO: 168639 - RNA, 1701 nt, Artificial Sequence; identical to SEQ ID NO: 168638
  derived and/or modified CDS sequence (opt4) from hemagglutinin__InfluenzaA__AFG99391

SEQ ID NO: 168640 - RNA, 1701 nt, Artificial Sequence
  derived and/or modified CDS sequence (opt4) from hemagglutinin__InfluenzaA__AFG99402
augaagaccaucaucgcccugagcuacaucuucugccugguguucgcccagaagcugcccggcaacgacaacagcaccgccacccugugccugggccaccacgccgugcccaacggcacccuggugaagaccaucaccaacgaccagaucgaggugaccaacgccaccgagcuggugcagagcagcagcaccggcagaaucugcgacagcccccacagaauccuggacggcaagaacugcacccugaucgacgcccugcugggcgacccccacugcgacggcuuccagaacgagaagugggaccuguucguggagagaagcaaggccuacagcaacugcuaccccuacgacgugcccgacuacgccagccugagaagccugguggccagcagcggcacccuggaguucaucaacgaggacuucaacuggaccggcgugacccagagcggcggcagcuacgccugcaagagaggcagcgugaacagcuucuucagcagacugaacuggcugcacaagagcgaguacaaguaccccgcccugaacgugaccaugcccaacaacggcaaguucgacaagcuguacaucuggggcgugcaccaccccgugaccgacagagagcagaccaaccuguacgugagagccagcggcagagugaccgugagcaccaagagaagccagcagaccgugauccccaacaucggcagcagacccugggugagaggccugagcagcagaaucagcaucuacuggaccaucgugaagcccggcgacauccugcugaucaacagcaccggcaaccugaucgcccccagaggcuacuucaagaucagaaccggcaagagcagcaucaugagaagcgacgcccccaucggcaccugcagcagcgagugcaucacccccaacggcagcauccccaacgacaagcccuuccagaacgugaacaagaucaccuacggcgccugccccagauacgugaagcagaacacccugaagcuggccaccggcaugagaaacgugcccgagaagcagaccagaggcaucuucggcgccaucgccggcuucaucgagaacggcugggagggcaugguggacggcugguacggcuucagacaccagaacagcgagggcaccggccaggccgccgaccugaagagcacccaggccgccaucgaccagaucaacggcaagcugaacagacugaucgagaagaccaacgagaaguuccaccagaucgagaaggaguucagcgagguggagggcagaauccaggaccuggagaaguacguggaggacaccaagaucgaccuguggagcuacaacgccgagcugcugguggcccuggagaaccagcacaccaucgaccugaccgacagcgagaugaacaagcuguucgagaagaccagaaagcagcugagagagaacgccgaggacaugggcaacggcugcuucaagaucuaccacaagugcgacaacgccugcaucggcagcaucagaaacggcaccuacgaccacgacguguacagagacgaggcccugaacaacagauuccagaucaagggcguggagcugaagagcggcuacaaggacuggauccuguggaucagcuucgccaucagcugcuuccugcugugcguggugcugcugggcuucaucaugugggccugccagaagggcaacaucagaugcaacaucugcaucuga

SEQ ID NO: 168641 - RNA, 1701 nt, Artificial Sequence
  derived and/or modified CDS sequence (opt4) from hemagglutinin__InfluenzaA__AFG99413
augaagaccaucaucgcccugagcuacaucuucugccugguguucgcccagaagcugcccggcaacgacaacagcaccgccacccugugccugggccaccacgccgugcccaacggcacccuggugaagaccaucaccaacgaccagaucgaggugaccaacgccaccgagcuggugcagagcagcagcaccggcagaaucugcgacagcccccacagaauccuggacggcaagaacugcacccugaucgacgcccugcugggcgacccccacugcgacggcuuccagaacaaggagugggaccuguucguggagagaagcaaggccuacagcaacugcuaccccuacgacgugcccgacuacgccagccugagaagccugguggccagcagcggcacccuggaguucaucaacgaggacuucaacuggaccggcguggcccagagcggcggcagcuacgccugcaagagaggcagcgugaacagcuucuucagcagacugaacuggcugcacgagagcgaguacaaguaccccgcccugaacgugaccaugcccaacaacggcaaguucgacaagcuguacaucuggggcgugcaccaccccagcaccgacagagagcagaccaaccuguacgugagagccagcggcagagugaccgugagcaccaagagaagccagcagaccgugauccccaacaucggcagcagacccugggugagaggccugagcagcagaaucagcaucuacuggaccaucgugaagcccggcgacauccugcugaucaacagcaccggcaaccugaucgcccccagaggcuacuucaagaucagaaccggcaagagcagcaucaugagaagcgacgcccccaucggcaccugcagcagcgagugcaucacccccaacggcagcauccccaacgacaagcccuuccagaacgugaacagaaucaccuacggcgccugccccagauacgugaagcagaacacccugaagcuggccaccggcaugagaaacgugcccgagaagcagaccagaggcaucuucggcgccaucgccggcuucaucgagaacggcugggagggcaugguggacggcugguacggcuucagacaccagaacagcgagggcaccggccaggccgccgaccugaagagcacccaggccgccaucgaccagaucaacggcaagcugaacagacugaucgagaagaccaacgagaaguuccaccagaucgagaaggaguucagcgagguggagggcagaauccaggaccuggagaaguacguggaggacaccaagaucgaccuguggagcuacaacgccgagcugcugguggcccuggagaaccagcacaccaucgaccugaccgacagcgagaugaacaagcuguucgagaagaccagaagacagcugagagagaacgccgaggacaugggcaacggcugcuucaagaucuaccacaagugcgacaacgccugcaucggcagcaucagaaacggcaccuacgaccacgacguguacagagacgaggcccugaacaacagauuccagaucaagggcguggagcugaagagcggcuacaaggacuggauccuguggaucagcuucgccaucagcugcuuccugcugugcguggugcugcugggcuucaucaugugggccugccagaagggcaacaucagaugcaacaucugcaucuga

SEQ ID NO: 168642 - RNA, 1701 nt, Artificial Sequence
  derived and/or modified CDS sequence (opt4) from hemagglutinin__InfluenzaA__AFG99424
augaagaccaucaucgcccugagcuacaucuucugccugguguucgcccagaagcugcccggcaacgacaacagcaccgccacccugugccugggccaccacgccgugcccaacggcacccuggugaagaccaucaccaacgaccagaucgaggugaccaacgccaccgagcuggugcagagcagcagcaccggcagaaucugcgacagcccccacagaauccuggacggcaagaacugcacccugaucgacgcccugcugggcgacccccacugcgacggcuuccagaacaaggagugggaccuguucguggagagaagcaaggccuacagcaacugcuaccccuacgacgugcccgacuacgccagccugagaagccugguggccagcagcggcacccuggaguucaucaacgaggacuucaacuggaccggcguggcccagagcggcggcagcuacgccugcaagagaggcagcgugaacagcuucuucagcagacugaacuggcugcacaagagcgaguacaaguaccccgcccugaacgugaccaugcccaacaacggcaaguucgacaagcuguacaucuggggcgugcaccaccccagcaccgacagagagcagaccaaccuguacgugagagccagcggcagagugaccgugagcaccaagagaagccagcagaccgugauccccaacaucggcagcagacccugggugagaggccugagcagcagaaucagcaucuacuggaccaucgugaagcccggcgacauccugcugaucaacagcaccggcaaccugaucgcccccagaggcuacuucaagaucagaaccggcaagagcagcaucaugagaagcgacgcccccaucggcaccugcagcagcgagugcaucacccccaacggcagcauccccaacgacaagcccuuccagaacgugaacagaaucaccuacggcgccugccccagauacgugaagcagaacacccugaagcuggccaccggcaugagaaacgugcccgagaagcagaccagaggcaucuucggcgccaucgccggcuucaucgagaacggcugggagggcaugguggacggcugguacggcuucagacaccagaacagcgagggcaccggccaggccgccgaccugaagagcacccaggccgccaucgaccagaucaacggcaagcugaacagacugaucgagaagaccaacgagaaguuccaccagaucgagaaggaguucagcgagguggagggcagaauccaggaccuggagaaguacguggaggacaccaagaucgaccuguggagcuacaacgccgagcugcugguggcccuggagaaccagcacaccaucgaccugaccgacagcgagaugaacaagcuguucgagaagaccagaagacagcugagagagaacgccgaggacaugggcaacggcugcuucaagaucuaccacaagugcgacaacgccugcaucggcagcaucagaaacggcaccuacgaccacgacguguacagagacgaggcccugaacaacagauuccagaucaagggcguggagcugaagagcggcuacaaggacuggauccuguggaucagcuucgccaucagcugcuuccugcugugcguggugcugcugggcuucaucaugugggccugccagaagggcaacaucagaugcaacaucugcaucuga

SEQ ID NO: 168643 - RNA, 1701 nt, Artificial Sequence
  derived and/or modified CDS sequence (opt4) from hemagglutinin__InfluenzaA__AFG99435
augaagaccaucaucgcccugagcuacaucuucugccugguguucgcccagaagcugcccggcaacgacaacagcaccgccacccugugccugggccaccacgccgugcccaacggcacccuggugaagaccaucaccaacgaccagaucgaggugaccaacgccaccgagcuggugcagaacagcagcaccggcagaaucugcgacagcccccacagaauccuggacggcaagaacugcacccugaucgacgcccugcugggcgacccccacugcgacggccugcagaacaaggagugggaccuguucguggagagaagcaaggccuacagcaacugcuaccccuacgacgugcccgacuacgccagccugagaagccugguggccagcagcggcacccuggaguucaccaaggaggacuucaacuggaccggcguggcccagagcggcggcagcuacgccugcaagagaggcagcgugaacagcuucuucagcagacugaacuggcugcacgagagcgaguacaaguaccccgcccugaacgugaccaugcccaacaacggcaaguucgacaagcuguacaucuggggcgugcaccaccccagcaccgacagagagcagaccaaccuguacgugagagccagcggcagagugaccgugagcaccaagagaagccagcagaccgugauccccaacaucggcagcagacccugggugagaggccugagcagcagaaucagcaucuacuggaccaucgugaagcccggcgacauccugcugaucaacagcaccggcaaccugaucgcccccagaggcuacuucaagaucagaaccggcaagagcagcaucaugagaagcgacgcccccaucggcaccugcagcagcgagugcaucacccccaacggcagcauccccaacgacaagcccuuccagaacgugaacagaaucaccuacggcgccugccccagauacgugaagcagaacacccugaagcuggccaccggcaugagaaacgugcccgagaagcagaccagaggcaucuucggcgccaucgccggcuucaucgagaacggcugggagggcaugguggacggcugguacggcuucagacaccagaacagcgagggcaccggccaggccgccgaccugaagagcacccaggccgccaucgaccagaucaacggcaagcugaacagacugaucgagaagaccaacgagaaguuccaccagaucgagaaggaguucagcgagguggagggcagaauccaggaccuggagaaguacguggaggacaccaagaucgaccuguggagcuacaacgccgagcugcugguggcccuggagaaccagcacaccaucgaccugaccgacagcgagaugaacaagcuguucgagaagaccagaaagcagcugagagagaacgccgaggacaugggcaacggcugcuucaagaucuaccacaagugcgacaacgccugcaucggcagcaucagaaacggcaccuacgaccacgacguguacagagacgaggcccugaacaacagauuccagaucaagggcguggagcugaagagcggcuacaaggacuggauccuguggaucagcuucgccaucagcugcuuccugcugugcguggugcugcugggcuucaucaugugggccugccagaagggcaacaucagaugcaacaucugcaucuga

SEQ ID NO: 168644 - RNA, 1701 nt, Artificial Sequence; identical to SEQ ID NO: 168643
  derived and/or modified CDS sequence (opt4) from hemagglutinin__InfluenzaA__AFG99446

SEQ ID NO: 168645 - RNA, 1701 nt, Artificial Sequence
  derived and/or modified CDS sequence (opt4) from hemagglutinin__InfluenzaA__AFG99457
augaagaccaucaucgcccugagcuacauccugugccugguguucgcccagaagcugcccggcaacgacaacagcaccgccacccugugccugggccaccacgccgugcccaacggcacccuggugaagaccaucaccaacgaccagaucgaggugaccaacgccaccgagcuggugcagagcagcagcaccggcagaaucugcgacagcccccacagaauccuggacggcgagaacugcacccugaucgacgcccugcugggcgacccccacugcgacggcuuccagaacaaggagugggaccuguucguggagagaagcaaggccuacagcaacugcuaccccuacgacgugcccgacuacgccagccugagaagccugguggccagcagcggcacccuggaguucaucaacgaggacuucaacuggaccggcguggcccagagcggcggcagcuacgccugcaagagaggcagcgugaacagcuucuucagcagacugaacuggcugcacaagagcgaguacaaguaccccgcccugaacgugaccaugcccaacaacggcaaguucgacaagcuguacaucuggggcgugcaccaccccagcaccgacagagaccagaccagccuguacgugagagccagcggcagagugaccgugagcaccaagagaagccagcagaccgugauccccaacaucggcagcagacccugggugagaggccagagcagcagaaucagcaucuacuggaccaucgugaagcccggcgacauccugcugaucaacagcaccggcaaccugaucgcccccagaggcuacuucaagaucagaaacggcaagagcagcaucaugagaagcgacgcccccaucggcaccugcagcagcgagugcaucacccccaacggcagcauccccaacgacaagcccuuccagaacgugaacagaaucaccuacggcgccugccccagauacgugaagcagaacacccugaagcuggccaccggcaugagaaacgugcccgagaagcagaccagaggcaucuucggcgccaucgccggcuucaucgagaacggcugggagggcaugguggacggcugguacggcuucagacaccagaacagcgagggcaccggccaggccgccgaccugaagagcacccaggccgccaucgaccagaucaacggcaagcugaacagacugaucgagaagaccaacgagaaguuccaccagaucgagaaggaguucagcgagguggagggcagaauccaggaccuggagaaguacguggaggacaccaagaucgaccuguggagcuacaacgccgagcugcugguggcccuggagaaccagcacaccaucgaccugaccgacagcgagaugaacaagcuguucgagaagaccagaaagcagcugagagagaacgccgaggacaugggcaacggcugcuucaagaucuaccacaagugcgacaacgccugcaucggcagcaucagaaacggcaccuacgaccacgacguguacagagacgaggcccugaacaacagauuccagaucaagggcguggagcugaagagcggcuacaaggacuggauccuguggaucagcuucgccaucagcugcuuccugcugugcguggugcugcugggcuucaucaugugggccugccagaagggcaacaucagaugcaacaucugcaucuga

SEQ ID NO: 168646 - RNA, 1701 nt, Artificial Sequence
  derived and/or modified CDS sequence (opt4) from hemagglutinin__InfluenzaA__AFG99468
augaagaccaucaucgcccugagcuacaucuucugccugguguucgcccagaagcugcccggcaacgacaacagcaccgccacccugugccugggccaccacgccgugcccaacggcacccuggugaagaccaucaccaacgaccagaucgaggugaccaacgccaccgagcuggugcagagcagcagcaccggcagaaucugcgacagcccccacagaauccuggacggcaagaacugcacccugaucgacgcccugcugggcgacccccacugcgacggcuuccagaacaaggagugggaccuguucguggagagaagcaaggccuacagcaacugcuaccccuacgacgugcccgacuacgccagccugagaagccugguggccagcagcggcacccuggaguucaucaacgaggacuucaacuggaccggcguggcccagagcggcggcagcuacgccugcaagagaggcagcgugaacagcuucuucagcagacugaacuggcugcacgagagcgaguacaaguaccccgcccugaacgugaccaugcccaacaacggcaaguucgacaagcuguacaucuggggcgugcaccaccccagcaccgacagagagcagaccaaccuguacgugagagccagcggcagagugaccgugagcaccaagagaagccagcagaccgugauccccaacaucggcagcagacccugggugagaggccugagcagcagaaucagcaucuacuggaccaucgugaagcccggcgacauccugcugaucaacagcaccggcaaccugaucgcccccagaggcuacuucaagaucagaaccggcaagagcagcaucaugagaagcgacgcccccaucggcaccugcagcagcgagugcaucacccccaacggcagcauccccaacgacaagcccuuccagaacgugaacagaaucaccuacggcgccugccccagauacgugaagcagaacacccugaagcuggccaccggcaugagaaacgugcccgagaagcagaccagaggcaucuucggcgccaucgccggcuucaucgagaacggcugggagggcaugguggacggcugguacggcuucagacaccagaacagcgagggcaccggccaggccgccgaccugaagagcacccaggccgccaucgaccagaucaacggcaagcugaacagacugaucgagaagaccaacgagaaguuccaccagaucgagaaggaguucagcgagguggagggcagaauccaggaccuggagaaguacguggaggacaccaagaucgaccuguggagcuacaacgccgagcugcugguggcccuggagaaccagcacaccaucgaccugaccgacagcgagauggacaagcuguucgagaagaccagaaagcagcugagagagaacgccgaggacaugggcaacggcugcuucaagaucuaccacaagugcgacaacgccugcaucggcagcaucagaaacggcaccuacgaccacgacguguacagagacgaggcccugaacaacagauuccagaucaagggcguggagcugaagagcggcuacaaggacuggauccuguggaucagcuucgccaucagcugcuuccugcugugcguggugcugcugggcuucaucaugugggccugccagaagggcaacaucagaugcaacaucugcaucuga

SEQ ID NO: 168647 - RNA, 1701 nt, Artificial Sequence
  derived and/or modified CDS sequence (opt4) from hemagglutinin__InfluenzaA__AFG99490
augaagaccaucaucgcccugagcuacauccugugccugguguucgcccagaagcugcccggcaacgacaacagcaccgccacccugugccugggccaccacgccgugcccaacggcacccuggugaagaccaucaccaacgaccagaucgaggugaccaacgccaccgagcuggugcagagcagcagcaccggcagaaucugcgacagcccccacagaauccuggacggcaagaacugcacccugaucgacgcccugcugggcgacccccacugcgacggcuuccagaacaaggagugggaccuguucaucgagagaagcaaggccuacagcaacugcuaccccuacgacgugcccgacuacgccagccugagaagccugguggccagcagcggcacccuggaguucaucaacgaggacuucaacuggaccggcguggcccagagcggcgagagcuacgccugcaagagaggcagcgugaagagcuucuucagcagacugaacuggcugcacgagagcgaguacaaguaccccgcccugaacgugaccaugcccaacaacggcaaguucgacaagcuguacaucuggggcgugcaccaccccagcaccgacagagagcagaccagccuguacgugagagccagcggcagagugaccgugagcaccaagagaagccagcagaccgugauccccaacaucggcagcagacccugggugagaggccugagcagcagaaucagcaucuacuggaccaucgugaagcccggcgacauccugcugaucaacagcaccggcaaccugaucgcccccagaggcuacuucaagaucagaaccggcaagagcagcaucaugagaagcgacgcccccaucggcaccugcagcagcgagugcaucacccccaacggcagcauccccaacgacaagcccuuccagaacgugaacagaaucaccuacggcgccugccccagauacgugaagcagaacacccugaagcuggccaccggcaugagaaacgugcccgagaagcagaccagaggcaucuucggcgccaucgccggcuucaucgagaacggcugggagggcaugguggacggcugguacggcuucagacaccagaacagcgagggcaccggccaggccgccgaccugaagagcacccaggccgccaucgaccagaucaacggcaagcugaacagacugaucgagaagaccaacgagaaguuccaccagaucgagaaggaguucagcgagguggagggcagaauccaggaccuggagaaguacguggaggacaccaagaucgaccuguggagcuacaacgccgagcugcugguggcccuggagaaccagcacaccaucgaccugaccgacagcgagaugaacaagcuguucgagaagaccagaaagcagcugagagagaacgccgaggacaugggcaacggcugcuucaagaucuaccacaagugcgacaacgccugcaucggcagcaucagaaacggcaccuacgaccacgacguguacagagacgaggcccugaacaacagauuccagaucaagggcguggagcugaagagcggcuacaaggacuggauccuguggaucagcuucgccaucagcugcuuccugcugugcguggugcugcugggcuucaucaugugggccugccagaagggcaacaucagaugcaacaucugcaucuga

SEQ ID NO: 168648 - RNA, 1701 nt, Artificial Sequence
  derived and/or modified CDS sequence (opt4) from hemagglutinin__InfluenzaA__AFG99501
augaagaccaucaucgcccugagcuacaucuucugccuggugguggcccagaagcugcccggcaacgacaacagcaccgccacccugugccugggccaccacgccgugcccaacggcacccuggugaagaccaucaccaacgaccagaucgaggugaccaacgccaccgagcuggugcagagcagcagcaccggcagaaucugcgacagcccccacagaauccuggacggcaagaacugcacccugaucgacgcccugcugggcgacccccacugcgacggcuuccagaacaaggagugggaccuguucguggagagaagcaaggccuacagcaacugcuaccccuacgacgugcccgacuacgccagccugagaagccugguggccagcagcggcacccuggaguucaucaacgaggacuucaacuggaccggcguggcccagagcggcggcagcuacaccugcaagagaggcagcgugaacagcuucuucagcagacugaacuggcugcacgagagcgaguacaaguaccccgcccugaacgugaccaugcccaacaacggcaaguucgacaagcuguacaucuggggcgugcaccaccccagcaccgacagagagcagaccaaccuguacgugagagccagcggcagagugaccgugagcaccaagagaagccagcagaccgugauccccaacaucggcagcagacccugggugagaggccugagcagcagaaucagcaucuacuggaccaucgugaagcccggcgacauccugcugaucaacagcaccggcaaccugaucgcccccagaggcuacuucaagaucagaaccggcaagagcagcaucaugagaagcgacgcccccaucggcaccugcagcagcgagugcaucacccccaacggcagcaucagcaacgacaagcccuuccagaacgugaacagaaucaccuacggcgccugccccagauacgugaagcagaacacccugaagcuggccaccggcaugagaaacgugcccgagaagcagaccagaggcaucuucggcgccaucgccggcuucaucgagaacggcugggagggcaugguggacggcugguacggcuucagacaccagaacagcgagggcaccggccaggccgccgaccugaagagcacccaggccgccaucgaccagaucaacggcaagcugaacagacugaucgagaagaccaacgagaaguuccaccagaucgagaaggaguucagcgagguggagggcagaauccaggaccuggagaaguacguggaggacaccaagaucgaccuguggagcuacaacgccgagcugcugguggcccuggagaaccagcacaccaucgaccugaccgacagcgagaugaacaagcuguucgagaagaccagaaagcagcugagagagaacgccgaggacaugggcaacggcugcuucaagaucuaccacaagugcgacaacgccugcaucggcagcaucagaaacggcaccuacgaccacgacguguacagagacgaggcccugaacaacagauuccagaucaagggcguggagcugaagagcggcuacaaggacuggauccuguggaucagcuucgccaucagcugcuuccugcugugcguggugcugcugggcuucaucaugugggccugccagaagggcaacaucagaugcaacaucugcaucuga

SEQ ID NO: 168649 - RNA, 1701 nt, Artificial Sequence
  derived and/or modified CDS sequence (opt4) from hemagglutinin__InfluenzaA__AFG99512
augaagaccaucaucgcccugagcuacauccugugccugguguucgcccagaagcugcccggcaacgacaacagcaccgccacccugugccugggccaccacgccgugcccaacggcacccuggugaagaccaucaccaacgaccagaucgaggugaccaacgccaccgagcuggugcagagcagcagcaccggcagaaucugcgacagcccccacagaauccuggacggcaagaacugcacccugaucgacgcccugcugggcgacccccacugcgacggcuuccagaacaaggagugggaccuguucguggagagaagcaaggccuacagcaacugcuaccccuacgacgugcccgacuacgccagccugagaagccugguggccagcagcggcacccuggaguucaucaacgaggacuucaacuggaccggcguggcccagagcggcgacagcuacgccugcaagagaggcagcgugaagagcuucuucagcagacugaacuggcugcacgagagcgaguacaaguaccccgcccugaacgugaccaugcccaacaacgacaaguucgacaagcuguacaucuggggcgugcaccaccccagcaccgacagagagcagaccagccuguacaucagagccagcggcagagugaccgugagcaccaagagaagccagcagaccgugauccccaacaucggcagcagacccugggugagaggccugagcagcagaaucagcaucuacuggaccaucgugaagcccggcgacauccugcugaucaacagcaccggcaaccugaucgcccccagaggcuacuucaagaucagaaccggcaagagcagcaucaugagaagcgacgcccccaucggcaccugcagcagcgagugcaucacccccaacggcagcauccccaacgacaagcccuuccagaacgugaacagaaucaccuacggcgccugccccagauacgugaagcagaacacccugaagcuggccaccggcaugagaaacgugcccgagaagcagaccagaggcaucuucggcgccaucgccggcuucaucgagaacggcugggagggcaugguggacggcugguacggcuucagacaccagaacagcgagggcaccggccaggccgccgaccugaagagcacccaggccgccaucgaccagaucaacggcaagcugaacagacugaucgagaagaccaacgagaaguuccaccagaucgagaaggaguucagcgagguggagggcagaauccaggaccuggagaaguacguggaggacaccaagaucgaccuguggagcuacaacgccgagcugcugguggcccuggagaaccagcacaccaucgaccugaccgacagcgagaugaacaagcuguucgagaagaccagaaagcagcugagagagaacgccgaggacaugggcaacggcugcuucaagaucuaccacaagugcgacaacgccugcaucggcagcaucagaaacggcaccuacgaccacgacguguacagagacgaggcccugaacaacagauuccagaucaagggcguggagcugaagagcggcuacaaggacuggauccuguggaucagcuucgccaucagcugcuuccugcugugcguggugcugcugggcuucaucaugugggccugccagaagggcaacaucagaugcaacaucugcaucuga

SEQ ID NO: 168650 - RNA, 1701 nt, Artificial Sequence
  derived and/or modified CDS sequence (opt4) from hemagglutinin__InfluenzaA__AFG99523
augaagaccaucaucgcccugagcuacaucuucugccugguguucgcccagaagcugcccggcaacgacaacagcaccgccacccugugccugggccaccacgccgugcccaacggcacccuggugaagaccaucaccaacgaccagaucgaggugaccaacgccaccgagcuggugcagagcagcagcaccggcagaaucugcgacagcccccacagaauccuggacggcaagaacugcacccugaucgacgcccugcugggcgacccccacugcgacggcuuccagaacaaggagugggaccuguucguggagagaagcaaggccuacagcaacugcuaccccuacgacgugcccgacuacgccagccugagaagccugguggccagcagcggcacccuggaguucaucaacgaggacuucaacuggaccggcguggcccagagcggcggcagcuacgccugcaagagaggcagcgugaacagcuucuucagcagacugaacuggcugcacgagagccaguacaaguaccccgcccugaacgugaccaugcccaacaacggcaaguucgacaagcuguacaucuggggcgugcaccaccccagcaccgacagagagcagaccaaccuguacgugagagccagcggcagagugaccgugagcaccaagagaagccagcagaccgugauccccaacaucggcagcagacccugggugagaggccugagcagcagaaucagcaucuacuggaccaucgugaagcccggcgacauccugcugaucaacagcaccggcaaccugaucgcccccagaggcuacuucaagaucagaaccggcaagagcagcaucaugagaagcgacgcccccaucggcaccugcagcagcgagugcaucacccccaacggcagcauccccaacgacaagcccuuccagaacgugaacagaaucaccuacggcgccugccccagauacgugaagcagaacacccugaagcuggccaccggcaugagaaacgugcccgagaagcagaccagaggcaucuucggcgccaucgccggcuucaucgagaacggcugggagggcaugguggacggcugguacggcuucagacaccagaacagcgagggcaccggccaggccgccgaccugaagagcacccaggccgccaucgaccagaucaacggcaagcugaacagacugaucgagaagaccaacgagaaguuccaccagaucgagaaggaguucagcgagguggagggcagaauccaggaccuggagaaguacguggaggacaccaagaucgaccuguggagcuacaacgccgagcugcugguggcccuggagaaccagcacaccaucgaccugaccgacagcgagaugaacaagcuguucgagaagaccagaaagcagcugagagagaacgccgaggacaugggcaacggcugcuucaagaucuaccacaagugcgacaacgccugcaucggcagcaucagaaacggcaccuacgaccacgacguguacagagacgaggcccugaacaacagauuccagaucaagggcguggagcugaagagcggcuacaaggacuggauccuguggaucagcuucgccaucagcugcuuccugcugugcguggugcugcugggcuucaucaugugggccugccagaagggcaacaucagaugcaacaucugcaucuga

SEQ ID NO: 168651 - RNA, 1701 nt, Artificial Sequence; identical to SEQ ID NO: 168547
  derived and/or modified CDS sequence (opt4) from hemagglutinin__InfluenzaA__AFG99534

SEQ ID NO: 168652 - RNA, 1701 nt, Artificial Sequence; identical to SEQ ID NO: 168547
  derived and/or modified CDS sequence (opt4) from hemagglutinin__InfluenzaA__AFG99545

SEQ ID NO: 168653 - RNA, 1701 nt, Artificial Sequence
  derived and/or modified CDS sequence (opt4) from hemagglutinin__InfluenzaA__AFG99556
augaagaccaucaucgcccugagcuacauccugugccugguguucgcccagaagcugcccggcaacgacaacagcaccgccacccugugccugggccaccacgccgugcccaacggcacccuggugaagaccaucaccaacgaccagaucgaggugaccaacgccaccgagcuggugcagagcagcagcaccggcagaaucugcgacagcccccacagaauccuggacggcaagaacugcacccugaucgacgcccugcugggcgacccccacugcgacggcuuccagaacaaggagugggaccuguucguggagagaagcaaggccuacagcaacugcuaccccuacgacgugcccgacuacgccagccugagaagccugguggccagcagcggcacccuggaguucaccaacgaggacuucaacuggaccggcguggcccagagcggcgagagcuacgccugcaagagaggcagcgugaagagcuucuucagcagacugaacuggcugcacgagagcgacuacaaguaccccgcccugaacgugaccaugcccaacaacggcaaguucgacaagcuguacaucuggggcgugcaccaccccagcaccgacagagagcagaccagccuguacgugagagccagcggcagagugaccgugagcaccaagagaagccagcagaccgugauccccaacaucggcagcagacccugggugagaggccugagcagcagaaucagcaucuacuggaccaucgugaagcccggcgacauccugcugaucaacagcaccggcaaccugaucgcccccagaggcuacuucaagaucagaaccggcaagagcagcaucaugagaagcgacgcccccaucggcaccugcagcagcgagugcaucacccccaacggcagcauccccaacgacaagcccuuccagaacgugaacagaaucaccuacggcgccugccccagauacgugaagcagaacacccugaagcuggccaccggcaugagaaacgugcccgagaagcagaccagaggcaucuucggcgccaucgccggcuucaucgagaacggcugggagggcaugguggacggcugguacggcuucagacaccagaacagcgagggcaccggccaggccgccgacagaaagagcacccaggccgccaucgaccagaucaacggcaagcugaacagacugaucgagaagaccaacgagaaguuccaccagaucgagaaggaguucagcgagguggagggcagaauccaggaccuggagaaguacguggaggacaccaagaucgaccuguggagcuacaacgccgagcugcugguggcccuggagaaccagcacaccaucgaccugaccgacagcgagaugaacaagcuguucgagaagaccagaaagcagcugagagagaacgccgaggacaugggcaacggcugcuucaagaucuaccacaagugcgacaacgccugcaucggcagcaucagaaacggcaccuacgaccacgacguguacagagacgaggcccugaacaacagauuccagaucaagggcguggagcugaagagcggcuacaaggacuggauccuguggaucagcuucgccaucagcugcuuccugcugugcguggugcugcugggcuucaucaugugggccugccagaagggcaacaucagaugcaacaucugcaucuga

SEQ ID NO: 168654 - RNA, 1701 nt, Artificial Sequence; identical to SEQ ID NO: 168547
  derived and/or modified CDS sequence (opt4) from hemagglutinin__InfluenzaA__AFG99567

SEQ ID NO: 168655 - RNA, 1701 nt, Artificial Sequence; identical to SEQ ID NO: 168547
  derived and/or modified CDS sequence (opt4) from hemagglutinin__InfluenzaA__AFG99578

SEQ ID NO: 168656 - RNA, 1701 nt, Artificial Sequence; identical to SEQ ID NO: 168547
  derived and/or modified CDS sequence (opt4) from hemagglutinin__InfluenzaA__AFG99589

SEQ ID NO: 168657 - RNA, 1701 nt, Artificial Sequence
  derived and/or modified CDS sequence (opt4) from hemagglutinin__InfluenzaA__AFG99600
augaagaccaucaucgcccugagcuacauccugugccugguguucgcccagaagcugcccggcaacgacaacagcaccgccacccugugccugggccaccacgccgugcccaacggcacccuggugaagaccaucaccaacgaccagaucgaggugaccaacgccaccgagcuggugcagagcagcagcaccggcagaaucugcgacagcccccacagagugcuggacggcaagaacugcacccugaucgacgcccugcugggcgacccccacugcgacggcuuccagaacaaggagugggaccuguucguggagagaagcaaggccuacagcaacugcuaccccuacgacgugcccgacuacgccagccugagaagccugguggccagcagcggcacccuggaguucaccaacgaggacuucaacuggaccggcguggcccagagcggcgagagcuacgccugcaagagaggcagcgugaagagcuucuucagcagacugaacuggcugcacgagagcgacuacaaguaccccgcccugaacgugaccaugcccaacaacggcaaguucgacaagcuguacaucuggggcgugcaccaccccagcaccgacagagagcagaccagccuguacgugagagccagcggcagagugaccgugagcaccaagagaagccagcagaccgugauccccaacaucggcagcagacccugggugagaggccugagcagcagaaucagcaucuacuggaccaucgugaagcccggcgacauccugcugaucaacagcaccggcaaccugaucgcccccagaggcuacuucaagaucagaaucggcaagagcagcaucaugagaagcgacgcccccaucggcaccugcagcagcgagugcaucacccccaacggcagcauccccaacgacaagcccuuccagaacgugaacagaaucaccuacggcgccugccccagauacgugaagcagaacacccugaagcuggccaccggcaugagaaacgugcccgagaagcagaccagaggcaucuucggcgccaucgccggcuucaucgagaacggcugggagggcaugguggacggcugguacggcuucagacaccagaacagcgagggcaccggccaggccgccgaccugaagagcacccaggccgccaucgaccagaucaacggcaagcugaacagacugaucgagaagaccaacgagaaguuccaccagaucgagaaggaguucagcgagguggagggcagaauccaggaccuggagaaguacguggaggacaccaagaucgaccuguggagcuacaacgccgagcugcugguggcccuggagaaccagcacaccaucgaccugaccgacagcgagaugaacaagcuguucgagaagaccagaaagcagcugagagagaacgccgaggacaugggcaacggcugcuucaagaucuaccacaagugcgacaacgccugcaucggcagcaucagaaacggcaccuacgaccacgacguguacagagacgaggcccugaacaacagauuccagaucaagggcguggagcugaagagcggcuacaaggacuggauccuguggaucagcuucgccaucagcugcuuccugcugugcguggugcugcugggcuucaucaugugggccugccagaagggcaacaucagaugcaacaucugcaucuga

SEQ ID NO: 168658 - RNA, 1701 nt, Artificial Sequence; identical to SEQ ID NO: 168547
  derived and/or modified CDS sequence (opt4) from hemagglutinin__InfluenzaA__AFG99611

SEQ ID NO: 168659 - RNA, 1701 nt, Artificial Sequence; identical to SEQ ID NO: 168547
  derived and/or modified CDS sequence (opt4) from hemagglutinin__InfluenzaA__AFG99622

SEQ ID NO: 168660 - RNA, 1701 nt, Artificial Sequence; identical to SEQ ID NO: 168547
  derived and/or modified CDS sequence (opt4) from hemagglutinin__InfluenzaA__AFG99633

SEQ ID NO: 168661 - RNA, 1701 nt, Artificial Sequence
  derived and/or modified CDS sequence (opt4) from hemagglutinin__InfluenzaA__AFG99644
augaagaccaucaucgcccugagcuacauccugugccugguguucgcccagaagcugcccggcaacgacaacagcaccgccacccugugccugggccaccacgccgugcccaacggcacccuggugaagaccaucaccaacgaccagaucgaggugaccaacgccaccgagcuggugcagaacagcagcaccggcagaaucugcgacagcccccacagaauccuggacggcaagaacugcacccugaucgacgcccugcugggcgacccccacugcgacgacuuccagaacaaggagugggaccuguucguggagagaagcaaggccuacagcaacugcuaccccuacgacgugcccgacuacgccagccugagaagccugguggccgccagcggcacccuggaguucaucaacgaggacuucaacuggaccggcguggcccagagcggcgagagcuacgccugcaagagaggcagcgugaagagcuucuucagcagacugaacuggcugcacgagagcgaguacaaguaccccgcccugaacgugaccaugcccaacaacggcaaguucgacaagcuguacaucuggggcgugcaccaccccagcaccgacagagagcagaccagccuguacgugagagccagcggcagagugaccgugagcaccaagagaagccagcagaccgugauccccaacaucggcagcagacccugggugagaggccugagcagcagaaucagcaucuacuggaccaucgugaagcccggcgacauccugcugaucaacagcaccggcaaccugaucgcccccagaggcuacuucaagaucagaaccggcaagagcagcaucaugagaagcgacgcccccaucggcaccugcagcagcgagugcaucacccccaacggcagcauccccaacgacaagcccuuccagaacgugaacagaaucaccuacggcgccugccccagauacgugaagcagaacacccugaagcuggccaccggcaugagaaacgugcccgagaagcagaccagaggcaucuucggcgccaucgccggcuucaucgagaacggcugggagggcaugguggacggcugguacggcuucagacaccagaacagcgagggcaccggccaggccgccgaccugaagagcacccaggccgccaucgaccagaucaacggcaagcugaacagacugaucgagaagaccaacgagaaguuccaccagaucgagaaggaguucagcgagaucgagggcagaauccagaaccuggagaaguacguggaggacaccaagaucgaccuguggagcuacaacgccgagcugcugguggcccuggagaaccagcacaccaucgaccugaccgacagcgagaugaacaagcuguucgagaagaccagaaagcagcugagagagaacgccgaggacaugggcaacggcugcuucaagaucuaccacaagugcgacaacgccugcaucggcagcaucagaaacggcaccuacgaccacgacguguacagagacgaggcccugaacaacagauuccagaucaagggcguggagcugaagagcggcuacaaggacuggauccuguggaucagcuucgccaucagcugcuuccugcugugcguggugcugcugggcuucaucaugugggccugccagaagggcaacaucagaugcaacaucugcaucuga

SEQ ID NO: 168662 - RNA, 1701 nt, Artificial Sequence
  derived and/or modified CDS sequence (opt4) from hemagglutinin__InfluenzaA__AFG99655
augaagaccaucaucgcccugagcuacauccugugccugguguucgcccagaagcugcccggcaacgacaacagcaccgccacccugugccugggccaccacgccgugcccaacggcacccuggugaagaccaucaccaacgaccagaucgaggugaccaacgccaccgagcuggugcagaacagcagcaccggcagaaucugcgacagcccccacagaauccuggacggcaagaacugcacccugaucgacgcccugcugggcgacccccacugcgacgacuuccagaacaaggagugggaccuguucguggagagaagcaaggccuacagcaacugcuaccccuacgacgugcccgacuacgccagccugagaagccugguggccagcagcggcacccuggaguucaucaacgaggacuucaacuggaccggcguggcccagagcggcgagagcuacgccugcaagagaggcagcgugaagagcuucuucagcagacugaacuggcugcacgagagcgaguacaaguaccccgcccugaacgugaccaugcccaacaacggcaaguucgacaagcuguacaucuggggcgugcaccaccccagcaccgacagagagcagaccagccuguacgugagagccagcggcagagugaccgugagcaccaagagaagccagcagaccgugauccccaacaucggcagcagacccugggugagaggccugagcagcagaaucagcaucuacuggaccaucgugaagcccggcgacauccugcugaucaacagcaccggcaaccugaucgcccccagaggcuacuucaagaucagaaccggcaagagcagcaucaugagaagcgacgcccccaucggcaccugcagcagcgagugcaucacccccaacggcagcauccccaacgacaagcccuuccagaacgugaacagaaucaccuacggcgccugccccagauacgugaagcagaacacccugaagcuggccaccggcaugagaaacgugcccgagaagcagaccagaggcaucuucggcgccaucgccggcuucaucgagaacggcugggagggcaugguggacggcugguacggcuucagacaccagaacagcgagggcaccggccaggccgccgaccugaagagcacccaggccgccaucgaccagaucaacggcaagcugaacagacugaucgagaagaccaacgagaaguuccaccagaucgagaaggaguucagcgagaucgagggcagaauccaggaccuggagaaguacguggaggacaccaagaucgaccuguggagcuacaacgccgagcugcugguggcccuggagaaccagcacaccaucgaccugaccgacagcgagaugaacaagcuguucgagaagaccagaaagcagcugagagagaacgccgaggacaugggcaacggcugcuucaagaucuaccacaagugcgacaacgccugcaucggcagcaucagaaacggcaccuacgaccacgacguguacagagacgaggcccugaacaacagauuccagaucaagggcguggagcugaagagcggcuacaaggacuggauccuguggaucagcuucgccaucagcugcuuccugcugugcguggugcugcugggcuucaucaugugggccugccagaagggcaacaucagaugcaacaucugcaucuga

SEQ ID NO: 168663 - RNA, 1701 nt, Artificial Sequence; identical to SEQ ID NO: 168662
  derived and/or modified CDS sequence (opt4) from hemagglutinin__InfluenzaA__AFG99666

SEQ ID NO: 168664 - RNA, 1701 nt, Artificial Sequence; identical to SEQ ID NO: 162398
  derived and/or modified CDS sequence (opt4) from hemagglutinin__InfluenzaA__AFG99677

SEQ ID NO: 168665 - RNA, 1701 nt, Artificial Sequence; identical to SEQ ID NO: 168547
  derived and/or modified CDS sequence (opt4) from hemagglutinin__InfluenzaA__AFG99688

SEQ ID NO: 168666 - RNA, 1701 nt, Artificial Sequence
  derived and/or modified CDS sequence (opt4) from hemagglutinin__InfluenzaA__AFG99701
augaagaccaucaucgcccugagcuacauccugugccugguguucgcccagaagcugcccggcaacgacaacagcaccgccacccugugccugggccaccacgccgugcccaacggcacccuggugaagaccaucaccaacgaccagaucgaggugaccaacgccaccgagcuggugcagagcagcagcaccggcagaaucugcgacagcccccacagaauccuggacggcaagaacugcacccugaucgacgcccugcugggcgacccccacugcgacggcuuccagaacaaggagugggaccuguucguggagagaagcaacgccuacagcaacugcuaccccuacgacgugcccgacuacgccagccugagaagccugguggccagcagcggcacccuggaguucaccaacgaggacuucaacuggaccggcguggcccagagcggcgagagcuacgccugcaagagaggcagcgugaagagcuucuucagcagacugaacuggcugcacgagagcgacuacaaguaccccgcccugaacgugaccaugcccaacaacggcaaguucgacaagcuguacaucuggggcgugcaccaccccagcaccgacagagagcagaccagccuguacgugagagccagcggcagagugaccgugagcaccaagagaagccagcagaccgugauccccaacaucggcagcagacccugggugagaggccugagcagcagaaucagcaucuacuggaccaucgugaagcccggcgacauccugcugaucaacagcaccggcaaccugaucgcccccagaggcuacuucaagaucagaaccggcaagagcagcaucaugagaagcgacgcccccaucggcaccugcagcagcgagugcaucacccccaacggcagcauccccaacgacaagcccuuccagaacgugaacagaaucaccuacggcgccugccccagauacgugaagcagaacacccugaagcuggccaccggcaugagaaacgugcccgagaagcagaccagaggcaucuucggcgccaucgccggcuucaucgagaacggcugggagggcaugguggacggcugguacggcuucagacaccagaacagcgagggcaccggccaggccgccgaccugaagagcacccaggccgccaucgaccagaucaacggcaagcugaacagacugaucgagaagaccaacgagaaguuccaccagaucgagaaggaguucagcgagguggagggcagaauccaggaccuggagaaguacguggaggacaccaagaucgaccuguggagcuacaacgccgagcugcugguggcccuggagaaccagcacaccaucgaccugaccgacagcgagaugaacaagcuguucgagaagaccagaaagcagcugagagagaacgccgaggacaugggcaacggcugcuucaagaucuaccacaagugcgacaacgccugcaucggcagcaucagaaacggcaccuacgaccacgacguguacagagacgaggcccugaacaacagauuccagaucaagggcgccgagcugaagagcggcuacaaggacuggauccuguggaucagcuucgccaucagcugcuuccugcugugcguggugcugcugggcuucaucaugugggccugccagaagggcaacaucagaugcaacaucugcaucuga

SEQ ID NO: 168667 - RNA, 1701 nt, Artificial Sequence
  derived and/or modified CDS sequence (opt4) from hemagglutinin__InfluenzaA__AFG99712
augaagaccaucaucgcccugagcuacauccugugccugguguucgcccagaagcugcccggcaacgacaacagcaccgccacccugugccugggccaccacgccgugcccaacggcacccuggugaagaccaucaccaacgaccagaucgaggugaccaacgccaccgagcuggugcagagcagcagcaccggcagaaucugcgacagcccccacagaauccuggacggcaagaacugcacccugaucgacgcccugcugggcgacccccacugcgacggcuuccagaacaaggagugggaccuguucguggagagaagcaaggccuacagcaacugcuaccccuacgaggugcccgacuacgccagccugagaagccugguggccagcagcggcacccuggaguucaccaacgaggacuucaacuggaccggcguggcccagagcggcgagagcuacgccugcaagagaggcagcgugaagagcuucuucagcagacugaacuggcugcacgagagcgacuacaaguaccccgcccugaacgugaccaugcccaacaacggcaaguucgacaagcuguacaucuggggcgugcaccaccccagcaccgacagagagcagaccagccuguacgugagagccagcggcagagugaccgugagcaccaagagaagccagcagaccgugauccccaacaucggcagcagacccugggugagaggccugagcagcagaaucagcaucuacuggaccaucgugaagcccggcgacauccugcugaucaacagcaccggcaaccugaucgcccccagaggcuacuucaagaucagaaccggcaagagcagcaucaugagaagcgacgcccccaucggcaccugcagcagcgagugcaucacccccaacggcagcauccccaacgacaagcccuuccagaacgugaacagaaucaccuacggcgccugccccagauacgugaagcagaacacccugaagcuggccaccggcaugagaaacgugcccgagaagcagaccagaggcaucuucggcgccaucgccggcuucaucgagaacggcugggagggcaugguggacggcugguacggcuucagacaccagaacagcgagggcaccggccaggccgccgaccugaagagcacccaggccgccaucgaccagaucaacggcaagcugaacagacugaucgagaagaccaacgagaaguuccaccagaucgagaaggaguucagcgagguggagggcagaauccaggaccuggagaaguacguggaggacaccaagaucgaccuguggagcuacaacgccgagcugcugguggcccuggagaaccagcacaccaucgaccugaccgacagcgagaugaacaagcuguucgagaagaccagaaagcagcugagagagaacgccgaggacaugggcaacggcugcuucaagaucuaccacaagugcgacaacgccugcaucggcagcaucagaaacggcaccuacgaccacgacguguacagagacgaggcccugaacaacagauuccagaucaagggcguggagcugaagagcggcuacaaggacuggauccuguggaucagcuucgccaucagcugcuuccugcugugcguggugcugcugggcuucaucaugugggccugccagaagggcaacaucagaugcaacaucugcaucuga

SEQ ID NO: 168668 - RNA, 1701 nt, Artificial Sequence; identical to SEQ ID NO: 168547
  derived and/or modified CDS sequence (opt4) from hemagglutinin__InfluenzaA__AFG99723

SEQ ID NO: 168669 - RNA, 1701 nt, Artificial Sequence; identical to SEQ ID NO: 168662
  derived and/or modified CDS sequence (opt4) from hemagglutinin__InfluenzaA__AFG99734

SEQ ID NO: 168670 - RNA, 1701 nt, Artificial Sequence
  derived and/or modified CDS sequence (opt4) from hemagglutinin__InfluenzaA__AFG99745
augaagaccaucaucgcccugagcuacauccugugccugguguucgcccagaagcugcccggcaacgacaacagcaccgccacccugugccugggccaccacgccgugcccaacggcacccuggugaagaccaucaccaacgaccagaucgaggugaccaacgccaccgagcuggugcagagcagcagcaccggcagaaucugcgacagcccccacagaauccuggacggcaagaacugcacccugaucgacgcccugcugggcgacccccacugcgacggcuuccagaacaaggagugggaccuguucguggagagaagcaaggccuacagcaacugcuaccccuacgacgugcccgacuacgccagccugagaagccugguggccagcagcggcacccuggaguucaucaacgaggacuucaacuggaccggcguggcccagagcggcgacagcuacgccugcaagagaggcagcgugaagagcuucuucagcagacugaacuggcugcacgagagcgaguacaaguaccccgcccugaacgugaccaugcccaacaacgacaaguucgacaagcuguacaucuggggcgugcaccaccccagcaccgagagagagcagaccagccuguacaucagagccagcggcagagugaccgugagcaccaagagaagccagcagaccgugauccccaacaucggcagcaagcccugggugagaggccugagcagcagaaucagcaucuacuggaccaucgugaagcccggcgacauccugcugaucaacagcaccggcaaccugaucgcccccagaggcuacuucaagaucagaaccggcaagagcagcaucaugagaagcgacgcccccaucggcaccugcagcagcgagugcaucacccccaacggcagcauccccaacgacaagcccuuccagaacgugaacagaaucaccuacggcgccugccccagauacgugaagcagaacacccugaagcuggccaccggcaugagaaacgugcccgagaagcagaccagaggcaucuucggcgccaucgccggcuucaucgagaacggcugggagggcaugguggacggcugguacggcuucagacaccagaacagcgagggcaccggccaggccgccgaccugaagagcacccaggccgccaucgaccagaucaacggcaagcugaacagacugaucgagaagaccaacgagaaguuccaccagaucgagaaggaguucagcgagguggagggcagaauccaggaccuggagaaguacguggaggacaccaagaucgaccuguggagcuacaacgccgagcugcugguggcccuggagaaccagcacaccaucgaccugaccgacagcgagaugaacaagcuguucgagaagaccagaaagcagcugagagagaacgccgaggacaugggcaacggcugcuucaagaucuaccacaagugcgacaacgccugcaugggcagcaucagaaacggcaccuacgaccacgacguguacagagacgaggcccugaacaacagauuccagaucaagggcguggagcugaagagcggcuacaaggacuggauccuguggaucagcuucgccaucagcugcuuccugcugugcguggugcugcugggcuucaucaugugggccugccagaagggcaacaucagaugcaacaucugcaucuga

SEQ ID NO: 168671 - RNA, 1701 nt, Artificial Sequence; identical to SEQ ID NO: 168547
  derived and/or modified CDS sequence (opt4) from hemagglutinin__InfluenzaA__AFG99756

SEQ ID NO: 168672 - RNA, 1701 nt, Artificial Sequence
  derived and/or modified CDS sequence (opt4) from hemagglutinin__InfluenzaA__AFG99767
augaagaccaucaucgcccugagcuacauccugugccugguguucgcccagaagcugcccggcaacgacaacagcaccgccacccugugccugggccaccacgccgugcccaacggcacccuggugaagaccaucaccaacgaccagaucgaggugaccaacgccaccgagcuggugcagagcagcagcaccggcagaaucugcgacagcccccacagaauccuggacggcaagaacugcacccugaucgacgcccugcugggcgacccccacugcgacgacuuccagaacaaggagugggaccuguucguggagagaagcaaggccuacagcaacugcuaccccuacgacgugcccgacuacgccagccugagaagccugguggccagcagcggcacccuggaguucaucaacgaggacuucaacuggaccggcguggcccagagcggcgagagcuacgccugcaagagaggcagcgugaagagcuucuucagcagacugaacuggcugcacgagagcgaguacaaguaccccgcccugaacgugaccaugcccaacaacgacaaguucgacaagcuguacaucuggggcgugcaccaccccagcaccgacagagagcagaccagccuguacaucagagccagcggcagagugaccgugagcaccaagagaagccagcagaccgugauccccaacaucggcagcagacccugggugagaggccugagcagcagaaucagcaucuacuggaccaucgugaagcccggcgacauccugcugaucaacagcaccggcaaccugaucgcccccagaggcuacuucaagaucagaaccggcaagagcagcaucaugagaagcgacgcccccaucggcaccugcagcagcgagugcaucacccccaacggcagcauccccaacgacaagcccuuccagaacgugaacagaaucaccuacggcgccugccccagauacgugaagcagaacacccugaagcuggccaccggcaugagaaacgugcccgagaagcagaccagaggcaucuucggcgccaucgccggcuucaucgagaacggcugggagggcaugguggacggcugguacggcuucagacaccagaacagcgagggcaccggccaggccgccgaccugaagagcacccaggccgccaucgaccagaucaacggcaagcugaacagacugaucgagaagaccaacgagaaguuccaccagaucgagaaggaguucagcgagguggagggcagaauccaggaccuggagaaguacguggaggacaccaagaucgaccuguggagcuacaacgccgagcugcugguggcccuggagaaccagcacaccaucgaccugaccgacagcgagaugaacaagcuguucgagaagaccagaaagcagcugagagagaacgccgaggacaugggcaacggcugcuucaagaucuaccacaagugcgacaacgccugcaucggcagcaucagaaacggcaccuacgaccacgacguguacagagacgaggcccugaacaacagauuccagaucaagggcguggagcugaagagcggcuacaaggacuggauccuguggaucagcuucgccaucagcugcuuccugcugugcguggugcugcugggcuucaucaugugggccugccagaagggcaacaucagaugcaacaucugcaucuga

SEQ ID NO: 168673 - RNA, 1701 nt, Artificial Sequence
  derived and/or modified CDS sequence (opt4) from hemagglutinin__InfluenzaA__AFG99778
augaagaccaucaucgcccugagcuacauccugugccugguguucgcccagaagcugcccggcaacgacaacagcaccgccacccugugccugggccaccacgccgugcccaacggcacccuggugaagacccugaccaacgaccagaucgaggugaccaacgccaccgagcuggugcagagcagcagcaccggcaagaucugcgacagcccccacagaauccuggacggcaagaacugcacccugaucgacgcccugcugggcgacccccacugcgacggccugcagaacaaggagugggaccuguucguggagagaagcaaggccuacagcaacugcuaccccuacgacgugcccgacuacgccagccugagaagccugguggccagcagcggcacccuggaguucaucaacgaggacuucaacuggaccggcguggcccaggacggcggcagcuacgccugcaagagaggcagcgugaacagcuucuucagcagacugaacuggcugcacaagagcgaguacaaguaccccgcccugaacgugaccaugcccaacaacggcaagguggacaagcuguacaucuggggcgugcaccaccccagcaccgacagagaccagaccagccuguacgugagagccagcggcagagugaccgugagcaccaagagaagccagcagaccgugauccccaacaucggcagcagacccugggugagaggccagagcagcagaaucagcaucuacuggaccaucgugaagcccggcgacauccugcugaucaacagcaccggcaaccugaucgcccccagaggcuacuucaagaucagaaacggcaagagcagcaucaugagaagcgacgcccccaucggcaccugcagcagcgagugcaucacccccaacggcagcauccccaacgacaagcccuuccagaacgugaacagaaucaccuacggcgccugccccagauacgugaagcagaacacccugaagcuggccaccggcaugagaaacgugcccgagaagcagaccagaggcaucuucggcgccaucgccggcuucaucgagaacggcugggagggcaugguggacggcugguacggcuucagacaccagaacagcgagggcaccggccaggccgccgaccugaagagcacccaggccgccaucgaccagaucaacggcaagcugaacagacugaucgagaagaccaacgagaaguuccaccagaucgagaaggaguucagcgagguggagggcagaauccaggaccuggagaaguacguggaggacaccaagaucgaccuguggagcuacaacgccgagcugcugguggcccuggagaaccagcacaccaucgaccugaccgacagcgagaugaacaagcuguucgagaagaccagaaagcagcugagagagaacgccgaggacaugggcaacggcugcuucaagaucuaccacaagugcgacaacgccugcaucggcagcaucagaaacggcaccuacgaccacgacguguacagagacgaggcccugaacaacagauuccagaucaagggcguggagcugaagagcggcuacaaggacuggauccuguggaucagcuucgccaucagcugcuuccugcugugcguggugcugcugggcuucaucaugugggccugccagaagggcaacaucagaugcaacaucugcaucuga

SEQ ID NO: 168674 - RNA, 1701 nt, Artificial Sequence; identical to SEQ ID NO: 168547
  derived and/or modified CDS sequence (opt4) from hemagglutinin__InfluenzaA__AFG99789

SEQ ID NO: 168675 - RNA, 1701 nt, Artificial Sequence; identical to SEQ ID NO: 168662
  derived and/or modified CDS sequence (opt4) from hemagglutinin__InfluenzaA__AFG99800

SEQ ID NO: 168676 - RNA, 1701 nt, Artificial Sequence
  derived and/or modified CDS sequence (opt4) from hemagglutinin__InfluenzaA__AFG99811
augaagaccaucaucgcccugagcuacauccugugccugguguucagccagaagcugcccggcaacgacaacagcaccgccacccugugccugggccaccacgccgugcccaacggcacccuggugaagaccaucaccaacgaccagaucgaggugaccaacgccaccgagcuggugcagaacagcagcaccggcagaaucugcgacagcccccacagaauccuggacggcaagaacugcacccugaucgacgcccugcugggcgacccccacugcgacgacuuccagaacaaggagugggaccuguucguggagagaagcaaggccuacagcaacugcuaccccuacgacgugcccgacuacgccagccugagaagccugguggccagcagcggcacccuggaguucaucaacgaggacuucaacuggaccggcguggcccagagcggcgagagcuacgccugcaagagaggcagcgugaagagcuucuucagcagacugaacuggcugcacgagagcgaguacaaguaccccgcccugaacgugaccaugcccaacaacggcaaguucgacaagcuguacaucuggggcgugcaccaccccagcaccgacagagagcagaccagccuguacgugagagccagcggcagagugaccgugagcaccaagagaagccagcagaccgugauccccaacaucggcagcagacccugggugagaggccugagcagcagaaucagcaucuacuggaccaucgugaagcccggcgacauccugcugaucaacagcaccggcaaccugaucgcccccagaggcuacuucaagaucagaaccggcaagagcagcaucaugagaagcgacgcccccaucggcaccugcagcagcgagugcaucacccccaacggcagcauccccaacgacaagcccuuccagaacgugaacagaaucaccuacggcgccugccccagauacgugaagcagaacacccugaagcuggccaccggcaugagaaacgugcccgagaagcagaccagaggcaucuucggcgccaucgccggcuucaucgagaacggcugggagggcaugguggacggcugguacggcuucagacaccagaacagcgagggcaccggccaggccgccgaccugaagagcacccaggccgccaucgaccagaucaacggcaagcugaacagacugaucgagaagaccaacgagaaguuccaccagaucgagaaggaguucagcgagaucgagggcagaauccaggaccuggagaaguacguggaggacaccaagaucgaccuguggagcuacaacgccgagcugcugguggcccuggagaaccagcacaccaucgaccugaccgacagcgagaugaacaagcuguucgagaagaccagaaagcagcugagagagaacgccgaggacaugggcaacggcugcuucaagaucuaccacaagugcgacaacgccugcaucggcagcaucagaaacggcaccuacgaccacgacguguacagagacgaggcccugaacaacagauuccagaucaagggcguggagcugaagagcggcuacaaggacuggauccuguggaucagcuucgccaucagcugcuuccugcugugcguggugcugcugggcuucaucaugugggccugccagaagggcaacaucagaugcaacaucugcaucuga

SEQ ID NO: 168677 - RNA, 1701 nt, Artificial Sequence; identical to SEQ ID NO: 168547
  derived and/or modified CDS sequence (opt4) from hemagglutinin__InfluenzaA__AFG99822

SEQ ID NO: 168678 - RNA, 1701 nt, Artificial Sequence; identical to SEQ ID NO: 168547
  derived and/or modified CDS sequence (opt4) from hemagglutinin__InfluenzaA__AFG99833

SEQ ID NO: 168679 - RNA, 1701 nt, Artificial Sequence; identical to SEQ ID NO: 168547
  derived and/or modified CDS sequence (opt4) from hemagglutinin__InfluenzaA__AFG99844

SEQ ID NO: 168680 - RNA, 1701 nt, Artificial Sequence
  derived and/or modified CDS sequence (opt4) from hemagglutinin__InfluenzaA__AFG99855
augaagaccaucaucgcccugagcuacauccugugccugguguucgcccagaagcugcccggcaacgacaacagcaccgccacccugugccugggccaccacgccgugcccaacggcacccuggugaagaccaucaccaacgaccagaucgaggugaccaacgccaccgagcuggugcagagcagcagcaccggcagaaucugcgacagcccccacagaauccuggacggcaagaacugcacccugaucgacgcccugcugggcgacccccacugcgacggcuuccagaacaaggagugggaccuguucguggagagaagcaaggccuacagcaacugcuaccccuacgacgugcccgacuacgccagccugagaagccugguggccagcagcggcacccuggaguucaccaacgaggacuucaacuggaccggcguggcccagagcggcgagagcuacgccugcaagagaggcagcgugaagagcuucuucagcagacugaacuggcugcacgagagcgacuacaaguaccccgcccugaacgugaccaugcccaacaacggcaaguucgacaagcuguacaucuggggcgugcaccaccccagcaccgacagagagcagaccagccuguacgugagagccagcggcagagugaccgugagcaccaagagaagccagcagaccgugauccccaacaucggcagcagacccugggugagaggccugagcagcagaaucagcaucuacuggaccaucgugaagcccggcgacauccugcugaucaacagcaccggcaaccugaucgcccccagaggcuacuucaagaucagaaccggcaagagcagcaucaugagaagcgacgcccccaucggcaccugcagcagcgagugcaucacccccaacggcagcauccccaacgacaagcccuuccagaacgugaacagaaucaccuacggcgccugccccagauacgugaagcagaacacccugaagcuggccaccggcaugagaaacgugcccggcaagcagaccagaggcaucuucggcgccaucgccggcuucaucgagaacggcugggagggcaugguggacggcugguacggcuucagacaccagaacagcgagggcaccggccaggccgccgaccugaagagcacccaggccgccaucgaccagaucaacggcaagcugaacagacugaucgagaagaccaacgagaaguuccaccagaucgagaaggaguucagcgagguggagggcagaauccaggaccuggagaaguacguggaggacaccaagaucgaccuguggagcuacaacgccgagcugcugguggcccuggagaaccagcacaccaucgaccugaccgacagcgagaugaacaagcuguucgagaagaccagaaagcagcugagagagaacgccgaggacaugggcaacggcugcuucaagaucuaccacaagugcgacaacgccugcaucggcagcaucagaaacggcaccuacgaccacgacguguacagagacgaggcccugaacaacagauuccagaucaagggcguggagcugaagagcggcuacaaggacuggauccuguggaucagcuucgccaucagcugcuuccugcugugcguggugcugcugggcuucaucaugugggccugccagaagggcaacaucagaugcaacaucugcaucuga

SEQ ID NO: 168681 - RNA, 1701 nt, Artificial Sequence; identical to SEQ ID NO: 168547
  derived and/or modified CDS sequence (opt4) from hemagglutinin__InfluenzaA__AFG99866

SEQ ID NO: 168682 - RNA, 1701 nt, Artificial Sequence; identical to SEQ ID NO: 168547
  derived and/or modified CDS sequence (opt4) from hemagglutinin__InfluenzaA__AFG99877

SEQ ID NO: 168683 - RNA, 1701 nt, Artificial Sequence
  derived and/or modified CDS sequence (opt4) from hemagglutinin__InfluenzaA__AFG99888
augaagaccaucaucgcccugagcuacauccugugccugguguucgcccagaagcugcccggcaacgacaacagcaccgccacccugugccugggccaccacgccgugcccaacggcacccuggugaagaccaucaccaacgaccagaucgaggugaccaacgccaccgagcuggugcagagcagcagcaccggcagaaucugcgacagcccccacagaauccuggacggcaagaacugcacccugaucgacgcccugcugggcgacccccacugcgacggcuuccagaacaaggagugggaccuguucguggagagaagcaaggccuacagcaacugcuaccccuacgacgugcccgacuacgccagccugagaagccugguggccagcagcggcacccuggaguucaucaacgaggacuucaacuggaccggcguggcccagagcggcgagagcuacgccugcaagagaggcagcgugaagagcuucuucagcagacugaacuggcugcacgagagcgaguacaaguaccccgcccugaacgugaccaugcccaacaacgacaaguucgacaagcuguacaucuggggcgugcaccaccccagcaccgacagagagcagaccagccuguacaucagagccagcggcagagugaccgugagcaccaagagaagccagcagaccgugauccccaacaucggcagcagacccugggugagaggccugagcagcagaaucagcaucuacuggaccaucgugaagcccggcgacauccugcugaucaacagcaccggcaaccugaucgcccccagaggcuacuucaagaucagaaccggcaagagcagcaucaugagaagcgacgcccccaucggcaccugcaacagcgagugcaucacccccaacggcagcauccccaacgacaagcccuuccagaacgugaacagaaucaccuacggcgccugccccagauacgugaagcagaacacccugaagcuggccaccggcaugagaaacgugcccgagaagcagaccagaggcaucuucggcgccaucgccggcuucaucgagaacggcugggagggcaugguggacggcugguacggcuucagacaccagaacagcgagggcaccggccaggccgccgaccugaagagcacccaggccgccaucgaccagaucaacggcaagcugaacagacugaucgagaagaccaacgagaaguuccaccagaucgagaaggaguucagcgagguggagggcagaauccaggaccuggagaaguacguggaggacaccaagaucgaccuguggagcuacaacgccgagcugcugguggcccuggagaaccagcacaccaucgaccugaccgacagcgagaugaacaagcuguucgagaagaccagaaagcagcugagagagaacgccgaggacaugggcaacggcugcuucaagaucuaccacaagugcgacaacgccugcaucggcagcaucagaaacggcaccuacaaccacgacguguacagagacgaggcccugaacaacagauuccagaucaagggcguggagcugaagagcggcuacaaggacuggauccuguggaucagcuucgccaucagcugcuuccugcugugcguggugcugcugggcuucaucaugugggccugccagaagggcaacaucagaugcaacaucugcaucuga

SEQ ID NO: 168684 - RNA, 1701 nt, Artificial Sequence; identical to SEQ ID NO: 168547
  derived and/or modified CDS sequence (opt4) from hemagglutinin__InfluenzaA__AFG99899

SEQ ID NO: 168685 - RNA, 1701 nt, Artificial Sequence; identical to SEQ ID NO: 168547
  derived and/or modified CDS sequence (opt4) from hemagglutinin__InfluenzaA__AFG99910

SEQ ID NO: 168686 - RNA, 1701 nt, Artificial Sequence; identical to SEQ ID NO: 168547
  derived and/or modified CDS sequence (opt4) from hemagglutinin__InfluenzaA__AFG99921

SEQ ID NO: 168687 - RNA, 1701 nt, Artificial Sequence
  derived and/or modified CDS sequence (opt4) from hemagglutinin__InfluenzaA__AFG99932
augaagaccaucaucgcccugagcuacauccugugccugguguucgcccagaagcugcccggcaacgacaacagcaccgccacccugugccugggccaccacgccgugcccaacggcacccuggugaagaccaucaccaacgaccagaucgaggugaccaacgccaccgagcuggugcagagcagcagcaccggcagaaucugcgacagcccccacagaauccuggacggcaagaacugcacccugaucgacgcccugcugggcgacccccacugcgacggcuuccagaacaaggagugggaccuguucguggagagaagcaaggccuacagcaacugcuaccccuacgacgugcccgacuacgccagccugagaagccugguggccagcagcggcacccuggaguucaucaacgaggacuucaacuggaccggcguggcccagagcggcgagagcuacgccugcaagagaggcagcgugaagagcuucuucagcagacugaacuggcugcacgagagcgaguacaaguaccccgcccugaacgugaccaugcccaacaacgacaaguucgacaagcuguacaucuggggcgugcaccaccccagcaccgacagagagcagaccagccuguacaucagagccagcggcagagugaccgugagcaccaagagaagccagcagaccgugauccccaacaucggcagcagacccugggugagaggccugagcagcagaaucagcaucuacuggaccaucgugaagcccggcgacauccugcugaucaacagcaccggcaaccugaucgcccccagaggcuacuucaagaucagaaccggcaagagcagcaucaugagaagcgacgcccccaucggcaccugcagcagcgagugcaucacccccaacggcagcauccccaacgacaagcccuuccagaacgugaacagaaucaccuacggcgccugccccagauacgugaagcagaacacccugaagcuggccaccggcaugagaaacgugcccgagaagcagaccagaggcaucuucggcgccaucgccggcuucaucgagaacggcugggagggcaugguggacggcugguacggcuucagacaccagaacagcgagggcaccggccaggccgccgaccugaagagcacccaggccgccaucgaccagaucaacggcaagcugaacagacugaucgagaagaccaacgagaaguuccaccagaucgagaaggaguucagcgagguggagggcagaauccaggaccuggagaaguacguggaggacaccaagaucgaccuguggagcuacaacgccgagcugcugguggcccuggagaaccagcacaccaucgaccugaccgacagcgagaugaacaagcuguucgagaagaccagaaagcagcugagagagaacgccgaggacaugggcaacggcugcuucaagaucuaccacaagugcgacaacgccugcaucggcagcaucagaaacggcaccuacgaccacgacguguacagagacgaggcccugaacaacagauuccagaucaagggcguggagcugaagagcggcuacaaggacuggauccuguggaucagcuucgccaucagcugcuuccugcugugcguggugcugcugggcuucaucaugugggccugccagaagggcaacaucagaugcaacaucugcaucuga

SEQ ID NO: 168688 - RNA, 1701 nt, Artificial Sequence; identical to SEQ ID NO: 168547
  derived and/or modified CDS sequence (opt4) from hemagglutinin__InfluenzaA__AFG99943

SEQ ID NO: 168689 - RNA, 1701 nt, Artificial Sequence
  derived and/or modified CDS sequence (opt4) from hemagglutinin__InfluenzaA__AFG99954
augaagaccaucaucgcccugagcuacauccugugccugguguucgcccagaagcugcccggcaacgacaacagcaccgccacccugugccugggccaccacgccgugcccaacggcacccuggugaagaccaucaccaacgaccagaucgaggugaccaacgccaccgagcuggugcagagcagcagcaccggcagaaucugcgacagcccccacagaauccuggacggcaagaacugcacccugaucgacgcccugcugggcgacccccacugcgacggcuuccagaacaaggagugggaccuguucguggagagaagcaaggccuacagcaacugcuaccccuacgacgugcccgacuacgccagccugagaagccugguggccagcagcggcacccuggaguucaucaacgaggacuucaacuggaccggcguggcccagagcggcgacagcuacgccugcaagagaggcagcgugaagagcuucuucagcagacugaacuggcugcacgagagcgaguacaaguaccccgcccugaacgugaccaugcccaacaacgacaaguucgacaagcuguacaucuggggcgugcaccaccccagcaccgagagagagcagaccagccuguacaucagagccagcggcagagugaccgugagcaccaagagaagccagcagaccgugauccccaacaucggcuucaagcccugggugagaggccugagcagcagaaucagcaucuacuggaccaucgugaagcccggcgacauccugcugaucaacagcaccggcaaccugaucgcccccagaggcuacuucaagaucagaaccggcaagagcagcaucaugagaagcgacgcccccaucggcaccugcagcagcgagugcaucacccccaacggcagcauccccaacgacaagcccuuccagaacgugaacagaaucaccuacggcgccugccccagauacgugaagcagaacacccugaagcuggccaccggcaugagaaacgugcccgagaagcagaccagaggcaucuucggcgccaucgccggcuucaucgagaacggcugggagggcaugguggacggcugguacggcuucagacaccagaacagcgagggcaccggccaggccgccgaccugaagagcacccaggccgccaucgaccagaucaacggcaagcugaacagacugaucgagaagaccaacgagaaguuccaccagaucgagaaggaguucagcgagguggagggcagaauccaggaccuggagaaguacguggaggacaccaagaucgaccuguggagcuacaacgccgagcugcugguggcccuggagaaccagcacaccaucgaccugaccgacagcgagaugaacaagcuguucgagaagaccagaaagcagcugagagagaacgccgaggacaugggcaacggcugcuucaagaucuaccacaagugcgacaacgccugcaucggcagcaucagaaacggcaccuacgaccacgacguguacagagacgaggcccugaacaacagauuccagaucaagggcguggagcugaagagcggcuacaaggacuggauccuguggaucagcuucgccaucagcugcuuccugcugugcguggugcugcugggcuucaucaugugggccugccagaagggcaacaucagaugcaacaucugcaucuga

SEQ ID NO: 168690 - RNA, 1701 nt, Artificial Sequence
  derived and/or modified CDS sequence (opt4) from hemagglutinin__InfluenzaA__AFG99965
augaagaccaucaucgcccugagcuacauccugugccuggccuucgcccagaagcugcccggcaacgacaacagcaccgccacccugugccugggccaccacgccgugcccaacggcacccuggugaagaccaucaccaacgaccagaucgaggugaccaacgccaccgagcuggugcagagcagcagcaccggcagaaucugcgacagcccccacagaauccuggacggcaagaacugcacccugaucgacgcccugcugggcgacccccacugcgacggcuuccagaacaaggagugggaccuguucguggagagaagcaaggccuacagcaacugcuaccccuacgacgugcccgacuacgccagccugagaagccugguggccagcagcggcacccuggaguucaccaacgaggacuucaacuggaccggcguggcccagagcggcgagagcuacgccugcaagagaggcagcgugaagagcuucuucagcagacugaacuggcugcacgagagcgacuacaaguaccccgcccugaacgugaccaugcccaacaacggcaaguucgacaagcuguacaucuggggcgugcaccaccccagcaccgacagagagcagaccagccuguacgugagagccagcggcagagugaccgugagcaccaagagaagccagcagaccgugauccccaacaucggcagcagacccugggugagaggccugagcagcagaaucagcaucuacuggaccaucgugaagcccggcgacauccugcugaucaacagcaccggcaaccugaucgcccccagaggcuacuucaagaucagaaccggcaagagcagcaucaugagaagcgacgcccccaucggcaccugcagcagcgagugcaucacccccaacggcagcauccccaacgacaagcccuuccagaacgugaacagaaucaccuacggcgccugccccagauacgugaagcagaacacccugaagcuggccaccggcaugagaaacgugcccgagaagcagaccagaggcaucuucggcgccaucgccggcuucaucgagaacggcugggagggcaugguggacggcugguacggcuucagacaccagaacagcgagggcaccggccaggccgccgaccugaagagcacccaggccgccaucgaccagaucaacggcaagcugaacagacugaucgagaagaccaacgagaaguuccaccagaucgagaaggaguucagcgagguggagggcagaauccaggaccuggagaaguacguggaggacaccaagaucgaccuguggagcuacaacgccgagcugcugguggcccuggagaaccagcacaccaucgaccugaccgacagcgagaugaacaagcuguucgagaagaccagaaagcagcugagagagaacgccgaggacaugggcaacggcugcuucaagaucuaccacaagugcgacaacgccugcaucggcagcaucagaaacggcaccuacgaccacgacguguacagagacgaggcccugaacaacagauuccagaucaagggcguggagcugaagagcggcuacaaggacuggauccuguggaucagcuucgccaucagcugcuuccugcugugcguggugcugcugggcuucaucaugugggccugccagaagggcaacaucagaugcaacaucugcaucuga

SEQ ID NO: 168691 - RNA, 1701 nt, Artificial Sequence; identical to SEQ ID NO: 168547
  derived and/or modified CDS sequence (opt4) from hemagglutinin__InfluenzaA__AFG99976

SEQ ID NO: 168692 - RNA, 1701 nt, Artificial Sequence
  derived and/or modified CDS sequence (opt4) from hemagglutinin__InfluenzaA__AFG99987
augaagaccaucaucgcccugagcuacauccugugccugguguucgcccagaagcugcccggcaacgacaacagcaccgccacccugugccugggccaccacgccgugcccaacggcacccuggugaagaccaucaccaacgaccagaucgaggugaccaacgccaccgagcuggugcagagcagcagcaccggcagaaucugcgacagcccccacagaauccuggacggcaagaacugcacccugaucgacgcccugcugggcgacccccacugcgacggcuuccagaacaaggagugggaccuguucguggagagaagcaaggccuacagcaacugcuaccccuacgacgugcccgacuacgccagccugagaagccugguggccagcagcggcacccuggaguucaucaacgaggacuucaacuggaccggcguggcccagaacggcgacagcuacgccugcaagagaggcagcgugaagagcuucuucagcagacugaacuggcugcacgagagcgaguacaaguaccccgcccugaacgugaccaugcccaacaacgacaaguucgacaagcuguacaucuggggcgugcaccaccccagcaccgacagagagcagaccagccuguacaucagagccagcggcagagugaccgugagcaccaagagaagccagcagaccgugauccccaacaucggcagcagacccugggugagaggccugagcagcagaaucagcaucuacuggaccaucgugaagcccggcgacauccugcugaucaacagcaccggcaaccugaucgcccccagaggcuacuucaagaucagaaccggcaagagcagcaucaugagaagcgacgcccccaucggcaccugcagcagcgagugcaucacccccaacggcagcauccccaacgacaagcccuuccagaacgugaacagaaucaccuacggcgccugccccagauacgugaagcagaacacccugaagcuggccaccggcaugagaaacgugcccgagaagcagaccagaggcaucuucggcgccaucgccggcuucaucgagaacggcugggagggcaugguggacggcugguacggcuucagacaccagaacagcgagggcaccggccaggccgccgaccugaagagcacccaggccgccaucgaccagaucaacggcaagcugaacagacugaucgagaagaccaacgagaaguuccaccagaucgagaaggaguucagcgagguggagggcagaauccaggaccuggagaaguacguggaggacaccaagaucgaccuguggagcuacaacgccgagcugcugguggcccuggagaaccagcacaccaucgaccugaccgacagcgagaugaacaagcuguucgagaagaccagaaagcagcugagagagaacgccgaggacaugggcaacggcugcuucaagaucuaccacaagugcgacaacgccugcaucggcagcaucagaaacggcaccuacgaccacgacguguacagagacgaggcccugaacaacagauuccagaucaagggcguggagcugaagagcggcuacaaggacuggauccuguggaucagcuucgccaucagcugcuuccugcugugcguggugcugcugggcuucaucaugugggccugccagaagggcaacaucagaugcaacaucugcaucuga

SEQ ID NO: 168693 - RNA, 1701 nt, Artificial Sequence
  derived and/or modified CDS sequence (opt4) from hemagglutinin__InfluenzaA__AFG99998
augaagaccaucaucgcccugagcuacauccugugccugguguucgcccagaagcugcccggcaacgacaacagcaccgccacccugugccugggccaccacgccgugcccaacggcacccuggugaagaccaucaccaacgaccagaucgaggugaccaacgccaccgagcuggugcagagcagcagcaccggcagaaucugcgacagcccccacagaauccuggacggcaagaacugcacccugaucgacgcccugcugggcgacccccacugcgacggcuuccagaacaaggagugggaccuguucguggagagaagcaaggccuacagcaacugcuaccccuacgacgugcccgacuacgccagccugagaagccugguggccagcagcggcacccuggaguucaucaacgaggacuucaacuggaccggcguggcccaggacggcggcagcuacgccugcaagagaggcagcgugaacagcuucuucagcagacugaacuggcugcacaagcuggaguacaaguaccccgcccugaacgugaccaugcccaacaacggcaaguucgacaagcuguacaucuggggcgugcaccaccccagcaccgacagcgaccagaccagccuguacgugagagccagcggcagagugaccgugagcaccaagagaagccagcagaccgugacccccaacaucggcagcagacccugggugagaggccugagcagcagaaucagcaucuacuggaccaucgugaagcccggcgacauccugcugaucaacagcaccggcaaccugaucgcccccagaggcuacuucaagaucagaaacggcaagagcagcaucaugagaagcgacgcccccaucggcaacugcagcagcgagugcaucacccccaacggcagcauccccaacgacaagcccuuccagaacgugaacagaaucaccuacggcgccugccccagauacgugaagcagaacacccugaagcuggccaccggcaugagaaacgugcccgagaagcagaccagaggcaucuucggcgccaucgccggcuucaucgagaacggcugggagggcaugguggacggcugguacggcuucagacaccagaacagcgagggcaccggccaggccgccgaccugaagagcacccaggccgccaucgaccagaucaacggcaagcugaacagacugaucgagaagaccaacgagaaguuccaccagaucgagaaggaguucagcgagguggagggcagaauccaggaccuggagaaguacguggaggacaccaagaucgaccuguggagcuacaacgccgagcugcugguggcccuggagaaccagcacaccaucgaccugaccgacagcgagaugaacaagcuguucgagaagaccagaaagcagcugagagagaacgccgaggacaugggcaacggcugcuucaagaucuaccacaagugcgacaacgccugcaucggcagcaucagaaacggcaccuacgaccacgacguguacagagacgaggcccugaacaacagauuccagaucaagggcguggagcugaagagcggcuacaaggacuggauccuguggaucagcuucgccaucagcugcuuccugcugugcguggugcugcugggcuucaucaugugggccugccagaagggcaacaucagaugcaacaucugcaucuga

SEQ ID NO: 168694 - RNA, 1701 nt, Artificial Sequence; identical to SEQ ID NO: 168662
  derived and/or modified CDS sequence (opt4) from hemagglutinin__InfluenzaA__AFH00021

SEQ ID NO: 168695 - RNA, 1701 nt, Artificial Sequence
  derived and/or modified CDS sequence (opt4) from hemagglutinin__InfluenzaA__AFH00032
augaagaccaucaucgcccugagcuacauccugugccugguguucgcccagaagcugcccggcaacgacaacagcaccgccacccugugccugggccaccacgccgugcccaacggcacccuggugaagaccaucaccaacgaccagaucgaggugaccaacgccaccgagcuggugcagagcagcagcaccggcaagaucugcgacagcccccacagaauccuggacggcaagaacugcacccugaucgacgcccugcugggcgacccccacugcgacgacuuccagaacaaggagugggaccuguucguggagagaagcaaggccuacagcaacugcuaccccuacgacgugcccgacuacgccagccugagaagccugguggccagcagcggcacccuggaguucaucaacgaggacuucaacuggaccggcguggcccagagcggcgacagcuacgccugcaagagaggcagcgugaagagcuucuucagcagacugaacuggcugcacgagagcgaguacaaguaccccgcccugaacgugaccaugcccaacaacgacaaguucgacaagcuguacaucuggggcgugcaccaccccagcaccgacagagagcagaccagccuguacaucagagccagcggcagagugaccgugagcaccaagagaagccagcagaccgugauccccaacaucggcagcagacccugggugagaggccugagcagcagaaucagcaucuacuggaccaucgugaagcccggcgacauccugcugaucaacagcaccggcaaccugaucgcccccagaggcuacuucaagaucagaaccggcaagagcagcaucaugagaagcgacgcccccaucggcaccugcagcagcgagugcaucacccccaacggcagcauccccaacgacaagcccuuccagaacgugaacagaaucaccuacggcgccugccccagauacgugaagcagaacacccugaagcuggccaccggcaugagaaacgugcccgagaagcagaccagaggcaucuucggcgccaucgccggcuucaucgagaacggcugggagggcaugguggacggcugguacggcuucagacaccagaacagcgagggcaccggccaggccgccgaccugaagagcacccaggccgccaucgaccagaucaacggcaagcugaacaagcugaucgagaagaccaacgagaaguuccaccagaucgagaaggaguucagcgagguggagggcagaauccaggaccuggagaaguacguggaggacaccaagaucgaccuguggagcuacaacgccgagcugcugguggcccuggagaaccagcacaccaucgaccugaccgacagcgagaugaacaagcuguucgagaagaccagaaagcagcugagagagaacgccgaggacaugggcaacggcugcuucaagaucuaccacaagugcgacaacgccugcaucggcagcaucagaaacggcaccuacgaccacgacguguacagagacgaggcccugaacaacagauuccagaucaagggcguggagcugaagagcggcuacaaggacuggauccuguggaucagcuucgccaucagcugcuuccugcugugcguggugcugcugggcuucaucaugugggccugccagaagggcaacaucagaugcaacaucugcaucuga

SEQ ID NO: 168696 - RNA, 1701 nt, Artificial Sequence
  derived and/or modified CDS sequence (opt4) from hemagglutinin__InfluenzaA__AFH00043
augaagaccaucaucgcccugagcuacauccugugccugguguucgcccagaagcugcccggcaacgacaacagcaccgccacccugugccugggccaccacgccgugcccaacggcacccuggugaagaccaucaccaacgaccagaucgaggugaccaacgccaccgagcuggugcagagcagcagcaccggcaagaucugcgacagcccccacagaauccuggacggcaagaacugcacccugaucgacgcccugcugggcgacccccacugcgacgacuuccagaacaaggagugggaccuguucguggagagaagcaaggccuacagcaacugcuaccccuacgacgugcccgacuacgccagccugagaagccugguggccagcagcggcacccuggaguucaucaacgaggacuucaacuggaccggcguggcccagagcggcgacagcuacgccugcaagagaggcagcgugaagagcuucuucagcagacugaacuggcugcacgagagcgaguacaaguaccccgcccugaacgugaccaugcccaacaacgacaaguucgacaagcuguacaucuggggcgugcaccaccccagcaccgacagagagcagaccagccuguacaucagagccagcggcagagugaccgugagcaccaagagaagccagcagaccgugauccccaacaucggcagcagacccugggugagaggccugagcagcagaaucagcaucuacuggaccaucgugaagcccggcgacauccugcugaucaacagcaccggcaaccugaucgcccccagaggcuacuucaagaucagaaccggcaagagcagcaucaugagaagcgacgccaccaucggcaccugcagcagcgagugcaucacccccaacggcagcauccccaacgacaagcccuuccagaacgugaacagaaucaccuacggcgccugccccagauacgugaagcagaacacccugaagcuggccaccggcaugagaaacgugcccgagaagcagaccagaggcaucuucggcgccaucgccggcuucaucgagaacggcugggagggcaugguggacggcugguacggcuucagacaccagaacagcgagggcaccggccaggccgccgaccugaagagcacccaggccgccaucgaccagaucaacggcaagcugaacaagcugaucgagaagaccaacgagaaguuccaccagaucgagaaggaguucagcgagguggagggcagaauccaggaccuggagaaguacguggaggacaccaagaucgaccuguggagcuacaacgccgagcugcugguggcccuggagaaccagcacaccaucgaccugaccgacagcgagaugaacaagcuguucgagaagaccagaaagcagcugagagagaacgccgaggacaugggcaacggcugcuucaagaucuaccacaagugcgacaacgccugcaucggcagcaucagaaacggcaccuacgaccacgacguguacagagacgaggcccugaacaacagauuccagaucaagggcguggagcugaagagcggcuacaaggacuggauccuguggaucagcuucgccaucagcugcuuccugcugugcguggugcugcugggcuucaucaugugggccugccagaagggcaacaucagaugcaacaucugcaucuga

SEQ ID NO: 168697 - RNA, 1701 nt, Artificial Sequence
  derived and/or modified CDS sequence (opt4) from hemagglutinin__InfluenzaA__AFH00054
augaagaccaucaucgcccugagcuacauccugugccugguguucgcccagaagcugcccggcaacgacaacagcaccgccacccugugccugggccaccacgccgugcccaacggcacccuggugaagaccaucaccaacgaccagaucgaggugaccaacgccaccgagcuggugcagagcagcagcaccggcagaaucugcgacagcccccacagaauccuggacggcaagaacugcacccugaucgacgcccugcugggcgacccccacugcgacggcuuccagaacaaggagugggaccuguucguggagagaagcaaggccuacagcaacugcuaccccuacgacgugcccgacuacgccagccugagaagccugguggccagcagcggcacccuggaguucaucaacgaggacuucaacuggaccggcguggcccagaacggcgacagcuacgccugcaagagaggcagcgugaagagcuucuucagcagacugaacuggcugcacgagagcgaguacaaguaccccgcccugaacgugaccaugcccaacaacgacaaguucgacaagcuguacaucuggggcgugcaccaccccagcaccgacagagagcagaccagccuguacaucagagccagcggcagagugaccgugagcaccaagagaagccagcagaccgugauccccaacaucggcagcagacccugggugagaggccugagcagcagaaucagcaucuacuggaccaucgugaagcccggcgacauccugcugaucaacagcaccggcaaccugaucgcccccagaggcuacuucaagaucagaaccggcaagagcagcaucaugagaagcgacgcccccaucggcaccugcagcagcgagugcaucacccccaacggcagcauccccaacgacaagcccuuccagaacgugaacagaaucaccuacggcgccugccccagauacgugaagcagaacacccugaagcuggccaccggcaugagaaacgugcccgagaagcagaccagaggcaucuucggcgccaucgccggcuucaucgagaacggcugggagggcaugguggacggcugguacggcuucagacaccagaacagcgagggcaccggccaggccgccgaccugaagagcacccaggccgccaucgaccagaucaacggcaagcugaacagacugaucgagaagaccaacgagaaguuccaccagaucgagaaggaguucagcgagguggagggcagaauccaggaccuggagaaguacguggaggacaccaagaucgaccuguggagcuacaacgccgagcugcugguggcccuggagaaccagcacaccaucgaccugaccgacagcgagaugaacaagcuguucgagaagaccagaaagcagcugagagagaacgccgaggacaugggcaacggcugcuucaagaucuaccacaagugcgacaacgccugcaucggcagcaucagaaacggcaccuacgaccacgacguguacagagacgaggcccugaacaacagauuccacaucaagggcguggagcugaagagcggcuacaaggacuggauccuguggaucagcuucgccaucagcugcuuccugcugugcguggugcugcugggcuucaucaugugggccugccagaagggcaacaucagaugcaacaucugcaucuga

SEQ ID NO: 168698 - RNA, 1701 nt, Artificial Sequence
  derived and/or modified CDS sequence (opt4) from hemagglutinin__InfluenzaA__AFH00065
augaagaccaucaucgcccugagcuacauccugugccugguguucgcccagaagcugcccggcaacgacaacagcaccgccacccugugccugggccaccacgccgugcccaacggcacccuggugaagaccaucaccaacgaccagaucgaggugaccaacgccaccgagcuggugcagagcagcagcaccggcagaaucugcgacagcccccacagaauccuggacggcaagaacugcacccugaucgacgcccugcugggcgacccccacugcgacggcuuccagaacaaggagugggaccuguucguggagagaagcaaggccuacagcaacugcuaccccuacgacgugcccgacuacgccagccugagaagccugguggccagcagcggcacccuggaguucaucaacgaggacuucaacuggaccggcguggcccaggacggcggcagcuacgccugcaagagaggcagcgugaacagcuucuucagcagacugaacuggcugcacaagcuggaguacaaguaccccgcccugaacgugaccaugcccaacaacggcaaguucgacaagcuguacaucuggggcgugcaccaccccagcaccgacagcgaccagaccagccuguacgugagagccagcggcagagugaccgugagcaccaagagaagccagcagaccgugauccccaacaucggcagcagacccugggugagaggccagcccagcagaaucagcaucuacuggaccaucgugaagcccggcgacauccugcugaucaacagcaccggcaaccugaucgcccccagaggcuacuucaagaucagaaacggcaagagcagcaucaugagaagcgacgcccccaucggcaacugcagcagcgagugcaucacccccaacggcagcauccccaacgacaagcccuuccagaacgugaacagaaucaccuacggcgccugccccagauacgugaagcagaacacccugaagcuggccaccggcaugagaaacgugcccgagaagcagaccagaggcaucuucggcgccaucgccggcuucaucgagaacggcugggagggcaugguggacggcugguacggcuucagacaccagaacagcgagggcaccggccaggccgccgaccugaagagcacccaggccgccaucgaccagaucaacggcaagcugaacagacugaucgagaagaccaacgagaaguuccaccagaucgagaaggaguucagcgagguggagggcagaauccaggaccuggagaaguacguggaggacaccaagaucgaccuguggagcuacaacgccgagcugcugguggcccuggagaaccagcacaccaucgaccugaccgacagcgagaugaacaagcuguucgagagaaccagaaagcagcugagagagaacgccgaggacaugggcaacggcugcuucaagaucuaccacaagugcgacaacgccugcaucggcagcaucagaaacggcaccuacgaccacgacguguacagagacgaggcccugaacaacagauuccagaucaagggcguggagcugaagagcggcuacaaggacuggauccuguggaucagcuucgccaucagcugcuuccugcugugcguggugcugcugggcuucaucaugugggccugccagaagggcaacaucagaugcaacaucugcaucuga

SEQ ID NO: 168699 - RNA, 1701 nt, Artificial Sequence
  derived and/or modified CDS sequence (opt4) from hemagglutinin__InfluenzaA__AFH00076
augaagaccaucaucgcccugagcuacauccugugccugguguucgcccagaagcugcccggcaacgacaacagcaccgccacccugugccugggccaccacgccgugcccaacggcacccuggugaagaccaucaccaacgaccagaucgaggugaccaacgccaccgagcuggugcagagcagcagcaccggcaagaucugcgacagcccccacagaauccuggacggcaagaacugcacccugaucgacgcccugcugggcgacccccacugcgacgacuuccagaacaaggagugggaccuguucguggagagaagcaaggccuacagcaacugcuaccccuacgacgugcccgacuacgccagccugagaagccugguggccagcagcggcacccuggaguucaucaacgaggacuucaacuggaccggcguggcccagagcggcgacagcuacgccugcaagagaggcagcgugaagagcuucuucagcagacugaacuggcugcacgagagcgaguacaaguaccccgcccugaacgugaccaugcccaacaacgacaaguucgacaagcuguacaucuggggcgugcaccaccccagcaccgacagagagcagaccagccuguacaucagagccagcggcagagugaccgugagcaccaagagaagccagcagaccgugauccccaacaucggcagcagacccugggugagaggccugagcagcagaaucagcaucuacuggaccaucgugaagcccggcgacauccugcugaucaacagcaccggcaaccugaucgcccccagaggcuacuucaagaucagaaccggcaagagcagcaucaugagaagcgacgcccccaucggcaccugcaacagcgagugcaucacccccaacggcagcauccccaacgacaagcccuuccagaacgugaacagaaucaccuacggcgccugccccagauacgugaagcagaacacccugaagcuggccaccggcaugagaaacgugcccgagaagcagaccagaggcaucuucggcgccaucgccggcuucaucgagaacggcugggagggcaugguggacggcugguacggcuucagacaccagaacagcgagggcaccggccaggccgccgaccugaagagcacccaggccgccaucgaccagaucaacggcaagcugaacagacugaucgagaagaccaacgagaaguuccaccagaucgagaaggaguucagcgagguggagggcagaauccaggaccuggagaaguacguggaggacaccaagaucgaccuguggagcuacaacgccgagcugcugguggcccuggagaaccagcacaccaucgaccugaccgacagcgagaugaacaagcuguucgagaagaccagaaagcagcugagagagaacgccgaggacaugggcaacggcugcuucaagaucuaccacaagugcgacaacgccugcaucggcagcaucagaaacggcaccuacgaccacgacguguacagagacgaggcccugaacaacagauuccagaucaagggcguggagcugaagagcggcuacaaggacuggauccuguggaucagcuucgccaucagcugcuuccugcugugcguggugcugcugggcuucaucaugugggccugccagaagggcaacaucagaugcaacaucugcaucuga

SEQ ID NO: 168700 - RNA, 1701 nt, Artificial Sequence
  derived and/or modified CDS sequence (opt4) from hemagglutinin__InfluenzaA__AFH00087
augaagaccaucaucgcccugagcuacauccugugccugguguucgcccagaagcugcccggcaacgacaacagcaccgccacccugugccugggccaccacgccgugcccaacggcacccuggugaagaccaucaccaacgaccagaucgaggugaccaacgccaccgagcuggugcagagcagcagcaccggcagaaucugcgacagcccccacagaauccuggacggcaagaacugcacccugaucgacgcccugcugggcgacccccacugcgacggcuuccagaacaaggagugggaccuguucguggagagaagcgaggccuacagcagcugcuaccccuacgacgugcccgacuacgccagccugagaagccugguggccagcagcggcacccuggaguucaucaacgaggacuucaacuggaccggcguggcccaggacggcaagagcuacgccugcaagagaggcagcgugaacagcuucuucagcagacugaacuggcugcacaagcuggaguacaaguaccccgcccugaacgugaccaugcccaacaacggcaaguucgacaagcuguacaucuggggcgugcaccaccccagcaccgacagcgaccagaccagccuguacgugagagccagcggcagagugaccgugagcaccaagagaagccagcagaccgugauccccaacaucggcagcagacccugggugagaggccagagcagcagaaucggcaucuacuggaccaucgugaagcccggcgacauccugcugaucaacagcaccggcaaccugaucgcccccagaggcuacuucaagaucagaaacggcaagagcagcaucaugagaagcgacgcccccaucggcaacugcagcagcgagugcaucacccccaacggcagcauccccaacgacaagcccuuccagaacgugaacaagaucaccuacggcgccugccccagauacgugaagcagaacacccugaagcuggccaccggcaugagaaacgugcccgagaagcagaccagaggcaucuucggcgccaucgccggcuucaucgagaacggcugggagggcaugguggacggcugguacggcuucagacaccagaacagcgagggcaccggccaggccgccgaccugaagagcacccaggccgccaucgaccagaucaacggcaagcugaacagacugaucgagaagaccaacgagaaguuccaccagaucgagaaggaguucagcgagguggagggcagaauccaggaccuggagaaguacguggaggacaccaagaucgaccuguggagcuacaacgccgagcugcugguggcccuggagaaccagcacaccaucgaccugaccgacagcgagaugaacaagcuguucgagagaaccagaaagcagcugagagagaacgccgaggacaugggcaacggcugcuucaagaucuaccacaagugcgacaacgccugcaucggcagcaucagaaacggcaccuacgaccacgacguguacagagacgaggcccugaacaacagauuccagaucaagggcguggagcugaagagcggcuacaaggacuggauccuguggaucagcuucgccaucagcugcuuccugcugugcguggugcugcugggcuucaucaugugggccugccagaagggcaacaucagaugcaacaucugcaucuga

SEQ ID NO: 168701 - RNA, 1701 nt, Artificial Sequence
  derived and/or modified CDS sequence (opt4) from hemagglutinin__InfluenzaA__AFH00098
augaagaccaucaucgcccugagcuacauccugugccugguguucgcccagaagcugcccggcaacgacaacagcaccgccacccugugccugggccaccacgccgugcccaacggcacccuggugaagaccaucaccaacgaccagaucgaggugaccaacgccaccgagcuggugcagagcagcagcaccggcagaaucugcgacagcccccacagaauccuggacggcaagaacugcacccugaucgacgcccugcugggcgacccccacugcgacggcuuccagaacaaggagugggaccuguucguggagagaagcaaggccuacagcaacugcuaccccuacgacgugcccgacuacgccagccugagaagccugguggccagcagcggcacccuggaguucaucaacgaggacuucaacuggaccggcguggcccaggacggcggcagcuacgccugcaagagaggcagcgugaacagcuucuucagcagacugaacuggcugcacaagcuggaguacaaguaccccgcccugaacgugaccaugcccaacaacggcaaguucgacaagcuguacaucuggggcgugcaccaccccagcaccgacagcgaccagaccagccuguacgugagagccagcggcagagugaccgugagcaccaagagaagccagcagaccgugauccccaacaucggcagcagacccugggugagaggccugcccagcagaaucagcaucuacuggaccaucgugaagcccggcgacauccugcugaucaacagcaccggcaaccugaucgcccccagaggcuacuucaagaucagaaacggcaagagcagcaucaugagaagcgacgcccccaucggcaacugcagcagcgagugcaucacccccaacggcagcauccccaacgacaagcccuuccagaacgugaacagaaucaccuacggcgccugccccagauacgugaagcagaacacccugaagcuggccaccggcaugagaaacgugcccgagaagcagaccagaggcaucuucggcgccaucgccggcuucaucgagaacggcugggagggcaugguggacggcugguacggcuucagacaccagaacagcgagggcaccggccaggccgccgaccugaagagcacccaggccgccaucgaccagaucaacggcaagcugaacagacugaucgagaagaccaacgagaaguuccaccagaucgagaaggaguucagcgagguggagggcagaauccaggaccuggagaaguacguggaggacaccaagaucgaccuguggagcuacaacgccgagcugcugguggcccuggagaaccagcacaccaucgaccugaccgacagcgagaugaacaagcuguucgagagaaccagaaagcagcugagagagaacgccgaggacaugggcaacggcugcuucaagaucuaccacaagugcgacaacgccugcaucggcagcaucagaaacggcaccuacgaccacgacguguacagagacgaggcccugaacaacagauuccagaucaagggcguggagcugaagagcggcuacaaggacuggauccuguggaucagcuucgccaucagcugcuuccugcugugcguggugcugcugggcuucaucaugugggccugccagaagggcaacaucagaugcaacaucugcaucuga

SEQ ID NO: 168702 - RNA, 1701 nt, Artificial Sequence
  derived and/or modified CDS sequence (opt4) from hemagglutinin__InfluenzaA__AFH00109
augaagaccaucaucgcccugagcuacauccugugccugguguucgcccagaagcugcccggcaacgacaacagcaccgccacccugugccugggccaccacgccgugcccaacggcacccuggugaagaccaucaccaacgaccagaucgaggugaccaacgccaccgagcuggugcagagcagcagcaccggcagaaucugcgacagcccccacagaauccuggacggcaagaacugcacccugaucgacgcccugcugggcgacccccacugcgacggcuuccagaacaaggagugggaccuguucguggagagaagcaaggccuacagcaacugcuaccccuacgacgugcccgacuacgccagccugagaagccugguggccagcagcggcacccuggaguucaucaacgaggacuucaacuggaccggcguggcccaggacggcaagagcuacaccugcaagagaggcagcgugaacagcuucuucagcagacugaacuggcugcacaagcuggaguacaaguaccccgcccugaacgugaccaugcccaacaacggcaaguucgacaagcuguacaucuggggcgugcaccaccccagcaccgacagcgaccagaccagccuguacgugagagccagcggcagagugaccgugagcaccaagagaagccagcagaccgugauccccaacaucggcuucagacccugggugagaggccugagcagcagaaucagcaucuacuggaccaucgugaagcccggcgacauccugcugaucaacagcaccggcaaccugaucgcccccagaggcuacuucaagaucagaaacggcaagagcagcaucaugagaagcgacgcccccaucggcaacugcagcagcgagugcaucacccccaacggcagcauccccaacgacaagcccuuccagaacgugaacagaaucaccuacggcgccugccccagauacgugaagcagaacacccugaagcuggccaccggcaugagaaacgugcccgagaagcagaccagaggcaucuucggcgccaucgccggcuucaucgagaacggcugggagggcaugguggacggcugguacggcuucagacaccagaacagcgagggcaccggccaggccgccgaccugaagagcacccaggccgccaucgaccagaucaacggcaagcugaacagacugaucgagaagaccaacgagaaguuccaccagaucgagaaggaguucagcgagguggagggcagaauccaggaccuggagaaguacguggaggacaccaagaucgaccuguggagcuacaacgccggccugcugguggcccuggagaaccagcacaccaucgaccugaccgacagcgagaugaacaagcuguucgagagaaccagaaagcagcugagagagaacgccgaggacaugggcaacggcugcuucaagaucuaccacaagugcgacaacgccugcaucggcagcaucagaaacggcaccuacgaccacgacguguacagagacgaggcccugaacaacagauuccagaucaagggcguggagcugaagagcggcuacaaggacuggauccuguggaucagcuucgccaucagcugcuuccugcugugcguggugcugcugggcuucaucaugugggccugccagaagggcaacaucagaugcaacaucugcaucuga

SEQ ID NO: 168703 - RNA, 1701 nt, Artificial Sequence
  derived and/or modified CDS sequence (opt4) from hemagglutinin__InfluenzaA__AFH00120
augaagaccaucaucgcccugagcuacauccugugccugguguucgcccagaagcugcccggcaacgacaacagcaccgccacccugugccugggccaccacgccgugcccaacggcacccuggugaagaccaucaccaacgaccagaucgaggugaccaacgccaccgagcuggugcagagcagcagcaccggcagaaucugcgacagcccccacagaauccuggacggcaagaacugcacccugaucgacgcccugcugggcgacccccacugcgacggcuuccagaacaaggagugggaccuguucguggagagaagcaaggccuacagcaacugcuaccccuacgacgugcccgacuacgccagccugagaagccugguggccagcagcggcacccuggaguucaucaacgaggacuucaacuggaccggcguggcccaggacggcaagagcuacgccugcaagagaggcagcgugaacagcuucuucagcagacugaacuggcugcacaagcuggaguacaaguaccccgcccugaacgugaccaugcccaacaacggcaaguucgacaagcuguacaucuggggcgugcaccaccccagcaccgacagcgaccagaccagccuguacgugagagccagcggcagagugaccgugagcaccaagagaagccagcagaccgugauccccaacaucggcuucagacccugggugagaggccugagcagcagaaucagcaucuacuggaccaucgugaagcccggcgacauccugcugaucaacagcaccggcaaccugaucgcccccagaggcuacuucaagaucagaaacggcaagagcagcaucaugagaagcgacgcccccaucggcaacugcagcagcgagugcaucacccccaacggcagcauccccaacgacaagcccuuccagaacgugaacagaaucaccuacggcgccugccccagauacgugaagcagaacacccugaagcuggccaccggcaugagaaacgugcccgagaagcagaccagaggcaucuucggcgccaucgccggcuucaucgagaacggcugggagggcaugguggacggcugguacggcuucagacaccagaacagcgagggcaccggccaggccgccgaccugaagagcacccaggccgccaucgaccagaucaacggcaagcugaacagacugaucgagaagaccaacgagaaguuccaccagaucgagaaggaguucagcgagguggagggcagaauccaggaccuggagaaguacguggaggacaccaagaucgaccuguggagcuacaacgccggccugcugguggcccuggagaaccagcacaccaucgaccugaccgacagcgagaugaacaagcuguucgagagaaccagaaagcagcugagagagaacgccgaggacaugggcaacggcugcuucaagaucuaccacaagugcgacaacgccugcaucggcagcaucagaaacggcaccuacgaccacgacguguacagagacgaggcccugaacaacagauuccagaucaagggcguggagcugaagagcggcuacaaggacuggauccuguggaucagcuucgccaucagcugcuuccugcugugcguggugcugcugggcuucaccaugugggccugccagaagggcaacaucagaugcaacaucugcaucuga

SEQ ID NO: 168704 - RNA, 1701 nt, Artificial Sequence; identical to SEQ ID NO: 168558
  derived and/or modified CDS sequence (opt4) from hemagglutinin__InfluenzaA__AFH00131

SEQ ID NO: 168705 - RNA, 1701 nt, Artificial Sequence
  derived and/or modified CDS sequence (opt4) from hemagglutinin__InfluenzaA__AFH00153
augaagaccaucaucgcccugagcuacauccugugccugguguucgcccagaagcugcccggcaacgacaacagcaccgccacccugugccugggccaccacgccgugcccaacggcacccuggugaagaccaucaccaacgaccagaucgaggugaccaacgccaccgagcuggugcagagcagcagcaccggcagaaucugcgacagcccccacagaauccuggacggcaagaacugcacccugaucgacgcccugcugggcgacccccacugcgacggcuuccagaacaaggagugggaccuguucguggagagaagcaaggccuacagcaacugcuaccccuacgacgugcccgacuacgccagccugagaagccugguggccagcagcggcacccuggaguucaucaacgaggacuucaacuggaccggcguggcccaggacggcaagagcuacgccugcaagagaggcagcgugaacagcuucuucagcagacugaacuggcugcacaagcuggaguacaaguaccccgcccugaacgugaccaugcccaacaacggcaaguucgacaagcuguacaucuggggcgugcaccaccccagcaccgacagcgaccagaccagccuguacaucagagccagcggcagagugaccgugagcaccaagagaagccagcagaccgugauccccaacaucggcagcagacccugggugagaggccugagcagcagaaucagcaucuacuggaccaucgugaagcccggcgacauccugcugaucaacagcaccggcaaccugaucgcccccagaggcuacuucaagaucagaaacggcaagagcagcaucaugagaagcgacgcccccaucggcaacugcagcagcgagugcaucacccccaacggcagcauccccaacgacaagcccuuccagaacgugaacagaaucaccuacggcgccugccccagauacgugaagcagaacacccugaagcuggccaccggcaugagaaacgugcccgagaagcagaccagaggcaucuucggcgccaucgccggcuucaucgagaacggcugggagggcaugguggacggcugguacggcuucagacaccagaacagcgagggcaccggccaggccgccgaccugaagagcacccaggccgccaucgaccagaucaacggcaagcugaacagacugaucgagaagaccaacgagaaguuccaccagaucgagaaggaguucagcgagguggagggcagaauccaggaccuggagaaguacguggaggacaccaagaucgaccuguggagcuacaacgccgagcugcugguggcccuggagaaccagcacaccaucgaccugaccgacagcgagaugaacaagcuguucgagagaaccagaaagcagcugagagagaacgccgaggacaugggcaacggcugcuucaagaucuaccacaagugcgacaacgccugcaucggcagcaucagaaacggcaccuacgaccacgacguguacagagacgaggcccugaacaacagauuccagaucaagggcguggagcugaagagcggcuacaaggacuggauccuguggaucagcuucgccaucagcugcuuccugcugugcguggugcugcugggcuucaucaugugggccugccagaagggcaacaucagaugcaacaucugcaucuga

SEQ ID NO: 168706 - RNA, 1701 nt, Artificial Sequence
  derived and/or modified CDS sequence (opt4) from hemagglutinin__InfluenzaA__AFH00164
augaagaccaucaucgcccugagcuacauccugugccugguguucgcccagaagcugcccggcaacgacaacagcaccgccacccugugccugggccaccacgccgugcccaacggcacccuggugaagaccaucaccaacgaccagaucgaggugaccaacgccaccgagcuggugcagagcagcagcaccggcagaaucugcgacagcccccacagaauccuggacggcaagaacugcacccugauggacgcccugcugggcgacccccacugcgacggcuuccagaacaaggagugggaccuguucguggagagaagcaaggccuacagcaacugcuaccccuacgacgugcccgacuacgccagccugagaagccugguggccagcagcggcacccuggaguucaucaacgaggacuucaacuggaccggcguggcccagaacggcgacagcuacgccugcaagagaggcagcgugaagagcuucuucagcagacugaacuggcugcacgagagcgaguacaaguaccccgcccugaacgugaccaugcccaacaacgacaaguucgacaagcuguacaucuggggcgugcaccaccccagcaccgacagagagcagaccagccuguacaucagagccagcggcagagugaccgugagcaccaagagaagccagcagaccgugauccccaacaucggcagcagacccugggugagaggccugagcagcagaaucagcaucuacuggaccaucgugaagcccggcgacauccugcugaucaacagcaccggcaaccugaucgcccccagaggcuacuucaagaucagaaccggcaagagcagcaucaugagaagcgacgcccccaucggcaccugcagcagcgagugcaucacccccaacggcagcauccccaacgacaagcccuuccagaacgugaacagaaucaccuacggcgccugccccagauacgugaagcagaacacccugaagcuggccaccggcaugagaaacgugcccgagaagcagaccagaggcaucuucggcgccaucgccggcuucaucgagaacggcugggagggcaugguggacggcugguacggcuucagacaccagaacagcgagggcaccggccaggccgccgaccugaagagcacccaggccgccaucgaccagaucaacggcaagcugaacagacugaucgagaagaccaacgagaaguuccaccagaucgagaaggaguucagcgagguggagggcagaauccaggaccuggagaaguacguggaggacaccaagaucgaccuguggagcuacaacgccgagcugcugguggcccuggagaaccagcacaccaucgaccugaccgacagcgagaugaacaagcuguucgagaagaccagaaagcagcugagagagaacgccgaggacaugggcaacggcugcuucaagaucuaccacaagugcgacaacgccugcaucggcagcaucagaaacggcaccuacgaccacgacguguacagagacgaggcccugaacaacagauuccagaucaagggcguggagcugaagagcggcuacaaggacuggauccuguggaucagcuucgccaucagcugcuuccugcugugcguggugcugcugggcuucaucaugugggccugccagaagggcaacaucagaugcaacaucugcaucuga

SEQ ID NO: 168707 - RNA, 1701 nt, Artificial Sequence
  derived and/or modified CDS sequence (opt4) from hemagglutinin__InfluenzaA__AFH00175
augaagaccaucaucgcccugagcuacauccugugccugguguucgcccagaagcugcccggcaacgacaacagcaccgccacccugugccugggccaccacgccgugcccaacggcacccuggugaagaccaucaccaacgaccagaucgaggugaccaacgccaccgagcuggugcagagcagcagcaccggcagaaucugcgacagcccccacagaauccuggacggcaagaacugcacccugaucgacgcccugcugggcgacccccacugcgacggcuuccagaacaaggagugggaccuguucguggagagaagcaaggccuacagcaacugcuaccccuacgacgugcccgacuacgccagccugagaagccugguggccagcagcggcacccuggaguucaucaacgaggacuucaacuggaccggcguggcccaggacggcaagagcuacgccugcaagagaggcagcgugaagagcuucuucagcagacugaacuggcugcacaagcuggaguacaaguaccccgcccugaacgugaccaugcccaacaacggcaaguucgacaagcuguacaucuggggcgugcaccaccccagcaccgacagcgaccagaccagccuguacgugagagccagcggcagagugaccgugagcaccaagaagagccagcagaccgugauccccaacaucggcagcagacccugggugagaggccagagcagcagaaucagcaucuacuggaccaucgugaagcccggcgacauccugcugaucaacagcaccggcaaccugaucgcccccagaggcuacuucaagaucagaaacggcaagagcagcaucaugagaagcgacgcccccaucggcaacugcagcagcgagugcaucacccccaacggcagcauccccaacgacaagcccuuccagaacgugaacagaaucaccuacggcgccugccccagauacgugaagcagaacacccugaagcuggccaccggcaugagaaacgugcccgagaagcagaccagaggcaucuucggcgccaucgccggcuucaucgagaacggcugggagggcaugguggacggcugguacggcuucagacaccagaacagcgagggcaccggccaggccgccgaccugaagagcacccaggccgccaucgaccagaucaacggcaagcugaacagacugaucgagaagaccaacgagaaguuccaccagaucgagaaggaguucagcgagguggagggcagaauccaggaccuggagaaguacguggaggacaccaagaucgaccuguggagcuacaacgccgagcugcugguggcccuggagaaccagcacaccaucgaccugaccgacagcgagaugaacaagcuguucgagagaaccagaaagcagcugagagagaacgccgaggacaugggcaacggcugcuucaagaucuaccacaagugcgacaacgccugcaucggcagcaucagaaacggcaccuacgaccacgacguguacagagacgaggcccugaacaacagauuccagaucaagggcguggagcugaagagcggcuacaaggacuggauccuguggaucagcuucgccaucagcugcuuccugcugugcguggugcugcugggcuucaucaugugggccugccagaagggcaacaucagaugcaacaucugcaucuga

SEQ ID NO: 168708 - RNA, 1701 nt, Artificial Sequence
  derived and/or modified CDS sequence (opt4) from hemagglutinin__InfluenzaA__AFH00186
augaagaccaucaucgcccugagccacauccugugccugguguucgcccagaagcugcccggcaacgacaacagcaccgccacccugugccugggccaccacgccgugcccaacggcacccuggugaagaccaucaccaacgaccagaucgaggugaccaacgccaccgagcuggugcagagcagcagcaccggcagaaucugcgacagcccccacagaauccuggacggcaagaacugcacccugaucgacgcccugcugggcgacccccacugcgacggcuuccagaacaaggagugggaccuguucguggagagaagcaaggccuacagcaacugcuaccccuacgacgugcccgacuacgccagccugagaagccugguggccagcagcggcacccuggaguucaucaacgaggacuucaacuggaccggcguggcccaggacggcggcagcuacgccugcaagagaggcagcgugaacagcuucuucagcagacugaacuggcugcacaagcuggaguacaaguaccccgcccugaacgugaccaugcccaacaacggcaaguucgacaagcuguacaucuggggcgugcaccaccccagcaccgacagcgaccagaccagccuguacgugagagccagcggcagagugaccgugagcaccaagagaagccagcagaccgugacccccaacaucggcagcagacccugggugagaggccagagcagcagaaucagcaucuacuggaccaucgugaagcccggcgacauccugcugaucagcagcaccggcaaccugaucgcccccagaggcuacuucaagaucagaaacggcaagagcagcaucaugagaagcgacgugcccaucggcaacugcagcagcgagugcaucacccccaacggcagcauccccaacgacaagcccuuccagaacgugaacagaaucaccuacggcgccugccccagauacgugaagcagaacacccugaagcuggccaccggcaugagaaacgugcccgagaagcagaccagaggcaucuucggcgccaucgccggcuucaucgagaacggcugggagggcaugguggacggcugguacggcuucagacaccagaacagcgagggcaccggccaggccgccgaccugaagagcacccaggccgccaucgaccagaucaacggcaagcugaacagacugaucgagaagaccaacgagaaguuccaccagaucgagaaggaguucagcgagguggagggcagaauccaggaccuggagaaguacguggaggacaccaagaucgaccuguggagcuacaacgccgagcugaucguggcccuggagaaccagcacaccaucgaccugaccgacagcgagaugaacaagcuguucgagaagaccagaaagcagcugagagagaacgccgaggacaugggcaacggcugcuucaagaucuaccacaagugcgacaacgccugcaucggcagcaucagaaacggcaccuacgaccacgacguguacagagacgaggcccugaacaacagauuccagaucaagggcguggagcugaagagcggcuacaaggacuggauccuguggaucagcuucgccaucagcugcuuccugcugugcguggugcugcugggcuucaucaugugggccugccagaagggcaacaucagaugcaacaucugcaucuga

SEQ ID NO: 168709 - RNA, 1701 nt, Artificial Sequence
  derived and/or modified CDS sequence (opt4) from hemagglutinin__InfluenzaA__AFH00197
augaagaccaucaucgcccugagcuacauccugugccugguguucgcccagaagcugcccggcaacgacaacagcaccgccacccugugccugggccaccacgccgugcccaacggcacccuggugaagaccaucaccaacgaccagaucgaggugaccaacgccaccgagcuggugcagagcagcagcaccggcagaaucugcgacagcccccacagaauccuggacggcaagaacugcacccugaucgacgcccugcugggcgacccccacugcgacggcuuccagaacaaggagugggaccuguucguggagagaagcaaggccuacagcaacugcuaccccuacgacgugcccgacuacgccagccugagaagccugguggccagcagcggcacccuggaguucaucaacgaggacuucaacuggaccggcguggcccaggacggcggcagcuacaccugcaagagaggcagcgugaacagcuucuucagcagacugaacuggcugcacaagcuggaguacaaguaccccgcccugaacgugaccaugcccaacaacggcaaguucgacaagcuguacaucuggggcgugcaccaccccagcaccgacagcgaccagaccagccuguacgugagagccagcggcagagugaccgugagcaccaagaucagccagcagaccgugauccccaacaucggcagcagacccugggugagaggccugagcagcagaaucagcaucuacuggaccaucgugaagcccggcgacauccugcugaucaacagcaccggcaaccugaucgcccccagaggcuacuucaagaucagaaacggcaagagcagcaucaugagaagcgacgcccccaucggcaacugcagcagcgagugcaucacccccaacggcagcauccccaacgacaagcccuuccagaacgugaacagaaucaccuacggcgccugccccagauacgugaagcagaacacccugaagcuggccaccggcaugagaaacgugcccgagaagcagaccagaggcaucuucggcgccaucgccggcuucaucgagaacggcugggagggcaugguggacggcugguacggcuucagacaccagaacagcgagggcaccggccaggccgccgaccugaagagcacccaggccgccaucgaccagaucaacggcaagcugaacagacugaucgagaagaccaacgagaaguuccaccagaucgagaaggaguucagcgagguggagggcagaauccaggaccuggagaaguacguggaggacaccaagaucgaccuguggagcuacaacgccgagcugcugguggcccuggagaaccagcacaccaucgaccugaccgacagcgagaugaacaagcuguucgagagaaccagaaagcagcugagagagaacgccgaggacaugggcaacggcugcuucaagaucuaccacaagugcgacaacgccugcaucggcagcaucagaaacggcaccuacgaccacgacguguacagagacgaggcccugaacaacagauuccagaucaagggcguggagcugaagagcggcuacaaggacuggauccuguggaucagcuucgccaucagcugcuuccugcugugcguggugcugcugggcuucaucaugugggccugccagaagggcaacaucagaugcaacaucugcaucuga

SEQ ID NO: 168710 - RNA, 1701 nt, Artificial Sequence
  derived and/or modified CDS sequence (opt4) from hemagglutinin__InfluenzaA__AFH00208
augaagaccaucaucgcccugagcuacauccugugccugguguucgcccagaagcugcccggcaacgacaacagcaccgccacccugugccugggccaccacgccgugcccaacggcacccuggugaagaccaucaccaacgaccagaucgaggugaccaacgccaccgagcuggugcagagcagcagcaccggcagaaucugcgacagcccccacagaauccuggacggcaagaacugcacccugaucgacgcccugcugggcgacccccacugcgacggcuuccagaacaaggagugggaccuguucguggagagaagcaaggccuacagcaacugcuaccccuacgacgugcccgacuacgccagccugagaagccugguggccagcagcggcacccuggaguucaucaacgaggacuucaacuggaccggcguggcccagaacggcgacagcuacgccugcaagagaggcagcgugaagagcuucuucagcagacugaacuggcugcacgagagcgaguacaaguaccccgcccugaacgugaccaugcccaacaacgacaaguucgacaagcuguacaucuggggcgugcaccaccccagcaccgacagagagcagaccagccuguacaucagagccagcggcagagugaccgugagcaccaagagaagccagcagaccgugauccccaacaucggcagcagacccugggugagaggccugagcagcagaaucagcaucuacuggaccaucgugaagcccggcgacauccugcugaucaacagcaccggcaaccugaucgcccccagaggcuacuucaagaucagaaccggcaagagcagcgugaugagaagcgacgcccccaucggcaccugcagcagcgagugcaucacccccaacggcagcauccccaacgacaagcccuuccagaacgugaacagaaucaccuacggcgccugccccagauacgugaagcagaacacccugaagcuggccaccggcaugagaaacgugcccgagaagcagaccagaggcaucuucggcgccaucgccggcuucaucgagaacggcugggagggcaugguggacggcugguacggcuucagacaccagaacagcgagggcaccggccaggccgccgaccugaagagcacccaggccgccaucgaccagaucaacggcaagcugagcagacugaucgagaagaccaacgagaaguuccaccagaucgagaaggaguucagcgagguggagggcagaauccaggaccuggagaaguacguggaggacaccaagaucgaccuguggagcuacaacgccgagcugcugguggcccuggagaaccagcacaccaucgaccugaccgacagcgagaugaacaagcuguucgagaagaccagaaagcagcugagagagaacgccgaggacaugggcaacggcugcuucaagaucuaccacaagugcgacaacgccugcaucggcagcaucagaaacggcaccuacgaccacgacguguacagagacgaggcccugaacaacagauuccagaucaagggcguggagcugaagagcggcuacaaggacuggauccuguggaucagcuucgccaucagcugcuuccugcugugcguggugcugcugggcuucaucaugugggccugccagaagggcaacaucagaugcaacaucugcaucuga

SEQ ID NO: 168711 - RNA, 1701 nt, Artificial Sequence
  derived and/or modified CDS sequence (opt4) from hemagglutinin__InfluenzaA__AFH00219
augaagaccaucaucgcccugagcuacauccugugccugguguucgcccagaagcugcccggcaacgacaacagcaccgccacccugugccugggccaccacgccgugcccaacggcacccuggugaagaccaucaccaacgaccagaucgaggugaccaacgccaccgagcuggugcagagcagcagcaccggcagaaucugcgacagcccccacagaauccuggacggcaagaacugcacccugaucgacgcccugcugggcgaccccaacugcgacggcuuccagaacaaggagugggaccuguucguggagagaagcaaggccuacagcaacugcuaccccuacgacgugcccgacuacgccagccugagaagccugguggccagcagcggcacccuggaguucaccaacgaggacuucaacuggaccggcguggcccaggacggcggcagcuacgccugcaagagaggcagcgugaacagcuucuucagcagacugaacuggcugcacaagcuggaguacaaguaccccgcccugaacgugaccaugcccaacaacggcaaguucgacaagcuguacaucuggggcgugcaccaccccagcaccgacagcgaccagaccagccuguacgugagagccagcggcagagugaccgugagcaccaagagaagccagcagaccgugacccccaacaucggcagcagacccugggugagaggccugagcagcagaaucagcaucuacuggaccaucgugaagcccggcgacauccugcugaucaacagcaccggcaaccugaucgcccccagaggcuacuucaagaucagaaacggcaagagcagcaucaugagaagcgacgcccccaucggcaccugcagcagcgagugcaucacccccaacggcagcauccccaacgacaagcccuuccagaacgugaacagaaucaccuacggcgccugccccagauacgugaagcagaacacccugaagcuggccaccggcaugagaaacgugcccgagaagcagaccagaggcaucuucggcgccaucgccggcuucaucgagaacggcugggagggcaugguggacggcugguacggcuucagacaccagaacagcgagggcaccggccaggccgccgaccugaagagcacccaggccgccaucgaccagaucaacggcaagcugaacagacugaucgacaagaccaacgagaaguuccaccagaucgagaaggaguucagcgagguggagggcagaauccaggaccuggagaaguacguggaggacaccaagaucgaccuguggagcuacaacgccgagcugcugguggcccuggagaaccagcacaccaucgaccugaccgacagcgagaugaacaagcuguucgagaagaccagaaagcagcugagagagaacgccgaggacaugggcaacggcugcuucaagaucuaccacaagugcgacaacgccugcaucggcagcaucagaaacggcaccuacgaccacgacguguacagagacgaggcccugaacaacagauuccagaucaagggcguggagcugaagagcggcuacaaggacuggauccuguggaucagcuucgccaucagcugcuuccugcugugcguggugcugcugggcuucaucaugugggccugccagaagggcaacaucagaugcaacaucugcaucuga

SEQ ID NO: 168712 - RNA, 1701 nt, Artificial Sequence
  derived and/or modified CDS sequence (opt4) from hemagglutinin__InfluenzaA__AFH00230
augaagaccaucaucgcccugagcuacauccugugccugguguucgcccagaagcugcccggcaacgacaacagcaccgccacccugugccugggccaccacgccgugcccaacggcacccuggugaagaccaucaccaacgaccagaucgaggugaccaacgccaccgagcuggugcagagcagcagcaccggcagaaucugcgacagcccccacagaauccuggacggcaagaacugcacccugaucgacgcccugcugggcgacccccacugcgacggcuuccagaacaaggagugggaccuguucguggagagaagcaaggccuacagcaacugcuaccccuacgacgugcccgacuacgccagccugagaagccugguggccagcagcggcacccuggaguucaucaacgaggacuucaacuggaccggcguggcccaggacggcaagagcuacgccugcaagagaggcagcgugaagagcuucuucagcagacugaacuggcugcacaagcuggaguacaaguaccccgcccugaacgugaccaugcccaacaacggcaaguucgacaagcuguacaucuggggcgugcaccaccccagcaccaacagcgaccagaccagccuguacgugagagccagcggcagagugaccgugagcaccaagagaagccagcagaccgugauccccaacaucggcuucagacccugggugagaggccugagcagcagaaucagcaucuacuggaccaucgugaagcccggcgacauccugcugaucaacagcaccggcaaccugaucgcccccagaggcuacuucaagaucagaaacggcaagagcagcaucaugagaagcgacgcccccaucggcaacugcagcagcgagugcaucacccccaacggcagcauccccaacgacaagcccuuccagaacgugaacagaaucaccuacggcgccugccccagauacgugaagcagaacacccugaagcuggccaccggcaugagaaacgugcccgagaagcagaccagaggcaucuucggcgccaucgccggcuucaucgagaacggcugggagggcaugguggacggcugguacggcuucagacaccagaacagcgagggcaccggccaggccgccgaccugaagagcacccaggccgccaucgaccagaucaacggcaagcugaacagacugaucgagaagaccaacgagaaguuccaccagaucgagaaggaguucagcgagguggagggcagaauccaggaccuggagaaguacguggaggacaccaagaucgaccuguggagcuacaacgccggccugcugguggcccuggagaaccagcacaccaucgaccugaccgacagcgagaugaacaagcuguucgagagaaccagaaagcagcugagagagaacgccgaggacaugggcaacggcugcuucaagaucuaccacaagugcgacaacgccugcaucggcagcaucagaaacggcaccuacgaccacgacguguacagagacgaggcccugaacaacagauuccagaucaagggcguggagcugaagagcggcuacaaggacuggauccuguggaucagcuucgccaucagcugcuuccugcugugcguggugcugcugggcuucaucaugugggccugccagaagggcaacaucagaugcaacaucugcaucuga

SEQ ID NO: 168713 - RNA, 1701 nt, Artificial Sequence; identical to SEQ ID NO: 161084
  derived and/or modified CDS sequence (opt4) from hemagglutinin__InfluenzaA__AFH00241

SEQ ID NO: 168714 - RNA, 1701 nt, Artificial Sequence
  derived and/or modified CDS sequence (opt4) from hemagglutinin__InfluenzaA__AFH00252
augaagaccaucaucgcccugagcuacauccugugccugguguucgcccagaagcugcccggcaacgacaacagcaccgccacccugugccugggccaccacgccgugcccaacggcacccuggugaagaccaucaccaacgaccagaucgaggugaccaacgccaccgagcuggugcagagcagcagcaccggcagaaucugcgacagcccccacagaauccuggacggcaagaacugcacccugaucgacgcccugcugggcgacccccacugcgacgacuuccagaacaaggagugggaccuguucguggagagaagcaaggccuacagcaacugcuaccccuacgacgugcccgacuacgccagccugagaagccugguggccagcagcggcacccuggaguucaucaacgaggacuucaacuggaccggcguggcccagagcggcgacagcuacgccugcaagagaggcagcgugaagagcuucuucagcagacugaacuggcugcacgagagcgaguacaaguaccccgcccugaacgugaccaugcccaacaacgacaaguucgacaagcuguacaucuggggcgugcaccaccccagcaccgacagagagcagaccagccuguacaucagagccagcggcagagugaccgugagcaccaagagaagccagcagaccgugauccccaacaucggcagcagacccugggugagaggccugagcagcagaaucagcaucuacuggaccaucgugaagcccggcgacauccugcugaucaacagcaccggcaaccugaucgcccccagaggcuacuucaagaucagaaccggcaagagcagcaucaugagaagcgacgcccccaucggcaccugcagcagcgagugcaucacccccaacggcagcauccccaacgacaagcccuuccagaacgugaacagaaucaccuacggcgccugccccagauacgugaagcagaacacccugaagcuggccaccggcaugagaaacgugcccgagaagcagaccagaggcaucuucggcgccaucgccggcuucaucgagaacggcugggagggcaugguggacggcugguacggcuucagacaccagaacagcgagggcaccggccaggccgccgaccugaagagcacccaggccgccaucgaccagaucaacggcaagcugaacagacugaucgagaagaccaacgagaaguuccaccagaucgagaaggaguucagcgagguggagggcagaauccaggaccuggagaaguacguggaggacaccaagaucgaccuguggagcuacaacgccgagcugcugguggcccuggagaaccagcacaccaucgaccugaccgacagcgagaugaacaagcuguucgagaagaccagaaagcagcugagagagaacgccgaggacaugggcaacggcugcuucaagaucuaccacaagugcgacaacgccugcaucggcagcaucagaaacggcaccuacgaccacgacguguacagagacgaggcccugaacaacagauuccagaucaagggcguggagcugaagagcggcuacaaggacuggauccuguggaucagcuucgccaucagcugcuuccugcugugcguggugcugcugggcuucaucaugugggccugccagaagggcaacaucagaugcaacaucugcaucuga

SEQ ID NO: 168715 - RNA, 1701 nt, Artificial Sequence
  derived and/or modified CDS sequence (opt4) from hemagglutinin__InfluenzaA__AFH00263
augaagaccaucaucgcccugagcuacauccugcaccugguguucgcccagaagcugcccggcaacgacaacagcaccgccacccugugccugggccaccacgccgugcccaacggcacccuggugaagaccaucaccaacgaccagaucgaggugaccaacgccaccgagcuggugcagagcagcagcaccggcagaaucugcgacagcccccacagaauccuggacggcaagaacugcacccugaucgacgcccugcugggcgaccccaacugcgacggcuuccagaacaaggagugggaccuguucguggagagaagcaaggccuacagcaacugcuaccccuacgacgugcccgacuacgccagccugagaagccugguggccagcagcggcacccuggaguucaccaacgaggacuucaacuggaccggcguggcccaggacggcggcagcuacgccugcaagagaggcagcgugaacagcuucuucagcagacugaacuggcugcacaagcuggaguacaaguaccccgcccugaacgugaccaugcccaacaacggcaaguucgacaagcuguacaucuggggcgugcaccaccccagcaccgacagcgugcagaccagccuguacgugagagccagcggcaaggugaccgugagcaccaagagaagccagcagaccgugacccccaacaucggcagcaagcccugggugagaggccugagcagcagaaucagcaucuacuggaccaucgugaagcccggcgacauccugcugaucaacagcaccggcaaccugaucgcccccagaggcuacuucaagaucagaaacggcaagagcagcaucaugagaagcgacgcccccaucggcaccugcagcagcgagugcaucacccccaacggcagcauccccaacgacaagcccuuccagaacgugaacagaaucaccuacggcgccugccccagauacgugaagcagaacacccugaagcuggccaccggcaugagaaacgugcccgagaagcagaccagaggcaucuucggcgccaucgccggcuucaucgagaacggcugggagggcaugguggacggcugguacggcuucagacaccagaacagcgagggcaccggccaggccgccgaccugaagagcacccaggccgccaucgaccagaucaacggcaagcugaacagacugaucgagaagaccaacgagaaguuccaccagaucgagaaggaguucagcgagguggagggcagaauccaggaccuggagaaguacguggaggacaccaagaucgaccuguggagcuacaacgccgagcugcugguggcccuggagaaccagcacaccaucgaccugaccgacagcgagaugaacaagcuguucgagaagaccagaaagcagcugagagagaacgccgaggacaugggcaacggcugcuucaagaucuaccacaagugcgacaacgccugcaucggcagcaucagaaacggcaccuacgaccacgacguguacagagacgaggcccugaacaacagauuccagaucaagggcguggagcugaagagcggcuacaaggacuggauccuguggaucagcuucgccaucagcugcuuccugcugugcguggugcugcugggcuucaucaugugggccugccagaagggcaacaucagaugcaacaucugcaucuga

SEQ ID NO: 168716 - RNA, 1701 nt, Artificial Sequence
  derived and/or modified CDS sequence (opt4) from hemagglutinin__InfluenzaA__AFH00274
augaagaccaucaucgcccugagcuacauccugugccugguguucgcccagaagcugcccggcaacgacaacagcaccgccacccugugccugggccaccacgccgugcccaacggcacccuggugaagaccaucaccaacgaccagaucgaggugaccaacgccaccgagcuggugcagagcagcagcaccggcagaaucugcgacagcccccacagaauccuggacggcaagaacugcacccugaucgacgcccugcugggcgacccccacugcgacggcuuccagaacaaggagugggaccuguucguggagagaagcaaggccuacagcaacugcuaccccuacgacgugcccgacuacgccagccugagaagccugguggccagcagcggcacccuggaguucaucaacgaggacuucaacuggaccggcguggcccaggacggcaagagcuacgccugcaagagaggcagcgugaacagcuucuucagcagacugaacuggcugcacaagcuggaguacaaguaccccgcccugaacgugaccaugcccaacaacggcaaguucgacaagcuguacaucuggggcgugcaccaccccagcaccgacagcgaccagaccagccuguacgugagagccagcggcagagugaccgugagcaccaagagaagccagcagaccgugauccccaacaucggcuucagacccugggugagaggccugagcagcggcaucagcaucuacuggaccaucgugaagcccggcgacauccugcugaucaacagcaccggcaaccugaucgcccccagaggcuacuucaagaucagaaacggcaagagcagcaucaugagaagcgacgcccccaucggcaacugcagcagcgagugcaucacccccaacggcagcauccccaacgacaagcccuuccagaacgugaacagaaucaccuacggcgccugccccagauacgugaagcagaacacccugaagcuggccaccggcaugagaaacgugcccgagaagcagaccagaggcaucuucggcgccaucgccggcuucaucgagaacggcugggagggcaugguggacggcugguacggcuucagacaccagaacagcgagggcaccggccaggccgccgaccugaagagcacccaggccgccaucgaccagaucaacggcaagcugaacagacugaucgagaagaccaacgagaaguuccaccagaucgagaaggaguucagcgagguggagggcagaauccaggaccuggagaaguacguggaggacaccaagaucgaccuguggagcuacaacgccggccugcugguggcccuggagaaccagcacaccaucgaccugaccgacagcgagaugaacaagcuguucgagagaaccagaaagcagcugagagagaacgccgaggacaugggcaacggcugcuucaagaucuaccacaagugcgacaacgccugcaucggcagcaucagaaacggcaccuacgaccacgacguguacagagacgaggcccugaacaacagauuccagaucaagggcguggagcugaagagcggcuacaaggacuggauccuguggaucagcuucgccaucagcugcuuccugcugugcguggugcugcugggcuucaucaugugggccugccagaagggcaacaucagaugcaacaucugcaucuga

SEQ ID NO: 168717 - RNA, 1701 nt, Artificial Sequence
  derived and/or modified CDS sequence (opt4) from hemagglutinin__InfluenzaA__AFH00285
augaagaccaucaucgcccugagcuacauccugugccugguguucgcccagaagcugcccggcaacgacaacagcaccgccacccugugccugggccaccacgccgugcccaacggcacccuggugaagaccaucaccaacgaccagaucgaggugaccaacgccaccgagcuggugcagagcagcagcaccggcagaaucugcggcagcccccacagaauccuggacggcaagaacugcacccugaucgacgcccugcugggcgacccccacugcgacggcuuccagaacaaggagugggaccuguucguggagagaagcaaggccuacagcaacugcuaccccuacgacgugcccgacuacgccagccugagaagccugguggccagcagcggcacccuggaguucaucaacgaggacuucaacuggaccggcguggcccaggacggcggcagcuacgccugcaagagaggcagcgugaacagcuucuucagcagacugaacuggcugcacaagcuggaguacaaguaccccgcccugaacgugaccaugcccaacaacggcaaguucgacaagcuguacaucuggggcgugcaccaccccagcaccgacagcgaccagaccagccuguacgugagagccagcggcagagugaccgugagcaccaagagaagccagcagaccgugacccccaacaucggcagcagacccugggugagaggccagagcagcagaaucagcaucuacuggaccaucgugaagcccggcgacauccugcugaucaacagcaccggcaaccugaucgcccccagaggcuacuucaagaucagaaacggcaagagcagcaucaugagaagcgacgcccccaucggcaacugcagcagcgagugcaucacccccaacggcagcauccccaacgacaagcccuuccagaacgugaacagaaucaccuacggcgccugccccagauacgugaagcagaacacccugaagcuggccaccggcaugagaaacgugcccgagaagcagaccagaggcaucuucggcgccaucgccggcuucaucgagaacggcugggagggcaugguggacggcugguacggcuucagacaccagaacagcgagggcaccggccaggccgccgaccugaagagcacccaggccgccaucgaccagaucaacggcaagcugaacagacugaucgagaagaccaacgagaaguuccaccagaucgagaaggaguucagcgagguggagggcagaauccaggaccuggagaaguacguggaggacaccaagaucgaccuguggagcuacaacgccgagcugcugguggcccuggagaaccagcacaccaucgaccugaccgacagcgagaugaacaagcuguucgagaagaccagaaagcagcugagagagaacgccgaggacaugggcaacggcugcuucaagaucuaccacaagugcgacaacgccugcaucggcagcaucagaaacggcaccuacgaccacgacguguacagagacgaggcccugaacaacagauuccagaucaagggcguggagcugaagagcggcuacaaggacuggauccuguggaucagcuucgccaucagcugcuuccugcugugcguggugcugcugggcuucaucaugugggccugccagaagggcaacaucagaugcaacaucugcaucuga

SEQ ID NO: 168718 - RNA, 1701 nt, Artificial Sequence
  derived and/or modified CDS sequence (opt4) from hemagglutinin__InfluenzaA__AFH00296
augaagaccaucaucgcccugagcuacaucuucugccugguguucgcccagaagcugcccggcaacgacaacagcaccgccacccugugccugggccaccacgccgugcccaacggcacccuggugaagaccaucaccaacgaccagaucgaggugaccaacgccaccgagcuggugcagagcagcagcaccggcagaaucugcgacagcccccacagaauccuggacggcaagaacugcacccugaucgacgcccugcugggcgacccccacugcgacggcuuccagaacaaggagugggaccuguucguggagagaagcaaggccuacagcaacugcuaccccuacgacgugcccgacuacgccagccugagaagccugguggccagcagcggcacccuggaguucaucaacgaggacuucaacuggaccggcguggcccagagcggcggcagcuacgccugcaagagaggcagcgugaacagcuucuucagcagacugaacuggcugcacgagagcgaguacaaguaccccgcccugaacgugaccaugcccaacaacggcaaguucgacaagcuguacaucuggggcgugcaccaccccagcaccgacagagagcagaccaaccuguacgugagagccagcggcagagugaccgugagcaccaagagaagccagcagaccgugauccccaacaucggcagcagacccugggugagaggccugagcagcagaaucagcaucuacuggaccaucgugaagcccggcgacauccugcugaucaacagcaccggcaaccugaucgcccccagaggcuacuucaagaucagaaccggcaagagcagcaucaugagaagcgacgcccccaucggcaccugcagcagcgagugcaucacccccaacggcagcauccccaacgacaagcccuuccagaacgugaacagaaucaccuacggcgccugccccagauacgugaagcagaacacccugaagcuggccaccggcaugagaaacgugcccgagaagcagaccagaggcaucuucggcgccaucgccggcuucaucgagaacggcugggagggcaugguggacggcugguacggcuucagacaccagaacagcgagggcaccggccaggccgccgaccugaagagcacccaggccgccaucgaccagaucaacggcaagcugaacagacugaucgagaagaccaacgagaaguuccaccagaucgagaaggaguucagcgagguggagggcagaauccaggaccuggagaaguacguggaggacaccaagaucgaccuguggagcuacaacgccgagcugcugguggcccuggagaaccagcacaccaucgaccugaccgacagcgagaugaacaagcuguucgagaagaccagaaagcagcugagagagaacgccgaggacaugggcaacggcugcuucaagaucuaccacaagugcgacaacgccugcaucggcagcaucagaaacggcaccuacgaccacgacguguacagagacgaggcccugaacaacagauuccagaucaagggcguggagcugaagagcggcuacaaggacuggauccuguggaucagcuucgccaccagcugcuuccugcugugcguggugcugcugggcuucaucaugugggccugccagaagggcaacaucagaugcaacaucugcaucuga

SEQ ID NO: 168719 - RNA, 1701 nt, Artificial Sequence
  derived and/or modified CDS sequence (opt4) from hemagglutinin__InfluenzaA__AFH00307
augaagaccaucaucgcccugagcuacauccugugccugguguucgcccagaagcugcccggcaacgacaacagcaccgccacccugugccugggccaccacgccgugcccaacggcacccuggugaagaccaucaccaacgaccagaucgaggugaccaacgccaccgagcuggugcagagcagcagcaccggcagaaucugcgacagcccccacagaauccuggacggcaagaacugcacccugaucgacgcccugcugggcgacccccacugcgacggcuuccagaacaaggagugggaccuguucguggagagaagcaaggccuacagcaacugcuaccccuacgacgugcccgacuacgccagccugagaagccugguggccagcagcggcacccuggaguucaucaacgaggacuucaacuggaccggcguggcccaggacggcggcagcuacgccugcaagagaggcagcgugaacagcuucuucagcagacugaacuggcugcacaagcuggaguacaaguaccccgcccugaacgugaccaugcccaacaacggcaaguucgacaagcuguacaucuggggcgugcaccaccccagcaccgacagcgaccagaccagccuguacgugagagccagcggcagagugaccgugagcaccaagagaagccagcagaccgugacccccaacaucggcagcagacccugggugagaggccagagcagcagaaucagcaucuacuggaccaucgugaagcccggcgacauccugcugaucaacagcaccggcaaccugaucgcccccagaggcuacuucaagaucagaaacggcaagagcagcaucaugagaagcgacgcccccaucggcaacugcagcagcgagugcaucacccccaacggcagcauccccaacgacaagcccuuccagaacgugaacagaaucaccuacggcgccugccccagauacgugaagcagaacacccugaagcuggccaccggcaugagaaacgugcccgagaagcagaccagaggcaucuucggcgccaucgccggcuucaucgagaacggcugggagggcaugguggacggcugguacggcuucagacaccagaacagcgagggcaccggccaggccgccgaccugaagagcacccaggccgccaucgaccagaucaacggcaagcugaacagacugaucgagaagaccaacgagaaguuccaccagaucgagaaggaguucagcgagguggagggcagaauccaggaccuggagaaguacguggaggacaccaagaucgaccuguggagcuacaacgccgagcugcugguggcccuggagaaccagcacaccaucgaccugaccgacagcgagaugaacaagcuguucgagaagaccagaaagcagcugagagagaacgccgaggacaugggcaacggcugcuucaagaucuaccacaagugcgacaacgccugcaucggcagcaucagaaacggcaccuacgaccacgacguguacagagacgaggcccugaacaacagauuccagaucaagggcguggagcugaagagcggcuacaaggacuggauccuguggaucagcuucgccaucagcugcuuccugcugugcguggugcugcugggcuucaucaugugggccugccagaagggcaacaucagaugcaacaucugcaucuga

SEQ ID NO: 168720 - RNA, 1701 nt, Artificial Sequence; identical to SEQ ID NO: 168719
  derived and/or modified CDS sequence (opt4) from hemagglutinin__InfluenzaA__AFH00318

SEQ ID NO: 168721 - RNA, 1701 nt, Artificial Sequence
  derived and/or modified CDS sequence (opt4) from hemagglutinin__InfluenzaA__AFH00329
augaagaccaucaucgcccugagcuacauccugugccugguguucgcccagaagcugcccggcaacgacaacagcaccgccacccugugccugggccaccacgccgugcccaacggcacccuggugaagaccaucaccaacgaccagaucgaggugaccaacgccaccgagcuggugcagagcagcagcaccggcagaaucugcgacagccaccacagaauccuggacggcaagaacugcacccugaucgacgcccugcugggcgacccccacugcgacggcuuccagaacaaggagugggaccuguucguggagagaagcaaggccuacagcaacugcuaccccuacgacgugcccgacuacgccagccugagaagccugguggccagcagcggcacccuggaguucaucaacgaggacuucaacuggaccggcguggcccaggacggcaagagcuacgccugcaagagaggcagcgugaacagcuucuucagcagacugaacuggcugcacaagcuggaguacaaguaccccgcccugaacgugaccaugcccaacaacggcaaguucgacaagcuguacaucuggggcgugcaccaccccagcaccgacagcgaccagaccagcaucuacgugagagccagcggcagagugaccgugagcaccaagagaagccagcagaccgugauccccaacaucggcagcagacccugggugagaggcaucagcagcagaaucagcaucuacuggaccaucgugaagcccggcgacauccugcugaucaacagcaccggcaaccugaucgcccccagaggcuacuucaagaucagaaacggcaagagcagcaucaugagaagcgacgcccccaucggcaacugcaacagcgagugcaucacccccaacggcagcauccccaacgacaagcccuuccagaacgugaacagaaucaccuacggcgccugccccagauacgugaagcagaacacccugaagcuggccaccggcaugagaaacgugcccgagaagcagaccagaggcaucuucggcgccaucgccggcuucaucgagaacggcugggagggcaugguggacggcugguacggcuucagacaccagaacagcgagggcaccggccaggccgccgaccugaagagcacccaggccgccaucgaccagaucaacggcaagcugaacagacugaucgagaagaccaacgagaaguuccaccagaucgagaaggaguucagcgagguggagggcagaauccaggaccuggagaaguacguggaggacaccaagaucgaccuguggagcuacaacgccgagcugcugguggcccuggagaaccagcacaccaucgaccugaccgacagcgagaugaacaagcuguucgagagaaccagaaagcagcugagagagaacgccgaggacaugggcaacggcugcuucaagaucuaccacaagugcgacaacgccugcaucggcagcaucagaaacggcaccuacgaccacgacguguacagagacgaggcccugaacaacagauuccagaucaagggcguggagcugaagagcggcuacaaggacuggauccuguggaucagcuucgccaccagcugcuuccugcugugcguggugcugcugggcuucaucaugugggccugccagaagggcaacaucagaugcaacaucugcaucuga

SEQ ID NO: 168722 - RNA, 1701 nt, Artificial Sequence
  derived and/or modified CDS sequence (opt4) from hemagglutinin__InfluenzaA__AFH00340
augaagaccaucaucgcccugagcuacauccugugccugguguucgcccagaagcugcccggcaacgacaacagcaccgccacccugugccugggccaccacgccgugcccaacggcacccuggugaagaccaucaccaacgaccagaucgaggugaccaacgccaccgagcuggugcagagcagcagcaccggcagaaucugcgacagcccccacagaauccuggacggcaagaacugcacccugaucgacgcccugcugggcgacccccacugcgacggcuuccagaacaaggagugggaccuguucguggagagaagcaaggccuacagcaacugcuaccccuacgacgugcccgacuacgccagccugagaagccugguggccagcagcggcacccuggaguucaucaacgaggacuucaacuggaccggcguggcccaggacggcaagagcuacgccugcaagagaggcagcgugaacagcuucuucagcagacugaacuggcugcacaagcuggaguacaaguaccccgcccugaacgugaccaugcccaacaacggcaaguucgacaagcuguacaucuggggcgugcaccaccccagcaccgacagcgaccagaccagccuguacgugagagccagcggcagagugaccgugagcaccaagagaagccagcagaccgugauccccaacaucggcuucagacccugggugagaggccugagcagcagaaucagcaucuacuggaccaucgugaagcccggcgacauccugcugaucagcagcaccggcaaccugaucgcccccagaggcuacuucaagaucagaaacggcaagagcagcaucaugagaagcgacgcccccaucggcaacugcagcagcgagugcaucacccccaacggcagcauccccaacgacaagcccuuccagaacgugaacagaaucaccuacggcgccugccccagauacgugaagcagaacacccugaagcuggccaccggcaugagaaacauccccgagaagcagaccagaggcaucuucggcgccaucgccggcuucaucgagaacggcugggagggcaugguggacggcugguacggcuucagacaccagaacagcgagggcaccggccaggccgccgaccugaagagcacccaggccgccaucgaccagaucaacggcaagcugaacagacugaucgagaagaccaacgagaaguuccaccagaucgagaaggaguucagcgagguggagggcagaauccaggaccuggagaaguacguggaggacaccaagaucgaccuguggagcuacaacgccggccugcugguggcccuggagaaccagcacaccaucgaccugaccgacagcgagaugaacaagcuguucgagagaaccagaaagcagcugagagagaacgccgaggacaugggcaacggcugcuucaagaucuaccacaagugcgacaacgccugcaucggcagcaucagaaacggcaccuacgaccacgacguguacagagacgaggcccugaacaacagauuccagaucaagggcguggagcugaagagcggcuacaaggacuggauccuguggaucagcuucgccaucagcugcuuccugcugugcguggugcugcugggcuucaucaugugggccugccagaagggcaacaucagaugcaacaucugcaucuga

SEQ ID NO: 168723 - RNA, 1701 nt, Artificial Sequence
  derived and/or modified CDS sequence (opt4) from hemagglutinin__InfluenzaA__AFH00351
augaagaccaucaucgcccugagcuacauccugugccugguguucgcccagaagcugcccggcaacgacaacagcaccgccacccugugccugggccaccacgccgugcccaacggcacccuggugaagaccaucaccaacgaccagaucgaggugaccaacgccaccgagcuggugcagagcagcagcaccggcagaaucugcgacagcccccacagaauccuggacggcaagaacugcacccugaucgacgcccugcugggcgacccccacugcgacggcuuccagaacaaggagugggaccuguucguggagagaagcaaggccuacagcaacugcuaccccuacgacgugcccgacuacgccagccugagaagccugguggccagcagcggcacccuggaguucaccaaggagggcuucaacuggaccggcguggcccaggacggcaagagcuacgccugcaagagaggcagcgugaagagcuucuucagcagacugaacuggcugcacaagcuggaguacaaguaccccgcccugaacgugaccaugcccaacaacgacaaguucgacaagcuguacaucuggggcgugcaccaccccagcaccgacagcgaccagaccagccuguacgugcaggccagcggcagagugaccgugagcaccaagagaagccagcagaccgugauccccaacaucggcagcagacccugggugagaggcaucagcagcagaaucagcaucuacuggaccaucgugaagcccggcgacauccugcugaucaacagcaccggcaaccugaucgcccccagaggcuacuucaagaucagaaacggcaagagcagcaucaugagaagcgacgcccccaucggcaacugcaacagcgagugcaucacccccgacggcagcauccccaacgacaagcccuuccagaacgugaacagaaucaccuacggcgccugccccagauacgugaagcagaacacccugaagcuggccaccggcaugagaaacgugcccgagaagcagaccagaggcaucuucggcgccaucgccggcuucaucgagaacggcugggagggcaugguggacggcugguacggcuucagacaccagaacagcgagggcaccggccaggccgccgaccugaagagcacccaggccgccaucgaccagaucaacggcaagcugaacagacugaucgagaagaccaacaagaaguuccaccagaucgagaaggaguucagcgagguggagggcagaauccaggaccuggagaaguacguggaggacaccaagaucgaccuguggagcuacaacgccgagcugcugguggcccuggagaaccagcacaccaucgaccugaccgacagcgagaugaacaagcuguucgagagaaccagaaagcagcugagagagaacgccgaggacaugggcaacggcugcuucaagaucuaccacaagugcgacaacgccugcaucggcagcaucagaaacggcaccuacgaccacgacguguacagagacgaggcccugaacaacagauuccagaucaagggcguggagcugaagagcggcuacaaggacuggauccuguggaucagcuucgccaucagcugcuuccugcugugcguggugcugcugggcuucaucaugugggccugccagaagggcaacaucagaugcaacaucugcaucuga

SEQ ID NO: 168724 - RNA, 1701 nt, Artificial Sequence
  derived and/or modified CDS sequence (opt4) from hemagglutinin__InfluenzaA__AFH00362
augaagaccaucaucgcccugagcuacauccugugccugguguucgcccagaagcugcccggcaacgacaacagcaccgccacccugugccugggccaccacgccgugcccaacggcacccuggugaagaccaucaccaacgaccagaucgaggugaccaacgccaccgagcuggugcagagcagcagcaccggcagaaucugcgacagcccccacagaauccuggacggcaagaacugcacccugaucgacgcccugcugggcgacccccacugcgacggcuuccagaacaaggagugggaccuguucguggagagaagcaaggccuacagcaacugcuaccccuacgacgugcccgacuacgccagccugagaagccugguggccagcagcggcacccuggaguucaccaacgagggcuucaacuggaccggcguggcccaggacggcaagagcuacgccugcaagagaggcagcgugaagagcuucuucagcagacugaacuggcugcacaagcuggaguacaaguaccccgcccugaacgugaccaugcccaacaacgacaaguucgacaagcuguacaucuggggcgugcaccaccccagcaccgacagcgaccagaccagccuguacgugcaggccagcggcagagugaccgugagcaccaagagaagccagcagaccgugauccccaacaucggcagcagacccugggugagaggcaucagcagcagaaucagcaucuacuggaccaucgugaagcccggcgacauccugcugaucaacagcaccggcaaccugaucgcccccagaggcuacuucaagaucagaaacggcaagagcagcaucaugagaagcgacgcccccaucgacaacugcaacagcgagugcaucacccccaacggcagcauccccaacgacaagcccuuccagaacgugaacagaaucaccuacggcgccugccccagauacgugaagcagaacacccugaagcuggccaccggcaugagaaacgugcccgagaagcagaccagaggcaucuucggcgccaucgccggcuucaucgagaacggcugggagggcaugguggacggcugguacggcuucagacaccagaacagcgagggcaccggccaggccgccgaccugaagagcacccaggccgccaucgaccagaucaacggcaagcugaacagacugaucgagaagaccaacgagaaguuccaccagaucgagaaggaguucagcgagguggagggcagaauccaggaccuggagaaguacguggaggacaccaagaucgaccuguggagcuacaacgccgagcugcugguggcccuggagaaccagcacaccaucgaccugaccgacagcgagaugaacaagcuguucgagagaaccagaaagcagcugagagagaacgccgaggacaugggcaacggcugcuucaagaucuaccacaagugcgacaacgccugcaucggcagcaucagaaacggcaccuacgaccacgacguguacagagacgaggcccugaacaacagauuccagaucaagggcguggagcugaagagcggcuacaaggacuggauccuguggaucagcuucgccaccagcugcuuccugcugugcguggugcugcugggcuucaucaugugggccugccagaagggcaacaucagaugcaacaucugcaucuga

SEQ ID NO: 168725 - RNA, 1701 nt, Artificial Sequence
  derived and/or modified CDS sequence (opt4) from hemagglutinin__InfluenzaA__AFH00384
augaagaccaucaucgcccugagcuacauccugugccugguguucgcccagaagcugcccggcaacgacaacagcaccgccacccugugccugggccaccacgccgugcccaacggcacccuggugaagaccaucaccaacgaccagaucgaggugaccaacgccaccgagcuggugcagagcagcagcaccggcagaaucugcgacagcccccacagaauccuggacggcaagaacugcacccugaucgacgcccugcugggcgacccccacugcgacggcuuccagaacaaggagugggaccuguucguggagagaagcaaggccuacagcaacugcuaccccuacgacgugcccgacuacgccagccugagaagccugguggccagcagcggcacccuggaguucaccaaggagggcuucaacuggaccggcguggcccaggacggcaagagcuacgccugcaagagaggcagcgugaacagcuucuucagcagacugaacuggcugcacaagcuggaguacaaguaccccgcccugaacgugaccaugcccaacaacgacaaguucgacaagcuguacaucuggggcgugcaccaccccagcaccgacagcgaccagaccagccuguacgugcaggccagcggcagagugaccgugagcaccaagagaagccagcagaccgugauccccaacaucggcagcagacccugggugagaggcaucagcagcagaaucagcaucuacuggaccaucgugaagcccggcgacauccugcugaucaacagcaucggcaaccugaucgcccccagaggcuacuucaagaucagaaacggcaagagcagcaucaugagaagcgacgcccccaucggcaacugcaacagcgagugcaucacccccaacggcagcauccccaacgacaagcccuuccagaacgugaacagaaucaccuacggcgccugccccagauacgugaagcagaacacccugaagcuggccaccggcaugagaaacgugcccgagaagcagaccagaggcaucuucggcgccaucgccggcuucaucgagaacggcugggagggcaugguggacggcugguacggcuucagacaccagaacagcgagggcaccggccaggccgccgaccugaagagcacccaggccgccaucgaccagaucaacggcaagcugaacagacugaucgagaagaccaacgagaaguuccaccagaucgagaaggaguucagcgagguggagggcagaauccaggaccuggagaaguacguggaggacaccaagaucgaccuguggagcuacaacgccggccugcugguggcccuggagaaccagcacaccaucgaccugaccgacagcgagaugaacaagcuguucgagagaaccagaaagcagcugagagagaacgccgaggacaugggcaacggcugcuucaagaucuaccacaagugcgacaacgccugcaucggcagcaucagaaacggcaccuacgaccacgacguguacagagacgaggcccugaacaacagauuccagaucaagggcguggagcugaagagcggcuacaaggacuggauccuguggaucagcuucgccaucagcugcuuccugcugugcguggugcugcugggcuucaucaugugggccugccagaagggcaacaucagaugcaacaucugcaucuga

SEQ ID NO: 168726 - RNA, 1701 nt, Artificial Sequence
  derived and/or modified CDS sequence (opt4) from hemagglutinin__InfluenzaA__AFH00395
augaaggccaucaucgcccugagcuacauccugugccugguguucgcccagaagcugcccggcaacgacaacagcaccgccacccugugccugggccaccacgccgugcccaacggcacccuggugaagaccaucaccaacgaccagaucgaggugaccaacgccaccgagcuggugcagagcagcagcaccggcagaaucugcgacagcccccacagaauccuggacggcaagaacugcacccugaucgacgcccugcugggcgacccccacugcgacggcuuccagaacaaggagugggaccuguucguggagagaagcaaggccuacagcaacugcuaccccuacgacgugcccgacuacgccagccugagaagccugguggccagcagcggcacccuggaguucaccaaggagggcuucaacuggaccggcguggcccaggacggcaagagcuacgccugcaagagaggcagcgugaacggcuucuucagcagacugaacuggcugcacaagcuggaguacaaguaccccgcccugaacgugaccaugcccaacaacgacaaguucgacaagcuguacaucuggggcgugcaccaccccagcaccgacagcgaccagaccagccuguacgugcaggccagcggcagagugaccgugagcaccaagagaagccagcagaccgugauccccaacaucggcagcagacccugggugagaggcaucagcagcagaaucagcaucuacuggaccaucgugaagcccggcgacauccugcugaucaagagcaccggcaaccugaucgcccccagaggcuacuucaagaucagaaacggcaagagcagcaucaugagaagcgacgcccccaucggcaacugcaacagcgagugcaucacccccaacggcagcauccccaacgacaagcccuuccagaacgugaacagaaucaccuacggcgccugccccagauacgugaagcagaacacccugaagcuggccaccggcaugagaaacgugcccgagaagcagaccagaggcaucuucggcgccaucgccggcuucaucgagaacggcugggagggcaugguggacggcugguacggcuucagacaccagaacagcgagggcaccggccaggccgccgaccugaagagcacccaggccgccaucgaccagaucaacggcaagcugaacagacugaucgagaagaccaacgagaaguuccaccagaucgagaaggaguucagcgagguggagggcagaauccaggaccuggagaaguacguggaggacaccaagaucgaccuguggagcuacaacgccgagcugcugguggcccuggagaaccagcacaccaucgaccugaccgacagcgagaugaacaagcuguucgagagaaccagaaagcagcugagagagaacgccgaggacaugggcaacggcugcuucaagaucuaccacaagugcgacaacgccugcaucggcagcaucagaaacggcaccuacgaccacgacguguacagagacgaggcccugaacaacagauuccagaucaagggcguggagcugaagagcggcuacaaggacuggauccuguggaucagcuucgccaucagcugcuuccugcugugcguggugcugcugggcuucaucaugugggccugccagaagggcaacaucagaugcaacaucugcaucuga

SEQ ID NO: 168727 - RNA, 1701 nt, Artificial Sequence
  derived and/or modified CDS sequence (opt4) from hemagglutinin__InfluenzaA__AFH00417
augaagaccaucaucgcccugagcuacauccugugccugguguucgcccagaagcugcccggcaacgacaacagcaccgccacccugugccugggccaccacgccgugcccaacggcacccuggugaagaccaucaccaacgaccagaucgaggugaccaacgccaccgagcuggugcagagcagcagcaccggcagaaucugcgacagcccccacagaauccuggacggcaagaacugcacccugaucgacgcccugcugggcgacccccacugcgacggcuuccagaacaaggagugggaccuguucguggagagaagcaaggccuacagcaacugcuaccccuacgacgugcccgacuacgccagccugagaagccugguggccagcagcggcacccuggaguucaccaacgagggcuucaacuggaccggcguggcccaggacggcaagagcuacgccugcaagagaggcagcgugaagagcuucuucagcagacugaacuggcugcacaagcuggaguacaaguaccccgcccugaacgugaccaugcccaacaacgacaaguucgacaagcuguacaucuggggcgugcaccaccccagcaccgacagcgaccagaccagccuguacgugcaggccagcggcagagugaccgugagcaccaagagaagccagcagaccgugauccccaacaucggcagcagacccugggugagaggcaucagcagcagaaucagcaucuacuggaccaucgugaagcccggcgacauccugcugaucaacagcaccggcaaccugaucgcccccagaggcuacuucaagaucagaaacggcaagagcagcaucaugagaagcgacgcccccaucgacaacugcaacagcgagugcaucacccccaacggcagcauccccaacgacaagcccuuccagaacgugaacagaaucaccuacggcgccugccccagauacgugaagcagaacacccugaagcuggccaccggcaugagaaacgugcccgagaagcagaccagaggcaucuucggcgccaucgccggcuucaucgagaacggcugggagggcaugguggacggcugguacggcuucagacaccagaacagcgagggcaccggccaggccgccgaccugaagagcacccaggccgccaucgaccagaucaacggcaagcugaacagacugaucgagaagaccaacgagaaguuccaccagaucgagaaggaguucagcgagguggagggcagaauccaggaccuggagaaguacguggaggacaccaagaucgaccuguggagcuacaacgccgagcugcugguggcccuggagaaccagcacaccaucgaccugaccgacagcgagaugaacaagcuguucgagagaaccagaaagcagcugagagagaacgccgaggacaugggcaacggcugcuucaagaucuaccacaagugcgacaacgccugcaucggcagcaucagaaacggcaccuacgaccacgacguguacagagacgaggcccugaacaacagauuccagaucaagggcguggagcugaagagcggcuacaaggacuggauccuguggaucagcuucgccaucagcugcuuccugcugugcguggugcugcugggcuucaucaugugggccugccagaagggcaacaucagaugcaacaucugcaucuga

SEQ ID NO: 168728 - RNA, 1701 nt, Artificial Sequence; identical to SEQ ID NO: 161048
  derived and/or modified CDS sequence (opt4) from hemagglutinin__InfluenzaA__AFH00428

SEQ ID NO: 168729 - RNA, 1701 nt, Artificial Sequence
  derived and/or modified CDS sequence (opt4) from hemagglutinin__InfluenzaA__AFH00439
augaagaccaucaucgcccugagcuacauccugugccugguguucgcccagaagcugcccggcaacgacaacagcaccgccacccugugccugggccaccacgccgugcccaacggcacccuggugaagaccaucaccaacgaccagaucgaggugaccaacgccaccgagcuggugcagagcagcagcaccggcagaaucugcgacagcccccacagaauccuggacggcaagaacugcacccugaucgacgcccugcugggcgacccccacugcgacggcuuccagaacaaggagugggaccuguucguggagagaagcaaggccuacagcaacugcuaccccuacgacgugcccgacuacgccagccugagaagccugguggccagcagcggcacccuggaguucaccaacgagggcuucaacuggaccggcguggcccaggacggcaccagcuacgccugcaagagaggcagcgugaagagcuucuucagcagacugaacuggcugcacaagcuggaguacaaguaccccgcccugaacgugaccaugcccaacaacgacaaguucgacaagcuguacaucuggggcgugcaccaccccagcaccgacagcgaccagaccagccuguacgugcaggccagcggcagagugaccgugagcaccaagagaagccagcagaccgugauccccaacaucggcagcagacccugggugagaggcgugagcagcagaaucagcaucuacuggaccaucgugaagcccggcgacauccugcugaucaacagcaccggcaaccugaucgcccccagaggcuacuucaagaucagaagcggcaagagcagcaucaugagaagcgacgcccccaucggcaacugcaacagcgagugcaucacccccaacggcagcauccccaacgacaagcccuuccagaacgugaacagaaucaccuacggcgccugccccagauacgugaagcagaacacccugaagcuggccaccggcaugagaaacgugcccgagaagcagaccagaggcaucuucggcgccaucgccggcuucaucgagaacggcugggagggcaugguggacggcugguacggcuucagacaccagaacagcgagggcaccggccaggccgccgaccugaagagcacccaggccgccaucaaccagaucaacggcaagcugaacagacugaucgagaagaccaacgagaaguuccaccagaucgagaaggaguucagcgagguggagggcagaauccaggaccuggagaaguacguggaggacaccaagaucgaccuguggagcuacaacgccgagcugcugguggcccuggagaaccagcacaccaucgaccugaccgacagcgagaugagcaagcuguucgagagaaccagaaagcagcugagagagaacgccgaggacaugggcaacggcugcuucaagaucuaccacaagugcgacaacgccugcaucggcagcaucagaaacggcaccuacgaccacgacguguacagagacgaggcccugaacaacagauuccagaucaagggcguggagcugaagagcggcuacaaggacuggauccuguggaucagcuucgccaucagcugcuuccugcugugcguggugcugcugggcuucaucaugugggccugccagaagggcaacaucagaugcaacaucugcaucuga

SEQ ID NO: 168730 - RNA, 1701 nt, Artificial Sequence
  derived and/or modified CDS sequence (opt4) from hemagglutinin__InfluenzaA__AFH00450
augaagaccaucaucgcccugagcuacauccugugccugguguucgcccagaagcugcccggcaacgacaacagcaccgccacccugugccugggccaccacgccgugcccaacggcacccuggugaagaccaucaccaacgaccagaucgaggugaccaacgccaccgagcuggugcagagcagcagcaccggcagaaucugcgacggcccccacagaaucaucgacggcaagaacugcacccugaucgacgcccugcugggcgacccccacugcgacggcuuccagaacaaggagugggaccuguucguggagagaagcaaggccuacagcaacugcuaccccuacgacgugcccgacuacgccagccugagaagccugguggccagcagcggcacccuggaguucaccaacgagagcuucaacuggaccggcguggcccagaacggcaccagcuacgccugcaagagaggcagcgugaagagcuucuucagcagacugaacuggcugcacaagcuggaguacaaguaccccgcccugaacgugaccaugcccaacaacgacaaguucgacaagcuguacaucuggggcgugcaccaccccagcaccgacagcgaccagaccagccuguacgugcagagcagcggcagagugaccgugagcaccaagagaagccagcagaccgugauccccaacaucggcagcagacccugggugagaggcgugagcagcagaaucagcaucuacuggaccaucgugaagcccggcgacauccugcugaucaacagcaccggcaaccugaucgcccccagaggcuacuucaagaucagaagcggcaagagcagcaucaugagaagcgacgcccccaucgacaacugcaacagcgagugcaucacccccaacggcagcauccccaacgacaagcccuuccagaacgugaacagaaucaccuacggcgccugccccagauacgugaagcagaacacccugaagcuggccaccggcaugagaaacgugcccgagaagcagaccagaggcaucuucggcgccaucgccggcuucaucgagaacggcugggagggcaugaucgacggcugguacggcuucagacaccagaacagcgagggcaccggccaggccgccgaccugaagagcacccaggccgccaucaaccagaucaacggcaagcugaacagacugaucgagaagaccaacgagaaguuccaccagaucgagaaggaguucagcgagguggagggcagaauccaggaccuggagaaguacguggaggacaccaagaucgaccuguggagcuacaacgccgagcugcugguggcccuggagaaccagcacaccaucgaccugaccgacagcgagaugaacaagcuguucgagagaaccagaaagcagcugagagagaacgccgaggacaugggcaacggcugcuucaagaucuaccacaagugcgacaacgccugcaucggcagcaucagaaacggcaccuacgaccacgacguguacagagacgaggcccugaacaacagauuccagaucaagggcguggagcugaagagcggcuacaaggacuggauccuguggaucagcuucgccaucagcugcuuccugcugugcguggugcugcugggcuucaucaugugggccugccagaagggcaacaucagaugcaacaucugcaucuga

SEQ ID NO: 168731 - RNA, 1701 nt, Artificial Sequence
  derived and/or modified CDS sequence (opt4) from hemagglutinin__InfluenzaA__AFH00461
augaagaccaucaucgcccugagcuacauccugugccugguguucgcccagaagcugcccggcaacgacaacagcaccgccacccugugccugggccaccacgccgugcccaacggcacccuggugaagaccaucaccaacgaccagaucgaggugaccaacgccaccgagcuggugcagagcagccccaccggcagaaucugcgacagcccccacagaauccuggacggcaagaacugcacccugaucgacgcccugcugggcgacccccacugcgacggcuuccagaacaaggagugggaccuguucguggagagaagcaaggccuacagcaacugcuaccccuacgacgugcccgacuacgccagccugagaagccugguggccagcagcggcacccuggaguucaucaacgagaacuucaacuggaccggcguggcccaggacggcaagagcuacgccugcaagagaggcagcgugaacagcuucuucagcagacugaacuggcugcacaagcuggacuacaaguaccccgcccugaacgugaccaugcccaacaacggcaaguucgacaagcuguacaucuggggcgugcaccaccccagcaccgacagcgaccagaucagccuguacgugagaagcagcggcagagugaccgugagcaccaagagaagccagcagaccgugauccccgacaucggcuacagacccugggugagaggccugagcagcagaaucagcaucuacuggaccaucgugaagcccggcgacauccugcugaucaacagcaccggcaaccugaucgcccccagaggcuacuucaagcugagaaacggcaagagcagcaucaugagaagcgacgcccccaucggcaacugcagcagcggcugcaucacccccaacggcagcauccccaacgacaagcccuuccagaacgugaacagaaucaccuacggcgccugccccagauacgugaagcagaacacccugaagcuggccaccggcaugagaaacgugcccgagaagcagaccagaggcaucuucggcgccaucgccggcuucaucgagaacggcugggagggcaugguggacggcugguacggcuucagacaccagaacagcgagggcaccggccaggccgccgaccugaagagcacccaggccgccaucgaccagaucaacggcaagcugaacagacugguggagaagaccaacgagaaguuccaccagaucgagaaggaguucagcgagguggagggcagaauccaggaccuggagaaguacguggaggacaccaagaucgaccuguggagcuacaacgccgagcugcugguggcccuggagaaccagcacaccaucgaccugaccgacagcgagaugaacaagcuguucgagagaaccagaaagcagcugagagagaacgccgaggacaugggcaacggcugcuucaagaucuaccacaagugcgacaacgccugcaucggcagcaucagaaacggcaccuacgaccacgacguguacagagacgaggcccugaacaacagauuccagaucaagggcguggagcugaagagcggcuacaaggacuggauccuguggaucagcuucgccaucagcugcuuccugcugugcguggugcugcugggcuucaucaugugggccugccagaagggcaacaucagaugcaacaucugcaucuga

SEQ ID NO: 168732 - RNA, 1701 nt, Artificial Sequence
  derived and/or modified CDS sequence (opt4) from hemagglutinin__InfluenzaA__AFH00472
augaagaccaucaucgcccugagcuacauccugugccugguguucgcccagaagcugcccggcaacgacaacagcaccgccacccugugccugggccaccacgccgugcccaacggcacccuggugaagaccaucaccaacgaccagaucgaggugaccaacgccaccgagcuggugcagagcagcagcaccggcagaaucugcgacagcccccacagaauccuggacggcaagaacugcacccugaucgacgcccugcugggcgacccccacugcgacggcuuccagaacaaggagugggaccuguucguggagagaagcaaggccuacagcaacugcuaccccuacgacgugagcgacuacgccagccugagaagccugguggccagcagcggcacccuggaguucaacaacgagagcuucaacuggaccggcguggcccagaacggcaccagcuacgccugcaagagaagaagcgugaagagcuucuucagcagacugaacuggcugcacaagcuggaguacaaguaccccgcccugaacgugaccaugcccaacaacgacaaguucgacaagcuguacaucuggggcgugcaccaccccagcaccgacagcgaccagaccagccuguacgugcaggccagcggcagagugaccgugagcaccaagagaagccagcagaccgugauccccaacaucggcagcagacccugggugagaggcgugagcagcagaaucagcaucuacuggaccaucgugaagcccggcgacauccugcugaucaacagcaccggcaaccugaucgcccccagaggcuacuucaagaucagaagcggcaagagcagcaucaugagaagcgacgcccccaucggcaacugcaacagcgagugcaucacccccaacggcagcauccccaacgacaagcccuuccagaacgugaacagaaucaccuacggcgccugccccagauacgugaagcagaacacccugaagcuggccaccggcaugagaaacgugcccgagaagcagaccagaggcaucuucggcgccaucgccggcuucaucgagaacggcugggagggcaugguggacggcugguacggcuucagacaccagaacagcgagggcaccggccaggccgccgaccugaagagcacccaggccgccaucaaccagaucaacggcaagcugaacagacugaucgagaagaccaacgagaaguuccaccagaucgagaaggaguucagcgagguggagggcagaauccaggaccuggagaaguacguggaggacaccaagaucgaccuguggagcuacaacgccgagcugcugguggcccuggagaaccagcacaccaucgaccugaccgacagcgagaugaacaagcuguucgagagaaccagaaagcagcugagagagaacgccgaggacaugggcaacggcugcuucaagaucuaccacaagugcgacaacgccugcaucggcagcaucagaaacggcaccuacgaccacgacguguacagagacgaggcccugaacaacagauuccagaucaagggcguggagcugaagagcggcuacaaggacuggauccuguggaucagcuucgccaucagcugcuuccugcugugcguggugcugcugggcuucaucaugugggccugccagaagggcaacaucagaugcaacaucugcaucuga

SEQ ID NO: 168733 - RNA, 1701 nt, Artificial Sequence
  derived and/or modified CDS sequence (opt4) from hemagglutinin__InfluenzaA__AFH00483
augaagaccaucaucgcccugagcuacauccugugcaugguguucgcccagaagcugcccggcaacgacaacagcaccgccacccugugccugggccaccacgccgugcccaacggcacccuggugaagaccaucaccaacgaccagaucgaggugaccaacgccaccgagcuggugcagagcagcagcaccggcaagaucugcgacagcccccacagaauccuggacggcaagaacugcacccugaucgacgcccugcugggcgacccccacugcgacggcuuccagaacaaggagugggaccuguucguggagagaagcaaggccuacagcaacugcuaccccuacgacgugcccgacuacgccagccugagaagccugguggccagcagcggcacccuggaguucaacaacgagagcuucaacuggaccggcguggcccagaacggcaccagcuacgccugcaagagaggcagcgugaagagcuucuucagcagacugaacuggcugcacaagcuggaguacaaguaccccgcccugaacgugaccaugcccaacaacgacaaguucgacaagcuguacaucuggggcgugcaccaccccagcaccgacagcgaccagaccagccuguacgugcaggccagcggcagagugaccgugagcaccaagagaagccagcagaccgugauccccaacaucggcagcagacccugggugagaggcgugagcagcagaaucagcaucuacuggaccaucgugaagcccggcgacauccugcugaucaacagcaccggcaaccugaucgcccccagaggcuacuucaagaucagaagcggcaagagcagcaucaugagaagcgacgcccccaucggcaacugcaacagcgagugcaucacccccaacggcagcauccccaacgacaagcccuuccagaacgugaacagaaucaccuacggcgccugccccagauacgugaagcagaacacccugaagcuggccaccggcaugagaaacgugcccgagaagcagaccagaggcaucuucggcgccaucgccggcuucaucgagaacggcugggagggcaugguggacggcugguacggcuucagacaccagaacagcgagggcaccggccaggccgccgaccugaagagcacccaggccgccaucaaccagaucaacggcaagcugaacagacugaucgagaagaccaacgagaaguuccaccagaucgagaaggaguucagcgagguggagggcagaauccaggaccuggagaaguacguggaggacaccaagaucgaccuguggagcuacaacgccgagcugcugguggcccuggagaaccagcacaccaucgaccugaccgacagcgagaugaacaagcuguucgagagaaccagaaagcagcugagagagaacgccgaggacaugggcaacggcugcuucaagaucuaccacaagugcgacaacgccugcaucggcagcaucagaaacggcaccuacgaccacgacguguacagagacgaggcccugaacaacagauuccagaucaagggcguggagcugaagagcggcuacaaggacuggauccuguggaucagcuucgccaucagcugcuuccugcugugcguggugcugcugggcuucaucaugugggccugccagaagggcaacaucagaugcaacaucugcaucuga

SEQ ID NO: 168734 - RNA, 1701 nt, Artificial Sequence
  derived and/or modified CDS sequence (opt4) from hemagglutinin__InfluenzaA__AFH00494
augaagaccaucaucgcccugagcuacauccugugccugguguucgcccagaagcugcccggcaacgacaacagcaccgccacccugugccugggccaccacgccgugcccaacggcacccuggugaagaccaucaccaacgaccagaucgaggugaccaacgccaccgagcuggugcagagcagccccaccggcagaaucugcgacagcccccacagaauccuggacggcaagaacugcacccugaucgacgcccugcugggcgacccccacugcgacggcuuccagaacaaggagugggaccuguucguggagagaagcaaggccuacagcaacugcuaccccuacgacgugcccgacuacgccagccugagaagccugguggccagcagcggcacccuggaguucaucaacgagaacuucaacuggaccggcguggcccaggacggcaagagcuacgccugcaagagaggcagcgugaacagcuucuucagcagacugaacuggcugcacaagcuggaguacaaguaccccgcccugaacgugaccaugcccaacaacggcaaguucgacaagcuguacaucuggggcgugcaccaccccagcaccgacagcgaccagaccagccuguacgugagagccagcggcagagugaccgugagcaccaagagaagccagcagaccgugauccccgacaucggcuacagacccugggugagaggccagagcagcagaaucggcaucuacuggaccaucgugaagcccggcgacauccugcugaucaacagcaccggcaaccugaucgcccccagaggcuacuucaagaucagaaacggcaagagcagcaucaugagaagcgacgcccccaucggcaacugcagcagcgagugcaucacccccaacggcagcauccccaacgacaagcccuuccagaacgugaacagaaucaccuacggcgccugccccagauacgugaagcagaacacccugaagcuggccaccggcaugagaaacgugcccgagaagcagaccagaggcaucuucggcgccaucgccggcuucaucgagaacggcugggagggcaugguggacggcugguacggcuucagacaccagaacagcgagggcaccggccaggccgccgaccugaagagcacccaggccgccaucgaccagaucaacggcaagcugaacagacugguggagaagaccaacgagaaguuccaccagaucgagaaggaguucagcgagguggagggcagaauccaggaccuggagaaguacguggaggacaccaagaucgaccuguggagcuacaacgccgagcugcugguggcccuggagaaccagcacaccaucgaccugaccgacagcgagaugaacaagcuguucgagagaaccagaaagcagcugagagagaacgccgaggacaugggcaacggcugcuucaagaucuaccacaagugcgacaacgccugcaucggcagcaucagaaacggcaccuacaaccacgacguguacagagacgaggcccugaacaacagauuccagaucaagggcguggagcugaagagcggcuacaaggacuggauccuguggaucagcuucgccaucagcugcuuccugcugugcguggugcugcugggcuucaucaugugggccugccagaagggcaacaucagaugcaacaucugcaucuga

SEQ ID NO: 168735 - RNA, 1701 nt, Artificial Sequence
  derived and/or modified CDS sequence (opt4) from hemagglutinin__InfluenzaA__AFH00505
augaagaccaucaucgcccugagcuacauccugugccugguguucgcccagaagcugcccggcaacgacaacagcaccgccacccugugccugggccaccacgccgugcccaacggcacccuggugaagaccaucaccaacgaccagaucgaggugaccaacgccaccgagcuggugcagagcagcagcaccggcagaaucugcgacagcccccacagaauccuggacggcaagaacugcacccugaucgacgcccugcugggcgacccccacugcgacggcuuccagaacaaggagugggaccuguucguggagagaagcaaggccuacagcaacugcuaccccuacgacgugcccgacuacgccagccugagaagccugguggccagcagcggcacccuggaguucaccaacgagggcuucaacuggaccggcguggcccaggacggcaccagcuacgccugcaagagaggcagcgugaagagcuucuucagcagacugaacuggcugcacaagcuggaguacaaguaccccgcccugaacgugaccaugcccaacaacgacaaguucgacaagcuguacaucuggggcgugcaccaccccagcaccgacagcgaccagaucagccuguacgugcaggccagcggcagagugaccgugagcaccaagagaagccagcagaccgugauccccaacaucggcagcagacccugggugagaggcgugagcagcaucaucagcaucuacuggaccaucgugaagcccggcgacauccugcugaucaacagcaccggcaaccugaucgcccccagaggcuacuucaagaucagaagcggcaagagcagcaucaugagaagcgacgcccccaucgacaacugcaacagcgagugcaucacccccaacggcagcauccccaacgacaagcccuuccagaacgugaacagaaucaccuacggcgccugccccagauacgugaagcagaacacccugaagcuggccaccggcaugagaaacgugcccgagaagcagaccagaggcaucuucggcgccaucgccggcuucaucgagaacggcugggagggcaugguggacggcugguacggcuucagacaccagaacagcgagggcaccggccaggccgccgaccugaagagcacccaggccgccaucaaccagaucaacggcaagcugaacagacugaucgagaagaccaacgagaaguuccaccagaucgagaaggaguucagcgagguggagggcagaauccaggaccuggagaaguacguggaggacaccaagaucgaccuguggagcuacaacgccgagcugcugguggcccuggagaaccagcacaccaucgaccugaccgacagcgagaugaacaagcuguucgagagaaccagaaagcagcugagagagaacgccgaggacaugggcaacggcugcuucaagaucuaccacaagugcgacaacgccugcaucggcagcaucagaaacggcaccuacgaccacgacguguacagagacgaggcccugaacaacagauuccagaucaagggcguggagcugaagagcggcuacaaggacuggauccuguggaucagcuucgccaucagcugcuuccugcugugcguggugcugcugggcuucaucaugugggccugccagaagggcaacaucagaugcaacaucugcaucuga

SEQ ID NO: 168736 - RNA, 1701 nt, Artificial Sequence
  derived and/or modified CDS sequence (opt4) from hemagglutinin__InfluenzaA__AFH00516
augaagaccaucaucgcccugagcuacauccugugccagguguucgcccagaagcugcccggcaacgacaacagcaccgccacccugugccugggccaccacgccgugcccaacggcacccuggugaagaccaucaccaacgaccagaucgaggugaccaacgccaccgagcuggugcagagcagcagcaccggcagaaucugcgacagcccccacagaauccuggacggcaagaacugcacccugaucgacgcccugcugggcgacccccacugcgacggcuuccagaacaaggagugggaccuguucguggagagaagcaaggccuacagcaacugcuaccccuacgacgugcccgacuacgccagccugagaagccugguggccagcagcggcacccuggaguucaccaacgagggcuucaacuggaccggcguggcccaggacggcaagagcuacgccugcaagagaggcagcgugaacagcuucuucagcagacugaacuggcugcacaagcuggaguacaaguaccccgcccugaacgugaccaugcccaacaacgacaaguucgacaagcuguacaucuggggcgugcaccaccccagcaccgacagcgaccagaccagccuguacgugcaggccagcggcagagugaccgugagcaccaagagaagccagcagaccgugauccccaacaucggcagcagacccugggugagaggcaucagcagcagaaucagcaucuacuggaccaucgugaagcccggcgacauccugcugaucaagagcaccggcaaccugaucgcccccagaggcuacuucaagaucagaaacggcaagagcagcaucaugagaagcgacgcccccaucgacaacugcaacagcgagugcaucacccccaacggcagcauccccaacgacaagcccuuccagaacgugaacagaaucaccuacggcgccugccccagauacgugaagcagaacacccugaagcuggccaccggcaugagaaacgugcccgagaagcagaccagaggcaucuucggcgccaucgccggcuucaucgagaacggcugggagggcaugguggacggcugguacggcuucagacaccagaacagcgagggcaccggccaggccgccgaccugaagagcacccaggccgccaucgaccagaucaacggcaagcugaacagacugaucgagaagaccaacgagaaguuccaccagaucgagaaggaguucagcgagguggagggcagaauccaggaccuggagaaguacguggaggacaccaagaucgaccuguggagcuacaacgccgagcugcugguggcccuggagaaccagcacaccaucgaccugaccgacagcgagaugaacaagcuguucgagagaaccagaaagcagcugagagagaacgccgaggacaugggcaacggcugcuucaagaucuaccacaagugcgacaacgccugcaucggcagcaucagaaacggcaccuacgaccacgacguguacagagacgaggcccugaacaacagauuccagaucaagggcguggagcugaagagcggcuacaaggacuggauccuguggaucagcuucgccaucagcugcuuccugcugugcguggugcugcugggcuucaucaugugggccugccagaagggcaacaucagaugcaacaucugcaucuga

SEQ ID NO: 168737 - RNA, 1701 nt, Artificial Sequence
  derived and/or modified CDS sequence (opt4) from hemagglutinin__InfluenzaA__AFH00527
augaagaccaucaucgcccugagcuacauccugugccugguguucgcccagaagauccccggcaacgacaacagcaccgccacccugugccugggccaccacgccgugcccaacggcacccuggugaagaccaucaccaacgaccagaucgaggugaccaacgccaccgagcuggugcagagcagcagcaccggcagaaucugcgacagcccccacagaauccuggacggcgagaacugcacccugaucgacgcccugcugggcgacccccacugcgacggcuuccagaacaaggagugggaccuguucguggagagaagcaaggccuacagcaacugcuaccccuacgacgugcccgacuacgccagccugagaagccugguggccagcagcggcacccuggaguucaacaacgagagcuucaacuggaccggcguggcccagaacggcaccagcuacgccugcaagagaagaagcaucaagagcuucuucagcagacugaacuggcugcaccagcugaaguacaaguaccccgcccugaacgugaccaugcccaacaacgacaaguucgacaagcuguacaucuggggcgugcaccaccccagcaccgacagcgaccagaccagccuguacgcccaggccagcggcagagugaccgugagcaccaagagaagccagcagaccgugauccccaacaucggcagcagacccugggugagaggcgugagcagcagaaucagcauccacuggaccaucgugaagcccggcgacauccugcugaucaacagcaccggcaaccugaucgcccccagaggcuacuucaagaucagaagcggcaagagcagcaucaugagaagcgacgcccccaucggcaagugcaacagcgagugcaucacccccaacggcagcauccccaacgacaagcccuuccagaacgugaacagaaucaccuacggcgccugccccagauacgugaagcagaacacccugaagcuggccaccggcaugagaaacgugcccgagaagcagaccagaggcaucuucggcgccaucgccggcuucaucgagaacggcugggagggcaugguggacggcugguacggcuucagacaccagaacagcgagggcaccggccaggccgccgaccugaagagcacccaggccgccaucaaccagaucaacggcaagcugaacagacugaucgagaagaccaacgagaaguuccaccagaucgagaaggaguucagcgagguggagggcagaauccaggaccuggagaaguacguggaggacaccaagaucgaccuguggagcuacaacgccgagcugcugguggcccuggagaaccagcacaccaucgaccugaccgacagcgagaugaacaagcuguucgagagaaccagaaagcagcugagagagaacgccgaggacaugggcaacggcugcuucaagaucuaccacaagugcgacaacgccugcaucggcagcaucagaaacggcaccuacgaccacgacguguacagagacgaggcccugaacaacagauuccagaucaagggcguggagcugaagagcggcuacaaggacuggauccuguggaucagcuucgccaucagcugcuuccugcugugcguggugcugcugggcuucaucaugugggccugccagaagggcaacaucagaugcaacaucugcaucuga

SEQ ID NO: 168738 - RNA, 1701 nt, Artificial Sequence
  derived and/or modified CDS sequence (opt4) from hemagglutinin__InfluenzaA__AFH00538
augaagaccaucaucgcccugagcuacauccugugccugguguucgcccagaagauccccggcaacgacaacagcaccgccacccugugccugggccaccacgccgugcccaacggcacccuggugaagaccaucaccaacgaccagaucgaggugaccaacgccaccgagcuggugcagagaagcagcaccggcagaaucugcgacagcccccacagaauccuggacggcgagaacugcacccugaucgacgcccugcugggcgacccccacugcgacggcuuccagaacaaggagugggaccuguucguggagagaagcaaggccuacagcaacugcuaccccuacgacgugcccgacuacgccagccugagaagccugguggccagcagcggcacccuggaguucaacaacgagagcuucaacuggaccggcguggcccagaacggcaccagcuacgccugcaagagaagaagcaucaagagcuucuucagcagacugaacuggcugcaccagcugaaguacaaguaccccgcccugaacgugaccaugcccaacaacgacaaguucgacaagcuguacaucuggggcgugcaccaccccagcaccgacagcgaccagaccagccuguacgcccaggccagcggcagagugaccgugagcaccaagagaagccagcagaccgugauccccaacaucggcagcagacccugggugagaggcgugagcagcagaaucagcaucuacuggaccaucgugaagcccggcgacauccugcugaucaacagcaccggcaaccugaucgcccccagaggcuacuucaagaucagaagcggcaagagcagcaucaugagaagcgacgcccccaucggcaagugcaacagcgagugcaucacccccaacggcagcauccccaacgacaagcccuuccagaacgugaacagaaucaccuacggcgccugccccagauacgugaagcagaacacccugaagcuggccaccggcaugagaaacgugcccgagaagcagaccagaggcaucuucggcgccaucgccggcuucaucgagaacggcugggagggcaugguggacggcugguacggcuucagacaccagaacagcgagggcaccggccaggccgccgaccugaagagcacccaggccgccaucaaccagaucaacggcaagcugaacagacugaucgagaagaccaacgagaaguuccaccagaucgagaaggaguucagcgagguggagggcagaauccaggaccuggagaaguacguggaggacaccaagaucgaccuguggagcuacaacgccgagcugcugguggcccuggagaaccagcacaccaucgaccugaccgacagcgagaugaacaagcuguucgagagaaccagaaagcagcugagagagaacgccgaggacaugggcaacggcugcuucaagaucuaccacaagugcgacaacgccugcaucggcagcaucagaaacggcaccuacgaccacgacguguacagagacgaggcccugaacaacagauuccagaucaagggcguggagcugaagagcggcuacaaggacuggauccuguggaucagcuucgccaucagcugcuuccugcugugcguggugcugcugggcuucaucaugugggccugccagaagggcaacaucagaugcaacaucugcaucuga

SEQ ID NO: 168739 - RNA, 1701 nt, Artificial Sequence
  derived and/or modified CDS sequence (opt4) from hemagglutinin__InfluenzaA__AFH00549
augaagaccaucaucgcccugagcuacauccugugccugguguucgcccagaagcugcccggcaacgacaacagcaccgccacccugugccugggccaccacgccgugcccaacggcacccuggugaagaccaucaccaacgaccagaucgaggugaccaacgccaccgagcuggugcagagcagcagcaccggcagaaucugcgacagcccccacagaauccuggacggcgagaacugcacccugaucgacgcccugcugggcgacccccacugcgacggcuuccagaacaaggagugggaccuguucguggagagaagcaaggccuacagcaacugcuaccccuacgacgugcccgacuacgccagccugagaagccugguggccagcagcggcacccuggaguucaacaacgagagcuucaacuggaccggcguggcccagaacggcaccagcagcgccugcaagagaagaagcaucaagagcuucuucagcagacugaacuggcugcaccagcugaaguacaaguaccccgcccugaacgugaccaugcccaacaacgacaaguucgacaagcuguacaucuggggcgugcaccaccccagcaccgacagcgaccagaccagccuguacgcccaggcccccggcagagugaccgugagcaccagaagaagccagcagaccgugauccccaacaucggcagcagacccugggugagaggcgugagcagcaucaucagcaucuacuggaccaucgugaagcccggcgacauccugcugaucaacagcaccggcaaccugaucgcccccagaggcuacuucaagaucagaagcggcaagagcagcaucaugagaagcgacgcccccaucagcaagugcaacagcgagugcaucacccccaacggcagcauccccaacgacaagcccuuccagaacgugaacagaaucaccuacggcgccugccccagauacgugaagcagaacacccugaagcuggccaccggcaugagaaacgugcccgagaagcagaccagaggcaucuucggcgccaucgccggcuucaucgagaacggcugggagggcaugguggacggcugguacggcuucagacaccagaacagcgagggcaccggccaggccgccgaccugaagagcacccaggccgccaucaaccagaucaacggcaagcugaacagacugaucgagaagaccaacgagaaguuccaccagaucgagaaggaguucagcgagguggagggcagaauccaggaccuggagaaguacguggaggacaccaagaucgaccuguggagcuacaacgccgagcugcugguggcccuggagaaccagcacaccaucgaccugaccgacagcgagaugaacaagcuguucgagagaaccagaaagcagcugagagagaacgccgaggacaugggcaacggcugcuucaagaucuaccacaagugcgacaacgccugcaucggcagcaucagaaacggcaccuacgaccacgacguguacagagacgaggcccugaacaacagauuccagaucaagggcguggagcugaagagcggcuacaaggacuggauccuguggaucagcuucgccaucagcugcuuccugcugugcguggugcugcugggcuucaucaugugggccugccagaagggcaacaucagaugcaacaucugcaucuga

SEQ ID NO: 168740 - RNA, 1701 nt, Artificial Sequence
  derived and/or modified CDS sequence (opt4) from hemagglutinin__InfluenzaA__AFH00560
augaagaccaucaucgcccugagcuacauccugugccugguguucgcccagaagcugcccgugaacgacaacagcaccgccacccugugccugggccaccacgccgugcccaacggcacccuggugaagaccaucaccaacgaccacaucgaggugaccaacgccaccgagcuggugcagagcagcagcaccggcagaaucugcgacaucccccaccagauccuggacggcgagaacugcacccugaucgacgcccugcugggcgacccccacugcgacggcuuccagaacaaggagugggaccuguucguggagagaagcaccgccuacagcaacugcuaccccuacgacgugcccgacuacgccagccugagaagccugguggccagcagcggcacccuggaguucaacaacgagagcuucaacuggaccggcguggcccagaacggcaccagcagcgccugcaagagaagaagcaucaagagcuucuucagcagacugaacuggcugcaccagcugaaguacaaguaccccgcccugaacgugaccaugcccaacaacgagaaguucgacaagcuguacaucuggggcgugcaccaccccagcaccgacagcgaccagaucagccuguacgcccaggcccccggcagagugaccgugagcaccaagagaagccagcagaccgugauccccaacaucggcagcagacccugggugagaggcgugagcagcagaaucagcaucuacuggaccaucgugaagcccggcgacauccugcugaucaacagcaccggcaaccugaucgcccccagaggcuacuucaagaucagaagcggcaagagcagcaucaugagaagcgacgcccccaucggcaagugcaacagcgagugcaucacccccaacggcagcauccccaacgacaagcccuuccagaacgugaacagaaucaccuacggcgccugccccagauacgugaagcagaacacccugaagcuggccaccggcaugagaaacgugcccgagaagcagaccagaggcaucuucggcgccaucgccggcuucaucgagaacggcugggagggcaugguggacggcugguacggcuucagacaccagaacagcgagggcaccggccaggccgccgaccugaagagcacccaggccgccaucaaccagaucaacggcaagcugaacagacugaucgagaagaccaacgagaaguuccaccagaucgagaaggaguucagcgaggccgagggcagaauccaggaccuggagaaguacguggaggacaccaagaucgaccuguggagcuacaacgccgagcugcugguggcccuggagaaccagcacaccaucgaccugaccgacagcgagaugaacaagcuguucgagagaaccagaaagcagcugagagagaacgccgaggacaugggcaacggcugcuucaagaucuaccacaagugcgacaacgccugcaucggcagcaucagaaacggcaccuacgaccacgacguguacagagacgaggcccugaacaacagauuccagaucaagggcguggagcugaagagcggcuacaaggacuggauccuguggaucagcuucgccaucagcugcuuccugcugugcaucgugcugcugggcuucaucaugugggccugccagaagggcaacaucagaugcaacaucugcaucuga

SEQ ID NO: 168741 - RNA, 1701 nt, Artificial Sequence
  derived and/or modified CDS sequence (opt4) from hemagglutinin__InfluenzaA__AFH00571
augaagaccaucaucgcccugagcuacauccugugccugguguucgcccagaagcugcccgugaacgacaacagcaccgccacccugugccugggccaccacgccgugcccaacggcacccuggugaagaccaucaccaacgacaacaucgaggugaccaacgccaccgagcuggugcagagcagcagcaccggcagaaucugcgacagcccccaccagauccuggacggcgagaacugcacccugaucgacgcccugcugggcgacccccacugcgacggcuuccagaacaaggagugggaccuguucguggagagaagcaccgccuacagcaacugcuaccccuacgacgugcccgacuacgccagccugagaagccugguggccagcagcggcacccuggaguucaacaacgagagcuucaacuggaccggcguggaccagaacggcaccagcagcgccugcaagagaagaagcaacaagagcuucuucagcagacugaacuggcugcaccagcugaaguacaaguaccccgcccugaacgugaccaugcccaacaacgagaaguucgacaagcuguacaucuggggcgugcaccaccccagcaccgacagcgaccagaucagccuguacgcccaggccagcggcagagugaccgugagcaccaagagaagccagcagaccgugauccccaacaucggcagcagacccugggugagaggcgugagcagcagaaucagcaucuacuggaccaucgugaagcccggcgacauccugcugaucaacagcaccggcaaccugaucgcccccagaggcuacuucaagaucagaagcggcaagagcagcaucaugagaagcaacgcccccaucggcaagugcaacagcgagugcaucacccccaacggcagcauccccaacgacaagcccuuccagaacgugaacagaaucaccuacggcgccugccccagauacgugaagcagaacacccugaagcuggccaccggcaugagaaacgugcccgagaagcagaccagaggcaucuucggcgccaucgccggcuucaucgagaacggcugggagggcaugguggacggcugguacggcuucagacaccagaacagcgagggcaccggccaggccgccgaccugaagagcacccaggccgccaucaaccagaucaacggcaagcugaacagacugaucgagaagaccaacgagaaguuccaccagaucgagaaggaguucagcgagguggagggcagaauccaggaccuggagaaguacguggaggacaccaagaucgaccuguggagcuacaacgccgagcugcugguggcccuggagaaccagcacaccaucgaccugaccgacagcgagaugaacaagcuguucgagagaaccagaaagcagcugagagagaacgccgaggacaugggcaacggcugcuucaagaucuaccacaagugcgacaacgccugcaucggcagcaucagaaacggcaccuacgaccacgacguguacagagacgaggcccugaacaacagauuccagaucaagggcguggagcugaagagcggcuacaaggacuggauccuguggaucagcuucgccaucagcugcuuccugcugugcguggugcugcugggcuucaucaugugggccugccagaagggcaacaucagaugcaacaucugcaucuga

SEQ ID NO: 168742 - RNA, 1701 nt, Artificial Sequence
  derived and/or modified CDS sequence (opt4) from hemagglutinin__InfluenzaA__AFH00582
augaagaccaucaucgcccugagcuacauccugugccugguguucgcccagaagcugcccggcaacgacaacagcaccgccacccugugccugggccaccacgccgugcccaacggcacccuggugaagaccaucaccaacgaccagaucgaggugaccaacgccaccgagcuggugcagagcagcagcaccggcggcaucugcgacagcccccaccagauccuggacggcgagaacugcacccugaucgacgcccugcugggcgacccccacugcgacggcuuccagaacaaggagugggaccuguucguggagagaagcaaggccuacagcaacugcuaccccuacgacgugcccgacuacgccagccugagaagccugguggccagcagcggcacccuggaguucaacaacgagagcuucaacuggaccggcguggcccagaacggcaccagcagcgccugcaagagaagaagcaacaagagcuucuucagcagacugaacuggcugcaccagcugaaguacaaguaccccgcccugaacgugaccaugcccaacaacgagaaguucgacaagcuguacaucuggggcgugcaccaccccagcaccgacagcgaccagaucagccuguacgcccaggcccccggcagagugaccgugagcaccaagagaagccagcagaccgugauccccaacaucggcagcagacccugggugagaggcgugagcagcagaaucagcaucuacuggaccaucgugaagcccggcgacauccugcugaucaacugcaccggcaaccugaucgcccccagaggcuacuucaagaucagaagcggcaagagcagcaucaugagaagcgacgccagcaucggcaagugcaacagcgagugcaucacccccaacggcagcauccccaacgacaagcccuuccagaacgugaacagaaucaccuacggcgccugccccagauacgugaagcagaacacccugaagcuggccaccggcaugagaaacgugcccgagaagcagaccagaggcaucuucggcgccaucgccggcuucaucgagaacggcugggagggcaugguggacggcugguacggcuucagacaccagaacagcgagggcaccggccaggccgccgaccugaagagcacccaggccgccaucaaccagaucaacggcaagcugaacagacugaucgagaagaccaacgagaaguuccaccagaucgagaaggaguucagcgagguggagggcagaauccaggaccuggagaaguacguggaggacaccaagaucgaccuguggagcuacaacgccgagcugcugguggcccuggagaaccagcacaccaucgaccugaccgacagcgagaugaacaagcuguucgagagaaccaagaagcagcugagagagaacgccgaggacaugggcaacggcugcuucaagaucuaccacaagugcgacaacgccugcaucggcagcaucagaaacggcaccuacgaccacgacguguacagagacgaggcccugaacaacagauuccagaucaagggcguggagcugaagagcggcuacaaggacuggauccuguggaucagcuucgccaccagcugcuuccugcugugcguggugcugcugggcuucaucaugugggccugccagaagggcaacaucagaugcaacaucugcaucuga

SEQ ID NO: 168743 - RNA, 1701 nt, Artificial Sequence; identical to SEQ ID NO: 161365
  derived and/or modified CDS sequence (opt4) from hemagglutinin__InfluenzaA__AFH00593

SEQ ID NO: 168744 - RNA, 1701 nt, Artificial Sequence; identical to SEQ ID NO: 161365
  derived and/or modified CDS sequence (opt4) from hemagglutinin__InfluenzaA__AFH00604

SEQ ID NO: 168745 - RNA, 1701 nt, Artificial Sequence
  derived and/or modified CDS sequence (opt4) from hemagglutinin__InfluenzaA__AFH00615
augaagaccaucaucgcccugagcuacauccugugccugguguucgcccagaagcugcccggcaacgacaacagcaccgccacccugugccugggccaccacgccgugcccaacggcaccaucgugaagaccaucaccaacgaccagaucgaggugaccaacgccaccgagcuggugcagagcagcagcaccggcggcaucugcaacagcccccaccagauccuggacggcgagaacugcacccugaucgacgcccugcugggcgacccccagugcgacggcuuccagaacaagaagugggaccuguucguggagagaagcaaggccuacagcaacugcuaccccuacgacgugcccgacuacgccagccugagaagccugguggccagcagcggcacccuggaguucaacaacgagagcuucaacuggaccggcgugacccagaacggcaccagcagcgccugcaagagaagaagcaacaagagcuucuucagcagacugaacuggcugacccaccugaaguacaaguaccccgcccugaacgugaccaugcccaacaacgagaaguucgacaagcuguacaucuggggcgugcaccaccccggcaccgacagcgaccagaucagccuguacgcccaggccagcggcagaaucaccgugagcaccaagagaagccagcagaccgugauccccaacaucggcagcagacccagagugagagacaucagcagcagaaucagcaucuacuggaccaucgugaagcccggcgacauccugcugaucaacagcaccggcaaccugaucgcccccagaggcuacuucaagaucagaagcggcaagagcagcaucaugagaagcgacgcccccaucggcaagugcaacagcgagugcaucacccccaacggcagcauccccaacgacaagcccuuccagaacgugaacagaaucaccuacggcgccugccccagauacgugaagcagaacacccugaagcuggccaccggcaugagaaacgugcccgagaagcagaccagaggcaucuucggcgccaucgccggcuucaucgagaacggcugggagggcaugguggacggcugguacggcuucagacaccagaacagcgagggcaccggccaggccgccgaccugaagagcacccaggccgccaucaaccagaucaacggcaagcugaacagacugaucggcaagaccaacgagaaguuccaccagaucgagaaggaguucagcgagguggagggcagaauccaggacaucgagaaguacguggaggacaccaagaucgaccuguggagcuacaacgccgagcugcugguggcccuggagaaccagcacaccaucgaccugaccgacagcgagaugaacaagcuguucgagagaaccaagaagcagcugagagagaacgccgaggacaugggcaacggcugcuucaagaucuaccacaagugcgacaacgccugcaucgagagcaucagaaacggcaccuacgaccacgacguguacagagacgaggcccugaacaacagauuccagaucaagggcguggagcugaagagcggcuacaaggacuggauccuguggaucagcuucgccaucagcugcuuccugcugugcguggcccugcugggcuucaucaugugggccugccagaagggcaacaucagaugcaacaucugcaucuga

SEQ ID NO: 168746 - RNA, 1701 nt, Artificial Sequence; identical to SEQ ID NO: 168337
  derived and/or modified CDS sequence (opt4) from hemagglutinin__InfluenzaA__AFH00626

SEQ ID NO: 168747 - RNA, 1701 nt, Artificial Sequence
  derived and/or modified CDS sequence (opt4) from hemagglutinin__InfluenzaA__AFH00637
augaagaccaucaucgcccugagcuacauccugugccugguguucgcccagaagcugcccggcaacgacaacagcaccgccacccugugccugggccaccacgccgugcccaacggcaccaucgugaagaccaucaccaacgaccagaucgaggugaccaacgccaccgagcuggugcagagcagcagcaccggcggcaucugcgacagcccccaccagauccuggacggcgagaacugcacccugaucgacgcccugcugggcgacccccagugcgacggcuuccagaacaagaagugggaccuguucguggagagaagcaaggccuacagcaacugcuaccccuacgacgugcccgacuacgccagccugagaagccugguggccagcagcggcacccuggaguucaacaacgagagcuucaacuggaccggcgugacccagaacggcaccagcagcagcugcaagagaagaagcaacaacagcuucuucagcagacugaacuggcugacccaccugaaguucaaguaccccgcccugaacgugaccaugcccaacaacgagaaguucgacaagcuguacaucuggggcgugcaccaccccggcaccaacaacgaccagaucagccuguacacccaggccagcggcagaaucaccgugagcaccaagagaagccagcagaccgugauccccaacaucggcagcagacccagagugagagacauccccagcagaaucagcaucuacuggaccaucgugaagcccggcgacauccugcugaucaacagcaccggcaaccugaucgcccccagaggcuacuucaagaucagaagcggcaagagcagcaucaugagaagcgacgcccccaucggcaagugcaacagcgagugcaucacccccaacggcagcauccccaacgacaagcccuuccagaacgugaacagaaucaccuacggcgccugccccagauacgugaagcagaacacccugaagcuggccaccggcaugagaaacgugcccgagaagcagaccagaggcaucuucggcgccaucgccggcuucaucgagaacggcugggagggcaugguggacggcugguacggcuucagacaccagaacagcgagggcaucggccaggccgccgaccugaagagcacccaggccgccaucaaccagaucaacggcaagcugaacagacugaucggcaagaccaacgagaaguuccaccagaucgagaaggaguucagcgagguggagggcagaauccaggaccuggagaaguacguggaggacaccaagaucgaccuguggagcuacaacgccgagcugcugguggcccuggagaaccagcacaccaucgaccugaccgacagcgagaugaacaagcuguucgagagaaccaagaagcagcugagagagaacgccgaggacaugggcaacggcugcuucaagaucuaccacaagugcgacaacgccugcaucggcagcaucagaaacggcaccuacgaccacgacguguacagagacgaggcccugaacaacagauuccagaucaagggcguggagcugaagagcggcuacaaggacuggauccuguggaucagcuucgccaucagcugcuuccugcugugcguggcccugcugggcuucaucaugugggccugccagaagggcaacaucagaugcaacaucugcaucuga

SEQ ID NO: 168748 - RNA, 1701 nt, Artificial Sequence
  derived and/or modified CDS sequence (opt4) from hemagglutinin__InfluenzaA__AFH00648
augaagaccaucaucgcccugagcuacauccugugccugguguucgcccagaagcugcccggcaacgacgacagcaccgccacccugugccugggccaccacgccgugcccaacggcaccaucgugaagaccaucaccaacgaccagaucgaggugaccaacgccaccgagcuggugcagagcagcagcaccggcggcaucugcgacagcccccaccagauccuggacggcgagaacugcacccugaucgacgcccugcugggcgacccccagugcgacggcuuccagaacaagaagugggaccuguucguggagagaagcaaggccuacagcaacugcuaccccuacgacgugcccgacuacgccagccugagaagccugguggccagcagcggcacccuggaguucaacgacgagagcuucaacuggaccggcgugacccagaacggcaccagcagcagcugcaagagaagaagcaacaacagcuucuucagcagacugaacuggcugacccaccugaaguucaaguaccccgcccugaacgugaccaugcccaacaacgagaaguucgacaagcuguacaucuggggcgugcaccaccccgugaccgacaacgaccagaucuuccuguacgcccaggccagcggcagaaucaccgugagcaccaagagaagccagcagaccgugauccccaacaucggcagcagacccagaaucagaaacauccccagcagaaucagcaucuacuggaccaucgugaagcccggcgacauccugcugaucaacagcaccggcaaccugaucgcccccagaggcuacuucaagaucagaagcggcaagagcagcaucaugagaagcgacgcccccaucggcaagugcaacagcgagugcaucacccccaacggcagcauccccaacgacaagcccuuccagaacgugaacagaaucaccuacggcgccugccccagauacgugaagcagaacacccugaagcuggccaccggcaugagaaacgugcccgagaagcagaccagaggcaucuucggcgccaucgccggcuucaucgagaacggcugggagggcaugguggacggcugguacggcuucagacaccagaacagcgagggcaucggccaggccgccgaccugaagagcacccaggccgccaucaaccagaucaacggcaagcugaacagacugaucggcaagaccaacgagaaguuccaccagaucgagaaggaguucagcgagguggagggcagaauccaggaccuggagaaguacguggaggacaccaagaucgaccuguggagcuacaacgccgagcugcugguggcccuggagaaccagcacaccaucgaccugaccgacagcgagaugaacaagcuguucgagagaaccaagaagcagcugagagagaacgccgaggacaugggcaacggcugcuucaagaucuaccacaagugcgacaacgccugcaucggcagcaucagaaacggcaccuacgaccacgacguguacagagacgaggcccugaacaacagauuccagaucaagggcguggagcugaagagcggcuacaaggacuggauccuguggaucagcuucgccaucagcugcuuccugcugugcguggcccugcugggcuucaucaugugggccugccagaagggcaacaucagaugcaacaucugcaucuga

SEQ ID NO: 168749 - RNA, 1701 nt, Artificial Sequence
  derived and/or modified CDS sequence (opt4) from hemagglutinin__InfluenzaA__AFH00659
augaagaccaucaucgcccugagcuacauccugugccugguguucacccagaagcugcccggcaacgacaacagcaccgccacccugugccugggccaccacgccgugcccaacggcaccauggugaagaccaucaccaacgaccagaucgaggugaccaacgccaccgagcuggugcagagcagcagcaccggcgagaucugcgacagcccccaccagauccuggacggcgagaacugcacccugaucgacgcccugcugggcgacccccagugcgacggcuuccagaacaagaagugggaccuguucguggagagaagcaaggcccacagcaacugcuaccccuacgacgugcccgacuacgccagccugagaagccugaucgccagcagcggcacccuggaguucaacaacgagagcuucaacuggaccggcgugacccagaacggcaccagcagcgccugcaagagaagaagcgacaacagcuucuucagcagacugaacuggcugacccaccugaaguucaaguaccccgcccugaacgugaccaugcccaacaacgaggaguucgacaagcuguacaucuggggcgugcaccaccccggcaccgacaacgaccagaucagccuguacgcccaggccagcggcagaaucaccgugagcaccaagagaagccagcagaccgugauccccaacaucggcagcagacccagagugagagacauccccagcagaaucagcaucuacuggaccaucgugaagcccggcgacauccugcugaucaacagcaccggcaaccugaucgcccccagaggcuacuucaagaucagaagcggcaagagcagcaucaugagaagcgacgcccccaucggcaagugcaacagcggcugcaucacccccaacggcagcauccccaacgacaagcccuuccagaacgugaacagaaucaccuacggcgccugccccagauacgugaagcagaacacccugaagcuggccaccggcaugagaaacgugcccgagaagcagaccagaggcaucuucggcgccaucgccggcuucaucgagaacggcugggagggcaugguggacggcugguacggcuucagacaccagaacagcgagggcaucggccaggccgccgaccugaagagcacccaggccgccaucgaccagaucaacggcaagcugaacagacugaucggcaagaccaacgagaaguuccaccagaucgagaaggaguucagcgagguggagggcagaauccaggaccuggagaaguacguggaggacaccaagaucgaccuguggagcuacaacgccgagcugcugguggcccuggagaaccagcacaccaucgaccugaccgacagcgagaugaacaagcuguucgagagaaccaagaagcagcugagagagaacgccgaggacaugggcaacggcugcuucaagaucuaccacaagugcgacaacgccugcaucggcagcaucagaaacggcaccuacgaccacgacguguacagagacgaggcccugaacaacagauuccagaucaagggcguggagcugaagagcggcuacaaggacuggauccuguggaucagcuucgccaucagcugcuuccugcugugcguggcccugcugggcuucaucaugugggccugccagaagggcaacaucagaugcaacaucugcaucuga

SEQ ID NO: 168750 - RNA, 1701 nt, Artificial Sequence
  derived and/or modified CDS sequence (opt4) from hemagglutinin__InfluenzaA__AFH00670
augaagaccaucaucgcccugagcuacauccugugccugguguucgcccagaagcugcccggcaucgacaacagcaccgccacccugugccugggccaccacgccgugcccaacggcaccaucgugaagaccaucaccaacgaccagaucgaggugaccaacgccaccgagcuggugcagaacagcagcaccggcggcaucugcgacagcccccaccagauccuggacggcgagaacugcacccugaucgacgcccugcugggcgacccccagugcgacggcuuccagaacaagaagugggaccuguucguggagagaagcaaggccuacagcaacugcuaccccuacgacgugcccgacuacgccagccugagaagccugguggccagcagcggcacccuggaguucaacaacgagagcuucaacuggaccggcgugacccagaacggcaccagcagcgccugcaagagaggcagcaacaacagcuucuucagcagacugaacuggcugacccacagcaaguucaaguaccccgcccugaacgugaccaugcccaacaacgaggaguucgacaagcuguacaucuggggcgugcugcaccccggcaccgacaacgaccagaucuuccuguacgcccaggccagcggcagaaucaccgugagcaccaagagaagccagcagaccgugauccccaacaucggcagcagacccagagugagaaacauccccagcagaaucagcaucuacuggaccaucgugaagcccggcgacauccugcugaucaacagcaccggcaaccugaucgcccccagaggcuacuucaagaucagaagcggcaagagcagcaucaugagaagcgacgcccccaucggcaagugcaacagcgagugcaucacccccaacggcagcauccccaacgacaagcccuuccagaacgugaacagaaucaccuacggcgccugccccagauacgugaagcagaacacccugaagcuggccaccggcaugagaaacgugcccgagaagcagaccagaggcaucuucggcgccaucgccggcuucaucgagaacggcugggagggcaugguggacggcugguacggcuucagacaccagaacagcgagggcaucggccaggccgccgaccugaagagcacccaggccgccaucgaccagaucaacggcaagcugaacagacugaucggcaagaccaacgagaaguuccaccagaucgagaaggaguucagcgagguggagggcagaauccaggaccuggagaaguacguggaggacaccaagaucgaccuguggagcuacaacgccgagcugcugguggcccuggagaaccagcacaccaucgaccugaccgacagcgagaugaacaagcuguucgagaagaccaagaagcagcugagagagaacgccgaggacaugggcaacggcugcuucaagaucuaccacaagugcgacaacgccugcaucggcagcaucagaaacggcaccuacgaccacgacguguacagagacgaggcccugaacaacagauuccagaucaagggcguggagcugaagagcggcuacaaggacuggauccuguggaucagcuucgccaucagcugcuuccugcugugcguggcccugcugggcuucaucaugugggccugccagaagggcaacaucagaugcaacaucugcaucuga

SEQ ID NO: 168751 - RNA, 1701 nt, Artificial Sequence
  derived and/or modified CDS sequence (opt4) from hemagglutinin__InfluenzaA__AFH00681
augaagaccaucaucgcccugagcuacauccugugccugguguucgcccagaagcugcccggcaacgacaacagcaccgccacccugugccugggccaccacgccgugcccaacggcaccaucgugaagaccaucaccaacgaccagaucgaggugaccaacgccaccgagcuggugcagagcagcagcaccggcgagaucugcgacagcccccaccagauccuggacggcgagaacugcacccugaucgacgcccugcugggcgacccccagugcgacggcuuccagaacaagaagugggaccuguucaucgagagaagcaaggccuacagcaacugcuaccccuacgacgugcccgacuacgccagccugagaagccugguggccagcagcggcacccuggaguucaacaacgagagcuucaacuggaccggcgugacccagaacggcaccagcagcgccugcaucagaagaagcaacaacagcuucuucagcagacugaacuggcugacccaccugaaguucaaguaccccgcccugaacgugaccaugcccaacaaggagaaguucgacaagcuguacaucuggggcgugcaccaccccggcaccgacaacgaccagaucuuccuguacgcccaggccagcggcagaaucaccgugagcaccaagagaagccagcagaccgugauccccaacaucggcagcagacccagagugagaaacauccccagcagaaucagcaucuacuggaccaucgugaagcccggcgacauccugcugaucaacagcaccggcaaccugaucgcccccagaggcuacuucaagaucagaagcggcaagagcagcaucaugagaagcgacgcccccaucggcaagugcaacagcgagugcaucacccccaacggcagcauccccaacgacaagcccuuccagaacgugaacagaaucaccuacggcgccugccccagauacgugaagcagaacacccugaagcuggccaccggcaugagaaacgugcccgagaagcagaccagaggcaucuucggcgccaucgccggcuucaucgagaacggcugggagggcaugguggacggcugguacggcuucagacaccagaacagcgagggcaucggccaggccgccgaccugaagagcacccaggccgccaucgaccagaucaacggcaagcugaacagacugaucggcaagaccaacgagaaguuccaccagaucgagaaggaguucagcgagguggagggcagaauccaggaccuggagaaguacguggaggacaccaagaucgaccuguggagcuacaacgccgagcugcugguggcccuggagaaccagcacaccaucgaccugaccgacagcgagaugaacaagcuguucgagaagaccaagaagcagcugagagagaacgccgaggacaugggcaacggcugcuucaagaucuaccacaagugcgacaacgccugcaucggcagcaucagaaacggcaccuacgaccacgacguguacagagacgaggcccugaacaacagauuccagaucaagggcguggagcugaagagcggcuacaaggacuggauccuguggaucagcuucgccaucagcugcuuccugcugugcguggcccugcugggcuucaucaugugggccugccagaagggcaacaucagaugcaacaucugcaucuga

SEQ ID NO: 168752 - RNA, 1701 nt, Artificial Sequence; identical to SEQ ID NO: 161988
  derived and/or modified CDS sequence (opt4) from hemagglutinin__InfluenzaA__AFH00692

SEQ ID NO: 168753 - RNA, 1701 nt, Artificial Sequence
  derived and/or modified CDS sequence (opt4) from hemagglutinin__InfluenzaA__AFH00703
augaagaccaucaucgcccugagcuacauccugugccugguguucgcccagaagcugcccggcaacgacaacagcaccgccacccugugccugggccaccacgccgugcccaacggcaccaucgugaagaccaucaccaacgaccagaucgaggugaccaacgccaccgagcuggugcagagcagcagcaccggcaagaucugcgacagcccccaccagauccuggacggcaagaacugcacccugaucgacgcccugcugggcgacccccagugcgacggcuuccagaacaagaagugggaccuguucguggagagaagcaaggccuacagcaacugcuaccccuacgacgugcccgacuacgccagccugagaagccugguggccagcagcggcacccuggaguucaacaacgagagcuucaacuggaccggcgugacccagaacggcaccagcagcgccugcaucagaagaagcaagaacagcuucuucagcagacugaacuggcugacccaccugaacuucaaguacagcgcccugaacgugaccaugcccaacaacgagcaguucgacaagcuguacaucuggggcgugcaccaccccggcaccgacaaggaccagaucuuccuguacgcccaggccagcggcagaaucaccgugagcaccaagagaagccagcagaccgugauccccaacaucggcagcagacccagagugagaaacauccccagcagaaucagcaucuacuggaccaucgugaagcccggcgacauccugcugaucaacagcaccggcaaccugaucgcccccagaggcuacuucaagaugcagagcggcaagagcagcaucaugagaagcgacgcccccaucggcaagugcaacagcgagugcaucacccccaacggcagcauccccaacgacaagcccuuccagaacgugaacagaaucaccuacggcgccugccccagauacgugaagcagaacacccugaagcuggccaccggcaugagaaacgugcccgagaagcagaccagaggcaucuucggcgccaucgccggcuucaucgagaacggcugggagggcaugguggacggcugguacggcuucagacaccagaacagcgagggcagaggccaggccgccgaccugaagagcacccaggccgccaucgaccagaucaacggcaagcugaacagacugaucggcaagaccaacgagaaguuccaccagaucgagaaggaguucagcgagguggagggcagaauccaggaccuggagaaguacguggaggacaccaagaucgaccuguggagcuacaacgccgagcugcugguggcccuggagaaccagcacaccaucgaccugaccgacagcgagaugaacaagcuguucgagaagaccaagaagcagcugagagagaacgccgaggacaugggcaacggcugcuucaagaucuaccacaagugcgacaacgccugcaucggcagcaucagaaacggcaccuacgaccacgacguguacagagacgaggcccugaacaacagauuccagaucaagggcguggagcugaagagcggcuacaaggacuggauccuguggaucagcuucgccaucagcugcuuccugcugugcguggcccugcugggcuucaucaugugggccugccagaagggcaacaucagaugcaacaucugcaucuga

SEQ ID NO: 168754 - RNA, 1701 nt, Artificial Sequence
  derived and/or modified CDS sequence (opt4) from hemagglutinin__InfluenzaA__AFH00714
augaagaccaucaucgcccugagcuacaucuucugccugguguucgcccagaaccugcccggcaacgacaacagcaccgccacccugugccugggccaccacgccgugcccaacggcacccuggugaagaccaucaccaacgaccagaucgaggugaccaacgccaccgagcuggugcagagcagcagcaccggcagaaucugcgacagcccccacagaauccuggacggcaagaacugcacccugaucgacgcccugcugggcgacccccacugcgacggcuuccagaacgagaagugggaccuguucguggagagaagcaaggccuucagcaacugcuaccccuacgacgugcccgacuacgccagccugagaagccugguggccagcagcggcacccuggaguucaucaacgagggcuucaacuggaccggcgugacccagagcggcggcagcuacgccugcaagagaggcagcgacaagagcuucuucagcagacugaacuggcuguacgagagcgagagcaaguaccccgugcugaacgugaccaugcccaacaacggcaacuucgacaagcuguacaucuggggcgugcaccaccccagcaccgacaaggagcagaccaaccuguacgugagagccagcggcagagugaccgugagcaccaagagaagccagcagaccaucauccccaacaucggcagcagacccugggugagaggccugagcagcggcaucagcaucuacuggaccaucgugaagcccggcgacauccugcugaucaacagcaacggcaaccugaucgcccccagaggcuacuucaagaucagaaccggcaagagcagcaucaugagaagcgacgcccccaucggcaccugcagcagcgagugcaucacccccaacggcagcauccccaacgacaagcccuuccagaacgugaacaagaucaccuacggcgccugccccaaguacgugaagcagaacacccugaagcuggccaccggcaugagaaacgugcccgagaagcagaccagaggcaucuucggcgccaucgccggcuucaucgagaacggcugggagggcaugguggacggcugguacggcuucagacaccagaacagcgagggcaccggccaggccgccgaccugaagagcacccaggccgccaucgaccagaucaacggcaagcugaacagagugaucgagaagaccaacgagaaguuccaccagaucgagaaggaguucagcgagguggagggcagaauccaggaccuggagaaguacguggaggacaccaagaucgaccuguggagcuacaacgccgagcugcugguggcccuggagaaccagcacaccaucgaccugaccgacagcgagaugaacaagcuguucgagaagaccagaagacagcugagagagaacgccgaggacaugggcaacggcugcuucaagaucuaccacaagugcgacaacgccugcaucggcagcaucagaaacggcaccuacgaccacgacguguacagagacgaggcccugaacaacagauuccagaucaagggcguggagcugaagagcggcuacaaggacuggauccuguggaucagcuucgccaucagcugcuuccugcugugcguggugcugcugggcuucaucaugugggccugccagaagggcaacaucagaugcaacaucugcaucuga

SEQ ID NO: 168755 - RNA, 1701 nt, Artificial Sequence
  derived and/or modified CDS sequence (opt4) from hemagglutinin__InfluenzaA__AFH00725
augaagaccaucaucgcccugagcuacaucuucugccugaucuucgcccagaaccugcccggcaacgacaacagcaccgccacccugugccugggccaccacgccgugcccaacggcacccuggugaagaccaucaccaacgaccagaucgaggugaccaacgccaccgagcuggugcagagcagcagcaccggcagaaucugcgacagcccccacagaauccuggacggcaagaacugcacccugaucgacgcccugcugggcgacccccacugcgacggcuuccagaacgagaagugggaccuguucguggagagaagcaaggccuucagcaacugcuaccccuacgacgugcccgacuacgccagccugagaagccugguggccagcagcggcacccuggaguucaucaacgagggcuucaacuggaccggcgugacccagagcggcggcagcuacgccugcaagagaggcagcgacaacagcuucuucagcagacugaacuggcuguacgagagcgagagcaaguaccccgugcugaacgugaccaugcccaacaacggcaaguucgacaagcuguacaucuggggcgugcaccaccccagcaccgacaaggagcagaccaagcuguacgugagagccagcggcagagugaccgugagcaccaagagaagccagcagaccgugauccccaacaucggcagcagacccugggugagaggccugagcagcagaaucagcaucuacuggaccaucgugaagcccggcgacauccugcugaucaacagcaccggcaaccugaucgcccccagaggcuacuucaagaucagaaccggcaagagcagcaucaugagaagcgacgcccccaucggcaccugcagcagcgagugcaucacccccaacggcagcauccccaacgacaagcccuuccagaacgugaacaagaucaccuacggcgccugccccagauacgugaagcagaacacccugaagcuggccaccggcaugagaaacgugcccgagaagcagaccagaggcaucuucggcgccaucgccggcuucaucgagaacggcugggagggcaugguggacggcugguacggcuucagacaccagaacagcgagggcaccggccaggccgccgaccugaagagcacccaggccgccaucgaccagaucaacggcaagcugaacagagugaucgagaagaccaacgagaaguuccaccagaucgagaaggaguucagcgagguggagggcagaauccaggaccuggagaaguacguggaggacaccaagaucgaccuguggagcuacaacgccgagcugcugguggcccuggagaaccagcacaccaucgaccugaccgacagcgagaugaacaagcuguucgagaagaccagaaagcagcugagagagaacgccgaggacaugggcaacggcugcuucaagaucuaccacaagugcgacaacgccugcaucggcagcaucagaaacggcaccuacgaccacgacguguacagagacgaggcccugaacaacagauuccagaucaagggcguggagcugaagagcggcuacaaggacuggauccuguggaucagcuucgccaucagcugcuuccugcugugcguggugcugcugggcuucaucaugugggccugccagaagggcaacaucagaugcaacaucugcaucuga

SEQ ID NO: 168756 - RNA, 1701 nt, Artificial Sequence; identical to SEQ ID NO: 167126
  derived and/or modified CDS sequence (opt4) from hemagglutinin__InfluenzaA__AFH00736

SEQ ID NO: 168757 - RNA, 1701 nt, Artificial Sequence
  derived and/or modified CDS sequence (opt4) from hemagglutinin__InfluenzaA__AFH00747
augaagaccaucaucgcccugagcuacaucuucugccugguguucgcccagaagcugcccggcaacgacaacagcaccgccacccugugccugggccacuacgccgugcccaacggcacccuggugaagaccaucaccaacgaccagaucgaggugaccaacgccaccgagcuggugcagagcagcagcaccggcagaaucugcgacagcccccacagaauccuggacggcaagaacugcacccugaucgacgcccugcugggcgacccccacugcgacggcuuccagaacgagaagugggaccuguucguggagagaagcaaggccuacagcaacugcuaccccuacgacgugcccgacuacgccagccugagaagccugguggccagcagcggcacccuggaguucaucaacgaggacuucaacuggaccggcgugacccagagcggcggcagcuacgccugcaagagaggcagcgugaagagcuucuucagcagacugaacuggcugcacgagagcgaguacaaguaccccgcccugaacgugaccaugcccaacaacggcaaguucgacaagcuguacaucuggggcgugcaccaccccagcaccgacagagagcagaccaaccuguacgugagagccagcggcagagugaccgugagcaccaagagaagccagcagaccgugauccccaacaucggcagcagacccugggugagaggccugagcagcagaaucagcaucuacuggaccaucgugaagcccggcgacauccugcugaucaacagcaccggcaaccugaucgcccccagaggcuacuucaagaucagaaccggcaagagcagcaucaugagaagcgacgcccccaucggcaccugcagcagcgagugcaucacccccaacggcagcauccccaacgacaagcccuuccagaacgugaacaagaucaccuacggcgccugccccagauacgugaagcagaacacccugaagcuggccaccggcaugagaaacgugcccgagaagcagaccagaggcaucuucggcgccaucgccggcuucaucgagaacggcugggagggcaugguggacggcugguacggcuucagacaccagaacagcgagggcaccggccaggccgccgaccugaagagcacccaggccgccaucgaccagaucaacggcaagcugaacagacugaucgagaagaccaacgagaaguuccaccagaucgagaaggaguucagcgagguggagggcagaauccaggaccuggagaaguacguggaggacaccaagaucgaccuguggagcuacaacgccgagcugcugguggcccuggagaaccagcacaccaucgaccugaccgacagcgagaugaacaagcuguucgagaagaccagaaagcagcugagagagaacgccgaggacaugggcaacggcugcuucaagaucuaccacaagugcgacaacgccugcaucggcagcaucagaaacggcaccuacgaccacgacguguacagagacgaggcccugaacaacagauuccagaucaagggcguggagcugaagagcggcuacaaggacuggauccuguggaucagcuucgccaucagcugcuuccugcugugcguggugcugcugggcuucaucaugugggccugccagaagggcaacaucagaugcaacaucugcaucuga

SEQ ID NO: 168758 - RNA, 1701 nt, Artificial Sequence
  derived and/or modified CDS sequence (opt4) from hemagglutinin__InfluenzaA__AFH00758
augaagaccaucaucgcccugagcuacauccugugccugguguucgcccagaagcugcccggcaacgacaacagcaccgccacccugugccugggccaccacgccgugcccaacggcacccuggugaagaccaucaccaacgaccagaucgaggugaccaacgccaccgagcuggugcagagcagcagcaccggcagaaucugcgacagcccccacagaauccuggacggcaagaacugcacccugaucgacgcccugcugggcgacccccacugcgacggcuuccagaacaaggagugggaccuguucguggagagaagcaaggccuacagcaacugcuaccccuacgacgugcccgacuacgccagccugagaagccugguggccagcagcggcacccuggaguucaucaacgaggacuucaacuggaccggcguggcccagagcggcgagagcuacgccugcaagagaggcagcgugaagagcuucuucagcagacugaacuggcugcacgagagcgaguacaaguaccccgcccugaacgugaccaugcccaacaacggcaaguucgacaagcuguacaucuggggcgugcaccaccccagcaccgacagagagcagaccaagcuguacgugagagccagcggcagagugaccgugagcaccaagagaagccagcagaccgugauccccaacaucggcagcagacccugggugagaggccugagcagcagaaucagcaucuacuggaccaucgugaagcccggcgacauccugcugaucaacagcaccggcaaccugaucgcccccagaggcuacuucaagaucagaaccggcaagagcagcaucaugagaagcgacgcccccaucggcaccugcagcagcgagugcaucacccccaacggcagcauccccaacgacaagcccuuccagaacgugaacagaaucaccuacggcgccugccccagauacgugaagcagaacacccugaagcuggccaccggcaugagaaacgugcccgagaagcagaccagaggcaucuucggcgccaucgccggcuucaucgagaacggcugggagggcaugguggacggcugguacggcuucagacaccagaacagcgagggcaccggccaggccgccgaccugaagagcacccaggccgccaucgaccagaucaacggcaagcugaacagacugaucgagaagaccaacgagaaguuccaccagaucgagaaggaguucagcgagguggagggcagaauccaggaccuggagaaguacguggaggacaccaagaucgaccuguggagcuacaacgccgagcugcugguggcccuggagaaccagcacaccaucgaccugaccgacagcgagaugaacaagcuguucgagaagaccagaaagcagcugagagagaacgccgaggacaugggcaacggcugcuucaagaucuaccacaagugcgacaacgccugcaucggcagcaucagaaacggcaccuacgaccacgacguguacagagacgaggcccugaacaacagauuccagaucaagggcguggagcugaagagcggcuacaaggacuggauccuguggaucagcuucgccaucagcugcuuccugcugugcguggugcugcugggcuucaucaugugggccugccagaagggcaacaucagaugcaacaucugcaucuga

SEQ ID NO: 168759 - RNA, 1701 nt, Artificial Sequence
  derived and/or modified CDS sequence (opt4) from hemagglutinin__InfluenzaA__AFH00769
augaagaccaucaucgcccugagcuacauccugugccugguguucgcccagaagcugcccggcaacgacaacagcaccgccacccugugccugggccaccacgccgugcccaacggcacccuggugaagaccaucaccaacgaccagaucgaggugaccaacgccaccgagcuggugcagagcagcagcaccggcagaaucugcgacagcccccacagaauccuggacggcaagaacugcacccugaucgacgcccugcugggcgacccccacugcgacggcuuccagaacaaggagugggaccuguucguggagagaagcaaggccuacagcaacugcuaccccuacgacgugcccgacuacgccagccugagaagccugguggccagcagcggcacccuggaguucaucaacgaggacuucaacuggaccggcguggcccagagcggcgagagcuacaccugcaagagaggcagcgugaagagcuucuucagcagacugaacuggcugcacgagagcgaguacaaguaccccgcccugaacgugaccaugcccaacaacgacaaguucgacaagcuguacaucuggggcgugcaccaccccagcaccgacagagagcagaccagccuguacaucagagccagcggcagagugaccgugagcaccaagagaagccagcagaccgugauccccaacaucggcagcagacccugggugagaggccugagcagcagaaucagcaucuacuggaccaucgugaagcccggcgacauccugcugaucaacagcaccggcaaccugaucgcccccagaggcuacuucaagaucagaaccggcaagagcagcaucaugagaagcgacgcccccaucggcaccugcagcagcgagugcaucacccccaacggcagcauccccaacgacaagcccuuccagaacgugaacagaaucaccuacggcgccugccccagauacgugaagcagaacacccugaagcuggccaccggcaugagaaacgugcccgagaagcagaccagaggcaucuucggcgccaucgccggcuucaucgagaacggcugggagggcaugguggacggcugguacggcuucagacaccagaacagcgagggcaccggccaggccgccgaccugaagagcacccaggccgccaucgaccagaucaacggcaagcugaacagacugaucgagaagaccaacgagaaguuccaccagaucgagaaggaguucagcgagguggagggcagaauccaggaccuggagaaguacguggaggacaccaagaucgaccuguggagcuacaacgccgagcugcugguggcccuggagaaccagcacaccaucgaccugaccgacagcgagaugaacaagcuguucgagaagaccagaaagcagcugagagagaacgccgaggacaugggcaacggcugcuucaagaucuaccacaagugcgacaacgccugcaucggcagcaucagaaacggcaccuacgaccacgacguguacagagacgaggcccugaacaacagauuccagaucaagggcguggagcugaagagcggcuacaaggacuggauccuguggaucagcuucgccaucagcugcuuccugcugugcguggugcugcugggcuucaucaugugggccugccagaagggcaacaucagaugcaacaucugcaucuga

SEQ ID NO: 168760 - RNA, 1701 nt, Artificial Sequence
  derived and/or modified CDS sequence (opt4) from hemagglutinin__InfluenzaA__AFH00780
augagagccaucaucgcccugagcuacauccugugccugguguucgcccagaagcugcccggcaacgacaacagcaccgccacccugugccugggccaccacgccgugcccaacggcacccuggugaagaccaucaccaacgaccagaucgaggugaccaacgccaccgagcuggugcagagcagcagcaccggcagaaucugcgacagcccccacagaauccuggacggcaagaacugcacccugaucgacgcccugcugggcgacccccacugcgacggcuuccagaacaaggagugggaccuguucguggagagaagcaaggccuacagcgacugcuaccccuacgacgugcccgacuacgccagccugagaagccugguggccagcagcggcacccuggaguucaccaacgagggcuucaacuggaccggcguggcccaggacggcaccagcuacgccugcaagagaggcagcgugaagagcuucuucagcagacugaacuggcugcacaagcuggaguacaaguaccccgcccugaacgugaccaugcccaacaacgacaaguucgacaagcuguacaucuggggcgugcaccaccccagcaccgacagcgaccagaccagccuguacgugcaggccagcggcagagugaccgugagcaccaagagaagccagcagaccgugauccccaacaucggcagcagacccugggugagaggcgugagcagcagaaucagcaucuacuggaccaucgugaagcccggcgacauccugcugaucaacagcaccggcaaccugaucgcccccagaggcuacuucaagaucagaagcggcaagagcagcaucaugagaagcgacgcccccaucggcaacugcaacagcgagugcaucacccccaacggcagcauccccaacgacaagcccuuccagaacgugaacagaaucaccuacggcgccugccccagauacgugaagcagaacacccugaagcuggccaccggcaugagaaacgugcccgagaagcagaccagaggcaucuucggcgccaucgccggcuucaucgagaacggcugggagggcaugguggacggcugguacggcuucagacaccagaacagcgagggcaccggccaggccgccgaccugaagagcacccaggccgccaucaaccagaucaacggcaagcugaacagacugaucgagaagaccaacgagaaguuccaccagaucgagaaggaguucagcgagguggagggcagaauccaggaccuggagaaguacguggaggacaccaagaucgaccuguggagcuacaacgccgagcugcugguggcccuggagaaccagcacaccaucgaccugaccgacagcgagaugaacaagcuguucgagagaaccagaaagcagcugagagagaacgccgaggacaugggcaacggcugcuucaagaucuaccacaagugcgacaacgccugcaucggcagcaucagaaacggcaccuacgaccacgacguguacagagacgaggcccugaacaacagauuccagaucaagggcguggagcugaagagcggcuacaaggacuggauccuguggaucagcuucgccaucagcugcuuccugcugugcguggugcugcugggcuucaucaugugggccugccagaagggcaacaucagaugcaacaucugcaucuga

SEQ ID NO: 168761 - RNA, 1701 nt, Artificial Sequence
  derived and/or modified CDS sequence (opt4) from hemagglutinin__InfluenzaA__AFH00791
augaagaccaucaucgcccugagcuacauccugugccugguguucgcccagaagcugcccggcaacgacaacagcaccgccacccugugccugggccaccacgccgugcccaacggcacccuggugaagaccaucaccaacgaccagaucgaggugaccaacgccaccgagcuggugcagggcagcagcaccggcagaaucugcgacagcccccaccagauccuggacggcaagaacugcacccugaucgacgcccugcugggcgacccccacugcgacggcuuccagaacaaggagugggaccuguucguggagagaagcaccgccuacagcaacugcuaccccuacgacgugcccgacuacgccagccugagaagccugguggccagcagcggcacccuggaguucaccaaggagggcuucaacuggaccggcguggcccaggacggcaccagcuacaccugcaagagaggcagcgugaagagcuucuucagcagacugaacuggcugcacaagcuggaguacaaguaccccgcccugaacgugaccaugcccaacaacgacaaguucgacaagcuguacaucuggggcgugcaccaccccagcaccgacagcgaccagaccagccuguacgugcaggccagcggcagagugaccgugagcaccaagagaagccagcagaccgugauccccaacaucggcagcagacccugggugagaggcgugagcagcagaaucagcaucuacuggaccaucgugaagcccggcgacauccugcugaucaacagcaccggcaaccugaucgcccccagaggcuacuucaagaucagaagcggcaagagcagcaucaugagaagcgacgcccccaucgacaacugcaacagcgagugcaucacccccaacggcagcauccccaacgacaagcccuuccagaacgugaacagaaucaccuacggcgccugccccagauacgugaagcagaacacccugaagcuggccaccggcaugagaaacgugcccgagaagcagaccagaggcaucuucggcgccaucgccggcuucaucgagaacggcugggagggcaugguggacggcugguacggcuucagacaccagaacagcgagggcaccggccaggccgccgaccugaagagcacccaggccgccaucaaccagaucaacggcaagcugaacagacugaucgagaagaccaacgagaaguuccaccagaucgagaaggaguucagcgagguggagggcagaauccaggaccuggagaaguacguggaggacaccaagaucgaccuguggagcuacaacgccgagcugcugguggcccuggagaaccagcacaccaucgaccugaccgacagcgagaugaacaagcuguucgagagaaccagaaagcagcugagagagaacgccgaggacaugggcaacggcugcuucaagaucuaccacaagugcgacaacgccugcaucggcagcaucagaaacggcaccuacgaccacgacguguacagagacgaggcccugaacaacagauuccagaucaagggcguggagcugaagagcggcuacaaggacuggauccuguggaucagcuucgccaucagcugcuuccugcugugcguggugcugcugggcuucaucaugugggccugccagaagggcaacaucagaugcaacaucugcaucuga

SEQ ID NO: 168762 - RNA, 1701 nt, Artificial Sequence; identical to SEQ ID NO: 161402
  derived and/or modified CDS sequence (opt4) from hemagglutinin__InfluenzaA__AFH00802

SEQ ID NO: 168763 - RNA, 1701 nt, Artificial Sequence
  derived and/or modified CDS sequence (opt4) from hemagglutinin__InfluenzaA__AFH00813
augaagaccaucaucgcccugagcuacauccugugccugguguucgcccagaagcugcccggcaacgacaacagcaccgccacccugugccugggccaccacgccgugcccaacggcaccaucgugaagaccaucaccaacgaccagaucgaggugaccaacgccaccgagcuggugcagagcagcagcaccggcgagaucugcaacagcccccaccagauccuggacggcgagaacugcacccugaucgacgcccugcugggcgacccccagugcgacggcuuccagaacaagaagugggaccuguucguggagagaagcaaggcccacagcaacugcuaccccuacgacgugcccgacuacgccagccugagaagccugguggccagcagcggcacccuggaguucaacaacgagagcuucaacuggaccggcgugacccagaacggcaccagcagcgccugcaucagaagaagcaacaacagcuucuucagcagacugaacuggcugacccaccugaacuucaaguaccccgcccugaacgugaccaugcccaacaacgagcaguucgacaagcuguacaucuggggcgugcaccaccccggcaccgacaaggaccagaucuuccuguacgcccaggccagcggcagaaucaccgugagcaccaagagaagccagcaggccgugauccccaacaucggcagcagacccagagugagagacauccccagcagagugagcaucuacuggaccaucgugaagcccggcgacauccugcugaucaacagcaccggcaaccugaucgcccccagaggcuacuucaagaucagaagcggcaagagcagcaucaugagaagcgacgcccccaucggcaagugcaacagcgccugcaucacccccaacggcagcauccccaacgacaagcccuuccagaacgugaacagaaucaccuacggcgccugccccagauacgugaagcagaacacccugaagcuggccaccggcaugagaaacgugcccgagaagcagaccagaggcaucuucggcgccaucgccggcuucaucgagaacggcugggagggcaugguggacggcugguacggcuucagacaccagaacagcgagggcagaggccaggccgccgaccugaagagcacccaggccgccaucgaccagaucaacggcaagcugaacagacugaucggcaagaccaacgagaaguuccaccagaucgagaaggaguucagcgagguggagggcagaauccaggaccuggagaaguacguggaggacaccaagaucgaccuguggagcuacaacgccgagcugcugguggcccuggagaaccagcacaccaucgaccugaccgacagcgagaugaacaagcuguucgagaagaccaagaagcagcugagagagaacgccgaggacaugggcaacggcugcuucaagaucuaccacaagugcgacaacgccugcaucggcagcaucagaaacggcaccuacgaccacgacguguacagagacgaggcccugaacaacagauuccagaucaagggcguggagcugaagagcggcuacaaggacuggauccuguggaucagcuucgccaucagcugcuuccugcugugcguggcccugcugggcuucaucaugugggccugccagaagggcaacaucagaugcaacaucugcaucuga

SEQ ID NO: 168764 - RNA, 1701 nt, Artificial Sequence
  derived and/or modified CDS sequence (opt4) from hemagglutinin__InfluenzaA__AFH00824
augaagaccaucaucgcccugagcuacauccugagacugguguucgcccagaagcugcccggcaacgacaacagcaccgccacccugugccugggccaccacgccgugcccaacggcaccaucgugaagaccaucaccaacgaccagaucgaggugaccaacgccaccgagcuggugcagaacagcagcaucggcgagaucugcaacagcccccaccagauccuggacggcgagaacugcacccugaucgacgcccugcugggcgacccccagugcgacggcuuccagaacaagaagugggaccuguucguggagagaagcaaggccuacagcaacugcuaccccuacgacgugcccgacuacgccagccugagaagccugguggccagcagcggcacccuggaguucaacaacgagagcuucaacuggaccggcgugacccagaacggcaccagcagcgccugcaucagaagaagcaacaacagcuucuucagcagacugaacuggcugacccaccugaacuucaaguaccccgcccugaacgugaccaugcccaacaacgagcaguucgacaagcuguacaucuggggcgugcaccaccccggcaccgacaaggaccagaucuuccuguacgcccagagcagcggcagaaucaccgugagcaccaagagaagccagcaggccgugauccccaacaucggcagcagacccagaaucagagacauccccagcagaaucagcaucuacuggaccaucgugaagcccggcgacauccugcugaucaacagcaccggcaaccugaucgcccccagaggcuacuucaagaucagaagcggcaagagcagcaucaugagaagcgacgcccccaucggcaagugcaacagcgagugcaucacccccaacggcagcauccccaacgacaagcccuuccagaacgugaacagaaucaccuacggcgccugccccagauacgugaagcagagcacccugaagcuggccaccggcaugagaaacgugcccgagaagcagaccagaggcaucuucggcgccaucgccggcuucaucgagaacggcugggagggcaugguggacggcugguacggcuucagacaccagaacagcgagggcagaggccaggccgccgaccugaagagcacccaggccgccaucgaccagaucaacggcaagcugaacagacugaucggcaagaccaacgagaaguuccaccagaucgagaaggaguucagcgagguggagggcagaauccaggaccuggagaaguacguggaggacaccaagaucgaccuguggagcuacaacgccgagcugcugguggcccuggagaaccagcacaccaucgaccugaccgacagcgagaugaacaagcuguucgagaagaccaagaagcagcugagagagaacgccgaggacaugggcaacggcugcuucaagaucuaccacaagugcgacaacgccugcaucggcagcaucagaaacggcaccuacgaccacgacguguacagagacgaggcccugaacaacagauuccagaucaagggcguggagcugaagagcggcuacaaggacuggauccuguggaucagcuucgccaucagcugcuuccugcugugcguggcccugcugggcuucaucaugugggccugccagaagggcaacaucagaugcaacaucugcaucuga

SEQ ID NO: 168765 - RNA, 1701 nt, Artificial Sequence
  derived and/or modified CDS sequence (opt4) from hemagglutinin__InfluenzaA__AFH01407
augaagaccaucaucgcccugagcuacauccugugccugguguucgcccagaagcugcccggcaacgacaacagcaccgccacccugugccugggccaccacgccgugcccaacggcaccaucgugaagaccaucaccaacgaccagaucgaggugaccaacgccaccgagcuggugcagagcagcagcaccggcggcaucugcaacagcccccaccagauccuggacggcgagaacugcacccugaucgacgcccugcugggcgacccccagugcgacggcuuccagaacaagaagugggaccuguucguggagagaagcaaggccuacagcaacugcuaccccuacgacgugcccgacuacgccagccugagaagccugguggccagcagcggcacccuggaguucaacaacgagagcuucaacuggaccggcgugacccagaacggcaccagcagcgccugcaagagaagaagcaacaagagcuucuucagcagacugaacuggcugacccaccugaaguacaaguaccccgcccugaacgugaccaugcccaacaacgagaaguucgacaagcuguacaucuggggcgugcaccaccccggcaccgacagcgaccagaucagccuguacgcccaggccagcggcagaaucaccgugagcaccaagagaagccagcagaccgugauccccaacaucggcagcagacccagagugagagacaucagcagcagaaucagcaucuacuggaccaucgugaagcccggcgacauccugcugaucaacagcaccggcaaccugaucgcccccagaggcuacuucaagaucagaagcggcaagagcagcaucaugagaagcgacgcccccaucggcaagugcaacagcgagugcaucacccccaacggcagcauccccaacgacaagcccuuccagaacgugaacagaaucaccuacggcgccugccccagauacgugaagcagaacacccugaagcuggccaccggcaugagaaacgugcccgagaagcagaccagaggcaucuucggcgccaucgccggcuucaucgagaacggcugggagggcaugguggacggcugguacggcuucagacaccagaacagcgagggcaccggccaggccgccgaccugaagagcacccaggccgccaucaaccagaucaacggcaagcugaacagacugaucggcaagaccaacgagaaguuccaccagaucgagaaggaguucagcgagguggagggcagaauccaggaccuggagaaguacguggaggacaccaagaucgaccuguggagcuacaacgccgagcugcugguggcccuggagaaccagcacaccaucgaccugaccgacagcgagaugaacaagcuguucgagagaaccaagaagcagcugagagagaacgccgaggacaugggcaacggcugcuucaagaucuaccacaagugcgacaacgccugcaucgagagcaucagaaacggcaccuacgaccacgacguguacagagacgaggcccugaacaacagauuccagaucaagggcguggagcugaagagcggcuacaaggacuggauccuguggaucagcuucgccaucagcugcuuccugcugugcguggcccugcugggcuucaucaugugggccugccagaagggcaacaucagaugcaacaucugcaucuga

SEQ ID NO: 168766 - RNA, 1701 nt, Artificial Sequence
  derived and/or modified CDS sequence (opt4) from hemagglutinin__InfluenzaA__AFH34940
augaagaccaucaucgcccugagcuacauccugugccugguguucgcccagaagcugcccggcaacgacaacagcaccgccacccugugccugggccaccacgccgugcccaacggcaccaucgugaagaccaucaccaacgaccagaucgaggugaccaacgccaccgagcuggugcagagcagcagcaccggcgagaucugcgacagcccccaccagauccuggacggcgagaacugcacccugaucgacgcccugcugggcgacccccagugcgacggcuuccagaacaagaagugggaccuguucguggagagaagcaaggccuacagcaacugcuaccccuacgacgugcccgacuacgccagccugagaagccugguggccagcagcggcacccuggaguucaacaacgagagcuucaacuggaccggcgugacccagaacggcaccagcagcgccugcaucagaagaagcaacagcagcuucuucagcagacugaacuggcugacccaccugaacuucaaguaccccgcccugaacgugaccaugcccaacaacgagcaguucgacaagcuguacaucuggggcgugcaccaccccggcaccgacaaggaccagaucuuccuguacgcccagagcagcggcagaaucaccgugagcaccaagagaagccagcaggccgugauccccaacaucggcagcagacccagaaucagaaacauccccagcagaaucagcaucuacuggaccaucgugaagcccggcgacauccugcugaucaacagcaccggcaaccugaucgcccccagaggcuacuucaagaucagaagcggcaagagcagcaucaugagaagcgacgcccccaucggcaagugcaacagcgagugcaucacccccaacggcagcauccccaacgacaagcccuuccagaacgugaacagaaucaccuacggcgccugccccagauacgugaagcagagcacccugaagcuggccaccggcaugagaaacgugcccgagaagcagaccagaggcaucuucggcgccaucgccggcuucaucgagaacggcugggagggcaugguggacggcugguacggcuucagacaccagaacagcgagggcagaggccaggccgccgaccugaagagcacccaggccgccaucgaccagaucaacggcaagcugaacagacugaucggcaagaccaacgagaaguuccaccagaucgagaaggaguucagcgagguggagggcagaauccaggaccuggagaaguacguggaggacaccaagaucgaccuguggagcuacaacgccgagcugcugguggcccuggagaaccagcacaccaucgaccugaccggcagcgagaugaacaagcuguucgagaagaccaagaagcagcugagagagaacgccgaggacaugggcaacggcugcuucaagaucuaccacaagugcgacaacgccugcaucggcagcaucagaaacggcaccuacaaccacgacguguacagagacgaggcccugaacaacagauuccagaucaagggcguggagcugaagagcggcuacaaggacuggauccuguggaucagcuucgccaucagcugcuuccugcugugcguggcccugcugggcuucaucaugugggccugccagaagggcaacaucagaugcaacaucugcaucuga

SEQ ID NO: 168767 - RNA, 1701 nt, Artificial Sequence
  derived and/or modified CDS sequence (opt4) from hemagglutinin__InfluenzaA__AFH34961
augaagaccaucaucgcccugagcuacauccugugccugguguucgcccagaagcugcccggcaacgacaacagcaccgccacccugugccugggccaccacgccgugcccaacggcaccaucgugaagaccaucaccaacgaccagaucgaggugaccaacgccaccgagcuggugcagagcagcagcaccggcgagaucugcgacagcccccaccagauccuggacggcgagaacugcacccugaucgacgcccugcugggcgacccccagugcgacggcuuccagaacaagaagugggaccuguucguggagagaagcaaggccuacagcaacugcuaccccuacgacgugcccgacuacgccagccugagaagccugguggccgccagcggcacccuggaguucaacaacgagagcuucaacuggaccggcgugacccagaacggcaccagcagcgccugcaucagaagaagcaacagcagcuucuucagcagacugaacuggcugacccaccugaacuucaaguaccccgcccugaacgugaccaugcccaacaacgagcaguucgacaagcuguacaucuggggcgugcaccaccccggcaccgacaaggaccagaucuuccuguacgcccagagcagcggcagaaucaccgugagcaccaagagaagccagcaggccgugauccccaacaucggcagcagacccagaaucagaaacauccccagcagaaucagcaucuacuggaccaucgugaagcccggcgacauccugcugaucaacagcaccggcaaccugaucgcccccagaggcuacuucaagaucagaagcggcaagagcagcaucaugagaagcgacgcccccaucggcaagugcaacagcgagugcaucacccccaacggcagcauccccaacgacaagcccuuccagaacgugaacagaaucaccuacggcgccugccccagauacgugaagcagagcacccugaagcuggccaccggcaugagaaacgugcccgagaagcagaccagaggcaucuucggcgccaucgccggcuucaucgagaacggcugggagggcaugguggacggcugguacggcuucagacaccagaacagcgagggcagaggccaggccgccgaccugaagagcacccaggccgccaucgaccagaucaacggcaagcugaacagacugaucggcaagaccaacgagaaguuccaccagaucgagaaggaguucagcgagguggagggcagaauccaggaccuggagaaguacguggaggacaccaagaucgaccuguggagcuacaacgccgagcugcugguggcccuggagaaccagcacaccaucgaccugaccgacagcgagaugaacaagcuguucgagaagaccaagaagcagcugagagagaacgccgaggacaugggcaacggcugcuucaagaucuaccacaagugcgacaacgccugcaucggcagcaucagaaacggcaccuacaaccacgacguguacagagacgaggcccugaacaacagauuccagaucaagggcguggagcugaagagcggcuacaaggacuggauccuguggaucagcuucgccaucagcugcuuccugcugugcguggcccugcugggcuucaucaugugggccugccagaagggcaacaucagaugcaacaucugcaucuga

SEQ ID NO: 168768 - RNA, 1701 nt, Artificial Sequence
  derived and/or modified CDS sequence (opt4) from hemagglutinin__InfluenzaA__AFH34968
augaagaccaucaucgcccugagcuacauccugugccugguguucgcccagaagcugcccggcaacgacaacagcaccgccacccugugccugggccaccacgccgugcccaacggcaccaucgugaagaccaucaccaacgaccagaucgaggugaccaacgccaccgagcuggugcagagcagcagcaccggcgagaucugcgacagcccccaccagauccuggacggcgagaacugcacccugaucgacgcccugcugggcgacccccagugcgacggcuuccagaacaagaagugggaccuguucguggagagaagcaaggccuacagcaacugcuaccccuacgacgugcccgacuacgccagccugagaagccugguggccgccagcggcacccuggaguucaacaacgagagcuucaacuggaccggcgugacccagaacggcaccagcagcgccugcaucagaagaagcaacagcagcuucuucagcagacugaacuggcugacccaccugaacuucaaguaccccgcccugaacgugaccaugcccaacaacgagcaguucgacaagcuguacaucuggggcgugcaccaccccggcaccgacaaggaccagaucuuccuguacgcccagagcagcggcagaaucaccgugagcaccaagagaagccagcaggccgugauccccaacaucggcagcagacccagaaucagagacauccccagcagaaucagcaucuacuggaccaucgugaagcccggcgacauccugcugaucaacagcaccggcaaccugaucgcccccagaggcuacuucaagaucagaagcggcaagagcagcaucaugagaagcgacgcccccaucggcaagugcaacagcgccugcaucacccccaacggcagcauccccaacgacaagcccuuccagaacgugaacagaaucaccuacggcgccugccccagauacgugaagcagagcacccugaagcuggccaccggcaugagaaacgugcccgagaagcagaccagaggcaucuucggcgccaucgccggcuucaucgagaacggcugggagggcaugguggacggcugguacggcuucagacaccagaacagcgagggcagaggccaggccgccgaccugaagagcacccaggccgccaucgaccagaucaacggcaagcugaacagacugaucggcaagaccaacgagaaguuccaccagaucgagaaggaguucagcgagguggagggcagaauccaggaccuggagaaguacguggaggacaccaagaucgaccuguggagcuacaacgccgagcugcugguggcccuggagaaccagcacaccaucgaccugaccgacagcgagaugaacaagcuguucgagaagaccaagaagcagcugagagagaacgccgaggacaugggcaacggcugcuucaagaucuaccacaagugcgacaacgccugcaucggcagcaucagaaacggcaccuacaaccacgacguguacagagacgaggcccugaacaacagauuccagaucaagggcguggagcugaagagcggcuacaaggacuggauccuguggaucagcuucgccaucagcugcuuccugcugugcguggcccugcugggcuucaucaugugggccugccagaagggcaacaucagaugcaacaucugcaucuga

SEQ ID NO: 168769 - RNA, 1701 nt, Artificial Sequence
  derived and/or modified CDS sequence (opt4) from hemagglutinin__InfluenzaA__AFH34975
augaagaccaucaucgcccugagcuacauccugugccugguguucgcccagaagcugcccggcaacgacaacagcaccgccacccugugccugggccaccacgccgugcccaacggcaccaucgugaagaccaucaccaacgacagaaucgaggugaccaacgccaccgagcuggugcagaacagcagcaucggcgagaucugcgacagcccccaccagauccuggacggcgagaacugcacccugaucgacgcccugcugggcgacccccagugcgacggcuuccagaacaagaagugggaccuguucguggagagaagcaaggccuacagcaacugcuaccccuacgacgugcccgacuacgccagccugagaagccugguggccagcagcggcacccuggaguucaacaacgagagcuucaacuggaacggcgugacccagaacggcaccagcagcgccugcaucagaagaagcaacaacagcuucuucagcagacugaacuggcugacccaccugaacuucaaguaccccgcccugaacgugaccaugcccaacaacgagcaguucgacaagcuguacaucuggggcgugcaccaccccggcaccgacaaggaccagaucuuccuguacgcccagcccagcggcagaaucaccgugagcaccaagagaagccagcaggccgugauccccaacaucggcagcagacccagaaucagaaacauccccagcagaaucagcaucuacuggaccaucgugaagcccggcgacauccugcugaucaacagcaccggcaaccugaucgcccccagaggcuacuucaagaucagaagcggcaagagcagcaucaugagaagcgacgcccccaucggcaagugcaagagcgagugcaucacccccaacggcagcauccccaacgacaagcccuuccagaacgugaacagaaucaccuacggcgccugccccagauacgugaagcagagcacccugaagcuggccaccggcaugagaaacgugcccgagaagcagaccagaggcaucuucggcgccaucgccggcuucaucgagaacggcugggagggcaugguggacggcugguacggcuucagacaccagaacagcgagggcagaggccaggccgccgaccugaagagcacccaggccgccaucgaccagaucaacggcaagcugaacagacugaucggcaagaccaacgagaaguuccaccagaucgagaaggaguucagcgagguggagggcagaauccaggaccuggagaaguacguggaggacaccaagaucgaccuguggagcuacaacgccgagcugcugguggcccuggagaaccagcacaccaucgaccugaccgacagcgagaugaacaagcuguucgagaagaccaagaagcagcugagagagaacgccgaggacaugggcaacggcugcuucaagaucuaccacaagugcgacaacgccugcaucggcagcaucagaaacggcaccuacgaccacgacguguacagagacgaggcccugaacaacagauuccagaucaagggcguggagcugaagagcggcuacaaggacuggauccuguggaucagcuucgccaucagcugcuuccugcugugcguggcccugcugggcuucaucaugugggccugccagaagggcaacaucagaugcaacaucugcaucuga

SEQ ID NO: 168770 - RNA, 1701 nt, Artificial Sequence; identical to SEQ ID NO: 163471
  derived and/or modified CDS sequence (opt4) from hemagglutinin__InfluenzaA__AFH74464

SEQ ID NO: 168771 - RNA, 1701 nt, Artificial Sequence; identical to SEQ ID NO: 162729
  derived and/or modified CDS sequence (opt4) from hemagglutinin__InfluenzaA__AFH74465

SEQ ID NO: 168772 - RNA, 1701 nt, Artificial Sequence; identical to SEQ ID NO: 163490
  derived and/or modified CDS sequence (opt4) from hemagglutinin__InfluenzaA__AFH74477

SEQ ID NO: 168773 - RNA, 1701 nt, Artificial Sequence
  derived and/or modified CDS sequence (opt4) from hemagglutinin__InfluenzaA__AFH74488
augaagaccaucaucgcccugagcuacauccugugccugguguucgcccagaagcugcccggcaacgacaacagcaccgccacccugugccugggccaccacgccgugcccaacggcaccaucgugaagaccaucaccaacgaccagaucgaggugaccaacgccaccgagcuggugcagagcagcagcaccggcgagaucugcgacaacccccaccagauccuggacggcaagaacugcacccugaucgacgcccugcugggcgacccccagugcgacggcuuccagaacaagaagugggaccuguucguggagagaagcaaggccuacagcaacugcuaccccuacgacgugcccgacuacgccagccugagaagccugguggccagcagcggcacccuggaguucaacaacgagagcuucaacuggaccggcgugacccagaacggcaccagcagcgccugcaucagaagaagcaagaacagcuucuucagcagacugaacuggcugacccaccugaacuucaaguaccccgcccugaacgugaccaugcccaacaacgagcaguucgacaagcuguacaucuggggcgugcaccaccccggcaccgacaaggaccagaucuuccuguacgcccaggccagcggcagaaucaccgugagcaccaagagaagccagcagaccgugauccccaacaucggcagcagacccagagugagaaacauccccagcagaaucagcaucuacuggaccaucgugaagcccggcgacauccugcugaucaacagcaccggcaaccugaucgcccccagaggcuacuucaagaucagaagcggcaagagcagcaucaugagaagcgacgcccccaucggcaagugcaacagcgagugcaucacccccaacggcagcauccccaacgacaagcccuuccagaacgugaacagaaucaccuacggcgccugccccagauacgugaagcagaacacccugaagcuggccaccggcaugagaaacgugcccgagaagcagaccagaggcaucuucggcgccaucgccggcuucaucgagaacggcugggagggcaugguggacggcugguacggcuucagacaccagaacagcgagggcagaggccaggccgccgaccugaagagcacccaggccgccaucgaccagaucaacggcaagcugaacagacugaucggcaagaccaacgagaaguuccaccagaucgagaaggaguucagcgagguggagggcagaauccaggaccuggagaaguacguggaggacaccaagaucgaccuguggagcuacaacgccgagcugcugguggcccuggagaaccagcacaccaucgaccugaccgacagcgagaugaacaagcuguucgagagaaccaagaagcagcugagagagaacgccgaggacaugggcaacggcugcuucaagaucuaccacaagugcgacaacgccugcaucggcagcaucagaaacggcaccuacgaccacgacguguacagagacgaggcccugaacaacagauuccagaucaagggcguggagcugaagagcggcuacaaggacuggauccuguggaucagcuucgccaucagcugcuuccugcugugcguggcccugcugggcuucaucaugugggccugccagaagggcaacaucagaugcaacaucugcaucuga

SEQ ID NO: 168774 - RNA, 1701 nt, Artificial Sequence; identical to SEQ ID NO: 163471
  derived and/or modified CDS sequence (opt4) from hemagglutinin__InfluenzaA__AFH74499

SEQ ID NO: 168775 - RNA, 1701 nt, Artificial Sequence; identical to SEQ ID NO: 163673
  derived and/or modified CDS sequence (opt4) from hemagglutinin__InfluenzaA__AFH74510

SEQ ID NO: 168776 - RNA, 1701 nt, Artificial Sequence
  derived and/or modified CDS sequence (opt4) from hemagglutinin__InfluenzaA__AFH74521
augaagaccaucaucgcccugagcuacauccugugccugguguucgcccagaagauccccggcaacgacaacagcaccgccacccugugccugggccaccacgccgugcccaacggcaccaucgugaagaccaucaccaacgaccagaucgaggugaccaacgccaccgagcuggugcagagcagcagcaccggcgagaucugcaacagcccccaccagauccuggacggcgagaacugcacccugaucgacgcccugcugggcgacccccagugcgacggcuuccagaacaagaagugggaccuguucguggagagaagcaaggccuacagcaacugcuaccccuacgacgugcccgacuacgccagccugagaagccugguggccagcagcggcacccuggaguucaacaacgagagcuucaacuggaccggcgugacccagaacggcaccagcagcgccugcaucagaagaagcaacaacagcuucuucagcagacugaacuggcugacccacagcaagagcaaguaccccgcccugaacgugaccaugcccaacaacgagcaguucgacaagcuguacaucuggggcgugcaccaccccggcaccgacaacgaccagaucuuccuguacgcccaggccagcggcagaaucaccgugagcaccaagagaagccagcagaccgugauccccaacaucggcagcagacccagaaucagagacauccccagcagaaucagcaucuacuggaccaucgugaagcccggcgacauccugcugaucaacagcaccggcaaccugaucgcccccagaggcuacuucaagaucagaagcggcaagagcagcaucaugaagagcgacgcccccaucggcaagugcaacagcgagugcaucacccccaacggcagcauccccaacgacaagcccuuccagaacgugaacagaaucaccuacggcgccugccccagauacgugaagcagaacacccugaagcuggccaccggcaugagaaacgugcccgagaagcagaccagaggcaucuucggcgccaucgccggcuucaucgagaacggcugggagggcaugguggacggcugguacggcuucagacaccagaacagcgagggcagaggccaggccgccgaccugaagagcacccaggccgccaucgaccagaucaacggcaagcugaacagacugaucggcaagaccaacgagaaguuccaccagaucgagaaggaguucagcgagguggagggcagaauccaggaccuggagaaguacguggaggacaccaagguggaccuguggagcuacaacgccgagcugcugguggcccuggagaaccagcacaccaucgaccugaccgacagcgagaugaacaagcuguucgagaagaccaagaagcagcugagagagaacgccgaggacaugggcaacggcugcuucaagaucuaccacaagugcgacaacgccugcaucggcagcaucagaaacggcaccuacgaccacgacguguacagagacgaggcccugaacaacagauuccagaucaagggcguggagcugaagagcggcuacaaggacuggauccuguggaucagcuucgccaucagcugcuuccugcugugcguggcccugcugggcuucaucaugugggccugccagaagggcaacaucagaugcaacaucugcaucuga

SEQ ID NO: 168777 - RNA, 1701 nt, Artificial Sequence; identical to SEQ ID NO: 167048
  derived and/or modified CDS sequence (opt4) from hemagglutinin__InfluenzaA__AFH74532

SEQ ID NO: 168778 - RNA, 1701 nt, Artificial Sequence; identical to SEQ ID NO: 163673
  derived and/or modified CDS sequence (opt4) from hemagglutinin__InfluenzaA__AFH74543

SEQ ID NO: 168779 - RNA, 1701 nt, Artificial Sequence; identical to SEQ ID NO: 163673
  derived and/or modified CDS sequence (opt4) from hemagglutinin__InfluenzaA__AFH74554

SEQ ID NO: 168780 - RNA, 1701 nt, Artificial Sequence; identical to SEQ ID NO: 163673
  derived and/or modified CDS sequence (opt4) from hemagglutinin__InfluenzaA__AFH74565

SEQ ID NO: 168781 - RNA, 1701 nt, Artificial Sequence; identical to SEQ ID NO: 163673
  derived and/or modified CDS sequence (opt4) from hemagglutinin__InfluenzaA__AFH74576

SEQ ID NO: 168782 - RNA, 1701 nt, Artificial Sequence; identical to SEQ ID NO: 163673
  derived and/or modified CDS sequence (opt4) from hemagglutinin__InfluenzaA__AFH74587

SEQ ID NO: 168783 - RNA, 1701 nt, Artificial Sequence
  derived and/or modified CDS sequence (opt4) from hemagglutinin__InfluenzaA__AFH74598
augaagaccaucaucgcccugagcuacauccugugccugguguucgcccagaagcugcccgagaacgacaacagcaccgccacccugugccugggccaccacgccgugcccaacggcaccaucgugaagaccaucaccaacgaccagaucgaggugaccaacgccaccgagcuggugcagagcagcagcaccggcgagaucugcgacagcccccaccagauccuggacggcaagaacugcacccugaucgacgcccugcugggcgacccccagugcgacggcuuccagaacaagaagugggaccuguucguggagagaagcaaggccuacagcaacugcuaccccuacgacgugcccgacuacgccagccugagaagccugguggccagcagcggcacccuggaguucaacaacgagagcuucaacuggaccggcgugacccagaacggcaccagcagcgccugcaucagaagaagcaagaacagcuucuucagcagacugaacuggcugacccaccugaacuucaaguaccccgcccugaacgugaccaugcccaacaacgagcaguucgacaagcuguacaucuggggcgugcaccaccccggcaccgacaaggaccagaucuuccuguacgcccaggccagcggcagaaucaccgugagcaccaagagaagccagcagaccgccauccccaacaucggcagcagacccagagugagaaacauccccagcagaaucagcaucuacuggaccaucgugaagcccggcgacauccugcugaucaacagcaccggcaaccugaucgcccccagaggcuacuucaagaucagaagcggcaagagcagcaucaugagaagcgacgcccccaucggcaagugcaacagcgagugcaucacccccaacggcagcauccccaacgacaagcccuuccagaacgugaacagaaucaccuacggcgccugccccagauacgugaagcagaacacccugaagcuggccaccggcaugagaaacgugcccgagaagcagaccagaggcaucuucggcgccaucgccggcuucaucgagaacggcugggagggcaugguggacggcugguacggcuucagacaccagaacagcgagggcagaggccaggccgccgaccugaagagcacccaggccgccaucgaccagaucaacggcaagcugaacagacugaucggcaagaccaacgagaaguuccaccagaucgagaaggaguucagcgagguggagggcagaauccaggaccuggagaaguacguggaggacaccaagaucgaccuguggagcuacaacgccgagcugcugguggcccuggagaaccagcacaccaucgaccugaccgacagcgagaugaacaagcuguucgagaagaccaagaagcagcugagagagaacgccgaggacaugggcaacggcugcuucaagaucuaccacaagugcgacaacgccugcaucggcagcaucagaaacggcaccuacgaccacgacguguacagagacgaggcccugaacaacagauuccagaucaagggcguggagcugaagagcggcuacaaggacuggauccuguggaucagcuucgccaucagcugcuuccugcugugcguggcccugcugggcuucaucaugugggccugccagaagggcaacaucagaugcaacaucugcaucuga

SEQ ID NO: 168784 - RNA, 1701 nt, Artificial Sequence; identical to SEQ ID NO: 163471
  derived and/or modified CDS sequence (opt4) from hemagglutinin__InfluenzaA__AFH74609

SEQ ID NO: 168785 - RNA, 1701 nt, Artificial Sequence; identical to SEQ ID NO: 163673
  derived and/or modified CDS sequence (opt4) from hemagglutinin__InfluenzaA__AFH74620

SEQ ID NO: 168786 - RNA, 1701 nt, Artificial Sequence
  derived and/or modified CDS sequence (opt4) from hemagglutinin__InfluenzaA__AFH74631
augaagaccaucaucgcccugagcuacauccugugccugguguucgcccagaagcugcccggcaacgacaacagcaccgccacccugugccugggccaccacgccgugcccaacggcaccaucgugaagaccaucaccaacgaccagaucgaggugaccaacgccaccgagcuggugcagagcagcagcaccggcgagaucugcgacagcccccaccagauccuggacggcaccaacugcacccugaucgacgcccugcugggcgacccccagugcgacggcuuccagaacaagaagugggaccuguucguggagagaagcaaggccuacagcaacugcuaccccuacgacgugcccgacuacgccagccugagaagccugguggccagcagcggcacccuggaguucaacaacgagagcuucaacuggaccggcgugacccagaacggcaccagcagcgccugcaucagaagaagcaagaacagcuucuucagcagacugaacuggcugacccaccugaacuucaaguaccccgcccugaacgugaccaugcccaacaacgagcaguucgacaagcuguacaucuggggcgugcaccaccccggcaccgacaaggaccagaucuuccuguacgcccaggccagcggcagaaucaccgugagcaccaagagaagccagcagaccgccauccccaacaucggcagcagacccagagugagaaacauccccagcagaaucagcaucuacuggaccaucgugaagcccggcgacauccugcugaucaacagcaccggcaaccugaucgcccccagaggcuacuucaagaucagaagcggcaagagcagcaucaugagaagcgacgcccccaucggcaagugcaacagcgagugcaucacccccaacggcagcauccccaacgacaagcccuuccagaacgugaacagaaucaccuacggcgccugccccagauacgugaagcagaacacccugaagcuggccaccggcaugagaaacgugcccgagaagcagaccagaggcaucuucggcgccaucgccggcuucaucgagaacggcugggagggcaugguggacggcugguacggcuucagacaccagaacagcgagggcagaggccaggccgccgaccugaagagcacccaggccgccaucgaccagaucaacggcaagcugaacagacugaucggcaagaccaacgagaaguuccaccagaucgagaaggaguucagcgagguggagggcagaauccaggaccuggagaaguacguggaggacaccaagaucgaccuguggagcuacaacgccgagcugcugguggcccuggagaaccagcacaccaucgaccugaccgacagcgagaugaacaagcuguucgagaagaccaagaagcagcugagagagaacgccgaggacaugggcaacggcugcuucaagaucuaccacaagugcgacaacgccugcaucggcagcaucagaaacggcaccuacgaccacgacguguacagagacgaggcccugaacaacagauuccagaucaagggcguggagcugaagagcggcuacaaggacuggauccuguggaucagcuucgccaucagcugcuuccugcugugcguggcccugcugggcuucaucaugugggccugccagaagggcaacaucagaugcaacaucugcaucuga

SEQ ID NO: 168787 - RNA, 1701 nt, Artificial Sequence; identical to SEQ ID NO: 163471
  derived and/or modified CDS sequence (opt4) from hemagglutinin__InfluenzaA__AFH74642

SEQ ID NO: 168788 - RNA, 1701 nt, Artificial Sequence; identical to SEQ ID NO: 163471
  derived and/or modified CDS sequence (opt4) from hemagglutinin__InfluenzaA__AFH74653

SEQ ID NO: 168789 - RNA, 1701 nt, Artificial Sequence; identical to SEQ ID NO: 163471
  derived and/or modified CDS sequence (opt4) from hemagglutinin__InfluenzaA__AFH74664

SEQ ID NO: 168790 - RNA, 1701 nt, Artificial Sequence; identical to SEQ ID NO: 163471
  derived and/or modified CDS sequence (opt4) from hemagglutinin__InfluenzaA__AFH74675

SEQ ID NO: 168791 - RNA, 1701 nt, Artificial Sequence; identical to SEQ ID NO: 168219
  derived and/or modified CDS sequence (opt4) from hemagglutinin__InfluenzaA__AFH74686

SEQ ID NO: 168792 - RNA, 1701 nt, Artificial Sequence; identical to SEQ ID NO: 168219
  derived and/or modified CDS sequence (opt4) from hemagglutinin__InfluenzaA__AFH74697

SEQ ID NO: 168793 - RNA, 1701 nt, Artificial Sequence; identical to SEQ ID NO: 163673
  derived and/or modified CDS sequence (opt4) from hemagglutinin__InfluenzaA__AFH74708

SEQ ID NO: 168794 - RNA, 1701 nt, Artificial Sequence; identical to SEQ ID NO: 163673
  derived and/or modified CDS sequence (opt4) from hemagglutinin__InfluenzaA__AFH74719

SEQ ID NO: 168795 - RNA, 1701 nt, Artificial Sequence; identical to SEQ ID NO: 163673
  derived and/or modified CDS sequence (opt4) from hemagglutinin__InfluenzaA__AFH74730

SEQ ID NO: 168796 - RNA, 1701 nt, Artificial Sequence
  derived and/or modified CDS sequence (opt4) from hemagglutinin__InfluenzaA__AFH74741
augaagaccaucaucgcccugagcuacauccugugccugguguucgcccagaagcugcccggcaacgacaacagcaccgccacccugugccugggccaccacgccgugcccaacggcaccaucgugaagaccaucaccaacgaccagaucgaggugaccaacgccaccgagcuggugcagaacagcagcaccggcgagaucugcgacagcccccaccagauccuggacggcaagaacugcacccugaucgacgcccugcugggcgacccccagugcgacggcuuccagaacaagaagugggaccuguucguggagagaagcaaggccuacagcaacugcuaccccuacgacgugcccgacuacgccagccugagaagccugguggccagcagcggcacccuggaguucaacaacgagagcuucaacuggaccggcgugacccagaacggcaccagcagcgccugcaucagaagaagcaagaacagcuucuucagcagacugaacuggcugacccaccugaacuucaaguaccccgcccugaacgugaccaugcccaacaacgagcaguucgacaagcuguacaucuggggcgugcaccaccccggcaccgacaaggaccagaucuuccuguacgcccaggccagcggcagaaucaccgugagcaccaagagaagccagcagaccgccauccccaacaucggcagcagacccagagugagaaacauccccagcagaaucagcaucuacuggaccaucgugaagcccggcgacauccugcugaucaacagcaccggcaaccugaucgcccccagaggcuacuucaagaucagaagcggcaagagcagcaucaugagaagcgacgcccccaucggcaagugcaacagcgagugcaucacccccaacggcagcauccccaacgacaagcccuuccagaacgugaacagaaucaccuacggcgccugccccagauacgugaagcagaacacccugaagcuggccaccggcaugagaaacgugcccgagaagcagaccagaggcaucuucggcgccaucgccggcuucaucgagaacggcugggagggcaugguggacggcugguacggcuucagacaccagaacagcgagggcagaggccaggccgccgaccugaagagcacccaggccgccaucgaccagaucaacggcaagcugaacagacugaucggcaagaccaacgagaaguuccaccagaucgagaaggaguucagcgagguggagggcagaauccaggaccuggagaaguacguggaggacaccaagaucgaccuguggagcuacaacgccgagcugcugguggcccuggagaaccagcacaccaucgaccugaccgacagcgagaugaacaagcuguucgagaagaccaagaagcagcugagagagaacgccgaggacaugggcaacggcugcuucaagaucuaccacaagugcgacaacgccugcaucggcagcaucagaaacggcaccuacgaccacgacguguacagagacgaggcccugaacaacagauuccagaucaagggcguggagcugaagagcggcuacaaggacuggauccuguggaucagcuucgccaucagcugcuuccugcugugcguggcccugcugggcuucaucaugugggccugccagaagggcaacaucagaugcaacaucugcaucuga

SEQ ID NO: 168797 - RNA, 1701 nt, Artificial Sequence; identical to SEQ ID NO: 163673
  derived and/or modified CDS sequence (opt4) from hemagglutinin__InfluenzaA__AFH74752

SEQ ID NO: 168798 - RNA, 1701 nt, Artificial Sequence; identical to SEQ ID NO: 163673
  derived and/or modified CDS sequence (opt4) from hemagglutinin__InfluenzaA__AFH74763

SEQ ID NO: 168799 - RNA, 1701 nt, Artificial Sequence; identical to SEQ ID NO: 163673
  derived and/or modified CDS sequence (opt4) from hemagglutinin__InfluenzaA__AFH74774

SEQ ID NO: 168800 - RNA, 1701 nt, Artificial Sequence; identical to SEQ ID NO: 167048
  derived and/or modified CDS sequence (opt4) from hemagglutinin__InfluenzaA__AFH74785

SEQ ID NO: 168801 - RNA, 1701 nt, Artificial Sequence; identical to SEQ ID NO: 163673
  derived and/or modified CDS sequence (opt4) from hemagglutinin__InfluenzaA__AFH74796

SEQ ID NO: 168802 - RNA, 1701 nt, Artificial Sequence; identical to SEQ ID NO: 168229
  derived and/or modified CDS sequence (opt4) from hemagglutinin__InfluenzaA__AFH74807

SEQ ID NO: 168803 - RNA, 1701 nt, Artificial Sequence; identical to SEQ ID NO: 168229
  derived and/or modified CDS sequence (opt4) from hemagglutinin__InfluenzaA__AFH74818

SEQ ID NO: 168804 - RNA, 1701 nt, Artificial Sequence; identical to SEQ ID NO: 168229
  derived and/or modified CDS sequence (opt4) from hemagglutinin__InfluenzaA__AFH74829

SEQ ID NO: 168805 - RNA, 1701 nt, Artificial Sequence; identical to SEQ ID NO: 168229
  derived and/or modified CDS sequence (opt4) from hemagglutinin__InfluenzaA__AFH74840

SEQ ID NO: 168806 - RNA, 1701 nt, Artificial Sequence
  derived and/or modified CDS sequence (opt4) from hemagglutinin__InfluenzaA__AFH74851
augaagaccaucaucgcccugagcuacauccugugccugguguucgcccagaagcugcccggcaacgacaacagcaccgccacccugugccugggccaccacgccgugcccaacggcaccaucgugaagaccaucaccaacgaccagaucgaggugaccaacgccaccgagcuggugcagagcagcagcaccggcgagaucugcgacagcccccaccagauccuggacggcaagaacugcacccugaucgacgcccugcugggcgacccccagugcgacggcuuccagaacaagaagugggaccuguucguggagagaagcaaggccuacggcaacugcuaccccuacgacgugcccgacuacgccagccugagaagccugguggccagcagcggcacccuggaguucaacaacgagagcuucaacuggaccggcgugacccagaacggcaccagcagcgccugcaucagaagaagcaagaacagcuucuucagcagacugaacuggcugacccaccugaacuucaaguaccccgcccugaacgugaccaugcccaacaacgagcaguucgacaagcuguacaucuggggcgugcaccaccccggcaccgacaaggaccagaucuuccuguacgcccaggccagcggcagaaucaccgugagcaccaagagaagccagcagaccgccauccccaacaucggcagcagacccagagugagaaacauccccagcagaaucagcaucuacuggaccaucgugaagcccggcgacauccugcugaucaacagcaccggcaaccugaucgcccccagaggcuacuucaagaucagaagcggcaagagcagcaucaugagaagcgacgcccccaucggcaagugcaacagcgagugcaucacccccaacggcagcauccccaacgacaagcccuuccagaacgugaacagaaucaccuacggcgccugccccagauacgugaagcagaacacccugagacuggccaccggcaugagaaacgugcccgagaagcagaccagaggcaucuucggcgccaucgccggcuucaucgagaacggcugggagggcaugguggacggcugguacggcuucagacaccagaacagcgagggcagaggccaggccgccgaccugaagagcacccaggccgccaucgaccagaucaacggcaagcugaacagacugaucggcaagaccaacgagaaguuccaccagaucgagaaggaguucagcgagguggagggcagaauccaggaccuggagaaguacguggaggacaccaagaucgaccuguggagcuacaacgccgagcugcugguggcccuggagaaccagcacaccaucgaccugaccgacagcgagaugaacaagcuguucgagaagaccaagaagcagcugagagagaacgccgaggacaugggcaacggcugcuucaagaucuaccacaagugcgacaacgccugcaucggcagcaucagaaacggcaccuacgaccacgacguguacagagacgaggcccugaacaacagauuccagaucaagggcguggagcugaagagcggcuacaaggacuggauccuguggaucagcuucgccaucagcugcuuccugcugugcguggcccugcugggcuucaucaugugggccugccagaagggcaacaucagaugcaacaucugcaucuga

SEQ ID NO: 168807 - RNA, 1701 nt, Artificial Sequence; identical to SEQ ID NO: 168232
  derived and/or modified CDS sequence (opt4) from hemagglutinin__InfluenzaA__AFH74862

SEQ ID NO: 168808 - RNA, 1701 nt, Artificial Sequence; identical to SEQ ID NO: 168232
  derived and/or modified CDS sequence (opt4) from hemagglutinin__InfluenzaA__AFH74873

SEQ ID NO: 168809 - RNA, 1701 nt, Artificial Sequence; identical to SEQ ID NO: 163673
  derived and/or modified CDS sequence (opt4) from hemagglutinin__InfluenzaA__AFH74884

SEQ ID NO: 168810 - RNA, 1701 nt, Artificial Sequence; identical to SEQ ID NO: 163673
  derived and/or modified CDS sequence (opt4) from hemagglutinin__InfluenzaA__AFH74895

SEQ ID NO: 168811 - RNA, 1701 nt, Artificial Sequence; identical to SEQ ID NO: 163673
  derived and/or modified CDS sequence (opt4) from hemagglutinin__InfluenzaA__AFH74906

SEQ ID NO: 168812 - RNA, 1701 nt, Artificial Sequence; identical to SEQ ID NO: 163471
  derived and/or modified CDS sequence (opt4) from hemagglutinin__InfluenzaA__AFH74917

SEQ ID NO: 168813 - RNA, 1701 nt, Artificial Sequence; identical to SEQ ID NO: 163673
  derived and/or modified CDS sequence (opt4) from hemagglutinin__InfluenzaA__AFH74928

SEQ ID NO: 168814 - RNA, 1701 nt, Artificial Sequence; identical to SEQ ID NO: 163673
  derived and/or modified CDS sequence (opt4) from hemagglutinin__InfluenzaA__AFH74939

SEQ ID NO: 168815 - RNA, 1701 nt, Artificial Sequence
  derived and/or modified CDS sequence (opt4) from hemagglutinin__InfluenzaA__AFH74950
augaagaccaucaucgcccugagcuacauccugugccugguguucgcccagaagcugcccggcaacgacaacagcaccgccacccugugccugggccaccacgccgugcccaacggcaccaucgugaagaccaucaccaacgaccagaucgaggugaccaacgccaccgagcuggugcagagcagcagcaccggcgagaucugcgacagcccccaccagauccuggacggcaagaacugcacccugaucgacgcccugcugggcgacccccagugcgacggcuuccagaacaagaagugggaccuguucguggagagaagcaaggccuacggcaacugcuaccccuacgacgugcccgacuacgccagccugagaagccugguggccagcagcggcacccuggaguucaacaacgagagcuucaacuggaccggcgugacccagaacggcaccagcagcgccugcaucagaagaagcaagaacagcuucuucagcagacugaacuggcugacccaccugaacuucaaguaccccgcccugaacgugaccaugcccaacaacgagcaguucgacaagcuguacaucuggggcgugcaccaccccggcaccgacaaggaccagaucuuccuguacgcccaggccagcggcagaaucaccgugagcaccaagagaagccagcagaccgccauccccaacaucggcagcagacccagagugagaaacauccccagcagaaucagcaucuacuggaccaucgugaagcccggcgacauccugcugaucaacagcaccggcaaccugaucgcccccagaggcuacuucaagaucagaagcggcaagagcagcaucaugagaagcgacgcccccaucggcaagugcaacagcgagugcaucacccccaacggcagcauccccaacgacaagcccuuccagaacgugaacagaaucaccuacggcgccugccccagauacgugaagcagaacacccugaagcuggccaccggcaugagaaacgugcccgagaagcagaccagaggcaucuucggcgccaucgccggcuucaucgagaacggcugggagggcaugguggacggcugguacggcuucagacaccagaacagcgagggcagaggccaggccgccgaccugaagagcacccaggccgccaucgaccagaucaacggcaagcugaacagacugaucggcaagaccaacgagaaguuccaccagaucgagaaggaguucagcgagguggagggcagaauccaggaccuggagaaguacguggaggacaccaagaucgaccuguggagcuacaacgccgagcugcugguggcccuggagaaccagcacaccaucgaccugaccgacagcgagaugaacaagcuguucgagaagaccaagaagcagcugagagagaacgccgaggacaugggcaacggcugcuucaagaucuaccacaagugcgacaacgccugcaucggcagcaucagaaacggcaccuacgaccacgacguguacagagacgaggcccugaacaacagauuccagaucaagggcguggagcugaagagcggcuacaaggacuggauccuguggaucagcuucgccaucagcugcuuccugcugugcguggcccugcugggcuucaucaugugggccugccagaagggcaacaucagaugcaacaucugcaucuga

SEQ ID NO: 168816 - RNA, 1701 nt, Artificial Sequence; identical to SEQ ID NO: 168232
  derived and/or modified CDS sequence (opt4) from hemagglutinin__InfluenzaA__AFH74961

SEQ ID NO: 168817 - RNA, 1701 nt, Artificial Sequence; identical to SEQ ID NO: 163673
  derived and/or modified CDS sequence (opt4) from hemagglutinin__InfluenzaA__AFH75388

SEQ ID NO: 168818 - RNA, 1701 nt, Artificial Sequence
  derived and/or modified CDS sequence (opt4) from hemagglutinin__InfluenzaA__AFH97140
augaaggccauccugguggugcugcuguacaucuucgccaccgccaacgccgacacccugugcaucggcuaccacgccaacaacagcaccgacaccguggacaccgugcuggagaagaacgugaccgugacccacagcgugaaccugcuggaggacaagcacaacggcaagcugugcaagcugagaggcguggccccccugcaccugggcaagugcaacaucgccggcuggauccugggcaaccccgagugcgagagccugagcaccgccagcagcuggagcuacaucguggagaccagcagcagcgacaacggcaccugcuaccccggcgacuucaucgacuacgaggagcugagagagcagcugagcagcgugagcagcuucgagagauucgagaucuuccccaagaccagcagcuggcccaaccacgacagcaacaagggcgugaccgccgccugcccccacgccggcgccaagagcuucuacaagaaccugaucuggcuggugaagaagggcaacagcuaccccaagcugagcaagagcuacaucaacgacaagggcaaggaggugcuggugcuguggggcauccaccaccccagcaccagcgccgaccagcagagccuguaccagaacgccgacgccuacguguucgugggcaccagcagauacagcaagaaguucaagcccgagaucgccaucagacccaaggugagagaccaggagggcagaaugaacuacuacuggacccugguggagcccggcgacaagaucaccuucgaggccaccggcaaccugguggugcccagauacgccuucgccauggagagaaacgccggcagcggcaucaucaucagcgacacccccgugcacgacugcaacaccaccugccagacccccaagggcgccaucaacaccagccugcccuuccagaacauccaccccaucaccaucggcaagugccccaaguacgugaagagcaccaagcugagacuggccaccggccugagaaacgugcccagcauccagagcagaggccuguucggcgccaucgccggcuucaucgagggcggcuggaccggcaugguggacggcugguacggcuaccaccaccagaacgagcagggcagcggcuacgccgccgaccugaagagcacccagaacgccaucgacgagaucaccaacaaggugaacagcgugaucgagaagaugaacacccaguucaccgccgugggcaaggaguucaaccaccuggagaagagaaucgagaaccugaacaagaagguggacgacggcuuccuggacaucuggaccuacaacgccgagcugcuggugcugcuggagaacgagagaacccuggacuaccacgacagcaacgugaagaaccuguacgagaaggugagaagccagcugaagaacaacgccaaggagaucggcaacggcugcuucgaguucuaccacaagugcgacaacaccugcauggagagcgugaagaacggcaccuacgacuaccccaaguacagcgaggaggccaagcugaacagagaggagaucgacggcgugaagcuggagagcaccagaaucuaccagauccuggccaucuacagcaccguggccagcagccuggugcugguggugagccugggcgccaucagcuucuggaugugcagcaacggcagccugcagugcagaaucugcaucuga

SEQ ID NO: 168819 - RNA, 1701 nt, Artificial Sequence
  derived and/or modified CDS sequence (opt4) from hemagglutinin__InfluenzaA__AFJ05142
augaagaccaucaucgcccugagcuacauccugugccugguguucgcccagaagauccccggcaacgacaacagcaccgccacccugugccugggccaccacgccgugcccaacggcaccaucgugaagaccaucaccaacgaccagaucgaggugaccaacgccaccgagcuggugcagagcagcagcaccggcgagaucugcgacagcccccaccagauccuggacggcgagaacugcacccugaucgacgcccugcugggcgacccccagugcgacggcuuccagaacaagaagugggaccuguucguggagagaagcaaggccuacagcaacugcuaccccuacgacgugcccgacuacgccagccugagaagccugguggccagcagcggcacccuggaguucaacaacgagugcuucaacuggaccggcgugacccagaacggcaccagcagcgccugcaucagaagaagcaacagcagcuucuucagcagacugaacuggcugacccaccugaacuucaaguaccccgcccugaacgugaccaugcccaacaacgagcaguucgacaagcuguacaucuggggcgugcaccaccccggcaccgacaaggaccagaucuuccuguacgcccagagcagcggcagaaucaccgugagcaccaagagaagccagcaggccgugauccccaacaucggcagcagacccagaaucagaaacauccccagcagaaucagcaucuacuggaccaucgugaagcccggcgacauccugcugaucaacagcaccggcaaccugaucgcccccagaggcuacuucaagaucagaagcggcaagagcagcaucaugagaagcgacgcccccaucggcaagugcaacagcggcugcaucacccccaacggcagcauccccaacgacaagcccuuccagaacgugaacagaaucaccuacggcgccugccccagauacgugaagcagagcacccugaagcuggccaccggcaugagaaacgugcccgagaagcagaccagaggcaucuucggcgccaucgccggcuucaucgagaacggcugggagggcaugguggacggcugguacggcuucagacaccagaacagcgagggcagaggccaggccgccgaccugaagagcacccaggccgccaucgaccagaucaacggcaagcugaacagacugaucggcaagaccaacgagaaguuccaccagaucgagaaggaguucagcgagguggagggcagaauccaggaccuggagaaguacguggaggacaccaagaucgaccuguggagcuacaacgccgagcugcugguggcccuggagaaccagcacaccaucgaccugaccgacagcgagaugaacaagcuguucgagaagaccaagaagcagcugagagagaacgccgaggacaugggcaacggcugcuucaagaucuaccacaagugcgacaacgccugcaucggcagcaucagaaacggcaccuacaaccacgacguguacagagacgaggcccugaacaacagauuccagaucaagggcguggagcugaagagcggcuacaaggacuggauccuguggaucagcuucgccaucagcugcuuccugcugugcguggcccugcugggcuucaucaugugggccugccagaagggcaacaucagaugcaacaucugcaucuga

SEQ ID NO: 168820 - RNA, 1701 nt, Artificial Sequence
  derived and/or modified CDS sequence (opt4) from hemagglutinin__InfluenzaA__AFJ05144
augaagaccaucaucgcccugagcuacauccugugccugguguucgcccagaagcugcccggcaacgacaacagcaccgccacccugugccugggccaccacgccgugcccaacggcaccaucgugaagaccaucaccaacgaccagaucgaggugaccaacgccaccgagcuggugcagagcagcagcaccggcgagaucugcgacagcccccaccagauccuggacggcgagaacugcacccugaucgacgcccugcugggcgacccccagugcgacggcuuccagaacaagaagugggaccuguucguggagagaagcaaggccuacagcaacugcuaccccuacgacgugcccgacuacgccagccugagaagccugguggccagcagcggcacccuggaguucaacaacgagagcuucaacuggaccggcgugacccagaacggcaccagcagcgccugcaucagaagaagcaacagcagcuucuucagcagacugaacuggcugacccaccugaacuucaaguaccccgcccugaacgugaccaugcccaacaacgagcaguucgacaagcuguacaucuggggcgugcaccaccccggcaccgacaaggaccagaucuuccuguacgcccagagcagcggcagaaucaccgugagcaccaagagaagccagcaggccgugauccccaacaucggcagcagacccagagugagaaacauccccagcagaaucagcaucuacuggaccaucgugaagcccggcgacauccugcugaucaacagcaccggcaaccugaucgcccccagaggcuacuucaagaucagaagcggcaagagcagcaucaugagaagcgacgcccccaucggcaagugcaacagcgagugcaucacccccaacggcagcauccccaacgacaagcccuuccagaacgugaacagaaucaccuacggcgccugccccagauacgugaagcagagcacccugaagcuggccaccggcaugagaaacgugcccgagaagcagaccagaggcaucuucggcgccaucgccggcuucaucgagaacggcugggagggcaugguggacggcugguacggcuucagacaccagaacagcgagggcagaggccaggccgccgaccugaagagcacccaggccgccaucgaccagaucaacggcaagcugaacagacugaucggcaagaccaacgagaaguuccaccagaucgagaaggaguucagcgagguggagggcagaauccaggaccuggagaaguacguggaggacaccaagaucgaccuguggagcuacaacgccgagcugcugguggcccuggagaaccagcacaccaucgaccugaccgacagcgagaugaacaagcuguucgagaagaccaagaagcagcugagagagaacgccgaggacaugggcaacggcugcuucaagaucuaccacaagugcgacaacgccugcaucggcagcaucagaaacggcaccuacaaccacgacguguacagagacgaggcccugaacaacagauuccagaucaagggcguggagcugaagagcggcuacaaggacuggauccuguggaucagcuucgccaucagcugcuuccugcugugcguggcccugcugggcuucaucaugugggccugccagaagggcaacaucagaugcaacaucugcaucuga

SEQ ID NO: 168821 - RNA, 1701 nt, Artificial Sequence
  derived and/or modified CDS sequence (opt4) from hemagglutinin__InfluenzaA__AFJ11706
augaagaccaucaucgcccugagcuacauccugugccugguguucgcccagaagcugcccggcaacgacaacagcaccgccacccugugccugggccaccacgccgugcccaacggcaccaucgugaagaccaucaccaacgaccagaucgaggugaccaacgccaccgagcuggugcagagcagcagcaccggcgagaucugcgacagcccccaccagauccuggacggcgagaacugcacccugaucgacgcccugcugggcgacccccagugcgacggcuuccagaacaagaagugggaccuguucguggagagaagcaaggccuacagcaacugcuaccccuacgacgugcccgacuacgccagccugagaagccugguggccagcagcggcacccuggaguucaacaacgagagcuucaacuggaccggcgugacccagaacggcaccagcagcgccugcaucagaagcagcaacaacagcuucuucagcagacugaacuggcugacccaccugaacuucaaguaccccgcccugaacgugaccaugcccaacaacgagcaguucgacaagcuguacaucuggggcgugcaccaccccggcaccgacaaggaccagaucuuccuguacgcccaggccagcggcagaaucaccgugagcaccaagagaagccagcaggccgugauccccaacaucggcagcagacccagagugagaaacauccccagcagaaucagcaucuacuggaccaucgugaagcccggcgacauccugcugaucaacagcaccggcaaccugaucgcccccagaggcuacuucaagaucagaagcggcaagagcagcaucaugagaagcgacgcccccaucggcaagugcaacagcgagugcaucacccccaacggcagcauccccaacgacaagcccuuccagaacgugaacagaaucaccuacggcgccugccccagauacgugaagcagagcacccugaagcuggccaccggcaugagaaacgugcccgagaagcagaccagaggcaucuucggcgccaucgccggcuucaucgagaacggcugggagggcaugguggacggcugguacggcuucagacaccagaacagcgagggcagaggccaggccgccgaccugaagagcacccaggccgccaucgaccagaucaacggcaagcugaacagacugaucggcaagaccaacgagaaguuccaccagaucgagaaggaguucagcgagguggagggcagaauccaggaccuggagaaguacguggaggacaccaagaucgaccuguggagcuacaacgccgagcugcugguggcccuggagaaccagcacaccaucgaccugaccgacagcgagaugaacaagcuguucgagaagaccaagaagcagcugagagagaacgccgaggacaugggcaacggcugcuucaccaucuaccacaagugcgacaacgccugcaucggcagcaucagaaacggcaccuacgaccacaacguguacagagacgaggcccugaacaacagauuccagaucaagggcguggagcugaagagcggcuacaaggacuggauccuguggaucagcuucgccaucagcugcuuccugcugugcguggcccugcugggcuucaucaugugggccugccagaagggcaacaucagaugcaacaucugcaucuga

SEQ ID NO: 168822 - RNA, 1701 nt, Artificial Sequence; identical to SEQ ID NO: 167042
  derived and/or modified CDS sequence (opt4) from hemagglutinin__InfluenzaA__AFJ11728

SEQ ID NO: 168823 - RNA, 1701 nt, Artificial Sequence
  derived and/or modified CDS sequence (opt4) from hemagglutinin__InfluenzaA__AFJ19842
augaagaccaucaucgcccugagcuacauccugugccugguguucgcccagaagcugcccggcaacgacaacagcaccgccacccugugccugggccaccacgccgugcccaacggcaccaucgugaagaccaucaccaacgaccagaucgaggugaccaacgccaccgagcuggugcagagcagcagcgccggcgagaucugcgacagcccccaccacauccuggacggcgagaacugcacccugaucgacgcccugcugggcgacccccagugcgacggcuuccagaacaagaagugggaccuguucguggagagaagcagagccuacagcaacugcuaccccuacgacgugcccgacuacgccagccugagaagccugguggccagcagcggcacccuggaguucaacaacgagagcuucaacuggaccggcgugacccagaacggcaccagcagcgccugcaucagaagaagcaacaacagcuucuucagcagacugaacuggcugacccaccugaacuucaaguaccccgcccugaacgugaccaugcccaacaacgagcaguucgacaagcuguacaucuggggcgugcaccaccccggcaccgacaaggaccagaucuuccuguacgcccaggccagcggcagaaucaccgugagcaccaagagaagccagcaggccgugauccccaacaucggcagcagacccagagugagaaacauccccagcagaaucagcaucuacuggaccaucgugaagcccggcgacauccugcugaucaacagcaccggcaaccugaucgcccccagaggcuacuucaagaucagaagcggcaagagcagcaucaugagaagcgacgcccccaucggcaagugcaacagcgagugcaucacccccaacggcagcauccccaacgacaagcccuuccagaacgugaacagaaucaccuacggcgccugccccagauacgugaagcagagcacccugaagcuggccaccggcaugagaaacgugcccgagaagcagaccagaggcaucuucggcgccaucgccggcuucaucgagaacggcugggagggcaugauggacggcugguacggcuucagacaccagaacagcgagggcagaggccaggccgccgaccugaagagcacccaggccgccaucgaccagaucaacggcaagcugaacagacugaucggcaagaccaacgagaaguuccaccagaucgagaaggaguucagcgagguggagggcagaauccaggaccuggagaaguacguggaggacaccaagaucgaccuguggagcuacaacgccgagcugcugguggcccuggagaaccagcacaccaucgaccugaccgacagcgagaugaacaagcuguucgagaagaccaagaagcagcugagagagaacgccgaggacaugggcaacggcugcuucaagaucuaccacaagugcgacaacgccugcaucggcagcaucagaaacggcaccuacgaccacgacguguacagagacgaggcccugaacaacagauuccagaucaagggcaucgagcugaagagcggcuacaaggacuggauccuguggaucagcuucgccaucagcugcuuccugcugugcguggcccugcugggcuucaucaugugggccugccagaagggcaacaucagaugcaacaucugcaucuga

SEQ ID NO: 168824 - RNA, 1701 nt, Artificial Sequence; identical to SEQ ID NO: 168421
  derived and/or modified CDS sequence (opt4) from hemagglutinin__InfluenzaA__AFJ20171

SEQ ID NO: 168825 - RNA, 1701 nt, Artificial Sequence; identical to SEQ ID NO: 167042
  derived and/or modified CDS sequence (opt4) from hemagglutinin__InfluenzaA__AFJ20182

SEQ ID NO: 168826 - RNA, 1701 nt, Artificial Sequence
  derived and/or modified CDS sequence (opt4) from hemagglutinin__InfluenzaA__AFJ74386
augaaggccaagcugcuggugcugcugugcgccuucaccgccaccuacgccgacaccaucugcaucggcuaccacgccaacaacagcaccgacaccguggacaccgugcuggagaagaacgugaccgugacccacagcgugaaccugcuggaggacagccacaacggcaagcugugcagacugaagggcaccgccccccugcagcugggcaacugcagcguggccggcuggauccugggcaaccccgagugcgagagccuguucagcaaggagagcuggagcuacaucgccgagacccccaaccccgagaacggcaccugcuaccccggcuacuucgccgacuacgaggagcugagagagcagcugagcagcgugagcagcuucgagagauucgagaucuuccccaaggagagcagcuggcccaaccacaccgugaccaagggcgugaccgccagcugcagccacaacggcaagagcagcuucuacaagaaccugcuguggcugaccgagaagaacggccuguaccccaaccugagcaagagcuacgugaacaacaaggagaaggaggugcuggugcuguggggcgugcaccaccccagcaacaucggcgaccagagagccaucuaccacaccgagaacgccuacgugagcgugaugagcagccacuacagcagaagauucacccccgagaucgccaagagacccaaggugagagaccaggagggcagaaucaacuacuacuggacccugcuggagcccggcgacaccaucaucuucgaggccaacggcaaccugaucgcccccugguacgccuucgcccugagcagaggcuucggcagcggcaucaucaccagcaacgccagcaugggcgagugcgacgccaagugccagaccccccagggcgccaucaacagcagccugcccuuccagaacgugcaccccgugaccaucggcgagugccccaaguacgugagaagcaccaagcugagaauggugaccggccugagaaacauccccagcauccagagcagaggccuguucggcgccaucgccggcuucaucgagggcggcuggaccggcaugaucgacggcugguacggcuaccaccaccagaacgagcagggcagcggcuacgccgccgaccagaagagcacccagaacgccaucgacggcaucaccaacaaggugaacagcgugaucgagaagaugaacacccaguucaccgccgugggcaaggaguucaacaagcuggagagaagaauggagaaccugaacaagaagguggacgacggcuuccuggacaucuggaccuacaacgccgagcugcuggugcugcuggagaacgagagaacccuggacuuccacgacagcaacgugaagaaccuguacgagaaggugaagaaccagcugaagaacaacgccaaggagaucggcaacggcugcuucgaguucuaccacaagugcaacaacgagugcauggagagcgugaagaacggcaccuacgacuaccccaaguacagcggcgagagcaagcugaacagagagaagaucgacggcgugaagcuggagagcaugggcguguaccagauccuggccaucuacagcaccguggccagcagccuggugcugcuggugagccugggcgccaucagcuucuggaugugcagcaacggcagccugcagugcagaaucugcaucuga

SEQ ID NO: 168827 - RNA, 1701 nt, Artificial Sequence
  derived and/or modified CDS sequence (opt4) from hemagglutinin__InfluenzaA__AFJ74407
augaagaccaucaucgcccugagcuacauccugugccugguguucgcccagaagcugcccggcaacgacaacagcaccgccacccugugccugggccaccacgccgugcccaacggcacccuggugaagaccaucaccaacgaccagaucgaggugaccaacgccaccgagcuggugcagagcagcagcaccggcagaaucugcgacagcccccacagaauccuggacggcaagaacugcacccugaucgacgcccugcugggcgacccccacugcgacggcuuccagaacaaggagugggaccuguucguggagagaagcaaggccuacagcaacugcuaccccuacgacgugcccgacuacgccagccugagaagccugguggccagcagcggcacccuggaguucaccaacgagggcuucaacuggaccggcguggcccaggacggcaccagcuacgccugcaagagaggcagcgugaagagcuucuucagcagacugaacuggcugcacaagcuggaguacaaguaccccgcccugaacgugaccaugcccaacaacgacaaguucgacaagcuguacaucuggggcgugcaccaccccagcaccgacagcgaccagaccagccuguacgugcaggccagcggcagagugaccgugagcaccaagagaagccagcagaccgugauccccaacaucggcagcagacccugggugagaggcgugagcagcagaaucagcaucuacuggaccaucgugaagcccggcgacauccugcugaucaacagcaccggcaaccugaucgcccccagaggcuacuucaagaucagaagcggcaagagcagcaucaugagaagcgacgcccccaucggcaacugcagcagcgagugcaucacccccaacggcagcauccccaacgacaagcccuuccagaacgugaacagaaucaccuacggcgccugccccagauacgugaagcagaacacccugaagcuggccaccggcaugagaaacgugcccgagaagcagaccagaggcaucuucggcgccaucgccggcuucaucgagaacggcugggagggcaugguggacggcugguacggcuucagacaccagaacagcgagggcaccggccaggccgccgaccugaagagcacccaggccgccaucaaccagaucaacggcaagcugaacagacugaucgagaagaccaacgagaaguuccaccagaucgagaaggaguucagcgagguggagggcagaauccaggaccuggagaaguacguggaggacaccaagaucgaccuguggagcuacaacgccgagcugcugguggcccuggagaaccagcacaccaucgaccugaccgacagcgagaugaacaagcuguucgagagaaccagaaagcagcugagagagaacgccgaggacaugggcaacggcugcuucaagaucuaccacaagugcgacaacgccugcaucggcagcaucagaaacggcaccuacgaccacgacguguacagagacgaggcccugaacaacagauuccagaucaagggcguggagcugaagagcggcuacaaggacuggauccuguggaucagcuucgccaucagcugcuuccugcugugcguggugcugcugggcuucaucaugugggccugccagaagggcaacaucagaugcaacaucugcaucuga

SEQ ID NO: 168828 - RNA, 1701 nt, Artificial Sequence
  derived and/or modified CDS sequence (opt4) from hemagglutinin__InfluenzaA__AFJ74418
augaagaccaucaucgcccugagcuacauccugugccugguguucgcccagaagcugcccggcaacgacaacagcaccgccacccugugccugggccaccacgccgugcccaacggcacccuggugaagaccaucaccaacgaccagaucgaggugaccaacgccaccgagcuggugcagagcagcagcaccggcagaaucugcgacagcccccaccagauccuggacggcgagaacugcacccugaucgacgcccugcugggcgacccccacugcgacggcuuccagaacaaggagugggaccuguucguggagagaagcaaggccuacagcaacugcuaccccuacgacgugcccgacuacgccagccugagaagccugguggccagcagcggcacccuggaguucaacaacgagagcuucaacuggaccggcguggcccagaacggcaccagcagcgccugcaagagaagaagcaucaagagcuucuucagcagacugaacuggcugcaccagcugaaguacaaguaccccgcccugaacgugaccaugcccaacaacgagaaguucgacaagcuguacaucuggggcgugcaccaccccagcaccgacagcgaccagaucagccuguacgcccaggccagcggcagagugaccgugagcaccaagagaagccagcagaccgugauccccaacaucggcagcagacccugggugagaggcgugagcagcagaaucagcaucuacuggaccaucgugaagcccggcgacauccugcugaucaacagcaccggcaaccugaucgcccccagaggcuacuucaagaucagaagcggcaagagcagcaucaugagaagcgacgcccccaucggcaagugcaacagcgagugcaucacccccaacggcagcauccccaacgacaagcccuuccagaacgugaacagaaucaccuacggcgccugccccagauacgugaagcagaacacccugaagcuggccaccggcaugagaaacgugcccgagaagcagaccagaggcaucuucggcgccaucgccggcuucaucgagaacggcugggagggcaugguggacggcugguacggcuucagacaccagaacagcgagggcaccggccaggccgccgaccugaagagcacccaggccgccaucaaccagaucaacggcaagcugaacagacugaucgagaagaccaacgagaaguuccaccagaucgagaaggaguucagcgagguggagggcagaauccaggaccuggagaaguacguggaggacaccaagaucgaccuguggagcuacaacgccgagcugcugguggcccuggagaaccagcacaccaucgaccugaccgacagcgagaugaacaagcuguucgagagaaccaagaagcagcugagagagaacgccgaggacaugggcaacggcugcuucaagaucuaccacaagugcgacaacgccugcaucggcagcaucagaaacggcaccuacgaccacgacguguacagagacgaggcccugaacaacagauuccagaucaagggcguggagcugaagagcggcuacaaggacuggauccuguggaucagcuucgccaucagcugcuuccugcugugcguggugcugcugggcuucaucaugugggccugccagaagggcaacaucagaugcaacaucugcaucuga

SEQ ID NO: 168829 - RNA, 1701 nt, Artificial Sequence
  derived and/or modified CDS sequence (opt4) from hemagglutinin__InfluenzaA__AFJ74437
augaagaccaucaucgcccugagcuacauccugugcaagguguucgcccagaagcugcccggcaacgacaacagcaccgccacccugugccugggccaccacgccgugcccaacggcacccuggugaagaccaucaccaacgaccagaucgaggugaccaacgccaccgagcuggugcagagcagcagcaccggcagaaucugcgacagcccccaccagauccuggacggcgagaacugcacccugaucgacgcccugcugggcgacccccacugcgacggcuuccagaacaaggagugggaccuguucguggagagaagcaaggccuacagcaacugcuaccccuacgacgugcccgacuacgccagccugagaagccugguggccagcagcggcacccuggaguucaacaacgagagcuucaacuggaccggcguggcccagaacggcaccagcagcgccugcaagagaagaagcaucaagagcuucuucagcagacugaacuggcugcaccagcugaaguacaaguaccccgcccugaacgugaccaugcccaacaacgagaaguucgacaagcuguacaucuggggcgugcaccaccccagcaccgacagcgaccagaucagccuguacgcccaggccagcggcagagugaccgugagcaccaagagaagccagcagaccgugauccccaacaucggcagcagacccugggugagaggcgugagcagcagaaucagcaucuacuggaccaucgugaagcccggcgacauccugcugaucaacagcaccggcaaccugaucgcccccagaggcuacuucaagaucagaagcggcaagagcagcaucaugagaagcgacgcccccaucggcaagugcaacagcgagugcaucacccccaacggcagcauccccaacgacaagcccuuccagaacgugaacagaaucaccuacggcgccugccccagauacgugaagcagaacacccugaagcuggccaccggcaugagaaacgugcccgagaagcagaccagaggcaucuucggcgccaucgccggcuucaucgagaacggcugggagggcaugguggacggcugguacggcuucagacaccagaacagcgagggcaccggccaggccgccgaccugaagagcacccaggccgccaucaaccagaucaacggcaagcugaacagacugaucgagaagaccaacgagaaguuccaccagaucgagaaggaguucagcgagguggagggcagaauccaggaccuggagaaguacguggaggacaccaagaucgaccuguggagcuacaacgccgagcugcugguggcccuggagaaccagcacaccaucgaccugaccgacagcgagaugaacaagcuguucgagagaaccaagaagcagcugagagagaacgccgaggacaugggcaacggcugcuucaagaucuaccacaagugcgacaacgccugcaucggcagcaucagaaacggcaccuacgaccacgacguguacagagacgaggcccugaacaacagauuccagaucaagggcguggagcugaagagcggcuacaaggacuggauccuguggaucagcuucgccaucagcugcuuccugcugugcguggugcugcugggcuucaucaugugggccugccagaagggcaacaucagaugcaacaucugcaucuga

SEQ ID NO: 168830 - RNA, 1701 nt, Artificial Sequence
  derived and/or modified CDS sequence (opt4) from hemagglutinin__InfluenzaA__AFJ74448
augaagaccaucaucgcccugagcuacauccugugccugguguucgcccagaagcugcccggcaacgacaacagcaccgccacccugugccugggccaccacgccgugcccaacggcacccuggugaagaccaucaccaacgaccagaucgaggugaccaacgccaccgagcuggugcagagcagcagcaccggcagaaucugcgacagcccccaccagauccuggacggcgagaacugcacccugaucgacgcccugcugggcggcccccacugcgacggcuuccagaacaaggagugggaccuguucguggagagaagcaaggccuacagcaacugcuaccccuacgacgugcccgacuacgccagccugagaagccugguggccagcagcggcacccuggaguucaacaacgagagcuucaacuggaccggcguggcccagaacggcaccagcagcgccugcaagagaagaagcaacaagagcuucuucagcagacugaacuggcugcaccagcugaaguacaaguaccccgcccugaacgugaccaugcccaacaacgagaaguucgacaagcuguacaucuggggcgugcaccaccccagcaccgacagcgaccagaucagccuguacgcccaggccagcggcagagugaccgugagcaccaagagaagccagcagaccgugauccccaacaucggcagcagacccugggugagaggcgugagcagcagaaucagcaucuacuggaccaucgugaagcccggcgacauccugcugaucaacagcaccggcaaccugaucgcccccagaggcuacuucaagaucagaagcggcaagagcagcaucaugagaagcgacgcccccaucggcaagugcaacagcgagugcaucacccccaacggcagcauccccaacgacaagcccuuccagaacgugaacagaaucaccuacggcgccugccccagauacgugaagcagaacacccugaagcuggccaccggcaugagaaacgugcccgagaagcagaccagaggcaucuucggcgccaucgccggcuucaucgagaacggcugggagggcaugguggacggcugguacggcuucagacaccagaacagcgagggcaccggccaggccgccgaccugaagagcacccaggccgccaucaaccagaucaacggcaagcugaacagacugaucgagaagaccaacgagaaguuccaccagaucgagaaggaguucagcgagguggagggcagaauccaggaccuggagaaguacguggaggacaccaagaucgaccuguggagcuacaacgccgagcugcugguggcccuggagaaccagcacaccaucgaccugaccgacagcgagaugaacaagcuguucgagagaaccaagaagcagcugagagagaacgccgaggacaugggcaacggcugcuucaagaucuaccacaagugcgacaacgccugcaucggcagcaucagaaacggcaccuacgaccacgacguguacagagacgaggcccugaacaacagauuccagaucaagggcguggagcugaagagcggcuacaaggacuggauccuguggaucagcuucgccaucagcugcuuccugcugugcguggugcugcugggcuucaucaugugggccugccagaagggcaacaucagaugcaacaucugcaucuga

SEQ ID NO: 168831 - RNA, 1701 nt, Artificial Sequence
  derived and/or modified CDS sequence (opt4) from hemagglutinin__InfluenzaA__AFJ74459
auggaggccaagcugcuggugcugcugugcgccuucaccgccaccuacgccgacaccaucugcaucggcuaccacgccaacaacagcaccgacaccguggacaccgugcuggagaagaacgugaccgugacccacagcgugaaccugcuggaggacagccacaacggcaagcugugcagacugaagggcaccgccccccugcagcugggcaacugcagcaucgccggcuggauccugggcaaccccgagugcgagagccuguucagcaaggagagcuggagcuacaucgccgagacccccaaccccgagaacggcaccugcuaccccggcuacuucgccgacuacgaggagcugagagagcagcugagcagcgugagcagcuucgagagauucgagaucuuccccaaggagagcagcuggcccaaccacaccgugaccaagggcgugaccgccagcugcagccacaacggcaagagcagcuucuacaagaaccugcuguggcugaccgagaagaacggccuguaccccaaccugagcaagagcuacgugaacaacaaggagaaggaggugcuggugcuguggggcgugcaccaccccagcaacaucggcgaccagagagccaucuaccacaccgagaacgccuacgugagcguggugagcagccacuacagcagaagauucacccccgagaucgccaagagacccaaggugagaaaccaggagggcagaaucaacuacuacuggacccugcuggagcccggcgacaccaucaucuucgaggccaacggcaaccugaucgcccccugguacgccuucgcccugagcagaggcuucggcagcggcaucaucaccagcaacgccagcaugggcgagugcgacgccaagugccagaccccccagggcgccaucaacagcagccugcccuuccagaacgugcaccccgugaccaucggcgagugccccaaguacgugagaagcaccaagcugagaauggugaccggccugagaaacauccccagcauccagagcagaggccuguucggcgccaucgccggcuucaucgagggcggcuggaccggcaugaucgacggcugguacggcuaccaccaccagaacgagcagggcagcggcuacgccgccgaccagaagagcacccagaacgccaucaacggcaucaccaacaaggugaacagcaucaucgagaagaugaacacccaguucaccgccgugggcaaggaguucaacaagcuggagagaagaauggagaaccugaacaagaagguggacgacggcuuccuggacaucuggaccuacaacgccgagcugcuggugcugcuggagaacgagagaacccuggacuuccacgacagcaacgugaagaaccuguacgagaaggugaagaaccagcugaagaacaacgccaaggagaucggcaacggcugcuucgaguucuaccacaagugcaacaacgagugcauggagagcgugaagaacggcaccuacgacuaccccaaguacagcaaggagagcaagcugaacagagagaagaucgacggcgugaagcuggagagcaugggcguguaccagauccuggccaucuacagcaccguggccagcagccuggugcugcuggugagccugggcgccaucagcuucuggaugugcagcaacggcagccugcagugcagaaucugcaucuga

SEQ ID NO: 168832 - RNA, 1701 nt, Artificial Sequence
  derived and/or modified CDS sequence (opt4) from hemagglutinin__InfluenzaA__AFJ74470
augaagaccaucaucgcccugagcuacauccugugccugguguucgcccagaagcugcccggcaacgacaacagcaccgccacccugugccugggccaccacgccgugcccaacggcacccuggugaagaccaucaccaacgaccagaucgaggugaccaacgccaccgagcuggugcagagcagcagcaccggcagaaucugcgacagcccccacagaauccuggacggcaagaacugcacccugaucgacgcccugcugggcgacccccacugcgacggcuuccagaacaaggagugggaccuguucguggagagaagcaaggccuacagcaacugcuaccccuacgacgugcccgacuacgccagccugagaagccugguggccagcagcggcacccuggaguucaacaacgagagcuucaacuggaccggcguggcccagaacggcaccagcuacgccugcaagagaagaagcgugaagagcuucuucagcagacugaacuggcugcacaagcuggaguacaaguaccccgcccugaacgugaccaugcccaacaacgacaaguucgacaagcuguacaucuggggcgugcaccaccccagcaccgacagcgaccagaucagccuguacgcccagaccagcggcagagugaccgugagcaccaagagaagccagcagaccgugauccccaacaucggcagcagacccugggugagaggcgugagcagcagaaucagcaucuacuggaccaucgugaagcccggcgacauccugcugaucaacagcaccggcaaccugaucgcccccagaggcuacuucaagaucagaagcggcaagagcagcaucaugagaagcgacgcccccaucggcaacugcagcagcgagugcaucacccccaacggcagcauccccaacgacaagcccuuccagaacgugaacagaaucaccuacggcgccugccccagauacgugaagcagaacacccugaagcuggccaccggcaugagaaacgugcccgagaagcagaccagaggcaucuucggcgccaucgccggcuucaucgagaacggcugggagggcaugguggacggcugguacggcuucagacaccagaacagcgagggcaccggccaggccgccgaccugaagagcacccaggccgccaucaaccagaucaacggcaagcugaacagacugaucgagaagaccaacgagaaguuccaccagaucgagaaggaguucagcgagguggagggcagaauccaggaccuggagaaguacguggaggacaccaagaucgaccuguggagcuacaacgccgagcugcugguggcccuggagaaccagcacaccaucgaccugaccgacagcgagaugaacaagcuguucgagagaaccagaaagcagcugagagagaacgccgaggacaugggcaacggcugcuucaagaucuaccacaagugcgacaacgccugcaucggcagcaucagaaacggcaccuacaaccacgacguguacagagacgaggcccugaacaacagauuccagaucaagggcguggagcugaagagcggcuacaaggacuggauccuguggaucagcuucgccaucagcugcuuccugcugugcguggugcugcugggcuucaucaugugggccugccagaagggcaacaucagaugcaacaucugcaucuga

SEQ ID NO: 168833 - RNA, 1701 nt, Artificial Sequence
  derived and/or modified CDS sequence (opt4) from hemagglutinin__InfluenzaA__AFJ74492
augaagaccaucaucgcccugagcuacauccugugccugguguucgcccagaagcugcccggcaacgacaacagcaccgccacccugugccugggccaccacgccgugcccaacggcacccuggugaagaccaucaccaacgaccagaucgaggugaccaacgccaccgagcuggugcagagcagcagcaccggcagaaucugcgacagcccccaccagauccuggacggcgagaacugcacccugaucgacgcccugcugggcgacccccacugcgacggcuuccagaacaaggagugggaccuguucguggagagaagcaaggccuacagcaacugcuaccccuacgacgugcccgacuacgccagccugagaagccugguggccagcagcggcacccuggaguucaacaacgagagcuucaacuggaccggcguggcccagaacggcaccagcagcgccugcaagagaagaagcaacaagagcuucuucagcagacugaacuggcugcaccagcugaaguacaaguaccccgcccugaacgugaccaugcccaacaacaagaaguucgacaagcuguacaucuggggcgugcaccaccccagcaccgacagcgaccagaucagccuguacgcccaggccagcggcagagugaccgugagcaccaagagaagccagcagaccgugauccccaacaucggcagcagacccugggugagaggcgugagcagcaucaucagcaucuacuggaccaucgugaagcccggcgacauccugcugaucaacagcaccggcaaccugaucgcccccagaggcuacuucaagaucagaaacggcaagagcagcaucaugagaagcgacgcccccaucggcaagugcaacagcgagugcaucacccccaacggcagcauccccaacgacaagcccuuccagaacgugaacagaaucaccuacggcgccugccccagauacgugaagcagaacacccugaagcuggccaccggcaugagaaacgugcccgagaagcagaccagaggcaucuucggcgccaucgccggcuucaucgagaacggcugggagggcaugguggacggcugguacggcuucagacaccagaacagcgagggcaccggccaggccgccgaccugaagagcacccaggccgccaucaaccagaucaacggcaagcugaacagacugaucggcaagaccaacgagaaguuccaccagaucgagaaggaguucagcgagguggagggcagaauccaggaccuggagaaguacguggaggacaccaagaucgaccuguggagcuacaacgccgagcugcugguggcccuggagaaccagcacaccaucgaccugaccgacagcgagaugaacaagcuguucgagagaaccaagaagcagcugagagagaacgccgaggacaugggcaacggcugcuucaagaucuaccacaagugcgacaacgccugcaucggcagcaucagaaacggcaccuacgaccacgacguguacagagacgaggcccugaacaacagauucaagaucaagggcguggagcugaagagcggcuacaaggacuggauccuguggaucagcuucgccaucagcugcuuccugcugugcguggugcugcugggcuucaucaugugggccugccagaagggcaacaucagaugcaacaucugcaucuga

SEQ ID NO: 168834 - RNA, 1701 nt, Artificial Sequence
  derived and/or modified CDS sequence (opt4) from hemagglutinin__InfluenzaA__AFJ74525
augaagaccaucaucgcccugagcuacauccugugccugguguucgcccagaagcugcccggcaacgacaacagcaccgccacccugugccugggccaccacgccgugcccaacggcacccuggugaagaccaucaccaacgaccagaucgaggugaccaacgccaccgagcuggugcagagcagcagcaccggcagaaucugcgacagcccccacagaauccuggacggcgagaacugcacccugaucgacgcccugcugggcgacccccacugcgacggcuuccagaacaaggagugggaccuguucguggagagaagcaaggccuacagcaacugcuaccccuacgacgugcccgacuacgccagccugagaagccugguggccagcagcggcacccuggaguucaacaacgagagcuucaacuggaccggcguggcccaggacggcaccagcagcgccugcaagagaagaagcaucaagagcuucuucagcagacugaacuggcugcaccagcugaaguacaaguaccccgcccugaacgugaccaugcccaacaacgacaaguucgacaagcuguacaucuggggcgugcaccaccccagcaccgacagcgaccagaccagccuguacgcccaggccagcggcagagugaccgugagcaccaagagaagccagcagaccgugauccccaacaucggcagcagacccugggugagaggcgugagcagcaucaucagcaucuacuggaccaucgugaagcccggcgacauccugcugaucaacagcaccggcaaccugaucgcccccagaggcuacuucaagaucagaagcggcaagagcagcaucaugagaagcgacgcccccaucggcaagugcaacagcgagugcaucacccccaacggcagcauccccaacgacaagcccuuccagaacgugaacagaaucaccuacggcaccugccccagauacgugaagcagaacacccugaagcuggccaccggcaugagaaacgugcccgagaagcagaccagaggcaucuucggcgccaucgccggcuucaucgagaacggcugggagggcaugguggacggcugguacggcuucagacaccagaacagcgagggcaccggccaggccgccgaccugaagagcacccaggccgccaucaaccagaucaacggcaagcugaacagacugaucgagaagaccaacgagaaguuccaccagaucgagaaggaguucagcgagguggagggcagaauccaggaccuggagaaguacguggaggacaccaagaucgaccuguggagcuacaacgccgagcugcugguggcccuggagaaccagcacaccaucgaccugaccgacagcgagaugaacaagcuguucgagagaaccagaaagcagcugagagagaacgccgaggacaugggcaacggcugcuucaagaucuaccacaagugcgacaacgccugcaucggcagcaucagaaacggcaccuacgaccacgacguguacagagacgaggcccugaacaacagauuccagaucaagggcguggagcugaagagcggcuacaaggacuggauccuguggaucagcuucgccaucagcugcuuccugcugugcguggugcugcugggcuucaucaugugggccugccagaagggcaacaucagaugcaacaucugcaucuga

SEQ ID NO: 168835 - RNA, 1701 nt, Artificial Sequence; identical to SEQ ID NO: 168833
  derived and/or modified CDS sequence (opt4) from hemagglutinin__InfluenzaA__AFJ74535

SEQ ID NO: 168836 - RNA, 1701 nt, Artificial Sequence
  derived and/or modified CDS sequence (opt4) from hemagglutinin__InfluenzaA__AFJ74560
augaagaccaucaucgcccugagcuacauccugugccugguguucgcccagaagcugcccggcaacgacaacagcaccgccacccugugccugggccaccacgccgugcccaacggcacccuggugaagaccaucaccaacgaccagaucgaggugaccaacgccaccgagcuggugcagagcagcagcaccggcagaaucugcgacagcccccaccagauccuggacggcgagaacugcacccugaucgacgcccugcugggcgacccccacugcgacggcuuccagaacaaggagugggaccuguucguggagagaagcaaggccuacagcaacugcuaccccuacgacgugcccgacuacgugagccugagaagccugguggccagcagcggcacccuggaguucaacaacgagagcuucaacuggaccggcguggcccagaacggcaccagcagcgccugcaagagaagaagcgacaagagcuucuucagcagacugaacuggcugcaccagcugaaguacaaguaccccgcccugaacgugaccaugcccaacaacgagaaguucgacaagcuguacaucuggggcgugcaccaccccggcaccgacagcgaccagaucagccuguacgcccagaccagcggcagagugaccgugagcaccaagagaagccagcagaccgugauccccaacaucggcagcggccccugggugagaggcgugagcagcagaaucagcaucuacuggaccaucgugaagcccggcgacauccugcugaucaacagcaccggcaaccugaucgcccccagaggcuacuucaagaucagaagcggcaagagcagcaucaugagaagcgacgcccccaucggcaagugcaacagcgagugcaucacccccaacggcagcauccccaacgacaagcccuuccagaacgugaacagaaucaccuacggccccugccccagauacgugaagcagaacacccugaagcuggccaccggcaugagaaacgugcccgagaagcagaccagaggcaucuucggcgccaucgccggcuucaucgagaacggcugggagggcaugauggacggcugguacggcuucagacaccagaacagcgagggcaccggccaggccgccgaccugaagagcacccaggccgccaucaaccagaucaacggcaagcugaacagacugguggagaagaccaacgagaaguuccaccagaucgagaaggaguucagcgagguggagggcagaauccaggaccuggagaaguacguggaggacaccaagaucgaccuguggagcuacaacgccgagcugcugguggcccuggagaaccagcacaccaucgaccugaccgacagcgagaugaacaagcuguucgagagaaccaagaagcagcugagagagaacgccgaggacaugggcaacggcugcuucaagaucuaccacaagugcgacaacgccugcaucggcagcaucagaaacggcaccuacgaccacgacguguacagagacgaggcccugaacaacagauuccagaucaagggcguggagcugaagagcggcuacaaggacuggauccuguggaucagcuucgccaucagcugcuuccugcugugcaucgugcugcugggcuucaucaugugggccugccagaagggcaacaucagaugcaacaucugcaucuga

SEQ ID NO: 168837 - RNA, 1701 nt, Artificial Sequence
  derived and/or modified CDS sequence (opt4) from hemagglutinin__InfluenzaA__AFJ74634
augaagaccaucaucgcccugagcuacauccugugccugguguucgcccagaagcugcccggcaacgacaacagcaccgccacccugugccugggccaccacgccgugcccaacggcaccaucgugaagaccaucaccaacgaccagaucgaggugaccaacgccaccgagcuggugcagagcagcagcaccggcggcaucugcgacagcccccaccagauccuggacggcgagaacugcacccugaucgacgcccugcugggcgacccccagugcgacggcuuccagaacaagaagugggaccuguucguggagagaagcaaggccuacagcaacugcuaccccuacgacgugcccgacuacgccagccugagaagccugguggccagcagcggcacccuggaguucaacaacgagagcuucaacuggaccggcgugacccagaacggcaccagcagcgccugcaagagaagaagcaacaagagcuucuucagcagacugaacuggcugacccagcugaaguacaaguaccccgcccugaacgugaccaugcccaacaacgagaaguucgacaagcuguacaucuggggcgugcaccaccccggcaccgacagcgaccagaucagccuguacgcccaggccagcggcagaaucaccgugagcaccaagagaagccagcagaccgugauccccaacaucggcagcagacccagagugagagacgugagcagcagaaucagcaucuacuggaccaucgugaagcccggcgacauccugcugaucaacagcaccggcaaccugaucgcccccagaggcuacuucaagaucagaagcggcaagagcagcaucaugagaagcgacgcccccaucggcaagugcaacagcgagugcaucacccccaacggcagcauccccaacgacaagcccuuccagaacgugaacagaaucaccuacggcgccugccccagauacgugaagcagaacacccugaagcuggccaccggcaugagaaacgugcccgagaagcagaccagaggcaucuucggcgccaucgccggcuucaucgagaacggcugggagggcaugguggacggcugguacggcuucagacaccagaacagcgagggcaccggccaggccgccgaccugaagagcacccaggccgccaucaaccagaucaacggcaagcugaacagacugaucggcaagaccaacgagaaguuccaccagaucgagaaggaguucagcgagguggagggcagaauccaggaccuggagaaguacguggaggacaccaagaucgaccuguggagcuacaacgccgagcugcugguggcccuggagaaccagcacaccaucgaccugaccgacagcgagaugaacaagcuguucgagagaaccaagaagcagcugagagagaacgccgaggacaugggcaacggcugcuucaagaucuaccacaagugcgacaacgccugcaucggcagcaucagaaacggcaccuacgaccacgacguguacagagacgaggcccugaacaacagauuccagaucaagggcguggagcugaagagcggcuacaaggacuggauccuguggaucagcuucgccaucagcugcuuccugcugugcguggcccugcugggcuucaucaugugggccugccagaagggcaacaucagaugcaacaucugcaucuga

SEQ ID NO: 168838 - RNA, 1698 nt, Artificial Sequence
  derived and/or modified CDS sequence (opt4) from hemagglutinin__InfluenzaA__AFJ74653
augaaggugaagcugcuggugcugcugugcaccuucaccgccaccuacgccgacaccaucugcaucggcuaccacgccaacaacagcaccgacaccguggacaccgugcuggagaagaacgugaccgugacccacagcgugaaccugcuggaggacagccacaacggcaagcugugccugcugaagggcaucgccccccugcagcugggcaacugcagcguggccggcuggauccugggcaaccccgagugcgagcugcugaucagcaaggagagcuggagcuacaucguggagaagcccaaccccgagaacggcaccugcuaccccggcuacuucgccgacuacgaggagcugagagagcagcugagcagcgugagcagcuucgagagauucgagaucuuccccaaggagagcagcuggcccaaccacaccgugaccggcgugagcgccagcugcagccacaacggcaagagcagcuucuacaagaaccugcuguggcugaccggcaagaacggccuguaccccaaccugagcaagagcuacgccaacaacaaggagaaggaggugcuggugcuguggggcgugcaccacccccccaacaucggcgaccagagagcccuguaccacaccgacaacgccuacgugagcguggugagcagccacuacagcagaaaguucacccccgagaucgccaagagacccaaggugagagaccaggagggcagaaucaacuacuacuggacccugcuggagcccggcgacaccaucaucuucgaggccaacggcaaccugaucgcccccagauacgccuucgcccugagcagaggcuucggcagcggcaucaucaacagcaacgcccccauggacgagugcgacgccaagugccagaccccccagggcgccaucaacagcagccugcccuuccagaacgugcaccccgugaccaucggcgagugccccaaguacgugagaagcgccaagcugagaauggugaccggccugagaaacauccccagcauccagagcagaggccuguucggcgccaucgccggcuucaucgagggcggcuggaccggcaugguggacggcugguacggcuaccaccaccagaacgagcagggcagcggcuacgccgccgaccagaagagcacccagaacgccaucaacggcaucaccaacaaggugaacagcgugaucgagaagaugaacacccaguucaccgccgugggcaaggaguucaacaagcuggagagaagaauggagaaccugaacaagaagguggacgacggcuucaucgacaucuggaccuacaacgccgagcugcuggugcugcuggagaacgagagaacccuggacuuccacgacagcaacgugaagaaccuguacgagaaggugaagagccagcugaagaacaacgccaaggagaucggcaacggcugcuucgaguucuaccacaagugcaacgacgagugcauggagagcgugaagaacggcaccuacgacuaccccaaguacagcgaggagagcaagcugaacagagagaagaucgacggcgugaagcuggagagcaugggcguguaccagauccuggccaucuacagcaccguggccagcagccuggugcugcuggugagccugggcgccaucagcuucuggaugugcagcaacggcagccugcagugcagaaucugcaucuga

SEQ ID NO: 168839 - RNA, 1698 nt, Artificial Sequence
  derived and/or modified CDS sequence (opt4) from hemagglutinin__InfluenzaA__AFJ74673
augaaggugaagcugcuggugcugcugugcaccuucaccgccaccuacgccgacaccaucugcaucggcuaccacgccaacaacagcaccgacaccguggacaccgugcuggagaagaacgugaccgugacccacagcgugaaccugcuggaggacagccacaacggcaagcugugccugcugaagggcaucgccccccugcagcugggcaacugcagcguggccggcuggauccugggcaaccccgagugcgagcugcugaucagcaaggagagcuggagcuacaucguggagaagcccaaccccgagaacggcaccugcuaccccggcuacuucgccgacuacgaggagcugagagagcagcugagcagcgugagcagcuucgagagauucgagaucuuccccaaggagagcagcuggcccaaccacaccgugaccggcgugagcgccagcugcagccacaacggcaagagcagcuucuacaagaaccugcuguggcugaccggcaagaacggccuguaccccaaccugagaaagagcuacgccaacaacaaggagaaggaggugcuggugcuguggggcgugcaccacccccccaacaucggcgaccagagagcccuguaccacaccgacaacgccuacgugagcguggugagcagccacuacagcagaaaguucacccccgagaucgccaagagacccaaggugagagaccaggagggcagaaucaacuacuacuggacccugcuggagcccggcgacaccaucaucuucgaggccaacggcaaccugaucgcccccagauacgccuucgcccugagcagaggcuucggcagcggcaucaucaacagcaacgcccccauggacgagugcgacgccaagugccagaccccccagggcgccaucaacagcagccugcccuuccagaacgugcaccccgugaccaucggcgagugccccaaguacgugagaagcgccaagcugagaauggugaccggccugagaaacauccccagcauccagagcagaggccuguucggcgccaucgccggcuucaucgagggcggcuggaccggcaugguggacggcugguacggcuaccaccaccagaacgagcagggcagcggcuacgccgccgaccagaagagcacccagaacgccaucaacggcaucaccaacaaggugaacagcgugaucgagaagaugaacacccaguucaccgccgugggcaaggaguucaacaagcuggagagaagaauggagaaccugaacaagaagguggacgacggcuucaucgacaucuggaccuacaacgccgagcugcuggugcugcuggagaacgagagaacccuggacuuccacgacagcaacgugaagaaccuguacgagaaggugaagagccagcugaagaacaacgccaaggagaucggcaacggcugcuucgaguucuaccacaagugcaacgacgagugcauggagagcgugaagaacggcaccuacgacuaccccaaguacagcgaggagagcaagcugaacagagagaagaucgacggcgugaagcuggagagcaugggcguguaccagauccuggccaucuacagcaccguggccagcagccuggugcugcuggugagccugggcgccaucagcuucuggaugugcagcaacggcagccugcagugcagaaucugcaucuga

SEQ ID NO: 168840 - RNA, 1701 nt, Artificial Sequence
  derived and/or modified CDS sequence (opt4) from hemagglutinin__InfluenzaA__AFJ74674
augaagaccaucaucgcccugagcuacauccugugccugguguucgcccagaagcugcccggcaacgacaacagcaccgccacccugugccugggccaccacgccgugcccaacggcacccuggugaagaccaucaccaacgaccagaucgaggugaccaacgccaccgagcuggugcagagcagcagcaccggcggcaucugcgacagcccccaccagauccuggacggcgagaacugcacccugaucgacgcccugcugggcgacccccacugcgacggcuuccagaacaagaagugggaccuguucguggagagaagcaaggccuacagcaacugcuaccccuacgacgugcccgacuacgccagccugagaagccugguggccagcagcggcacccuggaguucaacaacgagagcuucaacuggaccggcguggcccagaacggcaccagcagcgccugcaagagaagaagcaacaagagcuucuucagcagacugaacuggcugcaccagcugaaguacaaguaccccgcccugaacgugaccaugcccaacaacgagaaguucgacaagcuguacaucuggggcgugcaccaccccggcaccgacagcgaccagaucagccuguacgcccaggccagcggcagaaucaccgugagcaccaagagaagccagcagaccgugauccccaacaucggcagcagacccagagugagagacgugagcagcagaaucagcaucuacuggaccaucgugaagcccggcgacauccugcugaucaacagcaccggcaaccugaucgcccccagaggcuacuucaagaucagaagcggcagaagcagcaucaugagaagcgacgcccccaucggcaagugcaacagcgagugcaucacccccaacggcagcauccccaacgacaagcccuuccagaacgugaacagaaucaccuacggcgccugccccagauacgugaagcagaacacccugaagcuggccaccggcaugagaaacgugcccgagaagcagcccagaggcaucuucggcgccaucgccggcuucaucgagaacggcugggagggcaugguggacggcugguacggcuucagacaccagaacagcgagggcaccggccaggccgccgaccugaagagcacccaggccgccaucaaccagaucaacggcaagcugaacagacugaucggcaagaccaacgagaaguuccaccagaucgagaaggaguucagcgagguggagggcagaauccaggaccuggagaaguacguggaggacaccaagaucgaccuguggagcuacaacgccgagcugcugguggcccuggagaaccagcacaccaucgaccugaccgacagcgagaugaacaagcuguucgagagaaccaagaagcagcugagagagaacgccgaggacaugggcaacggcugcuucaagaucuaccacaagugcgacaacgccugcaucggcagcaucagaaacggcaccuacgaccacgacguguacagagacgaggcccugaacaacagauuccagaucaagggcguggagcugaagagcggcuacaaggacuggauccuguggaucagcuucgccaucagcugcuuccugcugugcguggcccugcugggcuucaucaugugggccugccagaagggcaacaucagaugcaacaucugcaucuga

SEQ ID NO: 168841 - RNA, 1698 nt, Artificial Sequence; identical to SEQ ID NO: 168838
  derived and/or modified CDS sequence (opt4) from hemagglutinin__InfluenzaA__AFJ74694

SEQ ID NO: 168842 - RNA, 1701 nt, Artificial Sequence
  derived and/or modified CDS sequence (opt4) from hemagglutinin__InfluenzaA__AFJ74695
augaagaccaucaucgcccugagcuacauccugugccugguguucgcccagaagcugcccggcaacgacaacagcaccgccacccugugccugggccaccacgccgugcccaacggcacccuggugaagaccaucaccaacgaccagaucgaggugaccaacgccaccgagcuggugcagaacagcagcaccggcagaaucugcgacagcccccaccagauccuggacggcgagaacugcacccugaucgacgcccugcugggcgacccccacugcgacggcuuccagaacaaggagugggaccuguucguggagagaagcaaggccuacagcaacugcuaccccuacgacgugcccgacuacgugagccugagaagccugguggccagcagcggcacccuggaguucaacaacgagagcuucaacuggaccggcguggcccaggacggcaccagcagcgccugcaagagaagaagcgacaagagcuucuucagcagacugaacuggcugcaccagcugaaguacaaguaccccgcccugaacgugaccaugcccaacaacgagaaguucgacaagcuguacaucuggggcgugcaccaccccggcaccgacagcgaccagaucagccuguacgccagagccagcggcagagugaccgugagcaccaagagaagccagcagaccgugauccccaacaucggcagcagacccugggugagaggcgugagcagcaagaucagcaucuacuggaccaucgugaagcccggcgacauccugcugaucaacagcaccggcaaccugaucgcccccagaggcuacuucaagaucagaagcggcaagagcagcaucaugagaagcgacgcccccaucggcaagugcaacagcgagugcaucacccccaacggcagcauccccaacgacaagcccuuccagaacgugaacagaaucaccuacggccccugccccagauacgugaagcagaacacccugaagcuggccaccggcaugagaaacgugcccgagaagcagaccagaggcaucuucggcgccaucgccggcuucaucgagaacggcugggagggcaugguggacggcugguacggcuucagacaccagaacagcgagggcaccggccaggccgccgaccugaagagcacccaggccgccaucaaccagaucaacggcaagcugaacagacugaucgagaagaccaacgagaaguuccaccagaucgagaaggaguucagcgagguggagggcagaauccaggaccuggagaaguacguggaggacaccaagaucgaccuguggagcuacaacgccgagcugcugguggcccuggagaaccagcacaccaucgaccugaccgacagcgagaugaacaagcuguucgagagaaccaagaagcagcugagagagaacgccgaggacaugggcaacggcugcuucaagaucuaccacaagugcgacaacgccugcaucggcagcaucagaaacggcaccuacgaccacgacguguacagagacgaggcccugaacaacagauuccagaucaagggcguggagcugaagagcggcuacaaggacuggauccuguggaucagcuucgccaucagcugcuuccugcugugcaucgugcugcugggcuucaucaugugggccugccagaagggcaacaucagaugcaacaucugcaucuga

SEQ ID NO: 168843 - RNA, 1701 nt, Artificial Sequence
  derived and/or modified CDS sequence (opt4) from hemagglutinin__InfluenzaA__AFJ74727
augaagaccaucaucgcccugagcuacauccugugccugguguucgcccagaagcugcccggcaacgacaacagcaccgccacccugugccugggccaccacgccgugcccaacggcaccaucgugaagaccaucaccaacgaccagaucgaggugaccaacgccaccgagcuggugcagagcagcagcaccggcggcaucugcgacagcccccaccagauccuggacggcgagaacugcacccugaucgacgcccugcugggcgacccccagugcgacggcuuccagaacaagaagugggaccuguucguggagagaagcaaggccuacagcaacugcuaccccuacgacgugcccgacuacgccagccugagaagccugguggccagcagcggcacccuggaguucaacaacgagagcuucaacuggaccggcgugacccagaacggcaccagcagcgccugcaagagaagaagcaacaagagcuucuucagcagacugaacuggcugacccagcugaaguacaaguaccccgcccugaacgugaccaugcccaacaacgagaaguucgacaagcuguacaucuggggcgugcaccaccccggcaccgacagcgaccagaucagccuguacgcccaggccagcggcagaaucaccgugagcaccaagagaagccagcagaccgugauccccaacaucggcagcagacccagagugagagacaucagcagcagaaucagcaucuacuggaccaucgugaagcccggcgacauccugcugaucaacagcaccggcaaccugaucgcccccagaggcuacuucaagaucagaagcggcaagagcagcaucaugagaagcgacgcccccaucggcaagugcaacagcgagugcaucacccccaacggcagcauccccaacgacaagcccuuccagaacgugaacagaaucaccuacggcgccugccccagauacgugaagcagaacacccugaagcuggccaccggcaugagaaacgugcccgagaagcagaccagaggcaucuucggcgccaucgccggcuucaucgagaacggcugggagggcaugguggacggcugguacggcuucagacaccagaacagcgagggcaccggccaggccgccgaccugaagagcacccaggccgccaucaaccagaucaacggcaagcugaacagacugaucggcaagaccaacgagaaguuccaccagaucgagaaggaguucagcgagguggagggcagaauccaggaccuggagaaguacguggaggacaccaagaucgaccuguggagcuacaacgccgagcugcugguggcccuggagaaccagcacaccaucgaccugaccgacagcgagaugaacaagcuguucgagagaaccaagaagcagcugagagagaacgccgaggacaugggcaacggcugcuucaagaucuaccacaagugcgacaacgccugcaucggcagcaucagaagcggcaccuacgaccacgacguguacagagacgaggcccugaacaacagauuccagaucaagggcguggagcugaagagcggcuacaaggacuggauccuguggaucagcuucgccaucagcugcuuccugcugugcguggcccugcugggcuucaucaugugggccugccagaagggcaacaucagaugcaacaucugcaucuga

SEQ ID NO: 168844 - RNA, 1698 nt, Artificial Sequence; identical to SEQ ID NO: 168838
  derived and/or modified CDS sequence (opt4) from hemagglutinin__InfluenzaA__AFJ74743

SEQ ID NO: 168845 - RNA, 1701 nt, Artificial Sequence; identical to SEQ ID NO: 168837
  derived and/or modified CDS sequence (opt4) from hemagglutinin__InfluenzaA__AFJ74744

SEQ ID NO: 168846 - RNA, 1698 nt, Artificial Sequence; identical to SEQ ID NO: 168838
  derived and/or modified CDS sequence (opt4) from hemagglutinin__InfluenzaA__AFJ74760

SEQ ID NO: 168847 - RNA, 1701 nt, Artificial Sequence
  derived and/or modified CDS sequence (opt4) from hemagglutinin__InfluenzaA__AFJ74761
augaagaccaucaucgcccugagcuacauccugugccugguguucgcccagaagcugcccggcaacgacaacagcaccgccacccugugccugggccaccacgccgugcccaacggcaccaucgugaagaccaucaccaacgaccagaucgaggugaccaacgccaccgagcuggugcagagcagcagcaccggcggcaucugcgacagcccccaccagauccuggacggcgagaacugcacccugaucgacgcccugcugggcgacccccagugcgacggcuuccagaacaagaagugggaccuguucguggagagaagcaaggccuacagcaacugcuaccccuacgacgugcccgacuacgccagccugagaagccugguggccagcagcggcacccuggaguucaacaacgagagcuucaacuggaccggcgugacccagaacggcaccagcagcgccugcaagagaagaagcaacaagagcuucuucagcagacugaacuggcugacccagcugaaguacaaguaccccgcccugaacgugaccaugcccaacaacgagaaguucgacaagcuguacaucuggggcgugcaccaccccggcaccgacagcgaccagaucagccuguacgcccaggccagcggcagaaucaccgugagcaccaagagaagccagcagaccgugauccccaacaucggcagcagacccagagugagagacaucagcagcagaaucagcaucuacuggaccaucgugaagcccggcgacauccugcugaucaacagcaccggcaaccugaucgcccccagaggcuacuucaagaucagaagcggcaagagcagcaucaugagaagcgacgcccccaucggcaagugcaacagcgagugcaucacccccaacggcagcauccccaacgacaagcccuuccagaacgugaacagaaucaccuacggcgccugccccagauacgugaagcagaacacccugaagcuggccaccggcaugagaaacgugcccgagaagcagaccagaggcaucuucggcgccaucgccggcuucaucgagaacggcugggagggcaugguggacggcugguacggcuucagacaccagaacagcgagggcaccggccaggccgccgaccugaagagcacccaggccgccaucaaccagaucaacggcaagcugaacagacugaucggcaagaccaacgagaaguuccaccagaucgagaaggaguucagcgagguggagggcagaauccaggaccuggagaaguacguggaggacaccaagaucgaccuguggagcuacaacgccgagcugcugguggcccuggagaaccagcacaccaucgaccugaccgacagcgagaugaacaagcuguucgagagaaccaagaagcagcugagagagaacgccgaggacaugggcaacggcugcuucaagaucuaccacaagugcgacaacgccugcaucggcagcaucagaaacggcaccuacgaccacgacguguacagagacgaggcccugaacaacagauuccagaucaagggcguggagcugaagagcggcuacaaggacuggauccuguggaucagcuucgccaucagcugcuuccugcugugcguggcccugcugggcuucaucaugugggccugccagaagggcaacaucagaugcaacaucugcaucuga

SEQ ID NO: 168848 - RNA, 1698 nt, Artificial Sequence; identical to SEQ ID NO: 168838
  derived and/or modified CDS sequence (opt4) from hemagglutinin__InfluenzaA__AFJ74779

SEQ ID NO: 168849 - RNA, 1701 nt, Artificial Sequence; identical to SEQ ID NO: 168837
  derived and/or modified CDS sequence (opt4) from hemagglutinin__InfluenzaA__AFJ74780

SEQ ID NO: 168850 - RNA, 1701 nt, Artificial Sequence
  derived and/or modified CDS sequence (opt4) from hemagglutinin__InfluenzaA__AFJ74804
augaagaccaucaucgcccugagcuacauccugugccugguguucgcccagaagcugcccggcaacgacaacagcaccgccacccugugccugggccaccacgccgugcccaacggcaccaucgugaagaccaucaccaacgaccagaucgaggugaccaacgccaccgagcuggugcagagcagcagcaccggcggcaucugcgacagcccccaccagauccuggacggcgagaacugcacccugaucgacgcccugcugggcgacccccagugcgacggcuuccagaacagaaagugggaccuguucguggagagaagcaaggccuacagcaacugcuaccccuacgacgugcccgacuacgccagccugagaagccugguggccagcagcggcacccuggaguucaacaacgagagcuucgacuggaccggcgugacccagaacggcaccagcagcgccugcaagagaagaagcaacaagagcuucuucagcagacugaacuggcugacccaccugaaguacaaguaccccgcccugaacgugaccaugcccaacaacgagaaguucgacaagcuguacaucuggggcgugcaccaccccggcaccgacagcgaccagaucagccuguacgcccaggccagcggcagaaucaccgugagcaccaagagaagccagcagaccgugauccccaacaucggcagcagacccagagugagagacgugagcagcagaaucagcaucuacuggaccaucgugaagcccggcgacauccugcugaucaacagcaccggcaaccugaucgcccccagaggcuacuucaagaucagaagcggcaagagcagcaucaugagaagcgacgcccccaucggcaagugcaacagcgagugcaucacccccaacggcagcauccccaacgacaagcccuuccagaacgugaacagaaucaccuacggcgccugccccagauacgugaagcagaacacccugaagcuggccaccggcaugagaaacgugcccgagaagcagaccagaggcaucuucggcgccaucgccggcuucaucgagaacggcugggagggcaugguggacggcugguacggcuucagacaccagaacagcgagggcaccggccaggccgccgaccugaagagcacccaggccgccaucaaccagaucaacggcaagcugaacagacugaucggcaagaccaacgagaaguuccaccagaucgagaaggaguucagcgagguggagggcagaauccaggaccuggagaaguacguggaggacaccaagaucgaccuguggagcuacaacgccgagcugcugguggcccuggagaaccagcacaccaucgaccugaccgacagcgagaugaacaagcuguucgagagaaccaagaagcagcugagagagaacgccgaggacaugggcaacggcugcuucaagaucuaccacaagugcgacaacgccugcaucggcagcaucagaaacggcaccuacgaccacgacguguacagagacgaggcccugaacaacagauuccagaucaagggcguggagcugaagagcggcuacaaggacuggauccuguggaucagcuucgccaucagcugcuuccugcugugcguggcccugcugggcuucaucaugugggccugccagaagggcaacaucagaugcaacaucugcaucuga

SEQ ID NO: 168851 - RNA, 1701 nt, Artificial Sequence
  derived and/or modified CDS sequence (opt4) from hemagglutinin__InfluenzaA__AFJ74819
augaagaccaucaucgcccugagcuacauccugugccugguguucgcccagaagcugcccggcaacgacaacagcaccgccacccugugccugggccaccacgccgugcccaacggcaccaucgugaagaccaucaccaacgaccagaucgaggugaccaacgccaccgagcuggugcagagcagcagcaccggcggcaucugcgacagcccccaccagauccuggacggcgagaacugcacccugaucgacgcccugcugggcgacccccagugcgacggcuuccagaacaagaagugggaccuguucguggagagaagcaaggccuacagcaacugcuaccccuacgacgugcccgacuacgccagccugagaagccugguggccagcagcggcacccuggaguucaacaacgagagcuucgacuggaccggcgugacccagaacggcaccagcagcgccugcaagagaagaagcaacaagagcuucuucagcagacugaacuggcugacccaccugaaguacaaguaccccgcccugaacgugaccaugcccaacaacgagaaguucgacaagcuguacaucuggggcgugcaccaccccggcaccgacagcgaccagaucaaccuguacgcccaggccagcggcagaaucaccgugagcaccaagagaagccagcagaccgugauccccaacaucggcagcagacccagagugagagacgugagcagcagaaucagcaucuacuggaccaucgugaagcccggcgacauccugcugaucaacagcaccggcaaccugaucgcccccagaggcuacuucaagaucagaagcggcaagagcagcaucaugagaagcgacgcccccaucggcaagugcaacagcgagugcaucacccccaacggcagcauccccaacgacaagcccuuccagaacgugaacagaaucaccuacggcgccugccccagauacgugaagcagaacacccugaagcuggccaccggcaugagaaacgugcccgagaagcagaccagaggcaucuucggcgccaucgccggcuucaucgagaacggcugggagggcaugguggacggcugguacggcuucagacaccagaacagcgagggcaccggccaggccgccgaccugaagagcacccaggccgccaucaaccagaucaacggcaagcugaacagacugaucggcaagaccaacgagaaguuccaccagaucgagaaggaguucagcgagguggagggcagaauccaggaccuggagaaguacguggaggacaccaagaucgaccuguggagcuacaacgccgagcugcugguggcccuggagaaccagcacaccaucgaccugaccgacagcgagaugaacaagcuguucgagagaaccaagaagcagcugagagagaacgccgaggacaugggcaacggcugcuucaagaucuaccacaagugcgacaacgccugcaucggcagcaucagaaacggcaccuacgaccacgacguguacagagacgaggcccugaacaacagauuccagaucaagggcguggagcugaagagcggcuacaaggacuggauccuguggaucagcuucgccaucagcugcuuccugcugugcguggcccugcugggcuucaucaugugggccugccagaagggcaacaucagaugcaacaucugcaucuga

SEQ ID NO: 168852 - RNA, 1701 nt, Artificial Sequence; identical to SEQ ID NO: 162705
  derived and/or modified CDS sequence (opt4) from hemagglutinin__InfluenzaA__AFJ74842

SEQ ID NO: 168853 - RNA, 1698 nt, Artificial Sequence
  derived and/or modified CDS sequence (opt4) from hemagglutinin__InfluenzaA__AFJ75036
augaaggugaagcugcuggugcugcugugcaccuucaccgccaccuacgccgacaccaucugcaucggcuaccacgccaacaacagcaccgacaccguggacaccgugcuggagaagaacgugaccgugacccacagcgugaaccugcuggaggacagccacaacggcaagcugugccugcugaagggcaucgccccccugcagcugggcaacugcagcguggccggcuggauccugggcaaccccgagugcgagcugcugaucagcagagagagcuggagcuacaucguggagaagcccaaccccgagaacggcaccugcuaccccggccacuucgccgacuacgaggagcugagagagcagcugagcagcgugagcagcuucgagagauucgagaucuuccccaaggagaacagcuggcccaaccacaccgugaccggcgugagcgccagcugcagccacaacggcaagagcagcuucuacaagaaccugcuguggcugaccggcaagaacggccuguaccccaaccugagcaagagcuacgccaacaacaaggagaaggaggugcuggugcuguggggcgugcaccacccccccaacaucggcgaccagagagcccuguaccacaccgagaacgccuacgugagcguggugagcagccacuacagcagaaaguucacccccgagaucgccaagagacccaaggugagagaccaggagggcagaaucaacuacuacuggacccugcuggagcccggcgacaccaucaucuucgaggccaacggcaaccugaucgcccccagauacgccuucgcccugagcagaggcuucggcagcggcaucaucaacagcaacgcccccauggacgagugcgacgccaagugccagaccccccagggcgccaucaacagcagccugcccuuccagaacgugcaccccgugaccaucggcgagugccccaaguacgugagaagcgccaagcugagaauggugaccggccugagaaacauccccagcauccagagcagaggccuguucggcgccaucgccggcuucaucgagggcggcuggaccggcaugguggacggcugguacggcuaccaccaccagaacgagcagggcagcggcuacgccgccgaccagaagagcacccagaacgccaucaacggcaucaccaacaaggugaacagcgugaucgagaagaugaacacccaguucaccgccgugggcaaggaguucaacaagcuggagagaagaauggagaaccugaacaagaagguggacgacggcuucaucgacaucuggaccuacaacgccgagcugcuggugcugcuggagaacgagagaacccuggacuuccacgacagcaacgugaagaaccuguacgagaaggugaagagccagcugaagaacaacgccaaggagaucggcaacggcugcuucgaguucuaccacaagugcaacgacgagugcauggagagcgugaagaacggcaccuacgacuaccccaaguacagcgaggagagcaagcugaacagagagaagaucgacggcgugaagcuggagagcaugggcguguaccagauccuggccaucuacagcaccguggccagcagccuggugcugcuggugagccugggcgccaucagcuucuggaugugcagcaacggcagccugcagugcagaaucugcaucuga

SEQ ID NO: 168854 - RNA, 1701 nt, Artificial Sequence; identical to SEQ ID NO: 160690
  derived and/or modified CDS sequence (opt4) from hemagglutinin__InfluenzaA__AFJ75047

SEQ ID NO: 168855 - RNA, 1698 nt, Artificial Sequence
  derived and/or modified CDS sequence (opt4) from hemagglutinin__InfluenzaA__AFJ75058
augaaggugaagcugcuggugcugcugugcaccuucaccgccaccuacgccgacaccaucugcaucggcuaccacgccaacaacagcaccgacaccguggacaccgugcuggagaagaacgugaccgugacccacagcgugaaccugcuggaggacagccacaacggcaagcugugccugcugaagggcaucgccccccugcagcugggcaacugcagcguggccggcuggauccugggcaaccccgagugcgagcugcugaucagcagagagagcuggagcuacaucguggagaagcccaaccccgagaacggcaccugcuaccccggccacuucgccgacuacgaggagcugagagagcagcugagcagcgugagcagcuucgagagauucgagaucuuccccaaggagagcagcuggcccaaccacaccgugaccggcgugagcgccagcugcagccacaacggcaagagcagcuucuacaagaaccugcuguggcugaccggcaagaacggccuguaccccaaccugagcaagagcuacgccaacaacaaggagaaggaggugcuggugcuguggggcgugcaccacccccccaacaucggcgaccagagagcccuguaccacaccgagaacgccuacgugagcguggugagcagccacuacagcagaaaguucacccccgagaucgccaagagacccaaggugagagaccaggagggcagaaucaacuacuacuggacccugcuggagcccggcgacaccaucaucuucgaggccaacggcaaccugaucgcccccagauacgccuucgcccugagcagaggcuucggcagcggcaucaucaacagcaacgcccccauggacgagugcgacgccaagugccagaccccccagggcgccaucaacagcagccugcccuuccagaacgugcaccccgugaccaucggcgagugccccaaguacgugagaagcgccaagcugagaauggugaccggccugagaaacauccccagcauccagagcagaggccuguucggcgccaucgccggcuucaucgagggcggcuggaccggcaugguggacggcugguacggcuaccaccaccagaacgagcagggcagcggcuacgccgccgaccagaagagcacccagaacgccaucaacggcaucaccaacaaggugaacagcgugaucgagaagaugaacacccaguucaccgccgugggcaaggaguucaacaagcuggagagaagaauggagaaccugaacaagaagguggacgacggcuucaucgacaucuggaccuacaacgccgagcugcuggugcugcuggagaacgagagaacccuggacuuccacgacagcaacgugaagaaccuguacgagaaggugaagagccagcugaagaacaacgccaaggagaucggcaacggcugcuucgaguucuaccacaagugcaacgacgagugcauggagagcgugaagaacggcaccuacgacuaccccaaguacagcgaggagagcaagcugaacagagagaagaucgacggcgugaagcuggagagcaugggcguguaccagauccuggccaucuacagcaccguggccagcagccuggugcugcuggugagccugggcgccaucagcuucuggaugugcagcaacggcagccugcagugcagaaucugcaucuga

SEQ ID NO: 168856 - RNA, 1698 nt, Artificial Sequence
  derived and/or modified CDS sequence (opt4) from hemagglutinin__InfluenzaA__AFJ75069
augaaggugaagcugcuggugcugcugugcaccuucaccgccaccuacgccgacaccaucugcaucggcuaccacgccaacaacagcaccgacaccguggacaccgugcuggagaagaacgugaccgugacccacagcgugaaccugcuggaggacagccacaacggcaagcugugccugcugaagggcaucgccccccugcagcugggcaacugcagcguggccggcuggauccugggcaaccccgagugcgagcugcugaucagcagagagagcuggagcuacaucguggagaagagcaaccccgagaacggcaccugcuaccccggccacuucgccgacuacgaggagcugagagagcagcugagcagcgugagcagcuucgagagauucgagaucuuccccaaggagagcagcuggcccaaccacaccaccaccggcgugagcgccagcugcagccacaacggcgagagcagcuucuacaagaaccugcuguggcugaccggcaagaacggccuguaccccaaccugagcaagagcuacgccaacaacaaggagaaggaggugcuggugcuguggggcgugcaccacccccccaacaucggcgaccagagagcccuguaccacaccgagaacgccuacgugagcguggugagcagccacuacagcagaaaguucacccccgagaucgccaagagacccaaggugagagaccaggagggcagaaucaacuacuacuggacccugcuggagcccggcgacaccaucaucuucgaggccaacggcaaccugaucgcccccagauacgccuucgcccugagcagaggcuucggcagcggcaucaucaacagcaacgcccccauggacgagugcgacgccaagugccagaccccccagggcgccaucaacagcagccugcccuuccagaacgugcaccccgugaccaucggcgagugccccaaguacgugagaagcgccaagcugagaauggugaccggccugagaaacauccccagcauccagagcagaggccuguucggcgccaucgccggcuucaucgagggcggcuggaccggcaugguggacggcugguacggcuaccaccaccagaacgagcagggcagcggcuacgccgccgaccagaagagcacccagaacgccaucaacggcaucaccaacaaggugaacagcgugaucgagaagaugaacacccaguucaccgccgugggcaaggaguucaacaagcuggagagaagaauggagaaccugaacaagaagguggacgacggcuucaucgacaucuggaccuacaacgccgagcugcuggugcugcuggagaacgagagaacccuggacuuccacgacagcaacgugaagaaccuguacgagaaggugaagagccagcugaagaacaacgccaaggagaucggcaacggcugcuucgaguucuaccacaagugcaacgacgagugcauggagagcgugaagaacggcaccuacgacuaccccaaguacagcgaggagagcaagcugaacagagagaagaucgacggcgugaagcuggagagcaugggcguguaccagauccuggccaucuacagcaccguggccagcagccuggugcugcuggugagccugggcgccaucagcuucuggaugugcagcaacggcagccugcagugcagaaucugcaucuga

SEQ ID NO: 168857 - RNA, 1701 nt, Artificial Sequence
  derived and/or modified CDS sequence (opt4) from hemagglutinin__InfluenzaA__AFJ75091
augaagaccaucaucgcccugagcuacauccugugccugguguucgcccagaagcugcccggcaacgacaacagcaccgccacccugugccugggccaccacgccgugcccaacggcaccaucgugaagaccaucaccaacgaccagaucgaggugaccaacgccaccgagcuggugcagagcagcagcaccggcggcaucugcgacagcccccaccagauccuggacggcgagaacugcacccugaucgacgcccugcugggcgacccccagugcgacggcuuccagaacaagaagugggaccuguucguggagagaagcaaggccuacagcaacugcuaccccuacgacgugcccgacuacgccagccugagaagccugguggccagcagcggcacccuggaguucaacaacgagagcuucaacuggaccggcgugacccagaacggcaccagcagcgccugcaagagaagaagcaacaacagcuucuucagcagacugaacuggcugacccaccugaaguucaaguaccccgcccugaacgugaccaugcccaacaacgagaaguucgacaagcuguacaucuggggcgugcaccaccccggcaccgacaacgaccagaucuuccuguacgcccaggccagcggcagaaucaccgugagcaccaagaucagccagcagaccgugauccccaacaucggcagcagacccagagugagaaacauccccagcagaaucagcaucuacuggaccaucgugaagcccggcgacauccugcugaucaacagcaccggcaaccugaucgcccccagaggcuacuucaagaucagaagcggcaagagcagcaucaugagaagcgacgcccccaucggcaagugcaacagcgagugcaucacccccaacggcagcauccccaacgacaagcccuuccagaacgugaacagaaucaccuacggcgccugccccagauacgugaagcagaacacccugaagcuggccaccggcaugagaaacgugcccgagaagcagaccagaggcaucuucggcgccaucgccggcuucaucgagaacggcugggagggcaugguggacggcugguacggcuucagacaccagaacagcgagggcaucggccaggccgccgaccugaagagcacccaggccgccaucgaccagaucaacggcaagcugaacagacugaucggcaagaccaacgagaaguuccaccagaucgagaaggaguucagcgagguggagggcagaauccaggaccuggagaaguacguggaggacaccaagaucgaccuguggagcuacaacgccgaccugcugguggcccuggagaaccagcacaccaucgaccugaccgacagcgagaugaacaagcuguucgagaagaccaagaagcagcugagagagaacgccgaggacaugggcaacggcugcuucaagaucuaccacaagugcgacaacgccugcaucggcagcaucagaaacggcaccuacgaccacgacguguacagagacgaggcccugaacaacagauuccagaucaagggcguggagcugaagagcggcuacaaggacuggauccuguggaucagcuucgccaucagcugcuuccugcugugcguggcccugcugggcuucaucaugugggccugccagaagggcaacaucagaugcaacaucugcaucuga

SEQ ID NO: 168858 - RNA, 1701 nt, Artificial Sequence
  derived and/or modified CDS sequence (opt4) from hemagglutinin__InfluenzaA__AFJ75449
augaagaccaucaucgcccugagcuacauccugugccugguguucgcccagaagcugcccggcaacgacaacagcaccgccacccugugccugggccaccacgccgugcccaacggcaccaucgugaagaccaucaccaacgaccagaucgaggugaccaacgccaccgagcuggugcagagcagcagcaccggcgagaucugcgacagcccccaccagauccuggacggcgagaacugcacccugaucgacgcccugcugggcgacccccagugcgacggcuuccagaacaagaagugggaccuguucguggagagaagcaaggccuacagcaacugcuaccccuacgacgugcccgacuacgccagccugagaagccugguggccagcagcggcacccuggaguucaacaacgagagcuucaacuggaccggcgugacccagaacggcaccagcagcgccugcaucagaagaagcaacaacagcuucuucagcagacugaacuggcugacccaccugaaguucaaguaccccgcccugaacgugaccaugcccaacaacgagaaguucgacaagcuguacaucuggggcgugcaccaccccggcaccgacaacgaccagaucuuccuguacgcccaggccagcggcaagaucaccgugagcaccaagagaagccagcagaccgugauccccaacaucggcagcagacccagagugagaaacauccccagcagaaucagcaucuacuggaccaucgugaagcccggcgacauccugcugaucaacagcaccggcaaccugaucgcccccagaggcuacuucaagaucagaagcggcaagagcagcaucaugagaagcgacgcccccaucggcaagugcaacagcgagugcaucacccccaacggcagcauccccaacgacaagcccuuccagaacgugaacagaaucaccuacggcgccugccccagauacgugaagcagaacacccugaagcuggccaccggcaugagaaacgugcccgagaagcagaccagaggcaucuucggcgccaucgccggcuucaucgagaacggcugggagggcaugguggacggcugguacggcuucagacaccagaacagcgagggcaccggccaggccgccgaccugaagagcacccaggccgccaucgaccagaucaacggcaagcugaacagacugaucggcaagaccaacgagaaguuccaccagaucgagaaggaguucagcgagguggagggcagaauccaggaccuggagaaguacguggaggacaccaagaucgaccuguggagcuacaacgccgagcugcugguggcccuggagaaccagcacaccaucgaccugaccgacagcgagaugaacaagcuguucgagaagaccaagaagcagcugagagagaacgccgaggacaugggcaacggcugcuucaagaucuaccacaagugcgacaacgccugcaucggcagcaucagaaacggcaccuacgaccacgacguguacagagacgaggcccugaacaacagauuccagaucaagggcguggagcugaagagcggcuacaaggacuggauccuguggaucagcuucgccaucagcugcuuccugcugugcguggcccugcugggcuucaucaugugggccugccagaagggcaacaucagaugcaacaucugcaucuga

SEQ ID NO: 168859 - RNA, 1701 nt, Artificial Sequence
  derived and/or modified CDS sequence (opt4) from hemagglutinin__InfluenzaA__AFJ75460
augaagaccaucaucgcccugagcuacauccugugccugguguucacccagaagcugcccggcaacgacaacagcaccgccacccugugccugggccaccacgccgugcccaacggcaccaucgugaagaccaucaccaacgaccagaucgaggugaccaacgccaccgagcuggugcagagcagcagcaccggcgagaucugcgacagcccccaccagauccuggacggcgagaacugcacccugaucgacgcccugcugggcgacccccagugcgacggcuuccagaacaagaagugggaccuguucguggagagaagcaaggccuacagcaacugcuaccccuacgacgugcccgacuacgccagccugagaagccugguggccagcagcggcacccuggaguucaacaacgagagcuucaacuggaccggcgugacccagaacggcaccagcagcgccugcaucagaagaagcaacaacagcuucuucagcagacugaacuggcugacccaccugaaguucaaguaccccgcccugaacgugaccaugcccaacaacgagaacuucgacaagcuguacaucuggggcgugcaccaccccggcaccgacaacgaccagaucuuccuguacgcccaggccagcggcagaaucaccgugagcaccaagagaagccagcagaccgugauccccaacaucggcagcagacccagagugagaaacauccccagcagaaucagcaucuacuggaccaucgugaagcccggcgacauccugcugaucaacagcaccggcaaccugaucgcccccagaggcuacuucaagaucagaagcggcaagagcagcaucaugagaagcgacgcccccaucggcaagugcaacagcgagugcaucacccccaacggcagcauccccaacgacaagcccuuccagaacgugaacagaaucaccuacggcgccugccccagauacgugaagcagaacacccugaagcuggccaccggcaugagaaacgugcccgagaagcagaccagaggcaucuucggcgccaucgccggcuucaucgagaacggcugggagggcaugguggacggcugguacggcuucagacaccagaacagcgagggcaucggccaggccgccgaccugaagagcacccaggccgccguggaccagaucaacggcaagcugaacagacugaucggcaagaccaacgagaaguuccaccagaucgagaaggaguucagcgagguggagggcagaauccaggaccuggagaaguacguggaggacaccaagaucgaccuguggagcuacaacgccgagcugcugguggcccuggagaaccagcacaccaucgaccugaccgacagcgagaugaacaagcuguucgagaagaccaagaagcagcugagagagaacgccgaggacaugggcaacggcugcuucaagaucuaccacaagugcgacaacgccugcaucggcagcaucagaaacggcaccuacgaccacgacguguacagagacgaggcccugaacaacagauuccagaucaagggcguggagcugaagagcggcuacaaggacuggauccuguggaucagcuucgccaucagcugcuuccugcugugcguggcccugcugggcuucaucaugugggccugccagaagggcaacaucagaugcaacaucugcaucuga

SEQ ID NO: 168860 - RNA, 1698 nt, Artificial Sequence
  derived and/or modified CDS sequence (opt4) from hemagglutinin__InfluenzaA__AFJ75517
augaaggugaagcugcuggugcugcugugcaccuucaccgccaccuacgccgacaccaucugcaucggcuaccacgccaacaacagcaccgacaccguggacaccgugcuggagaagaacgugaccgugaccuacagcgugaaccugcuggaggacaaccacaacggcaagcugugccugcugaagggcaucgccccccugcagcugggcaacugcagcguggccggcuggauccugggcaaccccgagugcgagcugcugaucagcaaggagagcuggagcuacaucguggagagacccaaccccgagaacggcaccugcuaccccggccacuucgccgacuacgaggagcugagagagcagcugagcagcgugagcagcuucgagagauucgagaucuuccccaaggagagcagcuggcccaaccacaccgugaccggcgugagcgccagcugcagccacaacggcgagagcagcuucuacaagaaccugcuguggcugaccggcaagaacggccuguaccccaaccugagcaagagcuacgccaacaacaaggagaaggaggugcuggugcuguggggcgugcaccacccccccaacaucggcgaccagaugacccuguaccacaagaagaacgccuacgugagcguggugagcagccacuacagcagaaaguucacccccgagaucgccaagagacccaaggugagagaccaggagggcagaaucaacuacuacuggacccugcuggagcccggcgacaccaucaucuucgaggccaacggcaaccugaucgcccccagauacgccuucgcccugaacagaggcuucggcagcggcaucaucaacagcaacgcccccauggacgagugcgacgccaagugccagaccccccagggcgccaucaacagcagccugcccuuccagaacgugcaccccgugaccaucggcgagugccccaaguacgugagaagcgccaagcugagaauggugaccggccugagaaacauccccagcauccagagcagaggccuguucggcgccaucgccggcuucaucgagggcggcuggaccggcaugguggacggcugguacggcuaccaccaccagaacgagcagggcagcggcuacgccgccgaccagaagagcacccagaacgccaucaacggcaucaccaacaaggugaacagcgugaucgagaagaugaacacccaguucaccgccgugggcaaggaguucaacaagcuggagagaagaauggagaaccugaacaagaagguggacgacggcuucaucgacguguggaccuacaacgccgagcugcuggugcugcuggagaacgagagaacccuggacuuccacgacagcaacgugaagaaccuguacgagaaggugaagacccagcugaagaacaacgccaaggagaucggcaacggcugcuucgaguucuaccacaagugcaacgacgagugcauggagagcgugaagaacggcaccuacgacuaccccaaguacagcgaggagagcaagcugagcagagagaagaucgacggcgugaagcuggagagcaugggcguguaccagauccuggccaucuacagcaccguggccagcagccuggugcugcuggugagccugggcgccaucagcuucuggaugugcagcaacggcagccugcagugcagaaucugcaucuga

SEQ ID NO: 168861 - RNA, 1698 nt, Artificial Sequence
  derived and/or modified CDS sequence (opt4) from hemagglutinin__InfluenzaA__AFJ75560
augaaggugaagcugcuggugcugcugugcaccuucaccgccaccuacgccgacaccaucugcaucggcuaccacgccaacaacagcaccgacaccguggacaccgugcuggagaagaacgugaccgugacccacagcgugaaccugcuggaggacaaccacaacggcaagcugugccugcugaagggcaucgccccccugcagcugggcaacugcagcguggccggcuggauccugggcaaccccgagugcgagcugcugaucagcaaggagagcuggagcuacaucguggagagacccaaccccgagaacggcaccugcuaccccggccacuucgccgacuacgaggagcugagagagcagcugagcagcgugagcagcuucgagagauucgagaucuuccccaaggagagcagcuggcccaaccacaccgugaccggcgugagcgccagcugcagccacaacggcgagagcagcuucuacaagaaccugcuguggcugaccggcaagaacggccuguaccccaaccugagcaagagcuacgccaacaacaaggagaaggaggugcuggugcuguggggcgugcaccacccccccaacaucggcgaccagaugacccuguaccacaaggagaacgccuacgugagcguggugagcagccacuacagcagaaaguucacccccgagaucgccaagagacccaaggugagagaccaggagggcagaaucaacuacuacuggacccugcuggagcccggcgacaccaucaucuucgaggccaacggcaaccugaucgcccccagauacgccuucgcccugagcagaggcuucggcagcggcaucaucaacagcaacgcccccauggacgagugcgacgccaagugccagaccccccagggcgccaucaacagcagccugcccuuccagaacgugcaccccgugaccaucggcgagugccccaaguucgugagaagcgccaagcugagaauggugaccggccugagaaacauccccagcauccagagcagaggccuguucggcgccaucgccggcuucaucgagggcggcuggaccggcaugguggacggcugguacggcuaccaccaccagaacgagcagggcagcggcuacgccgccgaccagaagagcacccagaacgccaucaacggcaucaccaacaaggugaacagcgugaucgagaagaugaacacccaguucaccgccgugggcaaggaguucaacaagcuggagagaagaauggagaaccugaacaagaagguggacgacggcuucaucgacguguggaccuacaacgccgagcugcuggugcugcuggagaacgagagaacccuggacuuccacgacagcaacgugaagaaccuguacgagaaggugaagaaccagcugagaaacaacgccaaggagaucggcaacggcugcuucgaguucuaccacaagugcaacgacgagugcauggagagcgugaagaacggcaccuacgacuaccccaaguacagcgaggagagcaagcugagcagagagaagaucgacggcgugaagcuggagagcaugggcguguaccagauccuggccaucuacagcaccguggccagcagccuggugcugcuggugagccugggcgccaucagcuucuggaugugcagcaacggcagccugcagugcagaaucugcaucuga

SEQ ID NO: 168862 - RNA, 1698 nt, Artificial Sequence
  derived and/or modified CDS sequence (opt4) from hemagglutinin__InfluenzaA__AFJ75571
augaaggugaagcugcuggugcugcugugcaccuucaccgccaccuacgccgacaccaucugcaucggcuaccacgccaacaacagcaccgacaccguggacaccgugcuggagaagaacgugaccgugacccacagcgugaaccugcuggaggacaaccacaacggcaagcugugccugcugaagggcaucgccccccugcagcugggcaacugcagcguggccggcuggauccugggcaaccccgagugcgagcugcugaucagcaaggagagcuggagcuacaucguggagagacccaaccccgagaacggcaccugcuaccccggccacuucgccgacuacgaggagcugagagagcagcugagcagcgugagcagcuucgagagauucgagaucuuccccaaggagagcagcuggcccaaccacaccgugaccggcgugagcgccagcugcagccacaacggcgagaacagcuucuacaagaaccugcuguggcugaccggcaagaacggccuguaccccaaccugagcaagagcuacgccaacaacaaggagaaggaggugcuggugcuguggggcgugcaccacccccccaacaucggcgaccagaugacccuguaccacaaggagaacgccuacgugagcguggugagcagccacuacagcagaaaguucacccccgagaucgccaagagacccaaggugagagaccaggagggcagaaucaacuacuacuggacccugcuggagcccggcgacaccaucaucuucgaggccaacggcaaccugaucgcccccagauacgccuucgcccugagcagaggcuucggcagcggcaucaucaacagcaacgcccccauggacgagugcgacgccaagugccagaccccccagggcgccaucaacagcagccugcccuuccagaacgugcaccccgugaccaucggcgagugccccaaguacgugagaagcgccaagcugagaauggugaccggccugagaaacauccccagcauccagagcagaggccuguucggcgccaucgccggcuucaucgagggcggcuggaccggcaugguggacggcugguacggcuaccaccaccagaacgagcagggcagcggcuacgccgccgaccagaagagcacccagaacgccaucaacggcaucaccaacaaggugaacagcgugaucgagaagaugaacacccaguucaccgccgugggcaaggaguucaacaagcuggagagaagaauggagaaccugaacaagaagguggacgacggcuucaucgacguguggaccuacaacgccgagcugcuggugcugcuggagaacgagagaacccuggacuuccacgacagcaacgugaagaaccuguacgagaaggugaagaaccagcugaagaacaacgccaaggagaucggcaacggcugcuucgaguucuaccacaagugcaacgacgagugcauggagagcgugaagaacggcaccuacgacuaccccaaguacagcgaggagagcaagcugagcagagagagaaucgacggcgugaagcuggagagcaugggcguguaccagauccuggccaucuacagcaccguggccagcagccuggugcugcuggugagccugggcgccaucagcuucuggaugugcagcaacggcagccugcagugcagaaucugcaucuga

SEQ ID NO: 168863 - RNA, 1701 nt, Artificial Sequence
  derived and/or modified CDS sequence (opt4) from hemagglutinin__InfluenzaA__AFJ75593
augaagaccaucaucgcccugagcuacauccugugccugguguucgcccagaagcugcccggcaacgacagcagcaccgccacccugugccugggccaccacgccgugcccaacggcaccaucgugaagaccaucaccaacgaccagaucgaggugaccaacgccaccgagcuggugcagagcagcagcaccggcgagaucugcaacagcccccaccagauccuggacggcgagaacugcacccugaucgacgcccugcugggcgacccccagugcgacggcuuccagaacaagaagugggaccuguucguggagagaagcaaggccuacagcaacugcuaccccuacgacgugcccgacuacgccagccugagaagccugguggccagcagcggcacccuggaguucaacaacgagagcuucaacuggaccggcgugacccagaacggcaccagcagcgccugcaucagaagaagcaacaacagcuucuucagcagacugaacuggcugacccaccugaaguucaaguaccccgcccugaacgugaccaugcccaacaacgagaaguucgacaagcuguacaucuggggcgugcaccaccccggcaccgacaacgaccagaucuuccuguacgcccaggccagcggcagaaucaccgugagcaccaagagaagccagcagaccgugauccccaacaucggcagcagacccagagugagaaacauccccagcagaaucagcaucuacuggaccaucgugaagcccggcgacauccugcugaucaacagcaccggcaaccugaucgcccccagaggcuacuucaagaucagaagcggcaagagcagcaucaugagaagcgacgcccccaucggcaagugcaacagcgagugcaucacccccaacggcagcauccccaacgacaagcccuuccagaacgugaacagaaucaccuacggcgccugccccagauacgugaagcagaacacccugaagcuggccaccggcaugagaaacgugcccgagaagcagaccagaggcaucuucggcgccaucgccggcuucaucgagaacggcugggagggcaugguggacggcugguacggcuucagacaccagaacagcgagggcaucggccaggccgccgaccugaagagcacccaggccgccaucgaccagaucaacggcaagcugaacagacugaucggcaagaccaacgagaaguuccaccagaucgagaaggaguucagcgagguggagggcagaauccaggaccuggagaaguacguggaggacaccaagguggaccuguggagcuacaacgccgagcugcugguggcccuggagaaccagcacaccaucgaccugaccgacagcgagaugaacaagcuguucgagaagaccaagaagcagcugagagagaacgccgaggacaugggcaacggcugcuucaagaucuaccacaagugcgacaacgccugcaucggcagcaucagaaacggcaccuacgaccacgacguguacagagacgaggcccugaacaacagauuccagaucaagggcguggagcugaagagcggcuacaaggacuggauccuguggaucagcuucgccaucagcugcuuccugcugugcguggcccugcugggcuucaucaugugggccugccagaagggcaacaucagaugcaacaucugcaucuga

SEQ ID NO: 168864 - RNA, 1698 nt, Artificial Sequence
  derived and/or modified CDS sequence (opt4) from hemagglutinin__InfluenzaA__AFJ75615
augaaggugaagcugcuggugcugcugugcaccuucaccgccaccuacgccgacaccaucugcgugggcuaccacgccaacaacagcaccgacaccguggacaccgugcuggagaagaacgugaccgugacccacagcgugaaccugcuggagaacagccacaacggcaagcugugccugcugaagggcaucgccccccugcagcugggcaacugcagcguggccggcuggauccugggcaaccccgagugcgagcugcugaucagcaaggagagcuggagcuacaucguggagaagcccaaccccgagaacggcaccugcuaccccggccacuucgccgacuacgaggagcugagagagcagcugagcagcgugagcagcuucgagagauucgagaucuuccccaaggagagcagcuggcccaaccacaccgugaccggcgugagcgccagcugcagccacaacggcgagagcagcuucuacagaaaccugcuguggcugaccggcaagaacggccuguaccccaaccugagcaagagcuacgccaacaacaaggagaaggaggugcuggugcuguggggcgugcaccacccccccaacaucggcgaccagaaggcccuguaccacaccgagaacgccuacgugagcguggugagcagccacuacagcagaaaguucacccccgagaucgccaagagacccaaggugagagaccaggagggcagaaucaacuacuacuggacccugcuggagcccggcgacaccaucaucuucgaggccaacggcaaccugaucgcccccagauacgccuucgcccugagcagaggcuucggcagcggcaucaucaacagcaacgcccccauggacaagugcgacgccaagugccagaccccccagggcgccaucaacagcagccugcccuuccagaacgugcaccccgugaccaucggcgagugccccaaguacgugagaagcgccaagcugagaauggugaccggccugagaaacauccccagcauccagagcagaggccuguucggcgccaucgccggcuucaucgagggcggcuggaccggcaugguggacggcugguacggcuaccaccaccagaacgagcagggcagcggcuacgccgccgaccagaagagcacccagaacgccaucaacggcaucaccaacaaggugaacagcgugaucgagaagaugaacacccaguucaccgaggugggcaaggaguucaacaagcuggagagaagaauggagaaccugaacaagaagguggacgacggcuucaucgacaucuggaccuacaacgccgagcugcuggugcugcuggagaacgagagaacccuggacuuccacgacagcaacgugaagaaccuguacgagaaggugaagagccagcugaagaacaacgccaaggagaucggcaacggcugcuucgaguucuaccacaagugcaacgacgagugcauggagagcgugaagaacggcaccuacgacuaccccaaguacagcgaggagagcaagcugaacagagagaagaucgacggcgugaagcuggagagcaugggcguguaccagauccuggccaucuacagcaccguggccagcagccuggugcugcuggugagccugggcgccaucagcuucuggaugugcagcaacggcagccugcagugcagaaucugcaucuga

SEQ ID NO: 168865 - RNA, 1701 nt, Artificial Sequence; identical to SEQ ID NO: 165412
  derived and/or modified CDS sequence (opt4) from hemagglutinin__InfluenzaA__AFJ75630

SEQ ID NO: 168866 - RNA, 1701 nt, Artificial Sequence; identical to SEQ ID NO: 165412
  derived and/or modified CDS sequence (opt4) from hemagglutinin__InfluenzaA__AFJ75641

SEQ ID NO: 168867 - RNA, 1698 nt, Artificial Sequence
  derived and/or modified CDS sequence (opt4) from hemagglutinin__InfluenzaA__AFJ75651
augaaggugaagcugcuggugcugcugugcaccuucaccgccaccuacgccgacaccaucugcaucggcuaccacgccaacaacagcaccgacaccguggacaccgugcuggagaagaacgugaccgugacccacagcgugaaccugcuggagaacagccacaacggcaagcugugccugcugaagggcaucgccccccugcagcugggcaacugcagcguggccggcuggauccugggcaaccccgagugcgagcugcugaucagcaaggagagcuggagcuacaucguggagaagcccaaccccgagaacggcaccugcuaccccggccacuucgccgacuacgaggagcugagagagcagcugagcagcgugagcagcuucgagagauucgagaucuuccccaaggagagcagcuggcccaaccacaccgugaccggcgugagcgccagcugcagccacaacggcgagagcagcuucuacagaaaccugcuguggcugaccggcaagaacggccuguaccccaaccugagcaagagcuacgccaacaacaaggagaaggaggugcuggugcuguggggcgugcaccacccccccaacaucggcgaccagaaggcccuguacagaaccgagaacgccuacgugagcguggugagcagccacuacagcagaaaguucacccccgagaucgccaagagacccaaggugagagaccaggagggcagaaucaacuacuacuggacccugcuggagcccggcgacaccaucaucuucgaggccaacggcaaccugaucgcccccagauacgccuucgcccugagcagaggcuucggcagcggcaucaucaacagcgacgcccccauggacaagugcgacgccaagugccagaccccccagggcgccaucaacagcagccugcccuuccagaacgugcaccccgugaccaucggcgagugccccaaguacgugagaagcgccaagcugagaauggugaccggccugagaaacauccccagcauccagagcagaggccuguucggcgccaucgccggcuucaucgagggcggcuggaccggcaugguggacggcugguacggcuaccaccaccagaacgagcagggcagcggcuacgccgccgaccagaagagcacccagaacgccaucaacggcaucaccaacaaggugaacagcgugaucgagaagaugaacacccaguucaccgccgugggcaaggaguucaacaagcuggagagaagaauggagaaccugaacaagaagguggacgacggcuucaucgacaucuggaccuacaacgccgagcugcuggugcugcuggagaacgagagaacccuggacuuccacgacagcaacgugaagaaccuguacgagaaggugaagagccagcugaagaacaacgccaaggagaucggcaacggcugcuucgaguucuaccacaagugcaacgacgagugcauggagagcgugaagaacggcaccuacgacuaccccaaguacagcgaggagagcaagcugaacagagagaagaucgacggcgugaagcuggagagcaugggcguguaccagauccuggccaucuacagcaccguggccagcagccuggugcugcuggugagccugggcgccaucagcuucuggaugugcagcaacggcagccugcagugcagaaucugcaucuga

SEQ ID NO: 168868 - RNA, 1701 nt, Artificial Sequence
  derived and/or modified CDS sequence (opt4) from hemagglutinin__InfluenzaA__AFJ75662
augaagaccaucaucgcccugagcuacauccugugccugguguucgcccagaagcugcccggcaacgacaacagcaccgccacccugugccugggccaccacgccgugcccaacggcaccaucgugaagaccaucaccaacgaccagaucgaggugaccaacgccaccgagcuggugcagagcagcagcaccggcgagaucugcgacagcccccaccagauccuggacggcgagaacugcacccugaucgacgcccugcugggcgacccccagugcgacggcuuccagaacaagaagugggaccuguucguggagagaagcaaggccuacagcaacugcuaccccuacgacgugcccgacuacgccagccugagaagccugguggccagcagcggcacccuggaguucaacaacgagagcuucaacuggaccggcgugacccagaacggcaccagcagcgccugcaucagaagaagcaacaacagcuucuucagcagacugaacuggcugacccaccugaaguucaaguaccccgcccugaacgugaccaugcccaacaacgaggaguucgacaagcuguacaucuggggcgugcaccaccccggcaccgacaacgaccagaucuuccuguacgcccaggccagcggcagaaucaccgugagcaccaagagaagccagcagaccgugauccccaacaucggcagcagacccagagugagaaacauccccagcagaaucagcaucuacuggaccaucgugaagcccggcgacauccugcugaucaacagcaccggcaaccugaucgcccccagaggcuacuucaagaucagaagcggcaagagcagcaucaugagaagcgacgcccccaucggcaagugcaacagcgagugcaucacccccaacggcagcauccccaacgacaagcccuuccagaacgugaacagaaucaccuacggcgccugccccagauacgugaagcagaacacccugaagcuggccaccggcaugagaaacgugcccgagaagcagaccagaggcaucuucggcgccaucgccggcuucaucgagaacggcugggagggcaugguggacggcugguacggcuucagacaccagaacagcgagggcaccggccaggccgccgaccugaagagcacccaggccgccaucgaccagaucaacggcaagcugaacagacugaucggcaagaccaacgagaaguuccaccagaucgagaaggaguucagcgagguggagggcagaauccaggaccuggagaaguacguggaggacaccaagaucgaccuguggagcuacaacgccgagcugcugguggcccuggagaaccagcacaccaucgaccugaccgacagcgagaugaacaagcuguucgagaagaccaagaagcagcugagagagaacgccgaggacaugggcaacggcugcuucaagaucuaccacaagugcgacaacgccugcaucggcagcaucagaaacggcaccuacgaccacgacguguacagagacgaggcccugaacaacagauuccagaucaagggcguggagcugaagagcggcuacaaggacuggauccuguggaucagcuucgccaucagcugcuuccugcugugcguggcccugcugggcuucaucaugugggccugccagaagggcaacaucagaugcaacaucugcaucuga

SEQ ID NO: 168869 - RNA, 1698 nt, Artificial Sequence
  derived and/or modified CDS sequence (opt4) from hemagglutinin__InfluenzaA__AFJ75673
augaaggugaagcugcuggugcugcugugcaccuucaccgccaccuacgccgacaccaucugcaucggcuaccacgccaacaacagcaccgacaccguggacaccgugcuggagaagaacgugaccgugaccuacagcgugaaccugcuggaggacaaccacaacggcaagcugugccugcugaagggcaucgccccccugcagcugggcaacugcagcguggccggcuggauccugggcaaccccgagugcgagcugcugaucagcaaggagagcuggagcuacaucguggagagacccaaccccgagaacggcaccugcuaccccggccacuucgccgacuacgaggagcugagagagcagcugagcagcgugagcagcuucgagagauucgagaucuuccccaaggagagcagcuggcccaaccacaccgugaccggcgugagcgccagcugcagccacaacggcgagagcagcuucuacaagaaccugcuguggcugaccggcaagaacggccuguaccccaaccugagcaagagcuacgccaacaacaaggagaaggaggugcuggugcuguggggcgugcaccacccccccaacaucggcaaccagaugacccuguaccacaaggagaacgccuacgugagcguggugagcagccacuacagcagaaaguucacccccgagaucgccaagagacccaaggugagagaccaggagggcagaaucaacuacuacuggacccugcuggagcccggcgacaccaucaucuucgaggccaacggcaaccugaucgcccccagauacgccuucgcccugaacagaggcuucggcagcggcaucaucaacagcaacgcccccauggacgagugcgacgccaagugccagaccccccagggcgccaucaacagcagccugcccuuccagaacgugcaccccgugaccaucggcgagugccccaaguacgugagaagcgccaagcugagaauggugaccggccugagaaacauccccagcauccagagcagaggccuguucggcgccaucgccggcuucaucgagggcggcuggaccggcaugguggacggcugguacggcuaccaccaccagaacgagcagggcagcggcuacgccgccgaccagaagagcacccagaacgccaucaacggcaucaccaacaaggugaacagcgugaucgagaagaugaacacccaguucaccgccgugggcaaggaguucaacaagcuggagagaagaauggagaaccugaacaagaagguggacgacggcuucaucgacguguggaccuacaacgccgagcugcuggugcugcuggagaacgagagaacccuggacuuccacgacagcaacgugaagaaccuguacgagaaggugaagacccagcugaagaacaacgccaaggagaucggcaacggcugcuucgaguucuaccacaagugcaacgacgagugcauggagagcgugaagaacggcaccuacgacuaccccaaguacagcgaggagagcaagcugagcagagagaagaucgacggcgugaagcuggagagcaugggcguguaccagauccuggccaucuacagcaccguggccagcagccuggugcugcuggugagccugggcgccaucagcuucuggaugugcagcaacggcagccugcagugcagaaucugcaucuga

SEQ ID NO: 168870 - RNA, 1701 nt, Artificial Sequence; identical to SEQ ID NO: 162729
  derived and/or modified CDS sequence (opt4) from hemagglutinin__InfluenzaA__AFJ76119

SEQ ID NO: 168871 - RNA, 1701 nt, Artificial Sequence; identical to SEQ ID NO: 163082
  derived and/or modified CDS sequence (opt4) from hemagglutinin__InfluenzaA__AFJ76131

SEQ ID NO: 168872 - RNA, 1701 nt, Artificial Sequence
  derived and/or modified CDS sequence (opt4) from hemagglutinin__InfluenzaA__AFJ76155
augaaggccauccugguggugcugcuguacaccuucgccaccgccaacgccgacacccugugcaucggcuaccacgccaacaacagcaccgacaccguggacaccgugcuggagaagaacgugaccgugacccacagcgugaaccugcuggaggacaagcacaacggcaagcugugcaagcugagaggcaucgccccccugcaccugggcaagugcaacaucgccggcuggauccugggcaaccccgagugcgagagccugagcaccgccagcagcuggagcuacaucguggagaccagcagcagcgacaacggcaccugcuaccccggcgacuucaucgacuacgaggagcugagagagcagcugagcagcgugagcagcuucgagagauucgagaucuuccccaagaccagcagcuggcccaaccacgacagcaacaagggcgugaccgccgccugcccccacgccggcgccaagagcuucuacaagaaccugaucuggcuggugaagaagggcaacagcuaccccaagcugagcaagagcuacaucaacgacaagggcaaggaggugcuggugcuguggggcauccaccaccccagcaccagcgccgaccagcagagccuguaccagaacgccgacgccuacguguucgugggcaccagcagauacagcaagaaguucaagcccgagaucgccaucagacccaaggugagagagcaggagggcagaaugaacuacuacuggacccugguggagcccggcgacaagaucaccuucgaggccaccggcaaccugguggugcccagauacgccuucgccauggagagaaaggccggcagcggcaucaucaucagcgacacccccgugcacgacugcaacaccaccugccagacccccaagggcgccaucaacaccagccugcccuuccagaacauccacagcaucaccaucggcaagugccccaaguacgugaagagcaccaagcugagacuggccaccggccugagaaacgugcccagcauccagagcagaggccuguucggcgccaucgccggcuucaucgagggcggcuggaccggcaugguggacggcugguacggcuaccaccaccagaacgagcagggcagcggcuacgccgccgaccugaagagcacccagaacgccaucgacgagaucaccaacaaggugaacagcgugaucgagaagaugaacacccaguucaccgccgugggcaaggaguucaaccaccuggagaagagaaucgagaaccugaacaagaagguggacgacggcuuccuggacaucuggaccuacaacgccgagcugcuggugcugcuggagaacgagagaacccuggacuaccacgacagcaacgugaagaaccuguacgagaaggugagaagccagcugaagaacaacgccaaggagaucggcaacggcugcuucgaguucuaccacaagugcgacaacaccugcauggagagcgugaagaacggcaccuacgacuaccccaaguacagcgaggaggccaagcugaacagagaggagaucgacggcgugaagcuggagagcaccagaaucuaccagauccuggccaucuacagcaccguggccagcagccuggugcugguggugagccugggcgccaucagcuucuggaugugcagcaacggcagccugcagugcagaaucugcaucuga

SEQ ID NO: 168873 - RNA, 1698 nt, Artificial Sequence
  derived and/or modified CDS sequence (opt4) from hemagglutinin__InfluenzaA__AFJ76186
augaaggugaagcugcuggugcugcugugcaccuucaccgccaccuacgccgacaccaucugcaucggcuaccacgccaacaacagcaccgacaccguggacaccgugcuggagaagaacgugaccgugacccacagcgugaaccugcuggagaacagccacaacggcaagcugugccugcugaagggcaucgccccccugcagcugggcaacugcagcguggccggcuggauccugggcaaccccgagugcgagcugcugaucagcaaggagagcuggagcuacaucguggagaagcccaaccccgagaacggcaccugcuaccccggccacuucgccgacuacgaggagcugagagagcagcugagcagcgugagcagcuucgagagauucgagaucuuccccaaggagagcagcuggcccaaccacaccgugaccggcgugagcgccagcugcagccacaacggcgagagcagcuucuacagaaaccugcuguggcugaccggcaagaacggccuguaccccaaccugagcaagagcuacgccaacaacaaggagaaggaggugcuggugcuguggggcgugcaccacccccccaacaucggcgaccagaaggcccuguaccacaccgagaacgccuacgugagcguggugagcagccacuacagcagaaaguucacccccgagaucaccaagagacccaaggugagagaccaggagggcagaaucaacuacuacuggacccugcuggagcccggcgacaccaucaucuucgaggccaacggcaaccugaucgcccccagauacgccuucgcccugagcagaggcuucggcagcggcaucaucaacagcgacgcccccauggacaagugcgacgccaagugccagaccccccagggcgccaucaacagcagccugcccuuccagaacgugcaccccgugaccaucggcgagugccccaaguacgugagaagcgccaagcugagaauggugaccggccugagaaacauccccagcauccagagcagaggccuguucggcgccaucgccggcuucaucgagggcggcuggaccggcaugguggacggcugguacggcuaccaccaccagaacgagcagggcagcggcuacgccgccgaccagaagagcacccagaacgccaucaacggcaucaccaacaaggugaacagcgugaucgagaagaugaacacccaguucaccgccgugggcaaggaguucaacaagcuggagagaagaauggagaaccugaacaagaagguggacgacggcuucaucgacaucuggaccuacaacgccgagcugcuggugcugcuggagaacgagagaacccuggacuuccacgacagcaacgugaagaaccuguacgagaaggugaagagccagcugaagaacaacgccaaggagaucggcaacggcugcuucgaguucuaccacaagugcaacgacgagugcauggagagcgugaagaacggcaccuacgacuaccccaaguacagcgaggagagcaagcugaacagagagaagaucgacggcgugaagcuggagagcaugggcguguaccagauccuggccaucuacagcaccguggccagcagccuggugcugcuggugagccugggcgccaucagcuucuggaugugcagcaacggcagccugcagugcagaaucugcaucuga

SEQ ID NO: 168874 - RNA, 1701 nt, Artificial Sequence; identical to SEQ ID NO: 162729
  derived and/or modified CDS sequence (opt4) from hemagglutinin__InfluenzaA__AFJ76203

SEQ ID NO: 168875 - RNA, 1701 nt, Artificial Sequence
  derived and/or modified CDS sequence (opt4) from hemagglutinin__InfluenzaA__AFJ76213
augaagaccaucaucgcccugagcuacauccugugccugguguucgcccagaagcugcccggcaacgacaacagcaccgccacccugugccugggccaccacgccgugcccaacggcaccaucgugaagaccaucaccaacgaccagaucgaggugaccaacgccaccgagcuggugcagagcagcagcaccggcggcaucugcgacagcccccaccagauccuggacggcgagaacugcacccugaucgacgcccugcugggcgacccccagugcgacggcuuccagaacaagaagugggaccuguucguggagagaagcaaggccuacagcaacugcuaccccuacgacgugcccgacuacgccagccugagaagccugguggccagcagcggcacccuggaguucaacaacgagagcuucgacuggaccggcgugacccagaacggcaccagcagcgccugcaagagaagaagcaacaagagcuucuucagcagacugaacuggcugacccacagcaaguacaaguaccccgcccugaacgugaccaugcccaacaacgagaaguucgacaagcuguacaucuggggcgugcaccaccccggcaccgacagcgaccagaucagccuguacgcccaggccagcggcagaaucaccgugagcaccaagagaagccagcagaccgugauccccaacaucggcagcagacccagagugagagacgugagcagcagaaucagcaucuacuggaccaucgugaagcccggcgacauccugcugaucaacagcaccggcaaccugaucgcccccagaggcuacuucaagaucagaagcggcaagagcagcaucaugagaagcgacgcccccaucggcaagugcaacagcgagugcaucacccccaacggcagcauccccaacgacaagcccuuccagaacgugaacagaaucaccuacggcgccugccccagauacgugaagcagaacacccugaagcuggccaccggcaugagaaacgugcccgagaagcagaccagaggcaucuucggcgccaucgccggcuucaucgagaacggcugggagggcaugguggacggcugguacggcuucagacaccagaacagcgagggcaccggccaggccgccgaccugaagagcacccaggccgccaucaaccagaucaacggcaagcugaacagacugaucggcaagaccaacgagaaguuccaccagaucgagaaggaguucagcgagguggagggcagaauccaggaccuggagaaguacguggaggacaccaagaucgaccuguggagcuacaacgccgagcugcugguggcccuggagaaccagcacaccaucgaccugaccgacagcgagaugaacaagcuguucgagagaaccaagaagcagcugagagagaacgccgaggacaugggcaacggcugcuucaagaucuaccacaagugcgacaacgccugcaucggcagcaucagaaacggcaccuacgaccacgacguguacagagacgaggcccugaacaacagauuccagaucaagggcguggagcugaagagcggcuacaaggacuggauccuguggaucagcuucgccaucagcugcuuccugcugugcguggcccugcugggcuucaucaugugggccugccagaagggcaacaucagaugcaacaucugcaucuga

SEQ ID NO: 168876 - RNA, 1701 nt, Artificial Sequence
  derived and/or modified CDS sequence (opt4) from hemagglutinin__InfluenzaA__AFJ77408
augaagaccaucaucgcccugagcuacauccugugccugaucuucgcccagaagcugcccggcaacgacaacagcaccgccacccugugccugggccaccacgccgugcccaacggcacccuggugaagaccaucaccaacgaccagaucgaggugaccaacgccaccgagcuggugcagagcagcagcaccggcagaaucugcaacagcccccacagaauccuggacggcgagaacugcacccugaucgacgcccugcugggcgacccccacugcgacggcuuccagaacaaggagugggaccuguucguggagagaagcaaggccuacagcaacugcuaccccuacgacgugcccgacuacgccagccugagaagccugguggccagcagcggcacccuggaguucaccaaggagggcuucaacuggaccggcguggcccaggacggcaagagcuacagcugcaagagaggcagcgugaacagcuucuucagcagacugaacuggcugcacaagcuggaguacaaguaccccgcccugaacgugaccaugcccaacaacgacaaguucgacaagcuguacaucuggggcgugcaccaccccagcaccgacagcgaccagaccagccuguacgugcaggccagcggcagagugaccgugagcaccaagagaagccagcagaccgugauccccaacaucggcagcagacccugggugagaggcaucagcagcagaaucagcaucuacuggaccaucgugaagcccggcgacauccugcugaucaacagcaccggcaaccugaucgcccccagaggcuacuucaagaucagaaacggcaagagcagcaucaugagaagcgacgcccccaucggcaacugcaacagcgagugcaucacccccaacggcagcauccccaacgacaagcccuuccagaacgugaacagaaucaccuacggcgccugccccagauacgugaagcagaacacccugaagcuggccaccggcaugagaaacgugcccgagaagcagaccagaggcaucuucggcgccaucgccggcuucaucgagaacggcugggagggcaugguggacggcugguacggcuucagacaccagaacagcgagggcaccggccaggccgccgaccugaagagcacccaggccgccaucaaccagaucaacggcaagcugaacagacugaucgagaagaccaacgagaaguuccaccagaucgagaaggaguucagcgagguggagggcagaauccaggaccuggagaaguacguggaggacaccaagaucgaccuguggagcuacaacgccgagcugcugguggcccuggagaaccagcacaccaucgaccugaccgacagcgagaugaacaagcuguucgagagaaccagaaagcagcugagagagaacgccgaggacaugggcaacggcugcuucaagaucuaccacaagugcgacaacgccugcaucggcagcaucagaaacggcaccuacgaccacgacguguacagagacgaggcccugaacaacagauuccagaucaagggcguggagcugaagagcggcuacaaggacuggauccuguggaucagcuucgccaucagcugcuuccugcugugcguggugcugcugggcuucaucaugugggccugccagaagggcaacaucagaugcaacaucugcaucuga

SEQ ID NO: 168877 - RNA, 1701 nt, Artificial Sequence
  derived and/or modified CDS sequence (opt4) from hemagglutinin__InfluenzaA__AFJ77430
augaagaccaucaucgcccugagcuacauccugugccugaucuucgcccagaagcugcccggcaacgacaacagcaccgccacccugugccugggccaccacgccgugcccaacggcacccuggugaagaccaucaccaacgaccagaucgaggugaccaacgccaccgagcuggugcagagcagcagcaccggcagaaucugcgacagcccccacagaauccuggacggcgagaacugcacccugaucgacgcccugcugggcgaccccaacugcgacggcuuccagaacaaggagugggaccuguucguggagagaagcaaggccuacagcaacugcuaccccuacgacgugcccgacuacgccagccugagaagccugguggccagcagcggcacccuggaguucaccaaggagggcuucaacuggaccggcguggcccaggacggcaagagcuacagcugcaagagaggcagcgugaacagcuucuucagcagacugaacuggcugcacaagcuggaguacaaguaccccgcccugaacgugaccaugcccaacaacgacaaguucgacaagcuguacaucuggggcgugcaccaccccagcaccgacagcgaccagaucagccuguacgcccaggccagcggcagagugaccgugagcaccaagagaagccagcagaccgugauccccaacaucggcagcagacccugggugagaggcaucagcagcagaaucagcaucuacuggaccaucgugaagcccggcgacauccugcugaucaacagcaccggcaaccugaucgcccccagaggcuacuucaagaucagaaacggcaagagcagcaucaugagaagcgacgcccccaucggcaacugcaacagcgagugcaucacccccaacggcagcauccccaacgacaagcccuuccagaacgugaacagaaucaccuacggcgccugccccagauacgugaagcagaacacccugaagcuggccaccggcaugagaaacgugcccgagaagcagaccagaggcaucuucggcgccaucgccggcuucaucgagaacggcugggagggcaugguggacggcugguacggcuucagacaccagaacagcgagggcaccggccaggccgccgaccugaagagcacccaggccgccaucaaccagaucaacggcaagcugaacagacugaucgagaagaccaacgagaaguuccaccagaucgagaaggaguucagcgagguggagggcagaauccaggaccuggagaaguacguggaggacaccaagaucgaccuguggagcuacaacgccgagcugcugguggcccuggagaaccagcacaccaucgaccugaccgacagcgagaugaacaagcuguucgagagaaccagaagacagcugagagagaacgccgaggacaugggcaacggcugcuucaagaucuaccacaagugcgacaacgccugcaucggcagcaucagaaacggcaccuacgaccacgacguguacagagacgaggcccugaacaacagauuccagaucaagggcguggagcugaagagcggcuacaaggacuggauccuguggaucagcuucgccaucagcugcuuccugcugugcguggugcugcugggcuucaucaugugggccugccagaagggcaacaucagaugcaacaucugcaucuga

SEQ ID NO: 168878 - RNA, 1701 nt, Artificial Sequence
  derived and/or modified CDS sequence (opt4) from hemagglutinin__InfluenzaA__AFJ77440
augaagaccaucaucgcccugagcuacauccugugccugguguucgcccagaagcugcccggcaacgacaacagcaccgccacccugugccugggccaccacgccgugcccaacggcacccuggugaagaccaucaccaacgaccagaucgaggugaccaacgccaccgagcuggugcagagcagcagcaccggcagaaucugcgacagcccccacagaauccuggacggcaagaacugcacccugaucgacgcccugcugggcgacccccacugcgacggcuuccagaacaaggagugggaccuguucguggagagaagcaaggccuacagcaacugcuaccccuacgacgugcccgacuacgccagccugagaagccugguggccagcagcggcacccuggaguucaccagcgagggcuucaacuggaccggcguggcccaggacggcaccagcuacgccugcaagagaggcagcgugaagagcuucuucagcagacugaacuggcugcacaagcuggaguacaaguaccccgcccugaacgugaccaugcccaacaacgacaaguucgacaagcuguacaucuggggcgugcaccaccccagcaccgacagcgaccagaccagccuguacgugcaggccagcggcagagugaccgugagcaccaagagaagccagcagaccgugauccccaacaucggcagcagacccugggugagaggcgugagcagcagaaucagcaucuacuggaccaucgugaagcccggcgacauccugcugaucaacagcaccggcaaccugaucgcccccagaggcuacuucaagaucagaagcggcaagagcagcaucaugagaagcgacgcccccaucggcaacugcaacagcgagugcaucacccccaacggcagcauccccaacgacaagcccuuccagaacgugaacagaaucaccuacggcgccugccccagauacgugaagcagaacacccugaagcuggccaccggcaugagaaacgugcccgagaagcagaccagaggcaucuucggcgccaucgccggcuucaucgagaacggcugggagggcaugguggacggcugguacggcuucagacaccagaacagcgagggcaccggccaggccgccgaccugaagagcacccaggccgccaucaaccagaucaacggcaagcugaacagacugaucgagaagaccaacgagaaguuccaccagaucgagaaggaguucagcgagguggagggcagaauccaggaccuggagaaguacguggaggacaccaagaucgaccuguggagcuacaacgccgagcugcugguggcccuggagaaccagcacaccaucgaccugaccgacagcgagaugaacaagcuguucgagagaaccagaaagcagcugagagagaacgccgaggacaugggcaacggcugcuucaagaucuaccacaagugcgacaacgccugcaucggcagcaucagaaacggcaccuacgaccacgacguguacagagacgaggcccugaacaacagauuccagaucaagggcguggagcugaagagcggcuacaaggacuggauccuguggaucagcuucgccaucagcugcuuccugcugugcguggugcugcugggcuucaucaugugggccugccagaagggcaacaucagaugcaacaucugcaucuga

SEQ ID NO: 168879 - RNA, 1701 nt, Artificial Sequence
  derived and/or modified CDS sequence (opt4) from hemagglutinin__InfluenzaA__AFJ77451
augaagaccaucaucgcccugagcuacauccugugccugguguucgcccagaagcugcccggcaacgacaacagcaccgccacccugugccugggccaccacgccgugcccaacggcacccuggugaagaccaucaccaacgaccagaucgaggugaccaacgccaccgagcuggugcagagcagcagcaccggcagaaucugcgacagcccccacagaauccuggacggcaagaacugcacccugaucgacgcccugcugggcgacccccacugcgacggcuuccagaacaaggagugggaccuguucguggagagaagcaaggccuacagcaacugcuaccccuacgacgugcccgacuacgccagccugagaagccugguggccagcagcggcacccuggaguucaacaacgagagcuucaacuggaccggcguggcccagaacggcaccagcuacgccugcaagagaagaagcgugaagagcuucuucagcagacugaacuggcugcacaagcuggaguacaaguaccccgcccugaacgugaccaugcccaacaacgacaaguucgacaagcuguacaucuggggcgugcaccaccccagcaccgacagcgaccagaccagccuguacgugcaggccagcggcagagugaccgugagcaccaagagaagccagcagaccgugauccccaacaucggcagcagacccugggugagaggcgugagcagcagaaucagcaucuacuggaccaucgugaagcccggcgacauccugcugaucaacagcaccggcaaccugaucgcccccagaggcuacuucaagaucagaagcggcaagagcagcaucaugagaagcgacgcccccaucggcaacugcaacagcgagugcaucacccccaacggcagcauccccaacgacaagcccuuccagaacgugaacagaaucaccuacggcgccugccccagauacgugaagcagaacacccugaagcuggccaccggcaugagaaacgugcccgagaagcagaccagaggcaucuucggcgccaucgccggcuucaucgagaacggcugggagggcaugguggacggcugguacggcuucagacaccagaacagcgagggcaccggccaggccgccgaccugaagagcacccaggccgccaucaaccagaucaacggcaagcugaacagacugaucgagaagaccaacggcaaguuccaccagaucgagaaggaguucagcgagguggagggcagaauccaggaccuggagaaguacguggaggacaccaagaucgaccuguggagcuacaacgccgagcugcugguggcccuggagaaccagcacaccaucgaccugaccgacagcgagaugaacaagcuguucgagagaaccagaaagcagcugagagagaacgccgaggacaugggcaacggcugcuucaagaucuaccacaagugcgacaacgccugcaucggcagcaucagaaacggcaccuacgaccacgacguguacagagacgaggcccugaacaacagauuccagaucaagggcguggagcugaagagcggcuacaaggacuggauccuguggaucagcuucgccaucagcugcuuccugcugugcguggugcugcugggcuucaucaugugggccugccagaagggcaacaucagaugcaacaucugcaucuga

SEQ ID NO: 168880 - RNA, 1701 nt, Artificial Sequence
  derived and/or modified CDS sequence (opt4) from hemagglutinin__InfluenzaA__AFJ77462
augaagaccaucaucgcccugagcuacauccugugccugguguucgcccagaagcugcccggcaacgacaacagcaccgccacccugugccugggccaccacgccgugcccaacggcacccuggugaagaccaucaccaacgaccagaucgaggugaccaacgccaccgagcuggugcagagcagcagcaccggcagaaucugcgacagcccccacagaauccuggacggcaagaacugcacccugaucgacgcccugcugggcgacccccacugcgacggcuuccagaacaaggagugggaccuguucguggagagaagcaaggccuacagcaacugcuaccccuacgacgugcccgacuacgccagccugagaagccugguggccagcagcggcacccuggaguucaccaacgagggcuucaacuggaccggcguggcccaggacggcaccagcuacgccugcaagagaggcagcgugaagagcuucuucagcagacugaacuggcugcacaagcuggaguacaaguaccccgcccugaacgugaccaugcccaacaacgacaaguucgacaagcuguacaucuggggcgugcaccaccccagcaccgacagcgaccagaccagccuguacgugcaggccagcggcagagugaccgugagcaccaagagaagccagcagaccgugauccccaacaucggcagcagacccugggugagaggcgugagcagcagaaucagcaucuacuggaccaucgugaagcccggcgacauccugcugaucaacagcaccggcaaccugaucgcccccagaggcuacuucaagaucagaagcggcaagagcagcaucaugagaagcgacgcccccaucggcaacugcaacagcgagugcaucacccccaacggcagcauccccaacgacaagcccuuccagaacgugaacagaaucaccuacggcgccugccccagauacgugaagcagaacacccugaagcuggccaccggcaugagaaacgugcccgagaagcagaccagaggcaucuucggcgccaucgccggcuucaucgagaacggcugggagggcaugguggacggcugguacggcuucagacaccagaacagcgagggcaccggccaggccgccgaccugaagagcacccaggccgccaucaaccagaucaacggcaagcugaacagacugaucgagaagaccaacgagaaguuccaccagaucgagaaggaguucagcgagguggagggcagaauccaggaccuggagaaguacguggaggacaccaagaucgaccuguggagcuacaacgccgagcugcugguggcccuggagaaccagcacaccaucgaccugaccgacagcgagaugaacaagcuguucgagagaaccagaaagcagcugagagagaacgccgaggacaugggcaacggcugcuucaagaucuaccacaagugcgacaacgccugcaucggcagcaucagaaacggcaccuacgaccacgacguguacagagacgaggcccugaacaacagauuccagaucaagggcguggagcugaagagcggcuacaaggacuggauccuguggaucagcuucgccaucagcugcuuccugcugugcguggugcugcugggcuucaucaugugggccugccagaagggcaacaucagaugcaacaucugcaucuga

SEQ ID NO: 168881 - RNA, 1701 nt, Artificial Sequence
  derived and/or modified CDS sequence (opt4) from hemagglutinin__InfluenzaA__AFJ77473
augaagaccaucaucgcccugagcuacauccugugccagguguucgcccagaagcugcccggcaacgacaacagcaccgccacccugugccugggccaccacgccgugcccaacggcacccuggugaagaccaucaccaacgaccagaucgaggugaccaacgccaccgagcuggugcagagcagcagcaccggcagaaucugcgacagcccccaccagauccuggacggcgagaacugcacccugaucgacgcccugcugggcgacccccacugcgacggcuuccagaacaaggagugggaccuguucguggagagaagcaaggccuacagcaacugcuaccccuacgacgugcccgacuacgccagccugagaagccugguggccagcagcggcacccuggaguucaacaacgagagcuucaacuggaccggcguggcccagaacggcaccagcagcgccugcaagagaagaagcaucaagagcuucuucagcagacugaacuggcugcaccagcugaaguacaaguaccccgcccugaacgugaccaugcccaacaacgagaaguucgacaagcuguacaucuggggcgugcaccaccccagcaccgacagcgaccagaucagccuguacgcccaggccagcggcagagugaccgugagcaccaagagaagccagcagaccgugauccccaacaucggcagcagacccugggugagaggcgugagcagcagaaucagcaucuacuggaccaucgugaagcccggcgacauccugcugaucaacagcaccggcaaccugaucgcccccagaggcuacuucaagaucagaagcggcaagagcagcaucaugagaagcgacgcccccaucggcaagugcaacagcgagugcaucacccccaacggcagcauccccaacgacaagcccuuccagaacgugaacagaaucaccuacggcgccugccccagauacgugaagcagaacacccugaagcuggccaccggcaugagaaacgugcccgagaagcagaccagaggcaucuucggcgccaucgccggcuucaucgagaacggcugggagggcaugguggacggcugguacggcuucagacaccagaacagcgagggcaccggccaggccgccgaccugaagagcacccaggccgccaucaaccagaucaacggcaagcugaacagacugaucgagaagaccaacgagaaguuccaccagaucgagaaggaguucagcgagguggagggcagaauccaggaccuggagaaguacguggaggacaccaagaucgaccuguggagcuacaacgccgagcugcugguggcccuggagaaccagcacaccaucgaccugaccgacagcgagaugaacaagcuguucgagagaaccaagaagcagcugagagagaacgccgaggacaugggcaacggcugcuucaagaucuaccacaagugcgacaacgccugcaucggcagcaucagaaacggcaccuacgaccacgacguguacagagacgaggcccugaacaacagauuccagaucaagggcguggagcugaagagcggcuacaaggacuggauccuguggaucagcuucgccaucagcugcuuccugcugugcguggugcugcugggcuucaucaugugggccugccagaagggcaacaucagaugcaacaucugcaucuga

SEQ ID NO: 168882 - RNA, 1701 nt, Artificial Sequence; identical to SEQ ID NO: 160246
  derived and/or modified CDS sequence (opt4) from hemagglutinin__InfluenzaA__AFJ77484

SEQ ID NO: 168883 - RNA, 1701 nt, Artificial Sequence; identical to SEQ ID NO: 160248
  derived and/or modified CDS sequence (opt4) from hemagglutinin__InfluenzaA__AFJ77495

SEQ ID NO: 168884 - RNA, 1701 nt, Artificial Sequence; identical to SEQ ID NO: 160246
  derived and/or modified CDS sequence (opt4) from hemagglutinin__InfluenzaA__AFJ77506

SEQ ID NO: 168885 - RNA, 1701 nt, Artificial Sequence
  derived and/or modified CDS sequence (opt4) from hemagglutinin__InfluenzaA__AFJ77517
augaagaccaucaucgcccugagcuacauccugugccugguguucgcccagaagauccccggcaacgacaacagcaccgccacccugugccugggccaccacgccgugcccaacggcacccuggugaagaccaucaccaacgaccagaucgaggugaccaacgccaccgagcuggugcagagcagcagcaccggcagaaucugcgacagcccccacagaauccuggacggcgagaacugcacccugaucgacgcccugcugggcgacccccacugcgacggcuuccagaacaaggagugggaccuguucguggagagaagcaaggccuacagcaacugcuaccccuacgacgugcccgacuacgccagccugagaagccugguggccagcagcggcacccuggaguucaacaacgagagcuucaacuggaccggcguggcccagaacggcaccagcaacgccugcaagagaagaagcaugaagagcuucuucagcagacugaacuggcugcaccagcugaaguacaaguaccccgcccugaacgugaccaugcccaacaacgacaaguucgacaagcuguacaucuggggcgugcaccaccccagcaccgacagcgaccagaccagccuguacgcccaggccagcggcagagugaccgugagcacccagagaagccagcagaccgugauccccaacaucggcagcagacccugggugagaggcgugagcagcagaaucagcaucuacuggaccaucgugaagcccggcgacauccugcugaucaacagcaccggcaaccugaucgcccccagaggcuacuucaagaucagaagcggcaagagcagcaucaucagaagcgacgcccccaucggcaagugcaacagcgagugcaucacccccaacggcagcauccccaacgacaagcccuuccagaacgugaacagaaucaccuacggcgccugccccagauacgugaagcagaacacccugaagcuggccaccggcaugagaaacgugcccgagaagcagaccagaggcaucuucggcgccaucgccggcuucaucgagaacggcugggagggcaugguggacggcugguacggcuucagacaccagaacagcgagggcaccggccaggccgccgaccugaagagcacccaggccgccaucaaccagaucaacggcaagcugaacagacugaucgagaagaccaacgagaaguuccaccagaucgagaaggaguucagcgagguggagggcagaauccaggaccuggagaaguacguggaggacaccaagaucgaccuguggagcuacaacgccgagcugcugguggcccuggagaaccagcacaccaucgaccugaccgacagcgagaugaacaagcuguucgagagaaccagaaagcagcugagagagaacgccgaggacaugggcaacggcugcuucaagaucuaccacaagugcgacaacgccugcaucggcagcaucagaaacggcaccuacgaccacgacguguacagagacgaggcccugaacaacagauuccagaucaagggcguggagcugaagagcggcuacaaggacuggauccuguggaucagcuucgccaugagcugcuuccugcugugcguggugcugcugggcuucaucaugugggccugccagaagggcaacaucagaugcaacaucugcaucuga

SEQ ID NO: 168886 - RNA, 1701 nt, Artificial Sequence; identical to SEQ ID NO: 160083
  derived and/or modified CDS sequence (opt4) from hemagglutinin__InfluenzaA__AFJ77528

SEQ ID NO: 168887 - RNA, 1698 nt, Artificial Sequence
  derived and/or modified CDS sequence (opt4) from hemagglutinin__InfluenzaA__AFJ77550
augaagaccaucaucgcccugagcuacauccugugccagguguucgcccagaagcugcccggcaacgacaacagcaccgccacccugugccugggccaccacgccgugcccaacggcacccuggugaagaccaucaccaacgaccagaucgaggugaccaacgccaccgagcuggugcagagcagcagcaccggcagaaucugcgacagcccccaccagauccuggacggcgagaacugcacccugaucgacgcccugcugggcgacccccacugcgacggcuuccagaacaaggagugggaccuguucguggagagaagcaaggccuacagcaacugcuaccccuacgacgugcccgacuacgccagccugagaagccugguggccagcagcggcacccuggaguucaacaacgagagcuucaacuggaccggcguggcccagaacggcaccagcagcgccugcaagagaagaagcaucaagagcuucuucagcagacugaacuggcugcaccagcugaaguacaaguaccccgcccugaacgugaccaugcccaacaacgagaaguucgacaagcuguacaucuggggcgugcaccaccccagcaccgacagcgaccagaucagccuguacgcccaggccagcggcagagugaccgugagcaccaagagaagccagcagaccgugauccccaacaucggcagcagacccugggugagaggcgugagcagcagaaucagcaucuacuggaccaucgugaagcccggcgacauccugcugaucaacagcaccggcaaccugaucgcccccagaggcuacuucaagaucagaagcggcaagagcagcaucaugagaagcgacgcccccaucggcaagugcaacagcgagugcaucacccccaacggcagcauccccaacgacaagcccuuccagaacgugaacagaaucaccuacggcgccugccccagauacgugaagcagaacacccugaagcuggccaccggcaugagaaacgugcccgagaagaccagaggcaucuucggcgccaucgccggcuucaucgagaacggcugggagggcaugguggacggcugguacggcuucagacaccagaacagcgagggcaccggccaggccgccgaccugaagagcacccaggccgccaucaaccagaucaacggcaagcugaacagacugaucgagaagaccaacgagaaguuccaccagaucgagaaggaguucagcgagguggagggcagaauccaggaccuggagaaguacguggaggacaccaagaucgaccuguggagcuacaacgccgagcugcugguggcccuggagaaccagcacaccaucgaccugaccgacagcgagaugaacaagcuguucgagagaaccaagaagcagcugagagagaacgccgaggacaugggcaacggcugcuucaagaucuaccacaagugcgacaacgccugcaucggcagcaucagaaacggcaccuacgaccacgacguguacagagacgaggcccugaacaacagauuccagaucaagggcguggagcugaagagcggcuacaaggacuggauccuguggaucagcuucgccaucagcugcuuccugcugugcguggugcugcugggcuucaucaugugggccugccagaagggcaacaucagaugcagcaucugcaucuga

SEQ ID NO: 168888 - RNA, 1701 nt, Artificial Sequence
  derived and/or modified CDS sequence (opt4) from hemagglutinin__InfluenzaA__AFJ77561
augaagaccaucaucgcccugagcuacauccugugccugguguucgcccagaagcugcccggcaacgacaacagcaccgccacccugugccugggccaccacgccgugcccaacggcacccuggugaagaccaucaccaacgaccagaucgaggugaccaacgccaccgagcuggugcagagcagcagcaccggcagaaucugcgacagcccccacagaauccuggacggcaagaacugcacccugaucgacgcccugcugggcgacccccacugcgacggcuuccagaacaaggagugggaccuguucguggagagaagcaaggccuacagcaacugcuaccccuacgacgugcccgacuacgccagccugagaagccugguggccagcagcggcacccuggaguucaacaacgagagcuucaacuggaccggcguggcccagaacggcaccagcuacgccugcaagagaagaagcgugaagagcuucuucagcagacugaacuggcugcacaagcuggaguacaaguaccccgcccugaacgugaccaugcccaacaacgacaaguucgacaagcuguacaucuggggcgugcaccaccccagcaccgacagcgaccagaccagccuguacgcccaggccagcggcagagugaccgugagcaccaagagaagccagcagaccgugauccccaacaucggcagcagacccugggugagaggcgugagcagcagaaucagcaucuacuggaccaucgugaagcccggcgacauccugcugaucuacagcaccggcaaccugaucgcccccagaggcuacuucaagaucagaagcggcaagagcagcaucaugagaagcgacgcccccaucggcaacugcagcagcgagugcaucacccccaacggcagcauccccaacgacaagcccuuccagaacgugaacagaaucaccuacggcgccugccccagauacgugaagcagaacacccugaagcuggccaccggcaugagaaacgugcccgagaagcagaccagaggcaucuucggcgccaucgccggcuucaucgagaacggcugggagggcaugguggacggcugguacggcuucagacaccagaacagcgagggcaccggccaggccgccgaccugaagagcacccaggccgccaucaaccagaucaacggcaagcugaacagacugaucgagaagaccaacgagaaguuccaccagaucgagaaggaguucagcgagguggagggcagaauccaggaccuggagaaguacguggaggacaccaagaucgaccuguggagcuacaacgccgagcugcugguggcccuggagaaccagcacaccaucgaccugaccgacagcgagaugaacaagcuguucgagagaaccagaaagcagcugagagagaacgccgaggacaugggcaacggcugcuucaagaucuaccacaagugcgacaacgccugcaucggcagcaucagaaacggcaccuacgaccacgacguguacagagacgaggcccugaacaacagauuccagaucaagggcguggagcugaagagcggcuacaaggacuggauccuguggaucagcuucgccaucagcugcuuccugcugugcguggugcugcugggcuucaucaugugggccugccagaagggcaacaucagaugcaacaucugcaucuga

SEQ ID NO: 168889 - RNA, 1698 nt, Artificial Sequence
  derived and/or modified CDS sequence (opt4) from hemagglutinin__InfluenzaA__AFJ77572
augaagaccaucaucgcccugagcuacauccugugccagguguucgcccagaagcugcccggcaacgacaacagcaccgccacccugugccugggccaccacgccgugcccaacggcacccuggugaagaccaucaccaacgaccagaucgaggugaccaacgccaccgagcuggugcagagcagcagcaccggcagaaucugcgacagcccccaccagauccuggacggcgagaacugcacccugaucgacgcccugcugggcgacccccacugcgacggcuuccagaacaaggagugggaccuguucguggagagaagcaaggccuacagcaacugcuaccccuacgacgugcccgacuacgccagccugagaagccugguggccagcagcggcacccuggaguucaacaacgagagcuucaacuggaccggcguggcccagaacggcaccagcagcgccugcaagagaagaagcaucaagagcuucuucagcagacugaacuggcugcaccagcugaaguacaaguaccccgcccugaacgugaccaugcccaacaacgagaaguucgacaagcuguacaucuggggcgugcaccaccccagcaccgacagcgaccagaucagccuguacgcccaggccagcggcagagugaccgugagcaccaagagaagccagcagaccgugauccccaacaucggcagcggccccugggugagaggcgugagcagcagaaucagcaucuacuggaccaucgugaagcccggcgacauccugcugaucaacagcaccggcaaccugaucgcccccagaggcuacuucaagaucagaagcggcaagagcagcaucaugagaagcgacgcccccaucggcaagugcaacagcgagugcaucacccccaacggcagcauccccaacgacaagcccuuccagaacgugaacagaaucaccuacggcgccugccccagauacgugaagcagaacacccugaagcuggccaccggcaugagaaacgugcccgagaagaccagaggcaucuucggcgccaucgccggcuucaucgagaacggcugggagggcaugguggacggcugguacggcuucagacaccagaacagcgagggcaccggccaggccgccgaccugaagagcacccaggccgccaucaaccagaucaacggcaagcugaacagacugaucgagaagaccaacgagaaguuccaccagaucgagaaggaguucagcgagguggagggcagaauccaggaccuggagaaguacguggaggacaccaagaucgaccuguggagcuacaacgccgagcugcugguggcccuggagaaccagcacaccaucgaccugaccgacagcgagaugaacaagcuguucgagagaaccaagaagcagcugagagagaacgccgaggacaugggcaacggcugcuucaagaucuaccacaagugcgacaacgccugcaucggcagcaucagaaacggcaccuacgaccacgacguguacagagacgaggcccugaacaacagauuccagaucaagggcguggagcugaagagcggcuacaaggacuggauccuguggaucagcuucgccaucagcugcuuccugcugugcguggugcugcugggcuucaucaugugggccugccagaagggcaacaucagaugcagcaucugcaucuga

SEQ ID NO: 168890 - RNA, 1701 nt, Artificial Sequence
  derived and/or modified CDS sequence (opt4) from hemagglutinin__InfluenzaA__AFJ77583
augaagaccaucaucacccugagcuacauccugugccugguguucgcccagaagcugcccgugaaggacaacagcaccgccacccugugccugggccaccacgccgugcccaacggcacccuggugaagaccaucaccaacgaccacaucgaggugaccaacgccaccgagcuggugcagagcagcagcaccggcagaaucugcgacagcccccaccagauccuggacggcgagaacugcacccugaucgacgcccugcugggcgacccccacugcgacggcuuccagaacaaggagugggaccuguucguggagagaagcaccgccuacagcaacugcuaccccuacgacgugcccgacuacgccagccugagaagccugguggccagcagcggcacccuggaguucaacaacgagagcuucaacuggaccggcguggcccagaacggcaccagcagcgccugcaagagaagaagcaucaagagcuucuucagcagacugaacuggcugcaccagcugaaguacaaguaccccgcccugaacgugaccaugcccaacaacgagaaguucgacaagcuguacaucuggggcgugcaccaccccagcaccgacagcgaccagaucagccuguacgcccaggccagcggcagagugaccgugagcaccaagagaagccagcagaccgugauccccaacaucggcagcagacccugggugagaggcgugagcagcagaaucagcaucuacuggaccaucgugaagcccggcgacauccugcugaucaacagcaccggcaaccugaucgcccccagaggcuacuucaagaucagaagcggcaagagcagcaucaugagaagcaacgcccccaucggcaagugcaacagcgagugcaucacccccaacggcagcauccccaacgacaagcccuuccagaacgugaacagaaucaccuacggcgccugccccagauacgugaagcagaacacccugaagcuggccaccggcaugagaaacgugcccgagaagcagaccagaggcaucuucggcgccaucgccggcuucaucgagaacggcugggagggcaugguggacggcugguacggcuucagacaccagaacagcgagggcaccggccaggccgccgaccugaagagcacccaggccgccaucaaccagaucaacggcaagcugaacagacugaucgagaagaccaacgagaaguuccaccagaucgagaaggaguucagcgagguggagggcagaauccaggaccuggagaaguacguggaggacaccaagaucgaccuguggagcuacaacgccgagcugcugguggcccuggagaaccagcacaccaucgaccugaccgacagcgagaugaacaagcuguucgagagaaccagaaagcagcugagagagaacgccgaggacaugggcaacggcugcuucaagaucuaccacaagugcgacaacgccugcaucggcagcaucagaaacggcaccuacgaccacgacguguacagagacgaggcccugaacaacagauuccagaucaagggcguggagcugaagagcggcuacaaggacuggauccuguggaucagcuucgccaucagcugcuuccugcugugcguggugcugcugggcuucaucaugugggccugccagaagggcaacaucagaugcaacaucugcaucuga

SEQ ID NO: 168891 - RNA, 1701 nt, Artificial Sequence
  derived and/or modified CDS sequence (opt4) from hemagglutinin__InfluenzaA__AFJ77594
augaagaccaucaucgcccugagcuacauccugugccugguguucgcccagaagcugcccgugaaggacaacagcaccgccacccugugccugggccaccacgccgugcccaacggcacccuggugaagaccaucaccaacgaccacaucgaggugaccaacgccaccgagcuggugcagagcagcagcaccggcagaaucugcgacagcccccaccagauccuggacggcgagaacugcacccugaucgacgcccugcugggcgacccccacugcgacggcuuccagaacaaggagugggaccuguucguggagagaagcaccgccuacagcaacugcuaccccuacgacgugcccgacuacgccagccugagaagccugguggccagcagcggcacccuggaguucaacaacgagagcuucaacuggaccggcguggcccagaacggcaccagcagcgccugcaagagaagaagcaucaagagcuucuucagcagacugaacuggcugcaccagcugaaguacaaguaccccgcccugaacgugaccaugcccaacaacgagaaguucgacaagcuguacaucuggggcgugcaccaccccagcaccgacagcgaccagaucagccuguacgcccaggccagcggcagagugaccgugagcaccaagagaagccagcagaccgugauccccaacaucggcagcagacccugggugagaggcgugagcagcagaaucagcaucuacuggaccaucgugaagcccggcgacauccugcugaucaacagcaccggcaaccugaucgcccccagaggcuacuucaagaucagaagcggcaagagcagcaucaugagaagcaacgcccccaucggcaagugcaacagcgagugcaucacccccaacggcagcauccccaacgacaagcccuuccagaacgugaacagaaucaccuacggcgccugccccagauacgugaagcagaacacccugaagcuggccaccggcaugagaaacgugcccgagaagcagaccagaggcaucuucggcgccaucgccggcuucaucgagaacggcugggagggcaugguggacggcugguacggcuucagacaccagaacagcgagggcaccggccaggccgccgaccugaagagcacccaggccgccaucaaccagaucaacggcaagcugaacagacugaucgagaagaccaacgagaaguuccaccagaucgagaaggaguucagcgagguggagggcagaauccaggaccuggagaaguacguggaggacaccaagaucgaccuguggagcuacaacgccgagcugcugguggcccuggagaaccagcacaccaucgaccugaccgacagcgagaugaacaagcuguucgagagaaccagaaagcagcugagagagaacgccgaggacaugggcaacggcugcuucaagaucuaccacaagugcgacaacgccugcaucggcagcaucagaaacggcaccuacgaccacgacguguacagagacgaggcccugaacaacagauuccagaucaagggcguggagcugaagagcggcuacaaggacuggauccuguggaucagcuucgccaucagcugcuuccugcugugcguggugcugcugggcuucaucaugugggccugccagaagggcaacaucagaugcaacaucugcaucuga

SEQ ID NO: 168892 - RNA, 1701 nt, Artificial Sequence
  derived and/or modified CDS sequence (opt4) from hemagglutinin__InfluenzaA__AFJ77605
augaagaccaucaucgcccugagcuacauccugugccugaucuucgcccagaagcugcccggcaacgacaacagcaccgccacccugugccugggccaccacgccgugcccaacggcacccuggugaagaccaucaccaacgaccagaucgaggugaccaacgccaccgagcuggugcagagcagcagcaccggcaagaucugcgacagcccccaccagauccuggacggcgagaacugcacccugaucgacgcccugcugggcgacccccacugcgacggcuuccagaacaaggagugggaccuguucguggagagaagcaaggccuacagcaacugcuaccccuacgacgugcccgacuacgccagccugagaagccugguggccagcagcggcacccuggaguucaacaacgagagcuucaacuggaccggcguggcccagaacggcaccagcagcgccugcaagagaagaagcaacaagagcuucuucagcagacugaacuggcugcaccagcugaaguacaaguaccccgcccugaacgugaccaugcccaacaacgagaaguucgacaagcuguacaucuggggcgugcaccaccccagcaccgacagcgaccagaucagccuguacgcccaggccagcggcagagugaccgugagcaccaagagaagccagcagaccgugauccccaacaucggcagcagacccugggugagaggcgugagcagcagaaucagcaucuacuggaccaucgugaagcccggcgacauccugcugaucaacagcaccggcaaccugaucgcccccagaggcuacuucaagaucagaagcggcaagagcagcaucaugagaagcgacgcccccaucggcaagugcaacagcgagugcaucacccccaacggcagcauccccaacgacaagcccuuccagaacgugaacagaaucaccuacggcgccugccccagauacgugaagcagaacacccugaagcuggccaccggcaugagaaacgugcccgagaagcagaccagaggcaucuucggcgccaucgccggcuucaucgagaacggcugggagggcaugguggacggcugguacggcuucagacaccagaacagcgagggcaccggccaggccgccgaccugaagagcacccaggccgccaucaaccagaucaacggcaagcugaacagacugaucgagaagaccaacgagaaguuccaccagaucgagaaggaguucagcgagguggagggcagaauccaggaccuggagaaguacguggaggacaccaagaucgaccuguggagcuacaacgccgagcugcugguggcccuggagaaccagcacaccaucgaccugaccgacagcgagaugaacaagcuguucgagagaaccaagaagcagcugagagagaacgccgaggacaugggcaacggcugcuucaagaucuaccacaagugcgacaacgccugcaucggcagcaucagaaacggcaccuacgaccacgacguguacagagacgaggccgugaacaacagauuccagaucaagggcguggagcugaagagcggcuacaaggacuggauccuguggaucagcuucgccaucagcugcuuccugcugugcguggugcugcugggcuucaucaugugggccugccagaagggcaacaucagaugcaacaucugcaucuga

SEQ ID NO: 168893 - RNA, 1701 nt, Artificial Sequence
  derived and/or modified CDS sequence (opt4) from hemagglutinin__InfluenzaA__AFJ77616
augaagaccaucaucgcccugagcuacauccugugcauggugcuggcccagaagcugcccgugaaggacaacagcaccgccacccugugccugggccaccacgccgugcccaacggcacccuggugaagaccaucaccaacgaccacaucgaggugaccaacgccaccgagcuggugcagagcagcagcaccggcagaaucugcgacagcccccaccagauccuggacggcgagaacugcacccugaucgacgcccugcugggcgacccccacugcgacggcuuccagaacaaggagugggaccuguucguggagagaagcaccgccuacagcaacugcuaccccuacgacgugcccgacuacgccagccugagaagccugguggccagcagcggcacccuggaguucaacaacgagagcuucaacuggaccggcguggcccagaacggcaccagcagcgccugcaagagaagaagcaucaagagcuucuucagcagacugaacuggcugcaccagcugaaguacaaguaccccgcccugaacgugaccaugcccaacaacgagaaguucgacaagcuguacaucuggggcgugcaccaccccagcaccgacagcgaccagaucagccuguacgcccaggccagcggcagagugaccgugagcaccaagagaagccagcagaccgugauccccaacaucggcagcagacccugggugagaggcgugagcagcagaaucagcaucuacuggaccaucgugaagcccggcgacauccugcugaucaacagcaccggcaaccugaucgcccccagaggcuacuucaagaucagaagcggcaagagcagcaucaugagaagcaacgccagcaucggcaagugcaacagcgagugcaucacccccaacggcagcauccccaacgacaagcccuuccagaacgugaacagaaucaccuacggcgccugccccagauacgugaagcagaacacccugaagcuggccaccggcaugagaaacgugcccgagaagcagaccagaggcaucuucggcgccaucgccggcuucaucgagaacggcugggagggcaugguggacggcugguacggcuucagacaccagaacagcgagggcaccggccaggccgccgaccugaagagcacccaggccgccaucaaccagaucaacggcaagcugaacagacugaucgagaagaccaacgagaaguuccaccagaucgagaaggaguucagcgagguggagggcagaauccaggaccuggagaaguacguggaggacaccaagaucgaccuguggagcuacaacgccgagcugcugguggcccuggagaaccagcacaccaucgaccugaccgacagcgagaugaacaagcuguucgagagaaccagaaagcagcugagagagaacgccgaggacaugggcaacggcugcuucaagaucuaccacaagugcgacaacgccugcaucggcagcaucagaaacggcaccuacgaccacgacguguacagagacgaggcccugaacaacagauuccagaucaagggcguggagcugaagagcggcuacaaggacuggauccuguggaucagcuucgccaucagcugcuuccugcugugcguggugcugcugggcuucaucaugugggccugccagaagggcaacaucagaugcaacaucugcaucuga

SEQ ID NO: 168894 - RNA, 1701 nt, Artificial Sequence
  derived and/or modified CDS sequence (opt4) from hemagglutinin__InfluenzaA__AFJ77627
augaagaccaucaucgcccugagcuacauccugugccuggugcuggcccagaagcugcccgugaaggacaacagcaccgccacccugugccugggccaccacgccgugcccaacggcacccuggugaagaccaucaccaacgaccacaucgaggugaccaacgccaccgagcuggugcagagcagcagcaccggcagaaucugcgacagcccccaccagauccuggacggcgagaacugcacccugaucgacgcccugcugggcgacccccacugcgacggcuuccagaacaaggagugggaccuguucguggagagaagcaccgccuacagcaacugcuaccccuacgacgugcccgacuacgccagccugagaagccugguggccagcagcggcacccuggaguucaacaacgagagcuucaacuggaccggcguggcccagaacggcaccagcagcgccugcaagagaagaagcaucaagagcuucuucagcagacugaacuggcugcaccagcugaaguacaaguaccccgcccugaacgugaccaugcccaacaacgagaaguucgacaagcuguacaucuggggcgugcaccaccccagcaccgacagcgaccagaucagccuguacgcccaggccagcggcagagugaccgugagcaccaagagaagccagcagaccgugauccccaacaucggcagcagacccugggugagaggcgugagcagcagaaucagcaucuacuggaccaucgugaagcccggcgacauccugcugaucaacagcaccggcaaccugaucgcccccagaggcuacuucaagaucagaagcggcaagagcagcaucaugagaagcaacgccagcaucggcaagugcaacagcgagugcaucacccccaacggcagcauccccaacgacaagcccuuccagaacgugaacagaaucaccuacggcgccugccccagauacgugaagcagaacacccugaagcuggccaccggcaugagaaacgugcccgagaagcagaccagaggcaucuucggcgccaucgccggcuucaucgagaacggcugggagggcaugguggacggcugguacggcuucagacaccagaacagcgagggcaccggccaggccgccgaccugaagagcacccaggccgccaucaaccagaucaacggcaagcugaacagacugaucgagaagaccaacgagaaguuccaccagaucgagaaggaguucagcgagguggagggcagaauccaggaccuggagaaguacguggaggacaccaagaucgaccuguggagcuacaacgccgagcugcugguggcccuggagaaccagcacaccaucgaccugaccgacagcgagaugaacaagcuguucgagagaaccagaaagcagcugagagagaacgccgaggacaugggcaacggcugcuucaagaucuaccacaagugcgacaacgccugcaucggcagcaucagaaacggcaccuacgaccacgacguguacagagacgaggcccugaacaacagauuccagaucaagggcguggagcugaagagcggcuacaaggacuggauccuguggaucagcuucgccaucagcugcuuccugcugugcguggugcugcugggcuucaucaugugggccugccagaagggcaacaucagaugcaacaucugcaucuga

SEQ ID NO: 168895 - RNA, 1701 nt, Artificial Sequence
  derived and/or modified CDS sequence (opt4) from hemagglutinin__InfluenzaA__AFJ77638
augaagaccaucaucgcccugagcuacauccugugccugguguucgcccagaagcugcccggcaacgacaacagcaccgccacccugugccugggccaccacgccgugcccaacggcacccuggugaagaccaucaccaacgaccagaucgaggugaccaacgccaccgagcuggugcagagcagcagcaccggcagaaucugcgacagcccccaccagauccuggacggcgagaacugcacccugaucgacgcccugcugggcgacccccacugcgacggcuuccagaacaaggagugggaccuguucguggagagaagcaaggccuacagcaacugcuaccccuacgacgugcccgacuacgccagccugagaagccugguggccagcagcggcacccuggaguucaacaacgagagcuucaacuggaccggcguggcccagaacggcaccagcagcgccugcaagagaagaagcaacaagagcuucuucagcagacugaacuggcugcaccagcugaaguacaaguaccccgcccugaacgugaccaugcccaacaacgagaaguucgacaagcuguacaucuggggcgugcaccaccccagcaccgacagcgaccagaucagccuguacgcccaggccagcggcagagugaccgugagcaccaagagaagccagcagaccgugauccccaacaucggcagcagacccugggugagaggcgugagcagcagaaucagcaucuacuggaccaucgugaagcccggcgacauccugcugaucaacagcaccggcaaccugaucgcccccagaggcuacuucaagaucagaagcggcaagagcagcaucaugagaagcgacgcccccaucggcaagugcaacagcgagugcaccacccccaacggcagcauccccaacgacaagcccuuccagaacgugaacagaaucaccuacggcgccugccccagauacgugaagcagaacacccugaagcuggccaccggcaugagaaacgugcccgagaagcagaccagaggcaucuucggcgccaucgccggcuucaucgagaacggcugggagggcaugguggacggcugguacggcuucagacaccagaacagcgagggcaccggccaggccgccgaccugaagagcacccaggccgccaucaaccagaucaacggcaagcugaacagacugaucggcaagaccaacgagaaguuccaccagaucgagaaggaguucagcgagguggagggcagaauccaggaccuggagaaguacguggaggacaccaagaucgaccuguggagcuacaacgccgagcugcugguggcccuggagaaccagcacaccaucgaccugaccgacagcgagaugaacaagcuguucgagagaaccaagaagcagcugagagagaacgccgaggacaugggcaacggcugcuucaagaucuaccacaagugcgacaacgccugcaucggcagcaucagaaacggcaccuacgaccacgacguguacagagacgaggcccugaacaacagauuccagaucaagggcguggagcugaagagcggcuacaaggacuggauccuguggaucagcuucgccaucagcugcuuccugcugugcguggugcugcugggcuucaucaugugggccugccagaagggcaacaucagaugcaacaucugcaucuga

SEQ ID NO: 168896 - RNA, 1701 nt, Artificial Sequence
  derived and/or modified CDS sequence (opt4) from hemagglutinin__InfluenzaA__AFJ77649
augaagaccaucaucgcccugagcuacauccugugccugguguucgcccagaagcugcccggcaacgacaacagcaccgccacccugugccugggccaccacgccgugcccaacggcacccuggugaagaccaucaccaacgaccagaucgaggugaccaacgccaccgagcuggugcagagcagcagcaccggcagaaucugcgacagcccccaccagauccuggacggcgagaacugcacccugaucgacgcccugcugggcgacccccacugcgacggcuuccagaacaaggagugggaccuguucguggagagaagcaaggccuacagcaacugcuaccccuacgacgugcccgacuacgccagccugagaagccugguggccagcagcggcacccuggaguucaacaacgagagcuucaacuggaccggcguggcccagaacggcaccagcagcgccugcaagagaagaagcaacaagagcuucuucagcagacugaacuggcugcaccagcugaaguacaaguaccccgcccugaacgugaccaugcccaacaacgagaaguucgacaagcuguacaucuggggcgugcaccaccccagcaccgacagcgaccagaucagccuguacgcccaggccagcggcagagugaccgugagcaccaagagaagccagcagaccgugauccccaacaucggcagcagacccugggugagaggcgugagcagcagaaucagcaucuacuggaccaucgugaagcccggcgacauccugcugaucaacaacaccggcaaccugaucgcccccagaggcuacuucaagaucagaaacggcaagagcagcaucaugagaagcgacgcccccaucggcaagugcaacagcgagugcaucacccccaacggcagcauccccaacgacaagcccuuccagaacgugaacagaaucaccuacggcgccugccccagauacgugaagcagaacacccugaagcuggccaccggcaugagaaacgugcccgagaagcagaccagaggcaucuucggcgccaucgccggcuucaucgagaacggcugggagggcaugguggacggcugguacggcuucagacaccagaacagcgagggcaccggccaggccgccgaccugaagagcacccaggccgccaucaaccagaucaacggcaagcugaacagacugaucggcaagaccaacgagaaguuccaccagaucgagaaggaguucagcgagguggagggcagaauccaggaccuggagaaguacguggaggacaccaagaucgaccuguggagcuacaacgccgagcugcugguggcccuggagaaccagcacaccaucgaccugaccgacagcgagaugaacaagcuguucgagagaaccaagaagcagcugagagagaacgccgaggacaugggcaacggcugcuucaagaucuaccacaagugcgacaacgccugcaucggcagcaucagaaacggcaccuacgaccacgacguguacagagacgaggcccugaacaacagauucaagaucaagggcguggagcugaagagcggcuacaaggacuggauccuguggaucagcuucgccaucagcugcuuccugcugugcguggugcugcugggcuucaucaugugggccugccagaagggcaacaucagaugcaacaucugcaucuga

SEQ ID NO: 168897 - RNA, 1701 nt, Artificial Sequence; identical to SEQ ID NO: 160263
  derived and/or modified CDS sequence (opt4) from hemagglutinin__InfluenzaA__AFJ77660

SEQ ID NO: 168898 - RNA, 1701 nt, Artificial Sequence; identical to SEQ ID NO: 160263
  derived and/or modified CDS sequence (opt4) from hemagglutinin__InfluenzaA__AFJ77671

SEQ ID NO: 168899 - RNA, 1701 nt, Artificial Sequence; identical to SEQ ID NO: 160263
  derived and/or modified CDS sequence (opt4) from hemagglutinin__InfluenzaA__AFJ77682

SEQ ID NO: 168900 - RNA, 1701 nt, Artificial Sequence
  derived and/or modified CDS sequence (opt4) from hemagglutinin__InfluenzaA__AFJ77693
augaagaccaucaucgcccugagcuacauccugugccugguguucgcccagaagcugcccgugaacgacaacagcaccgccacccugugccugggccaccacaccgugcccaacggcacccuggugaagaccaucaccaacgacaacaucgaggugaccaacgccaccgagcuggugcagagcagcagcaccggcagaaucugcgacagcccccaccagauccuggacggcgagaacugcacccugaucgacgcccugcugggcgacccccacugcgacggcuuccagaacaaggagugggaccuguucguggagagaagcaccgccuacagcaacugcuaccccuacgacgugcccgacuacgccagccugagaagccugguggccagcagcggcacccuggaguucaacaacgagagcuucaacuggaccggcguggaccagaacggcaccagcagcgccugcaagagaagaagcaacaagagcuucuucagcagacugaacuggcugcaccagcugaaguacaaguaccccgcccugaacgugaccaugcccaacaacgagaaguucgacaagcuguacaucuggggcgugcaccaccccagcaccgacagcgaccagaucagccuguacgcccaggccagcggcagagugaccgugagcaccaagagaagccagcagaccgugauccccaacaucggcagcagacccugggugagaggcgugagcagcagaaucagcaucuacuggaccaucgugaagcccggcgacauccugcugaucaacagcaccggcaaccugaucgcccccagaggcuacuucaagaucagaagcggcaagagcagcaucaugagaagcaacgcccccaucggcaagugcaacagcgagugcaucacccccaacggcagcauccccaacgacaagcccuuccagaacgugaacagaaucaccuacggcgccugccccagauacgugaagcagaacacccugaagcuggccaccggcaugagaaacgugcccgagaagcagaccagaggcaucuucggcgccaucgccggcuucaucgagaacggcugggagggcaugguggacggcugguacggcuucagacaccagaacuucgagggcaccggccaggccgccgaccugaagagcacccaggccgccaucaaccagaucaacggcaagcugaacagacugaucgagaagaccaacgagaaguuccaccagaucgagaaggaguucagcgagguggagggcagaauccaggaccuggagaaguacguggaggacaccaagaucgaccuguggagcuacaacgccgagcugcugguggcccuggagaaccagcacaccaucgaccugaccgacagcgagaugaacaagcuguucgagagaaccagaaagcagcugagagagaacgccgaggacaugggcaacggcugcuucaagaucuaccacaagugcgacaacgccugcaucggcagcaucagaaacggcaccuacgaccacgacguguacagagacgaggcccugaacaacagauuccagaucaagggcguggagcugaagagcggcuacaaggacuggauccuguggaucagcuucgccaucagcugcuuccugcugugcguggugcugcugggcuucaucaugugggccugccagaagggcaacaucagaugcaacaucugcaucuga

SEQ ID NO: 168901 - RNA, 1701 nt, Artificial Sequence; identical to SEQ ID NO: 160263
  derived and/or modified CDS sequence (opt4) from hemagglutinin__InfluenzaA__AFJ77704

SEQ ID NO: 168902 - RNA, 1701 nt, Artificial Sequence; identical to SEQ ID NO: 168741
  derived and/or modified CDS sequence (opt4) from hemagglutinin__InfluenzaA__AFJ77715

SEQ ID NO: 168903 - RNA, 1701 nt, Artificial Sequence; identical to SEQ ID NO: 168741
  derived and/or modified CDS sequence (opt4) from hemagglutinin__InfluenzaA__AFJ77726

SEQ ID NO: 168904 - RNA, 1701 nt, Artificial Sequence; identical to SEQ ID NO: 168837
  derived and/or modified CDS sequence (opt4) from hemagglutinin__InfluenzaA__AFJ77737

SEQ ID NO: 168905 - RNA, 1701 nt, Artificial Sequence; identical to SEQ ID NO: 160092
  derived and/or modified CDS sequence (opt4) from hemagglutinin__InfluenzaA__AFJ77748

SEQ ID NO: 168906 - RNA, 1701 nt, Artificial Sequence; identical to SEQ ID NO: 160092
  derived and/or modified CDS sequence (opt4) from hemagglutinin__InfluenzaA__AFJ77759

SEQ ID NO: 168907 - RNA, 1701 nt, Artificial Sequence
  derived and/or modified CDS sequence (opt4) from hemagglutinin__InfluenzaA__AFJ77781
augaagaccaucaucgcccugagcuacauccugugccugguguucgcccagaagcugcccggcaacgacaacagcaccgccacccugugccugggccaccacgccgugcccaacggcaccaucgugaagaccaucaccaacgaccagaucgaggugaccaacgccaccgagcuggugcagagcagcagcaccggcggcaucugcgacagcccccaccagauccuggacggcgagaacugcacccugaucgacgcccugcugggcgacccccagugcgacggcuuccagaacaagaagugggaccuguucguggagagaagcaaggccuacagcaacugcuaccccuacgacgugcccgacuacgccagccugagaagccugguggccagcagcggcacccuggaguucaacagcgagagcuucgacuggaccggcgugacccagaacggcaccagcagcgccugcaagagaagaagcaacaagagcuucuucagcagacugaacuggcugacccaccugaaguacaaguaccccgcccugaacgugaccaugcccaacaacgagaaguucgacaagcuguacaucuggggcgugcaccaccccggcaccgacagcgaccagaucagccuguacgcccaggccagcggcagaaucaccgugagcaccaagagaagccagcagaccgugauccccaacaucggcagcagacccagagugagagacgugagcagcagaaucagcaucuacuggaccaucgugaagcccggcgacauccugcugaucaacagcaccggcaaccugaucgcccccagaggcuacuucaagaucagaagcggcaagagcagcaucaugagaagcgacgcccccaucggcaagugcaacagcgagugcaucacccccaacggcagcauccccaacgacaagcccuuccagaacgugaacagaaucaccuacggcgccugccccagauacgugaagcagaacacccugaagcuggccaccggcaugagaaacgugcccgagaagcagaccagaggcaucuucggcgccaucgccggcuucaucgagaacggcugggagggcaugguggacggcugguacggcuucagacaccagaacagcgagggcaccggccaggccgccgaccugaagagcacccaggccgccaucaaccagaucaacggcaagcugaacagacugaucggcaagaccaacgagaaguuccaccagaucgagaaggaguucagcgagguggagggcagaauccaggaccuggagaaguacguggaggacaccaagaucgaccuguggagcuacaacgccgagcugcugguggcccuggagaaccagcacaccaucgaccugaccgacagcgagaugaacaagcuguucgagagaaccaagaagcagcugagagagaacgccgaggacaugggcaacggcugcuucaagaucuaccacaagugcgacaacgccugcaucggcagcaucagaaacggcaccuacgaccacgacguguacagagacgaggcccugaacaacagauuccagaucaagggcguggagcugaagagcggcuacaaggacuggauccuguggaucagcuucgccaucagcugcuuccugcugugcguggcccugcugggcuucaucaugugggccugccagaagggcaacaucagaugcaacaucugcaucuga

SEQ ID NO: 168908 - RNA, 1701 nt, Artificial Sequence; identical to SEQ ID NO: 161855
  derived and/or modified CDS sequence (opt4) from hemagglutinin__InfluenzaA__AFJ77792

SEQ ID NO: 168909 - RNA, 1701 nt, Artificial Sequence; identical to SEQ ID NO: 161855
  derived and/or modified CDS sequence (opt4) from hemagglutinin__InfluenzaA__AFJ77803

SEQ ID NO: 168910 - RNA, 1701 nt, Artificial Sequence; identical to SEQ ID NO: 161855
  derived and/or modified CDS sequence (opt4) from hemagglutinin__InfluenzaA__AFJ77814

SEQ ID NO: 168911 - RNA, 1701 nt, Artificial Sequence; identical to SEQ ID NO: 161855
  derived and/or modified CDS sequence (opt4) from hemagglutinin__InfluenzaA__AFJ77825

SEQ ID NO: 168912 - RNA, 1701 nt, Artificial Sequence; identical to SEQ ID NO: 161855
  derived and/or modified CDS sequence (opt4) from hemagglutinin__InfluenzaA__AFJ77836

SEQ ID NO: 168913 - RNA, 1701 nt, Artificial Sequence; identical to SEQ ID NO: 161855
  derived and/or modified CDS sequence (opt4) from hemagglutinin__InfluenzaA__AFJ77847

SEQ ID NO: 168914 - RNA, 1701 nt, Artificial Sequence
  derived and/or modified CDS sequence (opt4) from hemagglutinin__InfluenzaA__AFJ77858
augaagaccaucaucgcccugagcuacauccugugccugguguucgcccagaagcugcccggcaacgacaacagcaccgccacccugugccugggccaccacgccgugcccaacggcaccaucgugaagaccaucaccaacgaccagaucgaggugaccaacgccaccgagcuggugcagagcagcagcaccggcggcaucugcgacagcccccaccagauccuggacggcgagaacugcacccugaucgacgcccugcugggcgacccccagugcgacggcuuccagaacaagaagugggaccuguucguggagagaagcaaggccuacagcaacugcuaccccuacgacgugcccgacuacgccagccugagaagccugguggccagcagcggcacccuggaguucaacaacgagagcuucaacuggaccggcgugacccagaacggcaccagcagcgccugcaagagaagaagcaacaacagcuucuucagcagacugaacuggcugacccaccugaaguucaaguaccccgcccugaacgugaccaugcccaacaacgagaaguucgacaagcuguacaucuggggcgugcaccaccccggcaccgacaacgaccagaucagccuguacgcccaggccagcggcagaaucaccgugagcacccagagaagccagcagaccgugauccccaacaucggcagcagacccagagugagagacauccccagcagaaucagcaucuacuggaccaucgugaagcccggcgacaugcugcugaucaacagcaccggcaaccugaucgcccccagaggcuacuucaagaucagaagcggcaagagcagcaucaugagaagcgacgcccccaucggcaagugcaacagcgagugcaucacccccaacggcagcauccccaacgacaagcccuuccagaacgugaacagaaucaccuacggcgccugccccagauacgugaagcagaacacccugaagcuggccaccggcaugagaaacgugcccgagaagcagaccagaggcaucuucggcgccaucgccggcuucaucgagaacggcugggagggcaugguggacggcugguacggcuucagacaccagaacagcgagggcaccggccaggccgccgaccugaagagcacccaggccgccaucaaccagaucaacggcaagcugaacaagcugaucggcaagaccaacgagaaguuccaccagaucgagaaggaguucagcgagguggagggcagaauccaggaccuggagaaguacguggaggacaccaagaucgaccuguggagcuacaacgccgagcugcugguggcccuggagaaccagcacaccaucgaccugaccgacagcgagaugaacaagcuguucgagagaaccaagaagcagcugagagagaacgccgaggacaugggcaacggcugcuucaagaucuaccacaagugcgacaacgccugcaucggcagcaucagaaacggcaccuacgaccacgacguguacagagacgaggcccugaacaacagauuccagaucaagggcguggagcugaagagcggcuacaaggacuggauccuguggaucagcuucgccaucagcugcuuccuguucugcguggcccugcugggcuucaucaugugggccugccagaagggcaacaucagaugcaacaucugcaucuga

SEQ ID NO: 168915 - RNA, 1701 nt, Artificial Sequence
  derived and/or modified CDS sequence (opt4) from hemagglutinin__InfluenzaA__AFJ77869
augaagaccaucaucgccuucagcuacauccugugccugguguucgcccagaagcugcccggcaacgacaacagcaccgccacccugugccugggccaccacgccgugcccaacggcaccaucgugaagaccaucaccaacgaccagaucgaggugaccaacgccaccgagcuggugcagagcagcagcaccggcggcaucugcgacagcccccaccagauccuggacggcgagaacugcacccugaucgacgcccugcugggcgacccccagugcgacggcuuccagaacaagaagugggaccuguucguggagagaagcaaggccuacagcaacugcuaccccuacgacgugcccgacuacgccagccugagaagccugguggccagcagcggcacccuggaguucaacaacgagagcuucaacuggaccggcgugacccagaacggcaccagcagcgccugcaagagaagaagcaacaacagcuucuucagcagacugaacuggcugacccaccugaaguucaaguaccccgcccugaacgugaccaugcccaacaacgagaaguucgacaagcuguacaucuggggcgugcaccaccccggcaccgacaacgaccagaucagccuguacgcccaggccagcggcagaaucaccgugagcaccaagagaagccagcagaccgugauccccaacaucggcagcagacccagagugagagacauccccagcagaaucagcaucuacuggaccaucgugaagcccggcgacauccugcugaucaacagcaccggcaaccugaucgcccccagaggcuacuucaagaucagaagcggcaagagcagcaucaugagaagcgacgcccccaucggcaagugcaacagcgagugcaucacccccaacggcagcauccccaacgacaagcccuuccagaacgugaacagaaucaccuacggcgccugccccagauacgugaagcagaacacccugaagcuggccaccggcaugagaaacgugcccgagaagcagaccagaggcaucuucggcgccaucgccggcuucaucgagaacggcugggagggcaugguggacggcugguacggcuucagacaccagaacagcgagggcaccggccaggccgccgaccugaagagcacccaggccgccaucaaccagaucaacggcaagcugaacagacugaucggcaagaccaacgagaaguuccaccagaucgagaaggaguucagcgagguggagggcagaauccaggaccuggagaaguacguggaggacaccaagaucgaccuguggagcuacaacgccgagcugcugguggcccuggagaaccagcacaccaucgaccugaccgacagcgagaugaacaagcuguucgagagaaccaagaagcagcugagagagaacgccgaggacaugggcaacggcugcuucaagaucuaccacaagugcgacaacgccugcaucggcagcaucagaaacggcaccuacgaccacgacguguacagagacgaggcccugaacaacagauuccagaucaagggcguggagcugaagagcggcuacaaggacuggauccuguggaucagcuucgccaucagcugcuuccugcugugcguggcccugcugggcuucaucaugugggccugccagaagggcaacaucagaugcaacaucugcaucuga

SEQ ID NO: 168916 - RNA, 1701 nt, Artificial Sequence
  derived and/or modified CDS sequence (opt4) from hemagglutinin__InfluenzaA__AFJ77880
augaagaccaucaucgcccugagcuacauccugugccugguguucgcccagaagcugcccggcaacgacaacagcaccgccacccugugccugggccaccacgccgugcccaacggcaccaucgugaagaccaucaccaacgaccagaucgaggugaccaacgccaccgagcuggugcagagcagcagcaccggcggcaucugcaacagcccccaccagauccuggacggcgagaacugcacccugaucgacgcccugcugggcgacccccagugcgacggcuuccagaacaagaagugggaccuguucguggagagaagcaaggccuacagcaacugcuaccccuacgacgugcccgacuacgccagccugagaagccugguggccagcagcggcacccuggaguucaacaacgagagcuucaacuggaccggcgugacccagaacggcaccagcagcgccugcaagagaagaagcaacaagagcuucuucagcagacugaacuggcugacccaccugaaguucaaguaccccgcccugaacgugaccaugcccaacaacgagaaguucgacaagcuguacaucuggggcgugcaccaccccggcaccgacaacgaccagaucagccuguacgcccaggccagcggcagaaucaccgugagcaccaagagaagccagcagaccgugauccccaacaucggcagcagacccagagugagagacgugcccagcagaaucagcaucuacuggaccaucgugaagcccggcgacauccugcugaucaacagcaccggcaaccugaucgcccccagaggcuacuucaagaucagaagcggcaagagcagcaucaugagaagcgacgcccccaucggcaagugcaacagcgagugcaucacccccaacggcagcauccccaacgacaagcccuuccagaacgugaacagaaucaccuacggcgccugccccagauacgugaagcagaacacccugaagcuggccaccggcaugagaaacgugcccgagaagcagaccagaggcaucuucggcgccaucgccggcuucaucgagaacggcugggagggcaugguggacggcugguacggcuucagacaccagaacagcgagggcaccggccaggccgccgaccugaagagcacccaggccgccaucaaccagaucaacggcaagcugaacagacugaucggcaagaccaacgagaaguuccaccagaucgagaaggaguucagcgagguggagggcagaauccaggaccuggagaaguacguggaggacaccaagaucgaccuguggagcuacaacgccgagcugcugguggcccuggagaaccagcacaccaucgaccugaccgacagcgagaugaacaagcuguucgagagaaccaagaagcagcugagagagaacgccgaggacaugggcaacggcugcuucaagaucuaccacaagugcgacaacgccugcaucggcagcaucagaaacggcaccuacgaccacgacguguacagagacgaggcccugaacaacagauuccagaucaagggcguggagcugaagagcggcuacaaggacuggauccuguggaucagcuucgccaucagcugcuuccugcugugcguggcccugcugggcuucaucaugugggccugccagaagggcaacaucagaugcaacaucugcaucuga

SEQ ID NO: 168917 - RNA, 1701 nt, Artificial Sequence
  derived and/or modified CDS sequence (opt4) from hemagglutinin__InfluenzaA__AFJ77902
augaagaccaucaucgcccugagcuacauccugugccugguguucgcccagaagcugcccggcaacgacaacagcaccgccacccugugccugggccaccacgccgugcccaacggcaccaucgugaagaccaucaccaacgaccagaucgaggugaccaacgccaccgagcuggugcagagcagcagcaccggcggcaucugcgacagcccccaccagauccuggacggcgagaacugcacccugaucgacgcccugcugggcgacccccagugcgacggcuuccagaacaagaagugggaccuguucguggagagaagcaaggccuacagcaacugcuaccccuacgacgugcccgacuacgccagccugagaagccugguggccagcagcggcacccuggaguucaacaacgagagcuucaacuggaccggcgugacccagaacggcaccagcagcgccugcaagagaagaagcaacaacagcuucuucagcagacugaacuggcugacccaccugaaguucaaguaccccgcccugaacgugaccaugcccaacaacgagaaguucgacaagcuguacaucuggggcgugcaccaccccggcaccgacaacgaccagaucggccuguacgcccaggccagcggcagaaucaccgugagcaccaagagaagccagcagaccgugauccccaacaucggcagcagacccagagugagagacauccccagcagaaucagcaucuacuggaccaucgugaagcccggcgacaugcugcugaucaacagcaccggcaaccugaucgcccccagaggcuacuucaagaucagaagcggcaagagcagcaucaugagaagcgacgcccccaucggcaagugcaacagcgagugcaucacccccaacggcagcauccccaacgacaagcccuuccagaacgugaacagaaucaccuacggcgccugccccagauacgugaagcagaacacccugaagcuggccaccggcaugagaaacgugcccgagaagcagaccagaggcaucuucggcgccaucgccggcuucaucgagaacggcugggagggcaugguggacggcugguacggcuucagacaccagaacagcgagggcaccggccaggccgccgaccugaagagcacccaggccgccaucaaccagaucaacggcaagcugaacagacugaucggcaagaccaacgagaaguuccaccagaucgagaaggaguucagcgagguggagggcagaauccaggaccuggagaaguacguggaggacaccaagaucgaccuguggagcuacaacgccgagcugcugguggcccuggagaaccagcacaccaucgaccugaccgacagcgagaugaacaagcuguucgagagaaccaagaagcagcugagagagaacgccgaggacaugggcaacggcugcuucaagaucuaccacaagugcgacaacgccugcaucggcagcaucagaaacggcaccuacgaccacgacguguacagagacgaggcccugaacaacagauuccagaucaagggcguggagcugaagagcggcuacaaggacuggauccuguggaucagcuucgccaucagcugcuuccugcugugcguggcccugcugggcuucaucaugugggccugccagaagggcaacaucagaugcaacaucugcaucuga

SEQ ID NO: 168918 - RNA, 1701 nt, Artificial Sequence
  derived and/or modified CDS sequence (opt4) from hemagglutinin__InfluenzaA__AFJ77913
augaagaccaucaucgcccugagcuacauccugugccugguguucgcccagaagcugcccggcaacgacaacagcaccgccacccugugccugggccaccacgccgugcccaacggcaccaucgugaagaccaucaccaacgaccagaucgaggugaccaacgccaccgagcuggugcagagcagcagcaccggcggcaucugcgacagcccccaccagauccuggacggcgagaacugcacccugaucgacgcccugcugggcgacccccagugcgacggcuuccagaacaagaagugggaccuguucguggagagaagcaaggccuacagcaacugcuaccccuacgacgugcaggacuacgccagccugagaagccugguggccagcagcggcacccuggaguucaacaacgagagcuucaacuggaccggcgugacccagaacggcaccagcagcgccugcaagagaagaagcaacaacagcuucuucagcagacugaacuggcugacccaccugaaguucaaguaccccgcccugaacgugaccaugcccaacaacgagaaguucgacaagcuguacaucuggggcgugcaccaccccggcaccgacaacgaccagaucagccuguacgcccaggccagcggcagaaucaccgugagcaccaagagaagccagcagaccgugauccccaacaucggcagcagacccagagugagagacauccccagcagaaucagcaucuacuggaccaucgugaagcccggcgacaugcugcugaucaacagcaccggcaaccugaucgcccccagaggcuacuucaagaucagaagcggcaagagcagcaucaugagaagcgacgcccccaucggcaagugcaacagcgagugcaucacccccaacggcagcauccccaacgacaagcccuuccagaacgugaacagaaucaccuacggcgccugccccagauacgugaagcagaacacccugaagcuggccaccggcaugagaaacgugcccgagaagcagaccagaggcaucuucggcgccaucgccggcuucaucgagaacggcugggagggcaugguggacggcugguacggcuucagacaccagaacagcgagggcaccggccaggccgccgaccugaagagcacccaggccgccaucaaccagaucaacggcaagcugaacagacugaucggcaagaccaacgagaaguuccaccagaucgagaaggaguucagcgagguggagggcagaauccaggaccuggagaaguacguggaggacaccaagaucgaccuguggagcuacaacgccgagcugcugguggcccuggagaaccagcacaccaucgaccugaccgacagcgagaugaacaagcuguucgagagaaccaagaagcagcugagagagaacgccgaggacaugggcaacggcugcuucaagaucuaccacaagugcgacaacgccugcaucggcagcaucagaaacggcaccuacgaccacgacguguacagagacgaggcccugaacaacagauuccagaucaagggcguggagcugaagagcggcuacaaggacuggauccuguggaucagcuucgccaucagcugcuuccugcugugcguggcccugcugggcuucaucaugugggccugccagaagggcaacaucagaugcaacaucugcaucuga

SEQ ID NO: 168919 - RNA, 1701 nt, Artificial Sequence; identical to SEQ ID NO: 161173
  derived and/or modified CDS sequence (opt4) from hemagglutinin__InfluenzaA__AFJ77924

SEQ ID NO: 168920 - RNA, 1701 nt, Artificial Sequence
  derived and/or modified CDS sequence (opt4) from hemagglutinin__InfluenzaA__AFJ77935
augaagaccaucaucgcccugagcuacauccugugccugguguucgcccagaagcugcccggcaacgacaacagcaccgccacccugugccugggccaccacgccgugcccaacggcaccguggugaagaccaucaccaacgaccagaucgaggugaccaacgccaccgagcuggugcagagcagcagcaccggcggcaucugcgacagcccccaccagauccuggacggcgagaacugcacccugauggacgcccugcugggcgacccccagugcgacggcuuccagaacaagaagugggaccuguucguggagagaagcaaggccuacagcaacugcuaccccuacgacgugcccgaccacgccagccugagaagccugguggccagcagcggcacccuggaguucaacaacgagagcuucaacuggaccggcgugacccagaacggcaccagcagcgccugcaagagaagaagcaacaacagcuucuucagcagacugaacuggcugacccaccugaaguucaaguaccccgcccugaacgugaccaugcccaacaacgagaccuucgacaagcuguacaucuggggcgugcaccaccccggcaccgacaacgaccagaucagccuguacgcccaggccagcggcagaaucaccgugagcaccaagagaagccagcagaccgugauccccaacaucggcagcagacccagagugagagacauccccagcagaaucagcaucuacuggaccaucgugaagcccggcgacauccugcugaucaacagcaccggcaaccugaucgcccccagaggcuacuucaagaucagaagcggcaagagcagcaucaugagaagcgacgcccccaucggcaagugcaacagcgagugcaucacccccaacggcagcauccccaacgacaagcccuuccagaacgugaacagaaucaccuacggcgccugccccagauacgugaagcagaacacccugaagcuggccaccggcaugagaaacgugcccgagaagcagaccagaggcaucuucggcgccaucgccggcuucaucgagaacggcugggagggcaugguggacggcugguacggcuucagacaccagaacagcgagggcaccggccaggccgccgaccugaagagcacccaggccgccaucaaccagaucaacggcaagcugaacagacugaucggcaagaccaacgagaaguuccaccagaucgagaaggaguucagcgagguggagggcagaauccaggaccuggagaaguacguggaggacaccaagaucgaccuguggagcuacaacgccgagcugcugguggcccuggagaaccagcacaccaucgaccugaccgacagcgagaugaacaagcuguucgagagaaccaagaagcagcugagagagaacgccgaggacaugggcaacggcugcuucaagaucuaccacaagugcgacaacgccugcaucggcagcaucagaaacggcaccuacgaccacgacguguacagagacgaggcccugaacaacagauuccagaucaagggcguggagcugaagagcggcuacaaggacuggauccuguggaucagcuucgccaucagcugcuuccugcugugcguggcccugcugggcuucaucaugugggccugccagaagggcaacaucagaugcaacaucugcaucuga

SEQ ID NO: 168921 - RNA, 1701 nt, Artificial Sequence
  derived and/or modified CDS sequence (opt4) from hemagglutinin__InfluenzaA__AFJ77946
augaagaccaucaucgcccugagcuacauccugugccugguguucgcccagaagcugcccggcaacgacaacagcaccgccacccugugccugggccaccacgccgugcccaacggcaccaucgugaagaccaucaccaacgaccagaucgaggugaccaacgccaccgagcuggugcagagcagcagcaccggcggcaucugcgacagcccccaccagauccuggacggcgagaacugcacccugaucgacgcccugcugggcgacccccagugcgacggcuuccagaacaagaagugggaccuguucguggagagaagcaaggccuacagcaacugcuaccccuacgacgugcccgacuacgccagccugagaagccugguggccagcagcggcacccuggaguucaacaacgagagcuucaacuggaccggcgugacccagaacggcaccagcagcgccugcaagagaagaagcaacaacagcuucuucagcagacugaacuggcugacccaccugaaguucaaguaccccgcccugaacgugaccaugcccaacaacgagaaguucgacaagcuguacaucuggggcgugcaccaccccggcaccgacaacgaccagaucagccuguacgcccaggccagcggcagaaucaccgugagcaccaagagaagccagcagaccgugauccccaacaucggcagcagacccagagugagagacauccccagcagaaucagcaucuacuggaccaucgugaagcccggcgacaugcugcugaucaacagcaccggcaaccugaucgcccccagaggcuacuucaagaucagaagcggcaagagcagcaucaugagaagcgacgcccccaucggcaagugcaacagcgagugcaucacccccaacggcagcauccccaacgacaagcccuuccagaacgugaacagaaucaccuacggcgccugccccagauacaucaagcagaacacccugaagcuggccaccggcaugagaaacgugcccgagaagcagaccagaggcaucuucggcgccaucgccggcuucaucgagaacggcugggagggcaugguggacggcugguacggcuucagacaccagaacagcgagggcaccggccaggccgccgaccugaagagcacccaggccgccaucaaccagaucaacggcaagcugaacagacugaucggcaagaccaacgagaaguuccaccagaucgagaaggaguucagcgagguggagggcagaauccaggaccuggagaaguacguggaggacaccaagaucgaccuguggagcuacaacgccgagcugcugguggcccuggagaaccagcacaccaucgaccugaccgacagcgagaugaacaagcuguucgagagaaccaagaagcagcugagagagaacgccgaggacaugggcaacggcugcuucaagaucuaccacaagugcgacaacgccugcaucggcagcaucagaaacggcaccuacgaccacgacguguacagagacgaggcccugaacaacagauuccagaucaagggcguggagcugaagagcggcuacaaggacuggaucaucuggaucagcuucgccaucagcugcuuccugcugugcguggcccugcugggcuucaucaugugggccugccagaagggcaacaucagaugcaacaucugcaucuga

SEQ ID NO: 168922 - RNA, 1701 nt, Artificial Sequence; identical to SEQ ID NO: 161813
  derived and/or modified CDS sequence (opt4) from hemagglutinin__InfluenzaA__AFJ77957

SEQ ID NO: 168923 - RNA, 1701 nt, Artificial Sequence; identical to SEQ ID NO: 160690
  derived and/or modified CDS sequence (opt4) from hemagglutinin__InfluenzaA__AFJ77968

SEQ ID NO: 168924 - RNA, 1701 nt, Artificial Sequence
  derived and/or modified CDS sequence (opt4) from hemagglutinin__InfluenzaA__AFJ77979
augaagaccaucaucgcccugagcuacauccugugccugguguucgcccagaagcugcccggcaacgacaacagcaccgccacccugugccugggccaccacgccgugcccaacggcaccaucgugaagaccaucaccaacgaccagaucgaggugaccaacgccaccgagcuggugcagagcagcagcaccggcggcaucugcgacagcccccaccagauccuggacggcgagaacugcacccugaucgacgcccugcugggcgacccccagugcgacggcuuccagaacaagaagugggaccuguucguggagagaagcaaggccuacagcaacugcuaccccuacgacgugcccgacuacgccagccugagaagccugguggccagcagcggcacccuggaguucaacaacgagagcuucaacuggaccggcgugacccagaacggcaccagcagcgccugcaagagaagaagcaacaacagcuucuucagcagacugaacuggcugacccaccugaaguucaaguaccccgcccugaacgugaccaugcccaacaacgagaaguucgacaagcuguacaucuggggcgugcaccaccccggcaccgacaacgaccagaucuuccuguacgcccaggccagcggcagaaucaccgugagcaccaagagaagccagcagaccgugauccccaacaucggcagcagacccagagugagaaacauccccagcagaaucagcaucuacuggaccaucgugaagcccggcgacauccugcugaucaacagcaccggcaaccugaucgcccccagaggcuacuucaagaucagaagcggcaagagcagcaucaugagaagcgacgcccccaucggcaagugcaacagcgagugcaucacccccaacggcagcauccccaacgacaagcccuuccagaacgugaacagaaucaccuacggcgccugccccagauacgugaagcagaacacccugaagcuggccaccggcaugagaaacgugcccgagaagcagaccagaggcaucuucggcgccaucgccggcuucaucgagaacggcugggagggcaugguggacggcugguacggcuucagacaccagaacagcgagggcaucggccaggccgccgaccugaagagcacccaggccgccaucaaccagaucaacggcaagcugaacagacugaucggcaagaccaacgagaaguuccaccagaucgagaaggaguucagcgagguggagggcagaauccaggaccuggagaaguacguggaggacaccaagaucgaccuguggagcuacaacgccgagcugcugguggcccuggagaaccagcacaccaucgaccugaccgacagcgagaugaacaagcuguucgagagaaccaagaagcagcugagagagaacgccgaggacaugggcaacggcugcuucaagaucuaccacaagugcgacaacgccugcaucggcagcaucagaaacggcaccuacgaccacgacguguacagagacgaggcccugaacaacagauuccagaucaagggcguggagcugagaagcggcuacaaggacuggauccuguggaucagcuucgccaucagcugcuuccugcugugcguggcccugcugggcuucaucaugugggccugccagaagggcaacaucagaugcaacaucugcaucuga

SEQ ID NO: 168925 - RNA, 1701 nt, Artificial Sequence
  derived and/or modified CDS sequence (opt4) from hemagglutinin__InfluenzaA__AFJ77990
augaagaccaucaucgcccugagcuacauccugugccugguguucgcccagaagcugcccggcaacgacaacagcaccgccacccugugccugggccaccacgccgugcccaacggcaccaucgugaagaccaucaccaacgaccagaucgaggugaccaacgccaccgagcuggugcagagcagcagcaccggcggcaucugcgacagcccccaccagauccuggacggcgagaacugcacccugaucgacgcccugcugggcgacccccagugcgacggcuuccagaacaagaagugggaccuguucguggagagaagcaaggccuacagcaacugcuaccccuacgacgugcccgacuacgccagccugagaagccugguggccagcagcggcacccuggaguucaacaacgagagcuucaacuggaccggcgugacccagaacggcaccagcagcgccugcaagagaagaagcaacaacagcuucuucagcagacugaacuggcugacccaccugaaguucaaguaccccgcccugaacgugaccaugcccaacaacgagaaguucgacaagcuguacaucuggggcgugcaccaccccggcaccgacaacgaccagaucuuccuguacgcccaggccagcggcagaaucaccgugagcaccaagagaagccagcagaccgugauccccaacaucggcagcagacccagagugagaaacauccccagcagaaucagcaucuacuggaccaucgugaagcccggcgacauccugcugaucaacagcaccggcaaccugaucgcccccagaggcuacuucaagaucagaagcggcaagagcagcaucaugagaagcgacgcccccaucggcaagugcaacagcgagugcaucacccccaacggcagcauccccaacgacaagcccuuccagaacgugaacagaaucaccuacggcgccugccccagauacgugaagcagaacacccugaagcuggccaccggcaugagaaacgugcccgagaagcagaccagaggcaucuucggcgccaucgccggcuucaucgagaacggcugggagggcaugguggacggcugguacggcuucagacaccagaacagcgagggcaucggccaggccgccgaccugaagagcacccaggccgccaucaaccagaucaacggcaagcugaacagacugaucggcaagaccaacgagaaguuccaccagaucgagaaggaguucagcgagguggagggcagaauccaggaccuggagaaguacguggaggacaccaagaucgaccuguggagcuacaacgccgagcugcugguggcccuggagaaccagcacaccaucgaccugaccgacagcgagaugaacaagcuguucgagagaaccaagaagcagcugagagagaacgccgaggacaugggcaacggcugcuucaagaucuaccacaagugcgacaacgccugcaucggcagcaucagaaacggcaccuacgaccacgacgaguacagagacgaggcccugaacaacagauuccagaucaagggcguggagcugaagagcggcuacaaggacuggauccuguggaucagcuucgccaucagcugcuuccugcugugcgugacccugcugggcuucaucaugugggccugccagaagggcaacaucagaugcaacaucugcaucuga

SEQ ID NO: 168926 - RNA, 1701 nt, Artificial Sequence
  derived and/or modified CDS sequence (opt4) from hemagglutinin__InfluenzaA__AFJ78001
augaagaccaucaucgcccugagcuacauccugugccugguguucgcccagaagcugcccggcaacgacaacagcaccgccacccugugccugggccaccacgccgugcccaacggcaccaucgugaagaccaucaccaacgaccagaucgaggugaccaacgccaccgagcuggugcagagcagcagcaccggcggcaucugcgacagcccccaccagauccuggacggcaagaacugcacccugaucgacgcccugcugggcgacccccagugcgacgacuuccagaacaagaagugggaccuguucguggagagaagcaaggccuacagcaacugcuaccccuacgacgugcccgacuacgccagccugagaagccugguggccagcagcggcacccuggaguucaacaacgagagcuucaacuggaccggcgugacccagaacggcaccagcagcgccugcaagagaagaagcaacaacagcuucuucagcagacugaacuggcugacccaccugaaguucaaguaccccgcccugaacgugaccaugcccaacaacgagaaguucgacaagcuguacaucuggggcgugcaccaccccggcaccgacaacgaccagaucuuccuguacgcccaggccagcggcagaaucaccgugagcaccaagagaagccagcagaccgugauccccaacaucggcagcagacccagagugagaaacauccccagcagaaucagcaucuacuggaccaucgugaagcccggcgacauccugcugaucaacagcaccggcaaccugaucgcccccagaggcuacuucaagaucagaagcggcaagagcagcaucaugagaagcgacgcccccaucggcaagugcaacagcgagugcaucacccccaacggcagcauccccaacgacaagcccuuccagaacgugaacagaaucaccuacggcgccugccccagauacgugaagcagaacacccugaagcuggccaccggcaugagaaacgugcccgagaagcagaccagaggcaucuucggcgccaucgccggcuucaucgagaacggcugggagggcaugguggacggcugguacggcuucagacaccagaacagcgagggcaucggccaggccgccgaccugaagagcacccaggccgccaucaaccagaucaacggcaagcugaacagacugaucggcaagaccaacgagaaguuccaccagaucgagaaggaguucagcgagguggagggcagaauccaggaccuggagaaguacguggaggacaccaagaucgaccuguggagcuacaacgccgagcugcugguggcccuggagaaccagcacaccaucgaccugaccgacagcgagaugaacaagcuguucgagagaaccaagaagcagcugagagagaacgccgaggacaugggcaacggcugcuucaagaucuaccacaagugcgacaacgccugcaucggcagcaucagaaacggcaccuacgaccacgacguguacagagacgaggcccugaacaacagauuccagaucaagggcguggagcugaagagcggcuacaaggacuggauccuguggaucagcuucgccaucagcugcuuccugcugugcgugacccugcugggcuucaucaugugggccugccagaagggcaacaucagaugcaacaucugcaucuga

SEQ ID NO: 168927 - RNA, 1701 nt, Artificial Sequence
  derived and/or modified CDS sequence (opt4) from hemagglutinin__InfluenzaA__AFJ78012
augaagaccaucaucgcccugagcuacauccugugccugguguucgcccagaagcugcccggcaacgacaacagcaccgccacccugugccugggccaccacgccgugcccaacggcaccaucgugaagaccaucaccaacgaccagaucgaggugaccaacgccaccgagcuggugcagagcagcagcaccggcggcaucugcgacagcccccaccagauccuggacggcgagaacugcacccugaucgacgcccugcugggcgacccccagugcgacggcuuccagaacaagaagugggaccuguucguggagagaagcaaggcccacagcaacugcuaccccuacgacgugcccgacuacgccagccugagaagccugguggccagcagcggcacccuggaguucaacaacgagagcuucaacuggaccggcgugacccagaacggcaccagcagcgccugcaagagaagaagcaacaacagcuucuucagcagacugaacuggcugacccaccugaaguucaaguaccccgcccugaacgugaccaugcccaacaacgagaaguucgacaagcuguacaucuggggcgugcaccaccccggcaccgacaacgaccagaucuuccuguacgcccaggccagcggcagaaucaccgugagcaccaagagaagccagcagaccgugauccccaacaucggcagcagacccagagugagaaacauccccagcagaaucagcaucuacuggaccaucgugaagcccggcgacauccugcugaucaacagcaccggcaaccugaucgcccccagaggcuacuucaagaucagaagcggcaagagcagcaucaugagaagcgacgcccccaucggcaagugcaacagcgagugcaucacccccaacggcagcauccccaacgacaagcccuuccagaacgugaacagaaucaccuacggcgccugccccagauacgugaagcagaacacccugaagcuggccaccggcaugagaaacgugcccgagaagcagaccagaggcaucuucggcgccaucgccggcuucaucgagaacggcugggagggcaugguggacggcugguacggcuucagacaccagaacagcgagggcaucggccaggccgccgaccugaagagcacccaggccgccaucgaccagaucaacggcaagcugaacagacugaucggcaagaccaacgagaaguuccaccagaucgagaaggaguucagcgagguggagggcagaauccaggaccuggagaaguacguggaggacaccaagaucgaccuguggagcuacaacgccgagcugcugguggcccuggagaaccagcacaccaucgaccugaccgacagcgagaugaacaagcuguucgagagaaccaagaagcagcugagagagaacgccgaggacaugggcaacggcugcuucaagaucuaccacaagugcgacaacgccugcaucggcagcaucagaaacggcaccuacgaccacgacguguacagagacgaggcccugaacaacagauuccagaucaagggcguggagcugaagagcggcuacaaggacuggauccuguggaucagcuucgccaucagcugcuuccugcugugcguggcccugcugggcuucaucaugugggccugccagaagggcaacaucagaugcaacaucugcaucuga

SEQ ID NO: 168928 - RNA, 1701 nt, Artificial Sequence
  derived and/or modified CDS sequence (opt4) from hemagglutinin__InfluenzaA__AFJ78023
augaagaccaucaucgcccugagcuacauccugugccugguguucgcccagaagcugcccggcaacgacaacagcaccgccacccugugccugggccaccacgccgugcccaacggcaccaucgugaagaccaucaccaacgaccagaucgaggugaccaacgccaccgagcuggugcagagcagcagcaccggcggcaucugcgacagcccccaccagauccuggacggcgagaacugcacccugaucgacgcccugcugggcgacccccagugcgacggcuuccagaacaagaagugggaccuguucguggagagaagcaaggccuacagcaacugcuaccccuacgacgugcccgacuacgccagccugagaagccugguggccagcagcggcacccuggaguucaacaacgagagcuucaacuggaccggcgugacccagaacggcaccagcagcgccugcaagagaaagagcaacaacagcuucuucagcagacugaacuggcugacccaccugaaguucaaguaccccgcccugaacgugaccaugcccaacaacgagaaguucgacaagcuguacaucuggggcgugcaccaccccggcaccgacaacgaccagaucuuccuguacgcccaggccagcggcagaaucaccgugagcaccaagagaagccagcagaccgugauccccaacaucggcagcagacccagagugagaaacauccccagcagaaucagcaucuacuggaccaucgugaagcccggcgacauccugcugaucaacagcaccggcaaccugaucgcccccagaggcuacuucaagaucagaagcggcaagagcagcaucaugagaagcgacgcccccaucggcaagugcaacagcgagugcaucacccccaacggcagcauccccaacgacaagcccuuccagaacgugaacagaaucaccuacggcgccugccccagauacgugaagcagaacacccugaagcuggccaccggcaugagaaacgugcccgagaagcagaccagaggcaucuucggcgccaucgccggcuucaucgagaacggcugggagggcaugguggacggcugguacggcuucagacaccagaacagcgagggcaucggccaggccgccgaccugaagagcacccaggccgccaucaaccagaucaacggcaagcugaacagacugaucggcaagaccaacgagaaguuccaccagaucgagaaggaguucagcgagguggagggcagaauccaggaccuggagaaguacguggaggacaccaagaucgaccuguggagcuacaacgccgagcugcugguggcccuggagaaccagcacaccaucgaccugaccgacagcgagaugaacaagcuguucgagagaaccaagaagcagcugagagagaacgccgaggacaugggcaacggcugcuucaagaucuaccacaagugcgacaacgccugcaucggcagcaucagaaacggcaccuacgaccacgacguguacagagacgaggcccugaacaacagauuccagaucaagggcguggagcugaagagcggcuacaaggacuggauccuguggaucagcuucgccaucagcugcuuccugcugugcguggcccugcugggcuucaucaugugggccugccagaagggcaacaucagaugcaacaucugcaucuga

SEQ ID NO: 168929 - RNA, 1701 nt, Artificial Sequence; identical to SEQ ID NO: 160690
  derived and/or modified CDS sequence (opt4) from hemagglutinin__InfluenzaA__AFJ78034

SEQ ID NO: 168930 - RNA, 1701 nt, Artificial Sequence
  derived and/or modified CDS sequence (opt4) from hemagglutinin__InfluenzaA__AFJ78045
augaagaccaucaucgcccugagcuacauccugugccugguguucgcccagaagcugcccggcaacgacaacagcaccgccacccugugccugggccaccacgccgugcccaacggcaccaucgugaagaccaucaccaacgaccagaucgaggugaccaacgccaccgagcuggugcagagcagcagcaccggcggcaucugcgacagcccccaccagauccuggacggcgagaacugcacccugaucgacgcccugcugggcgacccccagugcgacggcuuccagaacaagaagugggaccuguucguggagagaagcagagccuacagcaacugcuaccccuacgacgugcccgacuacgccagccugagaagccugguggccagcagcggcacccuggaguucaacaacgagagcuucaacuggaccggcgugacccagaacggcaccagcagcgccugcaagagaagaagcaacaacagcuucuucagcagacugaacuggcugacccaccugaaguucaaguaccccgcccugaacgugaccaugcccaacaacgagaaguucgacaagcuguacaucuggggcgugcaccaccccggcaccgacaacgaccagaucuuccuguacgcccaggccagcggcagaaucaccgugagcaccaagagaagccagcagaccgugauccccaacaucggcagcagacccagagugagaaacauccccagcagaaucagcaucuacuggaccaucgugaagcccggcgacauccugcugaucaacagcaccggcaaccugaucgcccccagaggcuacuucaagaucagaagcggcaagagcagcaucaugagaagcgacgcccccaucggcaagugcaacagcgagugcaucacccccaacggcagcauccccaacgacaagcccuuccagaacgugaacagaaucaccuacggcgccugccccagauacgugaagcagaacacccugaagcuggccaccggcaugagaaacgugcccgagaagcagaccagaggcaucuucggcgccaucgccggcuucaucgagaacggcugggagggcaugguggacggcugguacggcuucagacaccagaacagcgagggcaugggccaggccgccgaccugaagagcacccaggccgccaucaaccagaucaacggcaagcugaacagacugaucggcaagaccaacgagaaguuccaccagaucgagaaggaguucagcgagguggagggcagaauccaggaccuggagaaguacguggaggacaccaagaucgaccuguggagcuacaacgccgagcugcugguggcccuggagaaccagcacaccaucgaccugaccgacagcgagaugaacaagcuguucgagagaaccaagaagcagcugagagagaacgccgaggacaugggcaacggcugcuucaagaucuaccacaagugcgacaacgccugcaucggcagcaucagaaacggcaccuacgaccacgacguguacagagacgaggcccugaacaacagauuccagaucaagggcguggagcugaagagcggcuacaaggacuggauccuguggaucagcuucgccaucagcugcuuccugcugugcguggcccugcugggcuucaucaugugggccugccagaagggcaacaucaagugcaacaucugcaucuga

SEQ ID NO: 168931 - RNA, 1701 nt, Artificial Sequence; identical to SEQ ID NO: 160690
  derived and/or modified CDS sequence (opt4) from hemagglutinin__InfluenzaA__AFJ78056

SEQ ID NO: 168932 - RNA, 1701 nt, Artificial Sequence
  derived and/or modified CDS sequence (opt4) from hemagglutinin__InfluenzaA__AFJ78067
augaagaccaucaucgcccugagcuacauccugugccugguguucgcccagaagcugcccggcaacgacaacagcaccgccacccugugccugggccaccacgccgugcccaacggcaccaucgugaagaccaucaccaacgaccagaucgaggugaccaacgccaccgagcuggugcagagcagcagcaccggcggcaucugcgacagcccccaccagauccuggacggcgagaacugcacccugaucgacgcccugcugggcgacccccagugcgacggcuuccagaacaagaagugggaccuguucguggagagaagcaaggccuacagcaacugcuaccccuacgacgugcccgacuacgccagccugagaagccugguggccagcagcggcacccuggaguucaacaacgagagcuucaacuggaccggcgugacccagaacggcaccagcagcgccugcaagagaagaagcaacaacagcuucuucagcagacugaacuggcugacccaccugaaguucaaguaccccgcccugaacgugaccaugcccaacaacgagaaguucgacaagcuguacaucuggggcgugcaccaccccggcaccgacaacgaccagaucuuccuguacgcccaggccagcggcagaaucaccgugagcaccaagagaagccagcagaccgugauccccaacaucggcagcagacccagagugagaaacauccccagcagaaucagcaucuacuggaccaucgugaagcccggcgacauccugcugaucaacagcaccggcaaccugaucgcccccagaggcuacuucaagaucagaagcggcagaagcagcaucaugagaagcgacgcccccaucggcaagugcaacagcgagugcaucacccccaacggcagcauccccaacgacaagcccuuccagaacgugaacagaaucaccuacggcgccugccccagauacgugaagcagaacacccugaagcuggccaccggcaugagaaacgugcccgagaagcagaccagaggcaucuucggcgccaucgccggcuucaucgagaacggcugggagggcaugguggacggcugguacggcuucagacaccagaacagcgagggcaucggccaggccgccgaccugaagagcacccaggccgccaucaaccagaucaacggcaagcugaacagacugaucggcaagaccaacgagaaguuccaccagaucgagaaggaguucagcgagguggagggcagaauccaggaccuggagaaguacguggaggacaccaagaucgaccuguggagcuacaacgccgagcugcugguggcccuggagaaccagcacaccaucgaccugaccgacagcgagaugaacaagcuguucgagagaaccaagaagcagcugagagagaacgccgaggacaugggcaacggcugcuucaagaucuaccacaagugcgacaacgccugcaucggcagcaucagaaacggcaccuacgaccacgacguguacagagacgaggcccugaacaacagauuccagaucaagggcguggagcugaagagcggcuacaaggacuggauccuguggaucagcuucgccaucagcugcuuccugcugugcguggcccugcugggcuucaucaugugggccugccagaagggcaacaucagaugcaacaucugcaucuga

SEQ ID NO: 168933 - RNA, 1701 nt, Artificial Sequence
  derived and/or modified CDS sequence (opt4) from hemagglutinin__InfluenzaA__AFJ78078
augaagaccaucaucgcccugagcuacauccugugccugguguucgcccagaagcugcccggcaacgacaacagcaccgccacccugugccugggccaccacgccgugcccaacggcaccaucgugaagaccaucaccaacgaccagaucgaggugaccaacgccaccgagcuggugcagagcagcagcaccggcggcaucugcgacagcccccaccagauccuggacggcgagaacugcacccugaucgacgcccugcugggcgacccccagugcgacggcuuccagaacaagaagugggaccuguucguggagagaagcaaggccuacagcaacugcuaccccuacgacgugcccgacuacgccagccugagaagccugguggccagcagcggcacccuggaguucaacaacgagagcuucaacuggaccggcgugacccagaacggcaccagcagcgccugcaagagaagaagcaacaacagcuucuucagcagacugaacuggcugacccaccugaaguucaaguaccccgcccugaacgugaccaugcccaacaacgagaaguucgacaagcuguacaucuggggcgugcaccaccccggcaccgacaacgaccagaucuuccuguacgcccaggccagcggcagaaucaccgugagcaccaagagaagccagcagaccgugauccccaacaucggcagcagacccagagugagaaacauccccagcagaaucagcaucuacuggaccaucgugaagcccggcgacauccugcugaucaacagcaccggcaaccugaucgcccccagaggcuacuucaagaucagaagcggcaagagcagcaucaugagaagcgacgcccccaucgacaagugcaacagcgagugcaucacccccaacggcagcauccccaacgacaagcccuuccagaacgugaacagaaucaccuacggcgccugccccagauacgugaagcagaacacccugaagcuggccaccggcaugagaaacgugcccgagaagcagaccagaggcaucuucggcgccaucgccggcuucaucgagaacggcugggagggcaugguggacggcugguacggcuucagacaccagaacagcgagggcaucggccaggccgccgaccugaagagcacccaggccgccaucgaccagaucaacggcaagcugaacagacugaucggcaagaccaacgagaaguuccaccagaucgagaaggaguucagcgagguggagggcagaauccaggaccuggagaaguacguggaggacaccaagaucgaccuguggagcuacaacgccgagcugcugguggcccuggagaaccagcacaccaucgaccugaccgacagcgagaugaacaagcuguucgagaagaccaagaagcagcugagagagaacgccgaggacaugggcaacggcugcuucaagaucuaccacaagugcgacaacgccugcaucggcagcaucagaaacggcaccuacgaccacgacguguacagagacgaggcccugaacaacagauuccagaucaagggcguggagcugaagagcggcuacaaggacuggauccuguggaucagcuucgccaucagcugcuuccugcugugcguggcccugcugggcuucaucaugugggccugccagaagggcaacaucagaugcaacaucugcaucuga

SEQ ID NO: 168934 - RNA, 1701 nt, Artificial Sequence; identical to SEQ ID NO: 168857
  derived and/or modified CDS sequence (opt4) from hemagglutinin__InfluenzaA__AFJ78089

SEQ ID NO: 168935 - RNA, 1701 nt, Artificial Sequence; identical to SEQ ID NO: 161888
  derived and/or modified CDS sequence (opt4) from hemagglutinin__InfluenzaA__AFJ78100

SEQ ID NO: 168936 - RNA, 1701 nt, Artificial Sequence
  derived and/or modified CDS sequence (opt4) from hemagglutinin__InfluenzaA__AFJ78111
augaagaccaucaucgcccugagcuacauccugugccugguguucgcccagaagcugcccggcaacgacaacagcaccgccacccugugccugggccaccacgccgugcccaacggcaccaucgugaagaccaucaccaacgaccagaucgaggugaccaacgccaccgagcuggugcagagcagcagcaccggcggcaucugcgacagcccccaccagauccuggacggcgagaacugcacccugaucgacgcccugcugggcgacccccagugcgacggcuuccagaacaagaagugggaccuguucguggagagaagcaaggccuacagcaacugcuaccccuacgacgugcccgacuacgccagccugagaagccugguggccagcagcggcacccuggaguucaacaacgagagcuucaacuggaccggcgugacccagaacggcaccagcagcgccugcaagagaagaagcaacaacagcuucuucagcagacugaacuggcugacccaccugaaguucaaguaccccgcccugaacgugaccaugcccaacaacgagaacuucgacaagcuguacaucuggggcgugcaccaccccggcaccgacaacgaccagaucuuccuguacgcccaggccagcggcagaaucaccgugagcaccaagagaagccagcagaccgugauccccaacaucggcagcagacccagagugagaaacauccccagcagaaucagcaucuacuggaccaucgugaagcccggcgacauccugcugaucaacagcaccggcaaccugaucgcccccagaggcuacuucaagaucagaagcggcaagagcagcaucaugagaagcgacgcccccaucggcaagugcaacagcgagugcaucacccccaacggcagcauccccaacgacaagcccuuccagaacgugaacagaaucaccuacggcgccugccccagauacgugaagcagaacacccugaagcuggccaccggcaugagaaacgugcccgagaagcagaccagaggcaucuucggcgccaucgccggcuucaucgagaacggcugggagggcaugguggacggcugguacggcuucagacaccagaacagcgagggcaucggccaggccgccgaccugaagagcacccaggccgccaucgaccagaucaacggcaagcugaacagacugaucggcaagaccaacgagaaguuccaccagaucgagaaggaguucagcgagguggagggcagaauccaggaccuggagaaguacguggaggacaccaagaucgaccuguggagcuacaacgccgagcugcugguggcccuggagaaccagcacaccaucgaccugaccgacagcgagaugaacaagcuguucgagaagaccaagaagcagcugagagagaacgccgaggacaugggcaacggcugcuucaagaucuaccacaagugcgacaacgccugcaucggcagcaucagaaacggcaccuacgaccacgacguguacagagacgaggcccugaacaacagauuccagaucaagggcguggagcugaagagcggcuacaaggacuggauccuguggaucagcuucgccaucagcugcuuccugcugugcguggcccugcugggcuucaucaugugggccugccagaagggcaacaucagaugcaacaucugcaucuga

SEQ ID NO: 168937 - RNA, 1701 nt, Artificial Sequence
  derived and/or modified CDS sequence (opt4) from hemagglutinin__InfluenzaA__AFJ78122
augaagaccaucaucgcccugagcuacauccugugccugaucuucgcccagaagcugcccggcaacgacaacagcaccgccacccugugccugggccaccacgccgugcccaacggcaccaucgugaagaccaucaccaacgaccagaucgaggugaccaacgccaccgagcuggugcagagcagcagcaccggcggcaucugcgacagcccccaccagauccuggacggcgagaacugcacccugaucgacgcccugcugggcgacccccagugcgacggcuuccagaacaagaagugggaccuguucguggagagaagcaaggccuacagcaacugcuaccccuacgacgugcccgacuacgccagccugagaagccugguggccagcagcggcacccuggaguucaacaacgagagcuucaacuggaccggcgugacccagaacggcaccagcagcgccugcaagagaagaagcaacaacagcuucuucagcagacugaacuggcugacccaccugaaguucaaguaccccgcccugaacgugaccaugcccaacaacgagaaguucgacaagcuguacaucuggggcgugcaccaccccggcaccgacaacgaccagaucuuccuguacgcccaggccagcggcagaaucaccgugagcaccaagagaagccagcagaccgugauccccaacaucggcagcagacccagagugagaaacauccccagcagaaucagcaucuacuggaccaucgugaagcccggcgacauccugcugaucaacagcaccggcaaccugaucgcccccagaggcuacuucaagaucagaagcggcagaagcagcaucaugagaagcgacgcccccaucgacaagugcaacagcgagugcaucacccccaacggcagcauccccaacgacaagcccuuccagaacgugaacagaaucaccuacggcgccugccccagauacgugaagcagaacacccugaagcuggccaccggcaugagaaacgugcccgagaagcagaccagaggcaucuucggcgccaucgccggcuucaucgagaacggcugggagggcaugguggacggcugguacggcuucagacaccagaacagcgagggcaucggccaggccgccgaccugaagagcacccaggccgccaucgaccagaucaacggcaagcugaacagacugaucagaaagaccaacgagaaguuccaccagaucgagaaggaguucagcgagguggagggcagaauccaggaccuggagaaguacguggaggacaccaagaucgaccuguggagcuacaacgccgagcugcugguggcccuggagaaccagcacaccaucgaccugaccgacagcgagaugaacaagcuguucgagaagaccaagaagcagcugagagagaacgccgaggacaugggcaacggcugcuucaagaucuaccacaagugcgacaacgccugcaucggcagcaucagaaacggcaccuacgaccacgacguguacagagacgaggcccugaacaacagauuccagaucaagggcguggagcugaagagcggcuacaaggacuggauccuguggaucagcuucgccaucagcugcuuccugcugugcguggcccugcugggcuucaucaugugggccugccagaagggcaacaucagaugcaacaucugcaucuga

SEQ ID NO: 168938 - RNA, 1701 nt, Artificial Sequence
  derived and/or modified CDS sequence (opt4) from hemagglutinin__InfluenzaA__AFJ78144
augaagaccaucaucgcccugagcuacauccugugccugguguucgcccagaagcugcccggcaacgacaacagcaccgccacccugugccugggccaccacgccgugcccaacggcaccaucgugaagaccaucaccaacgaccagaucgaggugaccaacgccaccgagcuggugcagagcagcagcaccggcgagaucugcgacagcccccaccagauccuggacggcgagaacugcacccugaucgacgcccugcugggcgacccccagugcgacggcuuccagaacaagaagugggaccuguucguggagagaagcaaggccuacagcaacugcuaccccuacgacgugcccgacuacgccagccugagaagccugguggccagcagcggcacccuggaguucaacaacgagagcuucaacuggaccggcgugacccagaacggcaccagcagcagcugcaucagaagaagcaacaacagcuucuucagcagacugaacuggcugacccaccugaaguucaaguaccccgcccugaacgugaccaugcccaacaacgagaaguucgacaagcuguacaucuggggcgugcaccaccccggcaccgacaacgaccagaucuuccuguacgcccaggccagcggcagaaucaccgugagcaccaagagaagccagcagaccgugauccccaacaucggcagcagacccagagugagaaacauccccagcagaaucagcaucuacuggaccaucgugaagcccggcgacauccugcugaucaacagcaccggcaaccugaucgcccccagaggcuacuucaagaucagaagcggcaagagcagcaucaugagaagcgacgcccccaucggcaagugcaacagcgagugcaucacccccaacggcagcauccccaacgacaagcccuuccagaacgugaacagaaucaccuacggcgccugccccagauacgugaagcagaacacccugaagcuggccaccggcaugagaaacgugcccgagaagcagaccagaggcaucuucggcgccaucgccggcuucaucgagaacggcugggagggcaugguggacggcugguacggcuucagacaccagaacagcgagggcaucggccaggccgccgaccugaagagcacccaggccgccaucgaccagaucaacggcaagcugaacagacugaucggcaagaccaacgagaaguuccaccagaucgagaaggaguucagcgagguggagggcagaauccaggaccuggagaaguacguggaggacaccaagguggaccuguggagcuacaacgccgagcugcugguggcccuggagaaccagcacaccaucgaccugaccgacagcgagaugaacaagcuguucgagaagaccaagaagcagcugagagagaacgccgaggacaugggcaacggcugcuucaagaucuaccacaagugcgacaacgccugcaucggcagcaucagaaacggcaccuacgaccacgacguguacagagacgaggcccugaacaacagauuccagaucaagggcguggagcugaagagcggcuacaaggacuggauccuguggaucagcuucgccaucagcugcuuccugcugugcguggcccugcugggcuucaucaugugggccugccagaagggcaacaucagaugcaacaucugcaucuga

SEQ ID NO: 168939 - RNA, 1701 nt, Artificial Sequence; identical to SEQ ID NO: 168938
  derived and/or modified CDS sequence (opt4) from hemagglutinin__InfluenzaA__AFJ78155

SEQ ID NO: 168940 - RNA, 1701 nt, Artificial Sequence
  derived and/or modified CDS sequence (opt4) from hemagglutinin__InfluenzaA__AFJ78166
augaagaccaucaucgcccugagcuacauccugugccugguguucgcccagaagcugcccggcaacgacaacagcaccgccacccugugccugggccaccacgccgugcccaacggcaccaucgugaagaccaucaccaacgaccagaucgaggugaccaacgccaccgagcuggugcagagcagcagcaccggcgagaucugcgacagcccccaccagauccuggacggcgagaacugcacccugaucgacgcccugcugggcgacccccagugcgacggcuuccagaacaagaagugggaccuguucguggagagaagcaaggccuacagcaacugcuaccccuacgacgugcccgacuacgccagccugagaagccugguggccagcagcggcacccuggaguucaacaacgagagcuucaacuggaccggcgugacccagaacggcaccagcagcgccugcaucagaagaagcaacaacagcuucuucagcagacugaacuggcugacccaccugaaguucaaguaccccgcccugaacgugaccaugcccaacaacgaggaguucgacaagcuguacaucuggggcgugcaccaccccggcaccgacaacgaccagaucuuccuguacgcccaggccagcggcagaaucaccgugagcaccaagagaagccagcagaccgugauccccaacaucggcagcagacccagagugagaaacauccccagcagaaucagcaucuacuggaccaucgugaagcccggcgacauccugcugaucaacagcaccggcaaccugaucgcccccagaggcuacuucaagaucagaagcggcaagagcagcaucaugagaagcgacgcccccaucggcaagugcaacagcgagugcaucacccccaacggcagcauccccaacgacaagcccuuccagaacgugaacagaaucaccuacggcgccugccccagauacgugaagcagaacacccugaagcuggccaccggcaugagaaacgugcccgagaagcagaccagaggcaucuucggcgccaucgccggcuucaucgagaacggcugggagggcaugguggacggcugguacggcuucagacaccagaacagcgagggcaucggccaggccgccgaccugaagagcacccaggccgccaucgaccagaucaacggcaagcugaacagacugaucggcaagaccaacgagaaguuccaccagaucgagaaggaguucagcgagguggagggcagaauccaggaccuggagaaguacguggaggacaccaagaucgaccuguggagcuacaacgccgagcugcugguggcccuggagaaccagcacaccaucgaccugaccgacagcgagaugaacaagcuguucgagaagaccaagagacagcugagagagaacgccgaggacaugggcaacggcugcuucaagaucuaccacaagugcgacaacgccugcaucggcagcaucagaaacggcaccuacgaccacgacguguacagagacgaggcccugaacaacagauuccagaucaagggcguggagcugaagagcggcuacaaggacuggauccuguggaucagcuucgccaucagcugcuuccugcugugcguggcccugcugggcuucaucaugugggccugccagaagggcaacaucagaugcaacaucugcaucuga

SEQ ID NO: 168941 - RNA, 1701 nt, Artificial Sequence; identical to SEQ ID NO: 161789
  derived and/or modified CDS sequence (opt4) from hemagglutinin__InfluenzaA__AFJ78177

SEQ ID NO: 168942 - RNA, 1701 nt, Artificial Sequence
  derived and/or modified CDS sequence (opt4) from hemagglutinin__InfluenzaA__AFJ78188
augaagaccaucaucgcccugagcuacauccugugccugguguucgcccagaagcugcccggcaacgacaacagcaccgccacccugugccugggccaccacgccgugcccaacggcaccaucgugaagaccaucaccaacgaccagaucgaggugaccaacgccaccgagcuggugcagagcagcagcaccggcgagaucugcgacagcccccaccagauccuggacggcgagaacugcacccugaucgacgcccugcugggcgacccccagugcgacggcuuccagaacaagaagugggaccuguucguggagagaagcaaggccuacagcaacugcuaccccuacgacgugcccgacuacgccagccugagaagccugguggccagcagcggcacccuggaguucaacaacgagagcuucaacuggaccggcgugacccagaacggcaccagcagcgccugcaucagaagaagcaacaacagcuucuucagcagacugaacuggcugacccaccugaaguucaaguaccccgcccugaacgugaccaugcccaacaacgagaaguucgacaagcuguacaucuggggcgugcaccaccccggcaccgacaacgaccagaucuuccuguacgcccaggccagcggcagaaucaccgugagcaccaagagaagccagcagaccgugauccccaacaucggcagcagacccagaaucagaaacauccccagcagaaucagcaucuacuggaccaucgugaagcccggcgacauccugcugaucaacagcaccggcaaccugaucgcccccagaggcuacuucaagaucagaagcggcaagagcagcaucaugagaagcgacgcccccaucggcaagugcaacagcgagugcaucacccccaacggcagcauccccaacgacaagcccuuccagaacgugaacagaaucaccuacggcgccugccccagauacgugaagcagaacacccugaagcuggccaccggcaugagaaacgugcccgagaagcagaccagaggcaucuucggcgccaucgccggcuucaucgagaacggcugggagggcaugguggacggcugguacggcuucagacaccagaacagcgagggcaccggccaggccgccgaccugaagagcacccaggccgccaucgaccagaucaacggcaagcugaacagacugaucggcaagaccaacgagaaguuccaccagaucgagaaggaguucagcgagguggagggcagaauccaggaccuggagaaguacguggaggacaccaagaucgaccuguggagcuacaacgccgagcugcugguggcccuggagaaccagcacaccaucgaccugaccgacagcgagaugaacaagcuguucgagaagaccaagaagcagcugagagagaacgccgaggacaugggcaacggcugcuucaagaucuaccacaagugcgacaacgccugcaucggcagcaucagaaacggcaccuacgaccacgacguguacagagacgaggcccugaacaacagauuccagaucaagggcguggagcugaagagcggcuacaaggacuggauccuguggaucagcuucgccaucagcugcuuccugcugugcguggcccugcugggcuucaucaugugggccugccagaagggcaacaucagaugcaacaucugcaucuga

SEQ ID NO: 168943 - RNA, 1701 nt, Artificial Sequence
  derived and/or modified CDS sequence (opt4) from hemagglutinin__InfluenzaA__AFJ78210
augaagaccaucaucgcccugagcuacauccugugccugguguucgcccagaagcugcccggcaacgacaacagcaccgccacccugugccugggccaccacgccgugcccaacggcaccaucgugaagaccaucaccaacgaccagaucgaggugaccaacgccaccgagcuggugcagagcagcagcaccggcgagaucugcgacagcccccaccagauccuggacggcgagaacugcacccugaucgacgcccugcugggcgacccccagugcgacggcuuccagaacaagaagugggaccuguucguggagagaagcaaggccuacagcaacugcuaccccuacgacgugcccgacuacgccagccugagaagccugguggccagcagcggcacccuggaguucaacaacgagagcuucaacuggaccggcgugacccagaacggcaccagcagcgccugcaucagaagaagcaacaacagcuucuucagcagacugaacuggcugacccaccugaaguucaaguaccccgcccugaacgugaccaugcccaacaacgagaaguucgacaagcuguacaucuggggcgugcaccaccccggcaccgacaacgaccagaucuuccuguacgcccaggccagcggcagaaucaccgugagcaccaagagaagccagcagaccgugauccccaacaucggcagcagacccagagugagaaacauccccagcagaaucagcaucuacuggaccaucgugaagcccggcgacauccugcugaucaacagcaccggcaaccugaucgcccccagaggcuacuucaagaucagaagcggcaagagcagcaucaugagaagcgacgcccccaucggcaagugcaacagcgagugcaucacccccaacggcagcauccccaacgacaagcccuuccagaacgugaacagaaucaccuacggcgccugccccagauacgugaagcagaacacccugaagcuggccaccggcaugagaaacgugcccgagaagcagaccagaggcaucuucggcgccaucgccggcuucaucgagaacggcugggagggcaugguggacggcugguacggcuucagacaccagaacagcgagggcaccggccaggccgccgaccugaagagcacccaggccgccaucgaccagaucaacggcaagcugaacagacugaucggcaagaccaacgagaaguuccaccagaucgagaaggaguucagcgagguggagggcagaauccaggaccuggagaaguacguggaggacaccaagaucgaccuguggagcuacaacgccgagcugcugguggcccuggagaaccagcacaccaucgaccugaccgacagcgagaugaacaagcuguucgagaagaccaagaagcagcugagagagaacgccgaggacaugggcaacggcugcuucaagaucuaccacaagugcgacaacgccugcaucggcagcaucagaaacggcaccuacgaccacgacguguacagagacgaggcccugaacaacagauuccagaucaagggcaucgagcugaagagcggcuacaaggacuggauccuguggaucagcuucgccaucagcugcuuccugcugugcguggcccugcugggcuucaucaugugggccugccagaagggcaacaucagaugcaacaucugcaucuga

SEQ ID NO: 168944 - RNA, 1701 nt, Artificial Sequence; identical to SEQ ID NO: 168868
  derived and/or modified CDS sequence (opt4) from hemagglutinin__InfluenzaA__AFJ78221

SEQ ID NO: 168945 - RNA, 1701 nt, Artificial Sequence
  derived and/or modified CDS sequence (opt4) from hemagglutinin__InfluenzaA__AFJ78232
augaagaccaucaucgcccugagcuacauccugugccugguguucgcccagaagcugcccggcaacgacaacagcaccgccacccugugccugggccaccacgccgugcccaacggcaccaucgugaagaccaucaccaacgaccagaucgaggugaccaacgccaccgagcuggugcagagcagcagcaccggcaagaucugcgacagcccccaccagauccuggacggcgagaacugcacccugaucgacgcccugcugggcgacccccagugcgacggcuuccagaacaagaagugggaccuguucguggagagaagcaaggccuacagcaacugcuaccccuacgacgugcccgacuacgccagccugagaagccugguggccagcagcggcacccuggaguucaacaacgagagcuucaacuggaccggcgugacccagaacggcaccagcagcgccugcaucagaagaagcaacaacagcuucuucagcagacugaacuggcugacccaccugaaguucaaguaccccgcccugaacgugaccaugcccaacaacgaggaguucgacaagcuguacaucuggggcgugcaccaccccggcaccgacaacgaccagaucuuccuguacgcccaggccagcggcagaaucaccgugagcaccaagagaagccagcagaccgugauccccaacaucggcagcagacccagagugagaaacauccccagcagaaucagcaucuacuggaccaucgugaagcccggcgacauccugcugaucaacagcaccggcaaccugaucgcccccagaggcuacuucaagaucagaagcggcaagagcagcaucaugagaagcgacgcccccaucggcaagugcaacagcgagugcaucacccccaacggcagcauccccaacgacaagcccuuccagaacgugaacagaaucaccuacggcgccugccccagauacgugaagcagaacacccugaagcuggccaccggcaugagaaacgugcccgagaagcagaccagaggcaucuucggcgccaucgccggcuucaucgagaacggcugggagggcaugguggacggcugguacggcuucagacaccagaacagcgagggcaccggccaggccgccgaccugaagagcacccaggccgccaucgaccagaucaacggcaagcugaacagacugaucggcaagaccaacgagaaguuccaccagaucgagaacgaguucagcgagguggagggcagaauccaggaccuggagaaguacguggaggacaccaagaucgaccuguggagcuacaacgccgagcugcugguggcccuggagaaccagcacaccaucgaccugaccgacagcgagaugaacaagcuguucgagaagaccaagaagcagcugagagagaacgccgaggacaugggcaacggcugcuucaagaucuaccacaagugcgacaacgccugcaucggcagcaucagaaacggcaccuacgaccacgacguguacagagacgaggcccugaacaacagauuccagaucaagggcguggagcugaagagcggcuacaaggacuggauccuguggaucagcuucgccaucagcugcuuccugcugugcguggcccugcugggcuucaucaugugggccugccagaagggcaacaucagaugcaacaucugcaucuga

SEQ ID NO: 168946 - RNA, 1701 nt, Artificial Sequence
  derived and/or modified CDS sequence (opt4) from hemagglutinin__InfluenzaA__AFJ78243
augaagaccaucaucgcccugagcuacauccugugccugguguucgcccagaagcugcccggcaacgacaacagcaccgccacccugugccugggccaccacgccgugcccaacggcaccaucgugaagaccaucaccaacgaccagaucgaggugaccaacgccaccgagcuggugcagagcagcagcaccggcgagaucugcgacagcccccaccagauccuggacggcgagaacugcacccugaucgacgcccugcugggcgacccccagugcgacggcuuccagaacaagaagugggaccuguucguggagagaagcaaggccuacagcaacugcuaccccuacgacgugcccgacuacgccagccugagaagccugguggccagcagcggcacccuggaguucaacaacgagagcuucaacuggaccggcgugacccagaacggcaccagcagcgccugcaucagaagaagcaacaacagcuucuucagcagacugaacuggcugacccaccugaaguucaaguaccccgcccugaacgugaccaugcccaacaacgaggaguucgacaagcuguacaucuggggcgugcaccaccccggcaccgacaacgaccagaucuuccuguacgccaaggccagcggcagaaucaccgugagcaccaagagaagccagcagaccgugauccccaacaucggcagcagacccagagugagaaacauccccagcagaaucagcaucuacuggaccaucgugaagcccggcgacauccugcugaucaacagcaccggcaaccugaucgcccccagaggcuacuucaagaucagaagcggcaagagcagcaucaugagaagcgacgcccccgugggcaagugcaacagcgagugcaucacccccaacggcagcauccccaacgacaagcccuuccagaacgugaacagaaucaccuacggcgccugccccagauacgugaagcagaacacccugaagcuggccaccggcaugagaaacgugcccgagaagcagaccagaggcaucuucggcgccaucgccggcuucaucgagaacggcugggagggcaugguggacggcugguacggcuucagacacaagaacagcgagggcaccggccaggccgccgaccugaagagcacccaggccgccaucgaccagaucaacggcaagcugaacagacugaucggcaagaccaacgagaaguuccaccagaucgagaaggaguucagcgagguggagggcagaauccaggaccuggagaaguacguggaggacaccaagaucgaccuguggagcuacaacgccgagcugcugguggcccuggagaaccagcacaccaucgaccugaccgacagcgagaugaacaagcuguucgagaagaccaagaagcagcugagagagaacgccgaggacaugggcaacggcugcuucaagaucuaccacaagugcgacaacgccugcaucggcagcaucagaaacggcaccuacgaccacgacguguacagagacgaggcccugaacaacagauuccagaucaagggcguggagcugaagagcggcuacaaggacuggauccuguggaucagcuucgccaucagcugcuuccugcugugcguggcccugcugggcuucaucaugugggccugccagaagggcaacaucagaugcaacaucugcaucuga

SEQ ID NO: 168947 - RNA, 1701 nt, Artificial Sequence
  derived and/or modified CDS sequence (opt4) from hemagglutinin__InfluenzaA__AFJ78254
augaagaccaucaucgcccugagcuacauccugugccugguguucgcccagaagcugcccggcaacgacaacagcaccgccacccugugccugggccaccacgccgugcccaacggcaccaucgugaagaccaucaccaacgaccagaucgaggugaccaacgccaccgagcuggugcagagcagcagcaccggcgagaucugcgacagcccccaccagauccuggacggcgagaacugcacccugaucgacgcccugcugggcgacccccagugcgacggcuuccagaacaagaagugggaccuguucguggagagaagcaaggccuacagcaacugcuaccccuacgacgugcccgacuacgccagccugagaagccugguggccagcagcggcacccuggaguucaacaacgagagcuucaacuggaccggcgugacccagaacggcaccagcagcgccugcaucagaagaagcaacaacagcuucuucagcagacugaacuggcugacccaccugaaguucaaguaccccgcccugaacgugaccaugcccaacaacgaggaguucgacaagcuguacaucuggggcgugcaccaccccggcaccgacaacgaccagaucuuccuguacgcccaggccagcggcagaaucaccgugagcaccaagagaagccagcagaccgugauccccaacaucggcagcagacccagagugagaaacauccccagcagaaucagcaucuacuggaccaucgugaagcccggcgacauccugcugaucaacagcaccggcaaccugaucgcccccagaggcuacuucaagaucagaagcggcaagagcagcaucaugagaagcgacgcccccaucggcaagugcaacagcgagugcaucacccccaacggcagcauccccaacgacaagcccuuccagaacgugaacagaaucaccuacggcgccugccccagauacgugaagcagaacacccugaagcuggccaccggcaugagaaacgugcccgagaagcagaccagaggcaucuucggcgccaucgccggcuucaucgagaacggcugggagggcaugguggacggcugguacggcuucagacaccagaacagcgagggcaucggccaggccgccgaccugaagagcacccaggccgccaucgaccagaucaacggcaagcugaacagacugaucggcaagaccaacgagaaguuccaccagaucgagaaggaguucagcgagguggagggcagaauccaggaccuggagaaguacguggaggacaccaagguggaccuguggagcuacaacgccgagcugcugguggcccuggagaaccagcacaccaucgaccugaccgacagcgagaugaacaagcuguucgagaagaccaagaagcagcugagagagaacgccgaggacaugggcaacggcugcuucaagaucuaccacaagugcgacaacgccugcaucggcagcaucagaaacggcaccuacgaccacgacguguacagagacgaggcccugaacaacagauuccagaucaagggcguggagcugaagagcggcuacaaggacuggauccuguggaucagcuucgccaucagcugcuuccugcugugcguggcccugcugggcuucaucaugugggccugccagaagggcaacaucagaugcaacaucugcaucuga

SEQ ID NO: 168948 - RNA, 1701 nt, Artificial Sequence; identical to SEQ ID NO: 168947
  derived and/or modified CDS sequence (opt4) from hemagglutinin__InfluenzaA__AFJ78265

SEQ ID NO: 168949 - RNA, 1701 nt, Artificial Sequence
  derived and/or modified CDS sequence (opt4) from hemagglutinin__InfluenzaA__AFJ78276
augaagaccaucaucgcccugagcuacauccugugccugguguucgcccagaagcugcccggcaacgacaacagcaccgccacccugugccugggccaccacgccgugcccaacggcaccaucgugaagaccaucaccaacgaccagaucgaggugaccaacgccaccgagcuggugcagagcagcagcaccggcgagaucugcgacagcccccaccagauccuggacggcgagaacugcacccugaucgacgcccugcugggcgacccccagugcgacggcuuccagaacaagaagugggaccuguucguggagagaagcaaggccuacagcaacugcuaccccuacgacgugcccgacuacgccagccugagaagccugguggccagcagcggcacccuggaguucaacaacgagagcuucaacuggaccggcgugacccagaacggcaccagcagcgccugcaucagaagaagcaacaacagcuucuucagcagacugaacuggcugacccaccugaaguucaaguaccccgcccugaacgugaccaugcccaacaacgagaaguucgacaagcuguacaucuggggcgugcaccaccccggcaccgacaacgaccagaucuuccuguacgcccaggccagcggcagaaucaccgugagcaccaagagaagccagcagaccgugauccccaacaucggcagcagacccagagugagaaacauccccagcagaaucagcaucuacuggaccaucgugaagcccggcgacauccugcugaucaacagcaccggcaaccugaucgcccccagaggcuacuucaagaucagaagcggcaagagcagcaucaugagaagcgacgcccccaucggcaagugcaacagcgagugcaucacccccaacggcagcauccccaacgacaagcccuuccagaacgugaacagaaucaccuacggcgccugccccagauacgugaagcagaacacccugaagcuggccaccggcaugagaaacgugcccgagaagcagaccagaggcaucuucggcgccaucgccggcuucaucgagaacggcugggagggcaugguggacggcugguacggcuucagacaccagaacagcgagggcaucggccaggccgccgaccugaagagcacccaggccgccaucgaccagaucaacggcaagcugaacagacugaucggcaagaccaacgagaaguuccaccagaucgagaaggaguucagcgagguggagggcagaauccaggaccuggagaaguacguggaggacaccaagguggaccuguggagcuacaacgccgagcugcugguggcccuggagaaccagcacaccaucgaccugaccgacagcgagaugaacaagcuguucgagaagaccaagaagcagcugagagagaacgccgaggacaugggcaacggcugcuucaagaucuaccacaagugcgacaacgccugcaucggcagcaucagaaacggcaccuacgaccacgacguguacagagacgaggcccugaacaacagauuccagaucaagggcguggagcugaagagcggcuacaaggacuggauccuguggaucagcuucgccaucagcugcuuccugcugugcguggcccugcugggcuucaucaugugggccugccagaagggcaacaucagaugcaacaucugcaucuga

SEQ ID NO: 168950 - RNA, 1701 nt, Artificial Sequence
  derived and/or modified CDS sequence (opt4) from hemagglutinin__InfluenzaA__AFJ78287
augaagaccaucaucgcccugagcuacauccugugccugguguucgcccagaagcugcccggcaacgacaacagcaccgccacccugugccugggccaccacgccgugcccaacggcaccaucgugaagaccaucaccaacgaccagaucgaggugaccaacgccaccgagcuggugcagagcagcagcaccggcgagaucugcgacagcccccaccagauccuggacggcaagaacugcacccugauggacgcccugcugggcgacccccagugcgacggcuuccagaacaagaagugggaccuguucguggagagaagcaaggccuacagcaacugcuaccccuacgacgugcccgacuacgccagccugagaagccugguggccagcagcggcacccuggaguucaacaacgagagcuucaacuggaccggcgugacccagaacggcaccagcagcgccugcaucagaagaagcaagaacagcuucuucagcagacugaacuggcugacccaccugaacuucaaguaccccgcccugaacgugaccaugcccaacaacgagcaguucgacaagcuguacaucuggggcgugcaccaccccggcaccgacaaggaccagaucuuccccuacgcccaggccagcggcagaaucaccgugagcaccaagagaagccagcagaccgugauccccaacaucggcagcagacccagagugagaaacauccccagcagaaucagcaucuacuggaccaucgugaagcccggcgacauccugcugaucaacagcaccggcaaccugaucgcccccagaggcuacuucaagaucagaagcggcaagagcagcaucaugagaagcgacgcccccaucggcaagugcaacagcgagugcaucacccccaacggcagcauccccaacgacaagcccuuccagaacgugaacagaaucaccuacggcgccugccccagauacgugaagcagaacacccugaagcuggccaccggcaugagaaacgugcccgagaagcagaccagaggcaucuucggcgccaucgccggcuucaucgagaacggcugggagggcaugguggacggcugguacggcuucagacaccagaacagcgagggcagaggccaggccgccgaccugaagagcacccaggccgccaucgaccagaucaacggcaagcugaacagacugaucggcaagaccaacgagaaguuccaccagaucgagaaggaguucagcgagguggagggcagaauccaggaccuggagaaguacguggaggacaccaagaucgaccuguggagcuacaacgccgagcugcugguggcccuggagaaccagcacaccaucgaccugaccgacagcgagaugaacaagcuguucgagaagaccaagaagcagcugagagagaacgccgaggacaugggcaacggcugcuucaagaucuaccacaagugcgacaacgccugcaucggcagcaucagaaacggcaccuacgaccacgacguguacagagacgaggcccugaacaacagauuccagaucaagggcguggagcugaagagcggcuacaaggacuggauccuguggaucagcuucgccaucagcugcuuccugcugugcguggcccugcugggcuucaucaugugggccugccagaagggcaacaucagaugcaacaucugcaucuga

SEQ ID NO: 168951 - RNA, 1698 nt, Artificial Sequence
  derived and/or modified CDS sequence (opt4) from hemagglutinin__InfluenzaA__AFJ78309
augaaggccaagcugcuggugcugcugugcaccuucaccgccaccuacgccgacaccaucugcaucggcuaccacgccaacaacagcaccgacaccguggacaccgugcuggagaagaacgugaccgugacccacagcgugaaccugcuggaggacagccacaacggcaagcugugccugcugaagggcaucgccccccugcagcugggcaacugcagcguggccggcuggauccugggcaaccccgagugcgagagccugaucagcaaggagagcuggagcuacaucguggagacccccaaccccgagaacggcaccugcuaccccggcuacuucgccgacuacgaggagcugagagagcagcugagcagcgugagcagcuucgagagauucgagaucuuccccaaggagagcagcuggcccaaccacaccgugaccggcgugagcgccagcugcagccacaacggcaagagcagcuucuacagaaaccugcuguggcugaccgagaagaacggccuguaccccaaccugagcaagagcuacgugaacaacaaggagaaggaggugcuggugcuguggggcgugcaccaccccagcaacaucggcgaccagagagccaucuaccacaccgagaacgccuacgugagcguggugagcagccacuacagcagaagauucacccccgagaucgccaagagacccaaggugagagaccaggagggcagaaucaacuacuacuggacccugcuggagcccggcgacaccaucaucuucgaggccaacggcaaccugaucgcccccugguacgccuucgcccugagcagaggcuucggcagcggcaucaucaccagcaacgcccccauggacgagugcgacgccaagugccagaccccccagggcgccaucaacagcagccugcccuuccagaacgugcaccccaucaccaucggcgagugccccaaguacgugagaagcgccaagcugagaauggugaccggccugagaaacauccccagcauccagagcagaggccuguucggcgccaucgccggcuucaucgagggcggcuggaccggcaugaucgacggcugguacggcuaccaccaccagaacgagcagggcagcggcuacgccgccgaccagaagagcacccagaacgccaucaacggcaucaccaacaaggugaacagcgugaucgagaagaugaacacccaguucaccgccgugggcaaggaguucaacaagcuggagagaagaauggagaaccugaacaagaagguggacgacggcuuccuggacaucuggaccuacaacgccgagcugcuggugcugcuggagaacgagagaacccuggacuuccacgacagcaacgugaagaaccuguacgagaaggugaagagccagcugaagaacaacgccaaggagaucggcaacggcugcuucgaguucuaccacaagugcaacaacgagugcauggagagcgugaagaacggcaccuacgacuaccccaaguacagcgaggagagcaagcugaacagagagaagaucgacggcgugaagcuggagagcaugggcguguaccagauccuggccaucuacagcaccguggccagcagccuggugcugcuggugagccugggcgccaucagcuucuggaugugcagcaacggcagccugcagugcagaaucugcaucuga

SEQ ID NO: 168952 - RNA, 1701 nt, Artificial Sequence
  derived and/or modified CDS sequence (opt4) from hemagglutinin__InfluenzaA__AFJ78320
augaagaccaucaucgcccugagcuacauccugugccugguguucgcccagaagcugcccggcaacgacaacagcaccgccacccugugccugggccaccacgccgugcccaacggcacccuggugaagaccaucaccaacgaccagaucgaggugaccaacgccaccgagcuggugcagagcagcagcaccggcagaaucugcgacagcccccaccagauccuggacggcgagaacugcacccugaucgacgcccugcugggcgacccccacugcgacggcuuccagaacaaggagugggaccuguucguggagagaagcaaggccuacagcaacugcuaccccuacgacgugcccgacuacgccagccugagaagccugguggccagcagcggcacccuggaguucaacaacgagagcuucaacuggaccggcguggcccagaacggcaccagcagcgccugcaagagaagaagcaacaagagcuucuucagcagacugaacuggcugcaccagcugaaguacaaguaccccgcccugaacgugaccaugcccaacaacgagaaguucgacaagcuguacaucuggggcgugcaccaccccagcaccgacagcgaccagaucagccuguacgcccaggccagcggcagagugaccgugagcaccaagagaagccagcagaccgugauccccaacaucggcagcagacccugggugagaggcgugagcagcagaaucagcaucuacuggaccaucgugaagcccggcgacauccugcugaucaacagcaccggcaaccugaucgcccccagaggcuacuucaagaucagaagcggcaagagcagcaucaugagaagcgacgcccccaucggcaagugcaacagcgagugcaucacccccaacggcagcauccccaacgacaagcccuuccagaacgugaacagaaucaccuacggcgccugccccagauacgugaagcagaacacccugaagcuggccaccggcaugagaaacgugcccgagaagcagaccagaggcaucuucggcgccaucgccggcuucaucgagaacggcugggagggcaugguggacggcugguacggcuucagacaccagaacagcgagggcaccggccaggccgccgaccugaagagcacccaggccgccaucaaccagaucaacggcaagcugaacagacugaucggcaagaccaacgagaaguuccaccagaucgagaaggaguucagcgagguggagggcagaauccaggaccuggagaaguacguggaggacaccaagaucgaccuguggagcuacaacgccgagcugcugguggcccuggagaaccagcacaccaucgaccugaccgacagcgagaugaacaagcuguucgagagaaccaagaagcagcugagagagaacgccgaggacaugggcaacggcugcuucaagaucuaccacaagugcgacaacgccugcaucggcagcaucagaaacggcaccuacgaccacgacguguacagagacgaggcccugaacaacagauuccagaucaagggcguggagcugaagagcggcuacaaggacuggauccuguggaucagcuucgccaucagcugcuuccugcugugcguggugcugcugggcuucaucaugugggccugccagaagggcaacaucagaugcaacaucugcaucuga

SEQ ID NO: 168953 - RNA, 1698 nt, Artificial Sequence
  derived and/or modified CDS sequence (opt4) from hemagglutinin__InfluenzaA__AFJ78331
augaaggccaagcugcuggugcugcugugcaccuucaccgccaccuacgccgacaccaucugcaucggcuaccacgccaacaacagcaccgacaccguggacaccgugcuggagaagaacgugaccgugacccacagcgugaaccugcuggaggacagccacaacggcaagcugugccugcugaagggcaucgccccccugcagcugggcaacugcagcguggccggcuggauccugggcaaccccgagugcgagcugcugaucagcaaggagagcuggagcuacaucguggagacccccaaccccgagaacggcaccugcuaccccggcuacuucgccgacuacgaggagcugagagagcagcugagcagcgugagcagcuucgagagauucgagaucuuccccaaggagagcagcuggcccaaccacaccgugaccggcgugagcgccagcugcagccacaacggcaagagcagcuucuacagaaaccugcuguggcugaccggcaagaacggccuguaccccaaccugagcaagagcuacgugaacaacaaggagaaggaggugcuggugcuguggggcgugcaccacccccccaacaucggcgaccagagagcccuguaccacaccgagaacgccuacgugagcguggugagcagccacuacagcagaagauucacccccgagaucgccaagagacccaaggugagagaccaggagggcagaaucaacuacuacuggacccugcuggagcccggcgacaccaucaucuucgaggccaacggcaaccugaucgcccccugguacgccuucgcccugagcagaggcuucggcagcggcaucaucaccagcaacgcccccauggacgagugcgacgccaagugccagaccccccagggcgccaucaacagcagccugcccuuccagaacgugcaccccgugaccaucggcgagugccccaaguacgugagaagcgccaagcugagaauggugaccggccugagaaacauccccagcauccagagcagaggccuguucggcgccaucgccggcuucaucgagggcggcuggaccggcaugguggacggcugguacggcuaccaccaccagaacgagcagggcagcggcuacgccgccgaccagaagagcacccagaacgccaucaacggcaucaccaacaaggugaacagcgugaucgagaagaugaacacccaguucaccgccgugggcaaggaguucaacaagcuggagagaagaauggagaaccugaacaagaagguggacgacggcuuccuggacaucuggaccuacaacgccgagcugcuggugcugcuggagaacgagagaacccuggacuuccacgacagcaacgugaagaaccuguacgagaaggugaagagccagcugaagaacaacgccaaggagaucggcaacggcugcuucgaguucuaccacaagugcaacaacgagugcauggagagcgugaagaacggcaccuacgacuaccccaaguacagcgaggagagcaagcugaacagagagaagaucgacggcgugaagcuggagagcaugggcguguaccagauccuggccaucuacagcaccguggccagcagccuggugcugcuggugagccugggcgccaucagcuucuggaugugcagcaacggcagccugcagugcagaaucugcaucuga

SEQ ID NO: 168954 - RNA, 1698 nt, Artificial Sequence; identical to SEQ ID NO: 168953
  derived and/or modified CDS sequence (opt4) from hemagglutinin__InfluenzaA__AFJ78342

SEQ ID NO: 168955 - RNA, 1698 nt, Artificial Sequence; identical to SEQ ID NO: 168953
  derived and/or modified CDS sequence (opt4) from hemagglutinin__InfluenzaA__AFJ78353

SEQ ID NO: 168956 - RNA, 1698 nt, Artificial Sequence
  derived and/or modified CDS sequence (opt4) from hemagglutinin__InfluenzaA__AFJ78364
augaaggccaagcugcuggugcugcugugcaccuucaccgccaccuacgccgacaccaucugcaucggcuaccacgccaacaacagcaccgacaccguggacaccgugcuggagaagaacgugaccgugacccacagcgugaaccugcuggaggacagccacaacggcaagcugugccugcugaagggcaucgccccccugcagcugggcaacugcagcguggccggcuggauccugggcaaccccgagugcgagagccugaucagcaaggagagcuggagcuacaucguggagacccccaaccccgagaacggcaccugcuaccccggcuacuucgccgacuacgaggagcugagagagcagcugagcagcgugagcagcuucgagagauucgagaucuuccccaaggagagcagcuggcccaaccacaccgugaccggcgugagcgccagcugcagccacaacggcaagagcagcuucuacagaaaccugcuguggcugaccgagaagaacggccuguaccccaaccugagcaagagcuacgugaacaacaaggagaaggaggugcuggugcuguggggcgugcaccaccccagcaacaucggcgaccagagagccaucuaccacaccgagaacgccuacgugagcguggugagcagccacuacaacagaagauucacccccgagaucgccaagagacccaaggugagaaaccaggagggcagaaucaacuacuacuggacccugcuggagcccggcgacaccaucaucuucgaggccaacggcaaccugaucgcccccugguacgccuucgcccugagcagaggcuucggcagcggcaucaucaccagcaacgcccccauggacgagugcgacgccaagugccagaccccccagggcgccaucaacagcagccugcccuuccagaacgugcaccccaucaccaucggcgagugccccaaguacgugagaagcgccaagcugagaauggugaccggccugagaaacauccccagcauccagagcagaggccuguucggcgccaucgccggcuucaucgagggcggcuggaccggcaugaucgacggcugguacggcuaccaccaccagaacgagcagggcagcggcuacgccgccgaccagaagagcacccagaacgccaucaacggcaucaccaacaaggugaacagcgugaucgagaagaugaacacccaguucaccgccgugggcaaggaguucaacaagcuggagagaagaauggagaaccugaacaagaagguggacgacggcuuccuggacaucuggaccuacaacgccgagcugcuggugcugcuggagaacgagagaacccuggacuuccacgacagcaacgugaagaaccuguacgagaaggugaagagccagcugaagaacaacgccaaggagaucggcaacggcugcuucgaguucuaccacaagugcaacaacgagugcauggagagcgugaagaacggcaccuacgacuaccccaaguacagcgaggagagcaagcugaacagagagaagaucgacggcgugaagcuggagagcaugggcguguaccagauccuggccaucuacagcaccguggccagcagccuggugcugcuggugagccugggcgccaucagcuucuggaugugcagcaacggcagccugcagugcagaaucugcaucuga

SEQ ID NO: 168957 - RNA, 1698 nt, Artificial Sequence
  derived and/or modified CDS sequence (opt4) from hemagglutinin__InfluenzaA__AFJ78375
augaaggccaagcugcuggugcugcugugcaccuucaccgccaccuacgccgacaccaucugcaucggcuaccacgccaacaacagcaccgacaccguggacaccgugcuggagaagaacgugaccgugacccacagcaucaaccugcuggagaacagccacaacggcaagcugugccugcugaagggcaucgccccccugcagcugggcaacugcagcguggccggcuggauccugggcaaccccgagugcgagcugcugaucagcaaggagagcuggagcuacaucguggagacccccaaccccgagaacggcaccugcuaccccggccacuucgccgacuacgaggagcugagagagcagcugagcagcgugagcagcuucgagagauucgagaucuuccccaaggagagcagcuggcccaaccacaccgugaccggcgugagcgccagcugcagccacaacggcaagagcagcuucuacagaaaccugcuguggcugaccgagaagaacggccuguaccccaaccugagcaagagcuacgugaacaacaaggagaaggaggugcuggugcuguggggcgugcaccaccccagcaacaucggcgaccagagagccaucuaccacaccgagaacgccuacgugagcguggugagcagccacuacagcagaagauucacccccgagaucgugaagagacccaaggugagagaccaggagggcagaaucaacuacuacuggacccugcuggagcccggcgacaccaucaucuucgaggccaacggcaaccugaucgcccccugguacgccuucgcccugagcagaggcuucggcagcggcaucaucaccagcaacgcccccauggacgagugcgacgccaagugccagaccccccagggcgccaucaacagcagccugcccuuccagaacgugcaccccgugaccaucggcgagugccccaaguacgugagaagcgccaagcugagaauggugaccggccugagaaacauccccagcauccagagcagaggccuguucggcgccaucgccggcuucaucgagggcggcuggaccggcaugaucgacggcugguacggcuaccaccaccagaacgagcagggcagcggcuacgccgccgaccagaagagcacccagaacgccaucaacggcaucaccaacaaggugaacagcaucaucgagaagaugaacacccaguucaccgccgugggcaaggaguucaacaagcuggagagaagaauggagaaccugaacaagaagguggacgacggcuuccuggacaucuggaccuacaacgccgagcugcuggugcugcuggagaacgagagaacccuggacuuccacgacagcaacgugaagaaccuguacgagaaggugaagagccagcugaagaacaacgccaaggagaucggcaacggcugcuucgaguucuaccacaagugcaacaacgagugcauggagagcgugaagaacggcaccuacgacuaccccaaguacagcgaggagagcaagcugaacagagagaagaucgacggcgugaagcuggagagcaugggcguguaccagauccuggccaucuacagcaccguggccagcagccuggugcugcuggugagccugggcgccaucagcuucuggaugugcagcaacggcagccugcagugcagaaucugcaucuga

SEQ ID NO: 168958 - RNA, 1698 nt, Artificial Sequence; identical to SEQ ID NO: 161445
  derived and/or modified CDS sequence (opt4) from hemagglutinin__InfluenzaA__AFJ78386

SEQ ID NO: 168959 - RNA, 1698 nt, Artificial Sequence; identical to SEQ ID NO: 161445
  derived and/or modified CDS sequence (opt4) from hemagglutinin__InfluenzaA__AFJ78397

SEQ ID NO: 168960 - RNA, 1698 nt, Artificial Sequence; identical to SEQ ID NO: 168137
  derived and/or modified CDS sequence (opt4) from hemagglutinin__InfluenzaA__AFJ78408

SEQ ID NO: 168961 - RNA, 1698 nt, Artificial Sequence
  derived and/or modified CDS sequence (opt4) from hemagglutinin__InfluenzaA__AFJ78419
augaaggugaagcugcuggugcugcugugcaccuucaccgccaccuacgccgacaccaucugcaucggcuaccacgccaacaacagcaccgacaccguggacaccgugcuggagaagaacgugaccgugacccacagcgugaaccugcuggaggacagccacaacggcaagcugugccugcugaagggcaucgccccccugcagcugggcaacugcagcguggccggcuggauccugggcaaccccgagugcgagcugcugaucagcaaggagagcuggagcuacaucguggagaagcccaaccccgagaacggcaccugcuaccccggcuacuucgccgacuacgaggagcugagagagcagcugagcagcgugagcagcuucgagagauucgagaucuuccccaaggagagcagcuggcccaaccacaccgugaccggcgugagcgccagcugcagccacaacggcaagagcagcuucuacaagaaccugcuguggcugaccggcaagaacggccuguaccccaaccugagcaagagcuacgccaacaacaaggagaaggaggugcuggugcuguggggcgugcaccacccccccaacaucggcgaccagagagcccuguaccacaccgagaacgccuacgugagcguggugagcagccacuacagcagaaaguucacccccgagaucgccaagagacccaaggugagagaccaggagggcagaaucaacuacuacuggacccugcuggagcccggcgacaccgugaucuucgaggccaacggcaaccugaucgcccccagauacgccuucgcccugagcagaggcuucggcagcggcaucaucaacagcaacgcccccauggacgagugcgacgccaagugccagaccccccagggcgccaucaacagcagccugcccuuccagaacgugcaccccgugaccaucggcgagugccccaaguacgugagaagcgccaagcugagaauggugaccggccugagaaacauccccagcauccagagcagaggccuguucggcgccaucgccggcuucaucgagggcggcuggaccggcaugguggacggcugguacggcuaccaccaccagaacgagcagggcagcggcuacgccgccgaccagaagagcacccagaacgccaucaacggcaucaccaacaaggugaacagcgugaucgagaagaugaacacccaguucaccgccgugggcaaggaguucaacaagcuggagagaagaauggagaaccugaacaagaagguggacgacggcuucaucgacaucuggaccuacaacgccgagcugcuggugcugcuggagaacgagagaacccuggacuuccacgacagcaacgugaagaaccuguacgagaaggugaagagccagcugaagaacaacgccaaggagaucggcaacggcugcuucgaguucuaccacaagugcaacgacgagugcauggagagcgugaagaacggcaccuacgacuaccccaaguacagcgaggagagcaagcugaacagagagaagaucgacggcgugaagcuggagagcaugggcguguaccagauccuggccaucuacagcaccguggccagcagccuggugcugcuggugagccugggcgccaucagcuucuggaugugcagcaacggcagccugcagugcagaaucugcaucuga

SEQ ID NO: 168962 - RNA, 1698 nt, Artificial Sequence
  derived and/or modified CDS sequence (opt4) from hemagglutinin__InfluenzaA__AFJ78430
augaaggugaagcugcuggugcugcugugcaccuucaccgccaccuacgccgacaccaucugcaucggcuaccacgccaacaacagcaccgacaccguggacaccgugcuggagaagaacgugaccgugacccacagcgugaaccugcuggaggacagccacaacggcaagcugugccugcugaagggcaucgccccccugcagcugggcaacugcagcguggccggcuggauccugggcaaccccgagugcgagcugcugaucagcagagagagcuggagcuacaucguggagaaccccaaccccgagaacggcaccugcuaccccggccacuucgccgacuacgaggagcugagagagcagcugagcagcgugagcagcuucgagagauucgagaucuuccccaaggagagcagcuggcccaaccacaccgugaccggcgugagcgccagcugcagccacaacggcaagagcagcuucuacaagaaccugcuguggcugaccggcaagaacggccuguaccccaaccugagcaagagcuacgccaacaacaaggagaaggaggugcuggugcuguggggcgugcaccacccccccaacaucggcgaccagagagcccuguaccacaccgagaacgccuacgugagcguggugagcagccacuacagcagaaaguucacccccgagaucgccaagagacccaaggugagagaccaggagggcagaaucaacuacuacuggacccugcugggccccggcgacaccaucaucuucgaggccaacggcaaccugaucgcccccagauacgccuucgcccugagcagaggcuucggcagcggcaucaucaacagcaacgcccccauggacgagugcgacgccaagugccagaccccccagggcgccaucaacagcagccugcccuuccagaacgugcaccccgugaccaucggcgagugccccaaguacgugagaagcgccaagcugagaauggugaccggccugagaaacauccccagcauccagagcagaggccuguucggcgccaucgccggcuucaucgagggcggcuggaccggcaugguggacggcugguacggcuaccaccaccagaacgagcagggcagcggcuacgccgccgaccagaagagcacccagaacgccaucaacggcaucaccaacaaggugaacagcgugaucgagaagaugaacacccaguucaccgccgugggcaaggaguucaacaagcuggagagaagaauggagaaccugaacaagaagguggacgacggcuucaucgacaucuggaccuacaacgccgagcugcuggugcugcuggagaacgagagaacccuggacuuccacgacagcaacgugaagaaccuguacgagaaggugaagagccagcugaagaacaacgccaaggagaucggcaacggcugcuucgaguucuaccacaagugcaacgacgagugcauggagagcgugaagaacggcaccuacgacuaccccaaguacagcgaggagagcaagcugaacagagagaagaucgacggcgugaagcuggagagcaugggcguguaccagauccuggccaucuacagcaccguggccagcagccuggugcugcuggugagccugggcgccaucagcuucuggaugugcagcaacggcagccugcagugcagaaucugcaucuga

SEQ ID NO: 168963 - RNA, 1698 nt, Artificial Sequence
  derived and/or modified CDS sequence (opt4) from hemagglutinin__InfluenzaA__AFJ78441
augaaggugaagcugauggugcugcugugcaccuucaccgccaccuacgccgacaccaucugcaucggcuaccacgccaacaacagcaccgacaccguggacaccgugcuggagaagaacgugaccgugacccacagcgugaaccugcuggaggacagccacaacggcaagcugugccugcugaagggcaucgccccccugcagcugggcaacugcagcguggccggcuggauccugggcaaccccgagugcgagcugcugaucagcagagagagcuggagcuacaucguggagaagcccaaccccgagaacggcaccugcuaccccggccacuucgccgacuacgaggagcugagagagcagcugagcagcgugagcagcuucgagagauucgagaucuuccccaaggagagcagcuggcccaaccacaccgugaccggcgugagcgccagcugcagccacaacggcaagagcagcuucuacaagaaccugcuguggcugaccggcaagaacggccuguaccccaaccugagcaagagcuacgccaacaacaaggagaaggaggugcuggugcuguggggcgugcaccacccccccaacaucggcgaccagaaggcccuguaccacaccgagaacgccuacgugagcguggugagcagccacuacagcagaaaguucacccccgagaucgccaagagacccaaggugagagaccaggagggcagaaucaacuacuacuggacccugcuggagcccggcgacaccaucaucuucgaggccaacggcaaccugaucgcccccagauacgccuucgcccugagcagaggcuucggcagcggcaucaucaacagcaacgcccccauggacgagugcgacgccaagugccagaccccccagggcgccaucaacagcagccugcccuuccagaacgugcaccccgugaccaucggcgagugccccaaguacgugagaagcgccaagcugagaauggugaccggccugagaaacauccccagcauccagagcagaggccuguucggcgccaucgccggcuucaucgagggcggcuggaccggcaugguggacggcugguacggcuaccaccaccagaacgagcagggcagcggcuacgccgccgaccagaagagcacccagaacgccaucaacggcaucaccaacaaggugaacagcgugaucgagaagaugaacacccaguucaccgccguggacaaggaguucaacaagcuggagagaagaauggagaaccugaacaagaagguggacgacggcuucaucgacaucuggaccuacaacgccgagcugcuggugcugcuggagaacgagagaacccuggacuuccacgacagcaacgugaagaaccuguacgagaaggugaagagccagcugaagaacaacgccaaggagaucggcaacggcugcuucgaguucuaccacaagugcaacgacgagugcauggagagcgugaagaacggcaccuacgacuaccccaaguacagcgaggagagcaagcugaacagagagaagaucgacggcgugaagcuggagagcaugggcguguaccagauccuggccaucuacagcaccguggccagcagccuggugcugcuggugagccugggcgccaucagcuucuggaugugcagcaacggcagccugcagugcagaaucugcaucuga

SEQ ID NO: 168964 - RNA, 1698 nt, Artificial Sequence
  derived and/or modified CDS sequence (opt4) from hemagglutinin__InfluenzaA__AFJ78452
augaaggugaagcugcuggugcugcugugcaccuucaccgccaccuacgccgacaccaucugcaucggcuaccacgccaacaacagcaccgacaccguggacaccgugcuggagaagaacgugaccgugacccacagcgugaaccugcuggaggacagccacaacggcaagcugugccugcugaagggcaucgccccccugcagcugggcaacugcagcguggccggcuggauccugggcaaccccgagugcgagcugcugaucagcaaggagagcuggagcuacaucguggagaagcccaaccccgagaacggcaccugcuaccccggccacuucgccgacuacgaggagcugagagagcagcugagcagcgugagcagcuucgagagauucgagaucuuccccaaggagagcagcuggcccaaccacaccgugaccggcgugagcgccagcugcagccacaacggcaagagcagcuucuacaagaaccugcuguggcugaccggcaagaacggccuguaccccaaccugagcaagagcuacgccaacaacaaggagaaggaggugcuggugcuguggggcgugcaccacccccccaacaucggcgaccagaaggcccuguaccacaccgagaacgccuacgugagcguggugagcagccacuacagcagaaaguucauccccgagaucgccaagagacccaaggugagagaccaggagggcagaaucaacuacuacuggacccugcuggagcccggcgacaccaucaucuucgaggccaacggcaaccugaucgcccccagauacgccuucgcccugagcagaggcuucggcagcggcaucaucaacagcaacgcccccauggacgagugcgacgccaagugccagaccccccagggcgccaucaacagcagccugcccuuccagaacgugcaccccgugaccaucggcgagugccccaaguacgugagaagcgccaagcugagaauggugaccggccugagaaacauccccagcauccagagcagaggccuguucggcgccaucgccggcuucaucgagggcggcuggaccggcaugguggacggcugguacggcuaccaccaccagaacgagcagggcagcggcuacgccgccgaccagaagagcacccagaacgccaucaacggcaucaccaacaaggugaacagcgugaucgagaagaugaacacccaguucaccgccgugggcaaggaguucaacaagcuggagagaagaauggagaaccugaacaagaagguggacgacggcuucaucgacaucuggaccuacaacgccgagcugcuggugcugcuggagaacgagagaacccuggacuuccacgacagcaacgugaagaaccuguacgagaaggugaagagccagcugaagaacaacgccaaggagaucggcaacggcugcuucgaguucuaccacaagugcaacgacgagugcauggagagcgugaagaacggcaccuacgacuaccccaaguacagcgaggagagcaagcugaacagagagaagaucgacggcgugaagcuggagagcaugggcguguaccagauccuggccaucuacagcaccguggccagcagccuggugcugcuggugagccugggcgccaucagcuucuggaugugcagcaacggcagccugcagugcagaaucugcaucuga

SEQ ID NO: 168965 - RNA, 1698 nt, Artificial Sequence
  derived and/or modified CDS sequence (opt4) from hemagglutinin__InfluenzaA__AFJ78463
augaaggugaagcugcuggugcugcugugcaccuucaccgccaccuacgccgacaccaucugcaucggcuaccacgccaacaacagcaccgacaccguggacaccgugcuggagaagaacgugaccgugacccacagcgugaaccugcuggaggacagccacaacggcaagcugugccugcugaagggcaucgccccccugcagcugggcaacugcagcguggccggcuggauccugggcaaccccgagugcgagcugcugaucagcaaggagagcuggagcuacaucguggagaagcccaaccccgagaacggcaccugcuaccccggccacuucgccgacuacgaggagcugagagagcagcugagcagcgugagcagcuucgagagauucgagaucuuccccaaggagagcagcuggcccaaccacaccgugaccggcgugagcgccagcugcagccacaacggcaagagcagcuucuacaagaaccugcuguggcugaccggcaagaacggccuguaccccaaccugggcaagagcuacgccaacaacaaggagaaggaggugcuggugcuguggggcgugcaccacccccccaacaucggcgaccagaaggcccuguaccacaccgagaacgccuacgugagcguggugagcagccacuacagcagaaaguucauccccgagaucgccaagagacccaaggugagagaccaggagggcagaaucaacuacuacuggacccugcuggagcccggcgacaccaucaucuucgaggccaacggcaaccugaucgcccccagauacgccuucgcccugagcagaggcuucggcagcggcaucaucaacagcaacgcccccauggacgagugcgacgccaagugccagaccccccagggcgccaucaacagcagccugcccuuccagaacgugcaccccgugaccaucggcgagugccccaaguacgugagaagcgccaagcugagaauggugaccggccugagaaacauccccagcauccagagcagaggccuguucggcgccaucgccggcuucaucgagggcggcuggaccggcaugguggacggcugguacggcuaccaccaccagaacgagcagggcagcggcuacgccgccgaccagaagagcacccagaacgccaucaacggcaucaccaacaaggugaacagcgugaucgagaagaugaacacccaguucaccgccgugggcaaggaguucaacaagcuggagagaagaauggagaaccugaacaagaagguggacgacggcuucaucgacaucuggaccuacaacgccgagcugcuggugcugcuggagaacgagagaacccuggacuuccacgacagcaacgugaagaaccuguacgagaaggugaagagccagcugaagaacaacgccaaggagaucggcaacggcugcuucgaguucuaccacaagugcaacgacgagugcauggagagcgugaagaacggcaccuacgacuaccccaaguacagcgaggagagcaagcugaacagagagaagaucgacggcgugaagcuggagagcaugggcguguaccagauccuggccaucuacagcaccguggccagcagccuggugcugcuggugagccugggcgccaucagcuucuggaugugcagcaacggcagccugcagugcagaaucugcaucuga

SEQ ID NO: 168966 - RNA, 1698 nt, Artificial Sequence
  derived and/or modified CDS sequence (opt4) from hemagglutinin__InfluenzaA__AFJ78474
augaaggugaagcugcuggugcugcugugcaccuucaccgccaccuacgccgacaccaucugcaucggcuaccacgccaacaacagcaccgacaccguggacaccgugcuggagaagaacgugaccgugacccacagcgugaaccugcuggaggacagccacaacggcaagcugugccugcugaagggcaucgccccccugcagcugggcaacugcagcguggccggcuggauccugggcaaccccgagugcgagcugcugaucagcagagagagcuggagcuacaucguggagaagcccaaccccgagaacggcaccugcuaccccggccacuucgccgacuacgaggagcugagagagcagcugagcagcgugagcagcuucgagagauucgagaucuuccccaaggagagcagcuggcccaaccacaccgugaccggcgugagcgccagcugcagcuacaacggcaagagcagcuucuacaagaaccugcuguggcugaccggcaagaacggccuguaccccaaccugagcaagagcuacgccaacaacaaggagaaggaggugcuggugcuguggggcgugcaccacccccccaacaucggcgaccagagagcccuguaccacaccgagaacgccuacgugagcguggugagcagccacuacagcagaaaguucacccccgagaucgccaagagacccaaggugagagaccaggagggcagaaucaacuacuacuggacccugcuggagcccggcgacaccaucaucuucgaggccaacggcaaccugaucgcccccagauacgccuucgcccugagcagaggcuucggcagcggcaucaucaacagcaacgcccccauggacgagugcgacgccaagugccagaccccccagggcgccaucaacagcagccugcccuuccagaacgugcaccccgugaccaucggcgagugccccaaguacgugagaagcgccaagcugagaauggugaccggccugagaaacauccccagcauccagagcagaggccuguucggcgccaucgccggcuucaucgagggcggcuggaccggcaugguggacggcugguacggcuaccaccaccagaacgagcagggcagcggcuacgccgccgaccagaagagcacccagaacgccaucaacggcaucaccaacaaggugaacagcgugaucgagaagaugaacacccaguucaccgccgugggcaaggaguucaacaagcuggagagaagaauggagaaccugaacaagaagguggacgacggcuucaucgacaucuggaccuacaacgccgagcugcuggugcugcuggagaacgagagaacccuggacuuccacgacagcaacgugaagaaccuguacgagaaggugaagagccagcugaagaacaacgccaaggagaucggcaacggcugcuucgaguucuaccacaagugcaacgacgagugcauggagagcgugaagaacggcaccuacgacuaccccaaguacagcgaggagagcaagcugaacagagagaagaucgacggcgugaagcuggagagcaugggcguguaccagauccuggccaucuacagcaccguggccagcagccuggugcugcuggugagccugggcgccaucagcuucuggaugugcagcaacggcagccugcagugcagaaucugcaucuga

SEQ ID NO: 168967 - RNA, 1698 nt, Artificial Sequence
  derived and/or modified CDS sequence (opt4) from hemagglutinin__InfluenzaA__AFJ78485
augaaggugaagcugcuggugcugcugugcaccuucaccgccaccuacgccgacaccaucugcaucggcuaccacgccaacaacagcaccgacaccguggacaccgugcuggagaagaacgugaccgugacccacagcgugaaccugcuggaggacagccacaacggcaagcugugccugcugaagggcaucgccccccugcagcugggcaacugcagcguggccggcuggauccugggcaaccccgagugcgagcugcugaucagcagagagagcuggagcuacaucguggagaagcccaaccccgagaacggcaccugcuaccccggccacuucgccgacuacgaggagcugagagagcagcugagcagcgugagcagcuucgagagauucgagaucuuccccaaggagagcagcuggcccaaccacaccaccaccggcgugagcgccagcugcagccacaacggcgagagcagcuucuacaagaaccugcuguggcugaccggcaagaacggccuguaccccaaccugagcaagagcuacgccaacaacaaggagaaggaggugcuggugcuguggggcgugcaccacccccccaacaucggcgaccagagagcccuguaccacaccgagaacgccuacgugagcguggugagcagccacuacagcagaaaguucacccccgagaucgccaagagacccaaggugagagaccaggagggcagaaucaacuacuacuggacccugcuggagcccggcgacaccaucaucuucgaggccaacggcaaccugaucgcccccagauacgccuucgcccugagcagaggcuucggcagcggcaucaucaacagcaacgcccccauggacgagugcgacgccaagugccagaccccccagggcgccaucaacagcagccugcccuuccagaacgugcaccccgugaccaucggcgagugccccaaguacgugagaagcgccaagcugagaauggugaccggccugagaaacauccccagcauccagagcagaggccuguucggcgccaucgccggcuucaucgagggcggcuggaccggcaugguggacggcugguacggcuaccaccaccagaacgagcagggcagcggcuacgccgccgaccagaagagcacccagaacgccaucaacggcaucaccaacaaggugaacagcgugaucgagaagaugaacacccaguucaccgccgugggcaaggaguucaacaagcuggagagaagaauggagaaccugaacaagaagguggaggacggcuucaucgacaucuggaccuacaacgccgagcugcuggugcugcuggagaacgagagaacccuggacuuccacgacagcaacgugaagaaccuguacgagaaggugaagagccagcugaagaacaacgccaaggagaucggcaacggcugcuucgaguucuaccacaagugcaacgacgagugcauggagagcgugaagaacggcaccuacgacuaccccaaguacagcgaggagagcaagcugaacagagagaagaucgacggcgugaagcuggagagcaugggcguguaccagauccuggccaucuacagcaccguggccagcagccuggugcugcuggugagccugggcgccaucagcuucuggaugugcagcaacggcagccugcagugcagaaucugcaucuga

SEQ ID NO: 168968 - RNA, 1698 nt, Artificial Sequence
  derived and/or modified CDS sequence (opt4) from hemagglutinin__InfluenzaA__AFJ78496
augaaggugaagcugcuggugcugcugugcaccuucaccgccaccuacgccgacaccaucugcaucggcuaccacgccaacaacagcaccgacaccguggacaccgugcuggagaagaacgugaccgugacccacagcgugaaccugcuggaggacagccacaacggcaagcugugccugcugaagggcaucgccccccugcagcugggcaacugcagcguggccggcuggauccugggcaaccccgagugcgagcugcugaucagcagagagagcuggagcuacaucguggagaagcccaaccccgagaacggcaccugcuaccccggccacuucgccgacuacgaggagcugagagagcagcugagcagcgugagcagcuucgagagauucgagaucuuccccaaggagagcagcuggcccaaccacaccaccaccggcgugagcgccagcugcagccacaacggcgagagcagcuucuacaagaaccugcuguggcugaccggcaagaacggccuguaccccaaccugagcaagagcuacgccaacaacaaggagaaggaggugcuggugcuguggggcgugcaccacccccccaacaucggcggccagagagcccuguaccacaccgagaacgccuacgugagcguggugagcagccacuacagcagaaaguucacccccgagaucgccaagagacccaaggugagagaccaggagggcagaaucaacuacuacuggacccugcuggagcccggcgacaccaucaucuucgaggccaacggcaaccugaucgcccccagauacgccuucgcccugagcagaggcuucggcagcggcaucaucaacagcaacgcccccauggacgagugcgacgccaagugccagaccccccagggcgccaucaacagcagccugcccuuccagaacgugcaccccgugaccaucggcgagugccccaaguacgugagaagcgccaagcugagaauggugaccggccugagaaacauccccagcauccagagcagaggccuguucggcgccaucgccggcuucaucgagggcggcuggaccggcaugguggacggcugguacggcuaccaccaccagaacgagcagggcagcggcuacgccgccgaccagaagagcacccagaacgccaucaacggcaucaccaacaaggugaacagcgugaucgagaagaugaacacccaguucaccgccgugggcaaggaguucaacaagcuggagagaagaauggagaaccugaacaagaagguggacgacggcuucaucgacaucuggaccuacaacgccgagcugcuggugcugcuggagaacgagagaacccuggacuuccacgacagcaacgugaagaaccuguacgagaaggugaagagccagcugaagaacaacgccaaggagaucggcaacggcugcuucgaguucuaccacaagugcaacgacgagugcauggagagcgugaagaacggcaccuacgacuaccccaaguacagcgaggagagcaagcugaacagagagaagaucgacggcgugaagcuggagagcaugggcguguaccagauccuggccaucuacagcaccguggccagcagccuggugcugcuggugagccugggcgccaucagcuucuggaugugcagcaacggcagccugcagugcagaaucugcaucuga

SEQ ID NO: 168969 - RNA, 1698 nt, Artificial Sequence
  derived and/or modified CDS sequence (opt4) from hemagglutinin__InfluenzaA__AFJ78518
augaaggugaagcugcuggugcugcugugcaccuucaccgccaccuacgccgacaccaucugcaucggcuaccacgccaacaacagcaccgacaccguggacaccgugcuggagaagaacgugaccgugacccacagcgugaaccugcuggaggacagccacaacggcaagcugugccugcugaagggcaucgccccccugcagcugggcaacugcagcguggccggcuggauccugggcaaccccgagugcgagcugcugaucagcagagagagcuggagcuacaucguggagaagcccaaccccgagaacggcaccugcuaccccggccacuucgccgacuacgaggagcugagagagcagcugagcagcgugagcagcuucgagagauucgagaucuuccccaaggagagcagcuggcccaaccacaccaccaccggcgugagcgccagcugcagccacaacggcgagagcagcuucuacaagaaccugcuguggcugaccggcaagaacggccuguaccccaaccugagcaagagcuacgccaacaacaaggagaaggaggugcuggugcuguggggcgugcaccacccccccaacaucggcgaccagagagcccuguaccacaccgagaacgccuacgugagcguggugagcagccacuacagcagaaaguucacccccgagaucgccaagagacccaaggugagagaccaggagggcagaaucaacuacuacuggacccugcuggagcccggcgacaccaucaucuucgaggccaacggcaaccugaucgcccccagauacgccuucgcccugagcagaggcuucggcagcggcaucaucaacagcaacgcccccauggacgagugcgacgccaagugccagaccccccagggcgccaucaacagcagccugcccuuccagaacgugcaccccgugaccaucggcgagugccccaaguacgugagaagcgccaagcugagaauggugaccggccugagaaacauccccagcauccagagcagaggccuguucggcgccaucgccggcuucaucgagggcggcuggaccggcaugguggacggcugguacggcuaccaccaccagaacgagcagggcagcggcuacgccgccgaccagaagagcacccagaacgccaucaacggcaucaccaacaaggugaacagcgugaucgagaagaugaacacccaguucaccgccgugggcaaggaguucaacaagcuggagagaagaauggagaaccugaacaagaagguggacgacggcuucaucgacaucuggaccuacaacgccgagcugcuggugcugcuggagaacgagagaacccuggacuuccacgacagcaacgugaagaaccuguacgagaaggugaagagccagcugaagaacaacgccaaggagaucggcaacggcugcuucgaguucuaccacaagugcaacgacgagugcauggagagcgugaagaacggcaccuacgacuaccccaaguacagcgaggagagcaagcugaacagagagaagaucgacggcgugaagcuggagagcaugggcguguaccagauccuggccaucuacagcaccguggccagcagccuggugcugcuggugagccugggcgccaucagcuucuggaugugcagcaacggcagccugcagugcagaaucugcaucuga

SEQ ID NO: 168970 - RNA, 1698 nt, Artificial Sequence
  derived and/or modified CDS sequence (opt4) from hemagglutinin__InfluenzaA__AFJ78529
augaaggugaagcugcuggugcugcugugcaccuucaccgccaccuacgccgacaccaucugcaucggcuaccacgccaacaacagcaccgacaccguggacaccgugcuggagaagaacgugaccgugacccacagcgugaaccugcuggaggacaaccacaacggcaagcugugccugcugaagggcaucgccccccugcagcugggcaacugcagcguggccggcuggauccugggcaaccccgagugcgagcugcugaucagcaaggagagcuggagcuacaucguggagagacccaaccccgagaacggcaccugcuaccccggccacuucgccgacuacgaggagcugagagagcagcugagcagcgugagcagcuucgagagauucgagaucuuccccaaggagagcagcuggcccaaccacaccgugaccggcgugagcgccagcugcagccacaacggcgagagcagcuucuacaagaaccugcuguggcugaccggcaagaacggccuguaccccaaccugagcaagagcuacgccaacaacaaggagaaggaggugcuggugcuguggggcgugcaccacccccccaacaucggcgaccagaugacccuguaccacaaggagaacgccuacgugagcguggugagcagccacuacagcagaaaguucacccccgagaucgccaagagacccaaggugagagaccaggagggcagaaucaacuacuacuggacccugcuggagcccggcgacaccaucaucuucgaggccaacggcaaccugaucgcccccagauacgccuucgcccugagcagaggcuucggcagcggcaucaucaacagcaacgcccccauggacgagugcgacgccaagugccagaccccccagggcgccaucaacagcagccugcccuuccagaacgugcaccccgugaccaucggcgagugccccaaguacgugagaagcgccaagcugagaauggugaccggccugagaaacauccccagcauccagagcagaggccuguucggcgccaucgccggcuucaucgagggcggcuggaccggcaugguggacggcugguacggcuaccaccaccagaacgagcagggcagcggcuacgccgccgaccagaagagcacccagaacgccaucaacggcaucaccaacaaggugaacagcgugaucgagaagaugaacacccaguucaccgccgugggcaaggaguucaacaagcuggagagaagaauggagaaccugaacaagaagguggacgacggcuucaucgacguguggaccuacaacgccgagcugcuggugcugcuggagaacgagagaacccuggacuuccacgacagcaacgugaagaaccuguacgagaaggugaagaaccagcugaagaacaacgccaaggagaucggcaacggcugcuucgaguucuaccacaagugcaacgacgagugcauggagagcgugaagaacggcaccuacgacuaccccaaguacagcgaggagagcaagcugagcagagagaagaucgacggcgugaagcuggagagcaugggcguguaccagauccuggccaucuacagcaccguggccagcagccuggugcugcuggugagccugggcgccaucagcuucuggaugugcagcaacggcagccugcagugcagaaucugcaucuga

SEQ ID NO: 168971 - RNA, 1698 nt, Artificial Sequence; identical to SEQ ID NO: 168970
  derived and/or modified CDS sequence (opt4) from hemagglutinin__InfluenzaA__AFJ78540

SEQ ID NO: 168972 - RNA, 1698 nt, Artificial Sequence; identical to SEQ ID NO: 168970
  derived and/or modified CDS sequence (opt4) from hemagglutinin__InfluenzaA__AFJ78551

SEQ ID NO: 168973 - RNA, 1698 nt, Artificial Sequence
  derived and/or modified CDS sequence (opt4) from hemagglutinin__InfluenzaA__AFJ78562
augaaggugaagcugcuggugcugcugugcaccuucaccgccaccuacgccgacaccaucugcaucggcuaccacgccaacaacagcaccgacaccguggacaccgugcuggagaagaacgugaccgugacccacagcgugaaccugcuggaggacaaccacaacggcaagcugugccugcugaagggcaucgccccccugcagcugggcaacugcagcguggccggcuggauccugggcaaccccgagugcgagcugcugaucagcaaggagagcuggagcuacaucguggagagacccaaccccgagaacggcaccugcuaccccggccacuucgccgacuacgaggagcugagagagcagcugagcagcgugagcagcuucgagagauucgagaucuuccccaaggagagcagcuggcccaaccacaccgugaccggcgugagcgccagcugcagccacaacggcgagagcagcuucuacaagaaccugcuguggcugaccggcaagaacggccuguaccccacccugagcaagagcuacgccaacaacaaggagaaggaggugcuggugcuguggggcgugcaccacccccccaacaucggcgaccagaugacccuguaccacaaggagaacgccuacgugagcguggugagcagccacuacagcagaaaguucacccccgagaucgccaagagacugaaggugagagaccaggagggcagaaucaacuacuacuggacccugcuggagcccggcgacaccaucaucuucgaggccaacggcaaccugaucgcccccagauacgccuucgcccugagcagaggccugggcagcggcaucaucaacagcaacgcccccauggacgagugcgacgccaagugccagaccccccagggcgccaucaacagcagccugcccuuccagaacgugcaccccgugaccaucggcgagugccccaaguacgugagaagcgccaagcugagaauggugaccggccugagaaacauccccagcauccagagcagaggccuguucggcgccaucgccggcuucaucgagggcggcuggaccggcaugguggacggcugguacggcuaccaccaccagaacgagcagggcagcggcuacgccgccgaccagaagagcacccagaacgccaucaacggcaucaccaacaaggugaacagcgugaucgagaagaugaacacccaguucaccgccgugggcaaggaguucaacaagcuggagagaagaauggagaaccugaacaagaagguggacgacggcuucaucgacguguggaccuacaacgccgagcugcuggugcugcuggagaacgagagaacccuggacuuccacgacagcaacgugaagaaccuguacgagaaggugaagaaccagcugaagaacaacgccaaggagaucggcaacggcugcuucgaguucuaccacaagugcaacgacgagugcauggagagcgugaagaacggcaccuacgacuaccccaaguacagcgaggagagcaagcugagcagagagaagaucgacggcgugaagcuggagagcaugggcguguaccagauccuggccaucuacagcaccguggccagcagccuggugcugcuggugagccugggcgccaucagcuucuggaugugcagcaacggcagccugcagugcagaaucugcaucuga

SEQ ID NO: 168974 - RNA, 1698 nt, Artificial Sequence
  derived and/or modified CDS sequence (opt4) from hemagglutinin__InfluenzaA__AFJ78573
augaaggugaagcugcuggugcugcugugcaccuucaccgccaccuacgccgacaccaucugcaucggcuaccacgccaacaacagcaccgacaccguggacaccgugcuggagaagaacgugaccgugacccacagcgugaaccugcuggaggacaaccacaacggcaagcugugccugcugaagggcaucgccccccugcagcugggcaacugcagcguggccggcuggauccugggcaaccccgagugcgagcugcugaucagcaaggagagcuggagcuacaucguggagagacccaaccccgagaacggcaccugcuaccccggccacuucgccgacuacgaggagcugagagagcagcugagcagcgugagcagcuucgagagauucgagaucuuccccaaggagagcagcuggcccaaccacaccgugaccggcgugagcgccagcugcagccacaacggcgagagcagcuucuacaagaaccugcuguggcugaccggcaagaacggccuguaccccaaccugagcaagagcuacgccaacaacaaggagaaggaggugcuggugcuguggggcgugcaccacccccccaacaucggcgaccagaugacccuguaccacaaggagaacgccuacgugagcguggugagcagccacuacagcagaaaguucacccccgagaucgccaagagacccaaggugagagaccaggagggcagaaucaacuacuacuggacccugcuggagcccggcgacaccaucaucuucgaggccaacggcaaccugaucgcccccagauacgccuucgcccugagcagaggcuucggcagcggcaucaucaacagcaacgccagcauggacgagugcgacgccaagugccagaccccccagggcgccaucaacagcagccugcccuuccagaacgugcaccccgugaccaucggcgagugccccaaguacgugagaagcgccaagcugagaauggugaccggccugagaaacauccccagcauccagagcagaggccuguucggcgccaucgccggcuucaucgagggcggcuggaccggcaugguggacggcugguacggcuaccaccaccagaacgagcagggcagcggcuacgccgccgaccagaagagcacccagaacgccaucaacggcaucaccaacaaggugaacagcgugaucgagaagaugaacacccaguucaccgccgugggcaaggaguucaacaagcuggagagaagaauggagaaccugaacaagaagguggacgacggcuucaucgacguguggaccuacaacgccgagcugcuggugcugcuggagaacgagagaacccuggacuuccacgacagcaacgugaagaaccuguacgagaaggugaagaaccagcugaagaacaacgccaaggagaucggcaacggcugcuucgaguucuaccacaagugcaacgacgagugcauggagagcgugaagaacggcaccuacgacuaccccaaguacagcgaggaggccaagcugagcagagagaagaucgacggcgugaagcuggagagcaugggcguguaccagauccuggccaucuacagcaccguggccagcagccuggugcugcuggugagccugggcgccaucagcuucuggaugugcagcaacggcagccugcagugcagaaucugcaucuga

SEQ ID NO: 168975 - RNA, 1698 nt, Artificial Sequence
  derived and/or modified CDS sequence (opt4) from hemagglutinin__InfluenzaA__AFJ78584
augaaggugaagcugcuggugcugcugugcaccuucaccgccaccuacgccgacaccaucugcaucggcuaccacgccaacaacagcaccgacaccguggacaccgugcuggagaagaacgugaccgugacccacagcgugaaccugcuggagaacagccacaacggcaagcugugccugcugaagggcaucgccccccugcagcugggcaacugcagcguggccggcuggauccugggcaaccccgagugcgagcugcugaucagcaaggagagcuggagcuacaucguggagaagcccaaccccgagaacggcaccugcuaccccggccacuucgccgacuacgaggagcugagagagcagcugagcagcgugagcagcuucgagagauucgagaucuuccccaaggagagcagcuggcccaaccacaccgugaccggcgugagcgccagcugcagccacaacggcgagaacagcuucuacagaaaccugcuguggcugaccagaaagaacggccuguaccccaaccugagcaagagcuacgccaacaacaaggagaaggaggugcuggugcuguggggcgugcaccacccccccaacaucggcgaccagaaggcccuguaccacaccgagaacgccuacgugagcguggugagcagccacuacagcagaaaguucacccccgagaucgccaagagacccaaggugagagaccaggagggcagaaucaacuacuacuggacccugcuggagcccggcgacaccaucaucuucgaggccaacggcaaccugaucgcccccagauacgccuucgcccugagcagaggcuucggcagcggcaucaucaacagcaacgcccccauggacaagugcgacgccaagugccagaccccccagggcgccaucaacagcagccugcccuuccagaacgugcaccccguggccaucggcgagugccccaaguacgugagaagcgccaagcugagaauggugaccggccugagaaacauccccagcauccagagcagaggccuguucggcgccaucgccggcuucaucgagggcggcuggaccggcaugguggacggcugguacggcuaccaccaccagaacgagcagggcagcggcuacgccgccgaccagaagagcacccagaacgccaucaacggcaucaccaacaaggugaacagcgugaucgagaagaugaacacccaguucaccgccgugggcaaggaguucaacaagcuggagagaagaauggagaaccugaacaagaagguggacgacggcuucaucgacaucuggaccuacaacgccgagcugcuggugcugcuggagaacgagagaacccuggacuuccacgacagcaacgugaagaaccuguacgagaaggugaagagccagcugaagaacaacgccaaggagaucggcaacggcugcuucgaguucuaccacaagugcaacgacgagugcauggagagcgugaagaacggcaccuacgacuaccccaaguacagcgaggagagcaagcugaacagagagaagaucgacggcgugaagcuggagagcaugggcguguaccagauccuggccaucuacagcaccguggccagcagccuggugcugcuggugagccugggcgccaucagcuucuggaugugcagcaacggcagccugcagugcagaaucugcaucuga

SEQ ID NO: 168976 - RNA, 1698 nt, Artificial Sequence
  derived and/or modified CDS sequence (opt4) from hemagglutinin__InfluenzaA__AFJ78595
augaaggugaagcugcuggugcugcugugcaccuucaccgccaccuacgccgacaccaucugcaucggcuaccacgccaacaacagcaccgacaccguggacaccgugcuggagaagaacgugaccgugacccacagcgugaaccugcuggagaacagccacaacggcaagcugugccugcugaagggcaucgccccccugcagcugggcaacugcagcguggccggcuggauccugggcaaccccgagugcgagcugcugaucagcaaggagagcuggagcuacaucguggagaagcccaaccccgagaacggcaccugcuaccccggccacuucgccgacuacgaggagcugagagagcagcugagcagcgugagcagcuucgagagauucgagaucuuccccaaggagagcagcuggcccaaccacaccgugaccggcgugagcgccagcugcagccacaacggcgagagcagcuucuacagaaaccugcuguggcugaccggcaagaacggccuguaccccaaccugagcaagagcuacgccaacaacagagagaaggaggugcuggugcuguggggcgugcaccacccccccaacaucggcgaccagaaggcccuguaccacaccgagaacgccuacgugagcguggugagcagccacuacagcagaaaguucacccccgagaucgccaagagacccaaggugagagaccaggagggcagaaucaacuacuacuggacccugcuggagcccggcgacaccaucaucuucgaggccaacggcaaccugaucgcccccagauacgccuucgcccugagcagaggcuucggcagcggcaucaucaacagcaacgcccccauggacaagugcgacgccaagugccagaccccccagggcgccaucaacagcagccugcccuuccagaacgugcaccccgugaccaucggcgagugccccaaguacgugagaagcgccaagcugagaauggugaccggccugagaaacauccccagcauccagagcagaggccuguucggcgccaucgccggcuucaucgagggcggcuggaccggcaugguggacggcugguacggcuaccaccaccagaacgagcagggcagcggcuacgccgccgaccagaagagcacccagaacgccaucaacggcaucaccaacaaggugaacagcgugaucgagaagaugaacacccaguucaccgccgugggcaaggaguucaacaagcuggagagaagaauggagaaccugaacaagaagguggacgacggcuucaucgacaucuggaccuacaacgccgagcugcuggugcugcuggagaacgagagaacccuggacuuccacgacagcaacgugaagaaccuguacgagaaggugaagagccagcugaagaacaacgccaaggagaucggcaacggcugcuucgaguucuaccacaagugcaacgacgagugcauggagagcgugaagaacggcaccuacgacuaccccaaguacagcgaggagagcaagcugaacagagagaagaucgacggcgugaagcuggagagcaugggcguguaccagauccuggccaucuacagcaccguggccagcagccuggugcugcuggugagccugggcgccaucagcuucuggaugugcagcaacggcagccugcagugcagaaucugcaucuga

SEQ ID NO: 168977 - RNA, 1698 nt, Artificial Sequence
  derived and/or modified CDS sequence (opt4) from hemagglutinin__InfluenzaA__AFJ78617
augaaggugaagcugcuggugcugcugugcaccuucaccgccaccuacgccgacaccaucugcaucggcuaccacgccaacaacagcaccgacaccguggacaccgugcuggagaagaacgugaccgugacccacagcgugaaccugcuggagaacagccacaacggcaagcugugccugcugaagggcaucgccccccugcagcugggcaacugcagcguggccggcuggauccugggcaaccccgagugcgagcugcugaucagcaaggagagcuggagcuacaucguggagaagcccaaccccgagaacggcaccugcuaccccggccacuucgccgacuacgaggagcugagagagcagcugagcagcgugagcagcuucgagagauucgagaucuuccccaaggagagcagcuggcccaaccacaccgugaccggcgugagcgccagcugcagccacgacggcgagagcagcuucuacagaaaccugcuguggcugaccggcaagaacggccuguaccccaaccugagcaagagcuacgccaacaacaaggagaaggaggugcuggugcuguggggcgugcaccacccccccagcaucagcgaccagaagacccuguaccacaccgagaacgcccacgugagcguggugagcagccacuacagcagaaaguucacccccgagaucgccaagagacccaaggugagagaccaggagggcagaaucaacuacuacuggacccugcuggagcccggcgacaccaucaucuucgaggccaacggcaaccugaucgcccccagauacgccuucgcccugagcagaggcuucggcagcggcaucaucaacagcaacgcccccauggacaagugcgacgccaagugccagaccccccagggcgccaucaacagcagccugcccuuccagaacgugcaccccgugaccaucggcgagugccccaaguacgugagaagcgccaagcugagaauggugaccggccugagaaacauccccagcauccagagcagaggccuguucggcgccaucgccggcuucaucgagggcggcuggaccggcaugguggacggcugguacggcuaccaccaccagaacgagcagggcagcggcuacgccgccgaccagaagagcacccagaacgccaucaacggcaucaccaacaaggugaacagcgugaucgagaagaugaacacccaguucaccgccgugagcaaggaguucaacaagcuggagagaagaauggagaaccugaacaagaagguggacgacggcuucaucgacaucuggaccuacaacgccgagcugcuggugcugcuggagaacgagagaacccuggacuuccacgacagcaacgugaagaaccuguacgagaaggugaagagccagcugaagaacaacgccaaggagaucggcaacggcugcuucgaguucuaccacaagugcaacgacgagugcauggagagcgugaagaacggcaccuacgacuaccccaaguacagcgaggagagcaagcugaacagagagaagaucgacggcgugaagcuggagagcaugggcguguaccagauccuggccaucuacagcaccguggccagcagccuggugcugcuggugagccugggcgccaucagcuucuggaugugcagcaacggcagccugcagugcagaaucugcaucuga

SEQ ID NO: 168978 - RNA, 1698 nt, Artificial Sequence
  derived and/or modified CDS sequence (opt4) from hemagglutinin__InfluenzaA__AFJ78628
augaaggugaagcugcuggugcugcugugcaccuucaccgccaccuacgccgacaccaucugcaucggcuaccacgccaacaacagcaccgacaccguggacaccgugcuggagaagaacgugaccgugacccacagcgugaaccugcuggaggacaaccacaacggcaagcugugccugcugaagggcaucgccccccugcagcugggcaacugcagcguggccggcuggauccugggcaaccccgagugcgagcugcugaucagcaaggagagcuggagcuacaucguggagagacccaaccccgagaacggcaccugcuaccccggccacuucgccgacuacgaggagcugagagagcagcugagcagcgugagcagcuucgagagauucgagaucuuccccaaggagagcagcuggcccaaccacaccgugaccggcgugagcgccagcugcagccacaacggcgagagcagcuucuacaagaaccugcuguggcugaccggcaagaacggccuguaccccaaccugagcaagagcuacgccaacaacaaggagaaggaggugcuggugcuguggggcgugcaccacccccccaacaucggcaaccagaugacccuguaccacaaggagaacgccuacgugagcguggugagcagccacuacagcagaaaguucacccccgagaucgccaagagacccaaggugagagaccaggagggcagaaucaacuacuacuggacccugcuggagcccggcgacaccaucaucuucgaggccaacggcaaccugaucgcccccagauacgccuucgcccugagcagaggcuucggcagcggcaucaucaacagcaacgcccccauggacgagugcgacgccaagugccagaccccccagggcgccaucaacagcagccugcccuuccagaacgugcaccccgugaccaucggcgagugccccaaguacgugagaagcgccaagcugagaauggugaccggccugagaaacauccccagcauccagagcagaggccuguucggcgccaucgccggcuucaucgagggcggcuggaccggcaugguggacggcugguacggcuaccaccaccagaacgagcagggcagcggcuacgccgccgaccagaagagcacccagaacgccaucaacggcaucaccaacaaggugaacagcgugaucgagaagaugaacacccaguucaccgccgugggcaaggaguucaacaagcuggagagaagaauggagaaccugaacaagaagguggacgacggcuucaucgacguguggaccuacaacgccgagcugcuggugcugcuggagaacgagagaacccuggacuuccacgacagcaacgugaagaaccuguacgagaaggugaagaaccagcugaagaacaacgccaaggagaucggcaacggcugcuucgaguucuaccacaagugcaacgacgagugcauggagagcgugaagaacggcaccuacgacuaccccaaguacagcgaggagagcaagcugagcagagagaagaucgacggcgugaagcuggagagcaugggcguguaccagauccuggccaucuacagcaccguggccagcagccuggugcugcuggugagccugggcgccaucagcuucuggaugugcagcaacggcagccugcagugcagaaucugcaucuga

SEQ ID NO: 168979 - RNA, 1698 nt, Artificial Sequence
  derived and/or modified CDS sequence (opt4) from hemagglutinin__InfluenzaA__AFJ78639
augaaggugaagcugcuggugcugcugugcaccuucaccgccaccuacgccgacaccaucugcaucggcuaccacgccaacaacagcaccgacaccguggacaccgugcuggagaagaacgugaccgugacccacagcgugaaccugcuggagaacagccacaacggcaagcugugccugcugaagggcaucgccccccugcagcugggcaacugcagcguggccggcuggauccugggcaaccccgagugcgagcugcugaucagcaaggagagcuggagcuacaucguggagaagcccaaccccgagaacggcaccugcuaccccggccacuucgccgacuacgaggagcugagagagcagcugagcagcgugagcagcuucgagagauucgagaucuuccccaaggagagcagcuggcccaaccacaccgugaccggcgugagcgccagcugcagccacaacggcgagagcagcuucuacagaaaccugcuguggcugaccggcaagaacggccuguaccccaaccugagcaagagcuacgccaacaacaaggagaaggaggugcuggugcuguggggcgugcaccacccccccagcaucagcaaccagaagacccuguaccacaccgagaacgccuacgugagcguggugagcagccacuacagcagaaaguucacccccgagaucgccaagagacccaaggugagagaccaggagggcagaaucaacuacuacuggacccugcuggagcccggcgacaccaucaucuucgaggccaacggcaaccugaucgcccccagauacgccuucgcccugagcagaggcuucggcagcggcaucaucaacagcaacgcccccauggacaagugcgacgccaagugccagaccccccagggcgccaucaacagcagccugcccuuccagaacgugcaccccgugaccaucggcgagugccccaaguacgugagaagcgccaagcugagaauggugaccggccugagaaacauccccagcauccagagcagaggccuguucggcgccaucgccggcuucaucgagggcggcuggaccggcaugguggacggcugguacggcuaccaccaccagaacgagcagggcagcggcuacgccgccgaccagaagagcacccagaacgccaucaacggcaucaccaacaaggugaacagcgugaucgagaagaugaacacccaguucaccgccgugggcaaggaguucaacaagcuggagagaagaauggagaaccugaacaagaagguggacgacggcuucaucgacaucuggaccuacaacgccgagcugcuggugcugcuggagaacgagagaacccuggacuuccacgacagcaacgugaagaaccuguacgagaaggugaagagccagcugaagaacaacgccaaggagaucggcaacggcugcuucgaguucuaccacaagugcaacgacgagugcauggagagcgugaagaacggcaccuacgacuaccccaaguacagcgaggagagcaagcugaacagagagaagaucgacggcgugaagcuggagagcaugggcguguaccagauccuggccaucuacagcaccguggccagcagccuggugcugcuggugagccugggcgccaucagcuucuggaugugcagcaacggcagccugcagugcagaaucugcaucuga

SEQ ID NO: 168980 - RNA, 1698 nt, Artificial Sequence; identical to SEQ ID NO: 168979
  derived and/or modified CDS sequence (opt4) from hemagglutinin__InfluenzaA__AFJ78650

SEQ ID NO: 168981 - RNA, 1701 nt, Artificial Sequence; identical to SEQ ID NO: 162729
  derived and/or modified CDS sequence (opt4) from hemagglutinin__InfluenzaA__AFJ78661

SEQ ID NO: 168982 - RNA, 1701 nt, Artificial Sequence
  derived and/or modified CDS sequence (opt4) from hemagglutinin__InfluenzaA__AFJ78681
augaaggccauccugguggugcugcuguacaccuucgccaccgugaacgccgacacccugugcaucggcuaccacgccaacaacagcaccgacaccguggacaccgugcuggagaagaacgugaccgugacccacagcgugaaccugcuggaggacaagcacaacggcaagcugugcaagcugagaggcguggccccccugcaccugggcaagugcaacaucgccggcuggauccugggcaaccccgagugcgagagccugagcaccgccagcagcuggagcuacaucguggagaccagcagcagcgacaacggcaccugcuaccccggcgacuucaucgacuacgaggagcugagagagcagcugagcagcgugagcagcuucgagagauucgagaucuuccccaagaccagcagcuggcccaaccacgacagcaacaagggcgugaccgccgccugcccccacgccggcgccaagagcuucuacaagaaccugaucuggcuggugaagaagggcaacagcuaccccaagcugagcaagagcuacaucaacgacaagggcaaggaggugcuggugcuguggggcauccaccaccccagcaccagcgccgaccagcagagccuguaccagaacgccgacgccuacguguucgugggcaccagcagauacagcaagaaguucaagcccgagaucgccaucagacccaaggugagagaccaggagggcagaaugaacuacuacuggacccugguggagcccggcgacaagaucaccuucgaggccaccggcaaccugguggugcccagauacgccuucgccauggagagaaacgccggcagcggcaucaucaucagcgacacccccgugcacgacugcaacaccaccugccagacccccaagggcgccaucaacaccagccugcccuuccagaacauccaccccaucaccaucggcaagugccccaaguacgugaagagcaccaagcugagacuggccaccggccugagaaacgugcccagcauccagagcagaggccuguucggcgccaucgccggcuucaucgagggcggcuggaccggcaugguggacggcugguacggcuaccaccaccagaacgagcagggcagcggcuacgccgccgaccugaagagcacccagaacgccaucgacgagaucaccaacaaggugaacagcgugaucgagaagaugaacacccaguucaccgccgugggcaaggaguucaaccaccuggagaagagaaucgagaaccugaacaagaagguggacgacggcuuccuggacaucuggaccuacaacgccgagcugcuggugcugcuggagaacgagagaacccuggacuaccacgacagcaacgugaagaaccuguacgagaaggugagaagccagcugaagaacaacgccaaggagaucggcaacggcugcuucgaguucuaccacaagugcgacaacaccugcauggagagcgugaagaacggcaccuacgacuaccccaaguacagcgaggaggccaagcugaacagagaggagaucgacggcgugaagcuggagagcaccagaaucuaccagauccuggccaucuacagcaccguggccagcagccuggugcugguggugagccugggcgccaucagcuucuggaugugcagcaacggcagccugcagugcagaaucugcaucuga

SEQ ID NO: 168983 - RNA, 1701 nt, Artificial Sequence; identical to SEQ ID NO: 162729
  derived and/or modified CDS sequence (opt4) from hemagglutinin__InfluenzaA__AFJ78691

SEQ ID NO: 168984 - RNA, 1701 nt, Artificial Sequence; identical to SEQ ID NO: 162729
  derived and/or modified CDS sequence (opt4) from hemagglutinin__InfluenzaA__AFJ78701

SEQ ID NO: 168985 - RNA, 1701 nt, Artificial Sequence; identical to SEQ ID NO: 167257
  derived and/or modified CDS sequence (opt4) from hemagglutinin__InfluenzaA__AFJ78711

SEQ ID NO: 168986 - RNA, 1701 nt, Artificial Sequence; identical to SEQ ID NO: 162729
  derived and/or modified CDS sequence (opt4) from hemagglutinin__InfluenzaA__AFJ78721

SEQ ID NO: 168987 - RNA, 1701 nt, Artificial Sequence
  derived and/or modified CDS sequence (opt4) from hemagglutinin__InfluenzaA__AFJ78731
augaaggccauccugguggugcugcuguacaccuucgccaccgccaacgccgacacccugugcaucggcuaccacgccaacaacagcaccgacaccguggacaccgugcuggagaagaacgugaccgugacccacagcgugaaccugcuggaggacaagcacaacggcaagcugugcaagcugagaggcguggccccccugcaccugggcaagugcaacaucgccggcuggauccugggcaaccccgagugcgagagccugagcaccgccagcagcuggagcuacaucguggagaccagcagcagcgacaacggcaccugcuaccccggcgacuucaucgacuacgaggagcugagagagcagcugagcagcgugagcagcuucgagagauucgagaucuuccccaagaccagcagcuggcccaaccacgacagcaacaagggcgugaccgccgccugcccccacgccggcgccaagagcuucuacaagaaccugaucuggcuggugaagaagggcaacagcuaccccaagcugagcaagagcuacaucaacgacaagggcaaggaggugcuggugcuguggggcauccaccaccccagcaccagcgccgaccagcagagccuguaccagaacgccgacgccuacguguucgugggcaccagcagauacagcaagaaguucaagcccgagaucgccaucagacccaaggugagagaccaggagggcagaaugaacuacuacuggacccugguggagcccggcgacaagaucaccuucgaggccaccggcaaccugguggugcccagauacgccuucgccauggagagaaacgccggcagcggcaucaucaucagcgacacccccgugcacgacugcaacaccaccugccagacccccaagggcagcaucaacaccagccugcccuuccagaacauccaccccaucaccaucggcaagugccccaaguacgugaagagcaccaagcugagacuggccaccggccugagaaacgugcccagcauccagagcagaggccuguucggcgccaucgccggcuucaucgagggcggcuggaccggcaugguggacggcugguacggcuaccaccaccagaacgagcagggcagcggcuacgccgccgaccugaagagcacccagaacgccaucgacgagaucaccaacaaggugaacagcgugaucgagaagaugaacacccaguucaccgccgugggcaaggaguucaaccaccuggagaagagaaucgagaaccugaacaagaagguggacgacggcuuccuggacaucuggaccuacaacgccgagcugcuggugcugcuggagaacgagagaacccuggacuaccacgacagcaacgugaagaaccuguacgagaaggugagaagccagcugaagaacaacgccaaggagaucggcaacggcugcuucgaguucuaccacaagugcgacaacaccugcauggagagcgugaagaacggcaccuacgacuaccccaaguacagcgaggaggccaagcugaacagagaggagaucgacggcgugaagcuggagagcaccagaaucuaccagauccuggccaucuacagcaccguggccagcagccuggugcugguggugagccugggcgccaucagcuucuggaugugcagcaacggcagccugcagugcagaaucugcaucuga

SEQ ID NO: 168988 - RNA, 1701 nt, Artificial Sequence; identical to SEQ ID NO: 163893
  derived and/or modified CDS sequence (opt4) from hemagglutinin__InfluenzaA__AFJ78741

SEQ ID NO: 168989 - RNA, 1701 nt, Artificial Sequence; identical to SEQ ID NO: 162729
  derived and/or modified CDS sequence (opt4) from hemagglutinin__InfluenzaA__AFJ78751

SEQ ID NO: 168990 - RNA, 1701 nt, Artificial Sequence; identical to SEQ ID NO: 162729
  derived and/or modified CDS sequence (opt4) from hemagglutinin__InfluenzaA__AFJ78761

SEQ ID NO: 168991 - RNA, 1701 nt, Artificial Sequence; identical to SEQ ID NO: 162729
  derived and/or modified CDS sequence (opt4) from hemagglutinin__InfluenzaA__AFJ78771

SEQ ID NO: 168992 - RNA, 1701 nt, Artificial Sequence; identical to SEQ ID NO: 162729
  derived and/or modified CDS sequence (opt4) from hemagglutinin__InfluenzaA__AFJ78781

SEQ ID NO: 168993 - RNA, 1701 nt, Artificial Sequence; identical to SEQ ID NO: 162729
  derived and/or modified CDS sequence (opt4) from hemagglutinin__InfluenzaA__AFJ78791

SEQ ID NO: 168994 - RNA, 1701 nt, Artificial Sequence; identical to SEQ ID NO: 162729
  derived and/or modified CDS sequence (opt4) from hemagglutinin__InfluenzaA__AFJ78801

SEQ ID NO: 168995 - RNA, 1701 nt, Artificial Sequence; identical to SEQ ID NO: 163590
  derived and/or modified CDS sequence (opt4) from hemagglutinin__InfluenzaA__AFJ78811

SEQ ID NO: 168996 - RNA, 1701 nt, Artificial Sequence; identical to SEQ ID NO: 162729
  derived and/or modified CDS sequence (opt4) from hemagglutinin__InfluenzaA__AFJ78821

SEQ ID NO: 168997 - RNA, 1701 nt, Artificial Sequence; identical to SEQ ID NO: 162729
  derived and/or modified CDS sequence (opt4) from hemagglutinin__InfluenzaA__AFJ78831

SEQ ID NO: 168998 - RNA, 1701 nt, Artificial Sequence; identical to SEQ ID NO: 163927
  derived and/or modified CDS sequence (opt4) from hemagglutinin__InfluenzaA__AFJ78841

SEQ ID NO: 168999 - RNA, 1701 nt, Artificial Sequence; identical to SEQ ID NO: 162729
  derived and/or modified CDS sequence (opt4) from hemagglutinin__InfluenzaA__AFJ78851

SEQ ID NO: 169000 - RNA, 1701 nt, Artificial Sequence
  derived and/or modified CDS sequence (opt4) from hemagglutinin__InfluenzaA__AFJ78861
augaaggccauccugguggugcugcuguacaccuucgccaccgccaacgccgacacccugugcaucggcuaccacgccaacaacagcaccgacaccguggacaccgugcuggagaagaacgugaccgugacccacagcgugaaccugcuggaggacaagcacaacggcaagcugugcagacugagaggcguggccccccugcaccugggcaagugcaacaucgccggcuggauccugggcaaccccgagugcgagagccugagcaccgccagcagcuggagcuacaucguggagaccagcagcagcgacaacggcaccugcuaccccggcgacuucaucgacuacgaggagcugagagagcagcugagcagcgugagcagcuucgagagauucgagaucuuccccaagaccagcagcuggcccaaccacgacagcaacaagggcgugaccgccgccugcccccacgccggcgccaagagcuucuacaagaaccugaucuggcuggugaagaagggcaacagcuaccccaagcugagcaagagcuacaucaacgacaagggcaaggaggugcuggugcuguggggcauccaccaccccagcaccagcgccgaccagcagagccuguaccagaacgccgacgccuacguguucgugggcaccagcagauacagcaagaaguucaagcccgagaucgccaucagacccaaggugagagaccaggagggcagaaugaacuacuacuggacccugguggagcccggcgacaagaucaccuucgaggccaccggcaaccugguggugcccagauacgccuucgccauggagagaaacgccggcagcggcaucaucaucagcgacacccccgugcacgacugcaacaccaccugccagacccccaagggcgccaucaacaccagccugcccuuccagaacauccaccccaucaccaucggcaagugccccaaguacgugaagagcaccaagcugagacuggccaccggccugagaaacgugcccagcauccagagcagaggccuguucggcgccaucgccggcuucaucgagggcggcuggaccggcaugguggacggcugguacggcuaccaccaccagaacgagcagggcagcggcuacgccgccgaccugaagagcacccagaacgccaucgacgagaucaccaacaaggugaacagcgugaucgagaagaugaacacccaguucaccgccgugggcaaggaguucaaccaccuggagaagagaaucgagaaccugaacaagaagguggacgacggcuuccuggacaucuggaccuacaacgccgagcugcuggugcugcuggagaacgagagaacccuggacuaccacgacagcaacgugaagaaccuguacgagaaggugagaagccagcugaagaacaacgccaaggagaucggcaacggcugcuucgaguucuaccacaagugcgacaacaccugcauggagagcgugaagaacggcaccuacgacuaccccaaguacagcgaggaggccaagcugaacagagaggagaucgacggcgugaagcuggagagcaccagaaucuaccagauccuggccaucuacagcaccguggccagcagccuggugcugguggugagccugggcgccaucagcuucuggaugugcagcaacggcagccugcagugcagaaucugcaucuga

SEQ ID NO: 169001 - RNA, 1701 nt, Artificial Sequence
  derived and/or modified CDS sequence (opt4) from hemagglutinin__InfluenzaA__AFJ78881
augaaggccauccugguggugcugcuguacaccuucgccaccgccaacgccgacacccugugcaucggcuaccacgccaacaacagcaccgacaccguggacaccgugcuggagaagaacgugaccgugacccacagcgugaaccugcuggaggacaagcacaacggcaagcugugcaagcugagaggcguggccccccugcaccugggcaagugcaacaucgccggcuggauccugggcaaccccgagugcgagagccugagcaccagcagcagcuggagcuacaucguggagaccagcagcagcgacaacggcaccugcuaccccggcgacuucaucgacuacgaggagcugagagagcagcugagcagcgugagcagcuucgagagauucgagaucuuccccaagaccagcagcuggcccaaccacgacagcaacaagggcgugaccgccgccugcccccacgccggcgccaagagcuucuacaagaaccugaucuggcuggugaagaagggcaacagcuaccccaagcugagcaagagcuacaucaacgacaagggcaaggaggugcuggugcuguggggcauccaccaccccagcaccagcgccgaccagcagagccuguaccagaacgccgacgccuacguguucgugggcaccagcagauacagcaagaaguucaagcccgagaucgccaucagacccaaggugagagaccaggagggcagaaugaacuacuacuggacccugguggagcccggcgacaagaucaccuucgaggccaccggcaaccugguggugcccagauacgccuucgccauggagagaaacgccggcagcggcaucaucaucagcgacacccccgugcacgacugcaacaccaccugccagacccccaagggcgccaucaacaccagccugcccuuccagaacauccaccccaucaccaucggcaagugccccaaguacgugaagagcaccaagcugagacuggccaccggccugagaaacgugcccagcauccagagcagaggccuguucggcgccaucgccggcuucaucgagggcggcuggaccggcaugguggacggcugguacggcuaccaccaccagaacgagcagggcagcggcuacgccgccgaccugaagagcacccagaacgccaucgacgagaucaccaacaaggugaacagcgugaucgagaagaugaacacccaguucaccgccgugggcaaggaguucaaccaccuggagaagagaaucgagaaccugaacaagaagguggacgacggcuuccuggacaucuggaccuacaacgccgagcugcuggugcugcuggagaacgagagaacccuggacuaccacgacagcaacgugaagaaccuguacgagaaggugagaagccagcugaagaacaacgccaaggagaucggcaacggcugcuucgaguucuaccacaagugcgacaacaccugcauggagagcgugaagaacggcaccuacgacuaccccaaguacagcgaggaggccaagcugaacagagaggagaucaacggcgugaagcuggagagcaccagaaucuaccagauccuggccaucuacagcaccgccgccagcagccuggugcugguggugagccugggcgccaucagcuucuggaugugcagcaacggcagccugcagugcagaaucugcaucuga

SEQ ID NO: 169002 - RNA, 1701 nt, Artificial Sequence; identical to SEQ ID NO: 162729
  derived and/or modified CDS sequence (opt4) from hemagglutinin__InfluenzaA__AFJ78891

SEQ ID NO: 169003 - RNA, 1701 nt, Artificial Sequence; identical to SEQ ID NO: 162729
  derived and/or modified CDS sequence (opt4) from hemagglutinin__InfluenzaA__AFJ78901

SEQ ID NO: 169004 - RNA, 1701 nt, Artificial Sequence; identical to SEQ ID NO: 162729
  derived and/or modified CDS sequence (opt4) from hemagglutinin__InfluenzaA__AFJ78911

SEQ ID NO: 169005 - RNA, 1701 nt, Artificial Sequence; identical to SEQ ID NO: 162729
  derived and/or modified CDS sequence (opt4) from hemagglutinin__InfluenzaA__AFJ78921

SEQ ID NO: 169006 - RNA, 1701 nt, Artificial Sequence
  derived and/or modified CDS sequence (opt4) from hemagglutinin__InfluenzaA__AFJ97567
augaaggccauccugguggugcugcuguacaccuucgccaccgccaacgccgacacccugugcaucggcuaccacgccaacaacagcaccgacaccguggacaccgugcuggagaagaacgugaccgugacccacagcguggaccugcuggaggacaagcacaacggcaagcugugcaagcugagaggcguggccccccugcaccugggcaagugcaacaucgccggcuggauccugggcaaccccgagugcgagagccugagcaccgccagcagcuggagcuacaucguggagaccagcagcagcgacaacggcaccugcuaccccggcgacuucaucgacuacgaggagcugagagagcagcugagcagcgugagcagcuucgagagauucgagaucuuccccaagaccagcagcuggcccaaccacgacagcaacaagggcgugaccgccgccugcccccacgccggcgccaagagcuucuacaagaaccugaucuggcuggugaagaagggcaacagcuaccccaagcugaacaagagcuacaucaacgacaagggcaaggaggugcuggugcuguggggcauccaccaccccagcaccagcaccgaccagcagagccuguaccagaacgccgacgccuacguguucgugggcaccagcagauacagcaagaaguucaagcccgagaucgccaucagacccaaggugagagaccaggagggcagaaugaacuacuacuggacccugguggagcccggcgacaagaucaccuucgaggccaccggcaaccugguggugcccagauacgccuucaccauggagagaaacgccggcagcggcaucaucaucagcgacacccccgugcacgacugcaacaccaccugccagacccccaagggcgccaucaacaccagcuuccccuuccagaacauccaccccaucaccaucggcaagugccccaaguacgugaagagcaccaagcugagacuggccaccggccugagaaacgugcccagcauccagagcagaggccuguucggcgccaucgccggcuucaucgagggcggcuggaccggcaugguggacggcugguacggcuaccaccaccagaacgagcagggcagcggcuacgccgccgaccugaagagcacccagaacgccaucgacgagaucaccaacaaggugaacagcgugaucgagaagaugaacacccaguucaccgccgugggcaaggaguucaaccaccuggagaagagaaucgagaaccugaacaagaagguggacgacggcuuccuggacaucuggaccuacaacgccgagcugcuggugcugcuggagaacgagagaacccuggacuaccacgacagcaacgugaagaaccuguacgagaaggugagaagccagcugaagaacaacgccaaggagaucggcaacggcugcuucgaguucuaccacaagugcgacaacaccugcauggagagcgugaagaacggcaccuacgacuaccccaaguacagcgaggaggccaagcugaacagagaggagaucgacggcgugaagcuggagagcaccagaaucuaccagauccuggccaucuacagcaccguggccagcagccuggugcugguggugagccugggcgccaucagcuucuggaugugcagcaacggcagccugcagugcagaaucugcaucuga

SEQ ID NO: 169007 - RNA, 1701 nt, Artificial Sequence; identical to SEQ ID NO: 162729
  derived and/or modified CDS sequence (opt4) from hemagglutinin__InfluenzaA__AFK14115

SEQ ID NO: 169008 - RNA, 1701 nt, Artificial Sequence; identical to SEQ ID NO: 162729
  derived and/or modified CDS sequence (opt4) from hemagglutinin__InfluenzaA__AFK14131

SEQ ID NO: 169009 - RNA, 1701 nt, Artificial Sequence; identical to SEQ ID NO: 164411
  derived and/or modified CDS sequence (opt4) from hemagglutinin__InfluenzaA__AFK14139

SEQ ID NO: 169010 - RNA, 1701 nt, Artificial Sequence
  derived and/or modified CDS sequence (opt4) from hemagglutinin__InfluenzaA__AFK14148
augaaggccauccugguggugcugcuguacaccuucgccaccgccaacgccgacacccugugcaucggcuaccacgccaacaacagcaccgacaccguggacaccgugcuggagaagaacgugaccgugacccacagcgugaaccugcuggaggacaagcacaacggcaagcugugcaagcugagaggcguggccccccugcaccugggcaagugcaacaucgccggcuggauccugggcaaccccgagugcgagagccugagcaccgccagcagcuggagcuacaucguggagaccagcagcagcgacaacggcaccugcuaccccggcgacuucaucgacuacgaggagcugagagagcagcugagcagcgugagcagcuucgagagauucgagaucuuccccaagaccagcagcuggcccaaccacgacagcaacaagggcgugaccgccgccugcccccacgccggcgccaagagcuucuacaagaaccugaucuggcuggugaagaagggcaacagcuaccccaagcugagcaagagcuacaucaacgacaagggcaaggaggugcuggugcuguggggcauccaccaccccagcaccagcgccgaccagcagagccuguaccagaacgccgacgccuacguguucgugggcaccagcagauacagcaagaaguucaagcccgagaucgccaucagacccaaggugagagaccaggagggcagaaugaacuacuacuggacccugguggagcccggcgacaagaucaccuucgaggccaccggcaaccugguggugcccagauacgccuucgccauggagagaaacgccggcagcggcaucaucaucagcgacacccccgugcacgacugcaacaccaccugccagacccccaagggcgccaucaacaccagccugcccuuccagaacauccaccccaucaccaucggcaagugccccaaguacgugaagagcaccaagcugagacuggccaccggccugagaaacgugcccagcauccagagcagaggccuguucggcgccaucgccggcuucaucgagggcggcuggaccggcaugguggacggcugguacggcuaccaccaccagaacgagcagggcagcggcuacgccgccgaccugaagagcacccagaacgccaucgacaagaucaccaacaaggugaacagcgugaucgagaagaugaacacccaguucaccgccgugggcaaggaguucaaccaccuggagaagagaaucgagaaccugaacaagaagguggacgacggcuuccuggacaucuggaccuacaacgccgagcugcuggugcugcuggagaacgagagaacccuggacuaccacgacagcaacgugaagaaccuguacgagaaggugagaaaccagcugaagaacaacgccaaggagaucggcaacggcugcuucgaguucuaccacaagugcgacaacaccugcauggagagcgugaagaacggcaccuacgacuaccccaaguacagcgaggaggccaagcugaacagagaggagaucgacggcgugaagcuggagagcaccagaaucuaccagauccuggccaucuacagcaccguggccagcagccuggugcugguggugagccugggcgccaucagcuucuggaugugcagcaacggcagccugcagugcagaaucugcaucuga

SEQ ID NO: 169011 - RNA, 1701 nt, Artificial Sequence; identical to SEQ ID NO: 164356
  derived and/or modified CDS sequence (opt4) from hemagglutinin__InfluenzaA__AFK14157

SEQ ID NO: 169012 - RNA, 1701 nt, Artificial Sequence; identical to SEQ ID NO: 162729
  derived and/or modified CDS sequence (opt4) from hemagglutinin__InfluenzaA__AFK14166

SEQ ID NO: 169013 - RNA, 1701 nt, Artificial Sequence; identical to SEQ ID NO: 164057
  derived and/or modified CDS sequence (opt4) from hemagglutinin__InfluenzaA__AFK14175

SEQ ID NO: 169014 - RNA, 1701 nt, Artificial Sequence; identical to SEQ ID NO: 165634
  derived and/or modified CDS sequence (opt4) from hemagglutinin__InfluenzaA__AFK14184

SEQ ID NO: 169015 - RNA, 1701 nt, Artificial Sequence; identical to SEQ ID NO: 163082
  derived and/or modified CDS sequence (opt4) from hemagglutinin__InfluenzaA__AFK14193

SEQ ID NO: 169016 - RNA, 1701 nt, Artificial Sequence; identical to SEQ ID NO: 164326
  derived and/or modified CDS sequence (opt4) from hemagglutinin__InfluenzaA__AFK14202

SEQ ID NO: 169017 - RNA, 1701 nt, Artificial Sequence; identical to SEQ ID NO: 163082
  derived and/or modified CDS sequence (opt4) from hemagglutinin__InfluenzaA__AFK14211

SEQ ID NO: 169018 - RNA, 1701 nt, Artificial Sequence
  derived and/or modified CDS sequence (opt4) from hemagglutinin__InfluenzaA__AFK14220
augaaggccauccugguggugcugcuguacaccuucgccaccgccaacgccgacacccugugcaucggcuaccacgccaacaacagcaccgacaccguggacaccgugcuggagaagaacgugaccgugacccacagcgugaaccugcuggaggacaagcacaacggcaagcugugcaagcugagaggcguggccccccugcaccugggcaagugcaacaucgccggcuggauccugggcaaccccgagugcgagagccugagcaccgccagcagcuggagcuacaucguggagaccagcagcagcgacaacggcaccugcuaccccggcgacuucaucgacuacgaggagcugagagagcagcugagcagcgccagcagcuucgagagauacgagaucuuccccaagaccagcagcuggcccaaccacgacagcaacaagggcgugaccgccgccugcccccacgccggcgccaagagcuucuacaagaaccugaucuggcuggugaagaagggcaacagcuaccccaagcugagcaagagcuacaucaacgacaagggcaaggaggugcuggugcuguggggcauccaccaccccagcaccagcgccgaccagcagagccuguaccagaacgccgacgccuacguguucgugggcaccagcagauacagcaagaaguucaagcccgagaucgccaucagacccaaggugagagaccaggagggcagaaugaacuacuacuggacccugguggagcccggcgacaagaucaccuucgaggccaccggcaaccugguggugcccagauacgccuucgccauggagagaaacgccggcagcggcaucaucaucagcgacacccccgugcacgacugcaacaccaccugccagacccccaagggcgccaucaacaccagccugcccuuccagaacauccaccccaucaccaucggcaagugccccaaguacgugaagagcaccaagcugagacuggccaccggccugagaaacgugcccagcauccagagcagaggccuguucggcgccaucgccggcuucaucgagggcggcuggaccggcaugguggacggcugguacggcuaccaccaccagaacgagcagggcagcggcuacgccgccgaccugaagagcacccagaacgccaucgacaagaucaccaacaaggugaacagcgugaucgagaagaugaacacccaguucaccgccgugggcaaggaguucaaccaccuggagaagagaaucgagaaccugaacaagaagguggacgacggcuuccuggacaucuggaccuacaacgccgagcugcuggugcugcuggagaacgagagaacccuggacuaccacgacagcaacgugaagaaccuguacgagaaggugagaaaccagcugaagaacaacgccaaggagaucggcaacggcugcuucgaguucuaccacaagugcgacaacaccugcauggagagcgugaagaacggcaccuacgacuaccccaaguacagcgaggaggccaagcugaacagagaggagaucgacggcgugaagcuggagagcaccagaaucuaccagauccuggccaucuacagcaccguggccagcagccuggugcugguggugagccugggcgccaucagcuucuggaugugcagcaacggcagccugcagugcagaaucugcaucuga

SEQ ID NO: 169019 - RNA, 1701 nt, Artificial Sequence; identical to SEQ ID NO: 164356
  derived and/or modified CDS sequence (opt4) from hemagglutinin__InfluenzaA__AFK14229

SEQ ID NO: 169020 - RNA, 1701 nt, Artificial Sequence; identical to SEQ ID NO: 167494
  derived and/or modified CDS sequence (opt4) from hemagglutinin__InfluenzaA__AFK14238

SEQ ID NO: 169021 - RNA, 1701 nt, Artificial Sequence
  derived and/or modified CDS sequence (opt4) from hemagglutinin__InfluenzaA__AFK14247
augaaggccauccugguggugcugcuguacaccuucgccaccgccaacgccgacacccugugcaucggcuaccacgccaacaacagcaccgacaccguggacaccgugcuggagaagaacgugaccgugacccacagcgugaaccugcuggaggacaagcacaacggcaagcugugcaagcugagaggcguggccccccugcaccugggcaagugcaacaucgccggcuggauccugggcaaccccgagugcgagagccugagcaccgccagcagcuggagcuacaucguggagaccagcagcagcgacaacggcaccugcuaccccggcgacuucaucgacuacgaggagcugagagagcagcugagcagcgugagcagcuucgagagauucgagaucuuccccaagaccagcagcuggcccaaccacgacagcaacaagggcgugaccgccgccugcccccacgccggcgccaagagcuucuacaagaaccugaucuggcuggugaagaagggcaacagcuaccccaagcugagcaagagcuacaucaacgacaagggcaaggaggugcuggugcuguggggcauccaccaccccagcaccagcgccgaccagcagagccuguaccagaacgccgacgccuacguguucgugggcaccagcagauacagcaagaaguucaagcccgagaucgccaucagacccaaggugagagaccaggagggcagaaugaacuacuacuggacccugguggagcccggcgacaagaucaccuucgaggccaccggcaaccugguggugcccagauacgccuucgccauggagagaaacgccggcagcggcaucaucaucagcgacacccccgugcacgacugcaacaccaccugccagacccccaagggcgccaugaacaccagccugcccuuccagaacauccaccccaucaccaucggcaagugccccaaguacgugaagagcaccaagcugagaauggccaccggccugagaaacgugcccagcauccagagcagaggccuguucggcgccaucgccggcuucaucgagggcggcuggaccggcaugguggacggcugguacggcuaccaccaccagaacgagcagggcagcggcuacgccgccgaccugaagagcacccagaacgccaucgacgagaucaccaacaaggugaacagcgugaucgagaagaugaacacccaguucaccgccgugggcaaggaguucaaccaccuggagaagagaaucgagaaccugaacaagaagguggacgacggcuuccuggacaucuggaccuacaacgccgagcugcuggugcugcuggagaacgagagaacccuggacuaccacgacagcaacgugaagaaccuguacgagaaggugagaagccagcugaagaacaacgccaaggagaucggcaacggcugcuucgaguucuaccacaagugcgacaacaccugcauggagagcgugaagaacggcaccuacgacuaccccaaguacagcgaggaggccaagcugaacagagaggagaucgacggcgugaagcuggagagcaccagaaucuaccagauccuggccaucuacagcaccguggccagcagccuggugcugguggugagccugggcgccaucagcuucuggaugugcagcaacggcagccugcagugcagaaucugcaucuga

SEQ ID NO: 169022 - RNA, 1701 nt, Artificial Sequence
  derived and/or modified CDS sequence (opt4) from hemagglutinin__InfluenzaA__AFK14272
augaaggccauccugaucgugcugcuguacaccuucgccaccgccaacgccgacacccugugcaucggcuaccacgccaacaacagcaccgacaccguggacaccgugcuggagaagaacgugaccgugacccacagcgugaaccugcuggaggacaagcacaacggcaagcugugcaagcugaccggcguggccccccugcaccugggcaagugcgacaucgccggcuggauccugggcaaccccgagugcgagagccugagcaccgccagcagcuggagcuacaucguggagaccagcagcagcgacaacggcaccugcuaccccggcgacuucaucgacuacgaggagcugagagagcagcugagcagcgugagcagcuucgagagauucgagaucuuccccaagaccagcagcuggcccaaccacgacagcaacaagggcgugaccgccgccugcccccacgccggcgccaagagcuucuacaagaaccugaucuggcuggugaagaagggcaacagcuaccccaagcugagcaagagcuacaucaacgacaagggcaaggaggugcuggugcuguggggcauccaccaccccagcaccagcgccgaccagcagagccuguaccagaacgccgacgccuacguguucgugggcaccagcagauacagcaagaaguucaagcccgagaucgccaucagacccaaggugagagaccaggagggcagaaugaacuacuacuggacccugguggagcccggcgacaagaucaccuucgaggccaccggcaaccugguggugcccagauacgccuucgccauggagagaaacgccggcagcggcaucaucaucagcgacacccccgugcacgacugcaacaccaccugccagacccccaagggcgccaucaacaccagccugcccuuccagaacauccaccccaucaccaucggcaagugccccaaguacgugaagagcaccaagcugagacuggccaccggccugagaaacgugcccagcauccagagcagaggccuguucggcgccaucgccggcuucaucgagggcggcuggaccggcaugguggacggcugguacggcuaccaccaccagaacgagcagggcagcggcuacgccgccgaccugaagagcacccagcacgccaucgacgagaucaccaacaaggugaacagcgugaucgagaagaugaacacccaguucaccgccgugggcaaggaguucaaccaccuggagaagagaaucgagaaccugaacaagaagguggacgacggcuuccuggacaucuggaccuacaacgccgagcugcuggugcugcuggagaacgagagaacccuggacuaccacgacagcaacgugaagaaccuguacgagaaggugagaagccagcugaagaacaacgccaaggagaucggcaacggcugcuucgaguucuaccacaagugcgacaacaccugcauggagagcgugaagaacggcaccuacgacuaccccaaguacagcgaggaggccaagcugaacagagaggagaucgacggcgugaagcuggagagcaccagaaucuaccagauccuggccaucuacagcaccguggccagcagccuggugcugguggugagccugggcgccaucagcuucuggaugugcagcaacggcagccugcagugcagaaucugcaucuga

SEQ ID NO: 169023 - RNA, 1701 nt, Artificial Sequence; identical to SEQ ID NO: 163082
  derived and/or modified CDS sequence (opt4) from hemagglutinin__InfluenzaA__AFK14314

SEQ ID NO: 169024 - RNA, 1701 nt, Artificial Sequence
  derived and/or modified CDS sequence (opt4) from hemagglutinin__InfluenzaA__AFK14323
augaaggccauccugguggugcugcuguacaccuucgccaccgccaacgccgacacccugugcaucggcuaccacgccaacaacagcaccgacaccguggacaccgugcuggagaagaacgugaccgugacccacagcgugaaccugcuggaggacaagcacaacggcaagcugugcaagcugagaggcguggccccccugcaccugggcaagugcaacaucgccggcuggauccugggcaaccccgagugcgagagccugagcaccgccagcagcuggagcuacaucguggagaccagcaacagcgacaacggcaccugcuaccccggcgacuucaucaacuacgaggagcugagagagcagcugagcagcgugagcagcuucgagagauucgagaucuuccccaagaccagcagcuggcccaaccacgacagcaacaagggcgugaccgccgccugcccccacgccggcgccaagagcuucuacaagaaccugaucuggcuggugaagaagggcaacagcuaccccaagcugagcaagagcuacaucaacgacaagggcaaggaggugcuggugcuguggggcauccaccaccccagcaccagcgccgaccagcagagccuguaccagaacgccgacgccuacguguucgugggcaccagcagauacagcaagaaguucaagcccgagaucgccaucagacccaaggugagagaccaggagggcagaaugaacuacuacuggacccugguggagcccggcgacaagaucaccuucgaggccaccggcaaccugguggugcccagauacgccuucgccauggagagaaacgccggcagcggcaucaucaucagcgacacccccgugcacgacugcaacaccaccugccagacccccaagggcgccaucaacaccagccugcccuuccagaacauccaccccaucaccaucggcaagugccccaaguacgugaagagcaccaagcugagacuggccaccggccugagaaacgugcccagcauccagagcagaggccuguucggcgccaucgccggcuucaucgagggcggcuggaccggcaugguggacggcugguacggcuaccaccaccagaacgagcagggcagcggcuacgccgccgaccugaagagcacccagaacgccaucgacaagaucaccaacaaggugaacagcgugaucgagaagaugaacacccaguucaccgccgugggcaaggaguucaaccaccuggagaagagaaucgagaaccugaacaagaagguggacgacggcuuccuggacaucuggaccuacaacgccgagcugcuggugcugcuggagaacgagagaacccuggacuaccacgacagcaacgugaagaaccuguacgagaaggugagaagccagcugaagaacaacgccaaggagaucggcaacggcugcuucgaguucuaccacaagugcgacaacaccugcauggagagcgugaagaacggcaccuacgacuaccccaaguacagcgaggaggccaagcugaacagagaggagaucgacggcgugaagcuggagagcaccagaaucuaccagauccuggccaucuacagcaccguggccagcagccuggugcugguggugagccugggcgccaucagcuucuggaugugcagcaacggcagccugcagugcagaaucugcaucuga

SEQ ID NO: 169025 - RNA, 1701 nt, Artificial Sequence; identical to SEQ ID NO: 167494
  derived and/or modified CDS sequence (opt4) from hemagglutinin__InfluenzaA__AFK14332

SEQ ID NO: 169026 - RNA, 1701 nt, Artificial Sequence
  derived and/or modified CDS sequence (opt4) from hemagglutinin__InfluenzaA__AFK14341
augaaggccauccugguggugcugcuguacaccuucgccaccgccaacgccgacacccugugcaucggcuaccacgccaacaacagcaccgacaccguggacaccgugcuggagaagaacgugaccgugacccacagcgugaaccugcuggaggacaagcacaacggcaagcugugcaagcugagaggcguggccccccugcaccugggcaagugcaacaucgccggcuggauccugggcaaccccgagugcgagagccugagcaccgccagcagcuggagcuacaucguggagaccagcagcagcgacaacggcaccugcuaccccggcgacuucaucgacuacgaggagcugagagagcagcugagcagcgugagcagcuucgagagauucgagaucuuccccaagaccagcagcuggcccaaccacgacagcaacaagggcgugaccgccgccugcccccacgccggcgccaagagcuucuacaagaaccugaucuggcuggugaagaagggcaacagcuaccccaagcugagcaagagcuacaucaacgacaagggcaaggaggugcuggugcuguggggcauccaccaccccagcaccagcgccgaccagcagagccuguaccagaacgccgacgccuacguguucgugggcaccagcagauacagcaagaaguucaagcccgagaucgccaucagacccaaggugagagagcaggagggcagaaugaacuacuacuggacccugguggagcccggcgacaagaucaccuucgaggccaccggcaaccugguggugcccagauacgccuucgccauggagagaaacgccggcagcggcaucaucaucagcgacacccccgugcacgacugcaacaccaccugccagacccccaagggcgccaucaacaccagccugcccuuccagaacauccaccccaucaccaucggcaagugccccaaguacgugaagagcaccaagcugagacuggccaccggccugagaaacgugcccagcauccagagcagaggccuguucggcgccaucgccggcuucaucgagggcggcuggaccggcaugguggacggcugguacggcuaccaccaccagaacgagcagggcagcggcuacgccgccgaccugaagagcacccagaacgccaucgacgagaucaccaacaaggugaacagcgugaucgagaagaugaacacccaguucaccgccgugggcaaggaguucaaccaccuggagaagagaaucgagaaccugaacaagaagguggacgacggcuuccuggacaucuggaccuacaacgccgagcugcuggugcugcuggagaacgagaagacccuggacuaccacgacagcaacgugaagaaccuguacgagaaggugagaagccagcugaagaacaacgccaaggagaucggcaacggcugcuucgaguucuaccacaagugcgacaacaccugcauggagagcgugaagaacggcaccuacgacuaccccaaguacagcgaggaggccaagcugaacagagaggagaucgacggcgugaagcuggagagcaccagaaucuaccagauccuggccaucuacagcaccguggccagcagccuggugcugguggugagccugggcgccaucagcuucuggaugugcagcaacggcagccugcagugcagaaucugcaucuga

SEQ ID NO: 169027 - RNA, 1701 nt, Artificial Sequence; identical to SEQ ID NO: 164149
  derived and/or modified CDS sequence (opt4) from hemagglutinin__InfluenzaA__AFK14350

SEQ ID NO: 169028 - RNA, 1701 nt, Artificial Sequence
  derived and/or modified CDS sequence (opt4) from hemagglutinin__InfluenzaA__AFK14358
augaaggccauccugguggugcugcuguacaccuucgccaccgccaacgccgacacccugugcaucggcuaccacgccaacaacagcaccgacaccguggacaccgugcuggagaagaacgugaccgugacccacagcgugaaccugcuggaggacaagcacaacggcaagcugugcaagcugagaggcguggccccccugcaccugggcaagugcaacaucgccggcuggauccugggcaaccccgagugcgagagccugagcaccgccagcagcuggagcuacaucguggagaccagcagcagcgacaacggcgccugcuaccccggcgacuucaucgacuacgaggagcugagagagcagcugagcagcgugagcagcuucgagagauucgagaucuuccccaagaccagcagcuggcccaaccacgacagcaacaagggcgugaccgccgccugcccccacgccggcgccaagagcuucuacaagaaccugaucuggcuggugaagaagggcaacagcuaccccaagcugagcaagagcuacaucaacgacaagggcaaggaggugcuggugcuguggggcauccaccaccccagcaccagcgccgaccagcagagccuguaccagaacgccgacgccuacguguucgugggcaccagcagauacagcaagaaguucaagcccgagaucgccaucagacccaaggugagagagcaggagggcagaaugaacuacuacuggacccugguggagcccggcgacaagaucaccuucgaggccaccggcaaccugguggugcccagauacgccuucgccauggagagaaacgccggcagcggcaucaucaucagcgacacccccgugcacgacugcaacaccaccugccagacccccaagggcgccaucaacaccagccugcccuuccagaacauccaccccaucaccaucggcaagugccccaaguacgugaagagcaccaagcugagacuggccaccggccugagaaacgugcccagcauccagagcagaggccuguucggcgccaucgccggcuucaucgagggcggcuggaccggcaugguggacggcugguacggcuaccaccaccagaacgagcagggcagcggcuacgccgccgaccugaagagcacccagaacgccaucgacgagaucaccaacaaggugaacagcgugaucgagaagaugaacacccaguucaccgccgugggcaaggaguucaaccaccuggagaagagaaucgagaaccugaacaagaagguggacgacggcuuccuggacaucuggaccuacaacgccgagcugcuggugcugcuggagaacgagaagacccuggacuaccacgacagcaacgugaagaaccuguacgagaaggugagaagccagcugaagaacaacgccaaggagaucggcaacggcugcuucgaguucuaccacaagugcgacaacaccugcauggagagcgugaagaacggcaccuacgacuaccccaaguacagcgaggaggccaagcugaacagagaggagaucgacggcgugaagcuggagagcaccagaaucuaccagauccuggccaucuacagcaccguggccagcagccuggugcugguggugagccugggcgccaucagcuucuggaugugcagcaacggcagccugcagugcagaaucugcaucuga

SEQ ID NO: 169029 - RNA, 1701 nt, Artificial Sequence
  derived and/or modified CDS sequence (opt4) from hemagglutinin__InfluenzaA__AFK14395
augaaggccauccugguggugcugcuguacaccuucgccaccgccaacgccgacacccugugcaucggcuaccacgccaacaacagcaccgacaccguggacaccgugcuggagaagaacgugaccgugacccacagcgugaacauccuggaggacaagcacaacggcaagcugugcaagcugagaggcguggccccccugcaccugggcaagugcaacaucgccggcuggauccugggcaaccccgagugcgagagccugagcaccgccagcagcuggagcuacaucguggagaccagcagcagcgagaacggcaugugcugccccagagacuucaucgacuacgaggagcugagagagcagcugagcagcgugagcagcuucgagagauucgagaucuuccccaagaccagcagcuggcccaaccacgacagcaacaagggcgugaccgccgccugcccccacgccggcgccaagagcuucuacaagaaccugaucuggcuggugaagaagggcaacagcuaccccaagcugagcaagagcuacaucaacgacaagggcaaggaggugcuggugcuguggggcauccaccaccccagcaccagcgccgaccagcagagccuguaccagaacgccgacgccuacguguucgugggcagcagcagauacagcaagaaguucaagcccgagaucgccaucagacccaaggugagagaccaggagggcagaaugaacuacuacuggacccugguggagcccggcgacaagaucaccuucgaggccaccggcaaccugguggugcccagauacgccuucgccauggagagaaacgccggcagcggcaucaucaucagcgacacccccgugcacgacugcaacaccaccugccagacccccaagggcgccaucaacaccagccugcccuuccagaacauccaccccaucaccaucggcaagugccccaaguacgugaagagcaccaagcugagacuggccaccggccugagaaacgugcccagcauccagagcagaggccuguucggcgccaucgccggcuucaucgagggcggcuggaccggcaugguggacggcugguacggcuaccaccaccagaacgagcagggcagcggcuacgccgccgaccugaagagcacccagaacgccaucgacgagaucaccaacaaggugaacagcgugaucgagaagaugaacacccaguucaccgccgugggcaaggaguucaaccaccuggagaagagaaucgagaaccugaacaagaagguggacgacggcuuccuggacaucuggaccuacaacgccgagcugcuggugcugcuggagaacgagagaacccuggacuaccacgacagcaacgugaagaaccuguacgagaaggugagaagccagcugaagaacaacgccaaggaggugggcaacggcugcuucgaguucuaccacaagugcgacaacaccugcauggagagcgugaagaacggcaccuacgacuaccccaaguacagcgaggaggccaagcugaacagagaggagaucgacggcgugaagcuggagagcaccagaaucuaccagauccuggccaucuacagcaccgccgccagcagccuggugcugguggugagccugggcgccaucagcuucuggaugugcagcaacggcagccugcagugcagaaucugcaucuga

SEQ ID NO: 169030 - RNA, 1701 nt, Artificial Sequence
  derived and/or modified CDS sequence (opt4) from hemagglutinin__InfluenzaA__AFK14431
augaaggccauccugguggugcugcuguacaccuucgccaccgccaacgccgacacccugugcaucggcuaccacgccaacaacagcaccgacaccguggacaccgugcuggagaagaacgugaccgugacccacagcgugaaccugcuggaggacaagcacaacggcaagcugugcaagcugagaggcguggccccccugcaccugggcaagugcaacaucgccggcuggauccugggcaaccccgagugcgagagccugagcaccgccagcagcuggagcuacaucguggagaccagcaacagcgacaacggcaccugcuaccccggcgacuuccuggacuacgaggagcugagaaagcagcugagcagcgugagcagcuucgagagaguggagaucuuccccaagaccagcagcuggcccaaccacgacagcaacaagggcgugaccgccgccugcccccacgccggcgccaagagcuucuacaagaaccugaucuggcuggugaagaagggcaacagcuaccccaagcugagcaagagcuacaucaacgacaagggcaaggaggugcuggugcuguggggcauccaccaccccagcaccagcgccgaccagcagagccuguaccagaacgccgacgccuacguguucgugggcaccagcagauacagcaagaaguucaagcccgagaucgccaucagacccaaggugagagaccaggagggcagaaugaacuacuacuggacccugguggagcccggcgacaagaucaccuucgaggccaccggcaaccugguggugcccagauacgccuucgccauggagagaaacgccggcagcggcaucaucaucagcgacacccccgugcacgacugcaacaccaccugccagacccccaagggcgccaucaacaccagccugcccuuccagaacauccaccccaucaccaucggcaagugccccaaguacgugaagagcaccaagcugagacuggccaccggccugagaaacgugcccagcauccagagcagaggccuguucggcgccaucgccggcuucaucgagggcggcuggaccggcaugguggacggcugguacggcuaccaccaccagaacgagcagggcagcggcuacgccgccgaccugaagagcacccagaacgccaucgacaagaucaccaacaaggugaacagcgugaucgagaagaugaacacccaguucaccgccgugggcaaggaguucaaccaccuggagaagagaaucgagaaccugaacaagaagguggacgacggcuuccuggacaucuggaccuacaacgccgagcugcuggugcugcuggagaacgagagaacccuggacuaccacgacagcaacgugaagaaccuguacgagaaggugagaagccagcugaagaacaacgccaaggagaucggcaacggcugcuucgaguucuaccacaagugcgacaacaccugcauggagagcgugaagaacggcaccuacgacuaccccaaguacagcgaggaggccaagcugaacagagaggagaucgacggcgugaagcuggagagcaccagaaucuaccagauccuggccaucuacagcaccguggccagcagccuggugcugguggugagccugggcgccaucagcuucuggaugugcagcaacggcagccugcagugcagaaucugcaucuga

SEQ ID NO: 169031 - RNA, 1701 nt, Artificial Sequence; identical to SEQ ID NO: 162729
  derived and/or modified CDS sequence (opt4) from hemagglutinin__InfluenzaA__AFK14456

SEQ ID NO: 169032 - RNA, 1701 nt, Artificial Sequence; identical to SEQ ID NO: 162729
  derived and/or modified CDS sequence (opt4) from hemagglutinin__InfluenzaA__AFK14465

SEQ ID NO: 169033 - RNA, 1701 nt, Artificial Sequence
  derived and/or modified CDS sequence (opt4) from hemagglutinin__InfluenzaA__AFK14536
augaaggccauccugguggugcugcuguacaccuucgccaccgccaacgccgacacccugugcaucggcuaccacgccaacaacagcaccgacaccguggacaccgugcuggagaagaacgugaccgugacccacagcgugaaccugcuggaggacaagcacaacggcaagcugugcaagcugagaggcguggccccccugcaccugggcaagugcaacaucgccggcuggauccugggcaaccccgagugcgagagccugagcaccgccagcagcuggagcuacaucguggagaccuacagcagcgacaacggcaccugcuaccccggcgacuucaucgacuacgaggagcugagagagcagcugagcagcgugagcagcuucgagagauucgagaucuuccccaagaccagcagcuggcccaaccacgacagcaacaagggcgugaccgccgccugcccccacgccggcgccaagagcuucuacaagaaccugaucuggcuggugaagaagggcaacagcuaccccaagcugagcaagagcuacaucaacgacaagggcaaggaggugcuggugcuguggggcauccaccaccccagcaccagcgccgaccagcagagccuguaccagaacgccgacgccuacguguucgugggcaccagcagauacagcaagaaguucaagcccgagaucgccaucagacccaaggugagagaccaggagggcagaaugaacuacuacuggacccugguggagcccggcgacaagaucaccuucgaggccaccggcaaccugguggugcccagauacgccuucgccauggagagaaacgccggcagcggcaucaucaucagcgacacccccgugcacgacugcaacaccaccugccagacccccaagggcgccaucaacaccagccugcccuuccagaacauccaccccaucaccaucggcaagugccccaaguacgugaagagcaccaagcugagacuggccaccggccugagaaacgugcccagcauccagagcagaggccuguucggcgccaucgccggcuucaucgagggcggcuggaccggcaugguggacggcugguacggcuaccaccaccagaacgagcagggcagcggcuacgccgccgaccugaagagcacccagcacgccaucgacgagaucaccaacaaggugaacagcgugaucgagaagaugaacacccaguucaccgccgugggcaaggaguucaaccaccuggagaagagaaucgagaaccugaacaagaagguggacgacggcuuccuggacaucuggaccuacaacgccgagcugcuggugcugcuggagaacgagagaacccuggacuaccacgacagcaacgugaagaaccuguacgagaaggugagaagccagcugaagaacaacgccaaggagaucggcaacggcugcuucgaguucuaccacaagugcgacaacaccugcauggagagcgugaagaacggcaccuacgacuaccccaaguacagcgaggaggccaagcugaacagagaggagaucgacggcgugaagcuggagagcaccagaaucuaccagauccuggccaucuacagcaccguggccagcagccuggugcugguggugagccugggcgccaucagcuucuggaugugcagcaacggcagccugcagugcagaaucugcaucuga

SEQ ID NO: 169034 - RNA, 1701 nt, Artificial Sequence; identical to SEQ ID NO: 162729
  derived and/or modified CDS sequence (opt4) from hemagglutinin__InfluenzaA__AFK14571

SEQ ID NO: 169035 - RNA, 1701 nt, Artificial Sequence; identical to SEQ ID NO: 167238
  derived and/or modified CDS sequence (opt4) from hemagglutinin__InfluenzaA__AFK14586

SEQ ID NO: 169036 - RNA, 1701 nt, Artificial Sequence
  derived and/or modified CDS sequence (opt4) from hemagglutinin__InfluenzaA__AFK14595
augaaggccauccugguggugcugcuguacaccuucgccaccgccaacgccgacacccugugcaucggcuaccacgccaacaacagcaccgacaccguggacaccgugcuggagaagaacgugaccgugacccacagcgugaaccugcuggaggacaagcacaacggcaagcugugcaagcugaagggcguggccccccugcaccugggcaagugcaacaucgccggcuggauccugggcaaccccaagugcgagagccugagcaccgccagcagcuggagcuacaucggcgagaccagcagcagcaacaacggcaccugcuaccccggcaacuucaucgacuucgaggagcugaagaagcagcugagcagcgugagcagcuucgagagauucgagaucuuccccaagaccagcagcuggcccaaccacgacagcaacaagggcgugaccgccgccugcccccacgccggcgccaagagcuucuacaagaaccugaucuggcuggugaagaagggcaacagcuaccccaagcugagcaagagcuacaucaacgacaagggcaaggaggugcuggugcuguggggcauccaccaccccagcaccagcgccgaccagcagagccuguaccagaacgccgacgccuacguguucgugggcaccagcagauacagcaagaaguucaagcccgagaucgccaucagacccaaggugagagaccaggagggcagaaugaacuacuacuggacccugguggagcccggcgacaagaucaccuucgaggccaccggcaaccugguggugcccagauacgccuucgccauggagagaaacgccggcagcggcaucaucaucagcgacacccccgugcacgacugcaacaccaccugccagacccccaagggcgccaucaacaccagccugcccuuccagaacauccaccccaucaccaucggcaagugccccaaguacgugaagagcaccaagcugagacuggccaccggccugagaaacgugcccagcauccagagcagaggccuguucggcgccaucgccggcuucaucgagggcggcuggaccggcaugguggacggcugguacggcuaccaccaccagaacgagcagggcagcggcuacgccgccgaccugaagagcacccagaacgccaucgacgagaucaccaacaaggugaacagcgugaucgagaagaugaacacccaguucaccgccgugggcaaggaguucaaccaccuggagaagagaaucgagaaccugaacaagaagguggacgacggcuuccuggacaucuggaccuacaacgccgagcugcuggugcugcuggagaacgagagaacccuggacuaccacgacagcaacgugaagaaccuguacgagaaggugagaagccagcugaagaacaacgccaaggagaucggcaacggcugcuucgaguucuaccacaagugcgacaacaccugcauggagagcgugaagaacggcaccuacgacuaccccaaguacagcgaggaggccaagcugaacagagaggagaucgacggcgugaagcuggagagcaccagaaucuaccagauccuggccaucuacagcaccguggccagcagccuggugcugguggugagccugggcgccaucagcuucuggaugugcagcaacggcagccugcagugcagaaucugcaucuga

SEQ ID NO: 169037 - RNA, 1701 nt, Artificial Sequence; identical to SEQ ID NO: 167238
  derived and/or modified CDS sequence (opt4) from hemagglutinin__InfluenzaA__AFK14612

SEQ ID NO: 169038 - RNA, 1701 nt, Artificial Sequence; identical to SEQ ID NO: 162729
  derived and/or modified CDS sequence (opt4) from hemagglutinin__InfluenzaA__AFK14621

SEQ ID NO: 169039 - RNA, 1701 nt, Artificial Sequence
  derived and/or modified CDS sequence (opt4) from hemagglutinin__InfluenzaA__AFK14630
augaaggccauccugguggugcugcuguacaccuucgccaccgccaacgccgacacccugugcaucggcuaccacgccaacaacagcaccgacaccguggacaccgugcuggagaagaacgugaccgugacccacagcgugaaccugcuggaggacaagcacaacggcaagcugugcaagcugagaggcguggccccccugcaccugggcaagugcaacaucgccggcuggauccugggcaaccccgagugcgagagccugagcaccgccagcagcuggagcuacaucguggagaccagcagcagcgacaacggcaccugcuaccccggcgacuucaucgacuacgaggagcugagagagcagcugagcagcgugagcagcuucgagagauucgagaucuuccccaagaccagcagcuggcccaaccacgacagcaacaagggcgugaccgccgccugcccccacgccggcgccaagagcuucuacaagaaccugaucuggcuggugaagaagggcaacagcuaccccaagcugagcaagagcuacaucaacgacaagggcaaggaggugcuggugcuguggggcauccaccaccccagcaccagagccgaccugcagagcaucaaccagaacgccgacgccuacguguucgugggcaccagcagauacagcaagaaguucaagcccgagaucgccaucagacccaaggugagagaccaggagggcagaaugaacuacuacuggacccugguggagcccggcgacaagaucaccuucgaggccaccggcaaccugguggugcccagauacgccuucgccauggagagaaacgccggcagcggcaucaucaucagcgacacccccgugcacgacugcaacaccaccugccagacccccaagggcgccaucaacaccagccugcccuuccagaacauccaccccaucaccaucggcaagugccccaaguacgugaagagcaccaagcugagacuggccaccggccugagaaacgugcccagcauccagagcagaggccuguucggcgccaucgccggcuucaucgagggcggcuggaccggcaugguggacggcugguacggcuaccaccaccagaacgagcagggcagcggcuacgccgccgaccugaagagcacccagaacgccaucgacgagaucaccaacaaggugaacagcgugaucgagaagaugaacacccaguucaccgccgugggcaaggaguucaaccaccuggagaagagaaucgagaaccugaacaagaagguggacgacggcuuccuggacaucuggaccuacaacgccgagcugcuggugcugcuggagaacgagagaacccuggacuaccacgacagcaacgugaagaaccuguacgagaaggugagaagccagcugaagaacaacgccaaggagaucggcaacggcugcuucgaguucuaccacaagugcgacaacaccugcauggagagcgugaagaacggcaccuacgacuaccccaaguacagcgaggaggccaagcugaacagagaggagaucgacggcgugaagcuggagagcaccagaaucuaccagauccuggccaucuacagcaccguggccagcagccuggugcugguggugagccugggcgccaucagcuucuggaugugcagcaacggcagccugcagugcagaaucugcaucuga

SEQ ID NO: 169040 - RNA, 1701 nt, Artificial Sequence
  derived and/or modified CDS sequence (opt4) from hemagglutinin__InfluenzaA__AFK14639
augaaggccauccugguggugcugcuguacaccuucgccaccgccaacgccgacacccugugcaucggcuaccacgccaacaacagcaccgacaccguggacaccgugcuggagaagaacgugaccgugacccacagcgugaacauccuggaggacaagcacaacggcaagcugugcaagcugagaggcguggccccccugcaccugggcaagugcaacaucgccggcuggauccugggcaaccccgagugcgagagccugagcaccgccagcagcuggagcuacaucguggagaccagcagcagcgacaacggcaccugcuaccccggcgacuucaucgacuacgaggagcugagagagcagcugagcagcgugagcagcuucgagagauucgagaucuuccccaagaccagcagcuggcccaaccacgacagcaacaagggcgugaccgccgccugcccccacgccggcgccaagagcuucuacaagaaccugaucuggcuggugaagaagggcaacagcuaccccaagcugagcaagagcuacaucaacgacaagggcaaggaggugcuggugcuguggggcauccaccaccccagcaccagcgccgaccagcagagccuguaccagaacgccgacgccuacguguucgugggcagcagcagauacagcaagaaguucaagcccgagaucgccaucagacccaaggugagagaccaggagggcagaaugaacuacuacuggacccugguggagcccggcgacaagaucaccuucgaggccaccggcaaccugguggugcccagauacgccuucgccauggagagaaacgccggcagcggcaucaucaucagcgacacccccgugcacgacugcaacaccaccugccagacccccaagggcgccaucaacaccagccugcccuuccagaacauccaccccaucaccaucggcaagugccccaaguacgugaagagcaccaagcugagacuggccaccggccugagaaacgugcccagcauccagagcagaggccuguucggcgccaucgccggcuucaucgagggcggcuggaccggcaugguggacggcugguacggcuaccaccaccagaacgagcagggcagcggcuacgccgccgaccugaagagcacccagaacgccaucgacgagaucaccaacaaggugaacagcgugaucgagaagaugaacacccaguucaccgccgugggcaaggaguucaaccaccuggagaagagaaucgagaaccugaacaagaagguggacgacggcuuccuggacaucuggaccuacaacgccgagcugcuggugcugcuggagaacgagagaacccuggacuaccacgacagcaacgugaagaaccuguacgagaaggugagaggccagcugaagaacaacgccaaggagaucggcaacggcugcuucgaguucuaccacaagugcgacaacaccugcauggagagcgugaagaacggcaccuacgacuaccccaaguacagcgaggaggccaagcugaacagagaggagaucgacggcgugaagcuggagagcaccagaaucuaccagauccuggccaucuacagcaccguggccagcagccuggugcugguggugagccugggcgccaucagcuucuggaugugcagcaacggcagccugcagugcagaaucugcaucuga

SEQ ID NO: 169041 - RNA, 1701 nt, Artificial Sequence; identical to SEQ ID NO: 162729
  derived and/or modified CDS sequence (opt4) from hemagglutinin__InfluenzaA__AFK14661

SEQ ID NO: 169042 - RNA, 1701 nt, Artificial Sequence; identical to SEQ ID NO: 167238
  derived and/or modified CDS sequence (opt4) from hemagglutinin__InfluenzaA__AFK14670

SEQ ID NO: 169043 - RNA, 1701 nt, Artificial Sequence; identical to SEQ ID NO: 167238
  derived and/or modified CDS sequence (opt4) from hemagglutinin__InfluenzaA__AFK14678

SEQ ID NO: 169044 - RNA, 1701 nt, Artificial Sequence
  derived and/or modified CDS sequence (opt4) from hemagglutinin__InfluenzaA__AFK14688
augaaggccauccugguggugcugcuguacaccuucgccaccgccaacgccgacacccugugcaucggcuaccacgccaacaacagcaccgacaccguggacaccgugcuggagaagaacgugaccgugacccacagcgugaaccugcuggaggacaagcacaacggcaagcugugcaagcugagaggcguggccccccugcaccugggcaagugcaacaucgccggcuggauccugggcaaccccgagugcgagagccugagcaccgccagcagcuggagcuacaucguggagaccagcagcagcgacaacggcaccugcuaccccggcgacuucauccacgacgaggagcugagaaagcagcugagcagcgugagcagcuucgagagauucgagaucuuccccaagaccagcagcuggcccaaccacgacagcaacaagggcgugaccgccgccugcccccacgccggcgccaagagcuucuacaagaaccugaucuggcuggugaagaagggcaacagcuaccccaagcugagcaagagcuacaucaacgacaagggcaaggaggugcuggugcuguggggcauccaccaccccagcaccagcgccgaccagcagagccuguaccagaacgccgacgccuacguguucgugggcaccagcagauacagcaagaaguucaagcccgagaucgccaucagacccaaggugagagaccaggagggcagaaugaacuacuacuggacccugguggagcccggcgacaagaucaccuucgaggccaccggcaaccugguggugcccagauacgccuucgccauggagagaaaggccggcagcggcaucaucauccuggacacccccgugcacgacuggaacaccaccugcgagacccccaagggcgccgugaacaccagccugcccuuccagaacauccaccccaucaccaucggcaagugccccaaguacgugaagagcaccaagcugagacuggccaccggccugagaaacgugcccagcauccagagcagaggccuguucggcgccaucgccggcuucaucgagggcggcuggaccggcaugguggacggcugguacggcuaccaccaccagaacgagcagggcagcggcuacgccgccgaccugaagagcacccagaacgccaucgacgagaucaccaacaaggugaacagcgugaucgagaagaugaacacccaguucaccgccgugggcaaggaguucaaccaccuggagaagagaaucgagaaccugaacaagaagguggacgacggcuuccuggacaucuggaccuacaacgccgagcugcuggugcugcuggagaacgagagaacccuggacuaccacgacagcaacgugaagaaccuguacgagaaggugagaagccagcugaagaacaacgccaaggagaucggcaacggcugcuucgaguucuaccacaagugcgacaacaccugcauggagagcgugaagaacggcaccuacgacuaccccaaguacagcgaggaggccaagcugaacagagaggagaucgacggcgugaagcuggagagcaccagaaucuaccagauccuggccaucuacagcaccguggccagcagccuggugcugguggugagccugggcgccaucagcuucuggaugugcagcaacggcagccugcagugcagaaucugcaucuga

SEQ ID NO: 169045 - RNA, 1701 nt, Artificial Sequence; identical to SEQ ID NO: 167238
  derived and/or modified CDS sequence (opt4) from hemagglutinin__InfluenzaA__AFK14697

SEQ ID NO: 169046 - RNA, 1701 nt, Artificial Sequence; identical to SEQ ID NO: 167238
  derived and/or modified CDS sequence (opt4) from hemagglutinin__InfluenzaA__AFK14713

SEQ ID NO: 169047 - RNA, 1701 nt, Artificial Sequence; identical to SEQ ID NO: 167238
  derived and/or modified CDS sequence (opt4) from hemagglutinin__InfluenzaA__AFK14722

SEQ ID NO: 169048 - RNA, 1701 nt, Artificial Sequence
  derived and/or modified CDS sequence (opt4) from hemagglutinin__InfluenzaA__AFK14731
augaaggccauccugguggugcugcuguacaccuucgccaccgccaacgccgacacccugugcaucggcuaccacgccaacaacagcaccgacaccguggacaccgugcuggagaagaacgugaccgugacccacagcgugaaccugcuggaggacaagcacaacggcaagcugugcaagcugagaggcguggccccccugcaccugggcaagugcaacaucgccggcuggauccugggcaaccccgagugcgagagccugagcaccgccagcagcuggagcuacaucguggagaccagcagcagcgacaacggcaccugcuaccccggcgacuucaucgacuacgaggagcugagaaagcagcugagcagcgugagcagcuucgagagaguggagaucuuccccaagaccagcagcuggcccaaccacgacagcaacaagggcgugaccgccgccugcccccacgccggcgccaagagcuucuacaagaaccugaucuggcuggugaagaagggcaacagcuaccccaagcugagcaagagcuacaucaacgacaagggcaaggaggugcuggugcuguggggcauccaccaccccagcaccagcgccgaccagcagagccuguaccagaacgccgacgccuacguguucgugggcaccagcagauacagcaagaaguucaagcccgagaucgccaucagacccaaggugagagaccaggagggcagaaugaacuacuacuggacccugguggagcccggcgacaagaucaccuucgaggccaccggcaaccugguggugcccagauacgccuucgccauggagagaaacgccggcagcggcaucaucaucagcgacacccccgugcacgacugcaacaccaccugccagacccccaagggcgccgugaacaccagccugcccuuccagaacauccaccccaucaccaucggcaagugccccaaguacgugaagagcaccaagcugagacuggccaccggccugagaaacgugcccagcauccagagcagaggccuguucggcgccaucgccggcuucaucgagggcggcuggaccggcaugguggacggcugguacggcuaccaccaccagaacgagcagggcagcggcuacgccgccgaccugaagagcacccagaacgccaucgacgagaucaccaacaaggugaacagcgugaucgagaagaugaacacccaguucaccgccgugggcaaggaguucaaccaccuggagaagagaaucgagaaccugaacaagaagguggacgacggcuuccuggacaucuggaccuacaacgccgagcugcuggugcugcuggagaacgagagaacccuggacuaccacgacagcaacgugaagaaccuguacgagaaggugagaagccagcugaagaacaacgccaaggagaucggcaacggcugcuucgaguucuaccacaagugcgacaacaccugcauggagagcgugaagaacggcaccuacgacuaccccaaguacagcgaggaggccaagcugaacagagaggagaucgacggcgugaagcuggagagcaccagaaucuaccagauccuggccaucuacagcaccguggccagcagccuggugcugguggugagccugggcgccaucagcuucuggaugugcagcaacggcagccugcagugcagaaucugcaucuga

SEQ ID NO: 169049 - RNA, 1701 nt, Artificial Sequence; identical to SEQ ID NO: 167238
  derived and/or modified CDS sequence (opt4) from hemagglutinin__InfluenzaA__AFK14740

SEQ ID NO: 169050 - RNA, 1701 nt, Artificial Sequence; identical to SEQ ID NO: 167238
  derived and/or modified CDS sequence (opt4) from hemagglutinin__InfluenzaA__AFK14749

SEQ ID NO: 169051 - RNA, 1701 nt, Artificial Sequence; identical to SEQ ID NO: 167238
  derived and/or modified CDS sequence (opt4) from hemagglutinin__InfluenzaA__AFK14756

SEQ ID NO: 169052 - RNA, 1701 nt, Artificial Sequence; identical to SEQ ID NO: 167238
  derived and/or modified CDS sequence (opt4) from hemagglutinin__InfluenzaA__AFK14764

SEQ ID NO: 169053 - RNA, 1701 nt, Artificial Sequence
  derived and/or modified CDS sequence (opt4) from hemagglutinin__InfluenzaA__AFK14779
augaaggccauccugguggugcugcuguacaccuucgccaccgccaacgccgacacccugugcaucggcuaccacgccaacaacagcaccgacaccguggacaccgugcuggagaagaacgugaccgugacccacagcgugaaccugcuggaggacaagcacaacggcaagcugugcaagcugggcggcguggccccccugcaccugggcaagugcaacaucgccggcuggauccugggcaaccccgagugcgagagccugagcaccgccagcagcuggagcuacaucguggagaccagcagcagcgacaacggcaccugcuaccccggcaacuucaucgacuacgaggagcugagagagcagcugagcagcgugagcagcuucgagagauucgagaucuuccccaagaccagcagcuggcccaaccacgacagcaacaagggcgugaccgccgccugcccccacgccggcgccaagagcuucuacaagaaccugaucuggcuggugaagaagggcaacagcuaccccaagcugagcaagagcuacaucaacgacaagggcaaggaggugcuggugcuguggggcauccaccaccccagcaccagcgccgaccagcagagccuguaccagaacgccgacgccuacguguucgugggcaccagcagauacagcaagaaguucaagcccgagaucgccaucagacccaaggugagagaccaggagggcagaaugaacuacuacuggacccugguggagcccggcgacaagaucaccuucgaggccaccggcaaccugguggugcccagauacgccuucgccauggagagaaacgccggcagcggcaucaucaucagcgacacccccgugcacgacugcaacaccaccugccagacccccaagggcgccaucaacaccagccugcccuuccagaacauccaccccaucaccaucggcaagugccccaaguacgugaagagcaccaagcugagacuggccaccggccugagaaacgugcccagcauccagagcagaggccuguucggcgccaucgccggcuucaucgagggcggcuggaccggcaugguggacggcugguacggcuaccaccaccagaacgagcagggcagcggcuacgccgccgaccugaagagcacccagaacgccaucgacgagaucaccaacaaggugaacagcgugaucgagaagaugaacacccaguucaccgccgugggcaaggaguucaaccaccuggagaagagaaucgagaaccugaacaagaagguggacgacggcuuccuggacaucuggaccuacaacgccgagcugcuggugcugcuggagaacgagagaacccuggacuaccacgacagcaacgugaagaaccuguacgagaaggugagaagccagcugaagaacaacgccaaggagaucggcaacggcugcuucgaguucuaccacaagugcgacaacaccugcauggagagcgugaagaacggcaccuacgacuaccccaaguacagcgaggaggccaagcugaacagagaggagaucgacggcgugaagcuggagagcaccagaaucuaccagauccuggccaucuacagcaccguggccagcagccuggugcugguggugagccugggcgccaucagcuucuggaugugcagcaacggcagccugcagugcagaaucugcaucuga

SEQ ID NO: 169054 - RNA, 1701 nt, Artificial Sequence
  derived and/or modified CDS sequence (opt4) from hemagglutinin__InfluenzaA__AFK14788
augaaggccauccugguggugcugcuguacaccuucgccaccgccaacgccgacacccugugcaucggcuaccacgccaacaacagcaccgacaccguggacaccgugcuggagaagaacgugaccgugacccacagcgugaacauccuggaggacaagcacaacggcaagcugugcaagcugagaggcguggccccccugcaccugggcaagugcaacaucgccggcuggauccugggcaaccccgagugcgagagccugagcaccgccagcagcuggagcuacaucguggagaccagcagcagcgacaacggcaccugcuaccccggcgacuucaucgacuacgaggagcugagagagcagcugagcagcgugagcagcuucgagagauucgagaucuuccccaagaccagcagcuggcccaaccacgacagcaacaagggcgugaccgccgccugcccccacgccggcgccaagagcuucuacaagaaccugaucuggcuggugaagaagggcaacagcuaccccaagcugagaaagagcuacaucaacgacaagggcaaggaggugcuggugcuguggggcauccaccaccccagcaccagcgccgaccagcagagccuguaccagaacgccgacgccuacguguucgugggcagcagcagauacagcaagaaguucaagcccgagaucgccaucagacccaaggugagagaccaggagggcagaaugaacuacuacuggacccugguggagcccggcgacaagaucaccuucgaggccaccggcaaccugguggugcccagauacgccuucgccauggagagaaacgccggcagcggcaucaucaucagcgacacccccgugcacgacugcaacaccaccugccagacccccaagggcgccaucaacaccagccugcccuuccagaacauccaccccaucaccaucggcaagugccccaaguacgugaagagcaccaagcugagacuggccaccggccugagaaacgugcccagcauccagagcagaggccuguucggcgccaucgccggcuucaucgagggcggcuggaccggcaugguggacggcugguacggcuaccaccaccagaacgagcagggcagcggcuacgccgccgaccugaagagcacccagaacgccaucgacgagaucaccaacaaggugaacagcgugaucgagaagaugaacacccaguucaccgccgugggcaaggaguucaaccaccuggagaagagaaucgagaaccugaacaagaagguggacgacggcuuccuggacaucuggaccuacaacgccgagcugcuggugcugcuggagaacgagagaacccuggacuaccacgacagcaacgugaagaaccuguacgagaaggugagaagccagcugaagaacaacgccaaggaggugggcaacggcugcuucgaguucuaccacaagugcgacaacaccugcauggagagcgugaagaacggcaccuacgacuaccccaaguacagcgaggaggccaagcugaacagagaggagaucgacggcgugaagcuggagagcaccagaaucuaccagauccuggccaucuacagcaccgccgccagcagccuggugcugguggugagccugggcgccaucagcuucuggaugugcagcaacggcagccugcagugcagaaucugcaucuga

SEQ ID NO: 169055 - RNA, 1701 nt, Artificial Sequence
  derived and/or modified CDS sequence (opt4) from hemagglutinin__InfluenzaA__AFK14798
augaaggccauccugguggugcugcuguacaccuucgccaccgccaacgccgacacccugugcaucggcuaccacgccaacaacagcaccgacaccguggacaccgugcuggagaagaacgugaccgugacccacagcgugaaccugcuggaggacaagcacaacggcaagcugugcaagcugagaggcguggccccccugcaccugggcaagugcaacaucgccggcuggauccugggcaaccccgagugcgagagccugagcaccgccagcagcuggagcuacaucguggagaccagcagcagcgacaacggcaccugcuaccccggcgacuucaucaacuacgaggagcugagaaagcagcugagcagcgugagcagcuucgagagaguggagaucuuccccaagaccagcagcuggcccaaccacgacagcaacaagggcgugaccgccgccugcccccacgccggcgccaagagcuucuacaagaaccugaucuggcuggugaagaagggcaacagcuaccccaagcugagcaagagcuacaucaacgacaagggcaaggaggugcuggugcuguggggcauccaccaccccagcaccagcgccgaccagcagagccuguaccagaacgccgacgccuacguguucgugggcaccagcagauacagcaagaaguucaagcccgagaucgccaucagacccaaggugagagaccaggagggcagaaugaacuacuacuggacccugguggagcccggcgacaagaucaccuucgaggccaccggcaaccugguggugcccagauacgccuucgccauggagagaaacgccggcagcggcaucaucaucagcgacacccccgugcacgacugcaacaccaccugccagacccccaacggcgccaucaacaccagccugcccuuccagaacauccaccccaucaccaucggcaagugccccaaguacgugaagagcaccaagcugagacuggccaccggccugagaaacgugcccagcauccagagcagaggccuguucggcgccaucgccggcuucaucgagggcggcuggaccggcaugguggacggcugguacggcuaccaccaccagaacgagcagggcagcggcuacgccgccgaccugaagagcacccagaacgccaucgacaagaucaccaacaaggugaacagcgugaucgagaagaugaacacccaguucaccgccgugggcaaggaguucaaccaccuggagaagagaaucgagaaccugaacaagaagguggacgacggcuuccuggacaucuggaccuacaacgccgagcugcuggugcugcuggagaacgagagaacccuggacuaccacgacagcaacgugaagaaccuguacgagaaggugagaagccagcugaagaacaacgccaaggagaucggcaacggcugcuucgaguucuaccacaagugcgacaacaccugcauggagagcgugaagaacggcaccuacgacuaccccaaguacagcgaggaggccaagcugaacagagaggagaucgacggcgugaagcuggagagcaccagaaucuaccagauccuggccaucuacagcaccguggccagcagccuggugcugguggugagccugggcgccaucagcuucuggaugugcagcaacggcagccugcagugcagaaucugcaucuga

SEQ ID NO: 169056 - RNA, 1701 nt, Artificial Sequence
  derived and/or modified CDS sequence (opt4) from hemagglutinin__InfluenzaA__AFK14814
augaaggccauccugguggugcugcuguacaccuucgccaccgccaacgccgacacccugugcaucggcuaccacgccaacaacagcaccgacaccguggacaccgugcuggagaagaacgugaccgugacccacagcgugaaccugcuggaggacaagcacaacggcaagcugugcaagcugagaggcguggccccccugcaccugggcaagugcaacaucgccggcuggauccugggcaaccccgagugcgagagccugagcaccgccagcagcuggagcuacaucguggagaccagcagcagcgacaacggcaccugcuaccccggcgacuucaucgacuacgaggagcugagagagcagcugagcagcgugagcagcuacgagagauacgagaucuuccccaagaccagcagcuggcccaaccacgacagcaacaagggcgugaccgccgccugcccccacgccggcgccaagagcuucuacaagaaccugaucuggcuggugaagaagggcaacagcuaccccaagcugagcaagagcuacaucaacgacaagggcaaggaggugcuggugcuguggggcauccaccaccccagcaccagcgccgaccagcagagccuguaccagaacgccgacgccuacguguucgugggcaccagcagauacagcaagaaguucaagcccgagaucgccaucagacccaaggugagagagcaggagggcagaaugaacuacuacuggacccugguggagcccggcgacaagaucaccuucgaggccaccggcaaccugguggugcccagauacgccuucgccauggagagaaacgccggcagcggcaucaucaucagcgacacccccgugcacgacugcaacaccaccugccagacccccaagggcgccaucaacaccagccugcccuuccagaacauccaccccaucaccaucggcaagugccccaaguacgugaagagcaccaagcugagacuggccaccggccugagaaacgugcccagcauccagagcagaggccuguucggcgccaucgccggcuucaucgagggcggcuggaccggcaugguggacggcugguacggcuaccaccaccagaacgagcagggcagcggcuacgccgccgaccugaagagcacccagaacgccaucgacgagaucaccaacaaggugaacagcgugaucgagaagaugaacacccaguucaccgccgugggcaaggaguucaaccaccuggagaagagaaucgagaaccugaacaagaagguggacgacggcuuccuggacaucuggaccuacaacgccgagcugcuggugcugcuggagaacgagagaacccuggacuaccacgacagcaacgugaagaaccuguacgagaaggugagaagccagcugaagaacaacgccaaggagaucggcaacggcugcuucgaguucuaccacaagugcgacaacaccugcauggagagcgugaagaacggcaccuacgacuaccccaaguacagcgaggaggccaagcugaacagagaggagaucgacggcgugaagcuggagagcaccagaaucuaccagauccuggccaucuacagcaccguggccagcagccuggugcugguggugagccugggcgccaucagcuucuggaugugcagcaacggcagccugcagugcagaaucugcaucuga

SEQ ID NO: 169057 - RNA, 1701 nt, Artificial Sequence
  derived and/or modified CDS sequence (opt4) from hemagglutinin__InfluenzaA__AFK14831
augaaggccauccugguggugcugcuguacaccuucgccaccgccaacgccgacacccugugcaucggcuaccacgccaacaacagcaccgacaccguggacaccgugcuggagaagaacgugaccgugacccacagcgugaaccugcuggaggacaagcacaacggcaagcugugcaagcugagaggcguggccccccugcaccugggcaagugcaacaucgccggcuggauccugggcaaccccgagugcgagagccugagcaccgccagcagcuggagcuacaucguggagaccagcagcagcgacaacggcaccugcuaccccggcgacuucagcgacuacgaggagcugagagagcagcugagcagcgugagcagcuucgagagauucgagaucuuccccaagaccagcagcuggcccaaccacgacagcaacaagggcgugaccgccgccugcccccacgccggcgccaagagcuucuacaagaaccugaucuggcuggugaagaagggcaacagcuaccccaagcugagcaagagcuacaucaacgacaagggcaaggaggugcuggugcuguggggcauccaccaccccagcaccagcgccgaccagcagagccuguaccagaacgccgacgccuacguguucgugggcaccagcagauacagcaagaaguucaagcccgagaucgccaucagacccaaggugagagaccaggagggcagaaugaacuacuacuggacccugguggagcccggcgacaagaucaccuucgaggccaccggcaaccugguggugcccagauacgccuucgccauggagagaaacgccggcagcggcaucaucaucagcgacacccccgugcacgacugcaacaccaccugccagacccccaagggcgccaucaacaccagccugcccuuccagaacauccaccccaucaccaucggcaagugccccaaguacgugaagagcaccaagcugagacuggccaccggccugagaaacgugcccagcauccagagcagaggccuguucggcgccaucgccggcuucaucgagggcggcuggaccggcaugguggacggcugguacggcuaccaccaccagaacgagcagggcagcggcuacgccgccgaccugaagagcacccagaacgccaucgacgagaucaccaacaaggugaacagcgugaucgagaagaugaacacccaguucaccgccgugggcaaggaguucaaccaccuggagaagagaaucgagaaccugaacaagaagguggacgacggcuuccuggacaucuggaccuacaacgccgagcugcuggugcugcuggagaacgagagaacccuggacuaccacgacagcaacgugaagaaccuguacgagaaggugagaagccagcugaagaacaacgccaaggagaucggcaacggcugcuucgaguucuaccacaagugcgacaacaccugcauggagagcgugaagaacggcaccuacgacuaccccaaguacagcgaggaggccaagcugaacagagaggagaucgacggcgugaagcuggagagcaccagaaucuaccagauccuggccaucuacagcaccguggccagcagccuggugcugguggugagccugggcgccaucagcuucuggaugugcagcaacggcagccugcagugcagaaucugcaucuga

SEQ ID NO: 169058 - RNA, 1701 nt, Artificial Sequence; identical to SEQ ID NO: 162729
  derived and/or modified CDS sequence (opt4) from hemagglutinin__InfluenzaA__AFK14839

SEQ ID NO: 169059 - RNA, 1701 nt, Artificial Sequence
  derived and/or modified CDS sequence (opt4) from hemagglutinin__InfluenzaA__AFK14847
augaaggccauccugguggugcugcuguacaccuucgccaccgccaacgccgacacccugugcaucggcuaccacgccaacaacagcaccgacaccguggacaccgugcuggagaagaacgugaccgugacccacagcgugaaccugcuggaggacaagcacaacggcaagcugugcaagcugagaggcguggccccccugcaccugggcaagugcaacaucgccggcuggauccugggcaaccccgagugcgagagccugagcaccgccagcagcuggagcuacaucguggagaccagcagcagcgacaacggcaccugcuaccccggcgacuucaucgacuacgaggagcugagagagcagcugagcagcgccagcagcuucgagagauacgagaucuuccccaagaccagcagcuggcccaaccacgacagcaacaagggcgugaccgccgccugcccccacgccggcgccaagagcuucuacaagaaccugaucuggcuggugaagaagggcaacagcuaccccaagcugagcaagagcuacaucaacgacaagggcaaggaggugcuggugcuguggggcauccaccaccccagcaccagcgccgaccagcagagccuguaccagaacgccgacgccuacguguucgugggcaccagcagauacagcaagaaguucaagcccgagaucgccaucagacccaaggugagagaccaggagggcagaaugaacuacuacuggacccugguggagcccggcgacaagaucaccuucgaggccaccggcaaccugguggugcccagauacgccuucgccauggagagaaacgccggcagcggcaucaucaucagcgacacccccgugcacgacugcaacaccaccugccagacccccaagggcgccaucaacaccagccugcccuuccagaacauccaccccaucaccaucggcaagugccccaaguacgugaagagcaccaagcugagacuggccaccggccugagaaacgugcccagcauccagagcagaggccuguucggcgccaucgccggcuucaucgagggcggcuggaccggcaugguggacggcugguacggcuaccaccaccagaacgagcagggcagcggcuacgccgccgaccugaagagcacccagaacgccaucgacgagaucaccaacaaggugaacagcgugaucgagaagaugaacacccaguucaccgccgugggcaaggaguucaaccaccuggagaagagaaucgagaaccugaacaagaagguggacgacggcuuccuggacaucuggaccuacaacgccgagcugcuggugcugcuggagaacgagagaacccuggacuaccacgacagcaacgugaagaaccuguacgagaaggugagaagccagcugaagaacaacgccaaggagaucggcaacggcugcuucgaguucuaccacaagugcgacaacaccugcauggagagcgugaagaacggcaccuacgacuaccccaaguacagcgaggaggccaagcugaacagagaggagaucgacggcgugaagcuggagagcaccagaaucuaccagauccuggccaucuacagcaccguggccagcagccuggugcugguggugagccugggcgccaucagcuucuggaugugcagcaacggcagccugcagugcagaaucugcaucuga

SEQ ID NO: 169060 - RNA, 1701 nt, Artificial Sequence; identical to SEQ ID NO: 167238
  derived and/or modified CDS sequence (opt4) from hemagglutinin__InfluenzaA__AFK14868

SEQ ID NO: 169061 - RNA, 1701 nt, Artificial Sequence; identical to SEQ ID NO: 163893
  derived and/or modified CDS sequence (opt4) from hemagglutinin__InfluenzaA__AFK14884

SEQ ID NO: 169062 - RNA, 1701 nt, Artificial Sequence; identical to SEQ ID NO: 163893
  derived and/or modified CDS sequence (opt4) from hemagglutinin__InfluenzaA__AFK14892

SEQ ID NO: 169063 - RNA, 1701 nt, Artificial Sequence; identical to SEQ ID NO: 163893
  derived and/or modified CDS sequence (opt4) from hemagglutinin__InfluenzaA__AFK14901

SEQ ID NO: 169064 - RNA, 1701 nt, Artificial Sequence; identical to SEQ ID NO: 163893
  derived and/or modified CDS sequence (opt4) from hemagglutinin__InfluenzaA__AFK14910

SEQ ID NO: 169065 - RNA, 1701 nt, Artificial Sequence; identical to SEQ ID NO: 162729
  derived and/or modified CDS sequence (opt4) from hemagglutinin__InfluenzaA__AFK14919

SEQ ID NO: 169066 - RNA, 1701 nt, Artificial Sequence; identical to SEQ ID NO: 162729
  derived and/or modified CDS sequence (opt4) from hemagglutinin__InfluenzaA__AFK14929

SEQ ID NO: 169067 - RNA, 1701 nt, Artificial Sequence; identical to SEQ ID NO: 168246
  derived and/or modified CDS sequence (opt4) from hemagglutinin__InfluenzaA__AFK25599

SEQ ID NO: 169068 - RNA, 1701 nt, Artificial Sequence
  derived and/or modified CDS sequence (opt4) from hemagglutinin__InfluenzaA__AFK25601
augaaggccauccugguggugcugcuguacaccuucgccaccgccaacgccgacacccugugcaucggcuaccacgccaacaacagcaccgacaccguggacaccgugcuggagaagaacgugaccgugacccacagcgugaaccugcuggaggacaagcacaacggcaagcugugcaagcugagaggcguggccccccugcaccugggcaagugcaacaucgccggcuggauccugggcaaccccgagugcgugacccugagcaccgccagcagcuggagcuacaucguggagaccagcagcagcgacaacggcaccugcuaccccggcgacuucaucgacuacgaggagcugagagagcagcugagcagcgugagcagcuucgagagauucgagaucuuccccaagaccagcagcuggcccaaccacgacagcaacaagggcgugaccgccgccugcccccacgccggcgccaagggcuucuacaagaaccugaucuggcuggugaagaagggcaacagcuaccccaagcugagcaagagcuacaucaacgacaagggcaaggaggugcuggugcuguggggcauccaccaccccagcaccaccgccgaccagcagagccuguaccagaacgccgacaccuacguguucgugggcaccagcagauacagcaagaaguucaagcccgagaucgccaucagacccaaggugagagaccaggagggcagaaugaacuacuacuggacccugguggagcccggcgacaagaucaccuucgaggccaccggcaaccugguggugcccagauacgccuucgccauggagagagacgccggcagcggcaucaucaucagcgacacccccgugcacgacugcaacaccaccugccagacccccaagggcgccaucaacaccagccugcccuuccagaacauccaccccaucaccaucggcaagugccccaaguacgugaagagcaccaagcugagacuggccaccggccugagaaacgugcccagcauccagagcagaggccuguucggcgccaucgccggcuucaucgagggcggcuggaccggcaugguggacggcugguacggcuaccaccaccagaacgagcagggcagcggcuacgccgccgaccugaagagcacccagaacgccaucgacaagaucaccaacaaggugaacagcgugaucgagaagaugaacacccaguucaccgccgugggcaaggaguucaaccaccuggagaagagaaucgagaaccugaacaagaagguggacgacggcuuccuggacaucuggaccuacaacgccgagcugcuggugcugcuggagaacgagagaacccuggacuaccacgacagcaacgugaagaaccuguacgagaaggugagaaaccagcugaagaacaacgccaaggagaucggcaacggcugcuucgaguucuaccacaagugcgacaacaccugcauggagagcgugaagaacggcaccuacgacuaccccaaguacagcgaggaggccaagcugaacagagaggagaucgacggcgugaagcuggagagcaccagaaucuaccagauccuggccaucuacagcaccgccgccagcagccuggugcugguggugagccugggcgccaucagcuucuggaugugcagcaacggcagccugcagugcagaaucugcaucuga

SEQ ID NO: 169069 - RNA, 1701 nt, Artificial Sequence; identical to SEQ ID NO: 168246
  derived and/or modified CDS sequence (opt4) from hemagglutinin__InfluenzaA__AFK25603

SEQ ID NO: 169070 - RNA, 1701 nt, Artificial Sequence
  derived and/or modified CDS sequence (opt4) from hemagglutinin__InfluenzaA__AFK25605
augaaggccauccugguggugcugcuguacaccuucgccaccgccaacgccgacacccugugcaucggcuaccacgccaacaacagcaccgacaccguggacaccgugcuggagaagaacgugaccgugacccacagcgugaaccugcuggaggacaagcacaacggcaagcugugcaagcugagaggcguggccccccugcaccugggcaagugcaacaucgccggcuggauccugggcaaccccgagugcgagacccugagcaccgccagcagcuggagcuacaucguggagaccagcagcagcgacaacggcaccugcuaccccggcgacuucaucgacuacgaggagcugagagagcagcugagcagcgugagcagcuucgagagauucgagaucuuccccaagaccagcagcuggcccaaccacgacagcaacaagggcgugaccgccgccugcccccacgccggcgccaagggcuucuacaagaaccugaucuggcuggugaagaagggcaacagcuaccccaagcugagcaagagcuacaucaacgacaagggcaaggaggugcuggugcuguggggcauccaccaccccagcaccaccgccgaccagcagagccuguaccagaacgccgacaccuacguguucgugggcaccagcagauacagcaagaaguucaagcccgagaucgccaucagacccaaggugagagaccaggagggcagaaugaacuacuacuggacccugguggagcccggcgacaagaucaccuucgaggccaccggcaaccugguggugcccagauacgccuucgccauggagagagacgccggcagcggcaucaucaucagcgacacccccgugcacgacugcaacaccaccugccagacccccaagggcgccaucaacaccagccugcccuuccagaacauccaccccaucaccaucggcaagugccccaaguacgugagaagcaccaagcugagacuggccaccggccugagaaacgugcccagcauccagagcagaggccuguucggcgccaucgccggcuucaucgagggcggcuggaccggcaugguggacggcugguacggcuaccaccaccagaacgagcagggcagcggcuacgccgccgaccugaagagcacccagaacgccaucgacaagaucaccaacaaggugaacagcgugaucgagaagaugaacacccaguucaccgccgugggcaaggaguucaaccaccuggagaagagaaucgagaaccugaacaagaagguggacgacggcuuccuggacaucuggaccuacaacgccgagcugcuggugcugcuggagaacgagagaacccuggacuaccacgacagcaacgugaagaaccuguacgagaaggugagaaaccagcugaagaacaacgccaaggagaucggcaacggcugcuucgaguucuaccacaagugcgacaacaccugcauggagagcgugaagaacggcaccuacgacuaccccaaguacagcgaggaggccaagcugaacagagaggagaucgacggcgugaagcuggagagcaccagaaucuaccagauccuggccaucuacagcaccgccgccagcagccuggugcugguggugagccugggcgccaucagcuucuggaugugcagcaacggcagccugcagugcagaaucugcaucuga

SEQ ID NO: 169071 - RNA, 1701 nt, Artificial Sequence; identical to SEQ ID NO: 168474
  derived and/or modified CDS sequence (opt4) from hemagglutinin__InfluenzaA__AFK74526

SEQ ID NO: 169072 - RNA, 1701 nt, Artificial Sequence; identical to SEQ ID NO: 162729
  derived and/or modified CDS sequence (opt4) from hemagglutinin__InfluenzaA__AFK74534

SEQ ID NO: 169073 - RNA, 1701 nt, Artificial Sequence; identical to SEQ ID NO: 162729
  derived and/or modified CDS sequence (opt4) from hemagglutinin__InfluenzaA__AFK74544

SEQ ID NO: 169074 - RNA, 1701 nt, Artificial Sequence; identical to SEQ ID NO: 162729
  derived and/or modified CDS sequence (opt4) from hemagglutinin__InfluenzaA__AFK74554

SEQ ID NO: 169075 - RNA, 1701 nt, Artificial Sequence; identical to SEQ ID NO: 162971
  derived and/or modified CDS sequence (opt4) from hemagglutinin__InfluenzaA__AFK74564

SEQ ID NO: 169076 - RNA, 1701 nt, Artificial Sequence; identical to SEQ ID NO: 165284
  derived and/or modified CDS sequence (opt4) from hemagglutinin__InfluenzaA__AFK74575

SEQ ID NO: 169077 - RNA, 1701 nt, Artificial Sequence; identical to SEQ ID NO: 162716
  derived and/or modified CDS sequence (opt4) from hemagglutinin__InfluenzaA__AFK74585

SEQ ID NO: 169078 - RNA, 1701 nt, Artificial Sequence
  derived and/or modified CDS sequence (opt4) from hemagglutinin__InfluenzaA__AFK74595
augaaggccauccugguggugcugcuguacaccuucgccaccgccaacgccgacacccugugcaucggcuaccacgccaacaacagcaccgacaccguggacaccgugcuggagaagaacgugaccgugacccacagcgugaaccugcuggaggacaagcacaacggcaagcugugcaagcugagaggcguggccccccugcaccugggcaagugcaacaucgccggcuggauccugggcaaccccgagugcgagagccugagcaccgccagcagcuggagcuacaucguggagaccagcagcagcgacaacggcaccugcuaccccggcgacuucaucgacuacgaggagcugagagagcagcugagcagcgugagcagcuucgagagauucgagaucuuccccaagaccagcagcuggcccaaccacgaccugaacaagggcgugaccgccgccugcccccacgccggcgccaagagcuucuacaagaaccugaucuggcuggugaagaagggcaacagcuaccccaagcugagcaagagcuacaucaacgacaagggcaaggaggugcuggugcuguggggcauccaccaccccagcaccagcgccgaccagcagagccuguaccagaacgccgacgccuacguguucgugggcaccagcagauacagcaagaaguucaagcccgagaucgccaucagacccaaggugagagaccaggagggcagaaugaacuacuacuggacccugguggagcccggcgacaagaucaccuucgaggccaccggcaaccugguggugcccagauacgccuucgccauggagagaaacgccggcagcggcaucaucaucagcgacacccccgugcacgacugcaacaccaccugccagacccccaagggcgccaucaacaccagccugcccuuccagaacauccaccccaucaccaucggcaagugccccaaguacgugaagagcaccaagcugagacuggccaccggccugagaaacgugcccagcauccagagcagaggccuguucggcgccaucgccggcuucaucgagggcggcuggaccggcaugguggacggcugguacggcuaccaccaccagaacgagcagggcagcggcuacgccgccgaccugaagagcacccagaacgccaucgacgagaucaccaacaaggugaacagcgugaucgagaagaugaacacccaguucaccgccgugggcaaggaguucaaccaccuggagaagagaaucgagaaccugaacaagaagguggacgacggcuuccuggacaucuggaccuacaacgccgagcugcuggugcugcuggagaacgagagaacccuggacuaccacgacagcaacgugaagaaccuguacgagaaggugagaagccagcugaagaacaacgccaaggagaucggcaacggcugcuucgaguucuaccacaagugcgacaacaccugcauggagagcgugaagaacggcaccuacgacuaccccaaguacagcgaggaggccaagcugaacagagaggagaucgacggcgugaagcuggagagcaccagaaucuaccagauccuggccaucuacagcaccguggccagcagccuggugcugguggugagccugggcgccaucagcuucuggaugugcagcaacggcagccugcagugcagaaucugcaucuga

SEQ ID NO: 169079 - RNA, 1701 nt, Artificial Sequence; identical to SEQ ID NO: 162729
  derived and/or modified CDS sequence (opt4) from hemagglutinin__InfluenzaA__AFK74605

SEQ ID NO: 169080 - RNA, 1701 nt, Artificial Sequence; identical to SEQ ID NO: 162971
  derived and/or modified CDS sequence (opt4) from hemagglutinin__InfluenzaA__AFK74615

SEQ ID NO: 169081 - RNA, 1701 nt, Artificial Sequence; identical to SEQ ID NO: 162971
  derived and/or modified CDS sequence (opt4) from hemagglutinin__InfluenzaA__AFK74625

SEQ ID NO: 169082 - RNA, 1701 nt, Artificial Sequence; identical to SEQ ID NO: 163831
  derived and/or modified CDS sequence (opt4) from hemagglutinin__InfluenzaA__AFK74635

SEQ ID NO: 169083 - RNA, 1701 nt, Artificial Sequence; identical to SEQ ID NO: 163831
  derived and/or modified CDS sequence (opt4) from hemagglutinin__InfluenzaA__AFK74645

SEQ ID NO: 169084 - RNA, 1701 nt, Artificial Sequence; identical to SEQ ID NO: 162729
  derived and/or modified CDS sequence (opt4) from hemagglutinin__InfluenzaA__AFK74655

SEQ ID NO: 169085 - RNA, 1701 nt, Artificial Sequence; identical to SEQ ID NO: 162729
  derived and/or modified CDS sequence (opt4) from hemagglutinin__InfluenzaA__AFK74665

SEQ ID NO: 169086 - RNA, 1701 nt, Artificial Sequence; identical to SEQ ID NO: 162729
  derived and/or modified CDS sequence (opt4) from hemagglutinin__InfluenzaA__AFK74675

SEQ ID NO: 169087 - RNA, 1701 nt, Artificial Sequence; identical to SEQ ID NO: 162729
  derived and/or modified CDS sequence (opt4) from hemagglutinin__InfluenzaA__AFK74685

SEQ ID NO: 169088 - RNA, 1701 nt, Artificial Sequence; identical to SEQ ID NO: 165284
  derived and/or modified CDS sequence (opt4) from hemagglutinin__InfluenzaA__AFK74695

SEQ ID NO: 169089 - RNA, 1701 nt, Artificial Sequence; identical to SEQ ID NO: 162729
  derived and/or modified CDS sequence (opt4) from hemagglutinin__InfluenzaA__AFK74705

SEQ ID NO: 169090 - RNA, 1701 nt, Artificial Sequence; identical to SEQ ID NO: 162729
  derived and/or modified CDS sequence (opt4) from hemagglutinin__InfluenzaA__AFK74715

SEQ ID NO: 169091 - RNA, 1701 nt, Artificial Sequence; identical to SEQ ID NO: 162729
  derived and/or modified CDS sequence (opt4) from hemagglutinin__InfluenzaA__AFK74725

SEQ ID NO: 169092 - RNA, 1701 nt, Artificial Sequence; identical to SEQ ID NO: 162729
  derived and/or modified CDS sequence (opt4) from hemagglutinin__InfluenzaA__AFK74735

SEQ ID NO: 169093 - RNA, 1701 nt, Artificial Sequence; identical to SEQ ID NO: 162729
  derived and/or modified CDS sequence (opt4) from hemagglutinin__InfluenzaA__AFK74745

SEQ ID NO: 169094 - RNA, 1701 nt, Artificial Sequence; identical to SEQ ID NO: 162729
  derived and/or modified CDS sequence (opt4) from hemagglutinin__InfluenzaA__AFK74755

SEQ ID NO: 169095 - RNA, 1701 nt, Artificial Sequence; identical to SEQ ID NO: 165284
  derived and/or modified CDS sequence (opt4) from hemagglutinin__InfluenzaA__AFK74765

SEQ ID NO: 169096 - RNA, 1701 nt, Artificial Sequence; identical to SEQ ID NO: 162729
  derived and/or modified CDS sequence (opt4) from hemagglutinin__InfluenzaA__AFK74775

SEQ ID NO: 169097 - RNA, 1701 nt, Artificial Sequence; identical to SEQ ID NO: 162729
  derived and/or modified CDS sequence (opt4) from hemagglutinin__InfluenzaA__AFK74785

SEQ ID NO: 169098 - RNA, 1701 nt, Artificial Sequence; identical to SEQ ID NO: 162729
  derived and/or modified CDS sequence (opt4) from hemagglutinin__InfluenzaA__AFK74795

SEQ ID NO: 169099 - RNA, 1701 nt, Artificial Sequence; identical to SEQ ID NO: 162729
  derived and/or modified CDS sequence (opt4) from hemagglutinin__InfluenzaA__AFK74805

SEQ ID NO: 169100 - RNA, 1701 nt, Artificial Sequence; identical to SEQ ID NO: 162729
  derived and/or modified CDS sequence (opt4) from hemagglutinin__InfluenzaA__AFK74815

SEQ ID NO: 169101 - RNA, 1701 nt, Artificial Sequence; identical to SEQ ID NO: 162729
  derived and/or modified CDS sequence (opt4) from hemagglutinin__InfluenzaA__AFK74825

SEQ ID NO: 169102 - RNA, 1701 nt, Artificial Sequence; identical to SEQ ID NO: 162729
  derived and/or modified CDS sequence (opt4) from hemagglutinin__InfluenzaA__AFK74835

SEQ ID NO: 169103 - RNA, 1701 nt, Artificial Sequence; identical to SEQ ID NO: 162729
  derived and/or modified CDS sequence (opt4) from hemagglutinin__InfluenzaA__AFK74845

SEQ ID NO: 169104 - RNA, 1701 nt, Artificial Sequence; identical to SEQ ID NO: 162729
  derived and/or modified CDS sequence (opt4) from hemagglutinin__InfluenzaA__AFK74895

SEQ ID NO: 169105 - RNA, 1701 nt, Artificial Sequence; identical to SEQ ID NO: 162729
  derived and/or modified CDS sequence (opt4) from hemagglutinin__InfluenzaA__AFK74905

SEQ ID NO: 169106 - RNA, 1701 nt, Artificial Sequence; identical to SEQ ID NO: 162729
  derived and/or modified CDS sequence (opt4) from hemagglutinin__InfluenzaA__AFK74915

SEQ ID NO: 169107 - RNA, 1701 nt, Artificial Sequence
  derived and/or modified CDS sequence (opt4) from hemagglutinin__InfluenzaA__AFK74925
augaaggccauccugguggugcugcuguacaccuucgccaccgccaacgccgacacccugugcaucggcuaccacgccaacaacagcaccgacaccguggacaccgugcuggagaagaacgugaccgugacccacagcgugaaccugcuggaggacaagcacaacggcaagcugugcaagcugagaggcguggugccccugcaccugggcaagugcaacaucgccggcuggauccugggcaaccccgagugcgagagccugagcaccgccagcagcuggagcuacaucguggagaccagcagcagcgacaacggcaccugcuaccccggcgacuucaucgacuacgaggagcugagagagcagcugagcagcgugagcagcuucgagagauucgagaucuuccccaagaccagcagcuggcccaaccacgacagcaacaagggcgugaccgccgccugcccccacgccggcgccaagagcuucuacaagaaccugaucuggcuggugaagaagggcaacagcuaccccaagcugagcaagagcuacaucaacgacaagggcaaggaggugcuggugcuguggggcauccaccaccccagcaccagcgccgaccagcagagccuguaccagaacgccgacgccuacguguucgugggcaccagcagauacagcaagaaguucaagcccgagaucgccaucagacccaaggugagagaccaggagggcagaaugaacuacuacuggacccugguggagcccggcgacaagaucaccuucgaggccaccggcaaccugguggugcccagauacgccuucaccauggagagaaacgccggcagcggcaucaucaucagcgacacccccgugcacgacugcaacaccaccugccagacccccaagggcgccaucaacaccagccugcccuuccagaacauccaccccaucaccaucggcaagugccccaaguacgugaagagcaccaagcugagacuggccaccggccugagaaacgugcccagcauccagagcagaggccuguucggcgccaucgccggcuucaucgagggcggcuggaccggcaugguggacggcugguacggcuaccaccaccagaacgagcagggcagcggcuacgccgccgaccugaagagcacccagaacgccaucgacggcaucaccaacaaggugaacagcgugaucgagaagaugaacacccaguucaccgccgugggcaaggaguucaaccaccuggagaagagaaucgagaaccugaacaagaagaucgacgacggcuuccuggacaucuggaccuacaacgccgagcugcuggugcugcuggagaacgagagaacccuggacuaccacgacagcaacgugaagaaccuguacgagaaggugagaagccagcugaagaacaacgccaaggagaucggcaacggcugcuucgaguucuaccacaagugcgacaacaccugcauggagagcgugaagaacggcaccuacgacuaccccaaguacagcgaggaggccaagcugaacagagaggagaucgacggcgugaagcuggagagcaccagaaucuaccagauccuggccaucuacagcaccguggccagcagccuggugcugguggugagccugggcgccaucagcuucuggaugugcagcaacggcagccugcagugcagaaucugcaucuga

SEQ ID NO: 169108 - RNA, 1701 nt, Artificial Sequence; identical to SEQ ID NO: 163831
  derived and/or modified CDS sequence (opt4) from hemagglutinin__InfluenzaA__AFK74935

SEQ ID NO: 169109 - RNA, 1701 nt, Artificial Sequence; identical to SEQ ID NO: 162729
  derived and/or modified CDS sequence (opt4) from hemagglutinin__InfluenzaA__AFK74945

SEQ ID NO: 169110 - RNA, 1701 nt, Artificial Sequence; identical to SEQ ID NO: 162729
  derived and/or modified CDS sequence (opt4) from hemagglutinin__InfluenzaA__AFK74955

SEQ ID NO: 169111 - RNA, 1701 nt, Artificial Sequence; identical to SEQ ID NO: 162729
  derived and/or modified CDS sequence (opt4) from hemagglutinin__InfluenzaA__AFK74965

SEQ ID NO: 169112 - RNA, 1701 nt, Artificial Sequence; identical to SEQ ID NO: 162820
  derived and/or modified CDS sequence (opt4) from hemagglutinin__InfluenzaA__AFK74975

SEQ ID NO: 169113 - RNA, 1701 nt, Artificial Sequence; identical to SEQ ID NO: 162729
  derived and/or modified CDS sequence (opt4) from hemagglutinin__InfluenzaA__AFK74985

SEQ ID NO: 169114 - RNA, 1701 nt, Artificial Sequence; identical to SEQ ID NO: 165284
  derived and/or modified CDS sequence (opt4) from hemagglutinin__InfluenzaA__AFK74995

SEQ ID NO: 169115 - RNA, 1701 nt, Artificial Sequence; identical to SEQ ID NO: 162729
  derived and/or modified CDS sequence (opt4) from hemagglutinin__InfluenzaA__AFK75005

SEQ ID NO: 169116 - RNA, 1701 nt, Artificial Sequence
  derived and/or modified CDS sequence (opt4) from hemagglutinin__InfluenzaA__AFK75015
augaaggccauccugguggugcugcuguacaccuucgccaccgccaacgccgacacccugugcaucggcuaccacgccaacaacagcaccgacaccguggacaccgugcuggagaagaacgugaccgugacccacagcgugaaccugcuggaggacaagcacaacggcaagcugugcaagcugagaggcguggccccccugcaccugggcaagugcaacaucgccggcuggauccugggcaaccccgagugcgagagccugagcaccgccagcagcuggagcuacaucguggagaccagcagcagcgacaacggcaccugcuaccccggcgacuucaucgacuacgaggagcugagagagcagcugagcagcgugagcagcuucgagagauucgagaucuuccccaagaccagcagcuggcccaaccacgacagcaacaagggcgugaccgccgccugcccccacgccggcgccaagagcuucuacaagaaccugaucuggcuggugaagaagggcaacagcuaccccaagcugagcaagagcuacaucaacgacaagggcaaggaggugcuggugcuguggggcauccaccaccccagcaccagcgccgaccagcagagccuguaccagaacgccgacgccuacguguucgugggcaccagcagauacagcaagaaguucaagcccgagaucgccaucagacccaaggugagagaccaggagggcagaaugaacuacuacuggacccugguggagcccggcgacaagaucaccuucgaggccaccggcaaccugguggugcccagauacgccuucgccauggagagaaacgccggcagcggcaucaucaucagcgacacccccgugcacgacugcaacaccaccugccagacccccaagggcgccaucaacaccagccugcccuuccagaacauccaccccaucaccaucggcaagugccccaaguacgugaagagcaccaagcugagacuggccaccggccugagaaacgugcccagcauccagagcagaggccuguucggcgccaucgccggcuucaucgagggcggcuggaccggcaugguggacggcugguacggcuaccaccaccagaacgagcagggcagcggcuacgccgccgaccugaagagcacccagaacgccaucgacgagaucaccaacaaggugaacagcgugaucgagaagaugaacacccaguucaccgccgugggcaaggaguucaaccaccuggagaagagaaucgagaaccugaacaagaagguggacgacggcuuccuggacaucuggaccuacaacgccgagcugcuggugcugcuggagaacgagagaacccuggacuaccacgacagcaacgugaagaaccuguacgagaaggugagaagccagcugaagaacaacgccaaggagaucggcaacggcugcuucgaguucuaccacaagugcgacaacaccugcauggagagcgugaagaacggcaccuacgacuaccccaaguacagcgaggaggccaagcugaacagagaggagaucgacggcgugaagcuggagagcaccagaaucuaccagauccuggccaucuacagcaccguggccagcagccuggugcugguggugagccugggcgccaucagcuucuggaugugcagcaacggcagccugcagugcagaaucugcguguga

SEQ ID NO: 169117 - RNA, 1701 nt, Artificial Sequence; identical to SEQ ID NO: 162971
  derived and/or modified CDS sequence (opt4) from hemagglutinin__InfluenzaA__AFK75025

SEQ ID NO: 169118 - RNA, 1701 nt, Artificial Sequence; identical to SEQ ID NO: 162971
  derived and/or modified CDS sequence (opt4) from hemagglutinin__InfluenzaA__AFK75035

SEQ ID NO: 169119 - RNA, 1701 nt, Artificial Sequence; identical to SEQ ID NO: 162971
  derived and/or modified CDS sequence (opt4) from hemagglutinin__InfluenzaA__AFK75045

SEQ ID NO: 169120 - RNA, 1701 nt, Artificial Sequence; identical to SEQ ID NO: 162971
  derived and/or modified CDS sequence (opt4) from hemagglutinin__InfluenzaA__AFK75055

SEQ ID NO: 169121 - RNA, 1701 nt, Artificial Sequence; identical to SEQ ID NO: 162729
  derived and/or modified CDS sequence (opt4) from hemagglutinin__InfluenzaA__AFK75065

SEQ ID NO: 169122 - RNA, 1701 nt, Artificial Sequence; identical to SEQ ID NO: 162729
  derived and/or modified CDS sequence (opt4) from hemagglutinin__InfluenzaA__AFK75075

SEQ ID NO: 169123 - RNA, 1701 nt, Artificial Sequence; identical to SEQ ID NO: 163893
  derived and/or modified CDS sequence (opt4) from hemagglutinin__InfluenzaA__AFK75085

SEQ ID NO: 169124 - RNA, 1701 nt, Artificial Sequence; identical to SEQ ID NO: 163893
  derived and/or modified CDS sequence (opt4) from hemagglutinin__InfluenzaA__AFK75095

SEQ ID NO: 169125 - RNA, 1701 nt, Artificial Sequence; identical to SEQ ID NO: 162729
  derived and/or modified CDS sequence (opt4) from hemagglutinin__InfluenzaA__AFK75105

SEQ ID NO: 169126 - RNA, 1701 nt, Artificial Sequence; identical to SEQ ID NO: 162971
  derived and/or modified CDS sequence (opt4) from hemagglutinin__InfluenzaA__AFK77857

SEQ ID NO: 169127 - RNA, 1701 nt, Artificial Sequence; identical to SEQ ID NO: 162971
  derived and/or modified CDS sequence (opt4) from hemagglutinin__InfluenzaA__AFK77867

SEQ ID NO: 169128 - RNA, 1701 nt, Artificial Sequence; identical to SEQ ID NO: 168257
  derived and/or modified CDS sequence (opt4) from hemagglutinin__InfluenzaA__AFK77877

SEQ ID NO: 169129 - RNA, 1701 nt, Artificial Sequence; identical to SEQ ID NO: 162729
  derived and/or modified CDS sequence (opt4) from hemagglutinin__InfluenzaA__AFK77887

SEQ ID NO: 169130 - RNA, 1701 nt, Artificial Sequence
  derived and/or modified CDS sequence (opt4) from hemagglutinin__InfluenzaA__AFK77897
augaaggccauccugguggugcugcuguacaccuucgccaccgccaacgccgacacccugugcaucggcuaccacgccaacaacagcaccgacaccguggacaccgugcuggagaagaacgugaccgugacccacagcaucaaccugcuggaggacaagcacaacggcaagcugugcaagcugagaggcguggccccccugcaccugggcaagugcaacaucgccggcuggauccugggcaaccccgagugcgagagccugagcaccgccagcagcuggagcuacaucguggagaccagcagcagcgacaacggcaccugcuaccccggcgacuucaucaacuacgaggagcugagagagcagcugagcagcgugagcagcuucgagagauucgagaucuuccccaagaccagcagcuggcccaaccacgacagcaacaagggcgugaccgccgccugcccccacgccggcgccaagagcuucuacaagaaccugaucuggcuggugaagaagggcaacagcuaccccaagcugagcaagagcuacaucaacgacaagggcaaggaggugcuggugcuguggggcauccaccaccccagcaccagcgccgaccagcagagccuguaccagaacgccgacgccuacguguucgugggcaccagcaaguacagcaagaaguucaagcccgagaucgccgugagacccaaggugagagaccaggagggcagaaugaacuacuacuggacccugguggagcccggcgacaagaucaccuucgaggccaccggcaaccugcuggugcccagauacgccuucgccauggagagaaacgccggcagcggcaucaucaucagcgacacccccgugcacgacugcaacaccaccugccagacccccaagggcgccaucaacaccagccugcccuuccagaacauccaccccaucaccaucggcaagugccccaaguacgugaagagcaccaagcugagacuggccaccggccugagaaacgugcccagcauccagagcagaggccuguucggcgccaucgccggcuucaucgagggcggcuggaccggcaugguggacggcugguacggcuaccaccaccagaacgagcagggcagcggcuacgccgccgaccugaagagcacccagaacgccaucgacaagaucaccaacaaggugaacagcgugaucgagaagaugaacacccaguucaccgccgugggcaaggaguucaaccaccuggagaagagaaucgagaaccugaacaagaagguggacgacggcuuccuggacaucuggaccuacaacgccgagcugcuggugcugcuggagaacgagagaacccuggacuaccacgacagcaacgugaagaaccuguacgagaaggugagaagccagcugaagaacaacgccaaggagaucggcaacggcugcuucgaguucuaccacaagugcgacaacaccugcauggagagcgugaagaacggcaccuacgacuaccccaaguacagcgaggaggccaagcugaacagagaggagaucgacggcgugaagcuggagagcaccagaaucuaccagauccuggccaucuacagcaccguggccagcagccuggugcugguggugagccugggcgccaucagcuucuggaugugcagcaacggcagccugcagugcagaaucugcaucuga

SEQ ID NO: 169131 - RNA, 1701 nt, Artificial Sequence; identical to SEQ ID NO: 167110
  derived and/or modified CDS sequence (opt4) from hemagglutinin__InfluenzaA__AFK78028

SEQ ID NO: 169132 - RNA, 1701 nt, Artificial Sequence; identical to SEQ ID NO: 162971
  derived and/or modified CDS sequence (opt4) from hemagglutinin__InfluenzaA__AFK78187

SEQ ID NO: 169133 - RNA, 1701 nt, Artificial Sequence; identical to SEQ ID NO: 166915
  derived and/or modified CDS sequence (opt4) from hemagglutinin__InfluenzaA__AFM45476

SEQ ID NO: 169134 - RNA, 1701 nt, Artificial Sequence
  derived and/or modified CDS sequence (opt4) from hemagglutinin__InfluenzaA__AFM45487
augaagaccaucaucgcccugagcuacauccugugccugguguucgcccagaagcugcccggcaacgacaacagcaccgccacccugugccugggccaccacgccgugcccaacggcaccaucgugaagaccaucaccaacgaccagaucgaggugaccaacgccaccgagcuggugcagagcagcagcaccggcgagaucugcgacagcccccaccagauccuggacggcgagaacugcacccugaucgacgcccugcugggcgacccccagugcgacggcuuccagaacaagaagugggaccuguucguggagagaagcaaggccuacagcaacugcuaccccuacgacgugcccgacuacgccagccugagaagccugguggccagcagcggcacccuggaguucaacaacgagagcuucaacuggaccggcgugacccagaacggcaccagcagcgccugcaucagaagaagcaacagcagcuucuucagcagacugaacuggcugacccaccugaacuucaaguaccccgcccugaacgugaccaugcccaacaacgagcaguucgacaagcuguacaucuggggcgugcaccaccccggcaccgacaaggaccagaucuuccuguacgcccagagcagcggcagaaucaccgugagcaccaagagaagccagcaggccgugauccccaacaucggcagcagacccagaaucagaaacauccccagcagaaucagcaucuacuggaccaucgugaagcccggcgacauccugcugaucaacagcaccggcaaccugaucgcccccagaggcuacuucaagaucagaagcggcaagagcagcaucaugagaagcgacgcccccaucggcaagugcaacagcgagugcaucacccccaacggcagcauccccaacgacaagcccuuccagaacgugaacagaaucaccuacggcgccugccccagauacgugaagcagagcacccugaagcuggccaccggcaugagaaacgugcccgagaagcagaccagaggcaucuucggcgccaucgccggcuucaucgagaacggcugggagggcaugguggacggcugguacggcuucagacaccagaacagcgagggcagaggccaggccgccgaccugaagagcacccaggccgccaucgaccagaucaacggcaagcugaacagacugaucggcaagaccaacgagaaguuccaccagaucgagaaggaguucagcgagguggagggcagaauccaggaccuggagaaguacguggaggacaccaagaucgaccuguggagcuacaacgccgagcugcugguggcccuggagaaccagcacaccaucgaccugaccgacagcgagaugaacaagcuguucgagaagaccaagaagcagcugagagagaacgccgaggacaugggcaacggcugcuucaagaucuaccacaagugcgacaacgccugcaucggcagcaucagaaacggcaccuacaaccacgacguguacagagacgaggcccugaacaacagauuccagaucaagggcguggagcugaagagcggcuacaaggacuggauccuguggaucagcuucgccaucagcugcuuccugcugugcguggcccugcugggcuucaucaugugggccugccagaagggcaacaucagaugcaacaucugcaucuga

SEQ ID NO: 169135 - RNA, 1701 nt, Artificial Sequence; identical to SEQ ID NO: 166915
  derived and/or modified CDS sequence (opt4) from hemagglutinin__InfluenzaA__AFM45489

SEQ ID NO: 169136 - RNA, 1701 nt, Artificial Sequence; identical to SEQ ID NO: 169134
  derived and/or modified CDS sequence (opt4) from hemagglutinin__InfluenzaA__AFM45494

SEQ ID NO: 169137 - RNA, 1701 nt, Artificial Sequence
  derived and/or modified CDS sequence (opt4) from hemagglutinin__InfluenzaA__AFM68954
augaaggccagacugcuggugcugcugugcgcccuggccgccaccgacgccgacaccaucugcaucggcuaccacgccaacaacagcaccgacaccguggacacccugcuggagaagaacgugaccgugacccacagcgugaaccugcuggaggacagccacaacggcaagcugugcaagcugaagggcaucgccccccugcagcugggcaagugcaacaucgccggcuggcugcugggcaaccccgagugcgacagccugcugcccgccagaagcuggagcuacaucguggagacccccaacagcgagaacggcgccugcuaccccggcgacuucaucgacuacgaggagcugaaggagcagcugagcagcgugagcagccuggagagauucgagaucuuccccaaggagagcagcuggcccaaccacaacacccugaagggcgugaccgccagcugcagccacggcggcaagagcagcuucuacagaaaccugcuguggcugaccaagaccgaggacagcuaccccaagcugagcaacagcuacgugaacaacaagggcaaggaggugcuggugcuguggggcgugcaccaccccagcagcagcgacgagcagcagagccuguaccacaacgugaacgccuacgugagcguggugagcagcaacuacaacggcagauucacccccgagaucgccgccagacccaaggugagaaaccagcccggcagaaugaacuacuacuggacccugcuggagcccggcgacaccaucaucuucgaggccaccggcaaccugaucgcccccugguacgccuucgcccugagcagaggcuucggcagcggcaucaucaccagcaacgccagcaugcacgagugcaacaccaagugccagaccccccagggcgccaucaacagcagccugcccuuccagaacauccaccccgugaccaucggcgagugccccaaguacgugagaagcaccaagcugagaauggugaccggccugagaaacauccccagcauccaguucagaggccuguucggcgccaucgccggcuucaucgagggcggcuggaccggcaugaucgacggcugguacggcuaccaccaccagaacgagcagggcagcggcuacgccgccgaccagaagagcacccagaacgccaucaacggcaucaccaacaaggugaacagcgugaucgagaagaugaacacccaguucaccgccgugagcaaggaguucaacaaccuggagaagagaauggagaaccugaacaagaagguggacgacggcuuccuggacaucuggaccuacaacgccgagcugcuggugcugcuggagaacgagagaacccuggacuuccacgaccugaacgugaagaaccuguacgagaaggugaagagccagcugaagaacaacgccaaggagaucggcaacggcugcuucgaguucuaccacaagugcgacaacaagugcauggagagcgugagaaacggcaccuacgacuaccccaaguacagcgaggagagcaagcugaacagagagaagaucgacggcgugaagcuggagagcaugggcguguaccagauccuggccaucuacagcaccguggccagcagccuggugcugcuggugagccugggcgccaucagcuucuggaugugcagcaacggcagccugcagugcagaaucugcaucuga

SEQ ID NO: 169138 - RNA, 1701 nt, Artificial Sequence
  derived and/or modified CDS sequence (opt4) from hemagglutinin__InfluenzaA__AFM68965
augaagaccaucaucgcccugagcuacaucuucugccaggugcuggcccagaaccugcccggcaacgacaacagcaccgccacccugugccugggccaccacgccgugcccaacggcacccuggugaagaccaucaccaacgaccagaucgaggugaccaacgccaccgagcuggugcagagcagcagcaccggcagaaucugcgacagcccccacagaauccuggacggcaagaacugcacccugaucgacgcccugcugggcgacccccacugcgacggcuuccagaacgagaagugggaccuguucguggagagaagcaaggccuucagcaacugcuaccccuacgacgugcccgacuacgccagccugagaagccugguggccagcagcggcacccuggaguucaucaacgagggcuucaacuggaccggcgugacccagaacggcggcagcuacgccugcaagagaggccccgacaacagcuucuucagcagacugaacuggcuguacaagagcgagagcaccuaccccgugcugaacgugaccaugcccaacaacgacaacuucgacaagcuguacaucuggggcgugcaccaccccagcaccgacaaggagcagaccaaccuguacgugcaggccagcggcagagugaccgugagcaccaagagaagccagcagaccaucauccccaacgugggcagcagacccugggugagaggccugagcagcggcaucagcaucuacuggaccaucgugaagcccggcgacauccugcugaucaacagcaacggcaaccugaucgcccccagaggcuacuucaagaucagaaccggcaagagcagcaucaugagaagcgacgcccccaucggcaccugcagcagcgagugcaucacccccaacggcagcauccccaacgacaagcccuuccagaacgugaacaagaucaccuacggcgccugccccaaguacgugaagcagaacacccugaagcuggccaccggcaugagaaacgugcccgagaagcagaccagaggcaucuucggcgccaaggccggcuucaucgagaacggcugggagggcaugaucgacggcugguacggcuucagacaccagaacagcgagggcaccggccaggccgccgaccugaagagcacccaggccgccaucgaccagaucaacggcaagcugaacagagugaucgagaagaccaacgagaaguuccaccagaucgagaaggaguucagcgagguggagggcagaauccaggaccuggagaaguacguggaggacaccaagaucgaccuguggagcuacaacgccgagcugcugguggcccuggagaaccagcacaccaucgaccugaccgacagcgagaugaacaagcuguucgagaagaccagaagacagcugagagagaacgccgaggacaugggcaacggcugcuucaagaucuaccacaagugcgacaacgccugcaucggcagcaucagaaacggcaccuacgaccacgacguguacagagacgaggcccugaacaacagauuccagaucaagggcguggagcugaagagcggcuacaaggacuggauccuguggaucagcuucgccaucagcugcuuccugcugugcguggugcugcugggcuucaucaugugggccugccagaagggcaacaucagaugcaacaucugcaucuga

SEQ ID NO: 169139 - RNA, 1701 nt, Artificial Sequence
  derived and/or modified CDS sequence (opt4) from hemagglutinin__InfluenzaA__AFM68987
augaagaccaucaucgcccugagcuacaucuucugccugguguucgcccagaaccugcccggcaacgacaacagcaccgccacccugugccugggccaccacgccgugcccaacggcacccuggugaagaccaucaccaacgaccagaucgaggugaccaacgccaccgagcuggugcagagcagcagcaccggcagaaucugcgacagcccccacagaauccuggacggcaagaacugcacccugaucgacgcccugcugggcgacccccacugcgacggcuuccagaacgagaagugggaccuguucguggagagaagcaaggccuucagcaacugcuaccccuacgacgugcccgacuacgccagccugagaagccugguggccagcagcggcacccuggaguucaucaacgagggcuucaacuggaccggcgugacccagagcggcggcagcuacgccugcaagagaggcagcgacaagagcuucuucagcagacugaacuggcuguacgagagcgagagcaaguaccccgugcugaacgugaccaugcccaacaacggcaacuucgacaagcuguacaucuggggcgugcaccaccccagcaccgacaaggagcagaccaaccuguacgugagagccagcggcagagugaccgugagcaccaagagaagccagcagaccgugauccccaacaucggcagcagacccugggugagaggccugagcagcagaaucagcaucuacuggaccaucgugaagcccggcgacauccugcugaucaacagcaacggcaaccugaucgcccccagaggcuacuucaagaucagaaccggcaagagcagcaucaugagaagcgacgcccccaucggcaccugcagcagcgagugcaucacccccaacggcagcauccccaacgacaagcccuuccagaacgugaacaagaucaccuacggcgccugccccaaguacgugaagcagaacacccugaagcuggccaccggcaugagaaacgugcccgagaagcagaccagaggcaucuucggcgccaucgccggcuucaucgagaacggcugggagggcaugguggacggcugguacggcuucagacaccagaacagcgagggcaccggccaggccgccgaccugaagagcacccaggccgccaucgaccagaucaacggcaagcugaacagagugaucgagaagaccaacgagaaguuccaccagaucgagaaggaguucagcgagguggagggcagaauccaggaccuggagaaguacguggaggacaccaagaucgaccuguggagcuacaacgccgagcugcugguggcccuggagaaccagcacaccaucgaccugaccgacagcgagaugaacaagcuguucgagaagaccagaagacagcugagagagaacgccgaggacaugggcaacggcugcuucaagaucuaccacaagugcgacaacgccugcaucggcagcaucagaaacggcaccuacgaccacgacguguacagagacgaggcccugaacaacagauuccagaucaagggcguggagcugaagagcggcuacaaggacuggauccuguggaucagcuucgccaucagcugcuuccugcugugcguggugcugcugggcuucaucaugugggccugccagaagggcaacaucagaugcaacaucugcaucuga

SEQ ID NO: 169140 - RNA, 1701 nt, Artificial Sequence
  derived and/or modified CDS sequence (opt4) from hemagglutinin__InfluenzaA__AFM71720
augaagaccaucaucgcccugagcuacaucuucugccugguguucgcccagaagcugcccggcaacgacaacagcaccgccacccugugccugggccaccacgccgugcccaacggcacccuggugaagaccaucaccaacgaccagaucgaggugaccaacgccaccgagcuggugcagagcagcagcaccggcagaaucugcgacagcccccacagaauccuggacggcaagaacugcacccugaucgacgcccugcugggcgacccccacugcgacggcuuccagaacgagaagugggaccuguucguggagagaagcaaggccuacagcaacugcuaccccuacgacgugcccgacuacgccagccugagaagccugguggccagcagcggcacccuggaguucaucaacgaggacuucaacuggaccggcgugacccagagcggcggcagcuacgccugcaagagaggcagcgugaacagcuucuucagcagacugaacuggcugcacgagagcgaguacaaguaccccgcccugaacguggccaugcccaacaacggcaaguucgacaagcuguacaucuggggcgugcaccaccccaucaccgacagagagcagaccaaccuguacgugagagccagcggcagagugaccgugagcaccaagagaagccagcagaccgugauccccaacaucggcagcagacccugggugagaggccugagcagcagaaucagcaucuacuggaccaucgugaagcccggcgacauccuguucaucaacagcaccggcaaccugaucgcccccagaggcuacuucaagaucagaaccggcaagagcagcaucaugagaagcgacgcccccaucggcaccugcagcagcgagugcaucacccccaacggcagcauccccaacgacaagcccuuccagaacgugaacaagaucaccuacggcgccugccccagauacgugaagcagaacacccugaagcuggccaccggcaugagaaacgugcccgagaagcagaccagaggcaucuucggcgccaucgccggcuucaucgagaacggcugggagggcaugguggacggcugguacggcuucagacaccagaacagcgagggcaccggccaggccgccgaccugaagagcacccaggccgccaucgaccagaucaacggcaagcugaacagacugaucgagaagaccaacgagaaguuccaccagaucgagaaggaguucagcgagguggagggcagaauccaggaccuggagaaguacguggaggacaccaagaucgaccuguggagcuacaacgccgagcugcugguggcccuggagaaccagcacaccaucgaccugaccgacagcgagaugaacaagcuguucgagaagaccagaaagcagcugagagagaacgccgaggacaugggcaacggcugcuucaagaucuaccacaagugcgacaacgccugcaucggcagcaucagaaacggcaccuacgaccacgacguguacagagacgaggcccugaacaacagauuccagaucaagggcguggagcugaagagcggcuacaaggacuggauccuguggaucagcuucgccaucagcugcuuccugcugugcguggugcugcugggcuucaucaugugggccugccagaagggcaacaucagaugcaacaucugcaucuga

SEQ ID NO: 169141 - RNA, 1701 nt, Artificial Sequence
  derived and/or modified CDS sequence (opt4) from hemagglutinin__InfluenzaA__AFM71731
augaagaccaucaucgcccugagcuacauccugugccugguguucgcccagaagcugcccggcaacgacaacagcaccgccacccugugccugggccaccacgccgugcccaacggcacccuggugaagaccaucaccaacgaccagaucgaggugaccaacgccaccgagcuggugcagagcagcagcaccggcagaaucugcgacagcccccacagaauccuggacggcaagaacugcacccugaucgacgcccugcugggcgacccccacugcgacggcuuccagaacaaggagugggaccuguucguggagagaagcaaggccuacagcaacugcuaccccuacgacgugcccgacuacgccagccugagaagccugguggccagcagcggcacccuggaguucaucaacgaggacuucaacuggaccggcguggcccagagcggcgagagcuacgccugcaagagaggcagcgugaagagcuucuucagcagacugaacuggcugcacaagagcgaguacaaguaccccgcccugaacgugaccaugcccaacaacggcaaguucgacaagcuguacaucuggggcgugcaccaccccagcaccgacagagagcagaccaaccuguacgugagagccagcggcagagugaccgugagcaccaagagaagccagcagaccgugauccccaacaucggcagcagacccugggugagaggccugagcagcagaaucagcaucuacuggaccaucgugaagcccggcgacauccugcugaucaacagcaccggcaaccugaucgcccccagaggcuacuucaagaucagaaccggcaagagcagcaucaugagaagcgacgcccccaucggcaccugcagcagcgagugcaucacccccaacggcagcauccccaacgacaagcccuuccagaacgugaacagaaucaccuacggcgccugccccagauacgugaagcagaacacccugaagcuggccaccggcaugagaaacgugcccgagaagcagaccagaggcaucuucggcgccaucgccggcuucaucgagaacggcugggagggcaugguggacggcugguacggcuucagacaccagaacagcgagggcaccggccaggccgccgaccugaagagcacccaggccgccaucgaccagaucaacggcaagcugaacagacugaucgagaagaccaacgagaaguuccaccagaucgagaaggaguucagcgagguggagggcagaauccaggaccuggagaaguacguggaggacaccaagaucgaccuguggagcuacaacgccgagcugcugguggcccuggagaaccagcacaccaucgaccugaccgacagcgagaugaacaagcuguucgagaagaccagaaagcagcugagagagaacgccgaggacaugggcaacggcugcuucaagaucuaccacaagugcgacaacgccugcaucggcagcaucagaaacggcaccuacgaccacgacguguacagagacgaggcccugaacaacagauuccagaucaagggcguggagcugaagagcggcuacaaggacuggauccuguggaucagcuucgccaucagcugcuuccugcugugcguggugcugcugggcuucaucaugugggccugccagaagggcaacaucagaugcaacaucugcaucuga

SEQ ID NO: 169142 - RNA, 1701 nt, Artificial Sequence
  derived and/or modified CDS sequence (opt4) from hemagglutinin__InfluenzaA__AFM71754
augaagaccaucaucgcccugagcuacauccugugccugguguucgcccagaagcugcccggcaacgacaacagcaccgccacccugugccugggccaccacgccgugcccaacggcaccaucgugaagaccaucaccaacgaccagaucgaggugaccaacgccaccgagcuggugcagagcagcagcaccggcgagaucugcgacagcccccaccagauccuggacggcaagaacugcacccugaucgacgcccugcugggcgacccccagugcgacggcuuccagaacaagaagugggaccuguucguggagagaagcaaggccuacagcaacugcuaccccuacgacgugcccgacuacgccagccugagaagccugguggccagcagcggcacccuggaguucaacaacgagagcuucaacuggaccggcgugacccagaacggcaccagcagcgccugcaucagaagaagcaagaacagcuucuucagcagacugaacuggcugacccaccugaacuucaaguaccccgcccugaacgugaccaugcccaacaacgagcaguucgacaagcuguacaucuggggcgugcaccaccccggcaccgacaaggaccagaucuuccccuacgcccaggccagcggcagaaucaccgugagcaccaagagaagccagcagaccgccauccccaacaucggcagcagacccagagugagaaacauccccagcagaaucagcaucuacuggaccaucgugaagcccggcgacauccugcugaucaacagcaccggcaaccugaucgcccccagaggcuacuucaagaucagaagcggcaagagcagcaucaugagaagcgacgcccccaucggcaagugcaacagcgagugcaucacccccaacggcagcauccccaacgacaagcccuuccagaacgugaacagaaucaccuacggcgccugccccagauacgugaagcagaacacccugaagcuggccaccggcaugagaaacgugcccgagaagcagaccagaggcaucuucggcgccaucgccggcuucaucgagaacggcugggagggcaugguggacggcugguacggcuucagacaccagaacagcgagggcagaggccaggccgccgaccugaagagcacccaggccgccaucgaccagaucaacggcaagcugaacagacugaucggcaagaccaacgagaaguuccaccagaucgagaaggaguucagcgagguggagggcagaauccaggaccuggagaaguacguggaggacaccaagaucgaccuguggagcuacaacgccgagcugcugguggcccuggagaaccagcacaccaucgaccugaccgacagcgagaugaacaagcuguucgagaagaccaagaagcagcugagagagaacgccgaggacaugggcaacggcugcuucaagaucuaccacaagugcgacaacgccugcaucggcagcaucagaaacggcaccuacgcccacgacguguacagagacgaggcccugaacaacagauuccagaucaagggcguggagcugaagagcggcuacaaggacuggauccuguggaucagcuucgccaucagcugcuuccugcugugcguggcccugcugggcuucaucaugugggccugccagaagggcaacaucagaugcaacaucugcaucuga

SEQ ID NO: 169143 - RNA, 1701 nt, Artificial Sequence
  derived and/or modified CDS sequence (opt4) from hemagglutinin__InfluenzaA__AFM71768
augaagaccaucaucgcccugagcuacauccugugccugguguucgcccagaagcugcccggcaacgacaacagcaccgccacccugugccugggccaccacgccgugcccaacggcaccaucgugaagaccaucaccaacgaccagaucgaggugaccaacgccaccgagcuggugcagagcagcagcaccggcgagaucugcgacagcccccaccagauccuggacggcaagaacugcacccugaucgacgcccugcugggcgacccccagugcgacgacuuccagaacaagaagugggaccuguucguggagagaagcaaggccuacagcaacugcuaccccuacgacgugcccgacuacgccagccugagaagccugguggccagcagcggcacccuggaguucaacaacgagagcuucaacuggaccggcgugacccagaacggcaccagcagcgccugcaucagaagaagcaagaacagcuucuucagcagacugaacuggcugacccaccugaacuucaaguaccccgcccugaacgugaccaugcccaacaacgagcaguucgacaagcuguacaucuggggcgugcaccaccccggcaccgacaaggaccagaucuuccccuacgcccaggccagcggcagaaucaccgugagcaccaagagaagccagcagaccgccauccccaacaucggcagcagacccagagugagaaacauccccagcagaaucagcaucuacuggaccaucgugaagcccggcgacauccugcugaucaacagcaccggcaaccugaucgcccccagaggcuacuucaagaucagaagcggcaagagcagcaucaugagaagcgacgcccccaucggcaagugcaacagcgagugcaucacccccaacggcagcauccccaacgacaagcccuuccagaacgugaacagaaucaccuacggcgccugccccagauacgugaagcagaacacccugaagcuggccaccggcaugagaaacgugcccgagaagcagaccagaggcaucuucggcgccaucgccggcuucaucgagaacggcugggagggcaugguggacggcugguacggcuucagacaccagaacagcgagggcagaggccaggccgccgaccugaagagcacccaggccgccaucgaccagaucaacggcaagcugaacagacugaucggcaagaccaacgagaaguuccaccagaucgagaaggaguucagcgagguggagggcagaauccaggaccuggagaaguacguggaggacaccaagaucgaccuguggagcuacaacgccgagcugcugguggcccuggagaaccagcacaccaucgaccugaccgacagcgagaugaacaagcuguucgagaagaccaagaagcagcugagagagaacgccgaggacaugggcaacggcugcuucaagaucuaccacaagugcgacaacgccugcaucggcagcaucagaaacggcaccuacgcccacgacguguacagagacgaggcccugaacaacagauuccagaucaagggcguggagcugaagagcggcuacaaggacuggauccuguggaucagcuucgccaucagcugcuuccugcugugcguggcccugcugggcuucaucaugugggccugccagaagggcaacaucagaugcaacaucugcaucuga

SEQ ID NO: 169144 - RNA, 1701 nt, Artificial Sequence
  derived and/or modified CDS sequence (opt4) from hemagglutinin__InfluenzaA__AFM71791
augaagaccaucaucgcccugagcuacacccugugccugguguucgcccagaagcugcccggcaacgacaacagcaccgccacccugugccugggccaccacgccgugcccaacggcaccaucgugaagaccaucaccaacgaccagaucgaggugaccaacgccaccgagcuggugcagagcagcagcaccggcgagaucugcgacagcccccaccagauccuggacggcaagaacugcacccugaucgacgcccugcugggcgacccccagugcgacggcuuccagaacaagaagugggaccuguucguggagagaagcaaggccuacagcaacugcuaccccuacgacgugcccgacuacgccagccugagaagccugguggccagcagcggcacccuggaguucaacaacgagagcuucaacuggaccggcgugacccagaacggcaccagcagcgccugcaucagaagaagcaagaacagcuucuucagcagacugaacuggcugacccaccugaacuucaaguaccccgcccugaacgugaccaugcccaacaacgagcaguucgacaagcuguacaucuggggcgugcaccaccccggcaccgacaaggaccagaucuuccccuacgcccaggccagcggcagaaucaccgugagcaccaagagaagccagcagaccgugauccccaacaucggcagcagacccagagugagaaacauccccagcagaaucagcaucuacuggaccaucgugaagcccggcgacauccugcugaucaacagcaccggcaaccugaucgcccccagaggcuacuucaagaucagaagcggcaagagcagcaucaugagaagcgacgcccccaucggcaagugcaacagcgagugcaucacccccaacggcagcauccccaacgacaagcccuuccagaacgugaacagaaucaccuacggcgccugccccagauacgugaagcagaacacccugaagcuggccaccggcaugagaaacgugcccgagaagcagaccagaggcaucuucggcgccaucgccggcuucaucgagaacggcugggagggcaugguggacggcugguacggcuucagacaccagaacagcgagggcagaggccaggccgccgaccugaagagcacccaggccgccaucgaccagaucaacggcaagcugaacagacugaucggcaagaccaacgagaaguuccaccagaucgagaaggaguucagcgagguggagggcagaauccaggaccuggagaaguacguggaggacaccaagaucgaccuguggagcuacaacgccgagcugcugguggcccuggagaaccagcacaccaucgagcugaccgacagcgagaugaacaagcuguucgagaagaccaagaagcagcugagagagaacgccgaggacaugggcaacggcugcuucaagaucuaccacaagugcgacaacgccugcaucggcagcaucagaaacggcaccuacgaccacgacguguacagagacgaggcccugaacaacagauuccagaucaagggcguggagcugaagagcggcuacaaggacuggauccuguggaucagcuucgccaucagcugcuuccugcugugcguggcccugcugggcuucaucaugugggccugccagaagggcaacaucagaugcaacaucugcaucuga

SEQ ID NO: 169145 - RNA, 1701 nt, Artificial Sequence
  derived and/or modified CDS sequence (opt4) from hemagglutinin__InfluenzaA__AFM71824
augaagaccaucaucgcccugagcuacauccugugccugguguucgcccagaagcugcccggcaacgacaacagcaccgccacccugugccugggccaccacgccgugcccaacggcaccaucgugaagaccaucaccaacgaccagaucgaggugaccaacgccaccgagcuggugcagagcagcagcaccggcgagaucugcgacagcccccaccagauccuggacggcaagaacugcacccugaucgacgcccugcugggcgacccccagugcgacggcuuccagaacaagaagugggaccuguucguggagagaagcaaggccuacagcaacugcuaccccuacgacgugcccgacuacgccagccugagaagccugguggccagcagcggcacccuggaguucaacaacgagagcuucaacuggaccggcgugacccaggacggcaccagcagcgccugcaucagaagaagcaagaacagcuucuucagcagacugaacuggcugacccaccugaacuucaaguaccccgcccugaacgugaccaugcccaacaacgagcaguucgacaagcuguacaucuggggcgugcaccaccccggcaccgacaaggaccagaucuuccccuacgcccaggccagcggcagaaucaccgugagcaccaagagaagccagcagaccgccauccccaacaucggcagcagacccagagugagaaacauccccagcagaaucagcaucuacuggaccaucgugaagcccggcgacauccugcugaucaacagcaccggcaaccugaucgcccccagaggcuacuucaagaucagaagcggcaagagcagcaucaugagaagcgacgcccccaucggcaagugcaacagcgagugcaucacccccaacggcagcauccccaacgacaagcccuuccagaacgugaacagaaucaccuacggcgccugccccagauacgugaagcagaacacccugaagcuggccaccggcaugagaaacgugcccgagaagcagaccagaggcaucuucggcgccaucgccggcuucaucgagaacggcugggagggcaugguggacggcugguacggcuucagacaccagaacagcgagggcagaggccaggccgccgaccugaagagcacccaggccgccaucgaccagaucaacggcaagcugaacagacugaucggcaagaccaacgagaaguuccaccagaucgagaaggaguucagcgagguggagggcagaauccaggaccuggagaaguacguggaggacaccaagaucgaccuguggagcuacaacgccgagcugcugguggcccuggagaaccagcacaccaucgaccugaccgacagcgagaugaacaagcuguucgagaagaccaagaagcagcugagagagaacgccgaggacaugggcaacggcugcuucaagaucuaccacaagugcgacaacgccugcaucggcagcaucagaaacggcaccuacgaccacgacguguacagagacgaggcccugaacaacagauuccagaucaagggcguggagcugaagagcggcuacaaggacuggauccuguggaucagcuucgccaucagcugcuuccugcugugcguggcccugcugggcuucaucaugugggccugccagaagggcaacaucagaugcaacaucugcaucuga

SEQ ID NO: 169146 - RNA, 1701 nt, Artificial Sequence
  derived and/or modified CDS sequence (opt4) from hemagglutinin__InfluenzaA__AFM71835
augaagaccaucaucgcccugagcuacauccugugccugguguucgcccagaagcugcccggcaacgacaacagcaccgccacccugugccugggccaccacgccgugcccaacggcaccaucgugaagaccaucaccaacgaccagaucgaggugaccaacgccaccgagcuggugcagagcagcagcaccggcgagaucugcgacagcccccaccagauccuggacggcgagaacugcacccugaucgacgcccugcugggcgacccccagugcgacggcuuccagaacaagaagugggaccuguucguggagagaagcaaggccuacagcagcugcuaccccuacgacgugcccgacuacgccagccugagaagccugguggccagcagcggcacccuggaguucaacagcgagagcuucaacuggaccggcgugacccagaacggcaccagcagcgccugcaucagaagaagcuacaacagcuucuucagcagacugaacuggcugacccaccugaacuucaaguaccccgcccugaacgugaccaugcccaacaacgagcaguucgacaagcuguacaucuggggcgugcaccaccccggcaccgacaaggaccagaucuuccccuacgcccaggccagcggcagaaucaccgugagcaccaagagaagccagcaggccgugauccccaacaucggcagcagacccagagugagaaacauccccagcagaaucagcaucuacuggaccaucgugaagcccggcgacauccugcugaucaacagcaccggcaaccugaucgcccccagaggcuacuucaagaucagaagcggcaagagcagcaucaugagaagcgacgcccccaucggcaagugcaacagcgagugcaucacccccaacggcagcauccccaacgacaagcccuuccagaacgugaacagaaucaccuacggcgccugccccagauacaucaagcagagcacccugaagcuggccaccggcaugagaaacgugcccgagaagcagaccagaggcaucuucggcgccaucgccggcuucaucgagaacggcugggagggcaugguggacggcugguacggcuucagacaccagaacagcgagggcagaggccaggccgccgaccugaagagcacccaggccgccaucgaccagaucaacggcaagcugaacagacugaucggcaagaccaacgagaaguuccaccagaucgagaaggaguucagcgagguggagggcagaauccaggaccuggagaaguacguggaggacaccaagaucgaccuguggagcuacaacgccgagcugcugguggcccuggagaaccagcacaccaucgaccugaccgacagcgagaugaacaagcuguucgagaagaccaagaagcagcugagagagaacgccgaggacaugggcaacggcugcuucaagaucuaccacaagugcgacaacgccugcaucggcagcaucagaaacggcaccuacgaccacgacguguacagagacgaggcccugaacaacagauuccagaucaagggcguggagcugaagagcggcuacaaggacuggauccuguggaucagccuggccaucagcugcuuccugcugugcguggcccugcugggcuucaucaugugggccugccagaagggcaacaucagaugcaacaucugcaucuga

SEQ ID NO: 169147 - RNA, 1698 nt, Artificial Sequence
  derived and/or modified CDS sequence (opt4) from hemagglutinin__InfluenzaA__AFM71846
augaaggccaaccugcuggugcugcugugcgcccuggccgccgccgacgccgacaccaucugcaucggcuaccacgccaacaacagcaccgacaccguggacaccgugcuggagaagaacgugaccgugacccacagcgugaaccugcuggaggacagccacaacggcaagcugugcagacugaagggcaucgccccccugcagcugggcaagugcaacaucgccggcuggcugcugggcaaccccgagugcgacccccugcugcccgugagaagcuggagcuacaucguggagacccccaacagcgagaacggcaucugcuaccccggcgacuucaucgacuacgaggagcugagagagcagcugagcagcgugagcagcuucgagagauucgagaucuuccccaaggagagcagcuggcccaaccacaacaccaacggcgugaccgccgccugcagccacgagggcaagagcagcuucuacagaaaccugcuguggcugaccgagaaggagggcagcuaccccaagcugaagaacagcuacgugaacaagaagggcaaggaggugcuggugcuguggggcauccaccaccccagcaacagcaaggagcagcagaaccuguaccagaacgagaacgccuacgugagcguggugaccagcaacuacaacagaagauucacccccgagaucgccgagagacccaaggugagagaccaggccggcagaaugaacuacuacuggacccugcugaagcccggcgacaccaucaucuucgaggccaacggcaaccugaucgcccccauguacgccuucgcccugagcagaggcuucggcagcggcaucaucaccagcaacgccagcaugcacgagugcaacaccaagugccagaccccccugggcgccaucaacagcagccugcccuaccagaacauccaccccgugaccaucggcgagugccccaaguacgugagaagcgccaagcugagaauggugaccggccugagaaacauccccagcauccagagcagaggccuguucggcgccaucgccggcuucaucgagggcggcuggaccggcaugaucgacggcugguacggcuaccaccaccagaacgagcagggcagcggcuacgccgccgaccagaagagcacccagaacgccaucaacggcaucaccaacaaggugaacaccgugaucgagaagaugaacauccaguucaccgccgugggcaaggaguucaacaagcuggagaagagaauggagaaccugaacaagaagguggacgacggcuuccuggacaucuggaccuacaacgccgagcugcuggugcugcuggagaacgagagaacccuggacuuccacgacagcaacgugaagaaccuguacgagaaggugaagagccagcugaagaacaacgccaaggagaucggcaacggcugcuucgaguucuaccacaagugcgacaacgagugcauggagagcgugagaaacggcaccuacgacuaccccaaguacagcgaggagagcaagcugaacagagagaagguggacggcgugaagcuggagagcaugggcaucuaccagauccuggccaucuacagcaccguggccagcagccuggugcugcuggugagccugggcgccaucagcuucuggaugugcagcaacggcagccugcagugcagaaucugcaucuga

SEQ ID NO: 169148 - RNA, 1701 nt, Artificial Sequence; identical to SEQ ID NO: 162378
  derived and/or modified CDS sequence (opt4) from hemagglutinin__InfluenzaA__AFM71857

SEQ ID NO: 169149 - RNA, 1701 nt, Artificial Sequence
  derived and/or modified CDS sequence (opt4) from hemagglutinin__InfluenzaA__AFM71868
augaagaccaucaucgcccugagcuacauccugugccugguguucgcccagaagcugcccggcaacgacaacagcaccgccacccugugccugggccaccacgccgugcccaacggcaccaucgugaagaccaucaccaacgaccagaucgaggugaccaacgccaccgagcuggugcagagcagcagcaccggcggcaucugcgacagcccccaccagauccuggacggcgagaacugcacccugaucgacgcccugcugggcgacccccagugcgacggcuuccagaacaagaagugggaccuguucguggagagaagcaaggccuacagcaacugcuaccccuacgacgugcccgacuacgccagccugagaagccugguggccagcagcggcacccuggaguucaacaacgagagcuucaacuggaccggcgugacccagaacggcaccagcagcagcugcaagagaagaagcaacaacagcuucuucagcagacugaacuggcugacccaccugaaguucaaguaccccgcccugaacgugaccaugcccaacaacgagaaguucgacaagcuguacaucuggggcgugcaccaccccgugaccgacaacgaccagaucagacuguacgcccaggccagcggcagaaucaccgugagcaccaagagaagccagcagaccgugauccccaacaucggcagcagacccagagugagagacauccccagcagaaucagcaucuacuggaccaucgugaagcccggcgacauccugcugaucaacagcaccggcaaccugaucgcccccagaggcuacuucaagaucagaagcggcaagagcagcaucaugagaagcgacgcccccaucggcaagugcaacagcgagugcaucacccccaacggcagcauccccaacgacaagcccuuccagaacgugaacagaaucaccuacggcgccugccccagauacgugaagcagaacacccugaagcuggccaccggcaugagaaacgugcccgagaagcagaccagaggcaucuucggcgccaucgccggcuucaucgagaacggcugggagggcaugguggacggcugguacggcuucagacaccagaacagcgagggcaucggccaggccgccgaccugaagagcacccaggccgccaucaaccagaucaacggcaagcugaacagacugaucggcaagaccaacgagaaguuccaccagaucgagaaggaguucagcgagguggagggcagaauccaggaccuggagaaguacguggaggacaccaagaucgaccuguggagcuacaacgccgagcugcugguggcccuggagaaccagcacaccaucgaccugaccgacagcgagaugaacaagcuguucgagagaaccaagaagcagcugagagagaacgccgaggacaugggcaacggcugcuucaagaucuaccacaagugcgacaacgccugcaucggcagcaucagaaacggcaccuacgaccacgacguguacagagacgaggcccugaacaacagauuccagaucaagggcguggagcugaagagcggcuacaaggacuggauccuguggaucagcuucgccaucagcugcuuccugcugugcguggugcugcugggcuucaucaugugggccugccagaagggcaacaucagaugcaacaucugcaucuga

SEQ ID NO: 169150 - RNA, 1701 nt, Artificial Sequence; identical to SEQ ID NO: 167058
  derived and/or modified CDS sequence (opt4) from hemagglutinin__InfluenzaA__AFM71879

SEQ ID NO: 169151 - RNA, 1701 nt, Artificial Sequence
  derived and/or modified CDS sequence (opt4) from hemagglutinin__InfluenzaA__AFM71890
augaaggccagacugcuggugcugcugugcgcccuggccgccaccgacgccgacaccaucugcaucggcuaccacgccaacaacagcaccgacaccguggacacccugcuggagaagaacgugaccgugacccacagcgugaaccugcuggaggacagccacaacggcaagcugugcaagcugaagggcaucgccccccugcagcugggcaagugcaacaucgccggcuggcugcugggcaaccccgagugcgacagccugcugcccgccagaagcuggagcuacaucguggagacccccaacagcgagaacggcgccugcuaccccggcgacuucaucgacuacgaggagcugaaggagcagcugagcagcgugagcagccuggagagauucgagaucuuccccaaggagagcagcuggcccaaccacaacacccugaagggcgugaccgccagcugcagccacggcggcaagagcagcuucuacagaaaccugcuguggcugaccaagaccgaggacagcuaccccaagcugagcaacagcuacgugaacaacaagggcaaggaggugcuggugcuguggggcgugcaccaccccagcagcagcgacgagcagcagagccuguaccacaacgugaacgccuacgugagcguggugagcagcaacuacaacagaagauucacccccgagaucgccgccagacccaaggugagaaaccagcccggcagaaugaacuacuacuggacccugcuggagcccggcgacaccaucaucuucgaggccaccggcaaccugaucgcccccugguacgccuucgcccugagcagaggcuucggcagcggcaucaucaccagcaacgccagcaugcacgagugcaacaccaagugccagaccccccagggcgccaucaacagcagccugcccuuccagaacauccaccccgugaccaucggcgagugccccaaguacgugagaagcaccaagcugagaauggugaccggccugagaaacauccccagcauccaguucagaggccuguucggcgccaucgccggcuucaucgagggcggcuggaccggcaugaucgacggcugguacggcuaccaccaccagaacgagcagggcagcggcuacgccgccgaccagaagagcacccagaacgccaucaacggcaucaccaacaaggugaacagcgugaucgagaagaugaacacccaguucaccgccgugagcaaggaguucaacaaccuggagaagagaauggagaaccugaacaagaagguggacgacggcuuccuggacaucuggaccuacaacgccgagcugcuggugcugcuggagaacgagagaacccuggacuuccacgaccugaacgugaagaaccuguacgagaaggugaagagccagcugaagaacaacgccaaggagaucggcaacggcugcuucgaguucuaccacaagugcgacaacaagugcauggagagcgugagaaacggcaccuacgacuaccccaaguacagcgaggagagcaagcugaacagagagaagaucgacggcgugaagcuggagagcaugggcguguaccagauccuggccaucuacagcaccguggccagcagccuggugcugcuggugagccugggcgccaucagcuucuggaugugcagcaacggcagccugcagugcagaaucugcaucuga

SEQ ID NO: 169152 - RNA, 1701 nt, Artificial Sequence; identical to SEQ ID NO: 169137
  derived and/or modified CDS sequence (opt4) from hemagglutinin__InfluenzaA__AFM71901

SEQ ID NO: 169153 - RNA, 1701 nt, Artificial Sequence
  derived and/or modified CDS sequence (opt4) from hemagglutinin__InfluenzaA__AFM71923
augaagaccaucaucgcccugagcuacaucuucugccuggugcugggccaggaccugcccggcaacgacaacagcaccgccacccugugccugggccaccacgccgugcccaacggcacccuggugaagaccaucaccaacgaccagaucgaggugaccaacgccaccgagcuggugcagagcagcagcaccggcaagaucugcaacaacccccacagaauccuggacggcaucgacugcacccugaucgacgcccugcugggcgacccccacugcgacagcuuccagaacgagaccugggaccuguucguggagagaagcaaggccuucagcaacugcuaccccuacgacgugcccgacuacgccagccugagaagccugguggccagcagcggcacccuggaguucaucaacgagggcuucaccuggaccggcgugacccagaacggcggcagcaacgccugcaagagaggccccgacagcggcuucuucagcagacugaacuggcuguacaagagcggcagcaccuaccccgugcugaacgugaccaugcccaacaacgacaacuucgacaagcuguacaucuggggcgugcaccaccccagcaccaaccaggagcagaccagccuguacgugcaggccagcggcagagugaccgugagcaccaagagaagccagcagaccaucauccccaacaucggcagcagacccugggugagaggccugagcagcagaaucagcaucuacuggaccaucgugaagcccggcgacauccuggugaucaacagcaacggcaaccugaucgcccccagaggcuacuucaagaugagaaccggcaagagcagcaucaugagaagcgacgcccccaucggcaccugcaucagcgagugcaucacccccaacggcagcauccccaacgacaagcccuuccagaacgugaacaagaucaccuacggcgccugccccaaguacgugaagcagaacacccugaagcuggccaccggcaugagaaacgugcccgagaagcagaccagaggccuguucggcgccaucgccggcuucaucgagaacggcugggagggcaugaucgacggcugguacggcuucagacaccagaacagcgagggcaccggccaggccgccgaccugaagagcacccaggccgccaucgaccagaucaacggcaagcugaacagagugaucgagaagaccaacgagaaguuccaccagaucgagaaggaguucagcgagguggagggcagaauccaggaccuggagaaguacguggaggacaccaagaucgaccuguggagcuacaacgccgagcugcugguggcccuggagaaccagcacaccaucgaccugaccgacagcgagaugaacaagcuguucgagaagaccagaagacagcugagagagaacgccgaggacaugggcaacggcugcuucagaaucuaccacaagugcgacaacgccugcaucggcagcaucagaaacggcaccuacgaccacgacguguacagagacgaggcccugaacaacagauuccagaucaagggcguggagcugaagagcggcuacaaggacuggauccuguggaucagcuucgccaucagcugcuuccugcugugcguggugcugcugggcuucaucaugugggccugccagaagggcaacaucagaugcaacaucugcaucuga

SEQ ID NO: 169154 - RNA, 1701 nt, Artificial Sequence
  derived and/or modified CDS sequence (opt4) from hemagglutinin__InfluenzaA__AFM71934
augaagaccaucaucgcccugagcuacaucuucugccuggugcugggccaggaccugcccggcaacgacaacagcaccgccacccugugccugggccaccacgccgugcccaacggcacccuggugaagaccaucaccaacgaccagaucgaggugaccaacgccaccgagcuggugcagagcagcagcaccggcaagaucugcaacaacccccacagaauccuggacggcaucgacugcacccugaucgacgcccugcugggcgacccccacugcgacggcuuccagaacgagaccugggaccuguucguggagagaagcaaggccuucagcaacugcuaccccuacgacgugcccgacuacgccagccugagaagccugguggccagcagcggcacccuggaguucaucaacgagggcuucaccuggaccggcgugacccagaacggcggcagcaacgccugcaagagaggccccgacagcggcuucuucagcagacugaacuggcuguacaagagcggcagcaccuaccccgugcugaacgugaccaugcccaacaacgacaacuucgacaagcuguacaucuggggcgugcaccaccccagcaccaaccaggagcagaccagccuguacgugcaggccagcggcagagugaccgugagcaccaagggcagccagcagaccaucauccccaacaucggcagcagacccugggugagaggccugagcagcagaaucagcaucuacuggaccaucgugaagcccggcgacauccuggugaucaacagcaacggcaaccugaucgcccccagaggcuacuucaagaugagaaccggcaagagcagcaucaugagaagcgacgcccccaucggcaccugcaucagcgagugcaucacccccaacggcagcauccccaacgacaagcccuuccagaacgugaacaagaucaccuacggcgccugccccaaguacgugaagcagaacacccugaagcuggccaccggcaugagaaacgugcccgagaagcagaccagaggccuguucggcgccaucgccggcuucaucgagaacggcugggagggcaugaucgacggcugguacggcuucagacaccagaacagcgagggcaccggccaggccgccgaccugaagagcacccaggccgccaucgaccagaucaacggcaagcugaacagagugaucgagaagaccaacgagaaguuccaccagaucgagaaggaguucagcgagguggagggcagaauccaggaccuggagaaguacguggaggacaccaagaucgaccuguggagcuacaacgccgagcugcugguggcccuggagaaccagcacaccaucgaccugaccgacagcgagaugaacaagcuguucgagaagaccagaagacagcugagagagaacgccgaggacaugggcaacggcugcuucagaaucuaccacaagugcgacaacgccugcaucggcagcaucagaaacggcaccuacgaccacgacguguacagagacgaggcccugaacaacagauuccagaucaagggcguggagcugaagagcggcuacaaggacuggauccuguggaucagcuucgccaucagcugcuuccugcugugcguggugcugcugggcuucaucaugugggccugccagaagggcaacaucagaugcaacaucugcaucuga

SEQ ID NO: 169155 - RNA, 1701 nt, Artificial Sequence
  derived and/or modified CDS sequence (opt4) from hemagglutinin__InfluenzaA__AFM71945
augaagaccaucaucgcccugagcuacaucuucugccuggugcugggccaggacuuccccggcaacgacaacagcaccgccacccugugccugggccaccacgccgugcccaacggcacccuggugaagaccaucaccaacgaccagaucgaggugaccaacgccaccgagcuggugcagagcagcagcaccggcaagaucugcaacaacccccacagaauccuggacggcaucaacugcacccugaucgacgcccugcugggcgacccccacugcgacggcuuccagaacgagaccugggaccuguucguggagagaagcaaggccuucagcaacugcuaccccuacgacgugcccgacuacgccagccugagaagccugguggccagcagcggcacccuggaguucaucaacgagggcuucaccuggaccggcgugacccagaacggcggcagcaacgccugcaagagaggccccgacagcggcuucuucagcagacugaacuggcuguacaagagcggcagcgccuaccccgugcugaacgugaccaugcccaacaacgacaacuucgacaagcuguacaucuggggcgugcaccaccccagcaccgaccaggagcagaccaaccuguacgugcaggccagcggcagagugaccgugagcaccaagagaagccagcagaccaucauccccaacaucggcagcagacccugggugagaggccugagcagcagaaucagcaucuacuggaccaucgugaagcccggcgacauccuggugaucaacagcaacggcaaccugaucgcccccagaggcuacuucaagaugagaaccggcaagagcagcaucaugagaagcgacgcccccaucggcaccugcaucagcgagugcaucacccccaacggcagcauccccaacgacaagcccuuccagaacgugaacaagaucaccuacggcgccugccccaaguacgugaagcagaacacccugaagcuggccaccggcaugagaaacgugcccgagaagcagaccagaggcaucuucggcgccaucgccggcuucaucgagaacggcugggagggcaugaucgacggcugguacggcuucagacaccagaacagcgagggcaccggccaggccgccgaccugaagagcacccaggccgccaucgaccagaucaacggcaagcugaacagagugaucgagaagaccaacgagaaguuccaccagaucgagaaggaguucagcgagguggagggcagaauccaggaccuggagaaguacguggaggacaccaagaucgaccuguggagcuacaacgccgagcugcugguggcccuggagaaccagcacaccaucgaccugaccgacagcgagaugaacaagcuguucgagaagaccagaagacagcugagagagaacgccgaggacaugggcaacggcugcuucaagaucuaccacaagugcgacaacgccugcaucggcagcaucagaaacggcaccuacgaccacgacguguacagagacgaggcccugaacaacagauuccagaucaagggcguggagcugaagagcggcuacaaggacuggauccuguggaucagcuucgccaucagcugcuuccugcugugcguggugcugcugggcuucaucaugugggccugccagaagggcaacaucagaugcaacaucugcaucuga

SEQ ID NO: 169156 - RNA, 1701 nt, Artificial Sequence; identical to SEQ ID NO: 169155
  derived and/or modified CDS sequence (opt4) from hemagglutinin__InfluenzaA__AFM71956

SEQ ID NO: 169157 - RNA, 1704 nt, Artificial Sequence
  derived and/or modified CDS sequence (opt4) from hemagglutinin__InfluenzaA__AFM71978
augaagaccaucaucgcccugagcuacaucuucugccugguguucgcccaggaccugcccggcaacgacaacaacagcaccgccacccugugccugggccaccacgccgugcccaacggcacccuggugaagaccaucaccaacgaccagaucgaggugaccaacgccaccgagcuggugcagagcagcagcaccggcaagaucugcaacaacccccacagaauccuggacggcaucaacugcacccugaucgacgcccugcugggcgacccccacugcgacggcuuccagaacgagaagugggaccuguucguggagagaagcaaggccuucagcaacugcuaccccuacgacgugcccgacuacgccagccugagaagccugguggccagcagcggcacccuggaguucaucaacgagggcuucaacuggaccggcgugacccagaacggcggcagcaacgccugcaagagaggccccgacagcggcuucuucagcagacugaacuggcuguacaagagcggcagcaccuaccccgugcagaacgugaccaugcccaacaacgacaacagcgacaagcuguacaucuggggcgugcaccaccccagcaccgacaaggagcagaccaaccuguacgugcaggccagcggcaaggugaccgugagcaccaagagaagccagcagaccaucauccccaacgugggcagcagacccugggugagaggccugagcagcagaaucagcaucuacuggaccaucgugaagcccggcgacauccuggugaucaacagcaacggcaaccugaucgcccccagaggcuacuucaagaugagaaccggcaagagcagcaucaugagaagcgacgcccccaucggcaccugcagcagcgagugcaucacccccaacggcagcauccccaacgacaagcccuuccagaacgugaacaagaucaccuacggcgccugccccaaguacgugaagcagaacacccugaagcuggccaccggcaugagaaacgugcccgagaagcagaccagaggcaucuucggcgccaucgccggcuucaucgagaacggcugggagggcaugaucgacggcugguacggcuucagacaccagaacagcgagggcaccggccaggccgccgaccugaagagcacccaggccgccaucgaccagaucaacggcaagcugaacagagugaucgagaagaccaacgagaaguuccaccagaucgagaaggaguucagcgagguggagggcagaauccaggaccuggagaaguacguggaggacaccaagaucgaccuguggagcuacaacgccgagcugcugguggcccuggagaaccagcacaccaucgaccugaccgacagcgagaugaacaagcuguucgagaagaccagaagacagcugagagagaacgccgaggacaugggcaacggcugcuucaagaucuaccacaagugcgacaacgccugcaucggcagcaucagaaacggcaccuacgaccacgacguguacagagacgaggcccugaacaacagauuccagaucaagggcguggagcugaagagcggcuacaaggacuggauccuguggaucagcuucgccaucagcugcuuccugcugugcguggugcugcugggcuucaucaugugggccugccagaagggcaacaucagaugcaacaucugcaucuga

SEQ ID NO: 169158 - RNA, 1701 nt, Artificial Sequence
  derived and/or modified CDS sequence (opt4) from hemagglutinin__InfluenzaA__AFM71989
augaagaccaucaucgcccugagcuacauccugugccugguguucgcccagaagcugcccggcaacgacaacagcaccgccacccugugccugggccaccacgccgugcccaacggcaccaucgugaagaccaucaccaacgaccagaucgaggugaccaacgccaccgagcuggugcagagcagcagcaccggcgagaucugcaacagcccccaccagauccuggacggcgagaacugcacccugaucgacgcccugcugggcgacccccagugcgacggcuuccagaacaagaagugggaccuguucguggagagaagcaaggcccacagcaacugcuaccccuacgacgugcccgacuacgccagccugagaagccugguggccagcagcggcacccuggaguucaacaacgagagcuucaacuggaccggcgugacccagaacggcaccagcagcgccugcaucagaagaagcaacaacagcuucuucagcagacugaacuggcugacccaccugaacuucaaguaccccgcccugaacgugaccaugcccaacaacgagcaguucgacaagcuguacaucuggggcgugcaccaccccagcaccgacaaggaccagaucuuccuguacacccaggccgccggcagaaucaccgugagcaccaagagaagccagcaggccgugauccccaacaucggcagcagacccagagugagaaacauccccagcagagugagcaucuacuggaccaucgugaagcccggcgacauccugcugaucaacagcaccggcaaccugaucgcccccagaggcuacuucaagaucagaagcggcaagagcagcaucaugagaagcgacgcccccaucggcaagugcaacagcgccugcaucacccccaacggcagcauccccaacgacaagcccuuccagaacgugaacagaaucaccuacggcgccugccccagauacgugaagcagaacacccugaagcuggccaccggcaugagaaacgugcccgagaagcagaccagaggcaucuucggcgccaucgccggcuucaucgagaacggcugggagggcaugguggacggcugguacggcuucagacaccagaacagcgagggcagaggccaggccgccgaccugaagagcacccaggccgccaucgaccagaucaacggcaagcugaacagacugaucggcaagaccaacgagaaguuccaccagaucgagaaggaguucagcgagguggagggcagaauccaggaccuggagaaguacguggaggacaccaagaucgaccuguggagcuacaacgccgagcugcugguggcccuggagaaccagcacaccaucgaccugaccgacagcgagaugaacaagcuguucgagaagaccaagaagcagcugagagagaacgccgaggacaugggcaacggcugcuucaagaucuaccacaagugcgacaacgccugcaucggcagcaucagaaacggcaccuacgaccacgacguguacagagacgaggcccugaacaacagauuccagaucaagggcguggagcugaagagcggcuacaaggacuggauccuguggaucagcuucgccaucagcugcuuccugcugugcguggcccugcugggcuucaucaugugggccugccagaagggcaacaucagaugcaacaucugcaucuga

SEQ ID NO: 169159 - RNA, 1701 nt, Artificial Sequence
  derived and/or modified CDS sequence (opt4) from hemagglutinin__InfluenzaA__AFM72010
augaagaccaucaucgcccugagcuacaucuucugccaggugcuggcccagaaccugcccggcaacgacaacagcaccgccacccugugccugggccaccacgccgugcccaacggcacccuggugaagaccaucaccaacgaccagaucgaggugaccaacgccaccgagcuggugcagagcagcagcaccggcagaaucugcgacagcccccacagaauccuggacggcaagaacugcacccugaucgacgcccugcugggcgacccccacugcgacggcuuccagaacgagaagugggaccuguucguggagagaagcaaggccuucagcaacugcuaccccuacgacgugcccgacuacgccagccugagaagccugguggccagcagcggcacccuggaguucaucaacgagggcuucaacuggaccggcgugacccagaacggcggcagcuacgccugcaagagaggccccgacaagagcuucuucagcagacugaacuggcuguacgagagcgagagcaccuaccccgugcugaacgugaccaugcccaacaacgacaacuucgacaagcuguacaucuggggcgugcaccaccccagcaccgacaaggagcagaccaagcuguacgugcaggccagcggcagagugaccgugagcaccaagagaagccagcagaccaucauccccaacgugggcagcagacccugggugagaggccugagcagcagaaucagcaucuacuggaccaucgugaagcccggcgacauccugcugaucaacagcaacggcaaccugaucgcccccagaggcuacuucaagaucagaaccggcaagagcagcaucaugagaagcgacgcccccaucggcaccugcagcagcgagugcaucacccccaacggcagcauccccaacgacaagcccuuccagaacgugaacaagaucaccuacggcgccugccccaaguacgugaagcagaacacccugaagcuggccaccggcaugagaaacgugcccgagaagcagaccagaggcaucuucggcgccaucgccggcuucaucgagaacggcugggagggcaugaucgacggcugguacggcuucagacaccagaacagcgagggcaccggccaggccgccgaccugaagagcacccaggccgccaucgaccagaucaacggcaagcugaacagagugaucgagaagaccaacgagaaguuccaccagaucgagaaggaguucagcgagguggagggcagaauccaggaccuggagaaguacguggaggacaccaagaucgaccuguggagcuacaacgccgagcugcugguggcccuggagaaccagcacaccaucgaccugaccgacagcgagaugaacaagcuguucgagaagaccagaagacagcugagagagaacgccgaggacaugggcaacggcugcuucaagaucuaccacaagugcgacaacgccugcaucggcagcaucagaaacggcaccuacgaccacgacguguacagagacgaggcccugaacaacagauuccagaucaagggcguggagcugaagagcggcuacaaggacuggauccuguggaucagcuucgccaucagcugcuuccugcugugcguggugcugcugggcuucaucaugugggccugccagaagggcaacaucagaugcaacaucugcaucuga

SEQ ID NO: 169160 - RNA, 1701 nt, Artificial Sequence; identical to SEQ ID NO: 160975
  derived and/or modified CDS sequence (opt4) from hemagglutinin__InfluenzaA__AFM72021

SEQ ID NO: 169161 - RNA, 1701 nt, Artificial Sequence
  derived and/or modified CDS sequence (opt4) from hemagglutinin__InfluenzaA__AFM72032
augaagaccaucaucgcccugagcuacauguucugccugguguucgcccagaaccugcccggcaacgacaacagcaccgccacccugugccugggccaccacgccgugcccaacggcacccuggugaagaccaucaccaacgaccagaucgaggugaccaacgccaccgagcuggugcagagcagcagcaccggcagaaucugcgacagcccccacagaauccuggacggcaagaacugcacccugaucgacgcccugcugggcgacccccacugcgacggcuuccagaacgagaagugggaccuguucguggagagaagcaaggccuucagcaacugcuaccccuacgacgugcccgacuacgccagccugagaagccugguggccagcagcggcacccuggaguucaucaacgagggcuucaacuggaccggcgugacccagagcggcggcagcuacaccugcaagagaggcagcaacaacagcuucuucagcagacugaacuggcuguacgagagcgagagcaaguaccccgugcugaacgugaccaugcccaacaacggcaaguucgacaagcuguacaucuggggcauccaccaccccagcaccgacaaggagcagaccaaccuguacaucagagccagcggcagagugaccgugagcaccaagagaagccagcagaccgugauccccaacaucggcagcagacccugggugagaggccugagcagcagaaucagcaucuacuggaccaucgugaagcccggcgacauccugcugaucaacagcaccggcaaccugaucgcccccagaggcuacuucaagaucagaaccggcaagagcagcaucaugagaagcgacgcccccaucggcaccugcagcagcgagugcaucacccccaacggcagcauccccaacgacaagcccuuccagaacgugaacaagaucaccuacggcgccugccccagauacgugaagcagaacacccugaagcuggccaccggcaugagaaacgugcccgagaagcagaccagaggcaucuucggcgccaucgccggcuucaucgagaacggcugggagggcaugguggacggcugguacggcuucagacaccagaacagcgagggcaccggccaggccgccgaccugaagagcacccaggccgccaucgaccagaucaacggcaagcugaacagagugaucgagaagaccaacgagaaguuccaccagaucgagaaggaguucagcgagguggagggcagaauccaggaccuggagaaguacguggaggacaccaagaucgaccuguggagcuacaacgccgagcugcugguggcccuggagaaccagcacaccaucgaccugaccgacagcgagaugaacaagcuguucgagaagaccagaaagcagcugagagagaacgccgaggacaugggcaacggcugcuucaagaucuaccacaagugcgacaacgccugcaucggcagcaucagaaacggcaccuacgaccacgacguguacagagacgaggcccugaacaacagauuccagaucaagggcguggagcugaagagcggcuacaaggacuggauccuguggaucagcuucgccaucagcugcuuccugcugugcguggugcugcugggcuucaucaugugggccugccagaagggcaacaucagaugcaacaucugcaucuga

SEQ ID NO: 169162 - RNA, 1701 nt, Artificial Sequence
  derived and/or modified CDS sequence (opt4) from hemagglutinin__InfluenzaA__AFM72043
augaagaccaucaucgcccugagcuacauguucugccugguguucgcccagaaccugcccggcaacgacaacagcaccgccacccugugccugggccaccacgccgugcccaacggcacccuggugaagaccaucaccaacgaccagaucgaggugaccaacgccaccgagcuggugcagagcagcagcaccggcagaaucugcgacagcccccacagaauccuggacggcaagaacugcacccugaucgacgcccugcugggcgacccccacugcgacggcuuccagaacgagaagugggaccuguucguggagagaagcaaggccuucagcaacugcuaccccuacgacgugcccgacuacgccagccugagaagccugguggccagcagcggcacccuggaguucaucaacgagggcuucaacuggaccggcgugacccagagcggcggcagcagcaccugcaagagaggcagcaacaacagcuucuucagcagacugaacuggcuguacgagagcgagagcaaguaccccgugcugaacgugaccaugcccaacaacggcaaguucgacaagcuguacaucuggggcauccaccaccccagcaccgacaaggagcagaccaaccuguacaucagagccagcggcagagugaccgugagcaccaagagaagccagcagaccgugauccccaacaucggcagcagacccugggugagaggccugagcagcagaaucagcaucuacuggaccaucgugaagcccggcgacauccugcugaucaacagcaccggcaaccugaucgcccccagaggcuacuucaagaucagaaccggcaagagcagcaucaugagaagcgacgcccccaucggcaccugcagcagcgagugcaucacccccaacggcagcauccccaacgacaagcccuuccagaacgugaacaagaucaccuacggcgccugccccagauacgugaagcagaacacccugaagcuggccaccggcaugagaaacgugcccgagaagcagaccagaggcaucuucggcgccaucgccggcuucaucgagaacggcugggagggcaugguggacggcugguacggcuucagacaccagaacagcgagggcaccggccaggccgccgaccugaagagcacccaggccgccaucgaccagaucaacggcaagcugaacagagugaucgagaagaccaacgagaaguuccaccagaucgagaaggaguucagcgagguggagggcagaauccaggaccuggagaaguacguggaggacaccaagaucgaccuguggagcuacaacgccgagcugcugguggcccuggagaaccagcacaccaucgaccugaccgacagcgagaugaacaagcuguucgagaagaccagaaagcagcugagagagaacgccgaggacaugggcaacggcugcuucaagaucuaccacaagugcgacaacgccugcaucggcagcaucagaaacggcaccuacgaccacgacguguacagagacgaggcccugaacaacagauuccagaucaagggcguggagcugaagagcggcuacaaggacuggauccuguggaucagcuucgccaucagcugcuuccugcugugcguggugcugcugggcuucaucaugugggccugccagaagggcaacaucagaugcaacaucugcaucuga

SEQ ID NO: 169163 - RNA, 1701 nt, Artificial Sequence
  derived and/or modified CDS sequence (opt4) from hemagglutinin__InfluenzaA__AFM72054
augaaggccaagcugcuggugcugcugugcgcccugagcgccaccgacgccgacaccaucugcaucggcuaccacgccaacaacagcaccgacaccguggacaccgugcuggagaagaacgugaccgugacccacagcgugaaccugcuggaggacaaccacaacggcaagcugugcaagcugaagggcaucgccccccugcagcugggcaagugcagcaucgccggcuggauccugggcaaccccgagugcgagagccuguucagcaagaagagcuggagcuacaucgccgagacccccaacagcgagaacggcaccugcuaccccggcuacuucgccgacuacgaggagcugagagagcagcugagcagcgugagcagcuucgagagauucgagaucuuccccaaggagagcagcuggcccaagcacaacgugaccaagggcgugaccgccgccugcagccacaagggcaagagcagcuucuacagaaaccugcuguggcugaccgagaagaacggcagcuaccccaaccugagcaagagcuacgugaacaacaaggagaaggaggugcuggugcuguggggcgugcaccaccccagcaacaucgaggaccagaagaccaucuacagaaaggagaacgccuacgugagcguggugagcagccacuacaacagaagauucacccccgagaucgccaagagacccaaggugagaaaccaggagggcagaaucaacuacuacuggacccugcuggagcccggcgacaccaucaucuucgaggccaacggcaaccugaucgcccccugguacgccuucgcccugagcagaggcuucggcagcggcaucaucaccagcaacgccagcauggacgagugcgacgccaagugccagaccccccagggcgccaucaacagcagccugcccuuccagaacgugcaccccgugaccaucggcgagugccccaaguacgugagaagcaccaagcugagaauggugaccggccugagaaacauccccagcauccagagcagaggccuguucggcgccaucgccggcuucaucgagggcggcuggaccggcaugaucgacggcugguacggcuaccaccaccagaacgagcagggcagcggcuacgccgccgaccagaagagcacccagaacgccaucaacggcaucaccaacaaggugaacagcaucaucgagaagaugaacacccaguucaccgccgugggcaaggaguucaacaagcuggagaagagaauggagaaccugaacaagaagguggacgacggcuuccuggacaucuggaccuacaacgccgagcugcuggugcugcuggagaacgagagaacccuggacuuccacgacagcaacgugaagaaccuguacgagaaggugaagagccagcugaagaacaacgccaaggagaucggcaacggcugcuucgaguucuaccacaagugcaacaacgagugcauggagagcgugaagaacggcaccuacgacuaccccaaguacagcgaggagagcaagcugaacagagagaagaucgacggcgugaagcuggagagcaugggcguguaccagauccuggccaucuacagcaccguggccagcagccuggugcugcuggugagccugggcgccaucagcuucuggaugugcagcaacggcagccugcagugcagaaucugcaucuga

SEQ ID NO: 169164 - RNA, 1701 nt, Artificial Sequence; identical to SEQ ID NO: 169163
  derived and/or modified CDS sequence (opt4) from hemagglutinin__InfluenzaA__AFM72065

SEQ ID NO: 169165 - RNA, 1701 nt, Artificial Sequence
  derived and/or modified CDS sequence (opt4) from hemagglutinin__InfluenzaA__AFM72087
augaagaccaucaucgcccugagcuacaucuucugccugguguucgcccagaagcugcccggcaacgacaacagcaccgccacccugugccugggccaccacgccgugcccaacggcacccuggugaagaccaucaccaacgaccagaucgaggugaccaacgccaccgagcuggugcagagcagcagcaccggcagaaucugcgacagcccccacagaauccuggacggcaagaacugcacccugaucgacgcccugcugggcgacccccacugcgacggcuuccagaacgagaagugggaccuguucaucgagagaagcaaggccuucagcaacugcuaccccuacgacgugcccgacuacgccagccugagaagccugguggccagcagcggcacccuggaguucaucaacgagggcuucaacuggaccggcgugacccagagcggcggcagcuacaccugcaagagaggcagcgugaacagcuucuucagcagacugaacuggcuguacgagagcgaguacaaguaccccgcccugaacgugaccaugcccaacaacggcaaguucgacaagcuguacaucuggggcgugcaccaccccagcaccgagaaggagcagaccaaccuguacgugagagccagcggcagagugaccgugagcaccaagagaagccagcagaccgugauccccaacaucggcagcagccccugggugagaggccugagcagcagaaucagcaucuacuggaccaucgugaagcccggcgacauccugcugaucaacagcaccggcaaccugaucgcccccagaggcuacuucaagaucagaaccggcaagagcagcaucaugagaagcgacgcccccaucggcaccugcagcagcgagugcaucacccccaacggcagcauccccaacgacaagcccuuccagaacgugaacaagaucaccuacggcgccugccccagauacgugaagcagaacacccugaagcuggccaccggcaugagaaacgugcccgagaagcagaccagaggcaucuucggcgccaucgccggcuucaucgagaacggcugggagggcaugguggacggcugguacggcuucagacaccagaacagcgagggcaccggccaggccgccgaccugaagagcacccaggccgccaucgaccagaucaacggcaagcugaacagacugaucgagaagaccaacgagaaguuccaccagaucgagaaggaguucagcgagguggagggcagaauccaggaccuggagaaguacguggaggacaccaagaucgaccuguggagcuacaacgccgagcugcugguggcccuggagaaccaguacaccaucgaccugaccgacagcgagaugaacaagcuguucgagaagaccagaaagcagcugagagagaacgccgaggacaugggcaacggcugcuucaagaucuaccacaagugcgacaacgccugcaucggcagcaucagaaacggcaccuacgaccacgacguguacagagacgaggcccugaacaacagauuccagaucaagggcguggagcugaagagcggcuacaaggacuggauccuguggaucagcuucgccaucagcugcuuccugcugugcguggugcugcugggcuucaucaugugggccugccagaagggcaacaucagaugcaacaucugcaucuga

SEQ ID NO: 169166 - RNA, 1701 nt, Artificial Sequence
  derived and/or modified CDS sequence (opt4) from hemagglutinin__InfluenzaA__AFM72098
augaagaccaucaucgcccugagcuacaucuucugccugguguucgcccagaagcugcccggcaacgacaacagcaccgccacccugugccugggccaccacgccgugcccaacggcacccuggugaagaccaucaccaacgaccagaucgaggugaccaacgccaccgagcuggugcagagcagcagcaccggcagaaucugcgacagcccccacagaauccuggacggcaagaacugcacccugaucgacgcccugcugggcgacccccacugcgacggcuuccagaacgagaagugggaccuguucguggagagaagcaaggccuacagcaacugcuaccccuacgacgugcccgacuacgccagccugagaagccugguggccagcagcggcacccuggaguucaucaacgaggacuucaacuggaccggcgugacccagagcggcggcagcuacgccugcaagagaggcagcgugaacagcuucuucagcagacugaacuggcuguacaagagcgaguacaaguaccccgcccugaacgugaccaugcccaacaacggcaaguucgacaagcuguacaucuggggcgugcaccaccccgugaccgacagagagcagaccaaccuguacgugagagccagcggcagagugaccgugagcaccaagagaagccagcagaccgugauccccaacaucggcagcagacccugggugagaggccugagcagcagaaucagcaucuacuggaccaucgugaagcccggcgacauccugcugaucaacagcaccggcaaccugaucgcccccagaggcuacuucaagaucagaaccggcaagagcagcaucaugagaagcgacgcccccaucggcaccugcagcagcgagugcaucacccccaacggcagcauccccaacgacaagcccuuccagaacgugaacaagaucaccuacggcgccugccccagauacgugaagcagaacacccugaagcuggccaccggcaugagaaacgugcccgagaagcagaccagaggcaucuucggcgccaucgccggcuucaucgagaacggcugggagggcaugguggacggcugguacggcuucagacaccagaacagcgagggcaccggccaggccgccgaccugaagagcacccaggccgccaucgaccagaucaacggcaagcugaacagacugaucgagaagaccaacgagaaguuccaccagaucgagaaggaguucagcgagguggagggcagaauccaggaccuggagaaguacguggaggacaccaagaucgaccuguggagcuacaacgccgagcugcugguggcccuggagaaccagcacaccaucgaccugaccgacagcgagaugaacaagcuguucgagaagaccagaaagcagcugagagagaacgccgaggacaugggcaacggcugcuucaagaucuaccacaagugcgacaacgccugcaucggcagcaucagaaacggcaccuacgaccacgacguguacagagacgaggcccugaacaacagauuccagaucaagggcguggagcugaagagcggcuacaaggacuggauccuguggaucagcuucgccaucagcugcuuccugcugugcguggugcugcugggcuucaucaugugggccugccagaagggcaacaucagaugcaacaucugcaucuga

SEQ ID NO: 169167 - RNA, 1701 nt, Artificial Sequence
  derived and/or modified CDS sequence (opt4) from hemagglutinin__InfluenzaA__AFM72109
augaagaccaucaucgcccugagcuacaucuucugccugguguucgcccagaagcugcccggcaacgacaacagcaccgccacccugugccugggccaccacgccgugcccaacggcacccuggugaagaccaucaccaacgaccagaucgaggugaccaacgccaccgagcuggugcagagcagcagcaccggcagaaucugcgacagcccccacagaauccuggacggcaagaacugcacccugaucgacgcccugcugggcgacccccacugcgacggcuuccagaacgagaagugggaccuguucguggagagaagcaaggccuacagcaacugcuaccccuacgacgugcccgacuacgccagccugagaagccugguggccagcagcggcacccuggaguucaucaacgaggacuucaacuggaccggcgugacccagagcggcggcagcuacgccugcaagagaggcagcgugaacagcuucuucagcagacugaacuggcugcacaagagcgaguacaaguaccccgcccugaacgugaccaugcccaacaacggcaaguucgacaagcuguacaucuggggcgugcaccaccccaucaccgacagagagcagaccaaccuguacgugagagccagcggcagagugaccgugagcaccaagagaagccagcagaccgugauccccaacaucggcagcagacccugggugagaggccugagcagcagaaucagcaucuacuggaccaucgugaagcccggcgacauccugcugaucaacagcaccggcaaccugaucgcccccagaggcuacuucaagaucagaaccggcaagagcagcaucaugagaagcgacgcccccaucggcaccugcagcagcgagugcaucacccccaacggcagcauccccaacgacaagcccuuccagaacgugaacaagaucaccuacggcgccugccccagauacgugaagcagaacacccugaagcuggccaccggcaugagaaacgugcccgagaagcagaccagaggcaucuucggcgccaucgccggcuucaucgagaacggcugggagggcaugguggacggcugguacggcuucagacaccagaacagcgagggcaccggccaggccgccgaccugaagagcacccaggccgccaucgaccagaucaacggcaagcugaacagacugaucgagaagaccaacgagaaguuccaccagaucgagaaggaguucagcgagguggagggcagaauccaggaccuggagaaguacguggaggacaccaagaucgaccuguggagcuacaacgccgagcugcugguggcccuggagaaccagcacaccaucgaccugaccgacagcgagaugaacaagcuguucgagaagaccagaagacagcugagagagaacgccgaggacaugggcaacggcugcuucaagaucuaccacaagugcgacaacgccugcaucggcagcaucagaaacggcaccuacgaccacgacguguacagagacgaggcccugaacaacagauuccagaucaagggcguggagcugaagagcggcuacaaggacuggauccuguggaucagcuucgccaucagcugcuuccugcugugcguggugcugcugggcuucaucaugugggccugccagaagggcaacaucagaugcaacaucugcaucuga

SEQ ID NO: 169168 - RNA, 1701 nt, Artificial Sequence
  derived and/or modified CDS sequence (opt4) from hemagglutinin__InfluenzaA__AFM72120
augaagaccaucaucgcccugagcuacaucuucugccugguguucgcccagaagcugcccggcaacgacaacagcaccgccacccugugccugggccaccacgccgugcccaacggcacccuggugaagaccaucaccaacgaccagaucgaggugaccaacgccaccgagcuggugcagagcagcagcaccggcagaaucugcgacagcccccacagaauccuggacggcaagaacugcacccugaucgacgcccugcugggcgacccccacugcgacggcuuccagaacgagaagugggaccuguucguggagagaagcaaggccuacagcaacugcuaccccuacgacgugcccgacuacgccagccugagaagccugguggccagcagcggcacccuggaguucaucaacgaggacuucaacuggaccggcgugacccagagcggcggcagcuacgccugcaagagaggcagcgugaacagcuucuucagcagacugaacuggcugcacgagagcgaguacaaguaccccgcccugaacgugaccaugcccaacaacggcaaguucgacaagcuguacaucuggggcgugcaccaccccaucaccgacagagagcagaccaaccuguacgugagagccagcggcagagugaccgugagcaccaagagaagccagcagaccgugauccccaacaucggcuucagacccugggugagaggccugagcagcagaaucagcaucuacuggaccaucgugaagcccggcgacauccugcugaucaacagcaccggcaaccugaucgcccccagaggcuacuucaagaucagaaacggcaagagcagcaucaugagaagcgacgcccccaucggcaccugcagcagcgagugcaucacccccaacggcagcauccccaacgacaagcccuuccagaacgugaacaagaucaccuacggcgccugccccagauacgugaagcagaacacccugaagcuggccaccggcaugagaaacgugcccgagaagcagaccagaggcaucuucggcgccaucgccggcuucaucgagaacggcugggagggcaugguggacggcugguacggcuucagacaccagaacagcgagggcaccggccaggccgccgaccugaagagcacccaggccgccaucgaccagaucaacggcaagcugaacagacugaucgagaagaccaacgagaaguuccaccagaucgagaaggaguucagcgagguggagggcagaauccaggaccuggagaaguacguggaggacaccaagaucgaccuguggagcuacaacgccgagcugcugguggcccuggagaaccagcacaccaucgaccugaccgacagcgagaugaacaagcuguucgagaagaccagaaagcagcugagagagaacgccgaggacaugggcaacggcugcuucaagaucuaccacaagugcgacaacgccugcaucggcagcaucagaaacggcaccuacgaccacgacguguacagagacgaggcccugaacaacagauuccagaucaagggcguggagcugaagagcggcuacaaggacuggauccuguggaucagcuucgccaucagcugcuuccugcugugcguggugcugcugggcuucaucaugugggccugccagaagggcaacaucagaugcaacaucugcaucuga

SEQ ID NO: 169169 - RNA, 1701 nt, Artificial Sequence
  derived and/or modified CDS sequence (opt4) from hemagglutinin__InfluenzaA__AFM72131
augaagaccaucaucgcccugagcuacauccugugccugguguucgcccagaagcugcccggcaacgacaacagcaccgccacccugugccugggccaccacgccgugcccaacggcacccuggugaagaccaucaccaacgaccagaucgaggugaccaacgccaccgagcuggugcagagcagcagcaccggcagaaucugcgacagcccccacagaauccuggacggcaaggacugcacccugaucgacgcccugcugggcgacccccacugcgacggcuuccagaacaaggagugggaccuguucguggagagaagcaaggccuacagcaacugcuaccccuacgacgugcccgacuacgccagccugagaagccugguggccagcagcggcacccuggaguucaucaacgaggacuucaacuggaacggcguggcccagagcggcgagagcuacgccugcaagagaggcagcgugaagagcuucuucagcagacugaacuggcugcacgagagcgaguacaaguaccccgcccugaacgugaccaugcccaacaacggcaaguucgacaagcuguacaucuggggcgugcaccaccccagcaccgacagagagcagaccaagcuguacgugagagccagcggcagagugaccgugagcaccaagagaagccagcagaccgugauccccaacaucggcagcagacccugggugagaggccugagcagcagaaucagcaucuacuggaccaucgugaagcccggcgacauccugcugaucaacagcaccggcaaccugaucgcccccagaggcuacuucaagaucagaaccggcaagagcagcaucaugagaagcgacgcccccaucggcaccugcagcagcgagugcaucacccccaacggcagcauccccaacgacaagcccuuccagaacgugaacagaaucaccuacggcgccugccccagauacgugaagcagaacacccugaagcuggccaccggcaugagaaacgugcccgagaagcagaccagaggcaucuucggcgccaucgccggcuucaucgagaacggcugggagggcaugguggacggcugguacggcuucagacaccagaacagcgagggcaccggccaggccgccgaccugaagagcacccaggccgccaucgaccagaucaacggcaagcugaacagacugaucgagaagaccaacgagaaguuccaccagaucgagaaggaguucagcgagguggagggcagaauccaggaccuggagaaguacguggaggacaccaagaucgaccuguggagcuacaacgccgagcugcugguggcccuggagaaccagcacaccaucgaccugaccgacagcgagaugaacaagcuguucgagaagaccagaaagcagcugagagagaacgccgaggacaugggcaacggcugcuucaagaucuaccacaagugcgacaacgccugcaucggcagcaucagaaacggcaccuacgaccacgacguguacagagacgaggcccugaacaacagauuccagaucaagggcguggagcugaagagcggcuacaaggacuggauccuguggaucagcuucgccaucagcugcuuccugcugugcguggugcugcugggcuucaucaugugggccugccagaagggcaacaucagaugcaacaucugcaucuga

SEQ ID NO: 169170 - RNA, 1701 nt, Artificial Sequence
  derived and/or modified CDS sequence (opt4) from hemagglutinin__InfluenzaA__AFM72142
augaagaccaucaucgcccugagcuacaucagcugccugguguucgcccagaagcugcccggcaacgacaacagcaccgccacccugugccugggccaccacgccgugcccaacggcacccuggugaagaccaucaccaacgaccagaucgaggugaccaacgccaccgagcuggugcagagcagcagcaccggcagaaucugcgacagcccccacagaauccuggacggcaagaacugcacccugaucgacgcccugcugggcgacccccacugcgacggcuuccagaacaaggagugggaccuguucguggagagaagcaaggccuacagcaacugcuaccccuacgacgugcccgacuacgccagccugagaagccugguggccagcagcggcacccuggaguucaucaacgaggacuucaacuggaccggcguggcccaggacggcggcagcuacgccugcaagagaggcagcgugaacagcuucuucagcagacugaacuggcugcacaagcuggaguacaaguaccccgcccugaacgugaccaugcccaacaacggcaaguucgacaagcuguacaucuggggcgugcaccaccccagcaccgacagagaccagaccagccuguacgugagagccagcggcagagugaccgugagcaccaagagaagccagcagaccgugauccccaacaucggcagcagacccugggugagaggccagagcagcagaaucagcaucuacuggaccaucgugaagcccggcgacauccugcugaucaacagcaccggcaaccugaucgcccccagaggcuacuucaagaucagaaacggcaagagcagcaucaugagaagcgacgcccccaucggcaacugcagcagcgagugcaucacccccaacggcagcauccccaacgacaagcccuuccagaacgugaacagaaucaccuacggcgccugccccagauacgugaagcagaacacccugaagcuggccaccggcaugagaaacgugcccgagaagcagaccagaggcaucuucggcgccaucgccggcuucaucgagaacggcugggagggcaugguggacggcugguacggcuucagacaccagaacagcgagggcaccggccaggccgccgaccugaagagcacccaggccgccaucgaccagaucaacggcaagcugaacagacugaucgagaagaccaacgagaaguuccaccagaucgagaaggaguucagcgagguggagggcagaauccaggaccuggagaaguacguggaggacaccaagaucgaccuguggagcuacaacgccgagcugcugguggcccuggagaaccagcacaccaucgaccugaccgacagcgagaugaacaagcuguucgagagaaccagaaagcagcugagagagaacgccgaggacaugggcaacggcugcuucaagaucuaccacaagugcgacaacgccugcaucggcagcaucagaaacggcaccuacgaccacgacguguacagagacgaggcccugaacaacagauuccagaucaagggcguggagcugaagagcggcuacaaggacuggauccuguggaucagcuucgccaucagcugcuuccugcugugcguggugcugcugggcuucaucaugugggccugccagaagggcaacaucagaugcaacaucugcaucuga

SEQ ID NO: 169171 - RNA, 1701 nt, Artificial Sequence
  derived and/or modified CDS sequence (opt4) from hemagglutinin__InfluenzaA__AFM72153
augaagaccaucaucgcccugagcuacauccugugccugguguucgcccagaagcugcccggcaacgacaacagcaccgccacccugugccugggccaccacgccgugcccaacggcacccuggugaagaccaucaccaacgaccagaucgaggugaccaacgccaccgagcuggugcagagcagcagcaccggcagaaucugcggcagcccccacagaauccuggacggcaagaacugcacccugaucgacgcccugcugggcgacccccacugcgacggcuuccagaacaaggagugggaccuguucguggagagaagcaaggccuacagcaacugcuaccccuacgacgugcccgacuacgccagccugagaagccugguggccagcagcggcacccuggaguucaucaacgaggacuucaacuggaccggcguggcccaggacggcggcagcuacgccugcaagagaggcagcgugaacagcuucuucagcagacugaacuggcugcacaagcuggaguacaaguaccccgcccugaacgugaccaugcccaacaacggcaaguucgacaagcuguacaucuggggcgugcaccaccccagcaccgacagcgaccagaccagccuguacgugagagccagcggcagagugaccgugagcaccaagagaagccagcagaccgugacccccaacaucggcagcagacccugggugagaggccagagcagcagaaucggcaucuacuggaccaucgugaagcccggcgacauccugcugaucaacagcaccggcaaccugaucgcccccagaggcuacuucaagaucagaaacggcaagagcagcaucaugagaagcgacgcccccaucggcaacugcagcagcgagugcaucacccccaacggcagcauccccaacgacaagcccuuccagaacgugaacagaaucaccuacggcgccugccccagauacgugaagcagaacacccugaagcuggccaccggcaugagaaacgugcccgagaagcagaccagaggcaucuucggcgccaucgccggcuucaucgagaacggcugggagggcaugguggacggcugguacggcuucagacaccagaacagcgagggcaccggccaggccgccgaccugaagagcacccaggccgccaucgaccagaucaacggcaagcugaacagacugaucgagaagaccaacgagaaguuccaccagaucgagaaggaguucagcgagguggagggcagaauccaggaccuggagaaguacguggaggacaccaagaucgaccuguggagcuacaacgccgagcugcugguggcccuggagaaccagcacaccaucgaccugaccgacagcgagaugaacaagcuguucgagaagaccagaaagcagcugagagagaacgccgaggacaugggcaacggcugcuucaagaucuaccacaagugcgacaacgccugcaucggcagcaucagaaacggcaccuacgaccacgacguguacagagacgaggcccugaacaacagauuccagaucaagggcguggagcugaagagcggcuacaaggacuggauccuguggaucagcuucgccaucagcugcuuccugcugugcguggugcugcugggcuucaucaugugggccugccagaagggcaacaucagaugcaacaucugcaucuga

SEQ ID NO: 169172 - RNA, 1701 nt, Artificial Sequence
  derived and/or modified CDS sequence (opt4) from hemagglutinin__InfluenzaA__AFM72164
augaagaccaucaucgcccugagcuacauccugugccugguguucgcccagaagcugcccggcaacgacaacagcaccgccacccugugccugggccaccacgccgugcccaacggcacccuggugaagaccaucaccaacgaccagaucgaggugaccaacgccaccgagcuggugcagagcagccccaccggcagaaucugcgacagcccccacagaauccuggacggcaagaacugcacccugaucgacgcccugcugggcgacccccacugcgacggcuuccagaacaaggagugggaccuguucguggagagaagcaaggccuacagcaacugcuaccccuacgacgugcccgacuacgccagccugagaagccugguggccagcagcggcacccuggaguucaucaacgagaacuucaacuggaccggcguggcccaggacggcaagagcuacgccugcaagagaggcagcgugaacagcuucuucagcagacugaacuggcugcacaagcuggaguacaaguaccccgcccugaacgugaccaugcccaacaacggcaaguucgacaagcuguacaucuggggcgugcaccaccccagcaccgacagcgaccagaccagccuguacgugagagccagcggcagagugaccgugagcaccaagagaagccagcagaccgugauccccgacaucggcuacagacccugggugagaggccagagcagcagaaucagcauccacuggaccaucgugaagcccggcgacauccugcugaucaacagcaccggcaaccugaucgcccccagaggcuacuucaagaucagaaacggcaagagcagcaucaugagaagcgacgcccccaucggcaacugcagcagcgagugcaucacccccaacggcagcauccccaacgacaagcccuuccagaacgugaacagaaucaccuacggcgccugccccagauacgugaagcagaacacccugaagcuggccaccggcaugagaaacgugcccgagaagcagaccagaggcaucuucggcgccaucgccggcuucaucgagaacggcugggagggcaugguggacggcugguacggcuucagacaccagaacagcgagggcaccggccaggccgccgaccugaagagcacccaggccgccaucgaccagaucaacggcaagcugaacagacugguggagaagaccaacgagaaguuccaccagaucgagaaggaguucagcgagguggagggcagaauccaggaccuggagaaguacguggaggacaccaagaucgaccuguggagcuacaacgccgagcugcugguggcccuggagaaccagcacaccaucgaccugaccgacagcgagaugaacaagcuguucgagagaaccagaaagcagcugagagagaacgccgaggacaugggcaacggcugcuucaagaucuaccacaagugcgacaacgccugcaucggcagcaucagaaacggcaccuacgaccacgacguguacagagacgaggcccugaacaacagauuccagaucaagggcguggagcugaagagcggcuacaaggacuggauccuguggaucagcuucgccaucagcugcuuccugcugugcguggugcugcugggcuucaucaugugggccugccagaagggcaacaucagaugcaacaucugcaucuga

SEQ ID NO: 169173 - RNA, 1701 nt, Artificial Sequence
  derived and/or modified CDS sequence (opt4) from hemagglutinin__InfluenzaA__AFM72175
augaagaccaucaucgcccugagcuacauccugugccugguguucgcccagaagcugcccggcaacgacaacagcaccgccacccugugccugggccaccacgccgugcccaacggcacccuggugaagaccaucaccaacgaccagaucgaggugaccaacgccaccgagcuggugcagagcagccccaccggcagaaucugcgacagcccccacagaauccuggacggcaagaacugcacccugaucgacgcccugcugggcgacccccacugcgacggcuuccagaacaaggagugggaccuguucguggagagaagcaaggccuacagcaacugcuaccccuacgacgugcccgacuacgccagccugagaagccugguggccagcagcggcacccuggaguucaucaacgagaacuucaacuggaccggcguggcccaggacggcaagagcuacgccugcaagagaggcagcgugaacagcuucuucagcagacugaacuggcugcacaagcuggaguacaaguaccccgcccugaacgugaccaugcccaacaacggcaaguucgacaagcuguacaucuggggcgugcaccaccccagcaccgacagcgaccagaccaaccuguacgugagagccagcggcagagugaccgugagcaccaagagaagccagcagaccgugauccccgacaucggcuacagacccugggugagaggccagagcagcagaaucagcauccacuggaccaucgugaagcccggcgacauccugcugaucaacagcaccggcaaccugaucgcccccagaggcuacuucaagaucagaaacggcaagagcagcaucaugagaagcgacgcccccaucggcaacugcagcagcgagugcaucacccccaacggcagcauccccaacgacaagcccuuccagaacgugaacagaaucaccuacggcgccugccccagauacgugaagcagaacacccugaagcuggccaccggcaugagaaacgugcccgagaagcagaccagaggcaucuucggcgccaucgccggcuucaucgagaacggcugggagggcaugguggacggcugguacggcuucagacaccagaacagcgagggcaccggccaggccgccgaccugaagagcacccaggccgccaucgaccagaucaacggcaagcugaacagacugguggagaagaccaacgagaaguuccaccagaucgagaaggaguucagcgagguggagggcagaauccaggaccuggagaaguacguggaggacaccaagaucgaccuguggagcuacaacgccgagcugcugguggcccuggagaaccagcacaccaucgaccugaccgacagcgagaugaacaagcuguucgagagaaccagaaagcagcugagagagaacgccgaggacaugggcaacggcugcuucaagaucuaccacaagugcgacaacgccugcaucggcagcaucagaaacggcaccuacgaccacgacguguacagagacgaggcccugaacaacagauuccagaucaagggcguggagcugaagagcggcuacaaggacuggauccuguggaucagcuucgccaucagcugcuuccugcugugcguggugcugcugggcuucaucaugugggccugccagaagggcaacaucagaugcaacaucugcaucuga

SEQ ID NO: 169174 - RNA, 1701 nt, Artificial Sequence
  derived and/or modified CDS sequence (opt4) from hemagglutinin__InfluenzaA__AFM72197
augaagaccaucaucgcccugagcuacauccugugcaugguguucgcccagaagcugcccggcaacgacaacagcaccgccacccugugccugggccaccacgccgugcccaacggcacccuggugaagaccaucaccaacgaccagaucgaggugaccaacgccaccgagcuggugcagagcagcagcaccggcagaaucugcgacagcccccacagaauccuggacggcaagaacugcacccugaucgacgcccugcugggcgacccccacugcgacggcuuccagaacaaggagugggaccuguucguggagagaagcaaggccuacagcaacugcuaccccuacgacgugcccgacuacgccagccugagaagccugguggccagcagcggcacccuggaguucaacaacgagagcuucaacuggaccggcguggcccagaacggcaccagcuacgccugcaagagaagaagcgugaagagcuucuucagcagacugaacuggcugcacaagcuggaguacaaguaccccgcccugaacgugaccaugcccaacaacgacaaguucgacaagcuguacaucuggggcgugcaccaccccaucaccgacagcgagcagaccagccuguacgugcaggccagcggcagagugaccgugagcaccaagagaagccagcagaccgugauccccaacaucggcuacagacccugggugagaggcgugagcagcagaaucagcaucuacuggaccaucgugaagcccggcgacauccugcugaucaacagcaccggcaaccugaucgcccccagaggcuacuucaagaucagaagcggcaagagcagcaucaugagaagcgacgcccccaucggcaacugcaacagcgagugcaucacccccaacggcagcauccccaacgacaagcccuuccagaacgugaacagaaucaccuacggcgccugccccagauacgugaagcagaacacccugaagcuggccaccggcaugagaaacgugcccgagaagcagaccagaggcaucuucggcgccaucgccggcuucaucgagaacggcugggagggcaugguggacggcugguacggcuucagacaccagaacagcgagggcaccggccaggccgccgaccugaagagcacccaggccgccaucaaccagaucaacggcaagcugaacagacugaucgagaagaccaacgagaaguuccaccagaucgagaaggaguucagcgagguggagggcagaauccaggaccuggagaaguacguggaggacaccaagaucgaccuguggagcuacaacgccgagcugcugguggcccuggagaaccagcacaccaucgaccugaccgacagcgagaugaacaagcuguucgagagaaccagaaagcagcugagagagaacgccgaggacaugggcaacggcugcuucaagaucuaccacaagugcgacaacgccugcaucggcagcaucagaaacggcaccuacgaccacgacguguacagagacgaggcccugaacaacagauuccagaucaagggcguggagcugaagagcggcuacaaggacuggauccuguggaucagcuucgccaucagcugcuuccugcugugcguggugcugcugggcuucaucaugugggccugccagaagggcaacaucaagugcaacaucugcaucuga

SEQ ID NO: 169175 - RNA, 1701 nt, Artificial Sequence
  derived and/or modified CDS sequence (opt4) from hemagglutinin__InfluenzaA__AFM72208
augaagaccaucaucgcccugagcuacauccugugccugguguucgcccagaagcugcccggcaacgacaacagcaccgccacccugugccugggccaccacgccgugcccaacggcacccuggugaagaccaucaccaacgaccagaucgaggugaccaacgccaccgagcuggugcagagcagcagcaccggcagaaucugcgacagcccccaccagauccuggacggcgagaacugcacccugaucgacgcccugcugggcgacccccacugcgacggcuuccagaacaaggagugggaccuguucguggagagaagcaaggccuacagcaacugcuaccccuacgacgugcccgacuacgccagccugagaagccugguggccagcagcggcacccuggaguucaacaacgagagcuucaacuggaccggcguggcccagaacggcaccagcagcgccugcaagagaagaagcaucaacagcuucuucagcagacugaacuggcugcaccagcugaaguacagauaccccgcccugaacgugaccaugcccaacaacgacaaguucgacaagcuguacaucuggggcgugcaccaccccagcaccgacagcgaccagaccagccuguacacccaggccagcggcagagugaccgugagcaccaagagaagccagcagaccgugauccccaacaucggcagcagacccugggugagaggcaucagcagcagaaucagcaucuacuggaccaucgugaagcccggcgacauccugcugaucaacagcaccggcaaccugaucgcccccagaggcuacuucaagaucagaagcggcaagagcagcaucaugagaagcgacgcccccaucggcaagugcaacagcgagugcaucacccccaacggcagcauccccaacgacaagcccuuccagaacgugaacagaaucaccuacggcgccugccccagauacgugaagcagaacacccugaagcuggccaccggcaugagaaacgugcccgagaagcagaccagaggcaucuucggcgccaucgccggcuucaucgagaacggcugggagggcaugauggacggcugguacggcuucagacaccagaacagcgagggcaccggccaggccgccgaccugaagagcacccaggccgccaucaaccagaucaacggcaagcugaacagacugaucgagaagaccaacgagaaguuccaccagaucgagaaggaguucagcgagguggagggcagaauccaggaccuggagaaguacguggaggacaccaagaucgaccuguggagcuacaacgccgagcugcugguggcccuggagaaccagcacaccaucgaccugaccgacagcgagaugaacaagcuguucgagagaaccagaaagcagcugagagagaacgccgaggacaugggcaacggcugcuucaagaucuaccacaagugcgacaacgccugcaucggcagcaucagaaacggcaccuacgaccacgacguguacagagacgaggcccugaacaacagauuccagaucaagggcguggagcugaagagcggcuacaaggacuggauccuguggaucagcuucgccaucagcugcuuccugcugugcguggugcugcugggcuucaucaugugggccugccagaagggcaacaucagaugcaacaucugcaucuga

SEQ ID NO: 169176 - RNA, 1701 nt, Artificial Sequence
  derived and/or modified CDS sequence (opt4) from hemagglutinin__InfluenzaA__AFM72219
augaagaccaucaucgcccugagcuacauccugugccugguguucgcccagaagcugcccggcaacgacaacagcaccgccacccugugccugggccaccacgccgugcccaacggcacccuggugaagaccaucaccaacgaccagaucgaggugaccaacgccaccgagcuggugcagagcagcagcaccggcagaaucugcgacagcccccaccagauccuggacggcgagaacugcacccugaucgacgcccugcugggcgacccccacugcgacggcuuccagaacaaggagugggaccuguucguggagagaagcaaggccuacagcaacugcuaccccuacgacgugcccgacuacgccagccugagaagccugguggccagcagcggcacccuggaguucaacaacgagagcuucaacuggaccggcguggcccagaacggcaccagcagcgccugcaagagaagaagcaucaacagcuucuucagcagacugaacuggcugcaccagcugaaguacagauaccccgcccugaacgugaccaugcccaacaacgacaaguucgacaagcuguacaucuggggcgugcaccaccccagcaccgacagcgaccagaccagccuguacacccaggccagcggcagagugaccgugagcaccaagagaagccagcagaccgugauccccaacaucggcagcagacccugggugagaggcaucagcagcagaaucagcaucuacuggaccaucgugaagcccggcgacauccugcugaucaagagcaccggcaaccugaucgcccccagaggcuacuucaagaucagaagcggcaagagcagcaucaugagaagcgacgcccccaucggcaagugcaacagcgagugcaucacccccaacggcagcauccccaacgacaagcccuuccagaacgugaacagaaucaccuacggcgccugccccagauacgugaagcagaacacccugaagcuggccaccggcaugagaaacgugcccgagaagcagaccagaggcaucuucggcgccaucgccggcuucaucgagaacggcugggagggcaugauggacggcugguacggcuucagacaccagaacagcgagggcaccggccaggccgccgaccugaagagcacccaggccgccaucaaccagaucaacggcaagcugaacagacugaucgagaagaccaacgagaaguuccaccagaucgagaaggaguucagcgagguggagggcagaauccaggaccuggagaaguacguggaggacaccaagaucgaccuguggagcuacaacgccgagcugcugguggcccuggagaaccagcacaccaucgaccugaccgacagcgagaugaacaagcuguucgagagaaccagaaagcagcugagagagaacgccgaggacaugggcaacggcugcuucaagaucuaccacaagugcgacaacgccugcaucggcagcaucagaaacggcaccuacgaccacgacguguacagagacgaggcccugaacaacagauuccagaucaagggcguggagcugaagagcggcuacaaggacuggauccuguggaucagcuucgccaucagcugcuuccugcugugcguggugcugcugggcuucaucaugugggccugccagaagggcaacaucagaugcaacaucugcaucuga

SEQ ID NO: 169177 - RNA, 1698 nt, Artificial Sequence
  derived and/or modified CDS sequence (opt4) from hemagglutinin__InfluenzaA__AFM72230
augaaggccaagcugcuggugcugcugugcaccuucaccgccaccuacgccgacaccaucugcaucggcuaccacgccaacaacagcaccgacaccguggacaccgugcuggagaagaacgugaccgugacccacagcgugaaccugcuggaggacagccacaacggcaagcugugccugcugaagggcaucgccccccugcagcugggcaacugcagcguggccggcuggauccugggcaaccccgagugcgagcugcugaucagcaagaagagcuggagcuacaucguggagacccccaaccccgagaacggcaccugcuaccccggcuacuucgccgacuacgaggagcugagagagcagcugagcagcgugagcagcuucgagagauucgagaucuuccccaaggagagcagcuggcccaaccacaccgugaccggcgugagcgccagcugcagccacaacggcaagagcagcuucuacagaaaccugcuguggcugaccggcaagaacggccuguaccccaaccugagcaagagcuacgugaacaacaaggagaaggaggugcuggugcuguggggcgugcaccacccccccaacaucggcaaccagagagcccuguaccacaccgagaacgccuacgugagcguggugagcagccacuacagcagaagauucacccccgagaucgccaagagacccaaggugagagaccaggagggcagaaucaacuacuacuggacccugcuggagcccggcgacaccaucaucuucgaggccaacggcaaccugaucgcccccugguacgccuucgcccugagcagaggcuucggcagcggcaucaucaccagcaacgcccccauggacgagugcgacgccaagugccagaccccccagggcgccaucaacagcagccugcccuuccagaacgugcaccccgugaccaucggcgagugccccaaguacgugagaagcgccaagcugagaauggugaccggccugagaaacauccccagcauccagagcagaggccuguucggcgccaucgccggcuucaucgagggcggcuggaccggcaugguggacggcugguacggcuaccaccaccagaacgagcagggcagcggcuacgccgccgaccagaagagcacccagaacgccaucaacggcaucaccaacaaggugaacagcgugaucgagaagaugaacacccaguucaccgccgugggcaaggaguucaacaagcuggagagaagaauggagaaccugaacaagaagguggacgacggcuuccuggacaucuggaccuacaacgccgagcugcuggugcugcuggagaacgagagaacccuggacuuccacgacagcaacgugaagaaccuguacgagaaggugaagagccagcugaagaacaacgccaaggagaucggcaacggcugcuucgaguucuaccacaagugcaacaacgagugcauggagagcgugaagaacggcaccuacgacuaccccaaguacagcgaggagagcaagcugaacagagagaagaucgacggcgugaagcuggagagcaugggcguguaccagauccuggccaucuacagcaccguggccagcagccuggugcugcuggugagccugggcgccaucagcuucuggaugugcagcaacggcagccugcagugcagaaucugcaucuga

SEQ ID NO: 169178 - RNA, 1701 nt, Artificial Sequence
  derived and/or modified CDS sequence (opt4) from hemagglutinin__InfluenzaA__AFM72246
augaagaccaucaucgcccugagcuacauccugugccugguguucgcccagaagcugcccggcaacgacaacagcaccgccacccugugccugggccaccacgccgugagcaacggcacccuggugaagaccaucaccaacgaccagaucgaggugaccaacgccaccgagcuggugcagagcagcagcaccggcagaaucugcgacagcccccaccagauccuggacggcgagaacugcacccugaucgacgcccugcugggcgacccccacugcgacggcuuccagaacaaggagugggaccuguucguggagagaagcaaggccuacagcaacugcuaccccuacgacgugcccgacuacgccagccugagaagccugguggccagcagcggcacccuggaguucaacaacgagagcuucaacuggaccggcguggcccagaacggcaccagcagcgccugcaagagaagaagcaacaagagcuucuucagcagacugaacuggcugcaccagcugaaguacaaguaccccgcccugaacgugaccaugcccaacaacgagaaguucgacaagcuguacaucuggggcgugcaccaccccagcaccgacagcgaccagaucagcaucuacgcccaggccagcggcagagugaccgugagcaccaagagaagccagcagaccgugauccccaacaucggcagcagccccugggugagaggcgugagcagcagaaucagcaucuacuggaccaucgugaagcccggcgacauccugcugaucaacagcaccggcaaccugaucgcccccagaggcuacuucaagaucagaagcggcaagagcagcaucaugagaagcgacgcccccaucggcaagugcaacagcgagugcaucacccccaacggcagcauccccaacgacaagcccuuccagaacgugaacagaaucaccuacggcgccugccccagauacgugaagcagaacacccugaagcuggccaccggcaugagaaacgugcccgagaagcagaccagaggcaucuucggcgccaucgccggcuucaucgagaacggcugggagggcaugguggacggcugguacggcuucagacaccagaacagcgagggcaccggccaggccgccgaccugaagagcacccaggccgccaucaaccagaucaacggcaagcugaacagacugaucgagaagaccaacgagaaguuccaccagaucgagaaggaguucagcgagguggagggcagaauccaggaccuggagaaguacguggaggacaccaagaucgaccuguggagcuacaacgccgagcugcugguggcccuggagaaccagcacaccaucgaccugaccgacagcgagaugaacaagcuguucgagagaaccaagaagcagcugagagagaacgccgaggacaugggcaacggcugcuucaagaucuaccacaagugcgacaacgccugcaucggcagcaucagaaacggcaccuacgaccacgacguguacagagacgaggcccugaacaacagauuccagaucaagggcguggagcugaagagcggcuacaaggacuggauccuguggaucagcuucgccaucagcugcuuccugcugugcguggugcugcugggcuucaucaugugggccugccagaagggcaacaucagaugcaacaucugcaucuga

SEQ ID NO: 169179 - RNA, 1701 nt, Artificial Sequence
  derived and/or modified CDS sequence (opt4) from hemagglutinin__InfluenzaA__AFM72257
augaagaccaucaucgcccugagcuacauccugugccugguguucgcccagaagcugcccgugaacgacaacagcaccgccacccugugccugggccaccacgccgugcccaacggcacccuggugaagaccaucaccaacgaccacaucgaggugaccaacgccaccgagcuggugcagagcagcagcaccggcagaaucugcgacagcccccaccagauccuggacggcgagaacugcacccugaucgacgcccugcugggcgacccccacugcgacggcuuccagaacaaggagugggaccuguucguggagagaagcaccgccuacagcaacugcuaccccuacgacgugcccgacuacgccagccugagaagccugguggccagcagcggcacccuggaguucaacaacgagagcuucaacuggaccggcguggcccagaacggcaccagcagcgccugcaagagaagaagcaucaagagcuucuucagcagacugaacuggcugcaccagcugaacuacaaguaccccgcccugaacgugaccaugcccaacaacgagaaguucgacaagcuguacaucuggggcgugcaccaccccagcaccgacagcgaccagaucagcaucuacgcccaggccagcggcagagugaccgugagcaccaagagaagccagcagaccgugauccccaacaucggcagcagacccugggugagaggcgugagcagcggcaucagcaucuacuggaccaucgugaagcccggcgacauccugcugaucaacagcaccggcaaccugaucgcccccagaggcuacuucaagaucagaagcggcaagagcagcaucaugagaagcaacgcccccaucggcaagugcaacagcgagugcaucacccccaacggcagcauccccaacgacaagcccuuccagaacgugaacagaaucaccuacggcgccugccccagauacgugaagcagaacacccugaagcuggccaccggcaugagaaacgugcccgagaagcagaccagaggcaucuucggcgccaucgccggcuucaucgagaacggcugggagggcaugguggacggcugguacggcuucagacaccagaacagcgagggcaccggccaggccgccgaccugaagagcacccaggccgccaucaaccagaucaacggcaagcugaacagacugaucgagaagaccaacgagaaguuccaccagaucgagaaggaguucagcgagguggagggcagaauccaggaccuggagaaguacguggaggacaccaagaucgaccuguggagcuacaacgccgagcugcugguggcccuggagaaccagcacaccaucgaccugaccgacagcgagaugaacaagcuguucgagagaaccagaaagcagcugagagagaacgccgaggacaugggcaacggcugcuucaagaucuaccacaagugcgacaacgccugcaucggcagcaucagaaacggcaccuacgaccacgacguguacagagacgaggcccugaacaacagauuccagaucaagggcguggagcugaagagcggcuacaaggacuggauccuguggaucagcuucgccaucagcugcuuccugcugugcguggugcugcugggcuucaucaugugggccugccagaagggcaacaucagaugcaacaucugcaucuga

SEQ ID NO: 169180 - RNA, 1701 nt, Artificial Sequence
  derived and/or modified CDS sequence (opt4) from hemagglutinin__InfluenzaA__AFM72268
augaagaccaucaucgcccugagcuacauccugugccugguguucgcccagaagcugcccgugaacgacaacagcaccgccacccugugccugggccaccacgccgugcccaacggcacccuggugaagaccaucaccaacgaccacaucgaggugaccaacgccaccgagcuggugcagagcagcagcaccggcagaaucugcgacagcccccaccagauccuggacggcgagaacugcacccugaucgacgcccugcugggcgacccccacugcgacggcuuccagaacaaggagugggaccuguucguggagagaagcaccgccuacagcaacugcuaccccuacgacgugcccgacuacgccagccugagaagccugguggccagcagcggcacccuggaguucaacaacgagagcuucaacuggaccggcguggcccagaacggcaccagcagcgccugcaagagaagaagcaucaagagcuucuucagcagacugaacuggcugcaccagcugaacuacaaguaccccgcccugaacgugaccaugcccaacaacgagaaguucgacaagcuguacaucuggggcgugcaccaccccaacaccgacagcgaccagaucagcaucuacgcccaggccagcggcagagugaccgugagcaccaagagaagccagcagaccgugauccccaacaucggcagcagacccugggugagaggcgugagcagcggcaucagcaucuacuggaccaucgugaagcccggcgacauccugcugaucaacagcaccggcaaccugaucgcccccagaggcuacuucaagaucagaagcggcaagagcagcaucaugagaagcaacgcccccaucggcaagugcaacagcgagugcaucacccccaacggcagcauccccaacgacaagcccuuccagaacgugaacagaaucaccuacggcgccugccccagauacgugaagcagaacacccugaagcuggccaccggcaugagaaacgugcccgagaagcagaccagaggcaucuucggcgccaucgccggcuucaucgagaacggcugggagggcaugguggacggcugguacggcuucagacaccagaacagcgagggcaccggccaggccgccgaccugaagagcacccaggccgccaucaaccagaucaacggcaagcugaacagacugaucgagaagaccaacgagaaguuccaccagaucgagaaggaguucagcgagguggagggcagaauccaggaccuggagaaguacguggaggacaccaagaucgaccuguggagcuacaacgccgagcugcugguggcccuggagaaccagcacaccaucgaccugaccgacagcgagaugaacaagcuguucgagagaaccagaaagcagcugagagagaacgccgaggacaugggcaacggcugcuucaagaucuaccacaagugcgacaacgccugcaucggcagcaucagaaacggcaccuacgaccacgacguguacagagacgaggcccugaacaacagauuccagaucaagggcguggagcugaagagcggcuacaaggacuggauccuguggaucagcuucgccaucagcugcuuccugcugugcguggugcugcugggcuucaucaugugggccugccagaagggcaacaucagaugcaacaucugcaucuga

SEQ ID NO: 169181 - RNA, 1701 nt, Artificial Sequence
  derived and/or modified CDS sequence (opt4) from hemagglutinin__InfluenzaA__AFM72279
augaagaccaucaucgcccugagcuacauccugugccugguguucgcccagaagcugcccgugaacgacaacagcaccgccacccugugccugggccaccacgccgugcccaacggcacccuggugaagaccaucaccaacgaccacaucgaggugaccaacgccaccgagcuggugcagagcagcagcaccggcagaaucugcgacagcccccaccagauccuggacggcgagaacugcacccugaucgacgcccugcugggcgacccccacugcgacggcuuccagaacaaggagugggaccuguucguggagagaagcaccgccuacagcaacugcuaccccuacgacgugcccgacuacgccagccugagaagccugguggccagcagcggcacccuggaguucaacaacgagagcuucaacuggaccggcguggcccagaacggcaccagcagcgccugcaagagaagaagcaucaagagcuucuucagcagacugaacuggcugcaccagcugaaguacaaguaccccgcccugaacgugaccaugcccaacaacgagaaguucgacaagcuguacaucuggggcgugcaccaccccagcaccgacagcgaccagaucagcaucuacgcccaggccagcggcagagugaccgugagcaccaagagaagccagcagaccgugauccccaacaucggcagcaagcacugggugagaggcgugagcagcagaaucagcaucuacuggaccaucgugaagcccggcgacauccugcugaucaacagcaccggcaaccugaucgcccccagaggcuacuucaagaucagaagcggcaagagcagcaucaugagaagcaacgcccccaucggcaagugcaacagcgagugcaucacccccaacggcagcauccccaacgacaagcccuuccagaacgugaacagaaucaccuacggcgccugccccagauacgugaagcagaacacccugaagcuggccaccggcaugagaaacgugcccgagaagcagaccagaggcaucuucggcgccaucgccggcuucaucgagaacggcugggagggcaugguggacggcugguacggcuucagacaccagaacagcgagggcaccggccaggccgccgaccugaagagcacccaggccgccaucaaccagaucaacggcaagcugaacagacugaucgagaagaccaacgagaaguuccaccagaucgagaaggaguucagcgagguggagggcagaauccaggaccuggagaaguacguggaggacaccaagaucgaccuguggagcuacaacgccgagcugcugguggcccuggagaaccagcacaccaucgaccugaccgacagcgagaugaacaagcuguucgagagaaccagaaagcagcugagagagaacgccgaggacaugggcaacggcugcuucaagaucuaccacaagugcgacaacgccugcaucggcagcaucagaaacggcaccuacgaccacgacguguacagagacgaggcccugaacaacagauuccagaucaagggcguggagcugaagagcggcuacaaggacuggauccuguggaucagcuucgccaucagcugcuuccugcugugcguggugcugcugggcuucaucaugugggccugccagaagggcaacaucagaugcaacaucugcaucuga

SEQ ID NO: 169182 - RNA, 1701 nt, Artificial Sequence
  derived and/or modified CDS sequence (opt4) from hemagglutinin__InfluenzaA__AFM72290
augaagaccaucaucgcccugagcuacauccugugccugguguucgcccagaagcugcccgugaacgacaacagcaccgccacccugugccugggccaccacgccgugcccaacggcacccuggugaagaccaucaccaacgaccacaucgaggugaccaacgccaccgagcuggugcagagcagcagcaccggcagaaucugcgacagcccccaccagauccuggacggcgagaacugcacccugaucgacgcccugcugggcgacccccacugcgacggcuuccagaacaaggagugggaccuguucguggagagaagcaccgccuacagcaacugcuaccccuacgacgugcccgacuacgccagccugagaagccugguggccagcagcggcacccuggaguucaacaacgagagcuucaacuggaccggcguggcccagaacggcaccagcagcgccugcaagagaagaagcaucaagagcuucuucagcagacugaacuggcugcaccagcugaaggacaaguaccccgcccugaacgugaccaugcccaacaacgagaaguucgacaagcuguacaucuggggcgugcaccaccccagcaccgacagcgaccagaucagcaucuacgcccaggccagcggcagagugaccgugagcaccaagagaagccagcagaccgugauccccaacaucggcagcaagcacugggugagaggcgugagcagcagaaucagcaucuacuggaccaucgugaagcccggcgacauccugcugaucaacagcaccggcaaccugaucgcccccagaggcuacuucaagaucagaagcggcaagagcagcaucaugagaagcaacgcccccaucggcaagugcaacagcgagugcaucacccccaacggcagcauccccaacgacaagcccuuccagaacgugaacagaaucaccuacggcgccugccccagauacgugaagcagaacacccugaagcuggccaccggcaugagaaacgugcccgagaagcagaccagaggcaucuucggcgccaucgccggcuucaucgagaacggcugggagggcaugguggacggcugguacggcuucagacaccagaacagcgagggcaccggccaggccgccgaccugaagagcacccaggccgccaucaaccagaucaacggcaagcugaacagacugaucgagaagaccaacgagaaguuccaccagaucgagaaggaguucagcgagguggagggcagaauccaggaccuggagaaguacguggaggacaccaagaucgaccuguggagcuacaacgccgagcugcugguggcccuggagaaccagcacaccaucgaccugaccgacagcgagaugaacaagcuguucgagagaaccagaaagcagcugagagagaacgccgaggacaugggcaacggcugcuucaagaucuaccacaagugcgacaacgccugcaucggcagcaucagaaacggcaccuacgaccacgacguguacagagacgaggcccugaacaacagauuccagaucaagggcguggagcugaagagcggcuacaaggacuggauccuguggaucagcuucgccaucagcugcuuccugcugugcguggugcugcugggcuucaucaugugggccugccagaagggcaacaucagaugcaacaucugcaucuga

SEQ ID NO: 169183 - RNA, 1701 nt, Artificial Sequence
  derived and/or modified CDS sequence (opt4) from hemagglutinin__InfluenzaA__AFM72301
augaagaccaucaucgcccugagcuacauccugugccugguguucagccagaagcugcccggcaacgacaacagcaccgccacccugugccugggccaccacgccgugcccaacggcaccaucgugaagaccaucaccaacgaccagaucgaggugaccaacgccaccgagcuggugcagagcagcagcaccggcggcaucugcgacagcccccaccagauccuggacggcgagaacugcacccugaucgacgcccugcugggcgacccccagugcgacggcuuccagaacaagaagugggaccuguucguggagagaagcaaggccuacagcaacugcuaccccuacgacgugcccgacuacgccagccugagaagccugguggccagcagcggcacccuggaguucaacaacgagagcuucaacugggccggcgugacccagaacggcaccagcagcgccugcaagagaagaagcaacaagagcuucuucagcagacugaacuggcugacccagcugaaguacaaguaccccgcccugaacgugaccaugcccaacaacgagaaguucgacaagcuguacaucuggggcgugcaccaccccgugaccgacagcgaccagaucagccuguacgcccaggccagcggcagaaucaccgugagcaccaagagaagccagcagaccgugauccccaacaucggcuacagacccagagugagagacaucagcagcagaaucagcaucuacuggaccaucgugaagcccggcgacauccugcugaucaacagcaccggcaaccugaucgcccccagaggcuacuucaagaucagaagcggcaagagcagcaucaugagaagcgacgcccccaucggcaagugcaacagcgagugcaucacccccaacggcagcauccccaacgacaagcccuuccagaacgugaacagaaucaccuacggcgccugccccagauacgugaagcagaacacccugaagcuggccaccggcaugagaaacgugcccgagaagcagaccagaggcaucuucggcgccaucgccggcuucaucgagaacggcugggagggcaugguggacggcugguacggcuucagacaccagaacagcgagggcaccggccaggccgccgaccugaagagcacccaggccgccaucaaccagaucaacggcaagcugaacagacugaucggcaagaccaacgagaaguuccaccagaucgagaaggaguucagcgagguggagggcagaauccaggaccuggagaaguacguggaggacaccaagaucgaccuguggagcuacaacgccgagcugcugguggcccuggagaaccagcacaccaucgaccugaccgacagcgagaugaacaagcuguucgagagaaccaagaagcagcugagagagaacgccgaggacaugggcaacggcugcuucaagaucuaccacaagugcgacaacgccugcaucgagagcaucagaaacggcaccuacgaccacgacguguacagagacgaggcccugaacaacagauuccagaucaagggcguggagcugaagagcggcuacaaggacuggauccuguggaucagcuucgccaucagcugcuuccugcugugcguggcccugcugggcuucaucaugugggccugccagaagggcaacaucagaugcaacaucugcaucuga

SEQ ID NO: 169184 - RNA, 1701 nt, Artificial Sequence
  derived and/or modified CDS sequence (opt4) from hemagglutinin__InfluenzaA__AFM72312
augaagaccaucaucgcccugagcuacauccugugccugguguucgcccagaagcugcccggcaacgacaacagcaccgccacccugugccugggccaccacgccgugcccaacggcaccaucgugaagaccaucaccaacgaccagaucgaggugaccaacgccaccgagcuggugcagagcagcagcaccggcggcaucugcgacagcccccaccagauccuggacggcgagaacugcacccugaucgacgcccugcugggcgacccccagugcgacggcuuccagaacaagaagugggaccuguucguggagagaagcaaggccuacagcaacugcuaccccuacgacgugcccgacuacgccagccugagaagccugguggccagcagcggcacccuggaguucaacaacgagagcuucaacuggaccggcgugacccagaacggcaccagcagcgccugcaagagaagaagcaacaagagcuucuucagcagacugaacuggcugacccaccugaaguacaaguaccccgcccugaacgugaccaugcccaacaacgagaaguucgacaagcuguacaucuggggcgugcaccaccccgugaccgacagcgaccagaucaaccuguacgcccaggccagcggcagaaucaccgugagcaccaagagaagccagcagaccgugauccccaacaucggcuacagacccagagugagagacauccccagcagaaucagcaucuacuggaccaucgugaagcccggcgacauccugcugaucaacagcaccggcaaccugaucgcccccagaggcuacuucaagaucagaagcggcaagagcagcaucaugagaagcgacgcccccaucggcaagugcaacagcgagugcaucacccccaacggcagcauccccaacgacaagcccuuccagaacgugaacagaaucaccuacggcgccugccccagauacgugaagcagaacacccugaagcuggccaccggcaugagaaacgugcccgagaagcagaccagaggcaucuucggcgccaucgccggcuucaucgagaacggcugggagggcaugguggacggcugguacggcuucagacaccagaacagcgagggcaccggccaggccgccgaccugaagagcacccaggccgccaucaaccagaucaacggcaagcugaacagacugaucggcaagaccaacgagaaguuccaccagaucgagaaggaguucagcgagguggagggcagaauccaggaccuggagaaguacguggaggacaccaagaucgaccuguggagcuacaacgccgagcugcugguggcccuggagaaccagcacaccaucgaccugaccgacagcgagaugaacaagcuguucgagagaaccaagaagcagcugagagagaacgccgaggacaugggcaacggcugcuucaagaucuaccacaagugcgacaacgccugcaucggcagcaucagaaacggcaccuacgaccacgacguguacagagacgaggcccugaacaacagauuccagaucaagggcguggagcugaagagcggcuacaaggacuggauccuguggaucagcuucgccaucagcugcuuccugcugugcguggcccugcugggcuucaucaugugggccugccagaagggcaacaucagaugcaacaucugcaucuga

SEQ ID NO: 169185 - RNA, 1701 nt, Artificial Sequence
  derived and/or modified CDS sequence (opt4) from hemagglutinin__InfluenzaA__AFM72323
augaaggccaucaucgcccugagcuacauccugugccugguguucgcccagaagcugcccggcaacgacaacagcaccgccacccugugccugggccaccacgccgugcccaacggcaccaucgugaagaccaucaccaacgaccagaucgaggugaccaacgccaccgagcuggugcagagcagcagcaccggcggcaucugcgacagcccccaccagauccuggacggcgagaacugcacccugaucgacgcccugcugggcgacccccagugcgacggcuuccagaacaagaagugggaccuguucguggagagaagcaaggccuacagcaacugcuaccccuacgacgugcccgacuacgccagccugagaagccugguggccagcagcggcacccuggaguucaacaacgagagcuucaacuggaccggcgugacccagaacggcaccagcagcgccugcaagagaagaagcaacaagagcuucuucagcagacugaacuggcugacccaccugaaguacaaguaccccgcccugaacgugaccaugcccaacaacgagaaguucgacaagcuguacaucuggggcgugcaccaccccgugaccgacagcgaccagaucaaccuguacgcccaggccagcggcagaaucaccgugagcaccaagagaagccagcagaccgugauccccaacaucggcuacagacccagagugagagacaaccccagcagaaucagcaucuacuggaccaucgugaagcccggcgacauccugcugaucaacagcaccggcaaccugaucgcccccagaggcuacuucaagaucagaagcggcaagagcagcaucaugagaagcgacgcccccaucggcaagugcaacagcgagugcaucacccccaacggcagcauccccaacgacaagcccuuccagaacgugaacagaaucaccuacggcgccugccccagauacgugaagcagaacacccugaagcuggccaccggcaugagaaacgugcccgagaagcagaccagaggcaucuucggcgccaucgccggcuucaucgagaacggcugggagggcaugguggacggcugguacggcuucagacaccagaacagcgagggcaccggccaggccgccgaccugaagagcacccaggccgccaucaaccagaucaacggcaagcugaacagacugaucggcaagaccaacgagaaguuccaccagaucgagaaggaguucagcgagguggagggcagaauccaggaccuggagaaguacguggaggacaccaagaucgaccuguggagcuacaacgccgagcugcugguggcccuggagaaccagcacaccaucgaccugaccgacagcgagaugaacaagcuguucgagagaaccaagaagcagcugagagagaacgccgaggacaugggcaacggcugcuucaagaucuaccacaagugcgacaacgccugcaucggcagcaucagaaacggcaccuacgaccacgacguguacagagacgaggcccugaacaacagauuccagaucaagggcguggagcugaagagcggcuacaaggacuggauccuguggaucagcuucgccaucagcugcuuccugcugugcguggcccugcugggcuucaucaugugggccugccagaagggcaacaucagaugcaacaucugcaucuga

SEQ ID NO: 169186 - RNA, 1701 nt, Artificial Sequence
  derived and/or modified CDS sequence (opt4) from hemagglutinin__InfluenzaA__AFM72334
augaagaccaucaucgcccugagcuacauccugugccugguguucgcccagaagcugcccggcaacgacaacagcaccgccacccugugccugggccaccacgccgugcccaacggcaccaucgugaagaccaucaccaacgaccagaucgaggugaccaacgccaccgagcuggugcagagcagcagcaccggcgagaucugcaacagcccccaccagauccuggacggcgagaacugcacccugaucgacgcccugcugggcgacccccagugcgacggcuuccagaacaagaagugggaccuguucguggagagaagcaaggcccacagcaacugcuaccccuacgacgugcccgacuacgccagccugagaagccugguggccagcagcggcacccuggaguucaacaacgagagcuucaacuggaccggcgugacccagaacggcaccagcagcgccugcaucagaagaagcaacaacagcuucuucagcagacugaacuggcugacccaccugaacuucaaguaccccgcccugaacgugaccaugcccaacaacgagcaguucgacaagcuguacaucuggggcgugcugcaccccggcaccuacaaggaccagaucuuccuguacgcccaggccagcggcagaaucaccgugagcaccaagagaagccagcaggccgugauccccaacaucggcagcagacccagagugagaaacauccccagcagagugagcaucuacuggaccaucgugaagcccggcgacauccugcugaucaacagcaccggcaaccugaucgcccccagaggcuacuucaagaucagaagcggcaagagcagcaucaugagaagcgacgcccccaucggcaagugcaacagcgccugcaucacccccaacggcagcauccccaacgacaagcccuuccagaacgugaacagaaucaccuacggcgccugccccagauacgugaagcagaacacccugaagcuggccaccggcaugagaaacgugcccgagaagcagaccagaggcaucuucggcgccaucgccggcuucaucgagaacggcugggagggcaugguggacggcugguacggcuucagacaccagaacagcgagggcagaggccaggccgccgaccugaagagcacccaggccgccaucgaccagaucaacggcaagcugaacagacugaucggcaagaccaacgagaaguuccaccagaucgagaaggaguucagcgagguggagggcagaauccaggaccuggagaaguacguggaggacaccaagaucgaccuguggagcuacaacgccgagcugcugguggcccuggagaaccagcacaccaucgaccugaccgacagcgagaugaacaagcuguucgagaagaccaagaagcagcugagagagaacgccgaggacaugggcaacggcugcuucaagaucuaccacaagugcgacaacgccugcaucggcagcaucagaaacggcaccuacgaccacgacguguacagagacgaggcccugaacaacagauuccagaucaagggcguggagcugaagagcggcuacaaggacuggauccuguggaucagcuucgccaucagcugcuuccugcugugcguggcccugcugggcuucaucaugugggccugccagaagggcaacaucagaugcaacaucugcaucuga

SEQ ID NO: 169187 - RNA, 1701 nt, Artificial Sequence
  derived and/or modified CDS sequence (opt4) from hemagglutinin__InfluenzaA__AFM72345
augaagaccaucaucgcccugagcuacauccugugccugguguucgcccagaagcugcccggcaacgacaacagcaccgccacccugugccugggccaccacgccgugcccaacggcaccaucgugaagaccaucaccaacgaccagaucgaggugaccaacgccaccgagcuggugcagagcagcagcaccggcggcaucugcgacagcccccaccagauccuggacggcgagaacugcacccugaucgacgcccugcugggcgacccccagugcgacggcuuccagaacaagaagugggaccuguucguggagagaagcaaggccuacagcaacugcuaccccuacgacgugcccgacuacgccagccugagaagccugguggccagcagcggcacccuggaguucaacaacgagagcuucgacuggaccggcgugacccagaacggcaccagcagcgccugcaagagaagaagcaacaagagcuucuucagcagacugaacuggcugacccaccugaaguacaaguaccccgcccugaacgugaccaugcccaacaacgagaaguucgacaagcuguacaucuggggcgugcaccaccccgugaccgacagcgaccagaucagccuguacacccaggccagcggcagaaucaccgugagcaccaagagaagccagcagaccgugauccccaacaucggcuucagacccagagugagagacaucagcagcagaaucagcaucuacuggaccaucgugaagcccggcgacauccugcugaucaacagcaccggcaaccugaucgcccccagaggcuacuucaagaucagaagcggcaagagcagcaucaugagaagcgacgcccccaucggcaagugcaacagcgagugcaucacccccaacggcagcauccccaacgacaagcccuuccagaacgugaacagaaucaccuacggcgccugccccagauacgugaagcagaacacccugaagcuggccaccggcaugagaaacgugcccgagaagcagaccagaggcaucuucggcgccaucgccggcuucaucgagaacggcugggagggcaugguggacggcugguacggcuucagacaccagaacagcgagggcaccggccaggccgccgaccugaagagcacccaggccgccaucaaccagaucaacggcaagcugaacagacugaucggcaagaccaacgagaaguuccaccagaucgagaaggaguucagcgagguggagggcagaauccaggaccuggagaaguacguggaggacaccaagaucgaccuguggagcuacaacgccgagcugcugguggcccuggagaaccagcacaccaucgaccugaccgacagcgagaugaacaagcuguucgagagaaccaagaagcagcugagagagaacgccgaggacaugggcaacggcugcuucaagaucuaccacaagugcgacaacgccugcaucggcagcaucagaaacggcaccuacgaccacgacguguacagagacgaggcccugaacaacagauuccagaucaagggcguggagcugaagagcggcuacaaggacuggauccuguggaucagcuucgccaucagcugcuuccugcugugcguggcccugcugggcuucaucaugugggccugccagaagggcaacaucagaugcaacaucugcaucuga

SEQ ID NO: 169188 - RNA, 1701 nt, Artificial Sequence
  derived and/or modified CDS sequence (opt4) from hemagglutinin__InfluenzaA__AFM72356
augaagaccaucaucgcccugagcuacauccugugccugguguucgcccagaagcugcccggcaacgacaacagcaccgccacccugugccugggccaccacgccgugcccaacggcaccaucgugaagaccaucaccaacgaccagaucgaggugaccaacgccaccgagcuggugcagagcagcagcaccggcggcaucugcgacagcccccaccagauccuggacggcgagaacugcacccugaucgacgcccugcugggcgacccccagugcgacggcuuccagaacaagaagugggaccuguucguggagagaagcaaggccuacagcaacugcuaccccuacgacgugcccgacuacgccagccugagaagccugguggccagcagcggcacccuggaguucaacaacgagagcuucaacuggaccggcgugacccagaacggcaccagcagcgccugcaagagaagaagcaacaagagcuucuucagcagacugaacuggcugacccaccugaaguucaaguaccccgcccugaacgugaccaugcccaacaacgagaaguucgacaagcuguacaucuggggcgugcaccaccccggcaccgacaacgaccagaucaaccuguacgugcaggccagcggcagaaucaccgugagcaccaagagaagccagcagaccgugauccccaacaucggcagcagacccagagugagagacgugcccagcagaaucagcaucuacuggaccaucgugaagcccggcgacauccugcugaucagcagcaccggcaaccugaucgcccccagaggcuacuucaagaucagaagcggcaagagcagcaucaugagaagcgacgcccccaucggcaagugcaacagcgagugcaucacccccaacggcagcauccccaacgacaagcccuuccagaacgugaacagaaucaccuacggcgccugccccagauacgugaagcagaacacccugaagcuggccaccggcaugagaaacgugcccgagaagcagaccagaggcaucuucggcgccaucgccggcuucaucgagaacggcugggagggcaugguggacggcugguacggcuucagacaccagaacagcgagggcaccggccaggccgccgaccugaagagcacccaggccgccaucaaccagaucaacggcaagcugaacagacugaucggcaagaccaacgagaaguuccaccagaucgagaaggaguucagcgagguggagggcagaauccaggaccuggagaaguacguggaggacaccaagaucgaccuguggagcuacaacgccgagcugcugguggcccuggagaaccagcacaccaucgaccugaccgacagcgagaugaacaagcuguucgagagaaccaagaagcagcugagagagaacgccgaggacaugggcaacggcugcuucaagaucuaccacaagugcgacaacgccugcaucggcagcaucagaaacggcaccuacgaccacgacguguacagagacgaggcccugaacaacagauuccagaucaagggcguggagcugaagagcggcuacaaggacuggauccuguggaucagcuucgccaucagcugcuuccugcugugcguggcccugcugggcuucaucaugugggccugccagaagggcaacaucagaugcaacaucugcaucuga

SEQ ID NO: 169189 - RNA, 1701 nt, Artificial Sequence
  derived and/or modified CDS sequence (opt4) from hemagglutinin__InfluenzaA__AFM72367
augaagaccaucaucgcccugagcuacauccugugccugguguucgcccagaagcugcccggcaacgacaacagcaccgccacccugugccugggccaccacgccgugcccaacggcaccaucgugaagaccaucaccaacgaccagaucgaggugaccaacgccaccgagcuggugcagagcagcagcaccggcggcaucugcgacagcccccaccagauccuggacggcgagaacugcacccugaucgacgcccugcugggcgacccccagugcgacggcuuccagaacaagaagugggaccuguucguggagagaagcaaggccuacagcaacugcuaccccuacgacgugcccgacuacgccagccugagaagccugguggccagcagcggcacccuggaguucaacaacgagagcuucaacuggaccggcgugacccagaacggcaccagcagcgccugcaagagaagaagcaacaagagcuucuucagcagacugaacuggcugacccaccugaaguucaaguaccccgcccugaacgugaccaugcccaacaacgagaaguucgacaagcuguacaucuggggcgugcaccaccccgugaccgacaacgaccagaucaaccuguacgcccaggccagcggcagaaucaccgugagcaccaagagaagccagcagaccgugauccccaacaucggcagcagacccagagugagagacgugcccagcagaaucagcaucuacuggaccaucgugaagcccggcgacauccugcugaucagcagcaccggcaaccugaucgcccccagaggcuacuucaagaucagaagcggcaagagcagcaucaugagaagcgacgcccccaucggcaagugcaacagcgagugcaucacccccaacggcagcauccccaacgacaagcccuuccagaacgugaacagaaucaccuacggcgccugccccagauacgugaagcagaacacccugaagcuggccaccggcaugagaaacgugcccgagaagcagaccagaggcaucuucggcgccaucgccggcuucaucgagaacggcugggagggcaugguggacggcugguacggcuucagacaccagaacagcgagggcaccggccaggccgccgaccugaagagcacccaggccgccaucaaccagaucaacggcaagcugaacagacugaucggcaagaccaacgagaaguuccaccagaucgagaaggaguucagcgagguggagggcagaauccaggaccuggagaaguacguggaggacaccaagaucgaccuguggagcuacaacgccgagcugcugguggcccuggagaaccagcacaccaucgaccugaccgacagcgagaugaacaagcuguucgagagaaccaagaagcagcugagagagaacgccgaggacaugggcaacggcugcuucaagaucuaccacaagugcgacaacgccugcaucggcagcaucagaaacggcaccuacgaccacgacguguacagagacgaggcccugaacaacagauuccagaucaagggcguggagcugaagagcggcuacaaggacuggauccuguggaucagcuucgccaucagcugcuuccugcugugcguggcccugcugggcuucaucaugugggccugccagaagggcaacaucagaugcaacaucugcaucuga

SEQ ID NO: 169190 - RNA, 1701 nt, Artificial Sequence
  derived and/or modified CDS sequence (opt4) from hemagglutinin__InfluenzaA__AFM72378
augaagaccaucaucgcccugagcuacauccugugccugguguucgcccagaagcugcccggcaacgacaacagcaccgccacccugugccugggccaccacgccgugcccaacggcaccaucgugaagaccaucaccaacgaccagaucgaggugaccaacgccaccgagcuggugcagagcagcagcaccggcgagaucugcaacagcccccaccagauccuggacggcgagaacugcacccugaucgacgcccugcugggcgacccccagugcgacggcuuccagaacaagaagugggaccuguucguggagagaagcaaggcccacagcaacugcuaccccuacgacgugcccgacuacgccagccugagaagccugguggccagcagcggcacccuggaguucaacaacgagagcuucaacuggaccggcgugacccagaacggcaccagcagcgccugcaucagaagaagcaacaacagcuucuucagcagacugaacuggcugacccagcugaacuucaaguaccccgcccugaacgugaccaugcccaacaacgagcaguucgacaagcuguacaucuggggcgugcaccaccccgugaccgacaaggaccagaucuuccuguacgcccaggccagcggcagaaucaccgugagcaccaagagaagccagcaggccgugauccccaacaucggcuacagacccagagugagaaacauccccagcagagugagcaucuacuggaccaucgugaagcccggcgacauccugcugaucaacagcaccggcaaccugaucgcccccagaggcuacuucaagaucagaagcggcaagagcagcaucaugagaagcgacgcccccaucggcaagugcaacagcgccugcaucacccccaacggcagcauccccaacgacaagcccuuccagaacgugaacagaaucaccuacggcgccugccccagauacgugaagcagaacacccugaagcuggccaccggcaugagaaacgugcccgagaagcagaccagaggcaucuucggcgccaucgccggcuucaucgagaacggcugggagggcaugguggacggcugguacggcuucagacaccagaacagcgagggcagaggccaggccgccgaccugaagagcacccaggccgccaucgaccagaucaacggcaagcugaacagacugaucggcaagaccaacgagaaguuccaccagaucgagaaggaguucagcgagguggagggcagaauccaggaccuggagaaguacguggaggacaccaagaucgaccuguggagcuacaacgccgagcugcugguggcccuggagaaccagcacaccaucgaccugaccgacagcgagaugaacaagcuguucgagaagaccaagaagcagcugagagagaacgccgaggacaugggcaacggcugcuucaagaucuaccacaagugcgacaacgccugcaucggcagcaucagaaacggcaccuacgaccacgacguguacagagacgaggcccugaacaacagauuccagaucaagggcguggagcugaagagcggcuacaaggacuggauccuguggaucagcuucgccaucagcugcuuccugcugugcguggcccugcugggcuucaucaugugggccugccagaagggcaacaucagaugcaacaucugcaucuga

SEQ ID NO: 169191 - RNA, 1701 nt, Artificial Sequence
  derived and/or modified CDS sequence (opt4) from hemagglutinin__InfluenzaA__AFM72389
augaagaccaucaucgcccugagcuacauccugugccugguguucgcccagaagcugcccggcaacgacaacagcaccgccacccugugccugggccaccacgccgugcccaacggcaccaucgugaagaccaucaccaacgaccagaucgaggugaccaacgccaccgagcuggugcagagcagcagcaccggcgagaucugcaacagcccccaccagauccuggacggcgagaacugcacccugaucgacgcccugcugggcgacccccagugcgacggcuuccagaacaagaagugggaccuguucguggagagaagcaaggcccacagcaacugcuaccccuacgacgugcccgacuacgccagccugagaagccugguggccagcagcggcacccuggaguucaacaacgagagcuucaacuggaccggcgugacccagaacggcaccagcagcgccugcaucagaagaagcaacaacagcuucuucagcagacugaacuggcugacccaccugaacuucaaguaccccgcccugaacgugaccaugcccaacaacgagcaguucgacaagcuguacaucuggggcgugcaccaccccgugaccgacaaggaccagaucuuccuguacgcccaggccagcggcagaaucaccgugagcaccaagagaagccagcaggccgugauccccaacaucggcuacagacccagagugagaaacaaccccagcagagugagcaucuacuggaccaucgugaagcccggcgacauccugcugaucaacagcaccggcaaccugaucgcccccagaggcuacuucaagaucagaagcggcaagagcagcaucaugagaagcgacgcccccaucggcaagugcaacagcgccugcaucacccccaacggcagcauccccaacgacaagcccuuccagaacgugaacagaaucaccuacggcgccugccccagauacgugaagcagaacacccugaagcuggccaccggcaugagaaacgugcccgagaagcagaccagaggcaucuucggcgccaucgccggcuucaucgagaacggcugggagggcaugguggacggcugguacggcuucagacaccagaacagcgagggcagaggccaggccgccgaccugaagagcacccaggccgccaucgaccagaucaacggcaagcugaacagacugaucggcaagaccaacgagaaguuccaccagaucgagaaggaguucagcgagguggagggcagaauccaggaccuggagaaguacguggaggacaccaagaucgaccuguggagcuacaacgccgagcugcugguggcccuggagaaccagcacaccaucgaccugaccgacagcgagaugaacaagcuguucgagaagaccaagaagcagcugagagagaacgccgaggacaugggcaacggcugcuucaagaucuaccacaagugcgacaacgccugcaucggcagcaucagaaacggcaccuacgaccacgacguguacagagacgaggcccugaacaacagauuccagaucaagggcguggagcugaagagcggcuacaaggacuggauccuguggaucagcuucgccaucagcugcuuccugcugugcguggcccugcugggcuucaucaugugggccugccagaagggcaacaucagaugcaacaucugcaucuga

SEQ ID NO: 169192 - RNA, 1701 nt, Artificial Sequence
  derived and/or modified CDS sequence (opt4) from hemagglutinin__InfluenzaA__AFM72400
augaagaccaucaucgcccugagcuacauccugugccugguguucgcccagaagcugcccggcaucgacaacagcaccgccacccugugccugggccaccacgccgugcccaacggcaccaucgugaagaccaucaccaacgaccagaucgaggugaccaacgccaccgagcuggugcagagcagcagcaccggcgagaucugcgacagcccccaccagauccuggacggcgagaacugcacccugaucgacgcccugcugggcgacccccagugcgacggcuuccagaacaagaagugggaccuguucguggagagaagcaaggccuacagcaacugcuaccccuacgacgugcccgacuacgccagccugagaagccugguggccagcagcggcacccuggaguucaacaacgagagcuucaacugggccggcgugacccagaacggcaccagcagcgccugcaagagaggcagcaacaacagcuucuucagcagacugaacuggcugacccacagcaaguucaaguaccccgcccugaacgugaccaugcccaacaacgaggaguucgacaagcuguacaucuggggcgugcugcaccccggcaccgacaacgaccagaucuuccuguacgcccaggccagcggcagaaucaccgugagcaccaagagaagccagcagaccgugauccccaacaucggcagcagacccagagugagaaacauccccagcagaaucagcaucuacuggaccaucgugaagcccggcgacauccugcugaucaacagcaccggcaaccugaucgcccccagaggcuacuucaagaucagaagcggcaagagcagcaucaugagaagcgacgcccccaucggcaagugcaacagcgagugcaucacccccaacggcagcauccccaacgacaagcccuuccagaacgugaacagaaucaccuacggcgccugccccagauacgugaagcagaacacccugaagcuggccaccggcaugagaaacgugcccgagaagcagaccagaggcaucuucggcgccaucgccggcuucaucgagaacggcugggagggcaugguggacggcugguacggcuucagacaccagaacagcgagggcaucggccaggccgccgaccugaagagcacccaggccgccaucgaccagaucaacggcaagcugaacagacugaucggcaagaccaacgagaaguuccaccagaucgagaaggaguucagcgagguggagggcagaauccaggaccuggagaaguacguggaggacaccaagaucgaccuguggagcuacaacgccgagcugcugguggcccuggagaaccagcacaccaucgaccugaccgacagcgagaugaacaagcuguucgagaagaccaagaagcagcugagagagaacgccgaggacaugggcaacggcugcuucaagaucuaccacaagugcgacaacgccugcaucggcagcaucagaaacggcaccuacgaccacgacguguacagagacgaggcccugaacaacagauuccagaucaagggcguggagcugaagagcggcuacaaggacuggauccuguggaucagcuucgccaucagcugcuuccugcugugcguggcccugcugggcuucaucaugugggccugccagaagggcaacaucagaugcaacaucugcaucuga

SEQ ID NO: 169193 - RNA, 1701 nt, Artificial Sequence
  derived and/or modified CDS sequence (opt4) from hemagglutinin__InfluenzaA__AFM72411
augaagaccaucaucgcccugagcuacauccugugccugguguucgcccagaagcugcccggcaucgacaacagcaccgccacccugugccugggccaccacgccgugcccaacggcaccaucgugaagaccaucaccaacgaccagaucgaggugaccaacgccaccgagcuggugcagagcagcagcaccggcgagaucugcgacagcccccaccagauccuggacggcgagaacugcacccugaucgacgcccugcugggcgacccccagugcgacggcuuccagaacaagaagugggaccuguucguggagagaagcaaggccuacagcaacugcuaccccuacgacgugcccgacuacgccagccugagaagccugguggccagcagcggcacccuggaguucaacaacgagagcuucaacugggccggcgugacccagaacggcaccagcagcgccugcaagagaggcagcaacaacagcuucuucagcagacugaacuggcugacccagagcaaguucaaguaccccgcccugaacgugaccaugcccaacaacgaggaguucgacaagcuguacaucuggggcgugcaccaccccgugaccgacaacgaccagaucuuccuguacgcccaggccagcggcagaaucaccgugagcaccaagagaagccagcagaccgugauccccaacaucggcagcagacccagagugagaaacauccccagcagaaucagcaucuacuggaccaucgugaagcccggcgacauccugcugaucaacagcaccggcaaccugaucgcccccagaggcuacuucaagaucagaagcggcaagagcagcaucaugagaagcgacgcccccaucggcaagugcaacagcgagugcaucacccccaacggcagcauccccaacgacaagcccuuccagaacgugaacagaaucaccuacggcgccugccccagauacgugaagcagaacacccugaagcuggccaccggcaugagaaacgugcccgagaagcagaccagaggcaucuucggcgccaucgccggcuucaucgagaacggcugggagggcaugguggacggcugguacggcuucagacaccagaacagcgagggcaucggccaggccgccgaccugaagagcacccaggccgccaucgaccagaucaacggcaagcugaacagacugaucggcaagaccaacgagaaguuccaccagaucgagaaggaguucagcgagguggagggcagaauccaggacuucgagaaguacguggaggacaccaagaucgaccuguggagcuacaacgccgagcugcugguggcccuggagaaccagcacaccaucgaccugaccgacagcgagaugaacaagcuguucgagaagaccaagaagcagcugagagagaacgccgaggacaugggcaacggcugcuucaagaucuaccacaagugcgacaacgccugcaucggcagcaucagaaacggcaccuacgaccacgacguguacagagacgaggcccugaacaacagauuccagaucaagggcguggagcugaagagcggcuacaaggacuggauccuguggaucagcuucgccaucagcugcuuccugcugugcguggcccugcugggcuucaucaugugggccugccagaagggcaacaucagaugcaacaucugcaucuga

SEQ ID NO: 169194 - RNA, 1701 nt, Artificial Sequence
  derived and/or modified CDS sequence (opt4) from hemagglutinin__InfluenzaA__AFM72422
augaagaccaucaucgcccugagcuacauccugugccugguguucgcccagaagcugcccggcaacgacaacagcaccgccacccugugccugggccaccacgccgugcccaacggcaccaucgugaagaccaucaccaacgaccagaucgaggugaccaacgccaccgagcuggugcagagcagcagcaccggcgagaucugcgacagcccccaccagauccuggacggcgagaacugcacccugaucgacgcccugcugggcgacccccagugcgacggcuuccagaacaagaagugggaccuguucguggagagaagcaaggccuacagcaacugcuaccccuacgacgugcccgacuacgccagccugagaagccugguggccagcagcggcacccuggaguucaacaacgagagcuucaacuggaccggcgugacccagaacggcaccagcagcgccugcaucagaagaagcaacaacagcuucuucagcagacugaacuggcugacccaccugaaguucaaguaccccgcccugaacgugaccaugcccaacaacgaggaguucgacaagcuguacaucuggggcgugcaccaccccgugaccgacaacgaccagaucuuccuguacgcccaggccagcggcagaaucaccgugagcaccaagagaagccagcagaccgugauccccaacaucggcuucagacccagagugagaaacauccccagcagaaucagcaucuacuggaccaucgugaagcccggcgacauccugcugaucaacagcaccggcaaccugaucgcccccagaggcuacuucaagaucagaagcggcaagagcagcaucaugagaagcgacgcccccaucggcaagugcaacagcgagugcaucacccccaacggcagcauccccaacgacaagcccuuccagaacgugaacagaaucaccuacggcgccugccccagauacgugaagcagaacacccugaagcuggccaccggcaugagaaacgugcccgagaagcagaccagaggcaucuucggcgccaucgccggcuucaucgagaacggcugggagggcaugguggacggcugguacggcuucagacaccagaacagcgagggcaucggccaggccgccgaccugaagagcacccaggccgccaucgaccagaucaacggcaagcugaacagacugaucggcaagaccaacgagaaguuccaccagaucgagaaggaguucagcgagguggagggcagaauccaggaccuggagaaguacgccgaggacaccaagaucgaccuguggagcuacaacgccgagcugcugguggcccuggagaaccagcacaccaucgaccugaccgacagcgagaugaacaagcuguucgagaagaccaagaagcagcugagagagaacgccgaggacaugggcaacggcugcuucaagaucuaccacaagugcgacaacgccugcaucggcagcaucagaaacggcaccuacgaccacgacguguacagagacgaggcccugaacaacagauuccagaucaagggcguggagcugaagagcggcuacaaggacuggauccuguggaucagcuucgccaucagcugcuuccugcugugcguggcccugcugggcuucaucaugugggccugccagaagggcaacaucagaugcaacaucugcaucuga

SEQ ID NO: 169195 - RNA, 1701 nt, Artificial Sequence
  derived and/or modified CDS sequence (opt4) from hemagglutinin__InfluenzaA__AFM72433
augaagaccaucaucgcccugagcuacauccugugccugguguucgcccagaagcugcccggcaacgacaacagcaccgccacccugugccugggccaccacgccgugcccaacggcaccaucgugaagaccaucaccaacgaccagaucgaggugaccaacgccaccgagcuggugcagagcagcagcaccggcgagaucugcgacagcccccaccagauccuggacggcgagaacugcacccugaucgacgcccugcugggcgacccccagugcgacggcuuccagaacaagaagugggaccuguucguggagagaagcaaggccuacagcaacugcuaccccuacgacgugcccgacuacgccagccugagaagccugguggccagcagcggcacccuggaguucaacaacgagagcuucaacuggaccggcgugacccagaacggcaccagcagcgccugcaucagaagaagcaacaacagcuucuucagcagacugaacuggcugacccaccugaaguucaaguaccccgcccugaacgugaccaugcccaacaacgaggaguucgacaagcuguacaucuggggcgugcaccaccccgugaccgacaacgaccagaucuuccuguacgcccaggccagcggcagaaucaccgugagcaccaagagaagccagcagaccgugauccccaacaucggcuucagacccagagugagaaacaaccccagcagaaucagcaucuacuggaccaucgugaagcccggcgacauccugcugaucaacagcaccggcaaccugaucgcccccagaggcuacuucaagaucagaagcggcaagagcagcaucaugagaagcgacgcccccaucggcaagugcaacagcgagugcaucacccccaacggcagcauccccaacgacaagcccuuccagaacgugaacagaaucaccuacggcgccugccccagauacgugaagcagaacacccugaagcuggccaccggcaugagaaacgugcccgagaagcagaccagaggcaucuucggcgccaucgccggcuucaucgagaacggcugggagggcaugguggacggcugguacggcuucagacaccagaacagcgagggcaucggccaggccgccgaccugaagagcacccaggccgccaucgaccagaucaacggcaagcugaacagacugaucggcaagaccaacgagaaguuccaccagaucgagaaggaguucagcgagguggagggcagaauccaggaccuggagaaguacgccgaggacaccaagaucgaccuguggagcuacaacgccgagcugcugguggcccuggagaaccagcacaccaucgaccugaccgacagcgagaugaacaagcuguucgagaagaccaagaagcagcugagagagaacgccgaggacaugggcaacggcugcuucaagaucuaccacaagugcgacaacgccugcaucggcagcaucagaaacggcaccuacgaccacgacguguacagagacgaggcccugaacaacagauuccagaucaagggcguggagcugaagagcggcuacaaggacuggauccuguggaucagcuucgccaucagcugcuuccugcugugcguggcccugcugggcuucaucaugugggccugccagaagggcaacaucagaugcaacaucugcaucuga

SEQ ID NO: 169196 - RNA, 1701 nt, Artificial Sequence
  derived and/or modified CDS sequence (opt4) from hemagglutinin__InfluenzaA__AFM72444
augaagaccaucaucgcccugagcuacauccugugccugguguucgcccagaagcugcccggcaacgacaacagcaccgccacccugugccugggccaccacgccgugcccaacggcaccaucgugaagaccaucaccaacgaccagaucgaggugaccaacgccaccgagcuggugcagagcagcagcaccggcgagaucugcgacagcccccaccagauccuggacggcgagaacugcacccugaucgacgcccugcugggcgacccccagugcgacggcuuccagaacaagaagugggaccuguucguggagagaagcaaggccuacagcaacugcuaccccuacgacgugcccgacuacgccagccugagaagccugguggccagcagcggcacccuggaguucaacaacgagagcuucaacuggaccggcgugacccagaacggcaccagcagcgccugcaucagaagaagcaacaacagcuucuucagcagacugaacuggcugacccaccugaaguucaaguaccccgcccugaacgugaccaugcccaacaacgaggaguucgacaagcuguacaucuggggcgugcaccaccccgugaccgacaacgaccagauccugcuguacgcccaggccagcggcagaaucaccgugagcaccaagagaagccagcagaccgugauccccaacaucggcuucagacccagagugagaaacaaccccagcagaaucagcaucuacuggaccaucgugaagcccggcgacauccugcugaucaacagcaccggcaaccugaucgcccccagaggcuacuucaagaucagaagcggcaagagcagcaucaugagaagcgacgcccccaucggcaagugcaacagcgagugcaucacccccaacggcagcauccccaacgacaagcccuuccagaacgugaacagaaucaccuacggcgccugccccagauacgugaagcagaacacccugaagcuggccaccggcaugagaaacgugcccgagaagcagaccagaggcaucuucggcgccaucgccggcuucaucgagaacggcugggagggcaugguggacggcugguacggcuucagacaccagaacagcgagggcaucggccaggccgccgaccugaagagcacccaggccgccaucgaccagaucaacggcaagcugaacagacugaucggcaagaccaacgagaaguuccaccagaucgagaaggaguucagcgagguggagggcagaauccaggaccuggagaaguacgccgaggacaccaagaucgaccuguggagcuacaacgccgagcugcugguggcccuggagaaccagcacaccaucgaccugaccgacagcgagaugaacaagcuguucgagaagaccaagaagcagcugagagagaacgccgaggacaugggcaacggcugcuucaagaucuaccacaagugcgacaacgccugcaucggcagcaucagaaacggcaccuacgaccacgacguguacagagacgaggcccugaacaacagauuccagaucaagggcguggagcugaagagcggcuacaaggacuggauccuguggaucagcuucgccaucagcugcuuccugcugugcguggcccugcugggcuucaucaugugggccugccagaagggcaacaucagaugcaacaucugcaucuga

SEQ ID NO: 169197 - RNA, 1701 nt, Artificial Sequence
  derived and/or modified CDS sequence (opt4) from hemagglutinin__InfluenzaA__AFM72455
augaagaccaucaucgcccugagcuacauccugugccugguguucgcccagaagcugcccggcaacgacaacagcaccgccacccugugccugggccaccacgccgugcccaacggcaccaucgugaagaccaucaccaacgaccagaucgaggugaccaacgccaccgagcuggugcagagcagcagcaccggcgagaucugcgacagcccccaccagauccuggacggcgagaacugcacccugaucgacgcccugcugggcgacccccagugcgacggcuuccagaacaagaagugggaccuguucguggagagaagcaaggccuacagcaacugcuaccccuacgacgugcccgacuacgccagccugagaagccugguggccagcagcggcacccuggaguucaacaacgagagcuucaacuggaccggcgugacccagaacggcaccagcagcgccugcaucagaagaagcaacaacagcuucuucagcagacugaacuggcugacccagcugaaguucaaguaccccgcccugaacgugaccaugcccaacaacgaggaguucgacaagcuguacaucuggggcgugcaccaccccgugaccgacaacgaccagaucuuccuguacgcccaggccagcggcagaaucaccgugagcaccaagagaagccagcagaccgugauccccaacaucggcuucagacccagagugagaaacaaccccagcagaaucagcaucuacuggaccaucgugaagcccggcgacauccugcugaucaacagcaccggcaaccugaucgcccccagaggcuacuucaagaucagaagcggcaagagcagcaucaugagaagcgacgcccccaucggcaagugcaacagcgagugcaucacccccaacggcagcauccccaacgacaagcccuuccagaacgugaacagaaucaccuacggcgccugccccagauacgugaagcagaacacccugaagcuggccaccggcaugagaaacgugcccgagaagcagaccagaggcaucuucggcgccaucgccggcuucaucgagaacggcugggagggcaugguggacggcugguacggcuucagacaccagaacagcgagggcaucggccaggccgccgaccugaagagcacccaggccgccaucgaccagaucaacggcaagcugaacagacugaucggcaagaccaacgagaaguuccaccagaucgagaaggaguucagcgagguggagggcagaauccaggaccuggagaaguacgccgaggacaccaagaucgaccuguggagcuacaacgccgagcugcugguggcccuggagaaccagcacaccaucgaccugaccgacagcgagaugaacaagcuguucgagaagaccaagaagcagcugagagagaacgccgaggacaugggcaacggcugcuucaagaucuaccacaagugcgacaacgccugcaucggcagcaucagaaacggcaccuacgaccacgacguguacagagacgaggcccugaacaacagauuccagaucaagggcguggagcugaagagcggcuacaaggacuggauccuguggaucagcuucgccaucagcugcuuccugcugugcguggcccugcugggcuucaucaugugggccugccagaagggcaacaucagaugcaacaucugcaucuga

SEQ ID NO: 169198 - RNA, 1701 nt, Artificial Sequence
  derived and/or modified CDS sequence (opt4) from hemagglutinin__InfluenzaA__AFM72466
augaagaccaucaucgcccugagcuacauccugugccugguguucgcccagaagcugcccggcaacgacaacagcaccgccacccugugccugggccaccacgccgugcccaacggcaccaucgugaagaccaucaccaacgaccagaucgaggugaccaacgccaccgagcuggugcagagcagcagcaccggcgagaucugcgacagcccccaccagauccuggacggcgagaacugcacccugaucgacgcccugcugggcgacccccagugcgacggcuuccagaacaagaagugggaccuguucguggagagaagcaaggccuacagcaacugcuaccccuacgacgugcccgacuacgccagccugagaagccugguggccagcagcggcacccuggaguucaacaacgagagcuucaacuggaccggcgugacccagaacggcaccagcagcgccugcaucagaagaagcaacaacagcuucuucagcagacugaacuggcugacccaccugaaguucaaguaccccgcccugaacgugaccaugcccaacaacgaggaguucgacaagcuguacaucuggggcgugcaccaccccgugaccgacaaggaccagaucuuccuguacgcccaggccagcggcagaaucaccgugagcaccaagagaagccagcagaccgugauccccaacaucggcuucagacccagagugagaaacaaccccagcagaaucagcaucuacuggaccaucgugaagcccggcgacauccugcugaucaacagcaccggcaaccugaucgcccccagaggcuacuucaagaucagaagcggcaagagcagcaucaugagaagcgacgcccccaucggcaagugcaacagcgagugcaucacccccaacggcagcauccccaacgacaagcccuuccagaacgugaacagaaucaccuacggcgccugccccagauacgugaagcagaacacccugaagcuggccaccggcaugagaaacgugcccgagaagcagaccagaggcaucuucggcgccaucgccggcuucaucgagaacggcugggagggcaugguggacggcugguacggcuucagacaccagaacagcgagggcaucggccaggccgccgaccugaagagcacccaggccgccaucgaccagaucaacggcaagcugaacagacugaucggcaagaccaacgagaaguuccaccagaucgagaaggaguucagcgagguggagggcagaauccaggaccuggagaaguacgccgaggacaccaagaucgaccuguggagcuacaacgccgagcugcugguggcccuggagaaccagcacaccaucgaccugaccgacagcgagaugaacaagcuguucgagaagaccaagaagcagcugagagagaacgccgaggacaugggcaacggcugcuucaagaucuaccacaagugcgacaacgccugcaucggcagcaucagaaacggcaccuacgaccacgacguguacagagacgaggcccugaacaacagauuccagaucaagggcguggagcugaagagcggcuacaaggacuggauccuguggaucagcuucgccaucagcugcuuccugcugugcguggcccugcugggcuucaucaugugggccugccagaagggcaacaucagaugcaacaucugcaucuga

SEQ ID NO: 169199 - RNA, 1701 nt, Artificial Sequence
  derived and/or modified CDS sequence (opt4) from hemagglutinin__InfluenzaA__AFM72488
augaagaccaucaucgcccugagcuacauccugugccugguguucgcccagaagcugcccggcaacgacaacagcaccgccacccugugccugggccaccacgccgugcccaacggcaccaucgugaagaccaucaccaacgaccagaucgaggugaccaacgccaccgagcuggugcagagcagcagcaccggcggcaucugcgacagcccccaccagauccuggacggcgagaacugcacccugaucgacgcccugcugggcgacccccagugcgacggcuuccagaacaagaagugggaccuguucguggagagaagcaaggccuacagcaacugcuaccccuacgacgugcccgacuacgccagccugagaagccugguggccagcagcggcacccuggaguucaacaacgagagcuucaacuggaccggcgugacccagaacggcaccagcagcgccugcaagagaagaagcaacaacagcuucuucagcagacugaacuggcugacccagcugaaguucaaguaccccgcccugaacgugaccaugcccaacaacgagaaguucgacaagcuguacaucuggggcgugcaccaccccgugaccgacaacgagcagaucuuccuguacgcccaggccagcggcagaaucaccgugagcaccaagagaagccagcagaccgugauccccaacaucggcuucagacccagagugagaaacauccccagcagaaucagcaucuacuggaccaucgugaagcccggcgacauccugcugaucaacagcaccggcaaccugaucgcccccagaggcuacuucaagaucagaagcggcaagagcagcaucaugagaagcgacgcccccaucggcaagugcaacagcaagugcaucacccccaacggcagcauccccaacgacaagcccuuccagaacgugaacagaaucaccuacggcgccugccccagauacgugaagcagaacacccugaagcuggccaccggcaugagaaacgugcccgagaagcagaccagaggcaucuucggcgccaucgccggcuucaucgagaacggcugggagggcaugguggacggcugguacggcuucagacaccagaacagcgagggcaucggccaggccgccgaccugaagagcacccaggccgccaucgaccagaucaacggcaagcugaacagacugaucggcaagaccaacgagaaguuccaccagaucgagaaggaguucagcgagguggagggcagaauccaggaccuggagaaguacguggaggacaccaagaucgaccuguggagcuacaacgccgagcugcugguggcccuggagaaccagcacaccaucgaccugaccgacagcgagaugaacaagcuguucgagaagaccaagaagcagcugagagagaacgccgaggacaugggcaacggcugcuucaagaucuaccacaagugcgacaacgccugcaucggcagcaucagaaacggcaccuacgaccacgacguguacagagacgaggcccugaacaacagauuccagaucaagggcguggagcugaagagcggcuacaaggacuggauccuguggaucagcuucgccaucagcugcuuccugcugugcguggcccugcugggcuucaucaugugggccugccagaagggcaacaucagaugcaacaucugcaucuga

SEQ ID NO: 169200 - RNA, 1701 nt, Artificial Sequence
  derived and/or modified CDS sequence (opt4) from hemagglutinin__InfluenzaA__AFM72499
augaagaccaucaucgcccugagcuacauccugugccugguguucgcccagaagcugcccggcaacgacaacagcaccgccacccugugccugggccaccacgccgugcccaacggcaccaucgugaagaccaucaccaacgaccagaucgaggugaccaacgccaccgagcuggugcagagcagcagcaccggcggcaucugcgacagcccccaccagauccuggacggcgagaacugcacccugaucgacgcccugcugggcgacccccagugcgacggcuuccagaacaagaagugggaccuguucguggagagaagcaaggccuacagcaacugcuaccccuacgacgugcccgacuacgccagccugagaagccugguggccagcagcggcacccuggaguucaacaacgagagcuucaacuggaccggcgugacccagaacggcaccagcagcgccugcaagagaagaagcaacaacagcuucuucagcagacugaacuggcugacccagcugaaguucaaguaccccgcccugaacgugaccaugcccaacaacgagaaguucgacaagcuguacaucuggggcgugcaccaccccgugaccgacaacgaccagaucuuccuguacgcccaggccagcggcagaaucaccgugagcaccaagagaagccagcagaccgugauccccaacaucggcagcagacccagagugagaaacauccccagcagaaucagcaucuacuggaccaucgugaagcccggcgacauccugcugaucaacagcaccggcaaccugaucgcccccagaggcuacuucaagaucagaagcggcaagagcagcaucaugagaagcgacgcccccaucggcaagugcaacagcgagugcaucacccccaacggcagcauccccaacgacaagcccuuccagaacgugaacagaaucaccuacggcgccugccccagauacgugaagcagaacacccugaagcuggccaccggcaugagaaacgugcccgagaagcagaccagaggcaucuucggcgccaucgccggcuucaucgagaacggcugggagggcaugguggacggcugguacggcuucagacaccagaacagcgagggcaucggccaggccgccgaccugaagagcacccaggccgccaucgaccagaucaacggcaagcugaacagacugaucggcaagaccaacgagaaguuccaccagaucgagaaggaguucagcgagguggagggcagaauccaggaccuggagaaguacguggaggacaccaagaucgaccuguggagcuacaacgccgagcugcugguggcccuggagaaccagcacaccaucgaccugaccgacagcgagaugaacaagcuguucgagaagaccaagaagcagcugagagagaacgccgaggacaugggcaacggcugcuucaagaucuaccacaagugcgacaacgccugcaucggcagcaucagaaacggcaccuacgaccacgacguguacagagacgaggcccugaacaacagauuccagaucaagggcguggagcugaagagcggcuacaaggacuggauccuguggaucagcuucgccaucagcugcuuccugcugugcguggcccugcugggcuucaucaugugggccugccagaagggcaacaucagaugcaacaucugcaucuga

SEQ ID NO: 169201 - RNA, 1698 nt, Artificial Sequence
  derived and/or modified CDS sequence (opt4) from hemagglutinin__InfluenzaA__AFM72521
augaaggugaagcugcuggugcugcugugcaccuucaccgccaccuacgccgacaccaucugcaucggcuaccacgccaacaacagcaccgacaccguggacaccgugcuggagaagaacgugaccgugacccacagcgugaaccugcuggagaacagccacaacggcagacugugccugcugaagggcaucgccccccugcagcugggcaacugcagcguggccggcuggauccugggcaaccccgagugcgagcugcugaucagcaaggagagcuggagcuacaucguggagaagcccaaccccgagaacggcaccugcuaccccggccacuucgccgacuacgaggagcugagagagcagcugagcagcgugagcagccuggagagauucgagaucuuccccaaggagagcagcuggcccaaccacaccgugaccggcgugagcgccagcugcagccacaacggcgagagcagcuucuacagaaaccugcuguggcugaccggcaagaacggccuguaccccaaccugagcaagagcuacgccaacaacaaggagaaggaggugcuggugcuguggggcgugcaccacccccccaacaucggcaaccagaaggcccuguaccacaccgagaacgccuacgugagcguggugagcagccacuacagcagaaaguucacccccgagaucgccaagagacccaaggugagagaccaggagggcagaaucaacuacuacuggacccugcuggagcccggcgacaccaucaucuucgaggccaacggcaaccugaucgcccccagauacgccuucgcccugagcagaggcuucggcagcggcaucaucaacagcaacgcccccauggacaagugcgacgccaagugccagaccccccagggcgccaucaacagcagccugcccuuccagaacgugcaccccgugaccaucggcgagugccccaaguacgugagaagcgccaagcugagaauggugaccggccugagaaacauccccagcauccagagcagaggccuguucggcgccaucgccggcuucaucgagggcggcuggaccggcaugguggacggcugguacggcuaccaccaccagaacgagcagggcagcggcuacgccgccgaccagaagagcacccagaacgccaucaacggcaucaccaacaaggugaacagcgugaucgagaagaugaacacccaguucaccgccgugggcaaggaguucaacaagcuggagagaagaauggagaaccugaacaagaagguggacgacggcuucaucgacaucuggaccuacaacgccgagcugcuggugcugcuggagaacgagagaacccuggacuuccacgacagcaacgugaagaaccuguacgagaaggugaagagccagcugaagaacaacgccaaggagaucggcaacggcugcuucgaguucuaccacaagugcaacgacgagugcauggagagcgugaagaacggcaccuacgacuaccccaaguacagcgaggagagcaagcugaacagagagaagaucgacggcgugaagcuggagagcaugggcguguaccagauccuggccaucuacagcaccguggccagcagccuggugcugcuggugagccugggcgccaucagcuucuggaugugcagcaacggcagccugcagugcagaaucugcaucuga

SEQ ID NO: 169202 - RNA, 1698 nt, Artificial Sequence; identical to SEQ ID NO: 169201
  derived and/or modified CDS sequence (opt4) from hemagglutinin__InfluenzaA__AFM72532

SEQ ID NO: 169203 - RNA, 1698 nt, Artificial Sequence; identical to SEQ ID NO: 169201
  derived and/or modified CDS sequence (opt4) from hemagglutinin__InfluenzaA__AFM72543

SEQ ID NO: 169204 - RNA, 1698 nt, Artificial Sequence
  derived and/or modified CDS sequence (opt4) from hemagglutinin__InfluenzaA__AFM72554
augaaggugaagcugcuggugcugcugugcaccuucaccgccaccuacgccgacaccaucugcaucggcuaccacgccaacaacagcaccgacaccguggacaccgugcuggagaagaacgugaccgugacccacagcgugaaccugcuggagaacagccacaacggcagacugugccugcugaagggcaucgccccccugcagcugggcaacugcagcguggccggcuggauccugggcaaccccgagugcgagcugcugaucagcaaggagagcuggagcuacaucguggagaagcccaaccccgagaacggcaccugcuaccccggccacuucgccgacuacgaggagcugagagagcagcugagcagcgugagcagccuggagagauucgagaucuuccccaaggagagcagcuggcccaaccacaccgugaccggcgugagcgccagcugcagccacaacggcgagagcagcuucuacagaaaccugcuguggcugaccggcaagaacggccuguaccccaaccugagcaagagcuacgccaacaacaaggagaaggaggugcuggugcuguggggcgugcaccacccccccaacaucggcaaccagaaggcccuguaccacaccgagaacgccuacgugagcguggugagcagccacuacagcagaaaguucacccccgagaucgccaagagacccaaggugagagaccaggagggcagaaucaacuacuacuggacccugcuggagcccggcgacaccaucaucuucgaggccaacggcaaccugaucgcccccagauacgccuucgcccugagcagaggcuucggcagcggcaucaucaacagcaacgcccccauggacaagugcgacgccaagugccagaccccccagggcgccaucaacagcagccugcccuuccagaacgugcaccccgugaccaucggcgagugccccaaguacgugagaagcgccaagcugagaauggugaccggccugagaaacauccccagcauccagagcagaggccuguucggcgccaucgccggcuucaucgagggcggcuggaccggcaugguggacggcugguacggcuaccaccaccagaacgagcagggcagcggcuacgccgccgaccagaagagcacccagaacgccaucaacggcaucaccaacaaggugaacagcgugaucgagaagaugaacacccaguucaccgccgugggcaaggaguucaacaagcuggagagaagaauggagaaccugaacaagaagguggacgacggcuucaucgacaucuggaccuacaacgccgagcugcuggugcugcuggagaacgagagaacccuggacuuccacgacagcaacgugaagaaccuguacgagaaggugaagagccagcugaagaacaacgccaaggagaucggcaacggcugcuucgaguucuaccacaagugcaacgacgagugcauggagagcgugaagaacggcaccuacgacuaccccaaguacagcgaggagagcaagcugaacagagagaagaucgacgaggugaagcuggagagcaugggcguguaccagauccuggccaucuacagcaccguggccagcagccuggugcugcuggugagccugggcgccaucagcuucuggaugugcagcaacggcagccugcagugcagaaucugcaucuga

SEQ ID NO: 169205 - RNA, 1701 nt, Artificial Sequence
  derived and/or modified CDS sequence (opt4) from hemagglutinin__InfluenzaA__AFM72565
augaagaccaucaucgcccugagcuacauccugugccugguguucgcccagaagcugcccggcaacgacaacagcaccgccacccugugccugggccaccacgccgugcccaacggcaccaucgugaagaccaucaccaacgaccagaucgaggugaccaacgccaccgagcuggugcagagcagcagcaccggcgagaucugcgacagcccccaccagauccuggacggcgagaacugcacccugaucgacgcccugcugggcgacccccagugcgacggcuuccagaacaagaagugggaccuguucguggagagaagcaaggccuacagcaacugcuaccccuacgacgugcccgacuacgccagccugagaagccugguggccagcagcggcacccuggaguucaacaacgagagcuucaacuggaccggcgugacccagaacggcaccagcagcagcugcaucagaagaagcaacaacagcuucuucagcagacugaacuggcugacccaccugaaguucaaguaccccgcccugaacgugaccaugcccaacaacgagaaguucgacaagcuguacaucuggggcgugcaccaccccggcaccgacaacgaccagaucuuccccuacgcccaggccagcggcagaaucaccgugagcaccaagagaagccagcagaccgugauccccaacaucggcagcagacccagagugagaaacauccccagcagaaucagcaucuacuggaccaucgugaagcccggcgacauccugcugaucaacagcaccggcaaccugaucgcccccagaggcuacuucaagaucagaagcggcaagagcagcaucaugagaagcgacgcccccaucggcaagugcaacagcgagugcaucacccccaacggcagcauccccaacgacaagcccuuccagaacgugaacagaaucaccuacggcgccugccccagauacgugaagcagaacacccugaagcuggccaccggcaugagaaacgugcccgagaagcagaccagaggcaucuucggcgccaucgccggcuucaucgagaacggcugggagggcaugguggacggcugguacggcuucagacaccagaacagcgagggcaucggccaggccgccgaccugaagagcacccaggccgccaucgaccagaucaacggcaagcugaacagacugaucggcaagaccaacgagaaguuccaccagaucgagaaggaguucagcgagguggagggcagaauccaggaccuggagaaguacguggaggacaccaagaucgaccuguggagcuacaacgccgagcugcugguggcccuggagaaccagcacaccaucgaccugaccgacagcgagaugaacaagcuguucgagaagaccaagaagcagcugagagagaacgccgaggacaugggcaacggcugcuucaagaucuaccacaagugcgacaacgccugcaucggcagcaucagaaacggcaccuacgaccacgacguguacagagacgaggcccugaacaacagauuccagaucaagggcguggagcugaagagcggcuacaaggacuggauccuguggaucagcuucgccaucagcugcuuccugcugugcguggcccugcugggcuucaucaugugggccugccagaagggcaacaucagaugcaacaucugcaucuga

SEQ ID NO: 169206 - RNA, 1701 nt, Artificial Sequence
  derived and/or modified CDS sequence (opt4) from hemagglutinin__InfluenzaA__AFM72576
augaagaccaucaucgcccugagcuacauccugugccugguguucgcccagaagcugcccggcaacgacaacagcaccgccacccugugccugggccaccacgccgugcccaacggcaccaucgugaagaccaucaccaacgaccagaucgaggugaccaacgccaccgagcuggugcagagcagcagcaccggcgagaucugcgacagcccccaccagauccuggacggcgagaacugcacccugaucgacgcccugcugggcgacccccagugcgacggcuuccagaacaagaagugggaccuguucguggagagaagcaaggccuacagcaacugcuaccccuacgacgugcccgacuacgccagccugagaagccugguggccagcagcggcacccuggaguucaacaacgagagcuucaacuggaccggcgugacccagaacggcaccagcagcagcugcaucagaggcagcaacaacagcuucuucagcagacugaacuggcugacccaccugaaguucaaguaccccgcccugaacgugaccaugcccaacaacgagaaguucgacaagcuguacaucuggggcgugcaccaccccggcaccgacaacgaccagaucuuccccuacgcccaggccagcggcagaaucaccgugagcaccaagagaagccagcagaccgugauccccaacaucggcagcagacccagagugagaaacauccccagcagaaucagcaucuacuggaccaucgugaagcccggcgacauccugcugaucaacagcaccggcaaccugaucgcccccagaggcuacuucaagaucagaagcggcaagagcagcaucaugagaagcgacgcccccaucggcaagugcaacagcgagugcaucacccccaacggcagcauccccaacgacaagcccuuccagaacgugaacagaaucaccuacggcgccugccccagauacgugaagcagaacacccugaagcuggccaccggcaugagaaacgugcccgagaagcagaccagaggcaucuucggcgccaucgccggcuucaucgagaacggcugggagggcaugguggacggcugguacggcuucagacaccagaacagcgagggcaucggccaggccgccgaccugaagagcacccaggccgccaucgaccagaucaacggcaagcugaacagacugaucggcaagaccaacgagaaguuccaccagaucgagaaggaguucagcgagguggagggcagaauccaggaccuggagaaguacguggaggacaccaagaucgaccuguggagcuacaacgccgagcugcugguggcccuggagaaccagcacaccaucgaccugaccgacagcgagaugaacaagcuguucgagaagaccaagaagcagcugagagagaacgccgaggacaugggcaacggcugcuucaagaucuaccacaagugcgacaacgccugcaucggcagcaucagaaacggcaccuacgaccacgacguguacagagacgaggcccugaacaacagauuccagaucaagggcguggagcugaagagcggcuacaaggacuggauccuguggaucagcuucgccaucagcugcuuccugcugugcguggcccugcugggcuucaucaugugggccugccagaagggcaacaucagaugcaacaucugcaucuga

SEQ ID NO: 169207 - RNA, 1698 nt, Artificial Sequence
  derived and/or modified CDS sequence (opt4) from hemagglutinin__InfluenzaA__AFM72799
augaaggugaagcugcuggugcugcugugcaccuucaccgccaccuacgccgacaccaucugcaucggcuaccacgccaacaacagcaccgacaccguggacaccgugcuggagaagaacgugaccgugacccacagcgugaaccugcuggaggacaaccacaacggcaagcugugccugcugaagggcaaggccccccugcagcugggcaacugcagcguggccggcuggauccugggcaaccccgagugcggccugcugaucagcaaggagagcuggagcuacaucguggagagacccaaccccgagaacggcaccugcuaccccggccacuucgccgacuacgaggagcugagagagcagcugagcagcgugagcagcuucgagagauucgagaucuuccccaaggagagcagcuggcccaaccacaccgugaccggcgugagcgccagcugcagccacaacggcgagagcagcuucuacaagaaccugcuguggcugaccggcaagaacggccuguaccccaaccugagcaagagcuacgccaacaacaaggagaaggaggugcuggugcuguggggcgugcaccacccccccaacaucggcaaccagaugacccuguaccacaaggagaacgccuacgugagcguggugagcagccacuacagcagaaaguucacccccgagaucgccaagagacccaaggugagagaccaggagggcagaaucaacuacuacuggacccugcuggagcccggcgacaccaucaucuucgaggccaacggcaaccugaucgcccccagauacgccuucgcccugagcagaggcuucggcagcggcaucaucaacagcaacgcccccauggacgagugcgacgccaagugccagaccccccagggcgccaucaacagcagccugcccuuccagaacgugcaccccgugaccaucggcgagugccccaaguacgugagaagcgccaagcugagaauggugaccggccugagaaacauccccagcauccagagcagaggccuguucggcgccaucgccggcuucaucgagggcggcuggaccggcaugguggacggcugguacggcuaccaccaccagaacgagcagggcagcggcuacgccgccgaccagaagagcacccagaacgccaucaacggcaucaccaacaaggugaacagcgugaucgagaagaugaacacccaguucaccgccgugggcaaggaguucaacaagcuggagagaagaauggagaaccugaacaagaagguggacgacggcuucaucgacguguggaccuacaacgccgagcugcuggugcugcuggagaacgagagaacccuggacuuccacgacagcaacgugaagaaccuguacgagaaggugaagaaccagcugaagaacaacgccaaggagaucggcaacggcugcuucgaguucuaccacaagugcaacgacgagugcauggagagcgugaagaacggcaccuacgacuaccccaaguacagcgaggagagcaagcugagcagagagaagaucgacggcgugaagcuggagagcaugggcguguaccagauccuggccaucuacagcaccguggccagcagccuggugcugcuggugagccugggcgccaucagcuucuggaugugcagcaacggcagccugcagugcagaaucugcaucuga

SEQ ID NO: 169208 - RNA, 1698 nt, Artificial Sequence; identical to SEQ ID NO: 169207
  derived and/or modified CDS sequence (opt4) from hemagglutinin__InfluenzaA__AFM72810

SEQ ID NO: 169209 - RNA, 1698 nt, Artificial Sequence; identical to SEQ ID NO: 169207
  derived and/or modified CDS sequence (opt4) from hemagglutinin__InfluenzaA__AFM72821

SEQ ID NO: 169210 - RNA, 1701 nt, Artificial Sequence
  derived and/or modified CDS sequence (opt4) from hemagglutinin__InfluenzaA__AFM72852
augaaggccauccugguggugcugcuguacaccuucgccaccgccaacgccgacacccugugcaucggcuaccacgccaacaacagcaccgacaccguggacaccgugcuggagaagaacgugaccgugacccacagcgugaaccugcuggaggacaagcacaacggcaagcugugcaagcugagaggcguggccccccugcaccugggcaagugcaacaucgccggcuggauccugggcaaccccgagugcgagagccugagcaccgccagcagcuggagcuacaucguggagacccccagcagcgacaacggcaccugcuaccccggcgacuucaucgacuacgaggagcugagagagcagcugagcagcgugagcagcuucgagagauucgagaucuuccccaagaccagcagcuggcccaaccacgacagcgacaagggcgugaccgccgccugcccccacgccggcgccaagagcuucuacaagaaccugaucuggcuggugaagaagggcaacagcuaccccaagcugagcaagagcuacaucaacgacaagggcaaggaggugcuggugcuguggggcauccaccaccccagcaccagcgccgaccagcagagccuguaccagaacgccgacgccuacguguucgugggcagcagcagauacagcaagaccuucaagcccgagaucgccaucagacccaaggugagagacagagagggcagaaugaacuacuacuggacccugguggagcccggcgacaagaucaccuucgaggccaccggcaaccugguggugcccagauacgccuucgccauggagagaaacgccggcagcggcaucaucaucagcgacacccccgugcacgacugcaacaccaccugccagacccccaagggcgccaucaacaccagccugcccuuccagaacauccaccccaucaccaucggcaagugccccaaguacgugaagagcaccaagcugagacuggccaccggccugagaaacauccccagcauccagagcagaggccuguucggcgccaucgccggcuucaucgagggcggcuggaccggcaugguggacggcugguacggcuaccaccaccagaacgagcagggcagcggcuacgccgccgaccugaagagcacccagaacgccaucgacgagaucaccaacaaggugaacagcgugaucgagaagaugaacacccaguucaccgccgugggcaaggaguucaaccaccuggagaagagaaucgagaaccugaacaagaagguggacgacggcuuccuggacaucuggaccuacaacgccgagcugcuggugcugcuggagaacgagagaacccuggacuaccacgacagcaacgugaagaaccuguacgagaaggugagaagccagcugaagaacaacgccaaggagaucggcaacggcugcuucgaguucuaccacaagugcgacaacaccugcauggagagcgugaagaacggcaccuacgacuaccccaaguacagcgaggaggccaagcugaacagagaggagaucgacggcgugaagcuggagagcaccagaaucuaccagauccuggccaucuacagcaccguggccagcagccuggugcugguggugagccugggcgccaucagcuucuggaugugcagcaacggcagccugcagugcagaaucugcaucuga

SEQ ID NO: 169211 - RNA, 1701 nt, Artificial Sequence
  derived and/or modified CDS sequence (opt4) from hemagglutinin__InfluenzaA__AFM72862
augaaggccauccugguggugcugcuguacaccuucgccaccgccaacgccgacacccugugcaucggcuaccacgccaacaacagcaccgacaccguggacaccgugcuggagaagaacgugaccgugacccacagcgugaaccugcuggaggacaagcacaacggcaagcugugcaagcugagaggcguggccccccugcaccugggcaagugcaacaucgccggcuggauccugggcaaccccgagugcgagagccugagcaccgccagcagcuggagcuacaucguggagacccccagcagcgacaacggcaccugcuaccccggcgacuucaucgacuacgaggagcugagagagcagcugagcagcgugagcagcuucgagagauucgagaucuuccccaagaccagcagcuggcccaaccacgacagcaacaagggcgugaccgccgccugcccccacgccggcgccaagagcuucuacaagaaccugaucuggcuggugaagaagggcaacagcuaccccaagcugagcaacagcuacaucaacgacaagggcaaggaggugcuggugcuguggggcauccaccaccccagcaccagcgccgaccagcagagccuguaccagaacgccgacgccuacguguucgugggcagcagcagauacagcaagaccuucaagcccgagaucgccaucagacccaaggugagagacagagagggcagaaugaacuacuacuggacccugguggagcccggcgacaagaucaccuucgaggccaccggcaaccugguggugcccagauacgccuucgccauggagagaaacgccggcagcggcaucaucaucagcgacacccccgugcacgacugcaacaccaccugccagacccccaagggcgccaucaacaccagccugcccuuccagaacauccaccccaucaccaucggcaagugccccaaguacgugaagagcaccaagcugagacuggccaccggccugagaaacauccccagcauccagagcagaggccuguucggcgccaucgccggcuucaucgagggcggcuggaccggcaugguggacggcugguacggcuaccaccaccagaacgagcagggcagcggcuacgccgccgaccugaagagcacccagaacgccaucgacgagaucaccaacaaggugaacagcgugaucgagaagaugaacacccaguucaccgccgugggcaaggaguucaaccaccuggagaagagaaucgagaaccugaacaagaagguggacgacggcuuccuggacaucuggaccuacaacgccgagcugcuggugcugcuggagaacgagagaacccuggacuaccacgacagcaacgugaagaaccuguacgagaaggugagaagccagcugaagaacaacgccaaggagaucggcaacggcugcuucgaguucuaccacaagugcgacaacaccugcauggagagcgugaagaacggcaccuacgacuaccccaaguacagcgaggaggccaagcugaacagagaggagaucgacggcgugaagcuggagagcaccagaaucuaccagauccuggccaucuacagcaccguggccagcagccuggugcugguggugagccugggcgccaucagcuucuggaugugcagcaacggcagccugcagugcagaaucugcaucuga

SEQ ID NO: 169212 - RNA, 1701 nt, Artificial Sequence
  derived and/or modified CDS sequence (opt4) from hemagglutinin__InfluenzaA__AFM72872
augaagaccaucaucgcccugagcuacacccugugccugguguucgcccagaagcugcccggcaacgacaacagcaccgccacccugugccugggccaccacgccgugcccaacggcaccaucgugaagaccaucaccaacgaccagaucgaggugaccaacgccaccgagcuggugcagagcagcagcaccggcgagaucugcgacagcccccaccagauccuggacggcaagaacugcacccugaucgacgcccugcugggcgacccccagugcgacggcuuccagaacaagaagugggaccuguucguggagagaagcaaggccuacagcaacugcuaccccuacgacgugcccgacuacgccagccugagaagccugguggccagcagcggcacccuggaguucaacaacgagagcuucaacuggaccggcgugacccagaacggcaccagcagcgccugcaucagaagaagcaagaacagcuucuucagcagacugaacuggcugacccaccugaacuucaaguaccccgcccugaacgugaccaugcccaacaacgagcaguucgacaagcuguacaucuggggcgugcaccaccccggcaccgacaaggaccagaucuuccccuacgcccaggccagcggcagaaucaccgugagcaccaagagaagccagcagaccgccauccccaacaucggcagcagacccagagugagaaacauccccagcagaaucagcaucuacuggaccaucgugaagcccggcgacauccugcugaucaacagcaccggcaaccugaucgcccccagaggcuacuucaagaucagaagcggcaagagcagcaucaugagaagcgacgcccccaucggcaagugcaacagcgagugcaucacccccaacggcagcauccccaacgacaagcccuuccagaacgugaacagaaucaccuacggcgccugccccagauacgugaagcagaacacccugaagcuggccaccggcaugagaaacgugcccgagaagcagaccagaggcaucuucggcgccaucgccggcuucaucgagaacggcugggagggcaugguggacggcugguacggcuucagacaccagaacagcgagggcagaggccaggccgccgaccugaagagcacccaggccgccaucgaccagaucaacggcaagcugaacagacugaucggcaagaccaacgagaaguuccaccagaucgagaaggaguucagcgagguggagggcagaauccaggaccuggagaaguacguggaggacaccaagaucgaccuguggagcuacaacgccgagcugcugguggcccuggagaaccagcacaccaucgaccugaccgacagcgagaugaacaagcuguucgagaagaccaagaagcagcugagagagaacgccgaggacaugggcaacggcugcuucaagaucuaccacaagugcgacaacgccugcaucggcagcaucagaaacggcaccuacgaccacgacguguacagagacgaggcccugaacaacagauuccagaucaagggcguggagcugaagagcggcuacaaggacuggauccuguggaucagcuucgccaucagcugcuuccugcugugcguggcccugcugggcuucaucaugugggccugccagaagggcaacaucagaugcaacaucugcaucuga

SEQ ID NO: 169213 - RNA, 1701 nt, Artificial Sequence
  derived and/or modified CDS sequence (opt4) from hemagglutinin__InfluenzaA__AFM72883
augaagaccaucaucgcccugagcuacauccugugccugguguucgcccagaagcugcccggcaacgacaacagcaccgccacccugugccugggccaccacgccgugcccaacggcaccaucgugaagaccaucaccaacgaccagaucgaggugaccaacgccaccgagcuggugcagaacagcagcaccggcgagaucugcgacagcccccaccagauccuggacggcaagaacugcacccugaucgacgcccugcugggcgacccccagugcgacggcuuccagaacaagaagugggaccuguucguggagagaagcaaggccuacagcaacugcuaccccuacgacgugcccgacuacgccagccugagaagccugguggccagcagcggcacccuggaguucaacaacgagagcuucaacuggaccggcgugacccagaacggcaccagcagcgccugcaucagaagaagcaagaacagcuucuucagcagacugaacuggcugacccaccugaacuucaaguaccccgcccugaacgugaccaugcccaacaacgagcaguucgacaagcuguacaucuggggcgugcaccaccccgugaccgacaaggaccagaucuuccuguacgcccaggccagcggcagaaucaccgugagcaccaagagaagccagcagaccgugauccccaacaucggcagcagacccagagugagaaacauccccaccagaaucagcaucuacuggaccaucgugaagcccggcgacauccugcugaucaacagcaccggcaaccugaucgcccccagaggcuacuucaagaugcagagcggcaagagcagcaucaugagaagcgacgcccccaucggcaagugcaacagcgagugcaucacccccaacggcagcauccccaacgacaagcccuuccagaacgugaacagaaucaccuacggcgccugccccagauacgugaagcagaacacccugaagcuggccaccggcaugagaaacgugcccgagaagcagaccagaggcaucuucggcgccaucgccggcuucaucgagaacggcugggagggcaugguggacggcugguacggcuucagacaccagaacagcgagggcagaggccaggccgccgaccugaagagcacccaggccgccaucgaccagaucaacggcaagcugaacagacugaucggcaagaccaacgagaaguuccaccagaucgagaaggaguucagcgagguggagggcagaauccaggaccuggagaaguacguggaggacaccaagaucgaccuguggagcuacaacgccgagcugcugguggcccuggagaaccagcacaccaucgaccugaccgacagcgagaugaacaagcuguucgagaagaccaagaagcagcugagagagaacgccgaggacaugggcaacggcugcuucaagaucuaccacaagugcgacaacgccugcaucggcagcaucagaaacggcaccuacgaccacaacguguacagagacgaggcccugaacaacagauuccagaucaagggcguggagcugaagagcggcuacaaggacuggauccuguggaucagcuucgccaucagcugcuuccugcugugcguggcccugcugggcuucaucaugugggccugccagaagggcaacaucagaugcaacaucugcaucuga

SEQ ID NO: 169214 - RNA, 1701 nt, Artificial Sequence
  derived and/or modified CDS sequence (opt4) from hemagglutinin__InfluenzaA__AFM72894
augaagaccaucaucgcccugagcuacauccugugccugguguucgcccagaagcugcccggcaacgacaacagcaccgccacccugugccugggccaccacgccgugcccaacggcaccaucgugaagaccaucaccaacgaccagaucgaggugaccaacgccaccgagcuggugcagaacagcagcaccggcgagaucugcgacagcccccaccagauccuggacggcaagaacugcacccugaucgacgcccugcugggcgacccccagugcgacggcuuccagaacaagaagugggaccuguucguggagagaagcaaggccuacagcaacugcuaccccuacgacgugcccgacuacgccagccugagaagccugguggccagcagcggcacccuggaguucaacaacgagagcuucaacuggaccggcgugacccagaacggcaccagcagcgccugcaucagaagaagcaagaacagcuucuucagcagacugaacuggcugacccagcugaacuucaaguaccccgcccugaacgugaccaugcccaacaacgagcaguucgacaagcuguacaucuggggcgugcaccaccccgugaccgacaaggaccagaucuuccuguacgcccaggccagcggcagaaucaccgugagcaccaagagaagccagcagaccgugauccccaacaucggcagcagacccagagugagaaacauccccagcagaaucagcaucuacuggaccaucgugaagcccggcgacauccugcugaucaacagcaccggcaaccugaucgcccccagaggcuacuucaagaugcagagcggcaagagcagcaucaugagaagcgacgcccccaucggcaagugcaacagcgagugcaucacccccaacggcagcauccccaacgacaagcccuuccagaacgugaacagaaucaccuacggcgccugccccagauacgugaagcagaacacccugaagcuggccaccggcaugagaaacgugcccgagaagcagaccagaggcaucuucggcgccaucgccggcuucaucgagaacggcugggagggcaugguggacggcugguacggcuucagacaccagaacagcgagggcagaggccaggccgccgaccugaagagcacccaggccgccaucgaccagaucaacggcaagcugaacagacugaucggcaagaccaacgagaaguuccaccagaucgagaaggaguucagcgagguggagggcagaauccaggaccuggagaaguacguggaggacaccaagaucgaccuguggagcuacaacgccgagcugcugguggcccuggagaaccagcacaccaucgaccugaccgacagcgagaugaacaagcuguucgagaagaccaagaagcagcugagagagaacgccgaggacaugggcaacggcugcuucaagaucuaccacaagugcgacaacgccugcaucggcagcaucagaaacggcaccuacgaccacaacguguacagagacgaggcccugaacaacagauuccagaucaagggcguggagcugaagagcggcuacaaggacuggauccuguggaucagcuucgccaucagcugcuuccugcugugcguggcccugcugggcuucaucaugugggccugccagaagggcaacaucagaugcaacaucugcaucuga

SEQ ID NO: 169215 - RNA, 1701 nt, Artificial Sequence
  derived and/or modified CDS sequence (opt4) from hemagglutinin__InfluenzaA__AFM72916
augaagaccaucaucgcccugagcuacauccugugccugguguucgcccagaagauccccggcaacgacaacagcaccgccacccugugccugggccaccacgccgugcccaacggcaccaucgugaagaccaucaccaacgaccagaucgaggugaccaacgccaccgagcuggugcagagcagcagcaccggcgagaucugcgacagcccccaccagauccuggacggcaagaacugcacccugaucgacgcccugcugggcgacccccagugcgacggcuuccagaacaagaagugggaccuguucguggagagaagcaaggccuacagcaacugcuaccccuacgacgugcccgacuacgccagccugagaagccugguggccagcagcggcacccuggaguucaacaacgagagcuucaacuggaccggcgugacccagaacggcaccagcagcgccugcaucagaagaagcaagaacagcuucuucagcagacugaacuggcugacccaccugaacuucaaguaccccgcccugaacgugaccaugcccaacaacgagcaguucgacaagcuguacaucuggggcgugcaccaccccggcaccgacaaggaccagaucuuccccuacgcccaggccagcggcagaaucaccgugagcaccaagagaagccagcagaccgccauccccaacaucggcagcagacccagagugagaaacauccccagcagaaucagcaucuacuggaccaucgugaagcccggcgacauccugcugaucaacagcaccggcaaccugaucgcccccagaggcuacuucaagaucagaagcggcaagagcagcaucaugagaagcgacgcccccaucggcaagugcaacagcggcugcaucacccccaacggcagcauccccaacgacaagcccuuccagaacgugaacagaaucaccuacggcgccugccccagauacgugaagcagaacacccugaagcuggccaccggcaugagaaacgugcccgagaagcagaccagaggcaucuucggcgccaucgccggcuucaucgagaacggcugggagggcaugguggacggcugguacggcuucagacaccagaacagcgagggcagaggccaggccgccgaccugaagagcacccaggccgccaucgaccagaucaacggcaagcugaacagacugaucggcaagaccaacgagaaguuccaccagaucgagaaggaguucagcgagguggagggcagaauccaggaccuggagaaguacguggaggacaccaagaucgaccuguggagcuacaacgccgagcugcugguggcccuggagaaccagcacaccaucgaccugaccgacagcgagaugaacaagcuguucgagaagaccaagaagcagcugagagagaacgccgaggacaugggcaacggcugcuucaagaucuaccacaagugcgacaacgccugcaucggcagcaucagaaacggcaccuacgaccacgacguguacagagacgaggcccugaacaacagauuccagaucaagggcguggagcugaagagcggcuacaaggacugguuccuguggaucagcuucgccaucagcugcuuccugcugugcguggcccugcugggcuucaucaugugggccugccagaagggcaacaucagaugcaacaucugcaucuga

SEQ ID NO: 169216 - RNA, 1701 nt, Artificial Sequence
  derived and/or modified CDS sequence (opt4) from hemagglutinin__InfluenzaA__AFM72927
augaagaccaucaucgcccugagcuacauccugugccugguguucgcccagaagcugcccggcaacgacaacagcaccgccacccugugccugggccaccacgccgugcccaacggcaccaucgugaagaccaucaccaacgaccagaucgaggugaccaacgccaccgagcuggugcagagcagcagcaccggcgagaucugcgacagcccccaccagauccuggacggcgagaacugcacccugaucgacgcccugcugggcgacccccagugcgacggcuuccagaacaagaagugggaccuguucguggagagaagcaaggccuacagcaacugcuaccccuacgacgugcccgacuacgccagccugagaagccugguggccagcagcggcacccuggaguucaacaacgagagcuucaacuggaccggcgugacccagaacggcaccagcagcgccugcaucagaagaagcaacaacagcuucuucagcagacugaacuggcugacccaccugaaguucaaguaccccgcccugaacgugaccaugcccaacaacgagcaguucgacaagcuguacaucuggggcgugcaccaccccggcaccgacaacgaccagaccagccuguacgcccaggccagcggcagaaucaccgugagcaccaagagaagccagcagaccgugauccccaacaucggcagcagacccagagugagaaacauccccagcagaaucagcaucuacuggaccaucgugaagcccggcgacauccugcugaucaacagcaucggcaaccugaucgcccccagaggcuacuucaagaucagaagcggcaagagcagcaucaugagaagcgacgcccccaucggcaagugcaacagcgagugcaucacccccaacggcagcauccccaacgacaagcccuuccagaacgugaacagaaucaccuacggcgccugccccagauacgugaagcagaacacccugaagcuggccaccggcaugagaaacgugcccgagaagcagaccagaggcaucuucggcgccaucgccggcuucaucgagaacggcugggagggcaugguggacggcugguacggcuucagacaccagaacagcgagggcagaggccaggccgccgaccugaagagcacccaggccgccaucgaccagaucaacggcaagcugaacagacugaucggcaagaccaacgagaaguuccaccagaucgagaaggaguucagcgagguggagggcagaauccaggaccuggagaaguacguggaggacaccaagaucgaccuguggagcuacaacgccgagcugcugguggcccuggagaaccagcacaccaucgaccugaccgacagcgagaugaacaagcuguucgagaagaccaagaagcagcugagagagaacgccgaggacaugggcaacggcugcuucaagaucuaccacaagugcgacaacgccugcaucggcagcaucagaaacggcaccuacgaccacaacguguacagagacgaggcccugaacaacagauuccagaucaagggcguggagcugaagagcggcuacaaggacuggauccuguggaucagcuucgccaucagcugcuuccugcugugcguggcccugcugggcuucaucaugugggccugccagaagggcaacaucagaugcaacaucugcaucuga

SEQ ID NO: 169217 - RNA, 1701 nt, Artificial Sequence
  derived and/or modified CDS sequence (opt4) from hemagglutinin__InfluenzaA__AFM72938
augaagaccaucaucgcccugagcuacauccugugccugguguucgcccagaagcugcccggcaacgacaacagcaccgccacccugugccugggccaccacgccgugcccaacggcaccaucgugaagaccaucaccaacgaccagaucgaggugaccaacgccaccgagcuggugcagagcagcagcaccggcgagaucugcgacagcccccaccagauccuggacggcgagaacugcacccugaucgacgcccugcugggcgacccccagugcgacggcuuccagaacaagaagugggaccuguucguggagagaagcaaggccuacagcaacugcuaccccuacgacgugcccgacuacgccagccugagaagccugguggccagcagcggcacccuggaguucaacaacgagagcuucaacuggaccggcgugacccagaacggcaccagcagcgccugcaucagaagaagcaacaacagcuucuucagcagacugaacuggcugacccaccugaaguucaaguaccccgcccugaacgugaccaugcccaacaacgagcaguucgacaagcuguacaucuggggcgugcaccaccccggcaccgacaacgaccagaccagccuguacgcccaggccagcggcagaaucaccgugagcaccaagagaagccagcagaccgugauccccaacaucggcagcagacccagagugagaaacaaccccagcagaaucagcaucuacuggaccaucgugaagcccggcgacauccugcugaucaacagcaucggcaaccugaucgcccccagaggcuacuucaagaucagaagcggcaagagcagcaucaugagaagcgacgcccccaucggcaagugcaacagcgagugcaucacccccaacggcagcauccccaacgacaagcccuuccagaacgugaacagaaucaccuacggcgccugccccagauacgugaagcagaacacccugaagcuggccaccggcaugagaaacgugcccgagaagcagaccagaggcaucuucggcgccaucgccggcuucaucgagaacggcugggagggcaugguggacggcugguacggcuucagacaccagaacagcgagggcagaggccaggccgccgaccugaagagcacccaggccgccaucgaccagaucaacggcaagcugaacagacugaucggcaagaccaacgagaaguuccaccagaucgagaaggaguucagcgagguggagggcagaauccaggaccuggagaaguacguggaggacaccaagaucgaccuguggagcuacaacgccgagcugcugguggcccuggagaaccagcacaccaucgaccugaccgacagcgagaugaacaagcuguucgagaagaccaagaagcagcugagagagaacgccgaggacaugggcaacggcugcuucaagaucuaccacaagugcgacaacgccugcaucggcagcaucagaaacggcaccuacgaccacaacguguacagagacgaggcccugaacaacagauuccagaucaagggcguggagcugaagagcggcuacaaggacuggauccuguggaucagcuucgccaucagcugcuuccugcugugcguggcccugcugggcuucaucaugugggccugccagaagggcaacaucagaugcaacaucugcaucuga

SEQ ID NO: 169218 - RNA, 1701 nt, Artificial Sequence
  derived and/or modified CDS sequence (opt4) from hemagglutinin__InfluenzaA__AFM72949
augaagaccaucaucgcccugagcuacauccugugccugguguucgcccagaagcugcccggcaacgacaacagcaccgccacccugugccugggccaccacgccgugcccaacggcaccaucgugaagaccaucaccaacgaccagaucgaggugaccaacgccaccgagcuggugcagagcagcagcaccggcgagaucugcgacagcccccaccagauccuggacggcgagaacugcacccugaucgacgcccugcugggcgacccccagugcgacggcuuccagaacaagaagugggaccuguucguggagagaagcaaggccuacagcaacugcuaccccuacgacgugcccgacuacgccagccugagaagccugguggccagcagcggcacccuggaguucaacaacgagagcuucaacuggaccggcgugacccagaacggcaccagcagcgccugcaucagaagaagcaacaacagcuucuucagcagacugaacuggcugacccagcugaaguucaaguaccccgcccugaacgugaccaugcccaacaacgagcaguucgacaagcuguacaucuggggcgugcaccaccccggcaccgacaacgaccagaccagccuguacgcccaggccagcggcagaaucaccgugagcaccaagagaagccagcagaccgugauccccaacaucggcagcagacccagagugagaaacaaccccagcagaaucagcaucuacuggaccaucgugaagcccggcgacauccugcugaucaacagcaucggcaaccugaucgcccccagaggcuacuucaagaucagaagcggcaagagcagcaucaugagaagcgacgcccccaucggcaagugcaacagcgagugcaucacccccaacggcagcauccccaacgacaagcccuuccagaacgugaacagaaucaccuacggcgccugccccagauacgugaagcagaacacccugaagcuggccaccggcaugagaaacgugcccgagaagcagaccagaggcaucuucggcgccaucgccggcuucaucgagaacggcugggagggcaugguggacggcugguacggcuucagacaccagaacagcgagggcagaggccaggccgccgaccugaagagcacccaggccgccaucgaccagaucaacggcaagcugaacagacugaucggcaagaccaacgagaaguuccaccagaucgagaaggaguucagcgagguggagggcagaauccaggaccuggagaaguacguggaggacaccaagaucgaccuguggagcuacaacgccgagcugcugguggcccuggagaaccagcacaccaucgaccugaccgacagcgagaugaacaagcuguucgagaagaccaagaagcagcugagagagaacgccgaggacaugggcaacggcugcuucaagaucuaccacaagugcgacaacgccugcaucggcagcaucagaaacggcaccuacgaccacaacguguacagagacgaggcccugaacaacagauuccagaucaagggcguggagcugaagagcggcuacaaggacuggauccuguggaucagcuucgccaucagcugcuuccugcugugcguggcccugcugggcuucaucaugugggccugccagaagggcaacaucagaugcaacaucugcaucuga

SEQ ID NO: 169219 - RNA, 1701 nt, Artificial Sequence
  derived and/or modified CDS sequence (opt4) from hemagglutinin__InfluenzaA__AFM72960
augaagaccaucaucgcccugagcuacauccugugccugguguucgcccagaagcugcccggcaacgacaacagcaccgccacccugugccugggccaccacgccgugcccaacggcaccaucgugaagaccaucaccaacgaccagaucgaggugaccaacgccaccgagcuggugcagagcagcagcaccggcgagaucugcgacagcccccaccagauccuggacggcgagaacugcacccugaucgacgcccugcugggcgacccccagugcgacggcuuccagaacaagaagugggaccuguucguggagagaagcaaggccuacagcaacugcuaccccuacgacgugcccgacuacgccagccugagaagccugguggccagcagcggcacccuggaguucaacaacgagagcuucaaguggaccggcgugacccagaacggcaccagcagcgccugcaucagaagaagcaacaacagcuucuucagcagacugaacuggcugacccaccugaaguucaaguaccccgcccugaacgugaccaugcccaacaacgagcaguucgacaagcuguacaucuggggcgugcaccaccccggcaccgacaacgaccagaccagccuguacgcccaggccagcggcagaaucaccgugagcaccaagagaagccagcagaccgugauccccaacaucggcagcagacccagagugagaaacauccccagcagaaucagcaucuacuggaccaucgugaagcccggcgacauccugcugaucaacagcaucggcaaccugaucgcccccagaggcuacuucaagaucagaagcggcaagagcagcaucaugagaagcgacgcccccaucggcaagugcaacagcgagugcaucacccccaacggcagcauccccaacgacaagcccuuccagaacgugaacagaaucaccuacggcgccugccccagauacgugaagcagaacacccugaagcuggccaccggcaugagaaacgugcccgagaagcagaccagaggcaucuucggcgccaucgccggcuucaucgagaacggcugggagggcaugguggacggcugguacggcuucagacaccagaacagcgagggcagaggccaggccgccgaccugaagagcacccaggccgccaucgaccagaucaacggcaagcugaacagacugaucggcaagaccaacgagaaguuccaccagaucgagaaggaguucagcgagguggagggcagaauccaggaccuggagaaguacguggaggacaccaagaucgaccuguggagcuacaacgccgagcugcugguggcccuggagaaccagcacaccaucgaccugaccgacagcgagaugaacaagcuguucgagaagaccaagaagcagcugagagagaacgccgaggacaugggcaacggcugcuucaagaucuaccacaagugcgacaacgccugcaucggcagcaucagaaacggcaccuacgaccacaacguguacagagacgaggcccugaacaacagauuccagaucaagggcguggagcugaagagcggcuacaaggacuggauccuguggaucagcuucgccaucagcugcuuccugcugugcguggcccugcugggcuucaucaugugggccugccagaagggcaacaucagaugcaacaucugcaucuga

SEQ ID NO: 169220 - RNA, 1701 nt, Artificial Sequence
  derived and/or modified CDS sequence (opt4) from hemagglutinin__InfluenzaA__AFM72971
augaagaccaucaucgcccugagcuacauccugugccugguguucgcccagaagcugcccggcaacgacaacagcaccgccacccugugccugggccaccacgccgugcccaacggcaccaucgugaagaccaucaccaacgaccagaucgaggugaccaacgccaccgagcuggugcagagcagcagcaccggcgagaucugcgacagcccccaccagauccuggacggcgagaacugcacccugaucgacgcccugcugggcgacccccagugcgacggcuuccagaacaagaagugggaccuguucguggagagaagcaaggccuacagcaacugcuaccccuacgacgugcccgacuacgccagccugagaagccugguggccagcagcggcacccuggaguucaacaacgagagcuucaaguggaccggcgugacccagaacggcaccagcagcgccugcaucagaagaagcaacaacagcuucuucagcagacugaacuggcugacccagcugaacuucaaguaccccgcccugaacgugaccaugcccaacaacgagcaguucgacaagcuguacaucuggggcgugcaccaccccggcaccgacaacgaccagaccagccuguacgcccaggccagcggcagaaucaccgugagcaccaagagaagccagcagaccgugauccccaacaucggcagcagacccagagugagaaacauccccagcagaaucagcaucuacuggaccaucgugaagcccggcgacauccugcugaucaacagcaucggcaaccugaucgcccccagaggcuacuucaagaucagaagcggcaagagcagcaucaugagaagcgacgcccccaucggcaagugcaacagcgagugcaucacccccaacggcagcauccccaacgacaagcccuuccagaacgugaacagaaucaccuacggcgccugccccagauacgugaagcagaacacccugaagcuggccaccggcaugagaaacgugcccgagaagcagaccagaggcaucuucggcgccaucgccggcuucaucgagaacggcugggagggcaugguggacggcugguacggcuucagacaccagaacagcgagggcagaggccaggccgccgaccugaagagcacccaggccgccaucgaccagaucaacggcaagcugaacagacugaucggcaagaccaacgagaaguuccaccagaucgagaaggaguucagcgagguggagggcagaauccaggaccuggagaaguacguggaggacaccaagaucgaccuguggagcuacaacgccgagcugcugguggcccuggagaaccagcacaccaucgaccugaccgacagcgagaugaacaagcuguucgagaagaccaagaagcagcugagagagaacgccgaggacaugggcaacggcugcuucaagaucuaccacaagugcgacaacgccugcaucggcagcaucagaaacggcaccuacgaccacaacguguacagagacgaggcccugaacaacagauuccagaucaagggcguggagcugaagagcggcuacaaggacuggauccuguggaucagcuucgccaucagcugcuuccugcugugcguggcccugcugggcuucaucaugugggccugccagaagggcaacaucagaugcaacaucugcaucuga

SEQ ID NO: 169221 - RNA, 1701 nt, Artificial Sequence
  derived and/or modified CDS sequence (opt4) from hemagglutinin__InfluenzaA__AFM72982
augaagaccaucaucgcccugagcuacauccugugccugguguucgcccagaagcugcccggcaacgacaacagcaccgccacccugugccugggccaccacgccgugcccaacggcaccaucgugaagaccaucaccaacgaccagaucgaggugaccaacgccaccgagcuggugcagagcagcagcaccggcgagaucugcgacagcccccaccagauccuggacggcgagaacugcacccugaucgacgcccugcugggcgacccccagugcgacggcuuccagaacaagaagugggaccuguucguggagagaagcaaggccuacagcaacugcuaccccuacgacgugcccgacuacgccagccugagaagccugguggccagcagcggcacccuggaguucaacagcgagagcuucaacuggaccggcgugacccagaacggcaccagcagcgccugcaucagaagaagcaacaacagcuucuucagcagacugaacuggcugacccaccugaacuucaaguaccccgcccugaacgugaccaugcccaacaacgagcaguucgacaagcuguacaucuggggcgugcaccaccccggcaccgacaaggaccagaucuuccccuacgcccaggccagcggcagaaucaccgugagcaccaagagaagccagcaggccgugauccccaacaucggcagcagacccagagugagaaacauccccagcagaaucagcaucuacuggaccaucgugaagcccggcgacauccugcugaucaacagcaccggcaaccugaucgcccccagaggcuacuucaagaucagaagcggcaagagcagcaucaugagaagcgacgcccccaucggcaagugcaacagcgagugcaucacccccaacggcagcauccccaacgacaagcccuuccagaacgugaacagaaucaccuacggcgccugccccagauacaucaagcagagcacccugaagcuggccaccggcaugagaaacgugcccgagaagcagaccagaggcaucuucggcgccaucgccggcuucaucgagaacggcugggagggcaugguggacggcugguacggcuucagacaccagaacagcgagggcagaggccaggccgccgaccugaagagcacccaggccgccaucgaccagaucaacggcaagcugaacagacugaucggcaagaccaacgagaaguuccaccagaucgagaaggaguucagcgagguggagggcagaauccaggaccuggagaaguacguggaggacaccaagaucgaccuguggagcuacaacgccgagcugcugguggcccuggagaaccagcacaccaucgaccugaccgacagcgagaugaacaagcuguucgagaagaccaagaagcagcugagagagaacgccgaggacaugggcaacggcugcuucaagaucuaccacaagugcgacaacgccugcaucggcagcaucagaaacggcaccuacgaccacgacguguacagagacgaggcccugaacaacagauuccagaucaagggcguggagcugaagagcggcuacaaggacuggauccuguggaucagccuggccaucagcugcuuccugcugugcguggcccugcugggcuucaucaugugggccugccagaagggcaacaucagaugcaacaucugcaucuga

SEQ ID NO: 169222 - RNA, 1701 nt, Artificial Sequence
  derived and/or modified CDS sequence (opt4) from hemagglutinin__InfluenzaA__AFM72993
augaagaccaucaucgcccugagcuacauccugugccugguguucgcccagaagcugcccggcaacgacaacagcaccgccacccugugccugggccaccacgccgugcccaacggcaccaucgugaagaccaucaccaacgaccagaucgaggugaccaacgccaccgagcuggugcagagcagcagcgccggcgagaucugcgacagcccccaccagauccuggacggcgagaacugcacccugaucgacgcccugcugggcgacccccagugcgacggcuuccagaacaagaagugggaccuguucguggagagaagcagagccuacagcaacugcuaccccuacgacgugcccgacuacgccagccugagaagccugguggccagcagcggcacccuggaguucaacaacgagagcuucaacuggaccggcgugacccagaacggcaccagcagcgccugcaucagaagaagcaacaacagcuucuucagcagacugaacuggcugacccaccugaacuucaaguaccccgcccugaacgugaccaugcccaacaacgagcaguucgacaagcuguacaucuggggcgugcugcaccccggcaccuacaaggaccagaucuuccuguacgcccaggccagcggcagaaucaccgugagcaccaagagaagccagcaggccgugauccccaacaucggcagcagacccagagugagaaacauccccagcagaaucagcaucuacuggaccaucgugaagcccggcgacauccugcugaucaacagcaccggcaaccugaucgcccccagaggcuacuucaagaucagaagcggcaagagcagcaucaugagaagcgacgcccccaucggcaagugcaacagcgagugcaucacccccaacggcagcauccccaacgacaagcccuuccagaacgugaacagaaucaccuacggcgccugccccagauacgugaagcagagcacccugaagcuggccaccggcaugagaaacgugcccgagaagcagaccagaggcaucuucggcgccaucgccggcuucaucgagaacggcugggagggcaugguggacggcugguacggcuucagacaccagaacagcgagggcagaggccaggccgccgaccugaagagcacccaggccgccaucgaccagaucaacggcaagcugaacagacugaucggcaagaccaacgagaaguuccaccagaucgagaaggaguucagcgagguggagggcagaauccaggaccuggagaaguacguggaggacaccaagaucgaccuguggagcuacaacgccgagcugcugguggcccuggagaaccagcacaccaucgaccugaccgacagcgagaugaacaagcuguucgagaagaccaagaagcagcugagagagaacgccgaggacaugggcaacggcugcuucaagaucuaccacaagugcgacaacgccugcaucggcagcaucagaaacggcaccuacgaccacgacguguacagagacgaggcccugaacaacagauuccagaucaagggcguggagcugaagagcggcuacaaggacuggauccuguggaucagcuucgccaucagcugcuuccugcugugcguggcccugcugggcuucaucaugugggccugccagaagggcaacaucagaugcaacaucugcaucuga

SEQ ID NO: 169223 - RNA, 1701 nt, Artificial Sequence
  derived and/or modified CDS sequence (opt4) from hemagglutinin__InfluenzaA__AFM73004
augaagaccaucaucgcccugagcuacauccugugccugguguucgcccagaagcugcccggcaacgacaacagcaccgccacccugugccugggccaccacgccgugcccaacggcaccaucgugaagaccaucaccaacgaccagaucgaggugaccaacgccaccgagcuggugcagagcagcagcgccggcgagaucugcgacagcccccaccagauccuggacggcgagaacugcacccugaucgacgcccugcugggcgacccccagugcgacggcuuccagaacaagaagugggaccuguucguggagagaagcagagccuacagcaacugcuaccccuacgacgugcccgacuacgccagccugagaagccugguggccagcagcggcacccuggaguucaacaacgagagcuucaacuggaccggcgugacccagaacggcaccagcagcgccugcaucagaagaagcaacaacagcuucuucagcagacugaacuggcugacccaccugaacuucaaguaccccgcccugaacgugaccaugcccaacaacgagcaguucgacaagcuguacaucuggggcgugcugcaccccggcaccuacaaggaccagaucuuccuguacgcccaggccagcggcagagugaccgugagcaccaagagaagccagcaggccgugauccccaacaucggcagcagacccagagugagaaacauccccagcagaaucagcaucuacuggaccaucgugaagcccggcgacauccugcugaucaacagcaccggcaaccugaucgcccccagaggcuacuucaagaucagaagcggcaagagcagcaucaugagaagcgacgcccccaucggcaagugcaacagcgagugcaucacccccaacggcagcauccccaacgacaagcccuuccagaacgugaacagaaucaccuacggcgccugccccagauacgugaagcagagcacccugaagcuggccaccggcaugagaaacgugcccgagaagcagaccagaggcaucuucggcgccaucgccggcuucaucgagaacggcugggagggcaugguggacggcugguacggcuucagacaccagaacagcgagggcagaggccaggccgccgaccugaagagcacccaggccgccaucgaccagaucaacggcaagcugaacagacugaucggcaagaccaacgagaaguuccaccagaucgagaaggaguucagcgagguggagggcagaauccaggaccuggagaaguacguggaggacaccaagaucgaccuguggagcuacaacgccgagcugcugguggcccuggagaaccagcacaccaucgaccugaccgacagcgagaugaacaagcuguucgagaagaccaagaagcagcugagagagaacgccgaggacaugggcaacggcugcuucaagaucuaccacaagugcgacaacgccugcaucggcagcaucagaaacggcaccuacgaccacgacguguacagagacgaggcccugaacaacagauuccagaucaagggcguggagcugaagagcggcuacaaggacuggauccuguggaucagcuucgccaucagcugcuucuuccugugcguggcccugcugggcuucaucaugugggccugccagaagggcaacaucagaugcaacaucugcaucuga

SEQ ID NO: 169224 - RNA, 1701 nt, Artificial Sequence
  derived and/or modified CDS sequence (opt4) from hemagglutinin__InfluenzaA__AFM73015
augaaggccauccugguggugcugcuguacaccuucgccaccgccaacgccgacacccugugcaucggcuaccacgccaacaacagcaccgacaccguggacaccgugcuggagaagaacgugaccgugacccacagcgugaaccugcuggaggacaagcacaacggcaagcugugcaagcugagaggcguggccccccugcaccugggcaagugcaacaucgccggcuggauccugggcaaccccgagugcgagagccugagcaccgccagcagcuggagcuacaucguggagaccagcagcagcgacaacggcaccugcuaccccggcgacuucaucgacuacgaggagcugagagagcagcugagcagcgugagcagcuucgagagauucgagaucuuccccaagaccagcagcuggcccaaccacgacagcaacaagggcgugaccgccgccugcccccacgccggcgccaagggcuucuacaagaaccugaucuggcuggugaagaagggcaacagcuaccccaagcugagcaagagcuacaucaacgacaagggcaaggaggugcuggugcuguggggcauccaccaccccagcaccaccgccgaccagcagagccuguaccagaacgccgacaccuacguguucgugggcaccagcagauacagcaagaaguucaagcccgagaucgccaucagacccaaggugagagacagagagggcagaaugaacuacuacuggacccugguggagcccggcgacaagaucaccuucgaggccaccggcaaccugguggugcccagauacgccuucgccauggagagaaacgccggcagcggcaucaucaucagcgacacccccgugcacgacugcaacaccaccugccagacccccaagggcgccaucaacaccagccugcccuuccagaacauccaccccaucaccaucggcaagugccccaaguacgugaagagcaccaagcugagacuggccaccggccugagaaacgugcccagcauccagagcagaggccuguucggcgccaucgccggcuucaucgagggcggcuggaccggcaugguggacggcugguacggcuaccaccaccagaacgagcagggcagcggcuacgccgccgaccugaagagcacccagaacgccaucgacaagaucaccaacaaggugaacagcgugaucgagaagaugaacacccaguucaccgccgugggcaaggaguucaaccaccuggagaagagaaucgagaaccugaacaagaagguggacgacggcuuccuggacaucuggaccuacaacgccgagcugcuggugcugcuggagaacgagagaacccuggacuaccacgacagcaacgugaagaaccuguacgagaaggugagaaaccagcugaagaacaacgccaaggagaucggcaacggcugcuucgaguucuaccacaagugcgacaacaccugcauggagagcgugaagaacggcaccuacgacuaccccaaguacagcgaggaggccaagcugaacagagaggagaucgacggcgugaagcuggagagcaccagaaucuaccagauccuggccaucuacagcaccguggccagcagccuggugcugguggugagccugggcgccaucagcuucuggaugugcagcaacggcagccugcagugcagaaucugcaucuga

SEQ ID NO: 169225 - RNA, 1701 nt, Artificial Sequence
  derived and/or modified CDS sequence (opt4) from hemagglutinin__InfluenzaA__AFM73025
augaaggccauccugguggugcugcuguacaccuucgccaccgccaacgccgacacccugugcaucggcuaccacgccaacaacagcaccgacaccguggacaccgugcuggagaagaacgugaccgugacccacagcgugaaccugcuggaggacaagcacaacggcaagcugugcaagcugagaggcguggccccccugcaccugggcaagugcaacaucgccggcuggauccugggcaaccccgagugcgagagccugagcaccgccagcagcuggagcuacaucguggagaccagcagcagcgacaacggcaccugcuaccccggcgacuucaucgacuacgaggagcugagagagcagcugagcagcgugagcagcuucgagagauucgagaucuuccccaagaccagcagcuggcccaaccacgacagcaacaagggcgugaccgccgccugcccccacgccggcgccaagggcuucuacaagaaccugaucuggcuggugaagaagggcaacagcuaccccaagcugagcaagagcuacaucaacgacaagggcaaggaggugcuggugcuguggggcauccaccaccccagcaccaccgacgaccagcagagccuguaccagaacgccgacaccuacguguucgugggcaccagcagauacagcaagaaguucaagcccgagaucgccaucagacccaaggugagagacagagagggcagaaugaacuacuacuggacccugguggagcccggcgacaagaucaccuucgaggccaccggcaaccugguggugcccagauacgccuucgccauggagagaaacgccggcagcggcaucaucaucagcgacacccccgugcacgacugcaacaccaccugccagacccccaagggcgccaucaacaccagccugcccuuccagaacauccaccccaucaccaucggcaagugccccaaguacgugaagagcaccaagcugagacuggccaccggccugagaaacgugcccagcauccagagcagaggccuguucggcgccaucgccggcuucaucgagggcggcuggaccggcaugguggacggcugguacggcuaccaccaccagaacgagcagggcagcggcuacgccgccgaccugaagagcacccagaacgccaucgacaagaucaccaacaaggugaacagcgugaucgagaagaugaacacccaguucaccgccgugggcaaggaguucaaccaccuggagaagagaaucgagaaccugaacaagaagguggacgacggcuuccuggacaucuggaccuacaacgccgagcugcuggugcugcuggagaacgagagaacccuggacuaccacgacagcaacgugaagaaccuguacgagaaggugagaaaccagcugaagaacaacgccaaggagaucggcaacggcugcuucgaguucuaccacaagugcgacaacaccugcauggagagcgugaagaacggcaccuacgacuaccccaaguacagcgaggaggccaagcugaacagagaggagaucgacggcgugaagcuggagagcaccagaaucuaccagauccuggccaucuacagcaccguggccagcagccuggugcugguggugagccugggcgccaucagcuucuggaugugcagcaacggcagccugcagugcagaaucugcaucuga

SEQ ID NO: 169226 - RNA, 1701 nt, Artificial Sequence; identical to SEQ ID NO: 169225
  derived and/or modified CDS sequence (opt4) from hemagglutinin__InfluenzaA__AFM73035

SEQ ID NO: 169227 - RNA, 1701 nt, Artificial Sequence
  derived and/or modified CDS sequence (opt4) from hemagglutinin__InfluenzaA__AFM73045
augaaggccauccugguggugcugcuguacaccuucgccaccgccaacgccgacacccugugcaucggcuaccacgccaacaacagcaccgacaccguggacaccgugcuggagagaaacgugaccgugacccacagcgugaaccugcuggaggacaagcacaacggcaagcugugcaagcugagaggcguggccccccugcaccugggcaagugcaacaucgccggcuggauccugggcaaccccgagugcgagagccugagcaccgccagcagcuggagcuacaucguggagaccagcagcagcgacaacggcaccugcuaccccggcgacuucaucgacuacgaggagcugagagagcagcugagcagcgugagcagcuucgagagauucgagaucuuccccaagaccagcagcuggcccaaccacgagagcaacaagggcgugaccgccgccugcccccacgccggcgccaagagcuucuacaagaaccugaucuggcuggugaagaagggcaacagcuaccccaagcugagcaagagcuacaucaacgacaagggcaaggaggugcuggugcuguggggcauccaccaccccagcaccagcgccgaccagcagagccuguaccagaacgccgacgccuacguguucgugggcaccagcagauacagcaagaaguucaagcccgagaucgccaucagacccaaggugagagaccaggagggcagaaugaacuacuacuggacccugguggagcccggcgacaagaucaccuucgaggccaccggcaaccugguggugcccagauacgccuucgccauggagagaaacgccggcagcggcaucaucaucagcgacacccccgugcacgacugcaacaccaccugccagacccccaagggcgccaucaacaccagccugcccuuccagaacauccaccccaucaccaucggcaagugccccaaguacgugaagagcaccaagcugagacuggccaccggccugagaaacgugcccagcauccagagcagaggccuguucggcgccaucgccggcuucaucgagggcggcuggaccggcaugguggacggcugguacggcuaccaccaccagaacgagcagggcagcggcuacgccgccgaccugaagagcacccagaacgccaucgacgagaucaccaacaaggugaacagcgugaucgagaagaugaacacccaguucaccgccgugggcaaggaguucaaccaccuggagaagagaaucgagaaccugaacaagaagguggacgacggcuuccuggacaucuggaccuacaacgccgagcugcuggugcugcuggagaacgagagaacccuggacuaccacgacagcaacgugaagaaccuguacgagaaggugagaagccagcugaagaacaacgccaaggagaucggcaacggcugcuucgaguucuaccacaagugcgacaacaccugcauggagagcgugaagaacggcaccuacgacuaccccaaguacagcgaggaggccaagcugaacagagaggagaucgacggcgugaagcuggagagcaccagaaucuaccagauccuggccaucuacagcaccguggccagcagccuggugcugguggugagccugggcgccaucagcuucuggaugugcagcaacggcagccugcagugcagaaucugcaucuga

SEQ ID NO: 169228 - RNA, 1701 nt, Artificial Sequence
  derived and/or modified CDS sequence (opt4) from hemagglutinin__InfluenzaA__AFM73055
augaaggccauccugguggugcugcuguacaccuucgccaccgccaacgccgacacccugugcaucggcuaccacgccaacaacagcaccgacaccguggacaccgugcuggagagaaacgugaccgugacccacagcgugaaccugcuggaggacaagcacaacggcaagcugugcaagcugagaggcguggccccccugcaccugggcaagugcaacaucgccggcuggauccugggcaaccccgagugcgagagccugagcaccgccagcagcuggagcuacaucguggagaccagcagcagcgacaacggcaccugcuaccccggcgacuucaucgacuacgaggagcugagagagcagcugagcagcgugagcagcuucgagagauucgagaucuuccccaagaccagcagcuggcccaaccacgacagcaacaagggcgugaccgccgccugcccccacgccggcgccaagagcuucuacaagaaccugaucuggcugguggagaagggcaacagcuaccccaagcugagcaagagcuacaucaacgacaagggcaaggaggugcuggugcuguggggcauccaccaccccagcaccagcgccgaccagcagagccuguaccagaacgccgacgccuacguguucgugggcaccagcagauacagcaagaaguucaagcccgagaucgccaucagacccaaggugagagacagagagggcagaaugaacuacuacuggacccugguggagcccggcgacaagaucaccuucgaggccaccggcaaccugguggugcccagauacgccuucgccauggagagaaacgccggcagcggcaucaucaucagcgacacccccgugcacgacugcaacaccaccugccagacccccaagggcgccaucaacaccagccugcccuuccagaacauccaccccaucaccaucggcaagugccccaaguacgugaagagcaccaagcugagacuggccaccggccugagaaacgugcccagcauccagagcagaggccuguucggcgccaucgccggcuucaucgagggcggcuggaccggcaugguggacggcugguacggcuaccaccaccagaacgagcagggcagcggcuacgccgccgaccugaagagcacccagaacgccaucgacgagaucaccaacaaggugaacagcgugaucgagaagaugaacacccaguucaccgccgugggcaaggaguucaaccaccuggagaagagaaucgagaaccugaacaagaagguggacgacggcuuccuggacaucuggaccuacaacgccgagcugcuggugcugcuggagaacgagagaacccuggacuaccacgacagcaacgugaagaaccuguacgagaaggugagaagccagcugaagaacaacgccaaggagaucggcaacggcugcuucgaguucuaccacaagugcgacaacaccugcauggagagcgugaagaacggcaccuacgacuaccccaaguacagcgaggaggccaagcugaacagagaggagaucgacggcgugaagcuggagagcaccagaaucuaccagauccuggccaucuacagcaccguggccagcagccuggugcugguggugagccugggcgccaucagcuucuggaugugcagcaacggcagccugcagugcagaaucugcaucuga

SEQ ID NO: 169229 - RNA, 1701 nt, Artificial Sequence
  derived and/or modified CDS sequence (opt4) from hemagglutinin__InfluenzaA__AFM73065
augaaggccauccugguggugcugcuguacaccuucgccaccgccaacgccgacacccugugcaucggcuaccacgccaacaacagcaccgacaccguggacaccgugcuggagagaaacgugaccgugacccacagcgugaaccugcuggaggacaagcacaacggcaagcugugcaagcugagaggcguggccccccugcaccugggcaagugcaacaucgccggcuggauccugggcaaccccgagugcgagagccugagcaccgccagcagcuggagcuacaucguggagaccagcagcagcgacaacggcaccugcuaccccggcgacuucaucgacuacgaggagcugagagagcagcugagcagcgugagcagcuucgagagauucgagaucuuccccaagaccagcagcuggcccaaccacgacagcaacaagggcgugaccgccgccugcccccacgccggcgccaagagcuucuacaagaaccugaucuggcuggugaaggagggcaacagcuaccccaagcugagcaagagcuacaucaacgacaagggcaaggaggugcuggugcuguggggcauccaccaccccagcaccagcgccgaccagcagagccuguaccagaacgccgacgccuacguguucgugggcaccagcagauacagcaagaaguucaagcccgagaucgccaucagacccaaggugagagacagagagggcagaaugaacuacuacuggacccugguggagcccggcgacaagaucaccuucgaggccaccggcaaccugguggugcccagauacgccuucgccauggagagaaacgccggcagcggcaucaucaucagcgacacccccgugcacgacugcaacaccaccugccagacccccaagggcgccaucaacaccagccugcccuuccagaacauccaccccaucaccaucggcaagugccccaaguacgugaagagcaccaagcugagacuggccaccggccugagaaacgugcccagcauccagagcagaggccuguucggcgccaucgccggcuucaucgagggcggcuggaccggcaugguggacggcugguacggcuaccaccaccagaacgagcagggcagcggcuacgccgccgaccugaagagcacccagaacgccaucgacgagaucaccaacaaggugaacagcgugaucgagaagaugaacacccaguucaccgccgugggcaaggaguucaaccaccuggagaagagaaucgagaaccugaacaagaagguggacgacggcuuccuggacaucuggaccuacaacgccgagcugcuggugcugcuggagaacgagagaacccuggacuaccacgacagcaacgugaagaaccuguacgagaaggugagaagccagcugaagaacaacgccaaggagaucggcaacggcugcuucgaguucuaccacaagugcgacaacaccugcauggagagcgugaagaacggcaccuacgacuaccccaaguacagcgaggaggccaagcugaacagagaggagaucgacggcgugaagcuggagagcaccagaaucuaccagauccuggccaucuacagcaccguggccagcagccuggugcugguggugagccugggcgccaucagcuucuggaugugcagcaacggcagccugcagugcagaaucugcaucuga

SEQ ID NO: 169230 - RNA, 1701 nt, Artificial Sequence; identical to SEQ ID NO: 160975
  derived and/or modified CDS sequence (opt4) from hemagglutinin__InfluenzaA__AFM73477

SEQ ID NO: 169231 - RNA, 1707 nt, Artificial Sequence
  derived and/or modified CDS sequence (opt4) from hemagglutinin__InfluenzaA__AFM78567
auggagaagaucgugcugcugcuggccaucgugagccuggugaagagcgaccagaucugcaucggcuaccacgccaacaacagcaccgagcagguggacaccaucauggagaagaacgugaccgugacccacgcccaggacauccuggagaagacccacaacggcaagcugugcgaccuggacggcgugaagccccugauccugagagacugcagcguggccggcuggcugcugggcaaccccaugugcgacgaguucaucaacgugcccgaguggagcuacaucguggagaaggccaaccccaccaacgaccugugcuaccccggcagcuucaacgacuacgaggagcugaagcaccugcugagcagaaucaaccacuucgagaagauccagaucauccccaagagcagcuggagcgaccacgaggccagcagcggcgugagcagcgccugccccuaccugggcagccccagcuucuucagaaacgugguguggcugaucaagaagaacagcaccuaccccaccaucaagaagagcuacaacaacaccaaccaggaggaccugcuggugcuguggggcauccaccaccccaacgacgccgccgagcagaccagacuguaccagaaccccaccaccuacaucagcaucggcaccagcacccugaaccagagacuggugcccaagaucgccaccagaagcaaggugaacggccagagcggcagaauggaguucuucuggaccauccugaagcccaacgacgccaucaacuucgagagcaacggcaacuucaucgcccccgaguacgccuacaagaucgugaagaagggcgacagcgccaucaugaagagcgagcuggaguacggcaacugcaacaccaagugccagacccccaugggcgccaucaacagcagcaugcccuuccacaacauccacccccugaccaucggcgagugccccaaguacgugaagagcaacagacuggugcuggccaccggccugagaaacagcccccagagagagagcagaagaaagaagagaggccuguucggcgccaucgccggcuucaucgagggcggcuggcagggcaugguggacggcugguacggcuaccaccacagcaacgagcagggcagcggcuacgccgccgacaaggagagcacccagaaggccaucgacggcgugaccaacaaggugaacagcaucaucgacaagaugaacacccaguucgaggccgugggcagagaguucaacaaccuggagagaagaaucgagaaccugaacaagaagauggaggacggcuuccuggacguguggaccuacaacgccgagcugcuggugcugauggagaacgagagaacccuggacuuccacgacagcaacgugaagaaccuguacgacaaggugagacugcagcugagagacaacgccaaggagcugggcaacggcugcuucgaguucuaccacaagugcgacaacgagugcauggagagcaucagaaacggcaccuacaacuacccccaguacagcgaggaggccagacugaagagagaggagaucagcggcgugaagcuggagagcaucggcaccuaccagauccugagcaucuacagcaccguggccagcagccuggcccuggccaucaugauggccggccugagccuguggaugugcagcaacggcagccugcagugcagaaucugcaucuga

SEQ ID NO: 169232 - RNA, 1701 nt, Artificial Sequence
  derived and/or modified CDS sequence (opt4) from hemagglutinin__InfluenzaA__AFM78646
augaaggccauccugguggugcugcuguacaccuucgccaccgccaacgccgacacccugugcaucggcuaccacgccaacaacagcaccgacaccguggacaccgugcuggagaagaacgugaccgugacccacagcgugaaccugcuggaggacaagcacaacggcaagcugugcaagcugagaggcguggccccccugcaccugggcaagugcaacaucgccggcuggauccugggcaaccccgagugcgagagccugagcaccgccagcagcuggagcuacaucguggagaccagcagcagcgacaacggcaccugcuaccccggcgacuucaucgacuacgaggagcugagagagcagcugagcagcgugagcagcuucgagagauucgagaucuuccccaagaccagcagcuggcccaaccacgaccccaacaagggcgugaccgccgccugcccccacgccggcgccaagagcuucuacaagaaccugaucuggcuggugaagaagggcaacagcuaccccaagcugagcaagagcuacaucaacgacaagggcaaggaggugcuggugcuguggggcauccaccaccccagcaccagcgccgaccagcagggccuguaccagaacgccgacgccuacguguucgugggcaccagcagauacagcaagaaguucaagcccgagaucgccaucagacccaaggugagagaccaggagggcagaaugaacuacuacuggacccugguggagcccggcgacaagaucaccuucgaggccaccggcaaccugguggugcccagauacgccuucgccauggagagaaacgccggcagcggcaucaucaucagcgacacccccgugcacgacugcaacaccaccugccagacccccaagggcgccaucaacaccagccugcccuuccagaacauccaccccaucaccaucggcaagugccccaaguacgugaagagcaccaagcugagacuggccaccggccugagaaacgugcccagcauccagagcagaggccuguucggcgccaucgccggcuucaucgagggcggcuggaccggcaugguggacggcugguacggcuaccaccaccagaacgagcagggcagcggcuacgccgccgaccugaagagcacccagaacgccaucgacgagaucaccaacaaggugaacagcgugaucgagaagaugaacacccaguucaccgccgugggcaaggaguucaaccaccuggagaagagaaucgagaaccugaacaagaagguggacgacggcuuccuggacaucuggaccuacaacgccgagcugcuggugcugcuggagaacgagagaacccuggacuaccacgacagcaacgugaagaaccuguacgagaaggugagaagccagcugaagaacaacgccaaggagaucggcaacggcugcuucgaguucuaccacaagugcgacaacaccugcauggagagcgugaagaacggcaccuacgacuaccccaaguacagcgaggaggccaagcugaacagagaggagaucgacggcgugaagcuggagagcaccagaaucuaccagauccuggccaucuacagcaccguggccagcagccuggugcugguggugagccugggcgccaucagcuucuggaugugcagcaacggcagccugcagugcagaaucugcaucuga

SEQ ID NO: 169233 - RNA, 1698 nt, Artificial Sequence
  derived and/or modified CDS sequence (opt4) from hemagglutinin__InfluenzaA__AFM85179
augaaggugaagcugcugauccugcugugcaccuucaccgccaccuacgccgacaccaucugcaucggcuaccacgccaacaacagcaccgacaccguggacaccgugcuggagaagaacgugaccgugacccacagcgugaaccugcuggagaacagccacaacggcaagcugugccugcugaagggcaucgccccccugcagcugggcaacugcagcguggccggcuggauccugggcaaccccgagugcgagcugcugaucagcaaggagagcuggagcuacaucguggagacccccaaccccgagaacggcaccugcuaccccggcuacuucgccgacuacgaggagcugagagagcagcugagcagcgugagcagcuucgagagauucgagaucuuccccaaggagagcagcuggcccaaccacaccgugaccggcgugagcgccagcugcagccacaacggcaagagcagcuucuacagaaaccugcuguggcugaccggcaagaacggccuguaccccaaccugagcaagagcuacgccaacaacaaggagaaggaggugcugauccuguggggcgugcaccacccccccaacaucggcgaccagagaacccuguacuacaccgagaacgccuacgugagcguggugagcagccacuacagcagaagauucacccccgagaucaccaagagacccaaggugagagaccaggagggcagaaucaacuacuacuggacccugcuggagcccggcgacaccaucaucuucgaggccaacggcaaccugaucgcccccugguacgccuucgcccugagcagaggcuucggcagcggcaucaucaucagcaacgcccccauggacgagugcgacgccaagugccagaccccccagggcgccaucaacagcagccugcccuuccagaacgugcaccccgugaccaucggcgagugccccaaguacgugagaagcgccaagcugagaauggugaccggccugagaaacauccccagcauccagagcagaggccuguucggcgccaucgccggcuucaucgagggcggcuggaccggcaugguggacggcugguacggcuaccaccaccagaacgagcagggcagcggcuacgccgccgaccagaagagcacccagaacgccaucaacggcaucaccaacaaggugaacagcgugaucgagaagaugaacacccaguucaccgccgugggcaaggaguucaacaaguucgagagaagaauggagaaccugaacaagaagguggacgacggcuuccuggacaucuggaccuacaacgccgagcugcuggugcugcuggagaacgagagaacccuggacuuccacgacagcaacgugaagaaccuguacgagaaggugaagagccagcugaagaacaacgccaaggagaucggcaacggcugcuucgaguucuaccacaagugcaacaacgagugcauggagagcgugaagaacggcaccuacgacuaccccaaguacagcgaggagagcaagcugaacagagagaagaucgacggcgugaagcuggagagcaugggcguguaccagauccuggccaucuacagcaccguggccagcagccuggugcugcuggugagccugggcgccaucagcuucuggaugugcagcaacggcagccugcagugcagaaucugcaucuga

SEQ ID NO: 169234 - RNA, 1701 nt, Artificial Sequence
  derived and/or modified CDS sequence (opt4) from hemagglutinin__InfluenzaA__AFN11846
augaagaccaucaucgcccugagcuacauccugugccugguguucgcccagaagcugcccggcaacgacaacagcaccgccacccugugccugggccaccacgccgugcccaacggcacccuggugaagaccaucaccaacgaccagaucgaggugaccaacgccaccgagcuggugcagagcagcagcaccggcagaaucugcgacagcccccacagaauccuggacggcaagaacugcacccugaucgacgcccugcugggcgacccccacugcgacggcuuccagaacaaggagugggaccuguucguggagagaagcaaggccuacagcaacugcuaccccuacgacgugcccgacuacgccagccugagaagccugguggccagcagcggcacccuggaguucaccaacgagggcuucaacuggaccggcguggcccaggacggcaagagcuacgccugcaagagaggcagcgugaagagcuucuucagcagacugaacuggcugcacaagcuggaguacaaguaccccgcccugaacgugaccaugcccaacaacgacaaguucgacaagcuguacaucuggggcgugcaccaccccagcaccgacagcgaccagaccagccuguacgugcaggccagcggcagagugaccgugagcaccaagagaagccagcagaccgugauccccaacaucggcagcagacccugggugagaggcaucagcagcagaaucagcaucuacuggaccaucgugaagcccggcgacauccugcugaucaacagcaccggcaaccugaucgcccccagaggcuacuucaagaucagaaacggcaagagcagcaucaugagaagcgacgcccccaucggcaacugcaacagcgagugcaucacccccaacggcagcauccccaacgacaagcccuuccagaacgugaacagaaucaccuacggcgccugccccagauacgugaagcagaacacccugaagcuggccaccggcaugagaaacgugcccgagaagcagaccagaggcaucuucggcgccaucgccggcuucaucgagaacggcugggagggcaugguggacggcugguacggcuucagacaccagaacagcgagggcaccggccaggccgccgaccugaagagcacccaggccgccaucgaccagaucaacggcaagcugaacagacugaucgagaagaccaacgagaaguuccaccagaucgagaaggaguucagcgagguggagggcagaauccaggaccuggagaaguacguggaggacaccaagaucgaccuguggagcuacaacgccgagcugcugguggcccuggagaaccagcacaccaucgaccugaccgacagcgagaugaacaagcuguucgagagaaccagaaagcagcugagagagaacgccgaggacaugggcaacggcugcuucaagaucuaccacaagugcgacaacgccugcaucggcagcaucagaaacggcaccuacgaccacgacguguacagagacgaggcccugaacaacagauuccagaucaagggcguggagcugaagagcggcuacaaggacuggauccuguggaucagcuucgccaucagcugcuuccugcugugcguggugcugcugggcuucaucaugugggccugccagaagggcaacaucagaugcaacaucugcaucuga

SEQ ID NO: 169235 - RNA, 1701 nt, Artificial Sequence; identical to SEQ ID NO: 163590
  derived and/or modified CDS sequence (opt4) from hemagglutinin__InfluenzaA__AFN17371

SEQ ID NO: 169236 - RNA, 1701 nt, Artificial Sequence; identical to SEQ ID NO: 162729
  derived and/or modified CDS sequence (opt4) from hemagglutinin__InfluenzaA__AFN17381

SEQ ID NO: 169237 - RNA, 1701 nt, Artificial Sequence; identical to SEQ ID NO: 162729
  derived and/or modified CDS sequence (opt4) from hemagglutinin__InfluenzaA__AFN17391

SEQ ID NO: 169238 - RNA, 1701 nt, Artificial Sequence; identical to SEQ ID NO: 162729
  derived and/or modified CDS sequence (opt4) from hemagglutinin__InfluenzaA__AFN17401

SEQ ID NO: 169239 - RNA, 1701 nt, Artificial Sequence; identical to SEQ ID NO: 162729
  derived and/or modified CDS sequence (opt4) from hemagglutinin__InfluenzaA__AFN17411

SEQ ID NO: 169240 - RNA, 1701 nt, Artificial Sequence; identical to SEQ ID NO: 162729
  derived and/or modified CDS sequence (opt4) from hemagglutinin__InfluenzaA__AFN17421

SEQ ID NO: 169241 - RNA, 1701 nt, Artificial Sequence; identical to SEQ ID NO: 162820
  derived and/or modified CDS sequence (opt4) from hemagglutinin__InfluenzaA__AFN17431

SEQ ID NO: 169242 - RNA, 1701 nt, Artificial Sequence
  derived and/or modified CDS sequence (opt4) from hemagglutinin__InfluenzaA__AFN17441
augaaggccauccugguggugcugcuguacaccuucgccaccgccaacgccgacacccugugcaucggcuaccacgccaacaacagcaccgacaccguggacaccgugcuggagaagaacgugaccgugacccacagcgugaaccugcuggaggacaagcacaacggcaagcugugcaagcugagaggcguggccccccugcaccugggcaagugcaacaucgccggcuggauccugggcaaccccgagugcgagagccugagcaaggccagcagcuggagcuacaucguggagaccagcagcagcgacaacggcaccugcuaccccggcgacuucaucgacuacgaggagcugagagagcagcugagcagcgugagcagcuucgagagauucgagaucuuccccaagaccagcagcuggcccaaccacgacagcaacaagggcgugaccgccgccugcccccacgccggcgccaagagcuucuacaagaaccugaucuggcuggugaagaagggcaacagcuaccccaagcugagcaagagcuacaucaacgacaagggcaaggaggugcuggugcuguggggcauccaccaccccagcaccagcgccgaccagcagagccuguaccagaacgccgacgccuacguguucgugggcaccagcagauacagcaagaaguucaagcccgagaucgccaucagacccaaggugagagaccaggagggcagaaugaacuacuacuggacccugguggagcccggcgacaagaucaccuucgaggccaccggcaaccugguggugcccagauacgccuucgccauggagagaaacgccggcagcggcaucaucaucagcgacacccccgugcacgacugcaacaccaccugccagacccccaagggcgccaucaacaccagccugcccuuccagaacauccaccccaucaccaucggcaagugccccaaguacgugaagagcaccaagcugagacuggccaccggccugagaaacgugcccagcauccagagcagaggccuguucggcgccaucgccggcuucaucgagggcggcuggaccggcaugguggacggcugguacggcuaccaccaccagaacgagcagggcagcggcuacgccgccgaccugaagagcacccagaacgccaucgacgagaucaccaacaaggugaacagcgugaucgagaagaugaacacccaguucaccgccgugggcaaggaguucaaccaccuggagaagagaaucgagaaccugaacaagaagguggacgacggcuuccuggacaucuggaccuacaacgccgagcugcuggugcugcuggagaacgagagaacccuggacuaccacgacagcaacgugaagaaccuguacgagaaggugagaagccagcugaagaacaacgccaaggagaucggcaacggcugcuucgaguucuaccacaagugcgacaacaccugcauggagagcgugaagaacggcaccuacgacuaccccaaguacagcgaggaggccaagcugaacagagaggagaucgacggcgugaagcuggagagcaccagaaucuaccagauccuggccaucuacagcaccguggccagcagccuggugcugguggugagccugggcgccaucagcuucuggaugugcagcaacggcagccugcagugcagaaucugcaucuga

SEQ ID NO: 169243 - RNA, 1701 nt, Artificial Sequence; identical to SEQ ID NO: 165284
  derived and/or modified CDS sequence (opt4) from hemagglutinin__InfluenzaA__AFN17451

SEQ ID NO: 169244 - RNA, 1701 nt, Artificial Sequence; identical to SEQ ID NO: 163571
  derived and/or modified CDS sequence (opt4) from hemagglutinin__InfluenzaA__AFN17467

SEQ ID NO: 169245 - RNA, 1701 nt, Artificial Sequence; identical to SEQ ID NO: 162729
  derived and/or modified CDS sequence (opt4) from hemagglutinin__InfluenzaA__AFN17477

SEQ ID NO: 169246 - RNA, 1701 nt, Artificial Sequence; identical to SEQ ID NO: 163590
  derived and/or modified CDS sequence (opt4) from hemagglutinin__InfluenzaA__AFN17487

SEQ ID NO: 169247 - RNA, 1701 nt, Artificial Sequence; identical to SEQ ID NO: 162729
  derived and/or modified CDS sequence (opt4) from hemagglutinin__InfluenzaA__AFN17497

SEQ ID NO: 169248 - RNA, 1701 nt, Artificial Sequence; identical to SEQ ID NO: 162729
  derived and/or modified CDS sequence (opt4) from hemagglutinin__InfluenzaA__AFN17507

SEQ ID NO: 169249 - RNA, 1701 nt, Artificial Sequence; identical to SEQ ID NO: 163571
  derived and/or modified CDS sequence (opt4) from hemagglutinin__InfluenzaA__AFN17517

SEQ ID NO: 169250 - RNA, 1701 nt, Artificial Sequence; identical to SEQ ID NO: 163590
  derived and/or modified CDS sequence (opt4) from hemagglutinin__InfluenzaA__AFN17527

SEQ ID NO: 169251 - RNA, 1701 nt, Artificial Sequence; identical to SEQ ID NO: 162729
  derived and/or modified CDS sequence (opt4) from hemagglutinin__InfluenzaA__AFN17537

SEQ ID NO: 169252 - RNA, 1701 nt, Artificial Sequence; identical to SEQ ID NO: 162971
  derived and/or modified CDS sequence (opt4) from hemagglutinin__InfluenzaA__AFN17547

SEQ ID NO: 169253 - RNA, 1701 nt, Artificial Sequence; identical to SEQ ID NO: 164260
  derived and/or modified CDS sequence (opt4) from hemagglutinin__InfluenzaA__AFN17557

SEQ ID NO: 169254 - RNA, 1701 nt, Artificial Sequence; identical to SEQ ID NO: 163571
  derived and/or modified CDS sequence (opt4) from hemagglutinin__InfluenzaA__AFN17567

SEQ ID NO: 169255 - RNA, 1701 nt, Artificial Sequence; identical to SEQ ID NO: 162971
  derived and/or modified CDS sequence (opt4) from hemagglutinin__InfluenzaA__AFN17574

SEQ ID NO: 169256 - RNA, 1701 nt, Artificial Sequence; identical to SEQ ID NO: 162729
  derived and/or modified CDS sequence (opt4) from hemagglutinin__InfluenzaA__AFN17580

SEQ ID NO: 169257 - RNA, 1701 nt, Artificial Sequence; identical to SEQ ID NO: 162729
  derived and/or modified CDS sequence (opt4) from hemagglutinin__InfluenzaA__AFN17586

SEQ ID NO: 169258 - RNA, 1701 nt, Artificial Sequence; identical to SEQ ID NO: 163590
  derived and/or modified CDS sequence (opt4) from hemagglutinin__InfluenzaA__AFN17595

SEQ ID NO: 169259 - RNA, 1701 nt, Artificial Sequence; identical to SEQ ID NO: 162729
  derived and/or modified CDS sequence (opt4) from hemagglutinin__InfluenzaA__AFN17605

SEQ ID NO: 169260 - RNA, 1701 nt, Artificial Sequence; identical to SEQ ID NO: 162729
  derived and/or modified CDS sequence (opt4) from hemagglutinin__InfluenzaA__AFN17615

SEQ ID NO: 169261 - RNA, 1701 nt, Artificial Sequence; identical to SEQ ID NO: 162729
  derived and/or modified CDS sequence (opt4) from hemagglutinin__InfluenzaA__AFN17625

SEQ ID NO: 169262 - RNA, 1701 nt, Artificial Sequence; identical to SEQ ID NO: 162729
  derived and/or modified CDS sequence (opt4) from hemagglutinin__InfluenzaA__AFN17635

SEQ ID NO: 169263 - RNA, 1701 nt, Artificial Sequence
  derived and/or modified CDS sequence (opt4) from hemagglutinin__InfluenzaA__AFN17645
augaaggccauccugguggugcugcuguacaccuucgccaccgccaacgccgacacccugugcaucggcuaccacgccaacaacagcaccgacaccguggacaccgugcuggagaagaacgugaccgugacccacagcgugaaccugcuggaggacaagcacaacggcaagcugugcaagcugagaggcguggccccccugcaccugggcaagugcaacaucgccggcuggauccugggcaaccccgagugcgagagccugagcaccgccagcagcuggagcuacaucguggagaccagcagcagcgacaacggcaccugcuaccccggcgacuucaucgacuacgaggagcugagagagcagcugagcagcgugagcagcuucgagagaguggagaucuuccccaagaccagcagcuggcccaaccacgacagcaacaagggcgugaccgccgccugcccccacgccggcgccaagagcuucuacaagaaccugaucuggcuggugaagaagggcaacagcuaccccaagcugagcaagagcuacaucaacgacaagggcaaggaggugcuggugcuguggggcauccaccaccccagcaccagcgccgaccagcagagccuguaccagaacgccgacgccuacguguucgugggcaccagcagauacagcaagaaguucaagcccgagaucgccaucagacccaaggugagagaccaggagggcagaaugaacuacuacuggacccugguggagcccggcgacaagaucaccuucgaggccaccggcaaccugguggugcccagauacgccuucgccauggagagaaacgccggcagcggcaucaucaucagcgacacccccgugcacgacugcaacaccaccugccagacccccaagggcgccaucaacaccagccugcccuuccagaacauccaccccaucaccaucggcaagugccccaaguacgugaagagcaccaagcugagacuggccaccggccugagaaacgugcccagcauccagagcagaggccuguucggcgccaucgccggcuucaucgagggcggcuggaccggcaugguggacggcugguacggcuaccaccaccagaacgagcagggcagcggcuacgccgccgaccugaagagcacccagaacgccaucgacgagaucaccaacaaggugaacagcgugaucgagaagaugaacacccaguucaccgccgugggcaaggaguucaaccaccuggagaagagaaucgagaaccugaacaagaagguggacgacggcuuccuggacaucuggaccuacaacgccgagcugcuggugcugcuggagaacgagagaacccuggacuaccacgacagcaacgugaagaaccuguacgagaaggugagaagccagcugaagaacaacgccaaggagaucggcaacggcugcuucgaguucuaccacaagugcgacaacaccugcauggagagcgugaagaacggcaccuacgacuaccccaaguacagcgaggaggccaagcugaacagagaggagaucgacggcgugaagcuggagagcaccagaaucuaccagauccuggccaucuacagcaccguggccagcagccuggugcugguggugagccugggcgccaucagcuucuggaugugcagcaacggcagccugcagugcagaaucugcaucuga

SEQ ID NO: 169264 - RNA, 1701 nt, Artificial Sequence; identical to SEQ ID NO: 163590
  derived and/or modified CDS sequence (opt4) from hemagglutinin__InfluenzaA__AFN17655

SEQ ID NO: 169265 - RNA, 1701 nt, Artificial Sequence; identical to SEQ ID NO: 163590
  derived and/or modified CDS sequence (opt4) from hemagglutinin__InfluenzaA__AFN17665

SEQ ID NO: 169266 - RNA, 1701 nt, Artificial Sequence
  derived and/or modified CDS sequence (opt4) from hemagglutinin__InfluenzaA__AFN17675
augaaggccauccugaucgugcugcuguacaccuucgccaccgccaacgccgacacccugugcaucggcuaccacgccaacaacagcaccgacaccguggacaccgugcuggagaagaacgugaccgugacccacagcgugaaccugcuggaggacaagcacaacggcaagcugugcaagcugagaggcguggccccccugcaccugggcaagugcaacaucgccggcuggauccugggcaaccccgagugcgagagccugagcaccgccagcagcuggagcuacaucguggagaccagcagcagcgacaacggcaccugcuaccccggcgacuucaucgacuacgaggagcugagagagcagcugagcagcgugagcagcuucgagagauucgagaucuuccccaagaccagcagcuggcccaaccacgacagcaacaagggcgugaccgccgccugcccccacgccggcgccaagagcuucuacaagaaccugaucuggcuggugaagaagggcaacagcuaccccaagcugagcgagagcuacaucaacgacaagggcaaggaggugcuggugcuguggggcauccaccaccccagcaccagcgccgaccagcagagccuguaccagaacgccgacgccuacguguucgugggcaccagcagauacagcaagaaguucaagcccgagaucgccaucagacccaaggugagagaccaggagggcagaaugaacuacuacuggacccugguggagcccggcgacaagaucaccuucgaggccaccggcaaccugguggugcccagauacgccuucgccauggagagaaacgccggcagcggcaucaucaucagcgacacccccgugcacgacugcaacaccaccugccagacccccaagggcgccaucaacaccagccugcccuuccagaacauccaccccaucaccaucggcaagugccccaaguacgugaagagcaccaagcugagacuggccaccggccugagaaacgugcccagcauccagagcagaggccuguucggcgccaucgccggcuucaucgagggcggcuggaccggcaugguggacggcugguacggcuaccaccaccagaacgagcagggcagcggcuacgccgccgaccugaagagcacccagaacgccaucgacgagaucaccaacaaggugaacagcgugaucgagaagaugaacacccaguucaccgccgugggcaaggaguucaaccaccuggagaagagaaucgagaaccugaacaagaagguggacgacggcuuccuggacaucuggaccuacaacgccgagcugcuggugcugcuggagaacgagagaacccuggacuaccacgacagcaacgugaagaaccuguacgagaaggugagaagccagcugaagaacaacgccaaggagaucggcaacggcugcuucgaguucuaccacaagugcgacaacaccugcauggagagcgugaagaacggcaccuacgacuaccccaaguacagcgaggaggccaagcugaacagagaggagaucgacggcgugaagcuggagagcaccagaaucuaccagauccuggccaucuacagcaccguggccagcagccuggugcugguggugagccugggcgccaucagcuucuggaugugcagcaacggcagccugcagugcagaaucugcaucuga

SEQ ID NO: 169267 - RNA, 1701 nt, Artificial Sequence
  derived and/or modified CDS sequence (opt4) from hemagglutinin__InfluenzaA__AFN17685
augaaggccauccugguggugcugcuguacaccuucgccaccgccaacgccgacacccugugcaucggcuaccacgccaacaacagcaccgacaccguggacaccauccuggagaagaacgugaccgugacccacagcgugaaccugcuggaggacaagcacaacggcaagcugugcaagcugagaggcguggccccccugcaccugggcaagugcaacaucgccggcuggauccugggcaaccccgagugcgagagccugagcaccgccagcagcuggagcuacaucguggagaccagcagcagcgacaacggcaccugcuaccccggcgacuucaucgacuacgaggagcugagagagcagcugagcagcgugagcagcuucgagagauucgagaucuuccccaagaccagcagcuggcccaaccacgacagcaacaagggcgugaccgccgccugcccccacgccggcgccaagagcuucuacaagaaccugaucuggcuggugaagaagggcaacagcuaccccaagcugagcaagagcuacaucaacgacaagggcaaggaggugcuggugcuguggggcauccaccaccccagcaccagcgccgaccagcagagccuguaccagaacgccgacgccuacguguucgugggcaccagcagauacagcaagaaguucaagcccgagaucgccaucagacccaaggugagagaccaggagggcagaaugaacuacuacuggacccugguggagcccagagacaagaucaccuucgaggccaccggcaaccugguggugcccagauacgccuucgccauggagagaaacgccggcagcggcaucaucaucagcgacacccccgugcacgacugcaacaccaccugccagacccccaagggcgccaucaacaccagccugcccuuccagaacauccaccccaucaccaucggcaagugccccaaguacgugaagagcaccaagcugagacuggccaccggccugagaaacgugcccagcauccagagcagaggccuguucggcgccaucgccggcuucaucgagggcggcuggaccggcaugguggacggcugguacggcuaccaccaccagaacgagcagggcagcggcuacgccgccgaccugaagagcacccagaacgccaucgacgagaucaccaacaaggugaacagcgugaucgagaagaugaacacccaguucaccgccgugggcaaggaguucaaccaccuggagaagagaaucgagaaccugaacaagaagguggacgacggcuuccuggacaucuggaccuacaacgccgagcugcuggugcugcuggagaacgagagaacccuggacuaccacgacagcaacgugaagaaccuguacgagaaggugagaagccagcugaagaacaacgccaaggagaucggcaacggcugcuucgaguucuaccacaagugcgacaacaccugcauggagagcgugaagaacggcaccuacgacuaccccaaguacagcgaggaggccaagcugaacagagaggagaucgacggcgugaagcuggagagcaccagaaucuaccagauccuggccaucuacagcaccguggccagcagccuggugcugguggugagccugggcgccaucagcuucuggaugugcagcaacggcagccugcagugcagaaucugcaucuga

SEQ ID NO: 169268 - RNA, 1701 nt, Artificial Sequence; identical to SEQ ID NO: 162729
  derived and/or modified CDS sequence (opt4) from hemagglutinin__InfluenzaA__AFN17695

SEQ ID NO: 169269 - RNA, 1701 nt, Artificial Sequence; identical to SEQ ID NO: 162729
  derived and/or modified CDS sequence (opt4) from hemagglutinin__InfluenzaA__AFN17705

SEQ ID NO: 169270 - RNA, 1701 nt, Artificial Sequence; identical to SEQ ID NO: 163358
  derived and/or modified CDS sequence (opt4) from hemagglutinin__InfluenzaA__AFN17715

SEQ ID NO: 169271 - RNA, 1701 nt, Artificial Sequence
  derived and/or modified CDS sequence (opt4) from hemagglutinin__InfluenzaA__AFN17725
augaaggccauccugguggugcugcuguacaccuucgccaccgccaacgccgacacccugugcaucggcuaccacgccaacaacagcaccgacaccguggacaccgugcuggagaagaacgugaccgugacccacagcgugaaccugcuggaggacaagcacaacggcaagcugugcaagcugagaggcguggccccccugcaccugggcaagugcaacaucgccggcuggauccugggcaaccccgagugcgagagccugagcaccgccagcagcuggagcuacaucguggagaccagcagcagcgacaacggcaccugcuaccccggcgacuucaucgacuacgaggagcugagagagcagcugagcagcgugagcagcuucgagagauucgagaucuuccccaagaccagcagcuggcccaaccacgacagcaacaagggcgugaccgccgccugcccccacgccggcgccaagagcuucuacaagaaccugaucuggcuggugaagaagggcaacagcuaccccaagcugagcaagagcuacaucaacgacaagggcaaggaggugcuggugcuguggggcauccaccaccccagcaccagcgccgaccagcagagccuguaccagaacgccgacgccuacguguucgugggcaccagcagauacagcaagaaguucaagcccgagaucgccaucagaccccaggugagagaccaggagggcagaaugaacuacuacuggacccugguggagcccggcgacaagaucaccuucgaggccaccggcaaccugguggugcccagauacgccuucgccauggagagaaacgccggcagcggcaucaucaucagcgacacccccgugcacgacugcaacaccaccugccagacccccaagggcgccaucaacaccagccugcccuuccagaacauccaccccaucaccaucggcaagugccccaaguacgugaagagcaccaagcugagacuggccaccggccugagaaacgugcccagcauccagagcagaggccuguucggcgccaucgccggcuucaucgagggcggcuggaccggcaugguggacggcugguacggcuaccaccaccagaacgagcagggcagcggcuacgccgccgaccugaagagcacccagaacgccaucgacgagaucaccaacaaggugaacagcgugaucgagaagaugaacacccaguucaccgccgugggcaaggaguucaaccaccuggagaagagaaucgagaaccugaacaagaagguggacgacggcuuccuggacaucuggaccuacaacgccgagcugcuggugcugcuggagaacgagagaacccuggacuaccacgacagcaacgugaagaaccuguacgagaaggugagaagccagcugaagaacaacgccaaggagaucggcaacggcugcuucgaguucuaccacaagugcgacaacaccugcauggagagcgugaagaacggcaccuacgacuaccccaaguacagcgaggaggccaagcugaacagagaggagaucgacggcgugaagcuggagagcaccagaaucuaccagauccuggccaucuacagcaccguggccagcagccuggugcugguggugagccugggcgccaucagcuucuggaugugcagcaacggcagccugcagugcagaaucugcaucuga

SEQ ID NO: 169272 - RNA, 1701 nt, Artificial Sequence; identical to SEQ ID NO: 162729
  derived and/or modified CDS sequence (opt4) from hemagglutinin__InfluenzaA__AFN17735

SEQ ID NO: 169273 - RNA, 1701 nt, Artificial Sequence; identical to SEQ ID NO: 162729
  derived and/or modified CDS sequence (opt4) from hemagglutinin__InfluenzaA__AFN17742

SEQ ID NO: 169274 - RNA, 1701 nt, Artificial Sequence; identical to SEQ ID NO: 162729
  derived and/or modified CDS sequence (opt4) from hemagglutinin__InfluenzaA__AFN17748

SEQ ID NO: 169275 - RNA, 1701 nt, Artificial Sequence; identical to SEQ ID NO: 162729
  derived and/or modified CDS sequence (opt4) from hemagglutinin__InfluenzaA__AFN17757

SEQ ID NO: 169276 - RNA, 1701 nt, Artificial Sequence; identical to SEQ ID NO: 163358
  derived and/or modified CDS sequence (opt4) from hemagglutinin__InfluenzaA__AFN17767

SEQ ID NO: 169277 - RNA, 1701 nt, Artificial Sequence; identical to SEQ ID NO: 167739
  derived and/or modified CDS sequence (opt4) from hemagglutinin__InfluenzaA__AFN17774

SEQ ID NO: 169278 - RNA, 1701 nt, Artificial Sequence; identical to SEQ ID NO: 162729
  derived and/or modified CDS sequence (opt4) from hemagglutinin__InfluenzaA__AFN17783

SEQ ID NO: 169279 - RNA, 1701 nt, Artificial Sequence; identical to SEQ ID NO: 163358
  derived and/or modified CDS sequence (opt4) from hemagglutinin__InfluenzaA__AFN17793

SEQ ID NO: 169280 - RNA, 1701 nt, Artificial Sequence; identical to SEQ ID NO: 162729
  derived and/or modified CDS sequence (opt4) from hemagglutinin__InfluenzaA__AFN17803

SEQ ID NO: 169281 - RNA, 1701 nt, Artificial Sequence; identical to SEQ ID NO: 162729
  derived and/or modified CDS sequence (opt4) from hemagglutinin__InfluenzaA__AFN17813

SEQ ID NO: 169282 - RNA, 1701 nt, Artificial Sequence
  derived and/or modified CDS sequence (opt4) from hemagglutinin__InfluenzaA__AFN17823
augaaggccauccugguggugcugcuguacaccuucgccaccgccaacgccgacacccugugcaucggcuaccacgccaacaacagcaccgacaccguggacaccgugcuggagaagaacgugaccgugacccacagcgugaaccugcuggaggacaagcacaacggcaagcugugcaagcugagaggcguggccccccugcaccugggcaagugcaacaucgccggcuggauccugggcaaccccgagugcgagagccugagcaccgccagcagcuggagcuacaucguggagaccagcagcagcgacaacggcaccugcuaccccggcgacuucaucgacuacgaggagcugagagagcagcugagcagcgugagcagcuucgagagauucgagaucuuccccaagaccagcagcuggcccaaccacgacagcaacaagggcgugaccgccgccugcccccacgccggcgccaagagcuucuacaagaaccugaucuggcuggugaagaagggcaacagcuaccccaagcugagcgagagcuacaucaacgacaagggcaaggaggugcuggugcuguggggcauccaccaccccagcaccagcgccgaccagcagagccuguaccagaacgccgacgccuacguguucgugggcaccagcagauacagcaagaaguucaagcccgagaucgccaucagacccaaggugagagaccaggagggcagaaugaacuacuacuggacccugguggagcccggcgacaagaucaccuucgaggccaccggcaaccugguggugcccagauacgccuucgccauggagagaaacgccggcagcggcaucaucaucagcgacacccccgugcacgacugcaacaccaccugccagacccccaagggcgccaucaacaccagccugcccuuccagaacauccaccccaucaccaucggcaagugccccaaguacgugaagagcaccaagcugagacuggccaccggccugagaaacgugcccagcauccagagcagaggccuguucggcgccaucgccggcuucaucgagggcggcuggaccggcaugguggacggcugguacggcuaccaccaccagaacgagcagggcagcggcuacgccgccgaccugaagagcacccagaacgccaucgacgagaucaccaacaaggugaacagcgugaucgagaagaugaacacccaguucaccgccgugggcaaggaguucaaccaccuggagaagagaaucgagaaccugaacaagaagguggacgacggcuuccuggacaucuggaccuacaacgccgagcugcuggugcugcuggagaacgagagaacccuggacuaccacgacagcaacgugaagaaccuguacgagaaggugagaagccagcugaagaacaacgccaaggagaucggcaacggcugcuucgaguucuaccacaagugcgacaacaccugcauggagagcgugaagaacggcaccuacgacuaccccaaguacagcgaggaggccaagcugaacagagaggagaucgacggcgugaagcuggagagcaccagaaucuaccagauccuggccaucuacagcaccguggccagcagccuggugcugguggugagccugggcgccaucagcuucuggaugugcagcaacggcagccugcagugcagaaucugcaucuga

SEQ ID NO: 169283 - RNA, 1701 nt, Artificial Sequence
  derived and/or modified CDS sequence (opt4) from hemagglutinin__InfluenzaA__AFN17833
augaaggccauccugguggugcugcuguacaccuucgccaccgccaacgccgacacccugugcaucggcuaccacgccaacaacagcaccgacaccguggacaccgugcuggagaagaacgugaccgugacccacagcgugaaccugcuggaggacaagcacaacggcaagcugugcaagcugagaggcguggccccccugcaccugggcaagugcaacaucgccggcuggauccugggcaaccccgagugcgagagccugagcaccgccagcagcuggagcuacaucguggagaccagcagcagcgacaacggcaccugcuaccccggcgacuucaucgacuacgaggagcugagagagcagcugagcagcgugagcagcuucgagagauucgagaucuuccccaagaccagcagcuggcccaaccacgacagcaacaagggcgugaccgccgccugccccaacgccggcgccaagagcuucuacaagaaccugaucuggcuggugaagaagggcaacagcuaccccaagcugagcaagagcuacaucaacgacaagggcaaggaggugcuggugcuguggggcauccaccaccccagcaccagcgccgaccagcagagccuguaccagaacgccgacgccuacguguucgugggcaccagcagauacagcaagaaguucaagcccgagaucgccaucagacccaaggugagagaccaggagggcagaaugaacuacuacuggacccugguggagcccggcgacaagaucaccuucgaggccaccggcaaccugguggugcccagauacgccuucgccauggagagaaacgccggcagcggcaucaucaucagcgacacccccgugcacgacugcaacaccaccugccagacccccaagggcgccaucaacaccagccugcccuuccagaacauccaccccaucaccaucggcaagugccccaaguacgugaagagcaccaagcugagacuggccaccggccugagaaacgugcccagcauccagagcagaggccuguucggcgccaucgccggcuucaucgagggcggcuggaccggcaugguggacggcugguacggcuaccaccaccagaacgagcagggcagcggcuacgccgccgaccugaagagcacccagaacgccaucgacgagaucaccaacaaggugaacagcgugaucgagaagaugaacacccaguucaccgccgugggcaaggaguucaaccaccuggagaagagaaucgagaaccugaacaagaagguggacgacggcuuccuggacaucuggaccuacaacgccgagcugcuggugcugcuggagaacgagagaacccuggacuaccacgacagcaacgugaagaaccuguacgagaaggugagaagccagcugaagaacaacgccaaggagaucggcaacggcugcuucgaguucuaccacaagugcgacaacaccugcauggagagcgugaagaacggcaccuacgacuaccccaaguacagcgaggaggccaagcugaacagagaggagaucgacggcgugaagcuggagagcaccagaaucuaccagauccuggccaucuacagcaccguggccagcagccuggugcugguggugagccugggcgccaucagcuucuggaugugcagcaacggcagccugcagugcagaaucugcaucuga

SEQ ID NO: 169284 - RNA, 1701 nt, Artificial Sequence; identical to SEQ ID NO: 167238
  derived and/or modified CDS sequence (opt4) from hemagglutinin__InfluenzaA__AFN17843

SEQ ID NO: 169285 - RNA, 1701 nt, Artificial Sequence; identical to SEQ ID NO: 162729
  derived and/or modified CDS sequence (opt4) from hemagglutinin__InfluenzaA__AFN17853

SEQ ID NO: 169286 - RNA, 1701 nt, Artificial Sequence; identical to SEQ ID NO: 162971
  derived and/or modified CDS sequence (opt4) from hemagglutinin__InfluenzaA__AFN17863

SEQ ID NO: 169287 - RNA, 1701 nt, Artificial Sequence
  derived and/or modified CDS sequence (opt4) from hemagglutinin__InfluenzaA__AFN17873
augaaggccauccugguggugcugcuguacaccuucgccaccgccaacgccgacacccugugcaucggcuaccacgccaacaacagcaccgacaccguggacaccgugcuggagaagaacgugaccgugacccacagcgugaaccugcuggaggacaagcacaacggcaagcugugcaagcugagaggcguggccccccugcaccugggcaagugcaacaucgccggcuggauccugggcaaccccgagugcgagagccugagcaccgccggcagcuggagcuacaucguggagaccagcagcagcgacaacggcaccugcuaccccggcgacuucaucgacuacgaggagcugagagagcagcugagcagcgugagcagcuucgagagauucgagaucuuccccaagaccagcagcuggcccaaccacgaccugaacaagggcgugaccgccgccugcccccacgccggcgccaagagcuucuacaagaaccugaucuggcuggugaagaagggcaacagcuaccccaagcugagcaagagcuacaucaacgacaagggcaaggaggugcuggugcuguggggcauccaccaccccagcaccagcgccgaccagcagagccuguaccagaacgccgacgccuacguguucgugggcaccagcagauacagcaagaaguucaagcccgagaucgccaucagacccaaggugagagaccaggagggcagaaugaacuacuacuggacccugguggagcccggcgacaagaucaccuucgaggccaccggcaaccugguggugcccagauacgccuucgccauggagagaaacgccggcagcggcaucaucaucagcgacacccccgugcacgacugcaacaccaccugccagacccccaagggcgccaucaacaccagccugcccuuccagaacauccaccccaucaccaucggcaagugccccaaguacgugaagagcaccaagcugagacuggccaccggccugagaaacgugcccagcauccagagcagaggccuguucggcgccaucgccggcuucaucgagggcggcuggaccggcaugguggacggcugguacggcuaccaccaccagaacgagcagggcagcggcuacgccgccgaccugaagagcacccagaacgccaucgacgagaucaccaacaaggugaacagcgugaucgagaagaugaacacccaguucaccgccgugggcaaggaguucaaccaccuggagaagagaaucgagaaccugaacaagaagguggacgacggcuuccuggacaucuggaccuacaacgccgagcugcuggugcugcuggagaacgagagaacccuggacuaccacgacagcaacgugaagaaccuguacgagaaggugagaagccagcugaagaacaacgccaaggagaucggcaacggcugcuucgaguucuaccacaagugcgacaacaccugcauggagagcgugaagaacggcaccuacgacuaccccaaguacagcgaggaggccaagcugaacagagaggagaucgacggcgugaagcuggagagcaccagaaucuaccagauccuggccaucuacagcaccguggccagcagccuggugcugguggugagccugggcgccaucagcuucuggaugugcagcaacggcagccugcagugcagaaucugcaucuga

SEQ ID NO: 169288 - RNA, 1701 nt, Artificial Sequence
  derived and/or modified CDS sequence (opt4) from hemagglutinin__InfluenzaA__AFN17883
augaaggccauccugguggugcugcuguacaccuucgccaccgccaacgccgacacccugugcaucggcuaccacgccaacaacagcaccgacaccguggacaccgugcuggagaagaacgugaccgugacccacagcgugaaccugcuggaggacaagcacaacggcaagcugugcaagcugagaggcguggccccccugcaccugggcaagugcaacaucgccggcuggauccugggcaaccccgagugcgagagccugagcaccgccagcagcuggagcuacaucguggagaccagcagcagcgacaacggcaccugcuaccccggcgacuucaucgacuacgaggagcugagagagcagcugagcagcgugagcagcuucgagagauucgagaucuuccccaagaccagcagcuggcccaaccacgacagcaacaagggcgugaccgccgccugcccccacgccggcgccaagagcuucuacaagaaccugaucuggcuggugaagaagggcaacagcuaccccaagcugagcaagagcuacaucaacgacaagggcaaggaggugcuggugcuguggggcauccaccaccccagcaccagcgccgaccagcagagccuguaccagaacgccgacgccuacguguucgugggcaccagcagauacagcaagaaguucaagcccgagaucgccaucagacccaaggugagagaccaggagggcagaaugaacuacuacuggacccugguggagcccggcgacaagaucaccuucgaggccaccggcaaccugguggugcccagauacgccuucgccauggagagaaacgccggcagcggcaucaucaucagcgacacccccgugcacgacugcaacaccaccugccagacccugaagggcgccaucaacaccagccugcccuuccagaacauccaccccaucaccaucggcaagugccccaaguacgugaagagcaccaagcugagacuggccaccggccugagaaacgugcccagcauccagagcagaggccuguucggcgccaucgccggcuucaucgagggcggcuggaccggcaugguggacggcugguacggcuaccaccaccagaacgagcagggcagcggcuacgccgccgaccugaagagcacccagaacgccaucgacgagaucaccaacaaggugaacagcgugaucgagaagaugaacacccaguucaccgccgugggcaaggaguucaaccaccuggagaagagaaucgagaaccugaacaagaagguggacgacggcuuccuggacaucuggaccuacaacgccgagcugcuggugcugcuggagaacgagagaacccuggacuaccacgacagcaacgugaagaaccuguacgagaaggugagaagccagcugaagaacaacgccaaggagaucggcaacggcugcuucgaguucuaccacaagugcgacaacaccugcauggagagcgugaagaacggcaccuacgacuaccccaaguacagcgaggaggccaagcugaacagagaggagaucgacggcgugaagcuggagagcaccagaaucuaccagauccuggccaucuacagcaccguggccagcagccuggugcugguggugagccugggcgccaucagcuucuggaugugcagcaacggcagccugcagugcagaaucugcaucuga

SEQ ID NO: 169289 - RNA, 1701 nt, Artificial Sequence; identical to SEQ ID NO: 162729
  derived and/or modified CDS sequence (opt4) from hemagglutinin__InfluenzaA__AFN17893

SEQ ID NO: 169290 - RNA, 1701 nt, Artificial Sequence
  derived and/or modified CDS sequence (opt4) from hemagglutinin__InfluenzaA__AFN17903
augaaggccauccugguggugcugcuguacaccuucgccaccgccaacgccgacacccugugcaucggcuaccacgccaacaacagcaccgacaccguggacaccgugcuggagaagaacgugaccgugacccacagcgugaaccugcuggaggacaagcacaacggcaagcugugcaagcugagaggcguggccccccugcaccugggcaagugcaacaucgccggcuggauccugggcaaccccgagugcgagagccugagcaccgccagcagcuggagcuacaucguggagaccagcagcagcgacaacggcaccugcuaccccggcgacuucaucgacuacgaggagcugagagagcagcugagcagcgugagcagcuucgagagauucgagaucuuccccaagaccagcagcuggcccaaccacgagagcaacaagggcgugaccgccgccugcccccacgccggcgccaagagcuucuacaagaaccugaucuggcuggugaagaagggcaacagcuaccccaagcugagcaagagcuacgugaacgacaagggcaaggaggugcuggugcuguggggcauccaccaccccagcaccagcgccgaccagcagagccuguaccagaacgccgacgccuacguguucgugggcaccagcagauacagcaagaaguucaagcccgagaucgccaucagacccaaggugagagaccaggagggcagaaugaacuacuacuggacccugguggagcccggcgacaagaucaccuucgaggccaccggcaaccugguggugcccagauacgccuucgccauggagagaaacgccggcagcggcaucaucaucagcgacacccccgugcacgacugcaacaccaccugccagacccccaagggcgccaucaacaccagccugcccuuccagaacauccaccccaucaccaucggcaagugccccaaguacgugaagagcaccaagcugagacuggccaccggccugagaaacgugcccagcauccagagcagaggccuguucggcgccaucgccggcuucaucgagggcggcuggaccggcaugguggacggcugguacggcuaccaccaccagaacgagcagggcagcggcuacgccgccgaccugaagagcacccagaacgccaucgacgagaucaccaacaaggugaacagcgugaucgagaagaugaacacccaguucaccgccgugggcaaggaguucaaccaccuggagaagagaaucgagaaccugaacaagaagguggacgacggcuuccuggacaucuggaccuacaacgccgagcugcuggugcugcuggagaacgagagaacccuggacuaccacgacagcaacgugaagaaccuguacgagaaggugagaagccagcugaagaacaacgccaaggagaucggcaacggcugcuucgaguucuaccacaagugcgacaacaccugcauggagagcgugaagaacggcaccuacgacuaccccaaguacagcgaggaggccaagcugaacagagaggagaucgacggcgugaagcuggagagcaccagaaucuaccagauccuggccaucuacagcaccguggccagcagccuggugcugguggugagccugggcgccaucagcuucuggaugugcagcaacggcagccugcagugcagaaucugcaucuga

SEQ ID NO: 169291 - RNA, 1701 nt, Artificial Sequence; identical to SEQ ID NO: 163082
  derived and/or modified CDS sequence (opt4) from hemagglutinin__InfluenzaA__AFN17919

SEQ ID NO: 169292 - RNA, 1701 nt, Artificial Sequence; identical to SEQ ID NO: 162971
  derived and/or modified CDS sequence (opt4) from hemagglutinin__InfluenzaA__AFN17929

SEQ ID NO: 169293 - RNA, 1701 nt, Artificial Sequence; identical to SEQ ID NO: 168987
  derived and/or modified CDS sequence (opt4) from hemagglutinin__InfluenzaA__AFN17939

SEQ ID NO: 169294 - RNA, 1701 nt, Artificial Sequence; identical to SEQ ID NO: 163590
  derived and/or modified CDS sequence (opt4) from hemagglutinin__InfluenzaA__AFN17949

SEQ ID NO: 169295 - RNA, 1701 nt, Artificial Sequence
  derived and/or modified CDS sequence (opt4) from hemagglutinin__InfluenzaA__AFN17959
augaaggccauccugguggugcugcuguacaccuucgccaccgccaacgccgacacccugugcaucggcuaccacgccaacaacagcaccgacaccguggacaccgugcuggagaagaacgugaccgugacccacagcgugaaccugcuggaggacaagcacaacggcaagcugugcaagcugagaggcguggccccccugcaccugggcaagugcaacaucgccggcuggauccugggcaaccccgagugcgagagccugagcaccgccagcagcuggagcuacaucguggagaccagcagcagcgacaacggcaccugcuaccccggcgacuucaucgacuacgaggagcugagagagcagcugagcagcgugagcagcuucgagagauucgagaucuuccccaagaccagcagcuggcccaaccacgacagcaacaagggcgugaccgccgccugcccccacgccggcgccaagagcuucuacaagaaccugaucuggcuggugaagaagggcaacagcuaccccaagcugagcaagagcuacgugaacgacaagggcaaggaggugcuggugcuguggggcauccaccaccccagcaccagcgccgaccagcagagccuguaccagaacgccgacgccuacguguucgugggcaccagcagauacagcaagaaguucaagcccgagaucgccaucagacccaaggugagagaccaggagggcagaaugaacuacuacuggacccugguggagcccggcgacaagaucaccuucgaggccaccggcaaccugguggugcccagauacgccuucgccauggagagaaacgccggcagcggcaucaucaucagcgacacccccgugcacgacugcaacaccaccugccagacccccaagggcgccaucaacaccagccugcccuuccagaacauccaccccaucaccaucggcaagugccccaaguacgugaagagcaccaagcugagacuggccaccggccugagaaacgugcccagcauccagagcagaggccuguucggcgccaucgccggcuucaucgagggcggcuggaccggcaugguggacggcugguacggcuaccaccaccagaacgagcagggcagcggcuacgccgccgaccugaagagcacccagaacgccaucgacgagaucaccaacaaggugaacagcgugaucgagaagaugaacacccaguucaccgccgugggcaaggaguucaaccaccuggagaagagaaucgagaaccugaacaagaagguggacgacggcuuccuggacaucuggaccuacaacgccgagcugcuggugcugcuggagaacgagagaacccuggacuaccacgacagcaacgugaagaaccuguacgagaaggugagaagccagcugaagaacaacgccaaggagaucggcaacggcugcuucgaguucuaccacaagugcgacaacaccugcauggagagcgugaagaacggcaccuacgacuaccccaaguacagcgaggaggccaagcugaacagagaggagaucgacggcgugaagcuggagagcaccagaaucuaccagauccuggccaucuacagcaccguggccagcagccuggugcugguggugagccugggcgccaucagcuucuggaugugcagcaacggcagccugcagugcagaaucugcaucuga

SEQ ID NO: 169296 - RNA, 1701 nt, Artificial Sequence; identical to SEQ ID NO: 164411
  derived and/or modified CDS sequence (opt4) from hemagglutinin__InfluenzaA__AFN17969

SEQ ID NO: 169297 - RNA, 1701 nt, Artificial Sequence; identical to SEQ ID NO: 163590
  derived and/or modified CDS sequence (opt4) from hemagglutinin__InfluenzaA__AFN17979

SEQ ID NO: 169298 - RNA, 1701 nt, Artificial Sequence
  derived and/or modified CDS sequence (opt4) from hemagglutinin__InfluenzaA__AFN17989
augaaggccauccugguggugcugcuguacaccuucgccaccgccaacgccgacacccugugcaucggcuaccacgccaacaacagcaccgacaccguggacaccgugcuggagaagaacgugaccgugacccacagcgugaaccugcuggaggacaagcacaacggcaagcugugcaagcugagaggcguggccccccugcaccugggcaagugcaacaucgccggcuggauccugggcaaccccgagugcgagagccugagcaccgccagcagcuggagcuacaucguggagaccagcagcagcgacaacggcaccugcuaccccggcgacuucaucgacuacgaggagcugagagagcagcugagcagcgugagcagcuucgagagauucgagaucuuccccaagaccagcagcuggcccaaccacgacagcaacaagggcgugaccgccgccugcccccacgccggcgccaagagcuucuacaagaaccugaucuggcuggugaagaagggcaacagcuaccccaagcugagcaagagcuacaucaacgacaagggcaaggaggugcuggugcuguggggcauccaccaccccagcaccagcgccgaccagcagagccuguaccagaacgccgacgccuacguguucgugggcaccagcagauacagcaagaaguucaagcccgagaucgccaucagacccaaggugagagaccaggagggcagaaugaacuacuacuggacccugguggagcccggcgacaagaucaccuucgaggccaccggcaaccugguggugcccagauacgccuucgccauggagagaaacgccggcagcggcaucaucaucagcgacacccccgugcacgacugcaacaccaccugccagacccccaagggcgccaucaacaccagccugcccuuccagaacauccaccccaucaccaucggcaagugccccaaguacgugaagagcaccaagcugagacuggccaccggccugagaaacgugcccagcauccagagcagaggccuguucggcgccaucgccggcuucaucgagggcggcuggaccggcaugguggacggcugguacggcuaccaccaccagaacgagcagggcagcggcuacgccgccgaccugaagagcacccagaacgccaucgacgagaucaccaacaaggugaacagcgugaucggcaagaugaacacccaguucaccgccgugggcaaggaguucaaccaccuggagaagagaaucgagaaccugaacaagaagguggacgacggcuuccuggacaucuggaccuacaacgccgagcugcuggugcugcuggagaacgagagaacccuggacuaccacgacagcaacgugaagaaccuguacgagaaggugagaagccagcugaagaacaacgccaaggagaucggcaacggcugcuucgaguucuaccacaagugcgacaacaccugcauggagagcgugaagaacggcaccuacgacuaccccaaguacagcgaggaggccaagcugaacagagaggagaucgacggcgugaagcuggagagcaccagaaucuaccagauccuggccaucuacagcaccguggccagcagccuggugcugguggugagccugggcgccaucagcuucuggaugugcagcaacggcagccugcagugcagaaucugcaucuga

SEQ ID NO: 169299 - RNA, 1701 nt, Artificial Sequence; identical to SEQ ID NO: 162729
  derived and/or modified CDS sequence (opt4) from hemagglutinin__InfluenzaA__AFN17999

SEQ ID NO: 169300 - RNA, 1701 nt, Artificial Sequence
  derived and/or modified CDS sequence (opt4) from hemagglutinin__InfluenzaA__AFN18019
augaaggccauccugguggugcugcuguacaccuucgccaccgccaaggccgacacccugugcaucggcuaccacgccaacaacagcaccgacaccguggacaccgugcuggagaagaacgugaccgugacccacagcgugaaccugcuggaggacaagcacaacggcaagcugugcaagcugagaggcguggccccccugcaccugggcaagugcaacaucgccggcuggauccugggcaaccccgagugcgagagccugagcaccgccagcagcuggagcuacaucguggagaccagcagcagcgacaacggcaccugcuaccccggcgacuucaucgacuacgaggagcugagagagcagcugagcagcgugagcagcuucgagagauucgagauguuccccaagaccagcagcuggcccaaccacgacagcaacaagggcgugaccgccgccugcccccacgccggcgccaagagcuucuacaagaaccugaucuggcuggugaagaagggcaacagcuaccccaagcugagcaagagcuacaucaacgacaagggcaaggaggugcuggugcuguggggcauccaccaccccagcaccagcgccgaccagcagagccuguaccagaacgccgacgccuacguguucgugggcaccagcagauacagcaagaaguucaagcccgagaucgccaucagacccaaggugagagaccaggagggcagaaugaacuacuacuggacccugguggagcccggcgacaagaucaccuucgaggccaccggcaaccugguggugcccagauacgccuucgccauggagagaaacgccggcagcggcaucaucaucagcgacacccccgugcacgacugcaacaccaccugccagacccccaagggcgccaucaacaccagccugcccuuccagaacauccaccccaucaccaucggcaagugccccaaguacgugaagagcaccaagcugagacuggccaccggccugagaaacgugcccagcauccagagcagaggccuguucggcgccaucgccggcuucaucgagggcggcuggaccggcaugguggacggcugguacggcuaccaccaccagaacgagcagggcagcggcuacgccgccgaccugaagagcacccagaacgccaucgacgagaucaccaacaaggugaacagcgugaucgagaagaugaacacccaguucaccgccgugggcaaggaguucaaccaccuggagaagagaaucgagaaccugaacaagaagguggacgacggcuuccuggacaucuggaccuacaacgccgagcugcuggugcugcuggagaacgagagaacccuggacuaccacgacagcaacgugaagaaccuguacgagaaggugagaagccagcugaagaacaacgccaaggagaucggcaacggcugcuucgaguucuaccacaagugcgacaacaccugcauggagagcgugaagaacggcaccuacgacuaccccaaguacagcgaggaggccaagcugaacagagaggagaucgacggcgugaagcuggagagcaccagaaucuaccagauccuggccaucuacagcaccguggccagcagccuggugcugguggugagccugggcgccaucagcuucuggaugugcagcaacggcagccugcagugcagaaucugcaucuga

SEQ ID NO: 169301 - RNA, 1701 nt, Artificial Sequence; identical to SEQ ID NO: 163590
  derived and/or modified CDS sequence (opt4) from hemagglutinin__InfluenzaA__AFN18039

SEQ ID NO: 169302 - RNA, 1701 nt, Artificial Sequence; identical to SEQ ID NO: 162729
  derived and/or modified CDS sequence (opt4) from hemagglutinin__InfluenzaA__AFN18049

SEQ ID NO: 169303 - RNA, 1701 nt, Artificial Sequence
  derived and/or modified CDS sequence (opt4) from hemagglutinin__InfluenzaA__AFN18059
augaaggccauccugguggugcugcuguacaccuucgccaccgccaacgccgacacccugugcaucggcuaccacgccaacaacagcaccgacaccguggacaccgugcuggagaagaacgugaccgugacccacagcgugaaccugcuggaggacaagcacaacggcaagcugugcaagcugagaggcguggccccccugcaccugggcaagugcaacaucgccggcuggauccugggcaaccccgagugcgagagccugagcaccgccagcagcuggagcuacaucguggagaccagcagcagcgacaacggcaccugcuaccccggcgacuucaucgacuacgaggagcugagagagcagcugagcagcgugagcagcuucgagagauucgagaucuuccccaagaccagcagcuggcccaaccacgacagcaacaagggcgugaccgccgccugcccccacgccggcgccaagagcuucuacaagaaccugaucuggcuggugaagaagggcaacagcuaccccaagcugagcaagagcuacaucaacgacaagggcaaggaggugcuggugcuguggggcauccaccaccccagcaccagcgccgaccagcagagccuguaccagaacgccgacgccuacguguucgugggcaccagcagauacagcaagaaguucaagcccgagaucgccaucagacccaaggugagagaccaggagggcagaaugaacuacuacuggacccugguggagcccggcgacaagaucaccuucgaggccaccggcaaccugguggugcccagauacgccuucgccauggagagaaacgccggcagcggcaucaucaucagcgacacccccgugcacgacugcaacaccaccugccagacccccaagggcgccaucaacaccagccugcccuuccagaacauccaccccaucaccaucggcaagugccccaaguacgugaagagcaccaagcugagacuggccaccggccugagaaacgugcccagcauccagagcagaggccuguucggcgccaucgccggcuucaucgagggcggcuggaccggcaugguggacggcugguacggcuaccaccaccagaacgagcagggcagcggcuacgccgccgaccugaagagcacccagaacgccaucgacgagaucaccaacaaggugaacagcgugaucgagaagaugaacacccaguucaccgccgugggcaaggaguucaaccaccuggagaagagaaucgagaaccugaacaagaagguggacgacggcuuccuggacaucuggaccuacaacgccgagcugcuggugcugcuggagaacgagagaacccuggacuaccacgacagcaacgugaagaaccuguacgagaaggugagaagccagcugaagaacaacgccaaggagaucggcaacggcugcuucgaguucuaccacaagugcgacaacgccugcauggagagcgugaagaacggcaccuacgacuaccccaaguacagcgaggaggccaagcugaacagagaggagaucgacggcgugaagcuggagagcaccagaaucuaccagauccuggccaucuacagcaccguggccagcagccuggugcugguggugagccugggcgccaucagcuucuggaugugcagcaacggcagccugcagugcagaaucugcaucuga

SEQ ID NO: 169304 - RNA, 1701 nt, Artificial Sequence; identical to SEQ ID NO: 162729
  derived and/or modified CDS sequence (opt4) from hemagglutinin__InfluenzaA__AFN18078

SEQ ID NO: 169305 - RNA, 1701 nt, Artificial Sequence
  derived and/or modified CDS sequence (opt4) from hemagglutinin__InfluenzaA__AFN18088
augaaggccauccugguggugcugcuguacaccuucgccaccgccaacgccgacacccugugcaucggcuaccacgccaacaacagcaccgacaccguggacaccgugcuggagaagaacgugaccgugacccacagcgugaaccugcuggaggacaagcacaacggcaagcugugcaagcugagaggcguggccccccugcaccugggcaagugcaacaucgccggcuggauccugggcaaccccgagugcgagagccugagcaccgccagcagcuggagcuacaucguggagaccagcagcagcgacaacggcaccugcuaccccggcgacuucaucgacuacgaggagcugagagagcagcugagcagcgugagcagcuucgagagauucgagaucuuccccaagaccagcagcuggcccaaccacgacagcaacaagggcgugaccgccgccugcccccacgccggcgccaagagcuucuacaagaaccugaucuggcuggugaagaagggcaacagcuaccccaagcugagcaagagcuacaucaacgacaagggcaaggaggugcuggugcuguggggcauccaccaccccagcaccagcgccgaccagcagagccuguaccagaacgccgacaccuacguguucgugggcaccagcagauacagcaagaaguucaagcccgagaucgccaucagacccaaggugagagaccaggagggcagaaugaacuacuacuggacccugguggagcccggcgacaagaucaccuucgaggccaccggcaaccugguggugcccagauacgccuucgccauggugagaaacgccggcagcggcaucaucaucagcgacacccccgugcacgacugcaacaccaccugccagacccccaagggcgccaucaacaccagccugcccuuccagaacauccaccccaucaccaucggcaagugccccaaguacgugaagagcaccaagcugagacuggccaccggccugagaaacgugcccagcauccagagcagaggccuguucggcgccaucgccggcuucaucgagggcggcuggaccggcaugguggacggcugguacggcuaccaccaccagaacgagcagggcagcggcuacgccgccgaccugaagagcacccagaacgccaucgacgagaucaccaacaaggugaacagcgugaucgagaagaugaacacccaguucaccgccgugggcaaggaguucaaccaccuggagaagagaaucgagaaccugaacaagaagguggacgacggcuuccuggacaucuggaccuacaacgccgagcugcuggugcugcuggagaacgagagaacccuggacuaccacgacagcaacgugaagaaccuguacgagaaggugagaagccagcugaagaacaacgccaaggagaucggcaacggcugcuucgaguucuaccacaagugcgacaacaccugcauggagagcgugaagaacggcaccuacgacuaccccaaguacagcgaggaggccaagcugaacagagaggagaucgacggcgugaagcuggagagcaccagaaucuaccagauccuggccaucuacagcaccguggccagcagccuggugcugguggugagccugggcgccaucagcuucuggaugugcagcaacggcagccugcagugcagaaucugcaucuga

SEQ ID NO: 169306 - RNA, 1701 nt, Artificial Sequence
  derived and/or modified CDS sequence (opt4) from hemagglutinin__InfluenzaA__AFN18098
augaaggccauccugguggugcugcuguacaccuucgccaccgccaacgccgacacccugugcaucggcuaccacgccaacaacagcaccgacaccguggacaccgugcuggagaagaacgugaccgugacccacagcgugaaccugcuggaggacaagcacaacggcaagcugugcaagcugagaggcaucgccccccugcaccugggcaagugcaacaucgccggcuggauccugggcaaccccgagugcgagagccugagcaccgccagcagcuggagcuacaucguggagaccagcagcagcgacaacggcaccugcuaccccggcaacuucaucgacuacgaggagcugagagagcagcugagcagcgugagcagcuucgagagauucgagaucuuccccaagaccagcagcuggcccaaccacgacagcaacaagggcgugaccgccgccugcccccacgccggcgccaagagcuucuacaagaaccugaucuggcuggugaagaagggcaacagcuaccccaagcugagcaagagcuacaucaacgacaagggcaaggaggugcuggugcuguggggcauccaccaccccagcaccagcgccgaccagcagagccuguaccagaacgccgacgccuacguguucgugggcaccagcagauacagcaagaaguucaagcccgagaucgccaucagacccaaggugagagaccaggagggcagaaugaacuacuacuggacccugguggagcccggcgacaagaucaccuucgaggccaccggcaaccugguggugcccagauacgccuucgccguggagagaaacgccggcagcggcaucaucaucagcgacacccccgugcacgacugcaacaccaccugccagacccccaagggcgccaucaacaccagccugcccuuccagaacauccaccccaucaccaucggcaagugccccaaguacgugaagagcaccaagcugagacuggccaccggccugagaaacgugcccagcauccagagcagaggccuguucggcgccaucgccggcuucaucgagggcggcuggaccggcaugguggacggcugguacggcuaccaccaccagaacgagcagggcagcggcuacgccgccgaccugaagagcacccagaacgccaucgacgagaucaccaacaaggugaacagcgugaucgagaagaugaacacccaguucaccgccgugggcaaggaguucaaccaccuggagaagagaaucgagaaccugaacaagaagguggacgacggcuuccuggacaucuggaccuacaacgccgagcugcuggugcugcuggagaacgagagaacccuggacuaccacgacagcaacgugaagaaccuguacgagaaggugagaagccagcugaagaacaacgccaaggagaucggcaacggcugcuucgaguucuaccacaagugcgacaacaccugcauggagagcgugaagaacggcaccuacgacuaccccaaguacagcgaggaggccaagcugaacagagaggagaucgacggcgugaagcuggagagcaccagaaucuaccagauccuggccaucuacagcaccguggccagcagccuggugcugguggugagccugggcgccaucagcuucuggaugugcagcaacggcagccugcagugcagaaucugcaucuga

SEQ ID NO: 169307 - RNA, 1701 nt, Artificial Sequence
  derived and/or modified CDS sequence (opt4) from hemagglutinin__InfluenzaA__AFN18105
augaaggccauccugaucgugcugcuguacaccuucgccaccgccaacgccgacacccugugcaucggcuaccacgccaacaacagcaccgacaccguggacaccgugcuggagaagaacgugaccgugacccacagcgugaaccugcuggaggacaagcacaacggcaagcugugcaagcugagaggcguggccccccugcaccugggcaagugcaacaucgccggcuggauccugggcaaccccgagugcgagagccugagcaccgccagcagcuggagcuacaucguggagaccagcagcagcgacaacggcaccugcuaccccggcgacuucaucgacuacgaggagcugagagagcagcugagcagcgugagcagcuucgagagauucgagaucuuccccaagaccagcagcuggcccaaccacgacagcaacaagggcgugaccgccgccugcccccacgccggcgccaagagcuucuacaagaaccugaucuggcuggugaagaagggcaacagcuaccccaagcugagcaagagcuacaucaacgacaagggcaaggaggugcuggugcuguggggcauccaccaccccagcaccagcgccgaccagcagagccuguaccagaacgccgacgccuacguguucgugggcaccagcagauacagcaagaaguucaagcccgagaucgccaucagacccaaggugagagaccaggagggcagaaugaacuacuacuggacccugguggagcccggcgacaagaucaccuucgaggccaccggcaaccugguggugcccagauacgccuucgccauggagagaaacgccggcagcggcaucaucaucagcgacacccccgugcacgacugcaacaccaacugccagacccccaagggcgccaucaacaccagccugcccuuccagaacauccaccccaucaccaucggcaagugccccaaguacgugaagagcaccaagcugagacuggccaccggccugagaaacgugcccagcauccagagcagaggccuguucggcgccaucgccggcuucaucgagggcggcuggaccggcaugguggacggcugguacggcuaccaccaccagaacgagcagggcagcggcuacgccgccgaccugaagagcacccagaacgccaucgacgagaucaccaacaaggugaacagcgugaucgagaagaugaacacccaguucaccgccgugggcaaggaguucaaccaccuggagaagagaaucgagaaccugaacaagaagguggacgacggcuuccuggacaucuggaccuacaacgccgagcugcuggugcugcuggagaacgagagaacccuggacuaccacgacagcaacgugaagaaccuguacgagaaggugagaagccagcugaagaacaacgccaaggagaucggcaacggcugcuucgaguucuaccacaagugcgacaacaccugcauggagagcgugaagaacggcaccuacgacuaccccaaguacagcgaggaggccaagcugaacagagaggagaucgacggcgugaagcuggagagcaccagaaucuaccagauccuggccaucuacagcaccguggccagcagccuggugcugguggugagccugggcgccaucagcuucuggaugugcagcaacggcagccugcagugcagaaucugcaucuga

SEQ ID NO: 169308 - RNA, 1701 nt, Artificial Sequence; identical to SEQ ID NO: 162971
  derived and/or modified CDS sequence (opt4) from hemagglutinin__InfluenzaA__AFN18107

SEQ ID NO: 169309 - RNA, 1701 nt, Artificial Sequence; identical to SEQ ID NO: 169303
  derived and/or modified CDS sequence (opt4) from hemagglutinin__InfluenzaA__AFN18117

SEQ ID NO: 169310 - RNA, 1701 nt, Artificial Sequence; identical to SEQ ID NO: 162729
  derived and/or modified CDS sequence (opt4) from hemagglutinin__InfluenzaA__AFN18119

SEQ ID NO: 169311 - RNA, 1701 nt, Artificial Sequence
  derived and/or modified CDS sequence (opt4) from hemagglutinin__InfluenzaA__AFN18121
augaaggccauccugguggugcugcuguacaccuucgccaccgccaacgccgacacccugugcaucggcuaccacgccaacaacagcaccgacaccguggacaccgugcuggagaagaacgugaccgugacccacagcgugaaccugcuggaggacaagcacaacggcaagcugugcaagcugagaggcguggccccccugcaccugggcaagugcaacaucgccggcuggauccugggcaaccccgagugcgagagccugagcaccgccagcagcuggagcuacaucguggagaccagcagcagcgacaacggcaccugcuaccccggcgacuucaucgacuacgaggagcugagagagcagcugagcagcgugagcagcuucgagagauucgagaucuuccccaagaccagcagcuggcccaaccacgacagcaacaagggcgugaccgccgccugcccccacgccggcgccagaagcuucuacaagaaccugaucuggcuggugaagaagggcaacagcuaccccaagcugagcaagagcuacaucaacgacaagggcaaggaggugcuggugcuguggggcauccaccaccccagcaccagcgccgaccagcagagccuguaccagaacgccgacgccuacguguucgugggcaccagcagauacagcaagaaguucaagcccgagaucgccaucagacccaaggugagagaccaggagggcagaaugaacuacuacuggacccugguggagcccggcgacaagaucaccuucgaggccaccggcaaccugguggugcccagauacgccuucgccauggugagaaacgccggcagcggcaucaucaucagcgacacccccgugcacgacugcaacaccaccugccagacccccaagggcgccaucaacaccagccugcccuuccagaacauccaccccaucaccaucggcaagugccccaaguacgugaagagcaccaagcugagacuggccaccggccugagaaacgugcccagcauccagagcagaggccuguucggcgccaucgccggcuucaucgagggcggcuggaccggcaugguggacggcugguacggcuaccaccaccagaacgagcagggcagcggcuacgccgccgaccugaagagcacccagaacgccaucgacgagaucaccaacaaggugaacagcgugaucgagaagaugaacacccaguucaccgccgugggcaaggaguucaaccaccuggagaagagaaucgagaaccugaacaagaagguggacgacggcuuccuggacaucuggaccuacaacgccgagcugcuggugcugcuggagaacgagagaacccuggacuaccacgacagcaacgugaagaaccuguacgagaaggugagaagccagcugaagaacaacgccaaggagaucggcaacggcugcuucgaguucuaccacaagugcgacaacaccugcauggagagcgugaagaacggcaccuacgacuaccccaaguacagcgaggaggccaagcugaacagagaggagaucgacggcgugaagcuggagagcaccagaaucuaccagauccuggccaucuacagcaccguggccagcagccuggugcugguggugagccugggcgccaucagcuucuggaugugcagcaacggcagccugcagugcagaaucugcaucuga

SEQ ID NO: 169312 - RNA, 1701 nt, Artificial Sequence; identical to SEQ ID NO: 169303
  derived and/or modified CDS sequence (opt4) from hemagglutinin__InfluenzaA__AFN18133

SEQ ID NO: 169313 - RNA, 1701 nt, Artificial Sequence; identical to SEQ ID NO: 168987
  derived and/or modified CDS sequence (opt4) from hemagglutinin__InfluenzaA__AFN18135

SEQ ID NO: 169314 - RNA, 1701 nt, Artificial Sequence; identical to SEQ ID NO: 163571
  derived and/or modified CDS sequence (opt4) from hemagglutinin__InfluenzaA__AFN18137

SEQ ID NO: 169315 - RNA, 1701 nt, Artificial Sequence
  derived and/or modified CDS sequence (opt4) from hemagglutinin__InfluenzaA__AFN18139
auggaggccauccugguggugcugcuguacaccuucgccaccgccaacgccgacacccugugcaucggcuaccacgccaacaacagcaccgacaccguggacaccgugcuggagaagaacgugaccgugacccacagcgugaaccugcuggaggacaagcacaacggcaagcugugcaagcugagaggcguggccccccugcaccugggcaagugcaacaucgccggcuggauccugggcaaccccgagugcgagagccugagcaccgccagcagcuggagcuacaucguggagaccagcagcagcgacaacggcaccugcuaccccggcgacuucaucgacuacgaggagcugagagagcagcugagcagcgugagcagcuucgagagauucgagaucuuccccaagaccagcagcuggcccaaccacgacagcaacaagggcgugaccgccgccugcccccacgccggcgccaagagcuucuacaagaaccugaucuggcuggugaagaagggcaacagcuaccccaagcugagcaagagcuacaucaacgacaagggcaaggaggugcuggugcuguggggcauccaccaccccagcaccagcgccgaccagcagggccuguaccagaacgccgacgccuacguguucgugggcagcagcagauacagcaagaaguucaagcccgagaucgccaucagacccaaggugagagaccaggagggcagaaugaacuacuacuggacccugguggagcccggcgacaagaucaccuucgaggccaccggcaaccugguggugcccagauacgccuucgccauggagagaaacgccggcagcggcaucaucaucagcgacacccccgugcacgacugcaacaccaccugccagacccccaagggcgccaucaacaccagccugcccuuccacaacauccaccccaucaccaucggcaagugccccaaguacgugaagagcaccaagcugagacuggccaccggccugagaaacgugcccagcauccagagcagaggccuguucggcgccaucgccggcuucaucgagggcggcuggaccggcaugguggacggcugguacggcuaccaccaccagaacgagcagggcagcggcuacgccgccgaccugaagagcacccagaacgccaucgacgagaucaccaacaaggugaacagcgugaucgagaagaugaacacccaguucaccgccgugggcaaggaguucaaccaccuggagaagagaaucgagaaccugaacaagaagguggacgacggcuuccuggacaucuggaccuacaacgccgagcugcuggugcugcuggagaacgagagaacccuggacuaccacgacagcaacgugaagaaccuguacgagaaggugagaagccagcugaagaacaacgccaaggagaucggcaacggcugcuucgaguucuaccacaagugcgacaacaccugcauggagagcgugaagaacggcaccuacgacuaccccaaguacagcgaggaggccaagcugaacagagaggagaucgacggcgugaagcuggagagcaccagaaucuaccagauccuggccaucuacagcaccguggccagcagccuggugcugguggugagccugggcgccaucagcuucuggaugugcagcaacggcagccugcagugcagaaucugcaucuga

SEQ ID NO: 169316 - RNA, 1701 nt, Artificial Sequence; identical to SEQ ID NO: 169311
  derived and/or modified CDS sequence (opt4) from hemagglutinin__InfluenzaA__AFN18141

SEQ ID NO: 169317 - RNA, 1701 nt, Artificial Sequence; identical to SEQ ID NO: 163590
  derived and/or modified CDS sequence (opt4) from hemagglutinin__InfluenzaA__AFN18148

SEQ ID NO: 169318 - RNA, 1701 nt, Artificial Sequence; identical to SEQ ID NO: 163893
  derived and/or modified CDS sequence (opt4) from hemagglutinin__InfluenzaA__AFN18155

SEQ ID NO: 169319 - RNA, 1701 nt, Artificial Sequence
  derived and/or modified CDS sequence (opt4) from hemagglutinin__InfluenzaA__AFN18157
augaaggccauccugguggugcugcuguacaccuucgccaccgccaacgccgacacccugugcaucggcuaccacgccaacaacagcaccgacaccguggacaccgugcuggagaagaacgugaccgugacccacagcgugaaccugcuggaggacaagcacaacggcaagcugugcaagcugagaggcguggccccccugcaccugggcaagugcaacaucgccggcuggauccugggcaaccccgagugcgagagccugagcaccgccagcagcuggagcuacaucguggagaccagcagcagcggcaacggcaccugcuaccccggcgacuucaucgacuacgaggagcugagagagcagcugagcagcgugagcagcuucgagagauucgagaucuuccccaagaccagcagcuggcccaaccacgacagcaacaagggcgugaccgccgccugcccccacgccggcgccaagagcuucuacaagaaccugaucuggcuggugaagaagggcaacagcuaccccaagcugagcaagagcuacaucaacgacaagggcaaggaggugcuggugcuguggggcauccaccaccccagcaccagcgccgaccagcagagccuguaccagaacgccgacgccuacgccuucgugggcaccagcagauacagcaagaaguucaagcccgagaucgccaucagacccaaggugagagaccaggagggcagaaugaacuacuacuggacccugguggagcccggcgacaagaucaccuucgaggccaccggcaaccugguggugcccagauacgccuucgccauggagagaaacgccggcagcggcaucaucaucagcgacacccccgugcacgacugcaacaccaccugccagacccccaagggcgccaucaacaccagccugcccuuccagaacauccaccccaucaccaucggcaagugccccaaguacgugaagagcaccaagcugagacuggccaccggccugagaaacgugcccagcauccagagcagaggccuguucggcgccaucgccggcuucaucgagggcggcuggaccggcaugguggacggcugguacggcuaccaccaccagaacgagcagggcagcggcuacgccgccgaccugaagagcacccagaacgccaucgacgagaucaccaacaaggugaacagcgugaucgagaagaugaacacccaguucaccgccgugggcaaggaguucaaccaccuggagaagagaaucgagaaccugaacaagaagguggacgacggcuuccuggacaucuggaccuacaacgccgagcugcuggugcugcuggagaacgagagaacccuggacuaccacgacagcaacgugaagaaccuguacgagaaggugagaagccagcugaagaacaacgccaaggagaucggcaacggcugcuucgaguucuaccacaagugcgacaacaccugcauggagagcgugaagaacggcaccuacgacuaccccaaguacagcgaggaggccaagcugaacagagaggagaucgacggcgugaagcuggagagcaccagaaucuaccagauccuggccaucuacagcaccguggccagcagccuggugcugguggugagccugggcgccaucagcuucuggaugugcagcaacggcagccugcagugcagaaucugcaucuga

SEQ ID NO: 169320 - RNA, 1701 nt, Artificial Sequence
  derived and/or modified CDS sequence (opt4) from hemagglutinin__InfluenzaA__AFN18159
auggaggccauccugguggugcugcuguacaccuucgccaccgccaacgccgacacccugugcaucggcuaccacgccaacaacagcaccgacaccguggacaccgugcuggagaagaacgugaccgugacccacagcgugaaccugcuggaggacaagcacaacggcaagcugugcaagcugagaggcguggccccccugcaccugggcaagugcaacaucgccggcuggauccugggcaaccccgagugcgagagccugagcaccgccagcagcuggagcuacaucguggagaccagcagcagcgacaacggcaccugcuaccccggcgacuucaucgacuacgaggagcugagagagcagcugagcagcgugagcagcuucgagagauucgagaucuuccccaagaccagcagcuggcccaaccacgacagcaacaagggcgugaccgccgccugcccccacgccggcagcaagagcuucuacaagaaccugaucuggcuggugaagaagggcaacagcuaccccaagcugagcaagagcuacaucaacgacaagggcaaggaggugcuggugcuguggggcauccaccaccccagcaccagcgccgaccagcagagccuguaccagaacgccgacgccuacguguucgugggcagcagcagauacagcaagaaguucaagcccgagaucgccaucagacccaaggugagagaccaggagggcagaaugaacuacuacuggacccugguggagcccggcgacaagaucaccuucgaggccaccggcaaccugguggugcccagauacgccuucgccauggagagaaacgccggcagcggcaucaucaucagcgacacccccgugcacgacugcaacaccaccugccagacccccaagggcgccaucaacaccagccugcccuuccacaacauccaccccaucaccaucggcaagugccccaaguacgugaagagcaccaagcugagacuggccaccggccugagaaacgugcccagcauccagagcagaggccuguucggcgccaucgccggcuucaucgagggcggcuggaccggcaugguggacggcugguacggcuaccaccaccagaacgagcagggcagcggcuacgccgccgaccugaagagcacccagaacgccaucgacgagaucaccaacaaggugaacagcgugaucgagaagaugaacacccaguucaccgccgugggcaaggaguucaaccaccuggagaagagaaucgagaaccugaacaagaagguggacgacggcuuccuggacaucuggaccuacaacgccgagcugcuggugcugcuggagaacgagagaacccuggacuaccacgacagcaacgugaagaaccuguacgagaaggugagaaaccagcugaagaacaacgccaaggagaucggcaacggcugcuucgaguucuaccacaagugcgacaacaccugcauggagagcgugaagaacggcaccuacgacuaccccaaguacagcgaggaggccaagcugaacagagaggagaucgacggcgugaagcuggagagcaccagaaucuaccagauccuggccaucuacagcaccguggccagcagccuggugcugguggugagccugggcgccaucagcuucuggaugugcagcaacggcagccugcagugcagaaucugcaucuga

SEQ ID NO: 169321 - RNA, 1701 nt, Artificial Sequence
  derived and/or modified CDS sequence (opt4) from hemagglutinin__InfluenzaA__AFN18164
augaaggccauccugguggugcugcuguacaccuucgccaccaccaacgccgacacccugugcaucggcuaccacgccaacaacagcaccgacaccguggacaccgugcuggagaagaacgugaccgugacccacagcgugaaccugcuggaggacaagcacaacggcaagcugugcaagcugagaggcguggccccccugcaccugggcaagugcaacaucgccggcuggauccugggcaaccccgagugcgagagccugagcaccgccagcagcuggagcuacaucguggagaccagcagcagcgacaacggcaccugcuaccccggcgacuucaucgacuacgaggagcugagagagcagcugagcagcgugagcagcuucgagagauucgagaucuuccccaagaccagcagcuggcccaaccacgacagcaacaagggcgugaccgccgccugcccccacgccggcgccaagagcuucuacaagaaccugaucuggcuggugaagaagggcaacagcuaccccaagcugagcaagagcuacaucaacgacaagggcaaggaggugcuggugcuguggggcauccaccaccccagcaccagcgccgaccagcagagccuguaccagaacgccgacgccuacguguucgugggcaccagcagauacagcaagaaguucaagcccgagaucgccaucagacccaaggugagagaccaggagggcagaaugaacuacuacuggacccugguggagcccggcgacaagaucaccuucgaggccaccggcaaccugaucgugcccagauacgccuucgccauggagagaaacgccggcagcggcaucaucaucagcaacacccccgugcacgacugcaacaccaccugccagacccccaagggcgccaucaacaccagccugcccuuccagaacauccaccccaucaccaucggcaagugccccaaguacgugaagagcaccaagcugagacuggccaccggccugagaaacgugcccagcauccagagcagaggccuguucggcgccaucgccggcuucaucgagggcggcuggaccggcaugguggacggcugguacggcuaccaccaccagaacgagcagggcagcggcuacgccgccgaccugaagagcacccagaacgccaucgacaagaucaccaacaaggugaacagcgugaucgagaagaugaacacccaguucaccgccgugggcaaggagcugaaccaccuggagaagagaaucgagaaccugaacaagaagguggacgacggcuuccuggacaucuggaccuacaacgccgagcugcuggugcugcuggagaacgagagaacccuggacuaccacgacagcaacgugaagaaccuguacgagaaggugagaagccagcugaagaacaacgccaaggagaucggcaacggcugcuucgaguucuaccacaagugcgacaacaccugcauggagagcgugaagaacggcaccuacgacuaccccaaguacagcgaggaggccaagcugaacagagaggagaucgacggcgugaagcuggagagcaccagaaucuaccagauccuggccguguacagcaccguggccagcagccuggugcugguggugagccugggcgccaucagcuucuggaugugcagcaacggcagccugcagugcagaaucugcaucuga

SEQ ID NO: 169322 - RNA, 1701 nt, Artificial Sequence
  derived and/or modified CDS sequence (opt4) from hemagglutinin__InfluenzaA__AFN18171
augaaggccauccugguggugcugcuguacaccuucgccaccgccaacgccgacacccugugcaucggcuaccacgccaacaacagcaccgacaccguggacaccgugcuggagaagaacgugaccgugacccacagcgugaaccugcuggaggacaagcacagcggcaagcugugcaagcugagaggcguggccccccugcaccugggcaagugcaacaucgccggcuggauccugggcaaccccgagugcgagagccugagcaccgccagcagcuggagcuacaucguggagaccagcagcagcgacaacggcaagugcuaccccggcgacuucaucgacuacgaggagcugagagagcagcugagcagcgugagcagcuucgagagauucgagaucuuccccaagaccagcagcuggcccaaccacgacagcaacaagggcgugaccgccgccugcccccacgccggcgccaagagcuucuacaagaaccugaucuggcuggugaagaagggcaacagcuaccccaagcugagcaagagcuacaucaacgacaagggcaaggaggugcuggugcuguggggcauccaccaccccagcaccagcgccgaccagcagagccuguaccagaacgccgacgccuacguguucgugggcaccagcaaguacagcaagaaguucaagcccgagaucgccaucagacccaaggugagagaccaggagggcagaaugaacuacuacuggacccugguggagcccggcgacaagaucaccuucgaggccaccggcaaccugguggugcccagauacgccuucgccauggagagaaacgccggcagcggcaucaucaucagcgacacccccgugaaggacugcaacaccaccugccagacccccaagggcgccaucaacaccagccugcccuuccagaacauccaccccaucaccaucggcaagugccccaaguacgugaagagcaccaagcugagacuggccaccggccugagaaacgugcccagcauccagagcagaggccuguucggcgccaucgccggcuucaucgagggcggcuggaccggcaugguggacggcugguacggcuaccaccaccagaacgagcagggcagcggcuacgccgccgaccugaagagcacccagaacgccaucgacgagaucaccaacaaggugaacagcgugaucgagaagaugaacacccaguucaccgccgugggcaaggaguucaaccaccuggagaagagaaucgagaaccugaacaagaagguggacgacggcuuccuggacaucuggaccuacaacgccgagcugcuggugcugcuggagaacgagagaacccuggacuaccacgacagcaacgugaagaaccuguacgagaaggugagaagccagcugaagaacaacgccaaggagaucggcaacggcugcuucgaguucuaccacaagugcgacaacaccugcauggagagcgugaagaacggcaccuacgacuaccccaaguacagcgaggaggccaagcugaacagagaggagaucgacggcgugaagcuggagagcaccagaaucuaccagauccuggccaucuacagcaccguggccagcagccuggugcugguggugagccugggcgccaucagcuucuggaugugcagcaacggcagccugcagugcagaaucugcaucuga

SEQ ID NO: 169323 - RNA, 1701 nt, Artificial Sequence
  derived and/or modified CDS sequence (opt4) from hemagglutinin__InfluenzaA__AFN18176
augaaggccauccugguggugcugcuguacaccuucgccaccgccaacgccgacacccugugcaucggcuaccacgccaacaacagcaccgacaccguggacaccgugcuggagaagaacgugaccgugacccacagcgugaaccugcuggaggacaagcacaacggcaagcugugcaagcugagaggcguggccccccugcaccugggcaagugcaacaucgccggcuggauccugggcaaccccgagugcgagagccugagcaccgccagcagcuggagcuacaucguggagaccagcagcagcgacaacggcaccugcuaccccggcgacuucaucgacuacgaggagcugagagagcagcugagcagcgugagcagcuucgagagauucgagaucuuccccaagaccagcagcuggcccaaccacgacagcaacaagggcgugaccgccgccugcccccacgccggcgccaagagcuucuacaagaaccugaucuggcuggugaagaagggcaacagcuaccccaagcugagcaagagcuacaucaacgacaagggcaaggaggugcuggugcuguggggcauccaccaccccagcaccagcgccgaccagcagagccuguaccagaacgccgacgccuacguguucgugggcaccagcagauacagcaagaaguucaagcccgagaucgccaucagacccaaggugagagaccaggagggcagaaugaacuacuacuggacccugguggagcccggcgacaagaucaccuucgaggccaccggcaaccugcuggugcccagauacgccuucgccauggagagaaacgccggcagcggcaucaucaucagcgacacccccgugcacgacugcaacaccaccugccagacccccaagggcgccaucaacaccagccugcccuuccagaacauccaccccaucaccaucggcaagugccccaaguacgugaagagcaccaagcugagacuggccaccggccugagaaacauccccagcauccagagcagaggccuguucggcgccaucgccggcuucaucgagggcggcuggaccggcaugguggacggcugguacggcuaccaccaccagaacgagcagggcagcggcuacgccgccgaccugaagagcacccagaacgccaucgacgagaucaccaacaaggugaacagcgugaucgagaagaugaacacccaguucaccgccgugggcaaggaguucaaccaccuggagaagagaaucgagaaccugaacaagaagguggacgacggcuuccuggacaucuggaccuacaacgccgagcugcuggugcugcuggagaacgagagaacccuggacuaccacgacagcaacgugaagaaccuguacgagaaggugagaagccagcugaagaacaacgccaaggagaucggcaacggcugcuucgaguucuaccacaagugcgacaacaccugcauggagagcgugaagaacggcaccuacgacuaccccaaguacagcgaggaggccaagcugaacagagaggagaucgacggcgugaagcuggagagcaccagaaucuaccagauccuggccaucuacagcaccguggccagcagccuggugcugguggugagccugggcgccaucagcuucuggaugugcagcaacggcagccugcagugcagaaucugcaucuga

SEQ ID NO: 169324 - RNA, 1701 nt, Artificial Sequence
  derived and/or modified CDS sequence (opt4) from hemagglutinin__InfluenzaA__AFN18183
augaaggccauccugguggugcugcuguacaccuucgccaccgccaacgccgacacccugugcaucggcuaccacgccaacaacagcaccgacaccguggacaccauccuggagaagaacgugaccgugacccacagcgugaaccugcuggaggacaagcacaacggcaagcugugcaagcugagaggcguggccccccugcaccugggcaagugcaacaucgccggcuggauccugggcaaccccgagugcgagagccugagcaccgccagcagcuggagcuacaucguggagaccagcagcagcgacaacggcaccugcuaccccggcgacuucaucgacuacgaggagcugagagagcagcugagcagcgugagcagcuucgagagauucgagaucuuccccaagaccagcagcuggcccaaccacgacagcaacaagggcgugaccgccgccugcccccacgccggcgccaagagcuucuacaagaaccugaucuggcuggugaagaagggcaacagcuaccccaagcugagcaagagcuacaucaacgacaagggcaaggaggugcuggugcuguggggcauccaccaccccagcaccagcgccgaccagcagagccuguaccagaacgccgacgccuacguguucgugggcaccagcagauacagcaagaaguucaagcccgagaucgccaucagacccaaggugagagaccaggagggcagaaugaacuacuacuggacccugguggagcccggcgacaagaucaccuucgaggccaccggcaaccugauggugcccagauacgccuucgccauggagagaaacgccggcagcggcaucaucaucagcgacacccccgugcacgacugcaacaccaccugccagacccccaagggcgccaucaacaccagccugcccuuccagaacauccaccccaucaccaucggcaagugccccaaguacgugaagagcaccaagcugagacuggccaccggccugagaaacgugcccagcauccagagcagaggccuguucggcgccaucgccggcuucaucgagggcggcuggaccggcaugguggacggcugguacggcuaccaccaccagaacgagcagggcagcggcuacgccgccgaccugaagagcacccagaacgccaucgacgagaucaccaacaaggugaacagcgugaucgagaagaugaacacccaguucaccgccgugggcaaggaguucaaccaccuggagaagagaaucgagaaccugaacaagaagguggacgacggcuuccuggacaucuggaccuacaacgccgagcugcuggugcugcuggagaacgagagaacccuggacuaccacgacagcaacgugaagaaccuguacgagaaggugagaagccagcugaagaacaacgccaaggagaucggcaacggcugcuucgaguucuaccacaagugcgacaacaccugcauggagagcgugaagaacggcaccuacgacuaccccaaguacagcgaggaggccaagcugaacagagaggagaucgacggcgugaagcuggagagcaccagaaucuaccagauccuggccaucuacagcaccguggccagcagccuggugcugguggugagccugggcgccaucagcuucuggaugugcagcaacggcagccugcagugcagaaucugcaucuga

SEQ ID NO: 169325 - RNA, 1701 nt, Artificial Sequence; identical to SEQ ID NO: 164281
  derived and/or modified CDS sequence (opt4) from hemagglutinin__InfluenzaA__AFN18195

SEQ ID NO: 169326 - RNA, 1701 nt, Artificial Sequence; identical to SEQ ID NO: 162729
  derived and/or modified CDS sequence (opt4) from hemagglutinin__InfluenzaA__AFN18200

SEQ ID NO: 169327 - RNA, 1701 nt, Artificial Sequence
  derived and/or modified CDS sequence (opt4) from hemagglutinin__InfluenzaA__AFN18207
augaaggccauccugguggugcugcuguacaccuucgccaccgccaacgccgacacccugugcaucggcuaccacgccaacaacagcaccgacaccguggacaccgugcuggagaagaacgugaccgugacccacagcgugaaccugcuggaggacaagcacaacggcaagcugugcaagcugagaggcguggccccccugcaccugggcaagugcaacaucgccggcuggauccugggcaaccccgagugcgagagccugagcaccgccagcagcuggagcuacaucguggagaccagcagcagcgacaacggcaccugcuaccccggcgacuucaucgacuacgaggagcugagagagcagcugagcagcgugagcagcuucgagagauucgagaucuuccccaagaccagcagcuggcccaaccacgacagcaacaagggcgugaccgccgccugcccccacgccggcgccaagagcuucuacaagagccugaucuggcuggugaagaagggcaacagcuaccccaagcugagcaagagcuacaucaacgacaagggcagagaggugcuggugcuguggggcauccaccaccccagcaccagcgccgaccagcagagccuguaccagaacgccgacgccuacguguucgugggcaccagcagauacagcaagaaguucaagcccgagaucgccaucagacccaaggugagagaccaggagggcagaaugaacuacuacuggacccugguggagcccggcgacaagaucaccuucgaggccaccggcaaccugguggugcccagauacgccuucgccauggagagaaacgccggcagcggcaucaucaucagcgacacccccgugcacgacugcaacaccaccugccagacccccaagggcgccaucaacaccagccugcccuuccagaacauccaccccaucaccaucggcaagugccccaaguacgugaagagcaccaagcugagacuggccaccggccugagaaacgugcccagcauccagagcagaggccuguucggcgccaucgccggcuucaucgagggcggcuggaccggcaugguggacggcugguacggcuaccaccaccagaacgagcagggcagcggcuacgccgccgaccugaagagcacccagaacgccaucgacgagaucaccaacaaggugaacagcgugaucgagaagaugaacacccaguucaccgccgugggcaaggaguucaaccaccuggagaagagaaucgagaaccugaacaagaagguggacgacggcuuccuggacaucuggaccuacaacgccgagcugcuggugcugcuggagaacgagagaacccuggacuaccacgacagcaacgugaagaaccuguacgagaaggugagaagccagcugaagaacaacgccaaggagaucggcaacggcugcuucgaguucuaccacaagugcgacaacaccugcauggagagcgugaagaacggcaccuacgacuaccccaaguacagcgaggaggccaagcugaacagagaggagaucgacggcgugaagcuggagagcaccagaaucuaccagauccuggccaucuacagcaccguggccagcagccuggugcugguggugagccugggcgccaucagcuucuggaugugcagcaacggcagccugcagugcagaaucugcaucuga

SEQ ID NO: 169328 - RNA, 1701 nt, Artificial Sequence
  derived and/or modified CDS sequence (opt4) from hemagglutinin__InfluenzaA__AFN18214
augaaggccauccugguggugcugcuguacaccuucgccaccgccaacgccgacacccugugcaucggcuaccacgccaacaacagcaccgacaccguggacaccgugcuggagaagaacgugaccgugacccacagcgugaacauccuggaggacaagcacaacggcaagcugugcaagcugagaggcguggccccccugcaccugggcaagugcaacaucgccggcuggauccugggcaaccccgagugcgagagccugagcaccgccagcagcuggagcuacaucguggagaccagcagcagcgacaacggcaccugcuaccccggcgacuucaucaacuacgaggagcugagagagcagcugagcagcgugagcagcuucgagagauucgagaucuuccccaagaccagcagcuggcccaaccacgacagcaacaagggcgugaccgccgccugcccccacgccggcgccaagagcuucuacaagaaccugaucuggcuggugaagaagggcaacagcuaccccaagcugagcaagagcuacaucaacgacaagggcaaggaggugcuggugcuguggggcauccaccaccccagcaccagcgccgaccagcagagccuguaccagaacgccgacgccuacguguucgugggcagcagcagauacagcaagaaguucaagcccgagaucgccaucagacccaaggugagagaccaggagggcagaaugaacuacuacuggacccugguggagcccggcgacaagaucaccuucgaggccaccggcaaccugguggugcccagauacgccuucgccauggagagaaacgccggcagcggcaucaucaucagcgacacccccgugcacgacugcaacaccaccugccagacccccaagggcgccaucaacaccagccugcccuuccagaacauccaccccaucaccaucggcaagugccccaaguacgugaagagcaccaagcugagacuggccaccggccugagaaacgugcccagcauccagagcagaggccuguucggcgccaucgccggcuucaucgagggcggcuggaccggcaugguggacggcugguacggcuaccaccaccagaacgagcagggcagcggcuacgccgccgaccugaagagcacccagaacgccaucgacgagaucaccaacaaggugaacagcgugaucgagaagaugaacacccaguucaccgccgugggcaaggaguucaaccaccuggagaagagaaucgagaaccugaacaagaagguggacgacggcuuccuggacaucuggaccuacaacgccgagcugcuggugcugcuggagaacgagagaacccuggacuaccacgacagcaacgugaagaaccuguacgagaaggugagaagccagcugaagaacaacgccaaggaggugggcaacggcugcuucgaguucuaccacaagugcgacaacaccugcauggagagcgugaagaacggcaccuacgacuaccccaaguacagcgaggaggccaagcugaacagagaggagaucgacggcgugaagcuggagagcaccagaaucuaccagauccuggccaucuacagcaccgccgccagcagccuggugcugguggugagccugggcgccaucagcuucuggaugugcagcaacggcagccugcagugcagaaucugcaucuga

SEQ ID NO: 169329 - RNA, 1701 nt, Artificial Sequence; identical to SEQ ID NO: 165284
  derived and/or modified CDS sequence (opt4) from hemagglutinin__InfluenzaA__AFN18224

SEQ ID NO: 169330 - RNA, 1701 nt, Artificial Sequence; identical to SEQ ID NO: 164281
  derived and/or modified CDS sequence (opt4) from hemagglutinin__InfluenzaA__AFN18231

SEQ ID NO: 169331 - RNA, 1701 nt, Artificial Sequence
  derived and/or modified CDS sequence (opt4) from hemagglutinin__InfluenzaA__AFN18233
augaaggccauccugguggugcugcuguacaccuucgccaccgccaacgccgacacccugugcaucggcuaccacgccaacaacagcaccgacaccguggacaccgugcuggagaagaacgugaccgugacccacagcgugaaccugcuggaggacaagcacaacggcaagcugugcaagcugagaggcguggccccccugcaccugggcaagugcaacaucgccggcuggauccugggcaaccccgagugcgagagccugagcaccgccagcagcuggagcuacaucguggagaccagcagcagcgacaacggcaccugcuaccccggcgacuucaucgacuacgaggagcugagagagcagcugagcagcgugagcagcuucgagagauucgagaucuuccccaagaccagcagcuggcccaaccacgaccccaacaagggcgugaccgccgccugcccccacgccggcgccaagagcuucuacaagaaccugaucuggcuggugaagaagggcaacagcuaccccaagcugagcaagagcuacaucaacgacaagggcaaggaggugcuggugcuguggggcauccaccaccccagcaccagcgccgaccagcagagccuguaccagaacgccgacgccuacguguucgugggcaccagcagauacagcagaaaguucaagcccgagaucgccaucagacccaaggugagagaccaggagggcagaaugaacuacuacuggacccugguggagcccggcgacaagaucaccuucgaggccaccggcaaccugguggugcccagauacgccuucgccauggagagaaacgccggcagcggcaucaucaucagcgacacccccgugcacgacugcaacaccaccugccagacccccaagggcgccaucaacaccagccugcccuuccagaacauccaccccaucaccaucggcaagugccccaaguacgugaagagcaccaagcugagacuggccaccggccugagaaacgugcccagcauccagagcagaggccuguucggcgccaucgccggcuucaucgagggcggcuggaccggcaugguggacggcugguacggcuaccaccaccagaacgagcagggcagcggcuacgccgccgaccugaagagcacccagaacgccaucgacgagaucaccaacaaggugaacagcgugaucgagaagaugaacacccaguucaccgccgugggcaaggaguucaaccaccuggagaagagaaucgagaaccugaacaagaagguggacgacggcuuccuggacaucuggaccuacaacgccgagcugcuggugcugcuggagaacgagagaacccuggacuaccacgacagcaacgugaagaagcuguacgagaaggugagaagccagcugaagaacaacgccaaggagaucggcaacggcugcuucgaguucuaccacaagugcgacaacaccugcauggagagcgugaagaacggcaccuacgacuaccccaaguacagcgaggaggccaagcugaacagagaggagaucgacggcgugaagcuggagagcaccagaaucuaccagauccuggccaucuacagcaccguggccagcagccuggugcugguggugagccugggcgccaucagcuucuggaugugcagcaacggcagccugcagugcagaaucugcaucuga

SEQ ID NO: 169332 - RNA, 1701 nt, Artificial Sequence
  derived and/or modified CDS sequence (opt4) from hemagglutinin__InfluenzaA__AFN18243
augaaggccauccugguggugcugcuguacaccuucgccaccgccaacgccgacacccugugcaucggcuaccacgccaacaacagcaccgacaccguggacaccgugcuggagaagaacgugaccgugacccacagcgugaaccugcuggaggacaagcacaacggcaagcugugcaagcugagaggcguggccccccugcaccugggcaagugcaacaucgccggcuggauccugggcaaccccgagugcgagagccugagcaccgccagcagcuggagcuacaucguggagaccagcagcagcgacaacggcaccugcuaccccggcgacuucaucgacuacgaggagcugagagagcagcugagcagcgugagcagcuucgagagauucgagaucuuccccaagaccagcagcuggcccaaccacgacagcaacaagggcgugaccgccgccugcccccacgccggcgccaagagcuucuacaagaaccugaucuggcuggugaagaagggcaacagcuaccccaagcugagcaagagcuacaucaacgacaagggcaaggaggugcuggugcuguggggcauccaccaccccagcaccagcgccgaccagcagagccuguaccagaacgccgacaccuacguguucgugggcaccagcagauacagcaagaaguucaagcccgagaucgccaucagacccaaggugagagaccaggagggcagaaugaacuacuacuggacccugguggagcccggcgacaagaucaccuucgaggccaccggcaaccugguggugcccagauacgccuucgccauggagagaaacgccggcagcggcaucaucaucagcgacacccccgugcacgacugcaacaccaccugccagacccccaagggcgccaucaacaccagccugcccuuccagaacauccaccccaucaccaucggcaagugccccaaguacgugaagagcaccaagcugagacuggccaccggccugagaaacgugcccagcauccagagcagaggccuguucggcgccaucgccggcuucaucgagggcggcuggaccggcaugguggacggcugguacggcuaccaccaccagaacgagcagggcagcggcuacgccgccgaccugaagagcacccagaacgccaucgacgagaucaccaacaaggugaacagcgugaucgagaagaugaacacccaguucaccgccgugggcaaggaguucaaccaccuggagaagagaaucgagaaccugaacaagaagguggacgacggcuuccuggacaucuggaccuacaacgccgagcugcuggugcugcuggagaacgagagaacccuggacuaccacgacagcaacgugaagaaccuguacgagaaggugagaagccagcugaagaacaacgccaaggagaucggcaacggcugcuucgaguucuaccacaagugcgacaacaccugcauggagagcgugaagaacggcaccuacgacuaccccaaguacagcgaggaggccaagcugaacagagaggagaucgacggcgugaagcuggagagcaccagaaucuaccagauccuggccaucuacagcaccguggccagcagccuggugcugguggugagccugggcgccaucagcuucuggaugugcagcaacggcagccugcagugcagaaucugcaucuga

SEQ ID NO: 169333 - RNA, 1701 nt, Artificial Sequence; identical to SEQ ID NO: 168818
  derived and/or modified CDS sequence (opt4) from hemagglutinin__InfluenzaA__AFN18245

SEQ ID NO: 169334 - RNA, 1701 nt, Artificial Sequence; identical to SEQ ID NO: 165284
  derived and/or modified CDS sequence (opt4) from hemagglutinin__InfluenzaA__AFN18255

SEQ ID NO: 169335 - RNA, 1701 nt, Artificial Sequence; identical to SEQ ID NO: 169332
  derived and/or modified CDS sequence (opt4) from hemagglutinin__InfluenzaA__AFN18260

SEQ ID NO: 169336 - RNA, 1701 nt, Artificial Sequence; identical to SEQ ID NO: 169332
  derived and/or modified CDS sequence (opt4) from hemagglutinin__InfluenzaA__AFN18267

SEQ ID NO: 169337 - RNA, 1701 nt, Artificial Sequence
  derived and/or modified CDS sequence (opt4) from hemagglutinin__InfluenzaA__AFN18269
augaaggccauccugguggugcugcuguacaccuucgccaccgccaacgccgacacccugugcaucggcuaccacgccaacaacagcaccgacaccguggacaccgugcuggagaagaacgugaccgugacccacagcgugaaccugcuggaggacaagcacaacggcaagcugugcaagcugagaggcguggccccccugcaccugggcaagugcaacaucgccggcuggauccugggcaaccccgagugcgagagccugagcaccgccagcagcuggagcuacaucguggagaccagcagcagcgacaacggcaccugcuaccccggcgacuucaucgacuacgaggagcugagagagcagcugagcagcgugagcagcuucgagaaguucgagaucuuccccaagaccagcagcuggcccaaccacgacagcaacaagggcgugaccgccgccugcccccacgccggcgccaagagcuucuacaagaaccugaucuggcuggugaagaagggcaacagcuaccccaagcugagcaagagcuacaucaacgacaagggcaaggaggugcuggugcuguggggcauccaccaccccagcaccagcgccgaccagcagagccuguaccagaacgccgacgccuacguguucgugggcaccagcagauacagcaagaaguucaagcccgagaucgccaucagacccaaggugagagaccaggagggcagaaugaacuacuacuggacccugguggagcccggcgacaagaucaccuucgaggccaccggcaaccugguggugcccagauacgccuucgccauggagagaaacgccggcagcggcaucaucaucagcgacacccccgugcacgacugcaacaccaccugccagacccccaagggcgccaucaacaccagccugcccuuccagaacauccaccccaucaccaucggcaagugccccaaguacgugaagagcaccaagcugagacuggccaccggccugagaaacgugcccagcauccagagcagaggccuguucggcgccaucgccggcuucaucgagggcggcuggaccggcaugguggacggcugguacggcuaccaccaccagaacgagcagggcagcggcuacgccgccgaccugaagagcacccagaacgccaucgacgagaucaccaacaaggugaacagcgugaucgagaagaugaacacccaguucaccgccgugggcaaggaguucaaccaccuggagaagagaaucgagaaccugaacaagaagguggacgacggcuuccuggacaucuggaccuacaacgccgagcugcuggugcugcuggagaacgagagaacccuggacuaccacgacagcaacgugaagaaccuguacgagaaggugagaagccagcugaagaacaacgccaaggagaucggcaacggcugcuucgaguucuaccacaagugcgacaacaccugcauggagagcgugaagaacggcaccuacgacuaccccaaguacagcgaggaggccaagcugaacagagaggagaucgacggcgugaagcuggagagcaccagaaucuaccagauccuggccaucuacagcaccguggccagcagccuggugcugguggugagccugggcgccaucagcuucuggaugugcagcaacggcagccugcagugcagaaucugcaucuga

SEQ ID NO: 169338 - RNA, 1701 nt, Artificial Sequence; identical to SEQ ID NO: 163893
  derived and/or modified CDS sequence (opt4) from hemagglutinin__InfluenzaA__AFN18271

SEQ ID NO: 169339 - RNA, 1701 nt, Artificial Sequence; identical to SEQ ID NO: 164281
  derived and/or modified CDS sequence (opt4) from hemagglutinin__InfluenzaA__AFN18273

SEQ ID NO: 169340 - RNA, 1701 nt, Artificial Sequence; identical to SEQ ID NO: 163893
  derived and/or modified CDS sequence (opt4) from hemagglutinin__InfluenzaA__AFN18280

SEQ ID NO: 169341 - RNA, 1701 nt, Artificial Sequence; identical to SEQ ID NO: 163527
  derived and/or modified CDS sequence (opt4) from hemagglutinin__InfluenzaA__AFN18303

SEQ ID NO: 169342 - RNA, 1701 nt, Artificial Sequence
  derived and/or modified CDS sequence (opt4) from hemagglutinin__InfluenzaA__AFN18305
augaaggccauccugguggugcugcuguacaccuucgccaccgccaacgccgacacccugugcaucggcuaccacgccaacaacagcaccgacaccguggacaccgugcuggagaagaacgugaccgugacccacagcgccaaccugcuggaggacaagcacaacggcaagcugugcaagcugagaggcguggccccccugcaccugggcaagugcaacaucgccggcuggauccugggcaaccccgagugcgagagccugagcaccgccagcagcuggagcuacaucguggagaccagcagcagcgacaacggcaccugcuaccccggcgacuucaucgacuacgaggagcugagagagcagcugagcagcgugagcagcuucgagagauucgagaucuuccccaagaccagcagcuggcccaaccacgacagcaacaagggcgugaccgccgccugcccccacgccggcgccaagagcuucuacaagaaccugaucuggcuggugaagaagggcaacagcuaccccaagcugagcaagagcuacaucaacgacaagggcaaggaggugcuggugcuguggggcauccaccaccccagcaccagcgccgaccagcagagccuguaccagaacgccgacgccuacguguucgugggcaccagcagauacagcaagaaguucaagcccgagaucgccaucagacccaaggugagagaccaggagggcagaaugaacuacuacuggacccugguggagcccggcgacaagaucaccuucgaggccaccggcaaccugguggugcccagauacgccuucgccauggagagaaacgccggcagcggcaucaucaucagcgacacccccgugcacgacugcaacaccaccugccagacccccaagggcgccaucaacaccagccugcccuuccagaacauccaccccaucaccaucggcaagugccccaaguacgugaagagcaccaagcugagacuggccaccggccugagaaacgugcccagcauccagagcagaggccuguucggcgccaucgccggcuucaucgagggcggcuggaccggcaugguggacggcugguacggcuaccaccaccagaacgagcagggcagcggcuacgccgccgaccugaagagcacccagaacgccaucgacaagaucaccaacaaggugaacagcgugaucgagaagaugaacacccaguucaccgccgugggcaaggaguucaaccaccugggcaagagaaucgagaaccugaacaagaagguggacgacggcuuccuggacaucuggaccuacaacgccgagcugcuggugcugcuggagaacgagagaacccuggacuaccacgacagcaacgugaagaaccuguacgagaaggugagaagccagcugaagaacaacgccaaggagaucggcaacggcugcuucgaguucuaccacaagugcgacaacaccugcauggagagcgugaagaacggcaccuacgacuaccccaaguacagcgaggaggccaagcugaacagagaggagaucgacggcgugaagcuggagagcaccagaaucuaccagauccuggccaucuacagcaccguggccagcagccuggugcugguggugagccugggcgccaucagcuucuggaugugcagcaacggcagccugcagugcagaaucugcaucuga

SEQ ID NO: 169343 - RNA, 1701 nt, Artificial Sequence
  derived and/or modified CDS sequence (opt4) from hemagglutinin__InfluenzaA__AFN18307
augaaggccauccugguggugcugcuguacaccuucgccgccgccaacgccgacacccugugcaucggcuaccacgccaacaacagcaccgacaccguggacaccgugcuggagaagaacgugaccgugacccacagcgugaaccugcuggaggacaagcacaacggcaagcugugcaagcugagaggcguggccccccugcaccugggcaagugcaacaucgccggcuggauccugggcaaccccgagugcgagagccugagcaccgccagcagcuggagcuacaucguggagaccagcagcagcgacaacggcaccugcuaccccggcgacuucaucgacuacgaggagcugagagagcagcugagcagcgugagcagcuucgagagauucgagaucuuccccaagaccagcagcuggcccaaccacgacagcaacaagggcgugaccgccgccugcccccacgccggcgccaagagcuucuacaagaaccugaucuggcuggugaagaagggcaacagcuaccccaagcugagcaagagcuacaucaacgacaagggcaaggaggugcuggugcuguggggcauccaccaccccagcaccagcgccgaccagcagagccuguaccagaacgccgacgccuacguguucgugggcaccagcagauacagcaagaaguucaagcccgagaucgccaucagacccaaggugagagaccaggagggcagaaugaacuacuacuggacccugguggagcccggcgacaagaucaccuucgaggccaccggcaaccugguggugcccagauacgccuucgccauggagagaaacaccggcagcggcaucaucaucagcgacacccccgugcacgacugcaacaccaccugccagacccccaagggcgccaucaacaccagccugcccuuccagaacauccaccccaucaccaucggcaagugccccaaguacgugaagagcaccaagcugagacuggccaccggccugagaaacgugcccagcauccagagcagaggccuguucggcgccaucgccggcuucaucgagggcggcuggaccggcaugguggacggcugguacggcuaccaccaccagaacgagcagggcagcggcuacgccgccgaccugaagagcacccagaacgccaucgacaagaucaccaacaaggugaacagcgugaucgagaagaugaacacccaguucaccgccgugggcaaggaguucaaccaccuggagaagagaaucgagaaccugaacaagaagguggacgacggcuuccuggacaucuggaccuacaacgccgagcugcuggugcugcuggagaacgagagaacccuggacuaccacgacagcaacgugaagaaccuguacgagaaggugagaagccagcugaagaacaacgccaaggagaucggcaacggcugcuucgaguucuaccacaagugcgacaacaccugcauggagagcgugaagaacggcaccuacgacuaccccaaguacagcgaggaggccaagcugaacagagaggagaucgacggcgugaagcuggagagcaccagaaucuaccagauccuggccaucuacagcaccguggccagcagccuggugcugguggugagccugggcgccaucagcuucuggaugugcagcaacggcagccugcagugcagaaucugcaucuga

SEQ ID NO: 169344 - RNA, 1701 nt, Artificial Sequence
  derived and/or modified CDS sequence (opt4) from hemagglutinin__InfluenzaA__AFN18312
augaaggccauccugguggugcugcuguacaccuucgccaccgccaacgccgacacccugugcaucggcuaccacgccaacaacagcaccgacaccguggacaccgugcuggagaagaacgugaccgugacccacagcgugaaccugcuggaggacaagcacaacggcaagcugugcaagcugagaggcguggccccccugcaccugggcaagugcaacaucgccggcuggauccugggcaaccccgagugcgagagccugagcaccgccagcagcuggagcuacaucguggagaccagcagcagcgacaacggcaccugcuaccccggcgacuucaucgacuacgaggagcugagagagcagcugagcagcgugagcagcuucgagagauucgagaucuuccccaagaccagcagcuggcccaaccacgacagcaacaagggcaucaccgccgccugcccccacgccggcgccaagagcuucuacaagaaccugaucuggcuggugaagaagggcaacagcuaccccaagcugagcaagagcuacaucaacgacaagggcaaggaggugcuggugcuguggggcauccaccaccccagcaccagcgccgaccagcagagccuguaccagaacgccgacgccuacguguucgugggcaccagcagauacagcaagaaguucaagcccgagaucgccaucagacccaaggugagagaccaggagggcagaaugaacuacuacuggacccugguggagcccggcgacaagaucaccuucgaggccaccggcaaccugguggugcccagauacgccuucgccauggagagaaacgccggcagcggcaucaucaucagcgacacccccgugcacgacugcaacaccaccugccagacccccaagggcgccaucaacaccagccugcccuuccagaacauccaccccaucaccaucggcaagugccccaaguacgugaagagcaccaagcugagacuggccaccggccugagaaacgugcccagcauccagagcagaggccuguucggcgccaucgccggcuucaucgagggcggcuggaccggcaugguggacggcugguacggcuaccaccaccagaacgagcagggcagcggcuacgccgccgaccugaagagcacccagaacgccaucgacaagaucaccaacaaggugaacagcgugaucgagaagaugaacacccaguucaccgccgugggcaaggaguucaaccaccuggagaagagaaucgagaaccugaacaagaagguggacgacggcuuccuggacaucuggaccuacaacgccgagcugcuggugcugcuggagaacgagagaacccuggacuaccacgacagcaacgugaagaaccuguacgagaaggugagaagccagcugaagaacaacgccaaggagaucggcaacggcugcuucgaguucuaccacaagugcgacaacaccugcauggagagcgugaagaacggcaccuacgacuaccccaaguacagcgaggaggccaagcugaacagagaggagaucgacggcgugaagcuggagagcaccagaaucuaccagauccuggccaucuacagcaccguggccagcagccuggugcuggugaucagccugggcgccaucagcuucuggaugugcagcaacggcagccugcagugcagaaucugcaucuga

SEQ ID NO: 169345 - RNA, 1701 nt, Artificial Sequence; identical to SEQ ID NO: 165094
  derived and/or modified CDS sequence (opt4) from hemagglutinin__InfluenzaA__AFN18319

SEQ ID NO: 169346 - RNA, 1701 nt, Artificial Sequence; identical to SEQ ID NO: 167191
  derived and/or modified CDS sequence (opt4) from hemagglutinin__InfluenzaA__AFN18324

SEQ ID NO: 169347 - RNA, 1701 nt, Artificial Sequence; identical to SEQ ID NO: 163082
  derived and/or modified CDS sequence (opt4) from hemagglutinin__InfluenzaA__AFN18334

SEQ ID NO: 169348 - RNA, 1701 nt, Artificial Sequence; identical to SEQ ID NO: 164845
  derived and/or modified CDS sequence (opt4) from hemagglutinin__InfluenzaA__AFN18344

SEQ ID NO: 169349 - RNA, 1701 nt, Artificial Sequence; identical to SEQ ID NO: 162729
  derived and/or modified CDS sequence (opt4) from hemagglutinin__InfluenzaA__AFN18354

SEQ ID NO: 169350 - RNA, 1701 nt, Artificial Sequence
  derived and/or modified CDS sequence (opt4) from hemagglutinin__InfluenzaA__AFN18364
augaaggccauccugguggugcugcuguacaccuucgccaccgccaacgccgacacccugugcaucggcuaccacgccaacaacagcaccgacaccguggacaccgugcuggagaagaacgugaccgugacccacagcgugaaccugcuggaggacaagcacaacggcaagcugugcaagcugagaggcguggccccccugcaccugggcaagugcaacaucgccggcuggauccugggcaaccccgagugcgagagccugagcaccgccagcagcuggagcuacaucguggagaccagcagcagcgacaacggcaccugcuaccccggcgacuucaucgacuacgaggagcugagagagcagcugagcagcgugagcagcuucgagagauucgagaucuuccccaagaccagcagcuggcccaaccacgaccugaacaagggcgugaccgccgccugcccccacgccggcgccaagagcuucuacaagaaccugaucuggcuggugaagaagggcaacagcuaccccaagcugagcaagagcuacaucaacgacaagggcaaggaggugcuggugcuguggggcauccaccaccccagcaccagcgccgaccagcagagccuguaccagaacgccgacgccuacguguucgugggcaccagcagauacagcaagaaguucaagcccgagaucgccaucagacccaaggugagagaccaggagggcagaaugaacuacuacuggacccugguggagcccggcgacaagaucaccuucgaggccaccggcaaccugguggugcccagauacgccuucgccauggagagaaacgccggcagcggcaucaucaucagcgacacccccgugcacgacugcaacaccaccugccagacccccaagggcgccaucaacaccagccugcccuuccagaacauccaccccaucaccaucggcaagugccccaaguacgugaagagcaccaagcugagacuggccaccggccugagaaacgugcccagcauccagagcagaggccuguucggcgccaucgccggcuucaucgagggcggcuggaccggcaugguggacggcugguacggcuaccaccaccagaacgagcagggcagcggcuacgccgccgaccugaagagcacccagaacgccaucgacgagaucaccaacaaggugaacagcgugaucgagaagaugaacacccaguucaccgccgugggcaaggaguucaaccaccuggagaagagaaucgagaaccugaacaagaagaucgacgacggcuuccuggacaucuggaccuacaacgccgagcugcuggugcugcuggagaacgagagaacccuggacuaccacgacagcaacgugaagaaccuguacgagaaggugagaagccagcugaagaacaacgccaaggagaucggcaacggcugcuucgaguucuaccacaagugcgacaacaccugcauggagagcgugaagaacggcaccuacgacuaccccaaguacagcgaggaggccaagcugaacagagaggagaucgacggcgugaagcuggagagcaccagaaucuaccagauccuggccaucuacagcaccguggccagcagccuggugcugguggugagccugggcgccaucagcuucuggaugugcagcaacggcagccugcagugcagaaucugcaucuga

SEQ ID NO: 169351 - RNA, 1701 nt, Artificial Sequence; identical to SEQ ID NO: 162729
  derived and/or modified CDS sequence (opt4) from hemagglutinin__InfluenzaA__AFN18374

SEQ ID NO: 169352 - RNA, 1701 nt, Artificial Sequence
  derived and/or modified CDS sequence (opt4) from hemagglutinin__InfluenzaA__AFN18381
augaaggccauccugguggugcugcuguacaccuucgccaccgccaacgccgacacccugugcaucggcuaccacgccaacaacagcaccgacaccguggacaccgugcuggagaagaacgugaccgugacccacagcgugaaccugcuggaggacaagcacaacggcaagcugugcaagcugagaggcguggccccccugcaccugggcaagugcaacaucgccggcuggauccugggcaaccccgagugcgagagccugagcaccgccagcagcuggagcuacaucguggagaccagcagcagcgacaacggcaccugcuaccccggcgacuucaucgacuacgaggagcugagagagcagcugagcagcgugagcagcuucgagagauucgagaucuuccccaagaccagcagcuggcccaaccacgacagcaacaagggcgugaccgccgccugcccccacgccggcgccaagagcuucuacaagaaccugaucuggcuggugaagaagggcaacagcuaccccaagcugagcaagagcuacaucaacgacaagggcaaggaggugcuggugcuguggggcauccaccaccccagcaccagcgccgaccagcagagccuguaccagaacgccgacgccuacguguucgugggcaccagcaaguacagcaagaaguucaagcccgagaucgccaucagacccaaggugagagaccaggagggcagaaugaacuacuacuggacccuggugaagcccggcgacaagaucaccuucgaggccaccggcaaccugguggugcccagauacgccuucgccauggagagaaacgccggcagcggcaucaucaucagcgacacccccgugcaggacugcaacaccaccugccagacccccaagggcgccaucaacaccagccugcccuuccagaacauccaccccaucaccaucggcaagugccccaaguacgugaagagcaccaagcugagacuggccaccggccugagaaacgugcccagcauccagagcagaggccuguucggcgccaucgccggcuucaucgagggcggcuggaccggcaugguggacggcugguacggcuaccaccaccagaacgagcagggcagcggcuacgccgccgaccugaagagcacccagaacgccaucgacgagaucaccaacaaggugaacagcgugaucgagaagaugaacacccaguucaccgccgugggcaaggaguucaaccaccuggagaagagaaucgagaaccugaacaagaagguggacgacggcuuccuggacaucuggaccuacaacgccgagcugcuggugcugcuggagaacgagagaacccuggacuaccacgacagcaacgugaagaaccuguacgagaaggugagaagccagcugaagaacaacgccaaggagaucggcaacggcugcuucgaguucuaccacaagugcgacaacaccugcauggagagcgugaagaacggcaccuacgacuaccccaaguacagcgaggaggccaagcugaacagagaggagaucgacggcgugaagcuggagagcaccagaaucuaccagauccuggccaucuacagcaccguggccagcagccuggugcugguggugagccugggcgccaucagcuucuggaugugcagcaacggcagccugcagugcagaaucugcaucuga

SEQ ID NO: 169353 - RNA, 1701 nt, Artificial Sequence
  derived and/or modified CDS sequence (opt4) from hemagglutinin__InfluenzaA__AFN18390
augaaggccauccugguggugcugcuguacaccuucgccaccgccaacgccgacacccugugcaucggcuaccacgccaacaacagcaccgacaccguggacaccgugcuggagaagaacgugaccgugacccacagcgugaaccugcuggaggacaagcacaacggcaagcugugcaagcugagaggcguggccccccugcaccugggcaagugcaacaucgccggcuggauccugggcaaccccgagugcgagagccugagcaccgccagcagcuggagcuacaucguggagaccagcagcagcgacaacggcaccugcuaccccggcgacuucaucgacuacgaggagcugagagagcagcugagcagcgugagcagcuucgagagauucgagaucuuccccaagaccagcagcuggcccaaccacgacagcaacaagggcgugaccgccgccugcccccacgccggcgccaagagcuucuacaagaaccugaucuggcuggugaagaagggcaacagcuaccccaagcugagcaagagcuacaucaacgacaagggcaaggaggugcuggugcuguggggcauccaccaccccagcaccagcgccgaccagcagagccuguaccagaacgccgacgccuacguguucgugggcaccagcagauacagcaagaaguucaagcccgagaucgccaucagacccaaggugagagaccaggagggcagaaugaacuacuacuggacccugguggagcccggcgacaagaucaccuucgaggccaccggcaaccugguggugcccagauacgccuucgccauggagagaaacgccggcagcggcaucaucaucagcgacacccccgugcacgacugcaacaccaccugccagacccccaagggcgccaucaacaccagccugcccuuccagaacauccaccccaucaccaucggcaagugccccaaguacgugaagagcaccaagcugagacuggccaccggccugagaaacgugcccagcauccagagcagaggccuguucggcgccaucgccggcuucaucgagggcggcuggaccggcaugguggacggcugguacggcuaccaccaccagaacgagcagggcagcggcuacgccgccgaccugaagagcacccagaacgccaucgacgagaucaccaacaaggugaacagcgugaucgagaagaugaacacccaguucaccgccgugggcaaggaguucaaccaccuggagaagagaaucgagaaccugaacaagaagguggacgacggcuuccuggacaucuggaccuacaacgccgagcugcuggugcugcuggagaacgagagaacccuggacuaccacgacagcaacgugaagaaccuguacgagaagaucagaagccagcugaagaacaacgccaaggagaucggcaacggcugcuucgaguucuaccacaagugcgacaacaccugcauggagagcgugaagaacggcaccuacgacuaccccaaguacagcgaggaggccaagcugaacagagaggagaucgacggcgugaagcuggagagcaccagaaucuaccagauccuggccaucuacagcaccguggccagcagccuggugcugguggugagccugggcgccaucagcuucuggaugugcagcaacggcagccugcagugcagaaucugcaucuga

SEQ ID NO: 169354 - RNA, 1701 nt, Artificial Sequence
  derived and/or modified CDS sequence (opt4) from hemagglutinin__InfluenzaA__AFN18400
augaaggccauccugguggugcugcuguacaccuucgccaccgccaacgccgacacccugugcaucggcuaccacgccaacaacagcaccgacaccguggacaccgugcuggagaagaacgugaccgugacccacagcgugaaccugcuggaggacaagcacaacggcaagcugugcaagcugagaggcgugaccccccugcaccugggcaagugcaacaucgccggcuggauccugggcaaccccgagugcgagagccugagcaaggccagcagcuggagcuacaucguggagaccagcagcagcgacaacggcaccugcuaccccggcgacuucaucgacuacgaggagcugagagagcagcugagcagcgugagcagcuucgagagauucgagaucuuccccaagaccagcagcuggcccaaccacgacagcaacaagggcgugaccgccgccugcccccacgccggcgccaagagcuucuacaagaaccugaucuggcuggugaagaagggcaacagcuaccccaagcugagcaagagcuacaucaacgacaagggcaaggaggugcuggugcuguggggcauccaccaccccagcaccagcgccgaccagcagagccuguaccagaacgccgacgccuacguguucgugggcaccagcagauacagcaagaaguucaagcccgagaucgccaucagacccaaggugagagaccaggagggcagaaugaacuacuacuggacccugguggagcccggcgacaagaucaccuucgaggccaccggcaaccugguggugcccagauacgccuucgccauggagagaaacgugggcagcggcaucaucaucagcgacacccccgugcacgacugcaacaccaccugccagacccccaagggcgccaucaacaccagccugcccuuccagaacauccaccccaucaccaucggcaagugccccaaguacgugaagagcaccaagcugagacuggccaccggccugagaaacgugcccagcauccagagcagaggccuguucggcgccaucgccggcuucaucgagggcggcuggaccggcaugguggacggcugguacggcuaccaccaccagaacgagcagggcagcggcuacgccgccgaccugaagagcacccagaacgccaucgacgagaucaccaacaaggugaacagcgugaucgagaagaugaacacccaguucaccgccgugggcaaggaguucaaccaccuggagaagagaaucgagaaccugaacaagaagguggacgacggcuuccuggacaucuggaccuacaacgccgagcugcuggugcugcuggagaacgagagaacccuggacuaccacgacagcaacgugaagaaccuguacgagaaggugagaagccagcugaagaacaacgccaaggagaucggcaacggcugcuucgaguucuaccacaagugcgacaacaccugcauggagagcgugaagaacggcaccuacgacuaccccaaguacagcgaggaggccaagcugaacagagaggagaucgacggcgugaagcuggagagcaccagaaucuaccagauccuggccaucuacagcaccguggccagcagccuggugcugguggugagccugggcgccaucagcuucuggaugugcagcaacggcagccugcagugcagaaucugcaucuga

SEQ ID NO: 169355 - RNA, 1701 nt, Artificial Sequence; identical to SEQ ID NO: 162820
  derived and/or modified CDS sequence (opt4) from hemagglutinin__InfluenzaA__AFN18410

SEQ ID NO: 169356 - RNA, 1701 nt, Artificial Sequence; identical to SEQ ID NO: 162729
  derived and/or modified CDS sequence (opt4) from hemagglutinin__InfluenzaA__AFN18420

SEQ ID NO: 169357 - RNA, 1701 nt, Artificial Sequence
  derived and/or modified CDS sequence (opt4) from hemagglutinin__InfluenzaA__AFN18430
augaaggccauccugguggugcugcuguacaccuucgccaccgccaacgccgacacccugugcaucggcuaccacgccaacaacagcaccgacaccguggacaccgugcuggagaagaacgugaccgugacccacagcgugaaccugcuggagaacaagcacaacggcaagcugugcaagcugagaggcguggccccccugcaccugggcaagugcaacaucgccggcuggauccugggcaaccccgagugcgagagccugagcaccgccagcagcuggagcuacaucguggagaccagcagcagcgacaacggcaccugcuaccccggcgacuucaucgacuacgaggagcugagagagcagcugagcagcgugagcagcuucgagagauucgagaucuuccccaagaccagcagcuggcccaaccacgacagcaacaagggcgugaccgccgccugcccccacgccggcgccaagagcuucuacaagaaccugaucuggcuggugaagaagggcaacagcuaccccaagcugagcaagagcuacaucaacgacaagggcaaggaggugcuggugcuguggggcauccaccaccccagcaccagcgccgaccagcagagccuguaccagaacgccgacgccuacguguucgugggcaccagcagauacagcaagaaguucaagcccgagaucgccaucagacccaaggugagagaccaggagggcagaaugaacuacuacuggacccugguggagcccggcgacaagaucaccuucgaggccaccggcaaccugguggugcccagauacgccuucgccauggugagaaacgccggcagcggcaucaucaucagcgacacccccgugcacgacugcaacaccaccugccagacccccaagggcgccaucaacaccagccugcccuuccagaacauccaccccaucaccaucggcaagugccccaaguacgugaagagcaccaagcugagacuggccaccggccugagaaacgugcccagcauccagagcagaggccuguucggcgccaucgccggcuucaucgagggcggcuggaccggcaugguggacggcugguacggcuaccaccaccagaacgagcagggcagcggcuacgccgccgaccugaagagcacccagaacgccaucgacgagaucaccaacaaggugaacagcgugaucgagaagaugaacacccaguucaccgccgugggcaaggaguucaaccaccuggagaagagaaucgagaaccugaacaagaagguggacgacggcuuccuggacaucuggaccuacaacgccgagcugcuggugcugcuggagaacgagagaacccuggacuaccacgacagcaacgugaagaaccuguacgagaaggugagaagccagcugaagaacaacgccaaggagaucggcaacggcugcuucgaguucuaccacaagugcgacaacaccugcauggagagcgugaagaacggcaccuacgacuaccccaaguacagcgaggaggccaagcugaacagagaggagaucgacggcgugaagcuggagagcaccagaaucuaccagauccuggccaucuacagcaccguggccagcagccuggugcugguggugagccugggcgccaucagcuucuggaugugcagcaacggcagccugcagugcagaaucugcaucuga

SEQ ID NO: 169358 - RNA, 1701 nt, Artificial Sequence; identical to SEQ ID NO: 162729
  derived and/or modified CDS sequence (opt4) from hemagglutinin__InfluenzaA__AFN18440

SEQ ID NO: 169359 - RNA, 1701 nt, Artificial Sequence; identical to SEQ ID NO: 162729
  derived and/or modified CDS sequence (opt4) from hemagglutinin__InfluenzaA__AFN18450

SEQ ID NO: 169360 - RNA, 1701 nt, Artificial Sequence; identical to SEQ ID NO: 165284
  derived and/or modified CDS sequence (opt4) from hemagglutinin__InfluenzaA__AFN18460

SEQ ID NO: 169361 - RNA, 1701 nt, Artificial Sequence; identical to SEQ ID NO: 163590
  derived and/or modified CDS sequence (opt4) from hemagglutinin__InfluenzaA__AFN18470

SEQ ID NO: 169362 - RNA, 1701 nt, Artificial Sequence; identical to SEQ ID NO: 162820
  derived and/or modified CDS sequence (opt4) from hemagglutinin__InfluenzaA__AFN18480

SEQ ID NO: 169363 - RNA, 1701 nt, Artificial Sequence; identical to SEQ ID NO: 163590
  derived and/or modified CDS sequence (opt4) from hemagglutinin__InfluenzaA__AFN18490

SEQ ID NO: 169364 - RNA, 1701 nt, Artificial Sequence; identical to SEQ ID NO: 162729
  derived and/or modified CDS sequence (opt4) from hemagglutinin__InfluenzaA__AFN18497

SEQ ID NO: 169365 - RNA, 1701 nt, Artificial Sequence; identical to SEQ ID NO: 162729
  derived and/or modified CDS sequence (opt4) from hemagglutinin__InfluenzaA__AFN18512

SEQ ID NO: 169366 - RNA, 1701 nt, Artificial Sequence
  derived and/or modified CDS sequence (opt4) from hemagglutinin__InfluenzaA__AFN18519
augaaggccauccugguggugcugcuguacaccuucgccaccgccaacgccgacacccugugcaucggcuaccacgccaacaacagcaccgacaccguggacaccgugcuggagaagaacgugaccgugacccacagcgugaaccugcuggaggacaagcacaacggcaagcugugcaagcugagaggcguggccccccugcaccugggcaagugcaacaucgccggcuggauccugggcaaccccgagugcgagagccugagcaccgccagcagcuggagcuacaucguggagaccagcagcagcgacaacggcaccugcuaccccggcgacuucaucgacuacgaggagcugagagagcagcugagcagcgugagcagcuucgagagauucgagaucuuccccaagaccagcagcuggcccaaccacgacagcaacaagggcgugaccgccgccugcccccacgccggcgccaagagcuucuacaagaaccugaucuggcuggugaagaaggagaacagcuaccccaagcugagcaagagcuacaucaacgacaagggcaaggaggugcuggugcuguggggcauccaccaccccagcaccagcgccgaccagcagagccuguaccagaacgccgacgccuacguguucgugggcaccagcagauacagcaagaaguucaagcccgagaucgccaucagacccaaggugagagaccaggagggcagaaugaacuacuacuggacccugguggagcccggcgacaagaucaccuucgaggccaccggcaaccugguggugcccagauacgccuucgccauggagagaaacgccggcagcggcaucaucaucagcgacacccccgugcacgacugcaacaccaccugccagacccccaagggcgccaucaacaccagccugcccuuccagaacauccaccccaucaccaucggcaagugccccaaguacgugaagagcaccaagcugagacuggccaccggccugagaaacgugcccagcauccagagcagaggccuguucggcgccaucgccggcuucaucgagggcggcuggaccggcaugguggacggcugguacggcuaccaccaccagaacgagcagggcagcggcuacgccgccgaccugaagagcacccagaacgccaucgacgagaucaccaacaaggugaacagcgugaucgagaagaugaacacccaguucaccgccgugggcaaggaguucaaccaccuggagaagagaaucgagaaccugaacaagaagguggacgacggcuuccuggacaucuggaccuacaacgccgagcugcuggugcugcuggagaacgagagaacccuggacuaccacgacagcaacgugaagaaccuguacgagaaggugagaagccagcugaagaacaacgccaaggagaucggcaacggcugcuucgaguucuaccacaagugcgacaacaccugcauggagagcgugaagaacggcaccuacgacuaccccaaguacagcgaggaggccaagcugaacagagaggagaucgacggcgugaagcuggagagcaccagaaucuaccagauccuggccaucuacagcaccguggccagcagccuggugcugguggugagccugggcgccaucagcuucuggaugugcagcaacggcagccugcagugcagaaucugcaucuga

SEQ ID NO: 169367 - RNA, 1701 nt, Artificial Sequence
  derived and/or modified CDS sequence (opt4) from hemagglutinin__InfluenzaA__AFN18521
augaaggccauccugguggugcugcuguacaccuucgccaccgccaacgccgacacccugugcaucggcuaccacgccaacaacagcaccgacaccguggacaccgugcuggagaagaacgugaccgugacccacagcgugaaccugcuggaggacaagcacaacggcaagcugugcaagcugagaggcguggccccccugcaccugggcaagugcaacaucgccggcuggauccugggcaaccccgagugcgagagccugagcaccgccagcagcuggagcuacaucguggagaccagcagcagcgacaacggcaccugcuaccccggcgacuucaucgacuacgaggagcugagagagcagcugagcagcgugagcagcuucgagagauucgagaucuuccccaagaccagcagcuggcccaaccacgacagcaacaagggcgugaccgccgccugcccccacgccggcgccaagagcuucuacaagaaccugaucuggcuggugaagaagggcaacagcuaccccaagcugagcaagagcuacaucaacgacaagggcaaggaggugcuggugcuguggggcauccaccaccccagcaccagcgccgaccagcagagccuguaccagaacgccgacgccuacguguucgugggcaccagcagauacagcaagaaguucaagcccgagaucgccaucagacccaaggugagagaccaggagggcagaaugaacuacuacuggacccugguggagcccggcgacaagaucaccuucgaggccaccggcaaccugguggugcccagauacgccuucgccauggugagaaacgccggcagcggcaucaucaucagcgacacccccgugcacgacugcaacaccaccugccagacccccaagggcgccaucaacaccagccugcccuuccagaacauccaccccaucaccaucggcaagugccccaaguacgugaagagcaccaagcugagacuggccaccggccugagaaacgugcccagcauccagagcagaggccuguucggcgccaucgccggcuucaucgagggcggcuggaccggcaugguggacggcugguacggcuaccaccaccagaacgagcagggcagcggcuacgccgccgaccugaagagcacccagaacgccaucgacgagaucaccaacaaggugaacagcgugaucgagaagaugaacacccaguucaccgccgugggcaaggaguucaaccaccuggagaagagaaucgagaaccugaacaagaagguggacgacggcuuccuggacaucuggaccuacaacgccgagcugcuggugcugcuggagaacgagagaacccuggacuaccacgacagcaacgugaagaaccuguacgagaaggugagaagccagcugaagaacaacgccaaggagaucggcaacggcugcuucgaguucuaccacaagugcgacaacaccugcauggagagcgugaagaacggcaccuacgacuaccccaaguacagcggcgaggccaagcugaacagagaggagaucgacggcgugaagcuggagagcaccagaaucuaccagauccuggccaucuacagcaccguggccagcagccuggugcugguggugagccugggcgccaucagcuucuggaugugcagcaacggcagccugcagugcagaaucugcaucuga

SEQ ID NO: 169368 - RNA, 1701 nt, Artificial Sequence; identical to SEQ ID NO: 162729
  derived and/or modified CDS sequence (opt4) from hemagglutinin__InfluenzaA__AFN18528

SEQ ID NO: 169369 - RNA, 1701 nt, Artificial Sequence; identical to SEQ ID NO: 162729
  derived and/or modified CDS sequence (opt4) from hemagglutinin__InfluenzaA__AFN18531

SEQ ID NO: 169370 - RNA, 1701 nt, Artificial Sequence; identical to SEQ ID NO: 165326
  derived and/or modified CDS sequence (opt4) from hemagglutinin__InfluenzaA__AFN18543

SEQ ID NO: 169371 - RNA, 1701 nt, Artificial Sequence; identical to SEQ ID NO: 167611
  derived and/or modified CDS sequence (opt4) from hemagglutinin__InfluenzaA__AFN18545

SEQ ID NO: 169372 - RNA, 1701 nt, Artificial Sequence; identical to SEQ ID NO: 163590
  derived and/or modified CDS sequence (opt4) from hemagglutinin__InfluenzaA__AFN18550

SEQ ID NO: 169373 - RNA, 1701 nt, Artificial Sequence
  derived and/or modified CDS sequence (opt4) from hemagglutinin__InfluenzaA__AFN18557
augaaggccauccugguggugcugcuguacaccuucgccaccgccaacgccgacacccugugcaucggcuaccacgccaacaacagcaccgacaccguggacaccgugcuggagaagaacgugaccgugacccacagcgugaaccugcuggaggacaagcacaacggcaagcugugcaagcugagaggcguggccccccugcaccugggcaagugcaacaucgccggcuggauccugggcaaccccgagugcgagagccugagcaccgccagcagcuggagcuacaucguggagaccagcagcagcgacaacggcaccugcuaccccggcgacuucaucgacuacgaggagcugagagagcagcugagcagcgugagcagcuucgagagauucgagaucuuccccaagaccagcagcuggcccaaccacgacagcaacaagggcgugaccgccgccugcccccacgccggcgccaagagcuucuacaagaaccugaucuggcuggugaagaagggcaacagcuaccccaagcugagcaagagcuacaucaacgacaagggcaaggaggugcuggugcuguggggcauccaccaccccagcaccagcgccgaccagcagagccuguaccagaacgccgacgccuacguguucgugggcaccagcagauacagcaagaaguucaagcccgagaucgccaucagacccaaggugagagaccaggagggcagaaugaacuacuacuggacccugguggagcccggcgacaagaucaccuucgaggccaccggcaaccugguggugcccagauacgccuucgccauggagagaaacgccggcagcggcaucaucaucagcgacacccccgcccacgacugcaacaccaccugccagacccccaagggcgccaucaacaccagccugcccuuccagaacauccaccccaucaccaucggcaagugccccaaguacgugaagagcaccaagcugagacuggccaccggccugagaaacgugcccagcauccagagcagaggccuguucggcgccaucgccggcuucaucgagggcggcuggaccggcaugguggacggcugguacggcuaccaccaccagaacgagcagggcagcggcuacgccgccgaccugaagagcacccagaacgccaucgacgagaucaccaacaaggugaacagcgugaucgagaagaugaacacccaguucaccgccgugggcaaggaguucaaccaccuggagaagagaaucgagaaccugaacaagaagguggacgacggcuuccuggacaucuggaccuacaacgccgagcugcuggugcugcuggagaacgagagaacccuggacuaccacgacagcaacgugaagaaccuguacgagaaggugagaagccagcugaagaacaacgccaaggagaucggcaacggcugcuucgaguucuaccacaagugcgacaacaccugcauggagagcgugaagaacggcaccuacgacuaccccaaguacagcgaggaggccaagcugaacagagaggagaucgacggcgugaagcuggagagcaccagaaucuaccagauccuggccaucuacagcaccguggccagcagccuggugcugguggugagccugggcgccaucagcuucuggaugugcagcaacggcagccugcagugcagaaucugcaucuga

SEQ ID NO: 169374 - RNA, 1701 nt, Artificial Sequence
  derived and/or modified CDS sequence (opt4) from hemagglutinin__InfluenzaA__AFN18559
augaaggccauccugguggugcugcuguacaccuucgccaccgccaacgccgacacccugugcaucggcuaccacgccaacaacagcaccgacaccguggacaccgugcuggagaagaacgugaccgugacccacagcgugaaccugcuggaggacaagcacaacggcaagcugugcaagcugagaggcguggccccccugcaccugggcaagugcaacaucgccggcuggauccugggcaaccccgagugcgagagccugagcaccgccagcagcuggagcuacaucguggagaccagcagcagcgacaacggcaccugcuaccccggcgacuucaucgacuacgaggagcugagagagcagcugagcagcgugagcagcuucgagagauucgagaucuuccccaagaccagcagcuggcccaaccacgacagcaacaagggcgugaccgccgccugcccccacgccggcgccaagagcuucuacaagaaccugaucuggcuggugaagaagggcaacagcuaccccaagcugagcaagagcuacaucaacgacaagggcaaggaggugcuggugcuguggggcauccaccaccccagcaccagcgccgaccagcagaaccuguaccagaacgccgacgccuacguguucgugggcaccagcagauacagcaagaaguucaagcccgagaucgccaucagacccaaggugagagaccaggagggcagaaugaacuacuacuggacccugguggagcccggcgacaagaucaccuucgaggccaccggcaaccugguggugcccagauacgccuucgccauggagagaaacgccggcagcggcaucaucaucagcgacacccccgugcacgacugcaacaccaccugccagacccccaagggcgccaucaacaccagccugcccuuccagaacauccaccccaucaccaucggcaagugccccaaguacgugaagagcaccaagcugagacuggccaccggccugagaaacgugcccagcauccagagcagaggccuguucggcgccaucgccggcuucaucgagggcggcuggaccggcaugguggacggcugguacggcuaccaccaccagaacgagcagggcagcggcuacgccgccgaccugaagagcacccagaacgccaucgacgagaucaccaacaaggugaacagcgugaucgagaagaugaacacccaguucaccgccgugggcaaggaguucaaccaccuggagaagagaaucgagaaccugaacaagaagguggacgacggcuuccuggacaucuggaccuacaacgccgagcugcuggugcugcuggagaacgagagaacccuggacuaccacgacagcaacgugaagaaccuguacgagaaggugagaagccagcugaagaacaacgccaaggagaucggcaacggcugcuucgaguucuaccacaagugcgacaacaccugcauggagagcgugaagaacggcaccuacgacuaccccaaguacagcgaggaggccaagcugaacagagaggagaucgacggcgugaagcuggagagcaccagaaucuaccagauccuggccaucuacagcaccguggccagcagccuggugcugguggugagccugggcgccaucagcuucuggaugugcagcaacggcagccugcagugcagaaucugcaucuga

SEQ ID NO: 169375 - RNA, 1701 nt, Artificial Sequence; identical to SEQ ID NO: 163595
  derived and/or modified CDS sequence (opt4) from hemagglutinin__InfluenzaA__AFN18561

SEQ ID NO: 169376 - RNA, 1701 nt, Artificial Sequence; identical to SEQ ID NO: 163831
  derived and/or modified CDS sequence (opt4) from hemagglutinin__InfluenzaA__AFN18563

SEQ ID NO: 169377 - RNA, 1701 nt, Artificial Sequence
  derived and/or modified CDS sequence (opt4) from hemagglutinin__InfluenzaA__AFN18565
augaaggccauccugguggugcugcuguacaccuucgccaccgccaacgccgacacccugugcaucggcuaccacgccaacaacagcaccgacaccguggacaccgugcuggagaagaacgugaccgugacccacagcgugaaccugcuggaggacaagcacaacggcaagcugugcaagcugagaggcguggccccccugcaccugggcaagugcaacaucgccggcuggauccugggcaaccccgagugcgagagccugagcaccgccagcagcuggagcuacaucguggagaccagcagcagcgacaacggcaccugcuaccccggcgacuucaucgacuacgaggagcugagagagcagcugagcagcgugagcagcuucgagagauucgagaucuuccccaagaccagcagcuggcccaaccacgacagcaacaagggcgugaccgccgccugcccccacgccggcgccaagagcuucuacaagaaccugaucuggcuggugaagaagggcaacagcuaccccaagcugagcaagagcuacaucaacgacaagggcaaggaggugcuggugcuguggggcauccaccaccccagcaccagcgccgaccagcagagccuguaccagaacgccgacgccuacguguucgugggcaccagcagauacagcaagaaguucaagcccgagaucgccaucagacccaaggugagagaccaggagggcagaaugaacuacuacuggacccugguggagcccggcgacaagaucaccuucgaggccaccggcaaccugguggugcccagauacgccuucgccauggugagaaacgccggcagcggcaucaucaucagcgacacccccgugcacgacugcaacaccaccugccagacccccaagggcgccaucaacaccagccugcccuuccagaacauccaccccaucaccaucggcaagugccccaaguacgugaagagcaccaagcugagacuggccaccggccugagaaacgugcccagcauccagagcagaggccuguucggcgccaucgccggcuucaucgagggcggcuggaccggcaugguggacggcugguacggcuaccaccaccagaacgagcagggcagcggcuacgccgccgaccugaagagcacccagaacgccaucgacgagaucaccaacaaggugaacagcgugaucgagaagaugaacacccaguucaccgccgugggcaaggaguucaaccaccuggagaagagaauggagaaccugaacaagaagguggacgacggcuuccuggacaucuggaccuacaacgccgagcugcuggugcugcuggagaacgagagaacccuggacuaccacgacagcaacgugaagaaccuguacgagaaggugagaagccagcugaagaacaacgccaaggagaucggcaacggcugcuucgaguucuaccacaagugcgacaacaccugcauggagagcgugaagaacggcaccuacgacuaccccaaguacagcgaggaggccaagcugaacagagaggagaucgacggcgugaagcuggagagcaccagaaucuaccagauccuggccaucuacagcaccguggccagcagccuggugcugguggugagccugggcgccaucagcuucuggaugugcagcaacggcagccugcagugcagaaucugcaucuga

SEQ ID NO: 169378 - RNA, 1701 nt, Artificial Sequence
  derived and/or modified CDS sequence (opt4) from hemagglutinin__InfluenzaA__AFN18570
augaaggccauccugguggugcugcuguacaccuucgccaccgccaacgccgacacccugugcaucggcuaccacgccaacaacagcaccgacaccguggacaccgugcuggagaagaacgugaccgugacccacagcgugaaccugcuggaggacaagcacaacggcaagcugugcaagcugagaggcguggccccccugcaccugggcaagugcaacaucgccggcuggauccugggcaaccccgagugcgagagccugagcaccgugagcagcuggagcuacaucguggagaccagcagcagcgacaacggcaccugcuaccccggcgacuucaucgacuacgaggagcugagagagcagcugagcagcgugagcagcuucgagagauucgagaucuuccccaagaccagcagcuggcccaaccacgacagcaacaagggcgugaccgccgccugcccccacgccggcgccaagagcuucuacaagaaccugaucuggcuggugaagaagggcaacagcuaccccaagcugagcaagagcuacaucaacgacaagggcaaggaggugcuggugcuguggggcauccaccaccccagcaccagcgccgaccagcagagccuguaccagaacgccgacgccuacguguucgugggcaccagcagauacagcaagaaguucaagcccgagaucgccaucagacccaaggugagagaccaggagggcagaaugaacuacuacuggacccugguggagcccggcgacaagaucaccuucgaggccaccggcaaccugguggugcccagauacgccuucgccauggagagaaacgccggcagcggcaucaucaucagcgacacccccgugcacgacugcaacaccaccugccagacccccaagggcgccaucaacaccagccugcccuuccagaacauccaccccaucaccaucggcaagugccccaaguacgugaagagcaccaagcugagacuggccaccggccugagaaacgugcccagcauccagagcagaggccuguucggcgccaucgccggcuucaucgagggcggcuggaccggcaugguggacggcugguacggcuaccaccaccagaacgagcagggcagcggcuacgccgccgaccugaagagcacccagaacgccaucgacgagaucaccaacaaggugaacagcgugaucgagaagaugaacacccaguucaccgccgugggcaaggaguucaaccaccuggagaagagaaucgagaaccugaacaagaagguggacgacggcuuccuggacaucuggaccuacaacgccgagcugcuggugcugcuggagaacgagagaacccuggacuaccacgacagcaacgugaagaaccuguacgagaaggugagaagccagcugaagaacaacgccaaggagaucggcaacggcugcuucgaguucuaccacaagugcgacaacaccugcauggagagcgugaagaacggcaccuacgacuaccccaaguacagcgaggaggccaagcugaacagagaggagaucgacggcgugaagcuggagagcaccagaaucuaccagauccuggccaucuacagcaccguggccagcagccuggugcugguggugagccugggcgccaucagcuucuggaugugcagcaacggcagccugcagugcagaaucugcaucuga

SEQ ID NO: 169379 - RNA, 1701 nt, Artificial Sequence; identical to SEQ ID NO: 162729
  derived and/or modified CDS sequence (opt4) from hemagglutinin__InfluenzaA__AFN18580

SEQ ID NO: 169380 - RNA, 1701 nt, Artificial Sequence; identical to SEQ ID NO: 162971
  derived and/or modified CDS sequence (opt4) from hemagglutinin__InfluenzaA__AFN18590

SEQ ID NO: 169381 - RNA, 1701 nt, Artificial Sequence
  derived and/or modified CDS sequence (opt4) from hemagglutinin__InfluenzaA__AFN18600
augaaggccauccugguggugcugcuguacaccuucgccaccgccaacgccgacacccugugcaucggcuaccacgccaacaacagcaccgacaccguggacaccgugcuggagaagaacgugaccgugacccacagcgugaaccugcuggaggacaagcacaacggcaagcugugcaagcugagaggcguggccccccugcaccugggcaagugcaacaucgccggcuggauccugggcaaccccgagugcgagagccugagcaccgccagcagcuggagcuacaucguggagaccagcagcagcgacaacggcaccugcuaccccggcgacuucaucgacuacgaggagcugagagagcagcugagcagcgugagcagcuucgagagauucgagaucuuccccaagaccagcagcuggcccaaccacgacagcaacaagggcgugaccgccgccugcccccacgccggcgccaagagcuucuacaagaaccugaucuggcuggugaagaagggcaacagcuaccccaagcugagcaagagcuacaucaacgacaagggcaaggaggugcuggugcuguggggcauccaccaccccagcaccagcgccgaccagcagaaccuguaccagaacgccgacgccuacguguucgugggcaccagcagauacagcaagaaguucaagcccgagaucgccaucagacccaaggugagagaccaggagggcagaaugaacuacuacuggacccugguggagcccggcgacaagaucaccuucgaggccaccggcaaccugguggugcccagauacgccuucgccauggagagaaacgccggcagcggcaucaucaucagcgacacccccgugcacgacugcaacaccaccugccagacccccaagggcgccaucaacaccagccugcccuuccagaacauccaccccaucaccaucggcaagugccccaaguacgugaagagcaccaagcugagacuggccaccggccugagaaacgugcccagcauccagagcagaggccuguucggcgccaucgccggcuucaucgagggcggcuggaccggcaugguggacggcugguacggcuaccaccaccagaacgagcagggcagcggcuacgccgccgaccugaagagcacccagaacgccaucgacgagaucaccaacaaggugaacagcgugaucgagaagaugaacacccaguucaccgccgugggcaaggaguucaaccaccuggagaagagaaucgagaaccugaacaagaagguggacgacggcuuccuggacaucuggaccuacaacgccgagcugcuggugcugcuggagaacgagagaacccuggacuaccacgacagcaacgugaagaaccuguacgagaaggugagaagccagcugaagaacaacgccaaggagaucggcaacggcugcuucgaguucuaccacaagugcgacaacgccugcauggagagcgugaagaacggcaccuacgacuaccccaaguacagcgaggaggccaagcugaacagagaggagaucgacggcgugaagcuggagagcaccagaaucuaccagauccuggccaucuacagcaccguggccagcagccuggugcugguggugagccugggcgccaucagcuucuggaugugcagcaacggcagccugcagugcagaaucugcaucuga

SEQ ID NO: 169382 - RNA, 1701 nt, Artificial Sequence; identical to SEQ ID NO: 162729
  derived and/or modified CDS sequence (opt4) from hemagglutinin__InfluenzaA__AFN18610

SEQ ID NO: 169383 - RNA, 1701 nt, Artificial Sequence
  derived and/or modified CDS sequence (opt4) from hemagglutinin__InfluenzaA__AFN18617
augaaggccauccugguggugcugcuguacaccuucgccaccgccaacgccgacacccugugcaucggcuaccacgccaacaacagcaccgacaccguggacaccgugcuggagaagaacgugaccgugacccacagcgugaaccugcuggaggacaagcacaacggcaagcugugcaagcugagaggcguggccccccugcaccugggcaagugcaacaucgccggcuggauccugggcaaccccgagugcgagagccugagcaccgccagcagcuggagcuacaucguggagaccagcagcagcgacaacggcaccugcuaccccggcgacuucaucgacuacgaggagcugagagagcagcugagcagcgugagcagcuucgagagauucgagaucuuccccaagaccagcagcuggcccaaccacgacagcaacaagggcgugaccgccgccugcccccacgccggcgccaagagcuucuacaagaaccugaucuggcuggugaagaagggcaacagcuaccccaagcugagcaagagcuacaucaacgacaagggcaaggaggugcuggugcuguggggcauccaccaccccagcaccagcgccgaccagcagagccuguaccagaacgccgacgccuacguguucgugggcaccagcagauacagcaagaaguucaagcccgagaucgccaucagacccaaggugagagaccaggagggcagaaugaacuacuacuggacccugguggagcccggcgacaagaucaccuucgaggccaccggcaaccugguggugcccagauacgccuucgccauggugagaaacgccggcagcggcaucaucaucagcgacacccccgugcacgacugcaacaccaccugccagacccccaagggcgccaucaacaccagccugcccuuccagaacauccaccccaucaccaucggcaagugccccaaguacgugaagagcaccaagcugagacuggccaccggccugagaaacgugcccagcauccagagcagaggccuguucggcgccaucgccggcuucaucgagggcggcuggaccggcaugguggacggcugguacggcuaccaccaccagaacgagcagggcagcggcuacgccgccgaccugaagagcacccagagcgccaucgacgagaucaccaacaaggugaacagcgugaucgagaagaugaacacccaguucaccgccgugggcaaggaguucaaccaccuggagaagagaaucgagaaccugaacaagaagguggacgacggcuuccuggacaucuggaccuacaacgccgagcugcuggugcugcuggagaacgagagaacccuggacuaccacgacagcaacgugaagaaccuguacgagaaggugagaagccagcugaagaacaacgccaaggagaucggcaacggcugcuucgaguucuaccacaagugcgacaacaccugcauggagagcgugaagaacggcaccuacgacuaccccaaguacagcgaggaggccaagcugaagagagaggagaucgacggcgugaagcuggagagcaccagaaucuaccagauccuggccaucuacagcaccguggccagcagccuggugcugguggugagccugggcgccaucagcuucuggaugugcagcaacggcagccugcagugcagaaucugcaucuga

SEQ ID NO: 169384 - RNA, 1701 nt, Artificial Sequence; identical to SEQ ID NO: 163590
  derived and/or modified CDS sequence (opt4) from hemagglutinin__InfluenzaA__AFN18622

SEQ ID NO: 169385 - RNA, 1701 nt, Artificial Sequence; identical to SEQ ID NO: 162729
  derived and/or modified CDS sequence (opt4) from hemagglutinin__InfluenzaA__AFN18629

SEQ ID NO: 169386 - RNA, 1701 nt, Artificial Sequence; identical to SEQ ID NO: 162971
  derived and/or modified CDS sequence (opt4) from hemagglutinin__InfluenzaA__AFN18634

SEQ ID NO: 169387 - RNA, 1701 nt, Artificial Sequence
  derived and/or modified CDS sequence (opt4) from hemagglutinin__InfluenzaA__AFN18644
augaaggccauccugguggugcugcuguacaccuucgccaccgccaacgccgacacccugugcaucggcuaccacgccaacaacagcaccgacaccguggacaccgugcuggagaagaacgugaccgugacccacagcgugaaccugcuggaggacaagcacaacggcaagcugugcaagcugagaggcguggccccccugcaccugggcaagugcaacaucgccggcuggauccugggcaaccccgagugcgagagccugagcaccgccagcagcuggagcuacaucguggagaccagcagcagcgacaacggcaccugcuaccccggcgacuucaucgacuacgaggagcugagagagcagcugagcagcgugagcagcuucgagagauucgagaucuuccccaagaccagcagcuggcccaaccacgacagcaacaagggcgugaccgccgccugcccccacgccggcgccaagagcuucuacaagaaccugaucuggcuggugaagaagggcaacagcuaccccaagcugagcaagagcuacaucaacgacaagggcaaggaggugcuggugcuguggggcauccaccaccccagcaccagcgccgaccagcagagccuguaccagaacgccgacgccuacguguucgugggcaccagcagauacagcaagaaguucaagcccgagaucgccaucagacccaaggugagagaccaggagggcagaaugaacuacuacuggacccugguggagcccggcgacaagaucaccuucgaggccaccggcaaccugguggugcccagauacgccuucgccauggugagaaacgccggcagcggcaucaucaucagcgacacccccgugcacgacugcaacaccaccugccagacccccaagggcgccaucaacaccagccugcccuuccagaacauccaccccaucaccaucggcaagugccccaaguacgugaagagcaccaagcugagacuggccaccggccugagaaacgugcccagcauccagagcagaggccuguucggcgccaucgccggcuucaucgagggcggcuggaccggcaugguggacggcugguacggcuaccaccaccagaacgagcagggcagcggcuacgccgccgaccugaagagcacccagagcgccaucgacgagaucaccaacaaggugaacagcgugaucgagaaggugaacacccaguucaccgccgugggcaaggaguucaaccaccuggagaagagaaucgagaaccugaacaagaagguggacgacggcuuccuggacaucuggaccuacaacgccgagcugcuggugcugcuggagaacgagagaacccuggacuaccacgacagcaacgugaagaaccuguacgagaaggugagaagccagcugaagaacaacgccaaggagaucggcaacggcugcuucgaguucuaccacaagugcgacaacaccugcauggagagcgugaagaacggcaccuacgacuaccccaaguacagcgaggaggccaagcugaacagagaggagaucgacggcgugaagcuggagagcaccagaaucuaccagauccuggccaucuacagcaccguggccagcagccuggugcugguggugagccugggcgccaucagcuucuggaugugcagcaacggcagccugcagugcagaaucugcaucuga

SEQ ID NO: 169388 - RNA, 1701 nt, Artificial Sequence; identical to SEQ ID NO: 163590
  derived and/or modified CDS sequence (opt4) from hemagglutinin__InfluenzaA__AFN18654

SEQ ID NO: 169389 - RNA, 1701 nt, Artificial Sequence; identical to SEQ ID NO: 162729
  derived and/or modified CDS sequence (opt4) from hemagglutinin__InfluenzaA__AFN18664

SEQ ID NO: 169390 - RNA, 1701 nt, Artificial Sequence; identical to SEQ ID NO: 162971
  derived and/or modified CDS sequence (opt4) from hemagglutinin__InfluenzaA__AFN18674

SEQ ID NO: 169391 - RNA, 1701 nt, Artificial Sequence; identical to SEQ ID NO: 162729
  derived and/or modified CDS sequence (opt4) from hemagglutinin__InfluenzaA__AFN18684

SEQ ID NO: 169392 - RNA, 1701 nt, Artificial Sequence; identical to SEQ ID NO: 163590
  derived and/or modified CDS sequence (opt4) from hemagglutinin__InfluenzaA__AFN18694

SEQ ID NO: 169393 - RNA, 1701 nt, Artificial Sequence
  derived and/or modified CDS sequence (opt4) from hemagglutinin__InfluenzaA__AFN18704
augaaggccauccugguggugcugcuguacaccuucgccaccgccaacgccgacacccugugcaucggcuaccacgccaacaacagcaccgacaccguggacaccgugcuggagaagaacgugaccgugacccacagcgugaaccugcuggaggacaagcacaacggcaagcugugcaagcugagaggcguggccccccugcaccugggcaagugcaacaucgccggcuggauccugggcaaccccgagugcgagagccugagcaccgccagcagcuggagcuacaucguggagaccagcagcagcgacaacggcaccugcuaccccggcgacuucaucgacuacgaggagcugagagagcagcugagcagcgugagcagcuucgagagauucgagaucuuccccaagaccagcagcuggcccaaccacgacagcaacaagggcgugaccgccgccugcccccacgccggcgccaagagcuucuacaagaaccugaucuggcuggugaagaagggcaacagcuaccccaagcugagcaagagcuacaucaacgacaagggcaaggaggugcuggugcuguggggcauccaccaccccagcaccagcgccgaccagcagagccuguaccagaacgccgacgccuacguguucgugggcaccagcagauacagcaagaaguucaagcccgagaucgccaucagacccaaggugagagaccaggagggcagaaugaacuacuacuggacccugguggagcccggcgacaagaucaccuucgaggccaccggcaaccugguggugcccagauacgccuucgccauggugagaaacgccggcagcggcaucaucaucagcgacacccccgugcacgacugcaacaccaccugccagacccccaagggcgccaucaacaccagccugcccuuccagaacauccaccccaucaccaucggcaagugccccaaguacgugaagagcaccaagcugagacuggccaccggccugagaaacgugcccagcauccagagcagaggccuguucggcgccaucgccggcuucaucgagggcggcuggaccggcaugguggacggcugguacggcuaccaccaccagaacgagcagggcagcggcuacgccgccgaccugaagagcacccagagcgccaucgacgagaucaccaacaaggugaacagcgugaucgagaagaugaacacccaguucaccgccgugggcaaggaguucaaccaccuggagaagagaaucgagaaccugaacaagaagguggacgacggcuuccuggacaucuggaccuacaacgccgagcugcuggugcugcuggagaacgagagaacccuggacuaccacgacagcaacgugaagaaccuguacgagaaggugagaagccagcugaagaacaacgccaaggagaucggcaacggcugcuucgaguucuaccacaagugcgacaacaccugcauggagagcgugaagaacggcaccuacgacuaccccaaguacagcgaggaggccaagcugaacagagaggagaucgacggcgugaagcuggagagcaccagaaucuaccagauccuggccaucuacagcaccguggccagcagccuggugcugguggugagccugggcgccaucagcuucuggaugugcagcaacggcagccugcagugcagaaucugcaucuga

SEQ ID NO: 169394 - RNA, 1701 nt, Artificial Sequence; identical to SEQ ID NO: 164963
  derived and/or modified CDS sequence (opt4) from hemagglutinin__InfluenzaA__AFN18714

SEQ ID NO: 169395 - RNA, 1701 nt, Artificial Sequence; identical to SEQ ID NO: 162729
  derived and/or modified CDS sequence (opt4) from hemagglutinin__InfluenzaA__AFN18721

SEQ ID NO: 169396 - RNA, 1701 nt, Artificial Sequence; identical to SEQ ID NO: 165395
  derived and/or modified CDS sequence (opt4) from hemagglutinin__InfluenzaA__AFN18725

SEQ ID NO: 169397 - RNA, 1701 nt, Artificial Sequence
  derived and/or modified CDS sequence (opt4) from hemagglutinin__InfluenzaA__AFN18735
augaaggccauccugguggugcugcuguacaccuucgccaccgccaacgccgacacccugugcaucggcuaccacgccaacaacagcaccgacaccguggacaccgugcuggagaagaacgugaccgugacccacagcgugaaccugcuggaggacaagcacaacggcaagcugugcaagcugagaggcguggccccccugcaccugggcaagugcaacaucgccggcuggauccugggcaaccccgagugcgagagccugagcaccgccagcagcuggagcuacaucguggagaccagcagcagcgacaacggcaccugcuaccccggcgacuucaucgacuacgaggagcugagagagcagcugagcagcgugagcagcuucgagagauucgagaucuuccccaagaccagcagcuggcccaaccacgacagcaacaagggcgugaccgccgccugcccccacgccggcgccaagagcuucuacaagacccugaucuggcuggugaagaagggcaacagcuaccccaagcugagcaagagcuacaucaacgacaagggcaaggaggugcuggugcuguggggcauccaccaccccagcaccagcgccgaccagcagagccuguaccagaacgccgacgccuacguguucgugggcaccagcagauacagcaagaaguucaagcccgagaucgccaucagacccaaggugagagaccaggagggcagaaugaacuacuacuggacccugguggagcccggcgacaagaucaccuucgaggccaccggcaaccugguggugcccagauacgccuucgccauggagagaaacgccggcagcggcaucaucaucagcgacacccccgugcacgacugcaacaccaccugccagacccccaagggcgccaucaacaccagccugcccuuccagaacauccaccccaucaccaucggcaagugccccaaguacgugaagagcaccaagcugagacuggccaccggccugagaaacgugcccagcauccagagcagaggccuguucggcgccaucgccggcuucaucgagggcggcuggaccggcaugguggacggcugguacggcuaccaccaccagaacgagcagggcagcggcuacgccgccgaccugaagagcacccagaacgccaucgacgagaucaccaacaaggugaacagcgugaucgagaagaugaacacccaguucaccgccgugggcaaggaguucaaccaccuggagaagagaaucgagaaccugaacaagaagguggacgacggcuuccuggacaucuggaccuacaacgccgagcugcuggugcugcuggagaacgagagaacccuggacuaccacgacagcaacgugaagaaccuguacgagaaggugagaagccagcugaagaacaacgccaaggagaucggcaacggcugcuucgaguucuaccacaagugcgacaacaccugcauggagagcgugaagaacggcaccuacgacuaccccaaguacagcgaggaggccaagcugaacagagaggagaucgacggcgugaagcuggagagcaccagaaucuaccagauccuggccaucuacagcaccguggccagcagccuggugcugguggugagccugggcgccaucagcuucuggaugugcagcaacggcagccugcagugcagaaucugcaucuga

SEQ ID NO: 169398 - RNA, 1701 nt, Artificial Sequence; identical to SEQ ID NO: 162729
  derived and/or modified CDS sequence (opt4) from hemagglutinin__InfluenzaA__AFN18742

SEQ ID NO: 169399 - RNA, 1701 nt, Artificial Sequence; identical to SEQ ID NO: 163831
  derived and/or modified CDS sequence (opt4) from hemagglutinin__InfluenzaA__AFN18747

SEQ ID NO: 169400 - RNA, 1701 nt, Artificial Sequence
  derived and/or modified CDS sequence (opt4) from hemagglutinin__InfluenzaA__AFN18757
augaaggccauccugguggugcugcuguacaccuucgccaccgccaacgccgacacccugugcaucggcuaccacgccaacaacagcaccgacaccguggacaccgugcuggagaagaacgugaccgugacccacagcgugaaccugcuggaggacaagcacaacggcaagcugugcaagcugagaggcguggccccccugcaccugggcaagugcaacaucgccggcuggauccugggcaaccccgagugcgagagccugagcaccgccagcagcuggagcuacaucguggagaccagcagcagcgacaacggcaccugcuaccccggcgacuucaucgacuacgaggagcugagagagcagcugagcagcgugagcagcuucgagagauucgagaucuuccccaagaccagcagcuggcccaaccacgacagcaacaagggcgugaccgccgccugcccccacgccggcgccaagagcuucuacaagaaccugaucuggcuggugaagaagggcaacagcuaccccaagcugagcaagagcuacaucaacgacaagggcaaggaggugcuggugcuguggggcauccaccaccccagcaccagcgccgaccagcagagccuguaccagaacgccgacgccuacguguucgugggcaccagcagauacagcaagaaguucaagcccgagaucgccaucagacccaaggugagagaccaggagggcagaaugaacuacuacuggacccugguggagcccggcgacaagaucaccuucgaggccaccggcaaccuggccgugcccagauacgccuucgccauggagagaaacgccggcagcggcaucaucaucagcgacacccccgugcacgacugcaacaccaccugccagacccccaagggcgccaucaacaccagccugcccuuccagaacauccaccccaucaccaucggcaagugccccaaguacgugaagagcaccaagcugagacuggccaccggccugagaaacgugcccagcauccagagcagaggccuguucggcgccaucgccggcuucaucgagggcggcuggaccggcaugguggacggcugguacggcuaccaccaccagaacgagcagggcagcggcuacgccgccgaccugaagagcacccagaacgccaucgacgagaucaccaacaaggugaacagcgugaucgagaagaugaacacccaguucaccgccgugggcaaggaguucaaccaccuggagaagagaaucgagaaccugaacaagaagguggacgacggcuuccuggacaucuggaccuacaacgccgagcugcuggugcugcuggagaacgagagaacccuggacuaccacgacagcaacgugaagaaccuguacgagaaggugagaagccagcugaagaacaacgccaaggagaucggcaacggcugcuucgaguucuaccacaagugcgacaacaccugcauggagagcgugaagaacggcaccuacgacuaccccaaguacagcgaggaggccaagcugaacagagaggagaucgacggcgugaagcuggagagcaccagaaucuaccagauccuggccaucuacagcaccguggccagcagccuggugcugguggugagccugggcgccaucagcuucuggaugugcagcaacggcagccugcagugcagaaucugcaucuga

SEQ ID NO: 169401 - RNA, 1701 nt, Artificial Sequence; identical to SEQ ID NO: 162729
  derived and/or modified CDS sequence (opt4) from hemagglutinin__InfluenzaA__AFN18767

SEQ ID NO: 169402 - RNA, 1701 nt, Artificial Sequence; identical to SEQ ID NO: 169393
  derived and/or modified CDS sequence (opt4) from hemagglutinin__InfluenzaA__AFN18774

SEQ ID NO: 169403 - RNA, 1701 nt, Artificial Sequence; identical to SEQ ID NO: 162729
  derived and/or modified CDS sequence (opt4) from hemagglutinin__InfluenzaA__AFN18776

SEQ ID NO: 169404 - RNA, 1701 nt, Artificial Sequence; identical to SEQ ID NO: 163595
  derived and/or modified CDS sequence (opt4) from hemagglutinin__InfluenzaA__AFN18778

SEQ ID NO: 169405 - RNA, 1701 nt, Artificial Sequence; identical to SEQ ID NO: 162729
  derived and/or modified CDS sequence (opt4) from hemagglutinin__InfluenzaA__AFN18784

SEQ ID NO: 169406 - RNA, 1701 nt, Artificial Sequence; identical to SEQ ID NO: 163595
  derived and/or modified CDS sequence (opt4) from hemagglutinin__InfluenzaA__AFN18789

SEQ ID NO: 169407 - RNA, 1701 nt, Artificial Sequence; identical to SEQ ID NO: 162729
  derived and/or modified CDS sequence (opt4) from hemagglutinin__InfluenzaA__AFN18799

SEQ ID NO: 169408 - RNA, 1701 nt, Artificial Sequence; identical to SEQ ID NO: 162729
  derived and/or modified CDS sequence (opt4) from hemagglutinin__InfluenzaA__AFN18809

SEQ ID NO: 169409 - RNA, 1701 nt, Artificial Sequence; identical to SEQ ID NO: 163831
  derived and/or modified CDS sequence (opt4) from hemagglutinin__InfluenzaA__AFN18816

SEQ ID NO: 169410 - RNA, 1701 nt, Artificial Sequence; identical to SEQ ID NO: 162729
  derived and/or modified CDS sequence (opt4) from hemagglutinin__InfluenzaA__AFN18818

SEQ ID NO: 169411 - RNA, 1701 nt, Artificial Sequence
  derived and/or modified CDS sequence (opt4) from hemagglutinin__InfluenzaA__AFN18820
augaaggccauccugguggugcugcuguacaccuucgccaccgccaacgccgacacccugugcaucggcuaccacgccaacaacagcaccgacaccguggacaccgugcuggagaagaacgugaccgugacccacagcgugaaccugcuggaggacaagcacaacggcaagcugugcaagcugagaggcguggccccccugcaccugggcaacugcaacaucgccggcuggauccugggcaaccccgagugcgagagccugagcaccgccagcagcuggagcuacaucguggagaccagcagcagcgacaacggcaccugcuaccccggcgacuucaucgacuacgaggagcugagagagcagcugagcagcgugagcagcuucgagagauucgagaucuuccccaagaccagcagcuggcccaaccacgacagcaacaagggcgugaccgccgccugcccccacgccggcgccaagagcuucuacaagaaccugaucuggcuggugaagaagggcaacagcuaccccaagcugagcaagagcuacaucaacgacaagggcaaggaggugcuggugcuguggggcauccaccaccccagcaccagcgccgaccagcagagccuguaccagaacgccgacgccuacguguucgugggcaccagcagauacagcaagaaguucaagcccgagaucgccaucagacccaaggugagagaccaggagggcagaaugaacuacuacuggacccugguggagcccggcgacaagaucaccuucgaggccaccggcaaccugguggugcccagauacgccuucgccauggagagaaacgccggcagcggcaucaucaucagcgacacccccgugcacgacugcaacaccaccugccagacccccaagggcgccaucaacaccagccugcccuuccagaacauccaccccaucaccaucggcaagugccccaaguacgugaagagcaccaagcugagacuggccaccggccugagaaacgugcccagcauccagagcagaggccuguucggcgccaucgccggcuucaucgagggcggcuggaccggcaugguggacggcugguacggcuaccaccaccagaacgagcagggcagcggcuacgccgccgaccugaagagcacccagaacgccaucgacgagaucaccaacaaggugaacagcgugaucgagaagaugaacacccaguucaccgccgugggcaaggaguucaaccaccuggagaagagaaucgagaaccugaacaagaagguggacgacggcuuccuggacaucuggaccuacaacgccgagcugcuggugcugcuggagaacgagagaacccuggacuaccacgacagcaacgugaagaaccuguacgagaaggugagaagccagcugaagaacaacgccaaggagaucggcaacggcugcuucgaguucuaccacaagugcgacaacaccugcauggagagcgugaagaacggcaccuacgacuaccccaaguacagcgaggaggccaagcugaacagagaggagaucgacggcgugaagcuggagagcaccagaaucuaccagauccuggccaucuacagcaccguggccagcagccuggugcugguggugagccugggcgccaucagcuucuggaugugcagcaacggcagccugcagugcagaaucugcaucuga

SEQ ID NO: 169412 - RNA, 1701 nt, Artificial Sequence; identical to SEQ ID NO: 162729
  derived and/or modified CDS sequence (opt4) from hemagglutinin__InfluenzaA__AFN18822

SEQ ID NO: 169413 - RNA, 1701 nt, Artificial Sequence
  derived and/or modified CDS sequence (opt4) from hemagglutinin__InfluenzaA__AFN18824
augaaggccauccugguggugcugcuguacaccuucgccaccgccaacgccgacacccugugcaucggcuaccacgccaacaacagcaccgacaccguggacaccgugcuggagaagaacgugaccgugacccacagcgugaaccugcuggaggacaagcacaacggcaagcugugcaagcugagaggcguggccccccugcaccugggcaagugcaacaucgccggcuggauccugggcaaccccgagugcgagagccugagcaccgccagcagcuggagcuacaucguggagaccagcagcagcgacaacggcaccugcuaccccggcgacuucaucgacuacgaggagcugagagagcagcugagcagcgugagcagcuucgagagauucgagaucuuccccaagaccagcagcuggcccaaccacgacagcaacaagggcgugaccgccgccugcccccacgccggcgccaagagcuucuacaagaaccugaucuggcuggugaagaagggcaacagcuaccccaagcugagcaagagcuacaucaacgacaagggcaaggaggugcuggugcuguggggcauccaccaccccagcaccagcgccgaccagcagagccuguaccagaacgccgacgccuacguguucgugggcaccagcagauacagcaagaaguucaagcccgagaucgccaucagacccaaggugagagaccaggagggcagaaugaacuacuacuggacccugguggagcccggcgacaagaucaccuucgaggccaccggcaaccugguggugcccagauacgccuucgccauggagagaaacgccggcagcggcaucaucaucagcgacacccccgugcacgacugcaacaccaccugccagacccccaagggcgccaucaacaccagccugcccuuccagaacauccaccccaucaccaucggcaagugccccaaguacgugaagagcaccaagcugagacuggccaccggccugagaaacgugcccagcauccagagcagaggccuguucggcgccaucgccggcuucaucgagggcggcuggaccggcaugguggacggcugguacggcuaccaccaccagaacgagcagggcagcggcuacgccgccgaccugaagagcacccagaacgccaucgacgagaucaccaacaaggugaacagcgugaucgagaagaugaacacccaguucaccgccgugggcaaggaguucaaccaccuggagaagagaaucgagaaccugaacaagaagguggacgacggcuuccuggacaucuggaccuacaacgccgagcugcuggugcugcuggagaacgagagaacccuggacuaccacgacagcaacgugaagaaccuguacgagaaggugagaagccagcugaagaacaacgccaaggagaucggcaacggcugcuucgaguucuaccacaagugcgacaacaccugcauggagagcgugaagaacggcaccuacgacuaccccaaguacagcgaggaggccaagcugaacagagaggagaucgacggcgugagacuggagagcaccagaaucuaccagauccuggccaucuacagcaccguggccagcagccuggugcugguggugagccugggcgccaucagcuucuggaugugcagcaacggcagccugcagugcagaaucugcaucuga

SEQ ID NO: 169414 - RNA, 1701 nt, Artificial Sequence; identical to SEQ ID NO: 169337
  derived and/or modified CDS sequence (opt4) from hemagglutinin__InfluenzaA__AFN18826

SEQ ID NO: 169415 - RNA, 1701 nt, Artificial Sequence
  derived and/or modified CDS sequence (opt4) from hemagglutinin__InfluenzaA__AFN18828
augaaggccauccugguggugcugcuguacaccuucgccaccgccaacgccgacacccugugcaucggcuaccacgccaacaacagcaccgacaccguggacaccgugcuggagaagaacgugaccgugacccacagcgugaaccugcuggaggacaagcacaacggcaagcugugcaagcugagaggcguggccccccugcaccugggcaagugcaacaucgccggcuggauccugggcaaccccgagugcgagagccugagcaccgccagcagcuggagcuacaucguggagaccagcagcagcgacaacggcaccugcuaccccggcgacuucaucgacuacgaggagcugagagagcagcugagcagcgugagcagcuucgagagauucgagaucuuccccaagaccagcagcuggcccaaccacgacagcaacaagggcgugaccgccgccugcccccacgccggcgccaagagcuucuacaagaaccugaucuggcuggugaagaagggcaacagcuaccccaagcugagcaagagcuacaucaacgacaagggcaaggaggugcuggugcuguggggcauccaccaccccagcaccagcgccgaccagcagagccuguaccagaacgccgacgccuacguguucgugggcaccagcagauacagcaagaaguucaagcccgagaucgccaucagacccaaggugagagaccaggagggcagaaugaacuacuacuggacccugguggagcccggcgacaagaucaccuucgaggccaccggcaaccugguggugcccagauacgccuucgccauggagagaaacgccggcagcggcaucaucaucagcgacacccccgugcacgacugcaacaccaccugccagacccccaagggcgccaucaacaccagccugcccuuccagaacauccaccccaucaccaucggcaagugccccaaguacgugaagagcaucaagcugagacuggccaccggccugagaaacgugcccagcauccagagcagaggccuguucggcgccaucgccggcuucaucgagggcggcuggaccggcaugguggacggcugguacggcuaccaccaccagaacgagcagggcagcggcuacgccgccgaccugaagagcacccagaacgccaucgacgagaucaccaacaaggugaacagcgugaucgagaagaugaacacccaguucaccgccgugggcaaggaguucaaccaccuggagaagagaaucgagaaccugaacaagaagguggacgacggcuuccuggacaucuggaccuacaacgccgagcugcuggugcugcuggagaacgagagaacccuggacuaccacgacagcaacgugaagaaccuguacgagaaggugagaagccagcugaagaacaacgccaaggagaucggcaacggcugcuucgaguucuaccacaagugcgacaacaccugcauggagagcgugaagaacggcaccuacgacuaccccaaguacagcgaggaggccaagcugaacagagaggagaucgacggcgugaagcuggagagcaccagaaucuaccagauccuggccaucuacagcaccguggccagcagccuggugcugguggugagccugggcgccaucagcuucuggaugugcagcaacggcagccugcagugcagaaucugcaucuga

SEQ ID NO: 169416 - RNA, 1701 nt, Artificial Sequence; identical to SEQ ID NO: 169400
  derived and/or modified CDS sequence (opt4) from hemagglutinin__InfluenzaA__AFN18830

SEQ ID NO: 169417 - RNA, 1701 nt, Artificial Sequence; identical to SEQ ID NO: 162729
  derived and/or modified CDS sequence (opt4) from hemagglutinin__InfluenzaA__AFN18832

SEQ ID NO: 169418 - RNA, 1701 nt, Artificial Sequence; identical to SEQ ID NO: 163595
  derived and/or modified CDS sequence (opt4) from hemagglutinin__InfluenzaA__AFN18834

SEQ ID NO: 169419 - RNA, 1701 nt, Artificial Sequence
  derived and/or modified CDS sequence (opt4) from hemagglutinin__InfluenzaA__AFN18849
augaaggccauccugguggugcugcuguacaccuucgccaccgccaacgccgacacccugugcaucggcuaccacgccaacaacagcaccgacaccguggacaccgugcuggagaagaacgugaccgugacccacagcgugaaccugcuggaggacaagcacaacggcaagcugugcaagcugagaggcguggccccccugcaccugggcaagugcaacaucgccggcuggauccugggcaaccccgagugcgagagccugagcaccgccagcagcuggagcuacaucguggagaccagcagcagcgacaacggcaccugcuaccccggcgacuucaucgacuacgaggagcugagagagcagcugagcagcgugagcagcuucgagagauucgagaucuuccccaagaccagcagcuggcccaaccacgacagcaacaagggcgugaccgccgccugcccccacgccggcgccaagagcuucuacaagaaccugaucuggcuggugaagaagggcaacagcuaccccaagcugagcaagagcuacaucaacgacaagggcaaggaggugcuggugcuguggggcauccaccaccccagcaccagcgccgaccagcagagccuguaccagaacguggacgccuacguguucgugggcaccagcagauacagcaagaaguucaagcccgagaucgccaucagacccaaggugagagaccaggagggcagaaugaacuacuacuggacccugguggagcccggcgacaagaucaccuucgaggccaccggcaaccugguggugcccagauacgccuucgccauggagagaaacgccggcagcggcaucaucaucagcgacacccccgugcacgacugcaacaccaccugccagacccccaagggcgccaucaacaccagccugcccuuccagaacauccaccccaucaccaucggcaagugccccaaguacgugaagagcaccaagcugagacuggccaccggccugagaaacgugcccagcauccagagcagaggccuguucggcgccaucgccggcuucaucgagggcggcuggaccggcaugguggacggcugguacggcuaccaccaccagaacgagcagggcagcggcuacgccgccgaccugaagagcacccagaacgccaucgacgagaucaccaacaaggugaacagcgugaucgagaagaugaacacccaguucaccgccgugggcaaggaguucaaccaccuggagaagagaaucgagaaccugaacaagaagguggacgacggcuuccuggacaucuggaccuacaacgccgagcugcuggugcugcuggagaacgagagaacccuggacuaccacgacagcaacgugaagaaccuguacgagaaggugagaagccagcugaagaacaacgccaaggagaucggcaacggcugcuucgaguucuaccacaagugcgacaacaccugcauggagagcgugaagaacggcaccuacgacuaccccaaguacagcgaggaggccaagcugaacagagaggagaucgacggcgugaagcuggagagcaccagaaucuaccagauccuggccaucuacagcaccguggccagcagccuggugcugguggugagccugggcgccaucagcuucuggaugugcagcaacggcagccugcagugcagaaucugcaucuga

SEQ ID NO: 169420 - RNA, 1701 nt, Artificial Sequence
  derived and/or modified CDS sequence (opt4) from hemagglutinin__InfluenzaA__AFN18856
augaaggccauccugguggugcugcuguacaccuucgccaccgccaacgccgacacccugugcaucggcuaccacgccaacaacagcaccgacaccguggacaccgugcuggagaagaacgugaccgugacccacagcgugaaccugcuggagaacaagcacaacggcaagcugugcaagcugagaggcguggccccccugcaccugggcaagugcaacaucgccggcuggauccugggcaaccccgagugcgagagccugagcaccgccagcagcuggagcuacaucguggagaccagcagcagcgacaacggcaccugcuaccccggcgacuucaucgacuacgaggagcugagagagcagcugagcagcgugagcagcuucgagagauucgagaucuuccccaagaccagcagcuggcccaaccacgacagcaacaagggcgugaccgccgccugcccccacgccggcgccaagagcuucuacaagaaccugaucuggcuggugaagaagggcaacagcuaccccaagcugagcaagagcuacaucaacgacaagggcaaggaggugcuggugcuguggggcauccaccaccccagcaccagcgccgaccagcagagccuguaccagaacgccgacgccuacguguucgugggcaccagcagauacagcaagaaguucaagcccgagaucgccaucagacccaaggugagagaccaggagggcagaaugaacuacuacuggacccugguggagcccggcgacaagaucaccuucgaggccaccggcaaccugguggugcccagauacgccuucgccauggagagaaacgccggcagcggcaucaucaucagcgacacccccgugcacgacugcaacaccaccugccagacccccaagggcgccaucaacaccagccugcccuuccagaacauccaccccaucaccaucggcaagugccccaaguacgugaagagcaccaagcugagacuggccaccggccugagaaacgugcccagcauccagagcagaggccuguucggcgccaucgccggcuucaucgagggcggcuggaccggcaugguggacggcugguacggcuaccaccaccagaacgagcagggcagcggcuacgccgccgaccugaagagcacccagaacgccaucgacgagaucaccaacaaggugaacagcgugaucgagaagaugaacacccaguucaccgccgugggcaaggaguucaaccaccuggagaagagaaucgagaaccugaacaagaagguggacgacggcuuccuggacaucuggaccuacaacgccgagcugcuggugcugcuggagaacgagagaacccuggacuaccacgacagcaacgugaagaaccuguacgagaaggugagaagccagcugaagaacaacgccaaggagaucggcaacggcugcuucgaguucuaccacaagugcgacaacaccugcauggagagcgugaagaacggcaccuacgacuaccccaaguacagcgaggaggccaagcugaacagagaggagaucgacggcgugaagcuggagagcaccagaaucuaccagauccuggccaucuacagcaccguggccagcagccuggugcugguggugagccugggcgccaucagcuucuggaugugcagcaacggcagccugcagugcagaaucugcaucuga

SEQ ID NO: 169421 - RNA, 1701 nt, Artificial Sequence; identical to SEQ ID NO: 163590
  derived and/or modified CDS sequence (opt4) from hemagglutinin__InfluenzaA__AFN18858

SEQ ID NO: 169422 - RNA, 1701 nt, Artificial Sequence
  derived and/or modified CDS sequence (opt4) from hemagglutinin__InfluenzaA__AFN18860
augaaggccauccugguggugcugcuguacaccuucgccaccgccaacgccgacacccugugcaucggcuaccacgccaacaacagcaccgacaccguggacaccgugcuggagaagaacgugaccgugacccacagcgugaaccugcuggaggacaagcacaacggcaagcugugcaagcugagaggcguggccccccugcaccugggcaagugcaacaucgccggcuggauccugggcaaccccgagugcgagagccugagcaccgccagcagcuggagcuacaucguggagaccagcagcagcgacaacggcaccugcuaccccggcgacuucaucgacuacgaggagcugagagagcagcugagcagcgugagcagcuucgagagauucgagaucuuccccaagaccagcagcuggcccaaccacgacagcaacaagggcgugaccgccgccugcagccacgccggcgccaagagcuucuacaagaaccugaucuggcuggugaagaagggcaacagcuaccccaagcugagcaagagcuacaucaacgacaagggcaaggaggugcuggugcuguggggcauccaccaccccagcaccagcgccgaccagcagagccuguaccagaacgccgacgccuacguguucgugggcaccagcagauacagcaagaaguucaagcccgagaucgccaucagacccaaggugagagaccaggagggcagaauggacuacuacuggacccugguggagcccggcgacaagaucaccuucgaggccaccggcaaccugguggugcccagauacgccuucgccauggagagaaacgccggcagcggcaucaucaucagcgacacccccgugcacgacugcaacaccaccugccagacccccaagggcgccaucaacaccagccugcccuuccagaacauccaccccaucaccaucggcaagugccccaaguacgugaagagcaccaagcugagacuggccaccggccugagaaacgugcccagcauccagagcagaggccuguucggcgccaucgccggcuucaucgagggcggcuggaccggcaugguggacggcugguacggcuaccaccaccagaacgagcagggcagcggcuacgccgccgaccugaagagcacccagaacgccaucgacgagaucaccaacaaggugaacagcgugaucgagaagaugaacacccaguucaccgccgugggcaaggaguucaaccaccuggagaagagaaucgagaaccugaacaagaagguggacgacggcuuccuggacaucuggaccuacaacgccgagcugcuggugcugcuggagaacgagagaacccuggacuaccacgacagcaacgugaagaaccuguacgagaaggugagaagccagcugaagaacaacgccaaggagaucggcaacggcugcuucgaguucuaccacaagugcgacaacaccugcauggagagcgugaagaacggcaccuacgacuaccccaaguacagcgaggaggccaagcugaacagagaggagaucgacggcgugaagcuggagagcaccagaaucuaccagauccuggccaucuacagcaccguggccagcagccuggugcugguggugagccugggcgccaucagcuucuggaugugcagcaacggcagccugcagugcagaaucugcaucuga

SEQ ID NO: 169423 - RNA, 1701 nt, Artificial Sequence
  derived and/or modified CDS sequence (opt4) from hemagglutinin__InfluenzaA__AFN18865
augaaggccauccugguggugcugcuguacaccuucgccaccgccaacgccgacacccugugcaucggcuaccacgccaacaacagcaccgacaccguggacaccgugcuggagaagaacgugaccgugacccacagcgugaaccugcuggaggacaagcacaacggcaagcugugcaagcugagaggcguggccccccugcaccugggcaagugcaacaucgccggcuggauccugggcaaccccgagugcgagagccugagcaccgccagcagcuggagcuacaucguggagaccagcagcagcgacaacggcaccugcuaccccggcgacuucaucgacuacgaggagcugagagagcagcugagcagcgugagcagcuucgagagauucgagaucuuccccaagaccagcagcuggcccaaccacgacagcaacaagggcgugaccgccgccugcccccacgccggcgccaagagcuucuacaagaaccugaucuggcuggugaagaagggcaacagcuaccccaagcugagcaagagcuacaucaacgacaagggcaaggaggugcuggugcuguggggcauccaccaccccagcaccagcgccgaccagcagagccuguaccagaacgccgacgccuacguguucgugggcaccagcagauacagcaagaaguucaagcccgagaucgccaucagacccaaggugagagaccaggagggcagaaugaacuacuacuggacccugguggagcccggcgacaagaucaccuucgaggccaccggcaaccugguggugcccagauacgccuucgccauggagagaaacgccggcagcggcaucaucaucagcgacaccagcgugcacgacugcaacaccaccugccagacccccaagggcgccaucaacaccagccugcccuuccagaacauccaccccaucaccaucggcaagugccccaaguacgugaagagcaccaagcugagacuggccaccggccugagaaacgugcccagcauccagagcagaggccuguucggcgccaucgccggcuucaucgagggcggcuggaccggcaugguggacggcugguacggcuaccaccaccagaacgagcagggcagcggcuacgccgccgaccugaagagcacccagaacgccaucgacaagaucaccaacaaggugaacagcgugaucgagaagaugaacacccaguucaccgccgugggcaaggaguucaaccaccuggagaagagaaucgagaaccugaacaagaagguggacgacggcuuccuggacaucuggaccuacaacgccgagcugcuggugcugcuggagaacgagagaacccuggacuaccacgacagcaacgugaagaaccuguacgagaaggugagaagccagcugaagaacaacgccaaggagaucggcaacggcugcuucgaguucuaccacaagugcgacaacaccugcauggagagcgugaagaacggcaccuacgacuaccccaaguacagcgaggaggccaagcugaacagagaggagaucgacggcgugaagcuggagagcaccagaaucuaccagauccuggccaucuacagcaccguggccagcagccuggugcugguggugagccugggcgccaucagcuucuggaugugcagcaacggcagccugcagugcagaaucugcaucuga

SEQ ID NO: 169424 - RNA, 1701 nt, Artificial Sequence
  derived and/or modified CDS sequence (opt4) from hemagglutinin__InfluenzaA__AFN18875
auggaggccauccugguggugcugcuguacaccuucgccaccgccaacgccgacacccugugcaucggcuaccacgccaacaacagcaccgacaccguggacaccgugcuggagaagaacgugaccgugacccacagcgugaaccugcuggaggacaagcacaacggcaagcugugcaagcugagaggcguggccccccugcaccugggcaagugcaacaucgccggcuggauccugggcaaccccgagugcgagagccugagcaccgccagcagcuggagcuacaucguggagaccagcagcagcgacaacggcaccugcuaccccggcgacuucaucgacuacgaggagcugagagagcagcugagcagcgugagcagcuucgagagauucgagaucuuccccaagaccagcagcuggcccaaccacgacagcaacaagggcgugaccgccgccugcccccacgccggcgccaagagcuucuacaagaaccugaucuggcuggugaagaagggcaacagcuaccccaagcugagcaagagcuacaucaacgacaagggcaaggaggugcuggugcuguggggcauccaccaccccagcaccagcgccgcccagcagagccuguaccagaacgccgacgccuacguguucgugggcagcagcagauacagcaagaaguucaagcccgagaucgccaucagacccaaggugagagaccaggagggcagaaugaacuacuacuggacccugguggagcccggcgacaagaucaccuucgaggccaccggcaaccugguggugcccagauacgccuucgccauggagagaaacgccggcagcggcaucaucaucagcgacacccccgugcacgacugcaacaccaccugccagacccccaagggcgccaucaacaccagccugcccuuccacaacauccaccccaucaccaucggcaagugccccaaguacgugaagagcaccaagcugagacuggccaccggccugagaaacgugcccagcauccagagcagaggccuguucggcgccaucgccggcuucaucgagggcggcuggaccggcaugguggacggcugguacggcuaccaccaccagaacgagcagggcagcggcuacgccgccgaccugaagagcacccagaacgccaucgacgagaucaccaacaaggugaacagcgugaucgagaagaugaacacccaguucaccgccgugggcaaggaguucaaccaccuggagaagagaaucgagaaccugaacaagaagguggacgacggcuuccuggacaucuggaccuacaacgccgagcugcuggugcugcuggagaacgagagaacccuggacuaccacgacagcaacgugaagaaccuguacgagaaggugagaagccagcugaagaacaacgccaaggagaucggcaacggcugcuucgaguucuaccacaagugcgacaacaccugcauggagagcgugaagaacggcaccuacgacuaccccaaguacagcgaggaggccaagcugaacagagaggagaucgacggcgugaagcuggagagcaccagaaucuaccagauccuggccaucuacagcaccguggccagcagccuggugcugguggugagccugggcgccaucagcuucuggaugugcagcaacggcagccugcagugcagaaucugcaucuga

SEQ ID NO: 169425 - RNA, 1701 nt, Artificial Sequence
  derived and/or modified CDS sequence (opt4) from hemagglutinin__InfluenzaA__AFN18885
augaaggccauccugaucgugcugcuguacaccuucgccaccgccaacgccgacacccugugcaucggcuaccacgccaacaacagcaccgacaccguggacaccgugcuggagaagaacgugaccgugacccacagcgugaaccugcuggaggacaagcacaacggcaagcugugcaagcugagaggcguggccccccugcaccugggcaagugcaacaucgccggcuggauccugggcaaccccgagugcgagagccugagcaccgccagcagcuggagcuacaucguggagaccagcagcagcgacaacggcaccugcuaccccggcgacuucaucgacuacgaggagcugagagagcagcugagcagcgugagcagcuucgagagauucgagaucuuccccaagaccagcagcuggcccaaccacgacagcaacaagggcgugaccgccgccugcccccacgccggcgccaagagcuucuacaagaaccugaucuggcuggugaagaagggcaacagcuaccccaagcugagcaagagcuacaucaacgacaagggcaaggaggugcuggugcuguggggcauccaccaccccagcaccagcgccgaccagcagagccuguaccagaacgccgacgccuacguguucgugggcaccagcagauacagcaagaaguucaagcccgagaucgccaucagacccaaggugagagaccaggagggcagaaugaacuacuacuggacccugguggagcccggcgacaagaucaccuucgaggccaccggcaaccugguggugcccagauacgccuucgccauggagagaaacgccggcagcggcaucaucaucagcgacacccccgugcacgacugcaacaccaccugccagacccccaagggcgccaucaacaccaaccugcccuuccagaacauccaccccaucaccaucggcaagugccccaaguacgugaagagcaccaagcugagacuggccaccggccugagaaacgugcccagcacccagagcagaggccuguucggcgccaucgccggcuucaucgagggcggcuggaccggcaugguggacggcugguacggcuaccaccaccagaacgagcagggcagcggcuacgccgccgaccugaagagcacccagaacgccaucgacgagaucaccaacaaggugaacagcgugaucgagaagaugaacacccaguucaccgccgugggcaaggaguucaaccaccuggagaagagaaucgagaaccugaacaagaagguggacgacggcuuccuggacaucuggaccuacaacgccgagcugcuggugcugcuggagaacgagagaacccuggacuaccacgacagcaacgugaagaaccuguacgagaaggugagaagccagcugaagaacaacgccaaggagaucggcaacggcugcuucgaguucuaccacaagugcgacaacaccugcauggagagcgugaagaacggcaccuacgacuaccccaaguacagcgaggaggccaagcugaacagagaggagaucgacggcgugaagcuggagagcaccagaaucuaccagauccuggccaucuacagcaccguggccagcagccuggugcugguggugagccugggcgccaucagcuucuggaugugcagcaacggcagccugcagugcaagaucugcaucuga

SEQ ID NO: 169426 - RNA, 1701 nt, Artificial Sequence; identical to SEQ ID NO: 162729
  derived and/or modified CDS sequence (opt4) from hemagglutinin__InfluenzaA__AFN18892

SEQ ID NO: 169427 - RNA, 1701 nt, Artificial Sequence; identical to SEQ ID NO: 162971
  derived and/or modified CDS sequence (opt4) from hemagglutinin__InfluenzaA__AFN18894

SEQ ID NO: 169428 - RNA, 1701 nt, Artificial Sequence; identical to SEQ ID NO: 169393
  derived and/or modified CDS sequence (opt4) from hemagglutinin__InfluenzaA__AFN18903

SEQ ID NO: 169429 - RNA, 1701 nt, Artificial Sequence; identical to SEQ ID NO: 163831
  derived and/or modified CDS sequence (opt4) from hemagglutinin__InfluenzaA__AFN18910

SEQ ID NO: 169430 - RNA, 1701 nt, Artificial Sequence
  derived and/or modified CDS sequence (opt4) from hemagglutinin__InfluenzaA__AFN18912
auggaggccauccugguggugcugcuguacaccuucgccaccgccaacgccgacacccugugcaucggcuaccacgccaacaacagcaccgacaccguggacaccgugcuggagaagaacgugaccgugacccacagcgugaaccugcuggaggacaagcacaacggcaagcugugcaagcugagaggcguggccccccugcaccugggcaagugcaacaucgccggcuggauccugggcaaccccgagugcgagagccugagcaccgccagcagcuggagcuacaucguggagaccagcagcagcgacaacggcaccugcuaccccggcgacuucaucgacuacgaggagcugagagagcagcugagcagcgugagcagcuucgagagauucgagaucuuccccaagaccagcagcuggcccaaccacgacagcaacaagggcgugaccgccgccugcccccacgccggcgccaagagcuucuacaagaaccugaucuggcuggugaagaagggcaacagcuaccccaagcugagcaagagcuacaucaacgacaagggcaaggaggugcuggugcuguggggcauccaccaccccagcaccagcgccgaccagcagagccuguaccagaacgccgacgccuacguguucgugggcagcagcagauacagcaagaaguucaagcccgagaucgccaucagacccaaggugagagaccaggagggcagaaugaacuacuacuggacccugguggagcccggcgacaagaucaccuucgaggccaccggcaaccugguggugcccagauacgccuucgccauggagagaaacgccggcagcggcaucaucaucagcgacaccagcgugcacgacugcaacaccaccugccagacccccaagggcgccaucaacaccagccugcccuuccacaacauccaccccaucaccaucggcaagugccccaaguacgugaagagcaccaagcugagacuggccaccggccugagaaacgugcccagcauccagagcagaggccuguucggcgccaucgccggcuucaucgagggcggcuggaccggcaugguggacggcugguacggcuaccaccaccagaacgagcagggcagcggcuacgccgccgaccugaagagcacccagaacgccaucgacgagaucaccaacaaggugaacagcgugaucgagaagaugaacacccaguucaccgccgugggcaaggaguucaaccaccuggagaagagaaucgagaaccugaacaagaagguggacgacggcuuccuggacaucuggaccuacaacgccgagcugcuggugcugcuggagaacgagagaacccuggacuaccacgacagcaacgugaagaaccuguacgagaaggugagaagccagcugaagaacaacgccaaggagaucggcaacggcugcuucgaguucuaccacaagugcgacaacaccugcauggagagcgugaagaacggcaccuacgacuaccccaaguacagcgaggaggccaagcugaacagagaggagaucgacggcgugaagcuggagagcaccagaaucuaccagauccuggccaucuacagcaccguggccagcagccuggugcugguggugagccugggcgccaucagcuucuggaugugcagcaacggcagccugcagugcagaaucugcaucuga

SEQ ID NO: 169431 - RNA, 1701 nt, Artificial Sequence; identical to SEQ ID NO: 163831
  derived and/or modified CDS sequence (opt4) from hemagglutinin__InfluenzaA__AFN18917

SEQ ID NO: 169432 - RNA, 1701 nt, Artificial Sequence; identical to SEQ ID NO: 162729
  derived and/or modified CDS sequence (opt4) from hemagglutinin__InfluenzaA__AFN18927

SEQ ID NO: 169433 - RNA, 1701 nt, Artificial Sequence; identical to SEQ ID NO: 165395
  derived and/or modified CDS sequence (opt4) from hemagglutinin__InfluenzaA__AFN18937

SEQ ID NO: 169434 - RNA, 1701 nt, Artificial Sequence
  derived and/or modified CDS sequence (opt4) from hemagglutinin__InfluenzaA__AFN18952
augaaggccauccugguggugcugcuguacaccuucgccaccgccaacgccgacacccugugcaucggcuaccacgccaacaacagcaccgacaccguggacaccgugcuggagaagaacgugaccgugacccacagcgugaacauccuggaggacaagcacaacagaaagcugugcaagcugagaggcguggccccccugcaccugggcaagugcaacaucgccggcuggauccugggcaaccccgagugcgagagccugagcaccgccagcagcuggagcuacaucguggagaccagcagcagcgacaacggcaccugcuaccccggcgacuucaucgacuacgaggagcugagagagcagcugagcagcgugagcagcuucgagagauucgagaucuuccccaagaccagcagcuggcccaaccacgacagcaacaagggcgugaccgccgccugcccccacgccggcgccaagagcuucuacaagaaccugaucuggcuggugaagaagggcaacagcuaccccaagcugagcaagagcuacaucaacgacaagggcaaggaggugcuggugcuguggggcauccaccaccccagcaccagcgccgaccagcagagccuguaccagaacgccgacgccuacguguucgugggcaccagcagauacagcaagaaguucaagcccgagaucgccaucagacccaaggugagagaccaggagggcagaaugaacuacuacuggacccugguggagcccggcgacaagaucaccuucgaggccaccggcaaccugguggugcccagauacgccuucgccauggagagaaacgccggcagcggcaucaucaucagcgacacccccgugcacgacugcaacaccaccugccagacccccaagggcgccaucaacaccagccugcccuuccagaacauccaccccaucaccaucggcaagugccccaaguacgugaagagcaccaagcugagacuggccaccggccugagaaacgugcccagcauccagagcagaggccuguucggcgccaucgccggcuucaucgagggcggcuggaccggcaugguggacggcugguacggcuaccaccaccagaacgagcagggcagcggcuacgccgccgaccugaagagcacccagaacgccaucgacgagaucaccaacaaggugaacagcgugaucgagaagaugaacacccaguucaccgccgugggcaaggaguucaaccaccuggagaagagaaucgagaaccugaacaagaagguggacgacggcuuccuggacaucuggaccuacaacgccgagcugcuggugcugcuggagaacgagagaacccuggacuaccacgacagcaacgugaagaaccuguacgagaaggugagaagccagcugaagaacaacgccaaggagaucggcaacggcugcuucgaguucuaccacaagugcgacaacaccugcauggagagcgugaagaacggcaccuacgacuaccccaaguacagcgaggaggccaagcugaacagagagaagaucgacggcgugaagcuggagagcaccagaaucuaccagauccuggccaucuacagcaccguggccagcagccuggugcugguggugagccugggcgccaucagcuucuggaugugcagcaacggcagccugcagugcagaaucugcaucuga

SEQ ID NO: 169435 - RNA, 1701 nt, Artificial Sequence
  derived and/or modified CDS sequence (opt4) from hemagglutinin__InfluenzaA__AFN18957
augaaggccauccugguggugcugcuguacaccuucgccaccgccaacgccgacacccugugcaucggcuaccacgccaacaacagcaccgacaccguggacaccgugcuggagaagaacgugaccgugacccacagcgugaaccugcuggaggacaaccacaacggcaagcugugcaagcugagaggcguggccccccugcaccugggcaagugcaacaucgccggcuggauccugggcaaccccgagugcgagagccugagcaccgccagcagcuggagcuacaucguggagaccagcagcagcgacaacggcaccugcuaccccggcgacuucaucgacuacgaggagcugagagagcagcugagcagcgugagcagcuucgagagauucgagaucuuccccaagaccagcagcuggcccaaccacgacagcaacaagggcgugaccgccgccugcccccacgccggcgccaagagcuucuacaagaaccugaucuggcuggugaagaagggcaacagcuaccccaagcugagcaagagcuacaucaacgacaagggcaaggaggugcuggugcuguggggcauccaccaccccagcaccagcgccgaccagcagagccuguaccagaacgccgacgccuacguguucgugggcaccagcagauacagcaagaaguucaagcccgagaucgccaucagacccaaggugagagaccaggagggcagaaugaacuacuacuggacccugguggagcccggcgacaagaucaccuucgaggccaccggcaaccugguggugcccagauacgccuucgccauggagagaaacgccggcagcggcaucaucaucagcgacacccccgugcacgacugcaacaccaccugccagacccccaagggcgccaucaacaccagccugcccuuccagaacauccaccccaucaccaucggcaagugccccaaguacgugaagagcaccaagcugagacuggccaccggccugagaaacgugcccagcauccagagcagaggccuguucggcgccaucgccggcuucaucgagggcggcuggaccggcaugguggacggcugguacggcuaccaccaccagaacgagcagggcagcggcuacgccgccgaccugaagagcacccagaacgccaucgacgagaucaccaacaaggugaacagcgugaucgagaagaugaacacccaguucaccgccgugggcaaggaguucaaccaccuggagaagagaaucgagaaccugaacaagaagguggacgacggcuuccuggacaucuggaccuacaacgccgagcugcuggugcugcuggagaacgagagaacccuggacuaccacgacagcaacgugaagaaccuguacgagaaggugagaagccagcugaagaacaacgccaaggagaucggcaacggcugcuucgaguucuaccacaagugcgacaacaccugcauggagagcgugaagaacggcaccuacgacuaccccaaguacagcgaggaggccaagcugaacagagaggagaucgacggcgugaagcuggagagcaccagaaucuaccagauccuggccaucuacagcaccguggccagcagccuggugcugguggugagccugggcgccaucagcuucuggaugugcagcaacggcagccugcagugcagaaucugcaucuga

SEQ ID NO: 169436 - RNA, 1701 nt, Artificial Sequence; identical to SEQ ID NO: 168818
  derived and/or modified CDS sequence (opt4) from hemagglutinin__InfluenzaA__AFN18964

SEQ ID NO: 169437 - RNA, 1701 nt, Artificial Sequence
  derived and/or modified CDS sequence (opt4) from hemagglutinin__InfluenzaA__AFN18974
augaaggccauccugguggugcugcuguacaccuucgccaccgccaacgccgacacccugugcaucggcuaccacgccaacaacagcaccgacaccguggacaccgugcuggagaagaacgugaccgugacccacagcgugaaccugcuggaggacaagcacaacggcaagcugugcaagcugagaggcguggccccccugcaccugggcaagugcaacaucgccggcuggauccugggcaaccccgagugcgagagccugagcaccgccagcagcuggagcuacaucguggagaccagcagcagcgacaacggcaccugcuaccccggcgacuucaucgacuacgaggagcugagagagcagcugagcagcaugagcagcuucgagagauucgagaucuuccccaagaccagcagcuggcccaaccacgaccccaacaagggcgugaccgccgccugcccccacgccggcgccaagagcuucuacaagaaccugaucuggcuggugaagaagggcaacagcuaccccaagcugagcaagagcuacaucaacgacaagggcaagaaggugcuggugcuguggggcauccaccaccccagcaccagcgccgaccagcagagccuguaccagaacgccgacgccuacguguucgugggcaccagcagauacagcaagaaguucaagcccgagaucgccaucagacccaaggugagagaccaggagggcagaaugaacuacuacuggacccugguggagcccggcgacaagaucaccuucgaggccaccggcaaccugguggugcccagauacgccuucgccauggagagaaacgccggcagcggcaucaucaucagcgacacccccgugcacgacugcaacaccaccugccagacccccaagggcgccaucaacaccagccugcccuuccagaacauccaccccaucaccaucggcaagugccccaaguacgugaagagcaccaagcugagacuggccaccggccugagaaacgugcccagcauccagagcagaggccuguucggcgccaucgccggcuucaucgagggcggcuggaccggcaugguggacggcugguacggcuaccaccaccagaacgagcagggcagcggcuacgccgccgaccugaagagcacccagaacgccaucgacgagaucaccaacaaggugaacagcgugaucgagaagaugaacacccaguucaccgccgugggcaaggaguucaaccaccuggagaagagaaucgagaaccugaacaagaagguggacgacggcuuccuggacaucuggaccuacaacgccgagcugcuggugcugcuggagaacgagagaacccuggacuaccacgacagcaacgugaagaaccuguacgagaaggugagaagccagcugaagaacaacgccaaggagaucggcaacggcugcuucgaguucuaccacaagugcgacaacaccugcauggagagcgugaagaacggcaccuacgacuaccccaaguacagcgacgaggccaagcugaacagagaggagaucgacggcgugaagcuggagagcaccagaaucuaccagauccuggccaucuacagcaccguggccagcagccuggugcugguggugagccugggcgccaucagcuucuggaugugcagcaacggcagccugcagugcagaaucugcaucuga

SEQ ID NO: 169438 - RNA, 1701 nt, Artificial Sequence; identical to SEQ ID NO: 164281
  derived and/or modified CDS sequence (opt4) from hemagglutinin__InfluenzaA__AFN18979

SEQ ID NO: 169439 - RNA, 1701 nt, Artificial Sequence
  derived and/or modified CDS sequence (opt4) from hemagglutinin__InfluenzaA__AFN18982
augaaggccauccugguggugcugcuguacaccuucgccaucgccaacgccgacacccugugcaucggcuaccacgccaacaacagcaccgacaccguggacaccgugcuggagaagaacgugaccgugacccacagcgugaaccugcuggaggacaagcacaacggcaagcugugcaagcugagaggcguggccccccugcaccugggcaagugcaacaucgccggcuggauccugggcaaccccgagugcgagagccugagcaccgccagcagcuggagcuacaucguggagaccagcagcagcgacaacggcaccugcuaccccggcgacuucaucgacuacgaggagcugagagagcagcugagcagcgugagcagcuucgagagauucgagaucuuccccaagaccaacagcuggcccaaccacgacagcaacaagggcgugaccgccgccugcccccacgccggcgccaagagcuucuacaagaaccugaucuggcuggugaagaagggcaacagcuaccccaagcugagcaagagcuacaucaacgacaagggcaaggaggugcuggugcuguggggcauccaccaccccagcaccagcgccgaccagcagagccuguaccagaacgccgacgccuacguguucgugggcaccagcagauacagcaagaaguucaagcccgagaucgccaucagacccaaggugagagaccaggagggcagaaugaacuacuacuggacccugguggagcccggcgacaagaucaccuucgaggccaccggcaaccugguggugcccagauacgccuucgccauggagagaaacgccggcagcggcaucaucaucagcgacacccccgugcacgacugcaacaccaccugccagacccccaagggcgccaucaacaccagccugcccuuccagaacauccaccccaucaccaucggcaagugccccaaguacgugaagagcaccaagcugagacuggccaccggccugagaaacgugcccagcauccagagcagaggccuguucggcgccaucgccggcuucaucgagggcggcuggaccggcaugguggacggcugguacggcuaccaccaccagaacgagcagggcagcggcuacgccgccgaccugaagagcacccagcacgccaucgacgagaucaccaacaaggugaacagcgugaucgagaagaugaacacccaguucaccgccgugggcaaggaguucaaccaccuggagaagagaaucgagaaccugaacaagaagguggacgacggcuuccuggacaucuggaccuacaacgccgagcugcuggugcugcuggagaacgagagaacccuggacuaccacgacagcaacgugaagaaccuguacgagaaggugagaagccagcugaagaacaacgccaaggagaucggcaacggcugcuucgaguucuaccacaagugcgacaacaccugcauggagagcgugaagaacggcaccuacgacuaccccaaguacagcgaggaggccaagcugaacagagaggagaucaacggcgugaagcuggagagcaccagaaucuaccagauccuggccaucuacagcaccguggccagcagccuggugcugguggugagccugggcgccaucagcuucuggaugugcagcaacggcagccugcagugcagaaucugcaucuga

SEQ ID NO: 169440 - RNA, 1701 nt, Artificial Sequence; identical to SEQ ID NO: 169332
  derived and/or modified CDS sequence (opt4) from hemagglutinin__InfluenzaA__AFN18984

SEQ ID NO: 169441 - RNA, 1701 nt, Artificial Sequence; identical to SEQ ID NO: 162729
  derived and/or modified CDS sequence (opt4) from hemagglutinin__InfluenzaA__AFN18986

SEQ ID NO: 169442 - RNA, 1701 nt, Artificial Sequence; identical to SEQ ID NO: 162729
  derived and/or modified CDS sequence (opt4) from hemagglutinin__InfluenzaA__AFN18988

SEQ ID NO: 169443 - RNA, 1701 nt, Artificial Sequence; identical to SEQ ID NO: 163893
  derived and/or modified CDS sequence (opt4) from hemagglutinin__InfluenzaA__AFN18993

SEQ ID NO: 169444 - RNA, 1701 nt, Artificial Sequence; identical to SEQ ID NO: 163893
  derived and/or modified CDS sequence (opt4) from hemagglutinin__InfluenzaA__AFN18999

SEQ ID NO: 169445 - RNA, 1701 nt, Artificial Sequence; identical to SEQ ID NO: 163527
  derived and/or modified CDS sequence (opt4) from hemagglutinin__InfluenzaA__AFN19006

SEQ ID NO: 169446 - RNA, 1701 nt, Artificial Sequence; identical to SEQ ID NO: 162729
  derived and/or modified CDS sequence (opt4) from hemagglutinin__InfluenzaA__AFN19026

SEQ ID NO: 169447 - RNA, 1701 nt, Artificial Sequence; identical to SEQ ID NO: 163869
  derived and/or modified CDS sequence (opt4) from hemagglutinin__InfluenzaA__AFN19036

SEQ ID NO: 169448 - RNA, 1701 nt, Artificial Sequence; identical to SEQ ID NO: 162729
  derived and/or modified CDS sequence (opt4) from hemagglutinin__InfluenzaA__AFN19043

SEQ ID NO: 169449 - RNA, 1701 nt, Artificial Sequence; identical to SEQ ID NO: 162729
  derived and/or modified CDS sequence (opt4) from hemagglutinin__InfluenzaA__AFN19053

SEQ ID NO: 169450 - RNA, 1701 nt, Artificial Sequence; identical to SEQ ID NO: 162729
  derived and/or modified CDS sequence (opt4) from hemagglutinin__InfluenzaA__AFN19063

SEQ ID NO: 169451 - RNA, 1701 nt, Artificial Sequence; identical to SEQ ID NO: 162729
  derived and/or modified CDS sequence (opt4) from hemagglutinin__InfluenzaA__AFN19070

SEQ ID NO: 169452 - RNA, 1701 nt, Artificial Sequence
  derived and/or modified CDS sequence (opt4) from hemagglutinin__InfluenzaA__AFN19076
augaaggccauccugguggugcugcuguacaccuucgccaccgccaacgccgacacccugugcaucggcuaccacgccaacaacagcaccgacaccguggacaccgugcuggagaaggacgugaccgugacccacagcgugaaccugcuggaggacaagcacaacggcaagcugugcaagcugagaggcguggccccccugcaccugggcaagugcaacaucgccggcuggauccugggcaaccccgagugcgagagccugagcaccgccagcagcuggagcuacaucguggagaccagcagcagcgacaacggcaccugcuaccccggcgacuucaucgacuacgaggagcugagagagcagcugagcagcgugagcagcuucgagagauucgagaucuuccccaagaccagcagcuggcccaaccacgacagcaacaagggcgugaccgccgccugcccccacgccggcgccaagagcuucuacaagaaccugaucuggcuggugaagaagggcaacagcuaccccaagcugagcaagagcuacaucaacgacaagggcaaggaggugcuggugcuguggggcauccaccaccccagcaccagcgccgaccagcagagccuguaccagaacgccgacgccuacguguucgugggcaccagcagauacagcaagaaguucaagcccgagaucgccaucagacccaaggugagagaccaggagggcagaaugaacuacuacuggacccugguggagcccggcgacaagaucaccuucgaggccaccggcaaccugguggugcccagauacgccuucgccauggagagaaacgccggcagcggcaucaucaucagcgacacccccgugcacgacugcaacaccaccugccagacccccaagggcgccaucaacaccagccugcccuuccagaacauccaccccaucaccaucggcaagugccccaaguacgugaagagcaccaagcugagacuggccaccggccugagaaacgugcccagcauccagagcagaggccuguucggcgccaucgccggcuucaucgagggcggcuggaccggcaugguggacggcugguacggcuaccaccaccagaacgagcagggcagcggcuacgccgccgaccugaagagcacccagaacgccaucgacgagaucaccaacaaggugaacagcgugaucgagaagaugaacacccaguucaccgccgugggcaaggaguucaaccaccuggagaagagaaucgagaaccugaacaagaagguggacgacggcuuccuggacaucuggaccuacaacgccgagcugcuggugcugcuggagaacgagagaacccuggacuaccacgacagcaacgugaagaaccuguacgagaaggugagaagccagcugaagaacaacgccaaggagaucggcaacggcugcuucgaguucuaccacaagugcgacaacaccugcauggagagcgugaagaacggcaccuacgacuaccccaaguacagcgaggaggccaagcugaacagagaggagaucgacggcgugaagcuggagagcaccagaaucuaccagauccuggccaucuacagcaccguggccagcagccuggugcugguggugagccugggcgccaucagcuucuggaugugcagcaacggcagccugcagugcagaaucugcaucuga

SEQ ID NO: 169453 - RNA, 1701 nt, Artificial Sequence; identical to SEQ ID NO: 162729
  derived and/or modified CDS sequence (opt4) from hemagglutinin__InfluenzaA__AFN19082

SEQ ID NO: 169454 - RNA, 1701 nt, Artificial Sequence; identical to SEQ ID NO: 162729
  derived and/or modified CDS sequence (opt4) from hemagglutinin__InfluenzaA__AFN19088

SEQ ID NO: 169455 - RNA, 1701 nt, Artificial Sequence; identical to SEQ ID NO: 162729
  derived and/or modified CDS sequence (opt4) from hemagglutinin__InfluenzaA__AFN19097

SEQ ID NO: 169456 - RNA, 1701 nt, Artificial Sequence; identical to SEQ ID NO: 162729
  derived and/or modified CDS sequence (opt4) from hemagglutinin__InfluenzaA__AFN19104

SEQ ID NO: 169457 - RNA, 1701 nt, Artificial Sequence; identical to SEQ ID NO: 162729
  derived and/or modified CDS sequence (opt4) from hemagglutinin__InfluenzaA__AFN19113

SEQ ID NO: 169458 - RNA, 1701 nt, Artificial Sequence; identical to SEQ ID NO: 162729
  derived and/or modified CDS sequence (opt4) from hemagglutinin__InfluenzaA__AFN19119

SEQ ID NO: 169459 - RNA, 1701 nt, Artificial Sequence; identical to SEQ ID NO: 165240
  derived and/or modified CDS sequence (opt4) from hemagglutinin__InfluenzaA__AFN19125

SEQ ID NO: 169460 - RNA, 1701 nt, Artificial Sequence; identical to SEQ ID NO: 162729
  derived and/or modified CDS sequence (opt4) from hemagglutinin__InfluenzaA__AFN19134

SEQ ID NO: 169461 - RNA, 1701 nt, Artificial Sequence; identical to SEQ ID NO: 162729
  derived and/or modified CDS sequence (opt4) from hemagglutinin__InfluenzaA__AFN19144

SEQ ID NO: 169462 - RNA, 1701 nt, Artificial Sequence; identical to SEQ ID NO: 165284
  derived and/or modified CDS sequence (opt4) from hemagglutinin__InfluenzaA__AFN19154

SEQ ID NO: 169463 - RNA, 1701 nt, Artificial Sequence; identical to SEQ ID NO: 162729
  derived and/or modified CDS sequence (opt4) from hemagglutinin__InfluenzaA__AFN19164

SEQ ID NO: 169464 - RNA, 1701 nt, Artificial Sequence; identical to SEQ ID NO: 162729
  derived and/or modified CDS sequence (opt4) from hemagglutinin__InfluenzaA__AFN19174

SEQ ID NO: 169465 - RNA, 1701 nt, Artificial Sequence; identical to SEQ ID NO: 162729
  derived and/or modified CDS sequence (opt4) from hemagglutinin__InfluenzaA__AFN19184

SEQ ID NO: 169466 - RNA, 1701 nt, Artificial Sequence; identical to SEQ ID NO: 162729
  derived and/or modified CDS sequence (opt4) from hemagglutinin__InfluenzaA__AFN19194

SEQ ID NO: 169467 - RNA, 1701 nt, Artificial Sequence; identical to SEQ ID NO: 162729
  derived and/or modified CDS sequence (opt4) from hemagglutinin__InfluenzaA__AFN19203

SEQ ID NO: 169468 - RNA, 1701 nt, Artificial Sequence; identical to SEQ ID NO: 162729
  derived and/or modified CDS sequence (opt4) from hemagglutinin__InfluenzaA__AFN19213

SEQ ID NO: 169469 - RNA, 1701 nt, Artificial Sequence; identical to SEQ ID NO: 162729
  derived and/or modified CDS sequence (opt4) from hemagglutinin__InfluenzaA__AFN19223

SEQ ID NO: 169470 - RNA, 1701 nt, Artificial Sequence; identical to SEQ ID NO: 162729
  derived and/or modified CDS sequence (opt4) from hemagglutinin__InfluenzaA__AFN19233

SEQ ID NO: 169471 - RNA, 1701 nt, Artificial Sequence
  derived and/or modified CDS sequence (opt4) from hemagglutinin__InfluenzaA__AFN19243
augaaggccauccugguggugcugcuguacaccuucgccaccgccaacgccgacacccugugcaucggcuaccacgccaacaacagcaccgacaccguggacaccgugcuggagaagaacgugaccgugacccacagcgugaaccugcuggaggacaagcacaacggcaagcugugcaagcugagaggcguggccccccugcaccugggcaagugcaacaucgccggcuggauccugggcaaccccgagugcgagagccugagcaccgccagcagcuggagcuacaucguggagaccagcagcagcgacaacggcaccugcuaccccggcgacuucaucgacuacgaggagcugagagagcagcugagcagcgugagcagcuucgagagauucgagaucuuccccaagaccagcagcuggcccaaccacgacagcaacaagggcgugaccgccgccugcccccacgccggcgccaagagcuucuacaagaaccugaucuggcuggugaagaagggcaacagcuaccccaagcugagcaagagcuacaucaacgacaagggcaaggaggugcuggugcuguggggcauccaccaccccagcaccagcgccgaccagcagagccuguaccagaacgccgacgccuacguguucgugggcaccagcaaguacagcaagaaguucaagcccgagaucgccaucagacccaaggugagagaccaggagggcagaaugaacuacuacuggacccugguggagcccggcgacaagaucaccuucgaggccaccggcaaccugguggugcccagauacgccuucgccauggagagaaacgccggcagcggcaucaucaucagcgacacccccgugcaggacugcaacaccaccugccagacccccaagggcgccaucaacaccagccugcccuuccagaacauccaccccaucaccaucggcaagugccccaaguacgugaagagcaccaagcugagacuggccaccggccugagaaacgugcccagcauccagagcagaggccuguucggcgccaucgccggcuucaucgagggcggcuggaccggcaugguggacggcugguacggcuaccaccaccagaacgagcagggcagcggcuacgccgccgaccugaagagcacccagaacgccaucgacgagaucaccaacaaggugaacagcgugaucgagaagaugaacacccaguucaccgccgugggcaaggaguucaaccaccuggagaagagaaucgagaaccugaacaagaagguggacgacggcuuccuggacaucuggaccuacaacgccgagcugcuggugcugcuggagaacgagagaacccuggacuaccacgacagcaacgugaagaaccuguacgagaaggugagaagccagcugaagaacaacgccaaggagaucggcaacggcugcuucgaguucuaccacaagugcgacaacaccugcauggagagcgugaagaacggcaccuacgacuaccccaaguacagcgaggaggccaagcugaacagagaggagaucgacggcgugaagcuggagagcaccagaaucuaccagauccuggccaucuacagcaccguggccagcagccuggugcugguggugagccugggcgccaucagcuucuggaugugcagcaacggcagccugcagugcagaaucugcaucuga

SEQ ID NO: 169472 - RNA, 1701 nt, Artificial Sequence; identical to SEQ ID NO: 164845
  derived and/or modified CDS sequence (opt4) from hemagglutinin__InfluenzaA__AFN19250

SEQ ID NO: 169473 - RNA, 1701 nt, Artificial Sequence; identical to SEQ ID NO: 162729
  derived and/or modified CDS sequence (opt4) from hemagglutinin__InfluenzaA__AFN19259

SEQ ID NO: 169474 - RNA, 1701 nt, Artificial Sequence; identical to SEQ ID NO: 162729
  derived and/or modified CDS sequence (opt4) from hemagglutinin__InfluenzaA__AFN19269

SEQ ID NO: 169475 - RNA, 1701 nt, Artificial Sequence; identical to SEQ ID NO: 162729
  derived and/or modified CDS sequence (opt4) from hemagglutinin__InfluenzaA__AFN19279

SEQ ID NO: 169476 - RNA, 1701 nt, Artificial Sequence; identical to SEQ ID NO: 163590
  derived and/or modified CDS sequence (opt4) from hemagglutinin__InfluenzaA__AFN19286

SEQ ID NO: 169477 - RNA, 1701 nt, Artificial Sequence; identical to SEQ ID NO: 162729
  derived and/or modified CDS sequence (opt4) from hemagglutinin__InfluenzaA__AFN19295

SEQ ID NO: 169478 - RNA, 1701 nt, Artificial Sequence; identical to SEQ ID NO: 162729
  derived and/or modified CDS sequence (opt4) from hemagglutinin__InfluenzaA__AFN19305

SEQ ID NO: 169479 - RNA, 1701 nt, Artificial Sequence; identical to SEQ ID NO: 163595
  derived and/or modified CDS sequence (opt4) from hemagglutinin__InfluenzaA__AFN19315

SEQ ID NO: 169480 - RNA, 1701 nt, Artificial Sequence; identical to SEQ ID NO: 162729
  derived and/or modified CDS sequence (opt4) from hemagglutinin__InfluenzaA__AFN19325

SEQ ID NO: 169481 - RNA, 1701 nt, Artificial Sequence; identical to SEQ ID NO: 162729
  derived and/or modified CDS sequence (opt4) from hemagglutinin__InfluenzaA__AFN19335

SEQ ID NO: 169482 - RNA, 1701 nt, Artificial Sequence; identical to SEQ ID NO: 162729
  derived and/or modified CDS sequence (opt4) from hemagglutinin__InfluenzaA__AFN19344

SEQ ID NO: 169483 - RNA, 1701 nt, Artificial Sequence
  derived and/or modified CDS sequence (opt4) from hemagglutinin__InfluenzaA__AFN19351
augaagaccaucaucgcccugagcuacauccugugccugguguucgcccagaagcugcccggcaacgacaacagcauggccacccugugccugggccaccacgccgugcccaacggcaccaucgugaagaccaucaccaacgaccagaucgaggugaccaacgccaccgagcuggugcagaacagcagcaucggcgagaucugcgacagcccccaccagauccuggacggcgagaacugcacccugaucgacgcccugcugggcgacccccagugcgacggcuuccagaacaagaagugggaccuguucguggagagaagcaaggccuacagcaacugcuaccccuacgacgugcccgacuacgccagccugagaagccugguggccagcagcggcacccuggaguucaacaacgagagcuucaacuggaccggcgugacccagaacggcaccagcagcgccugcaucagaagaagcaacaacagcuucuucagcagacugaacuggcugacccaccugaacuucaaguaccccgcccugaacgugaccaugcccaacaacgagcaguucgacaagcuguacaucuggggcgugcaccaccccggcaccgacaaggaccagaucuuccuguacgcccagagcagcggcagaaucaccgugagcaccaagagaagccagcaggccgugauccccaacaucggcagcagacccagaaucagaaacauccccagcagaaucagcaucuacuggaccaucgugaagcccggcgacauccugcugaucaacagcaccggcaaccugaucgcccccagaggcuacuucaagaucagaagcggcaagagcagcaucaugagaagcgacgcccccaucggcaagugcaacagcgagugcaucacccccaacggcagcauccccaacgacaagcccuuccagaacgugaacagaaucaccuacggcgccugccccagauacgugaagcagagcacccugaagcuggccaccggcaugagaaacgugcccgagaagcagaccagaggcaucuucggcgccaucgccggcuucaucgagaacggcugggagggcaugguggacggcugguacggcuucagacaccagaacagcgagggcagaggccaggccgccgaccugaagagcacccaggccgccaucgaccagaucaacggcaagcugaacagacugaucggcaagaccaacgagaaguuccaccagaucgagaaggaguucagcgagguggagggcagaauccaggaccuggagaaguacguggaggacaccaagaucgaccuguggagcuacaacgccgagcugcugguggcccuggagaaccagcacaccaucgaccugaccgacagcgagaugaacaagcuguucgagaagaccaagaagcagcugagagagaacgccgaggacaugggcaacggcugcuucaagaucuaccacaagugcgacaacgccugcaucggcagcaucagaaacggcaccuacgaccacgacguguacagagacgaggcccugaacaacagauuccagaucaagggcguggagcugaagagcggcuacaaggacuggauccuguggaucagcuucgccaucagcugcuuccugcugugcguggcccugcugggcuucaucaugugggccugccagaagggcaacgugagaugcaacaucugcaucuga

SEQ ID NO: 169484 - RNA, 1701 nt, Artificial Sequence; identical to SEQ ID NO: 169134
  derived and/or modified CDS sequence (opt4) from hemagglutinin__InfluenzaA__AFN19355

SEQ ID NO: 169485 - RNA, 1701 nt, Artificial Sequence; identical to SEQ ID NO: 169134
  derived and/or modified CDS sequence (opt4) from hemagglutinin__InfluenzaA__AFN19357

SEQ ID NO: 169486 - RNA, 1701 nt, Artificial Sequence; identical to SEQ ID NO: 169134
  derived and/or modified CDS sequence (opt4) from hemagglutinin__InfluenzaA__AFN19361

SEQ ID NO: 169487 - RNA, 1701 nt, Artificial Sequence
  derived and/or modified CDS sequence (opt4) from hemagglutinin__InfluenzaA__AFN19363
augaagaccaucaucgcccugagcuacauccugugccugguguucgcccagaagcugcccggcaacgacaacagcaccgccacccugugccugggccaccacgccgugcccaacggcaccaucgugaagaccaucaccaacgaccagaucgaggugaccaacgccaccgagcuggugcagaucagcagcaccggcgagaucugcgacagcccccaccagauccuggacggcgagaacugcacccugaucgacgcccugcugggcgacccccagugcgacggcuuccagaacaagaagugggaccuguucguggagagaagcaaggccuacagcaacugcuaccccuacgacgugcccgacuacgccagccugagaagccugguggccagcagcggcacccuggaguucaacaacgagagcuucaacuggaccggcgugacccagaacggcaccagcagcgccugcaucagaagaagcaacagcagcuucuucagcagacugaacuggcugacccaccugaacuucaaguaccccgcccugaacgugaccaugcccaacaacgagcaguucgacaagcuguacaucuggggcgugcaccaccccggcaccgacaaggaccagaucuuccuguacgcccagagcagcggcagaaucaccgugagcaccaagagaagccagcaggccgugauccccaacaucggcagcagacccagaaucagaaacauccccagcagaaucagcaucuacuggaccaucgugaagcccggcgacauccugcugaucaacagcaccggcaaccugaucgcccccagaggcuacuucaagaucagaagcggcaagagcagcaucaugagaagcgacgcccccaucggcaagugcaacagcgagugcaucacccccaacggcagcauccccaacgacaagcccuuccagaacgugaacagaaucaccuacggcgccugccccagauacgugaagcagagcacccugaagcuggccaccggcaugagaaacgugcccgagaagcagaccagaggcaucuucggcgccaucgccggcuucaucgagaacggcugggagggcaugguggacggcugguacggcuucagacaccagaacagcgagggcagaggccaggccgccgaccugaagagcacccaggccgccaucgaccagaucaacggcaagcugaacagacugaucggcaagaccaacgagaaguuccaccagaucgagaaggaguucagcgagguggagggcagaauccaggaccuggagaaguacguggaggacaccaagaucgaccuguggagcuacaacgccgagcugcugguggcccuggagaaccagcacaccaucgaccugaccgacagcgagaugaacaagcuguucgagaagaccaagaagcagcugagagagaacgccgaggacaugggcaacggcugcuucaagaucuaccacaagugcgacaacgccugcaucggcagcaucagaaacggcaccuacaaccacgacguguacagagacgaggcccugaacaacagauuccagaucaagggcguggagcugaagagcggcuacaaggacuggauccuguggaucagcuucgccaucagcugcuuccugcugugcguggcccugcugggcuucaucaugugggccugccagaagggcaacaucagaugcaacaucugcaucuga

SEQ ID NO: 169488 - RNA, 1701 nt, Artificial Sequence; identical to SEQ ID NO: 167042
  derived and/or modified CDS sequence (opt4) from hemagglutinin__InfluenzaA__AFN19365

SEQ ID NO: 169489 - RNA, 1701 nt, Artificial Sequence
  derived and/or modified CDS sequence (opt4) from hemagglutinin__InfluenzaA__AFN19367
augaagaccaucaucgcccugagcuacauccugugccugguguucgcccagaagcugcccgagaacgacaacagcaccgccacccugugccugggccaccacgccgugcccaacggcaccaucgugaagaccaucaccaacgaccagaucgaggugaccaacgccaccgagcuggugcagagcagcagcaccggcgagaucugcgacagcccccaccagauccuggacggcgugaacugcacccugaucgacgcccugcugggcgacccccagugcgacggcuuccagaacaagaagugggaccuguucguggagagaagcaaggccuacagcaacugcuaccccuacgacgugcccgacuacgccagccugagaagccugguggccagcagcggcacccuggaguucaacaacgagagcuucaacuggaccggcgugacccagaacggcaccagcagcgccugcaucagaagaagcaacagcagcuucuucagcagacugaacuggcugacccaccugaacuucaaguaccccgcccugaacgugaccaugcccaacaacgagcaguucgacaagcuguacaucuggggcgugcaccaccccggcaccgacaaggaccagaucuuccuguacgcccagagcagcggcagaaucaccgugagcaccaagagaagccagcaggccgugauccccaacaucggcagcagacccagaaucagaaacauccccagcagaaucagcaucuacuggaccaucgugaagcccggcgacauccugcugaucaacagcaccggcaaccugaucgcccccagaggcuacuucaagauccagagcggcaagagcagcaucaugagaagcgacgcccccaucggcaagugcaacagcgagugcaucacccccaacggcagcauccccaacgacaagcccuuccagaacgugaacagaaucaccuacggcgccugccccagauacgugaagcagagcacccugaagcuggccaccggcaugagaaacgugcccgagaagcagaccagaggcaucuucggcgccaucgccggcuucaucgagaacggcugggagggcaugguggacggcugguacggcuucagacaccagaacagcgagggcagaggccaggccgccgaccugaagagcacccaggccgccaucgaccagaucaacggcaagcugaacagacugaucggcaagaccaacgagaaguuccaccagaucgagaaggaguucagcgagguggagggcagaauccaggaccuggagaaguacguggaggacaccaagaucgaccuguggagcuacaacgccgagcugcugguggcccuggagaaccagcacaccaucgaccugaccgacagcgagaugaacaagcuguucgagaagaccaagaagcagcugagagagaacgccgaggacaugggcaacggcugcuucaagaucuaccacaagugcgacaacgccugcaucggcagcaucagaaacggcaccuacaaccacgacguguacagagacgaggcccugaacaacagauuccagaucaagggcguggagcugaagagcggcuacaaggacuggauccuguggaucagcuucgccaucagcugcuuccugcugugcguggcccugcugggcuucaucaugugggccugccagaagggcaacaucagaugcaacaucugcaucuga

SEQ ID NO: 169490 - RNA, 1701 nt, Artificial Sequence
  derived and/or modified CDS sequence (opt4) from hemagglutinin__InfluenzaA__AFN19369
augaagaccaucaucgcccugagcuacauccugugccugguguucgcccagaagcugcccgagaacgacaacagcaccgccacccugugccugggccaccacgccgugcccaacggcaccaucgugaagaccaucaccaacgaccagaucgaggugaccaacgccaccgagcuggugcagagcagcagcaccggcgagaucugcgacagcccccaccagauccuggacggcgugaacugcacccugaucgacgcccugcugggcgacccccagugcgacggcuuccagaacaagaagugggaccuguucguggagagaagcaaggccuacagcaacugcuaccccuacgacgugcccgacuacgccagccugagaagccugguggccagcagcggcacccuggaguucaacaacgagagcuucaacuggaccggcgugacccagaacggcaccagcagcgccugcaucagaagaagcaacagcagcuucuucagcagacugaacuggcugacccaccugaacuucaaguaccccgcccugaacgugaccaugcccaacaacgagcaguucgacaagcuguacaucuggggcgugcaccaccccggcaccgacaaggaccagaucuuccuguacgcccagagcagcggcagaaucaccgugagcaccaagagaagccagcaggccgugauccccaacaucggcagcagacccagaaucagaaacauccccagcagaaucagcaucuacuggaccaucgugaagcccggcgacauccugcugaucaacagcaccggcaaccugaucgcccccagaggcuacuucaagaucagaagcggcaagagcagcaucaugagaagcgacgcccccaucggcaagugcaacagcgagugcaucacccccaacggcagcauccccaacgacaagcccuuccagaacgugaacagaaucaccuacggcgccugccccagauacgugaagcagagcacccugaagcuggccaccggcaugagaaacgugcccgagaagcagaccagaggcaucuucggcgccaucgccggcuucaucgagaacggcugggagggcaugguggacggcugguacggcuucagacaccagaacagcgagggcagaggccaggccgccgaccugaagagcacccaggccgccaucgaccagaucaacggcaagcugaacagacugaucggcaagaccaacgagaaguuccaccagaucgagaaggaguucagcgagguggagggcagaauccaggaccuggagaaguacguggaggacaccaagaucgaccuguggagcuacaacgccgagcugcugguggcccuggagaaccagcacaccaucgaccugaccgacagcgagaugaacaagcuguucgagaagaccaagaagcagcugagagagaacgccgaggacaugggcaacggcugcuucaagaucuaccacaagugcgacaacgccugcaucggcagcaucagaaacggcaccuacaaccacgacguguacagagacgaggcccugaacaacagauuccagaucaagggcguggagcugaagagcggcuacaaggacuggauccuguggaucagcuucgccaucagcugcuuccugcugugcguggcccugcugggcuucaucaugugggccugccagaagggcaacaucagaugcaacaucugcaucuga

SEQ ID NO: 169491 - RNA, 1701 nt, Artificial Sequence
  derived and/or modified CDS sequence (opt4) from hemagglutinin__InfluenzaA__AFN19373
augaagaccaucaucgcccugagcuacauccugugccugguguucgcccagaagcugcccggcaacgacaacagcaccgccacccugugccugggccaccacgccgugcccaacggcaccaucgugaagaccaucaccaacgaccagaucgaggugaccaacgccaccgagcuggugcagaacagcagcaucggcgagaucugcgacagcccccaccagauccuggacggcgagaacugcacccugaucgacgcccugcugggcgacccccagugcgacggcuuccagaacaagaagugggaccuguucguggagagaagcaaggccuacagcaacugcuaccccuacgacgugcccgacuacgccagccugagaagccugguggccagcagcggcacccuggaguucaacaacgagagcuucaacuggaccggcgugacccagaacggcaccagcagcgccugcaucagaagaagcaacaacagcuucuucagcagacugaacuggcugacccaccugaacuucaaguaccccgcccugaacgugaccaugcccaacaacgagcaguucgacaagcuguacaucuggggcgugcaccaccccggcaccgacaaggaccagaucuuccuguacgcccagagcagcggcagaaucaccgugagcaccaagagaagccagcaggccgugauccccaacaucggcagcagacccagaaucagaaacauccccagcagaaucagcaucuacuggaccaucgugaagcccggcgacauccugcugaucaacagcaccggcaaccugaucgcccccagaggcuacuucaagaucagaagcggcaagagcagcaucaugagaagcgacgcccccaucggcaagugcaacagcgagugcaucacccccaacggcagcauccccaacgacaagcccuuccagaacgugaacagaaucaccuacggcgccugccccagauacgugaagcagagcacccugaagcuggccaccggcaugagaaacgugcccgagaagcagaccagaggcaucuucggcgccaucgccggcuucaucgagaacggcugggagggcaugguggacggcugguacggcuucagacaccagaacagcgagggcagaggccaggccgccgaccugaagagcacccaggccgccaucgaccagaucaacggcaagcugaacagacugaucggcaagaccaacgagaaguuccaccagaucgagaaggaguucagcgagguggagggcagaauccaggaccuggagaaguacguggaggacaccaagaucgaccuguggagcuacaacgccgagcugcugguggcccuggagaaccagcacaccaucgaccugaccgacagcgagaugaacaagcuguucgagaagaccaagaagcagcugagagagaacgccgaggacaugggcaacggcugcuucaagaucuaccacaagugcgacaacgccugcaucggcagcaucagaaacggcaccuacgaccacgacguguacagagacgaggcccugaacaacagauuccagaucaagggcguggagcugaagagcggcuacaaggacuggauccuguggaucagcuucgccaucagcugcuuccugcugugcguggcccugcugggcuucaucaugugggccugccagaagggcaacaucagaugcaacaucugcaucuga

SEQ ID NO: 169492 - RNA, 1701 nt, Artificial Sequence; identical to SEQ ID NO: 169134
  derived and/or modified CDS sequence (opt4) from hemagglutinin__InfluenzaA__AFN19375

SEQ ID NO: 169493 - RNA, 1701 nt, Artificial Sequence
  derived and/or modified CDS sequence (opt4) from hemagglutinin__InfluenzaA__AFN19377
augaagaccaucaucgcccugagcuacauccugugccugguguucgcccagaagcugcccgagaacgacaacagcaccgccacccugugccugggccaccacgccgugcccaacggcaccaucgugaagaccaucaccaacgaccagaucgaggugaccaacgccaccgagcuggugcagagcagcagcaccggcgagaucugcgacagcccccaccagauccuggacggcgugaacugcacccugaucgacgcccugcugggcgacccccagugcgacggcuuccagaacaagaagugggaccuguucguggagagaagcaaggccuacagcaacugcuaccccuacgacgugcccgacuacgccagccugagaagccugguggccagcagcggcacccuggaguucaacaacgagagcuucaacuggaccggcgugacccagaacggcaccagcagcgccugcaucagaagaagcaacagcagcuucuucagcagacugaacuggcugacccaccugaacuucaaguaccccgcccugaacgugaccaugcccaacaacgagcaguucgacaagcuguacaucuggggcgugcaccaccccggcaccgacaaggaccagaucuuccuguacgcccagagcagcggcagaaucaccgugagcaccaagagaagccagcaggccgugauccccaacaucggcagcagacccagaaucagaaacauccccagcagaaucagcaucuacuggaccaucgugaagcccggcgacauccugcugaucaacagcaccggcaaccugaucgcccccagaggcuacuucaagaucagaagcggcaagagcagcaucaugagaagcgacgcccccaucggcaagugcaacagcgagugcaucacccccaacggcagcauccccaacgacaagcccuuccagaacgugaacagaaucaccuacggcgccugccccagauacgugaagcagagcacccugaagcuggccaccggcaugagaaacgugcccgagaagcagaccagaggcaucuucggcgccaucgccggcuucaucgagaacggcugggagggcaugguggacggcugguacggcuucagacaccagaacagcgagggcagaggccaggccgccgaccugaagagcacccaggccgccaucgaccagaucaacggcaagcugaacagacugaucggcaagaccaacgagaaguuccaccagaucgagaaggaguucagcgagguggagggcagaauccaggaccuggagaaguacguggaggacaccaagaucgaccuguggagcuacaacgccgagcugcugguggcccuggagaaccagcacaccaucgaccugaccgacagcgagaugaacaagcuguucgagaagaccaagaagcagcugagagagaacgccgaggacaugggcaacggcugcuucaagaucuaccacaagugcgacaacgccugcaucggcagcaucagaaacggcaccuacaaccacgacguguacagagacgaggcccugaacaacagauuccagaucaagggcguggagcugaagagcggcuacaaggacuggauccuguggaucagcuucgccaucagcugcuuccugcugugcguggcccugcugggcuucaucaugugggccugccagaacggcaacaucagaugcaacaucugcaucuga

SEQ ID NO: 169494 - RNA, 1701 nt, Artificial Sequence; identical to SEQ ID NO: 169134
  derived and/or modified CDS sequence (opt4) from hemagglutinin__InfluenzaA__AFN19379

SEQ ID NO: 169495 - RNA, 1701 nt, Artificial Sequence; identical to SEQ ID NO: 169491
  derived and/or modified CDS sequence (opt4) from hemagglutinin__InfluenzaA__AFN19381

SEQ ID NO: 169496 - RNA, 1701 nt, Artificial Sequence; identical to SEQ ID NO: 169490
  derived and/or modified CDS sequence (opt4) from hemagglutinin__InfluenzaA__AFN19383

SEQ ID NO: 169497 - RNA, 1701 nt, Artificial Sequence
  derived and/or modified CDS sequence (opt4) from hemagglutinin__InfluenzaA__AFN19385
augaagaccaucaucgcccugagcuacauccugugccugguguucgcccagaagcugcccgagaacgacaacagcaccgccacccugugccugggccaccacgccgugcccaacggcaccaucgugaagaccaucaccaacgaccagaucgaggugaccaacgccaccgagcuggugcagagcagcagcaccggcgagaucugcgacagcccccaccagauccuggacggcgugaacugcacccugaucgacgcccugcugggcgacccccagugcgacggcuuccagaacaagaagugggaccuguucguggagagaagcaaggccuacagcaacugcuaccccuacgacgugcccgacuacgccagccugagaagccugguggccagcagcggcacccuggaguucaacaacgagagcuucaacuggaccggcgugacccagaacggcaccagcagcgccugcaucagaagaagcaacagcagcuucuucagcagacugaacuggcugacccaccugaacuucaaguaccccgcccugaacgugaccaugcccaacaacgagcaguucgacaagcuguacaucuggggcgugcaccaccccggcaccgacaaggaccagaucuuccuguacgcccagagcagcggcagaaucaccgugagcaccaagagaagccagcaggccgugauccccaacaucggcagcagacccagaaucagaaacauccccagcagaaucagcaucuacuggaccaucgugaagcccggcgacauccugcugaucaacagcaccggcaaccugaucgcccccagaggcuacuucaagauccagagcggcaagagcagcaucaugagaagcgacgcccccaucggcaagugcaacagcgagugcaucacccccaacggcagcauccccaacgacaagcccuuccagaacgugaacagaaucaccuacggcgccugccccagauacgugaagcagagcacccugaagcuggccaccggcaugagaaacgugcccgagaagcagaccagaggcaucuucggcgccaucgccggcuucaucgagaacggcugggagggcaugguggacggcugguacggcuucagacaccagaacagcgagggcagaggccaggccgccgaccugaagagcacccaggccgccaucgaccagaucaacggcaagcugaacagacugaucggcaagaccaacgagaaguuccaccagaucgagaaggaguucagcgagguggagggcagaauccaggaccuggagaaguacguggaggacaccaagaucgacaucuggagcuacaacgccgagcugcugguggcccuggagaaccagcacaccaucgaccugaccgacagcgagaugaacaagcuguucgagaagaccaagaagcagcugagagagaacgccgaggacaugggcaacggcugcuucaagaucuaccacaagugcgacaacgccugcaucggcagcaucagaaacggcaccuacaaccacgacguguacagagacgaggcccugaacaacagauuccagaucaagggcguggagcugaagagcggcuacaaggacuggauccuguggaucagcuucgccaucagcugcuuccugcugugcguggcccugcugggcuucaucaugugggccugccagaagggcaacaucagaugcaacaucugcaucuga

SEQ ID NO: 169498 - RNA, 1701 nt, Artificial Sequence; identical to SEQ ID NO: 169490
  derived and/or modified CDS sequence (opt4) from hemagglutinin__InfluenzaA__AFN19387

SEQ ID NO: 169499 - RNA, 1701 nt, Artificial Sequence; identical to SEQ ID NO: 169134
  derived and/or modified CDS sequence (opt4) from hemagglutinin__InfluenzaA__AFN19389

SEQ ID NO: 169500 - RNA, 1701 nt, Artificial Sequence; identical to SEQ ID NO: 169134
  derived and/or modified CDS sequence (opt4) from hemagglutinin__InfluenzaA__AFN19391

SEQ ID NO: 169501 - RNA, 1701 nt, Artificial Sequence
  derived and/or modified CDS sequence (opt4) from hemagglutinin__InfluenzaA__AFN19393
augaagaccaucaucgcccugagcuacauccugugccugguguucgcccagaagcugcccggcaacgacaacagcaccgccacccugugccugggccaccacgccgugcccaacggcaccaucgugaagaccaucaccaacgaccagaucgaggugaccaacgccaccgagcuggugcagagcagcagcgccggcgagaucugcgacagcccccaccacauccuggacggcgagaacugcacccugaucgacgcccugcugggcgacccccagugcgacggcuuccagaacaagaagugggaccuguucguggagagaagcagagccuacagcaacugcuaccccuacgacgugcccgacuacgccagccugagaagccugguggccagcagcggcacccuggaguucaacaacgagagcuucaacuggaccggcgugacccagaacggcaccagcagcgccugcaucagaagaagcaacaacagcuucuucagcagacugaacuggcugacccaccugaacuucaaguaccccgcccugaacgugaccaugcccaacaacgagcaguucgacaagcuguacaucuggggcgugcaccaccccggcaccgacaaggaccagaucuuccuguacgcccaggccagcggcagaaucaccgugagcaccaagagaagccagcaggccgugauccccaacaucggcagcagacccagagugagaaacauccccagcagaaucagcaucuacuggaccaucgugaagcccggcgacauccugcugaucaacagcaccggcaaccugaucgcccccagaggcuacuucaagaucagaagcggcaagagcagcaucaugagaagcgacgcccccaucggcaagugcaacagcgagugcaucacccccaacggcagcauccccaacgacaagcccuuccagaacgugaacagaaucaccuacggcgccugccccagauacgugaagcagagcacccugaagcuggccaccggcaugagaaacgugcccgagaagcagaccagaggcaucuucggcgccaucgccggcuucaucgagaacggcugggagggcaugauggacggcugguacggcuucagacaccagaacagcgagggcagaggccaggccgccgaccugaagagcacccaggccgccaucgaccagaucaacggcaagcugaacagacugaucggcaagaccaacgagaaguuccaccagaucgagaaggaguucagcgagguggagggcagaauccaggaccuggagaaguacguggaggacaccaagaucgaccuguggagcuacaacgccgagcugcugguggcccuggagaaccagcacaccaucgaccugaccgacagcgagaugaacaagcuguucgagaagaccaagaagcagcugagagagaacgccgaggacaugggcaacggcugcuucaagaucuaccacaagugcgacaacgccugcaucggcagcaucagaaacggcaccuacgaccacgacguguacagagacgaggcccugagcaacagauuccagaucaagggcguggagcugaagagcggcuacaaggacuggauccuguggaucagcuucgccaucagcugcuuccugcugugcguggcccugcugggcuucaucaugugggccugccagaagggcaacaucagaugcaacaucugcaucuga

SEQ ID NO: 169502 - RNA, 1701 nt, Artificial Sequence; identical to SEQ ID NO: 169490
  derived and/or modified CDS sequence (opt4) from hemagglutinin__InfluenzaA__AFN19397

SEQ ID NO: 169503 - RNA, 1701 nt, Artificial Sequence; identical to SEQ ID NO: 169134
  derived and/or modified CDS sequence (opt4) from hemagglutinin__InfluenzaA__AFN19399

SEQ ID NO: 169504 - RNA, 1701 nt, Artificial Sequence; identical to SEQ ID NO: 169490
  derived and/or modified CDS sequence (opt4) from hemagglutinin__InfluenzaA__AFN19401

SEQ ID NO: 169505 - RNA, 1701 nt, Artificial Sequence; identical to SEQ ID NO: 169134
  derived and/or modified CDS sequence (opt4) from hemagglutinin__InfluenzaA__AFN19403

SEQ ID NO: 169506 - RNA, 1701 nt, Artificial Sequence; identical to SEQ ID NO: 169490
  derived and/or modified CDS sequence (opt4) from hemagglutinin__InfluenzaA__AFN19405

SEQ ID NO: 169507 - RNA, 1701 nt, Artificial Sequence
  derived and/or modified CDS sequence (opt4) from hemagglutinin__InfluenzaA__AFN19407
augaagaccaucaucgcccugagcuacauccugugccugguguucgcccagaagcugcccggcaacgacaacagcaccgccacccugugccugggccaccacgccgugcccaacggcaccaucgugaagaccaucaccaacgaccagaucgaggugaccaacgccaccgagcuggugcagaacagcagcaucggcgagaucugcgacagcccccaccagauccuggacggcgagaacugcacccugaucgacgcccugcugggcgacccccagugcgacggcuuccagaacaagaagugggaccuguucguggagagaagcaaggccuacagcaacugcuaccccuacgacgugcccgacuacgccagccugagaagccugguggccagcagcggcacccuggaguucaacaacgagagcuucaacuggagcggcgugacccagaacggcaccagcagcgccugcaugagaagaagcaacagcagcuucuucagcagacugaacuggcugacccaccugaacuucaaguaccccgcccugaacgugaccaugcccaacaacgagcaguucgacaagcuguacaucuggggcgugcaccaccccggcaccgacaaggaccagaucuuccuguacgcccagagcagcggcagaaucaccgugagcaccaagagaagccagcaggccgugauccccaacaucggcagcagacccagaaucagaaacauccccagcagaaucagcaucuacuggaccaucgugaagcccggcgacauccugcugaucaacagcaccggcaaccugaucgcccccagaggcuacuucaagaucagaagcggcaagagcagcaucaugagaagcgacgcccccaucggcaagugcaacagcgagugcaucacccccaacggcagcauccccaacgacaagcccuuccagaacgugaacagaaucaccuacggcgccugccccagauacgugaagcagagcacccugaagcuggccaccggcaugagaaacgugcccgagaagcagaccagaggcaucuucggcgccaucgccggcuucaucgagaacggcugggagggcaugguggacggcugguacggcuucagacaccagaacagcgagggcagaggccaggccgccgaccugaagagcacccaggccgccaucgaccagaucaacggcaagcugaacagacugaucggcaagaccaacgagaaguuccaccagaucgagaaggaguucagcgagguggagggcagaauccaggaccuggagaaguacguggaggacaccaagaucgaccuguggagcuacaacgccgagcugcugguggcccuggagaaccagcacaccaucgaccugaccgacagcgagaugaacaagcuguucgagaagaccaagaagcagcugagagagaacgccgaggacaugggcaacggcugcuucaagaucuaccacaagugcgacaacgccugcaucggcagcaucagaaacggcaccuacgaccacgacguguacagagacgaggcccugaacaacagauuccagaucaagggcguggagcugaagagcggcuacaaggacuggauccuguggaucagcuucgccaucagcugcuuccugcugugcguggcccugcugggcuucaucaugugggccugccagaagggcaacaucagaugcaacaucugcaucuga

SEQ ID NO: 169508 - RNA, 1701 nt, Artificial Sequence
  derived and/or modified CDS sequence (opt4) from hemagglutinin__InfluenzaA__AFN19409
augaagaccaucaucgcccugagcuacauccugugccugguguucgcccagaagcugcccggcaacgacaacagcaccgccacccugugccugggccaccacgccgugcccaacggcaccaucgugaagaccaucaccaacgaccagaucgaggugaccaacgccaccgagcuggugcagagcagcagcaucggcgagaucugcgacagcccccaccagauccuggacggcgagaacugcacccugaucgacgcccugcugggcgacccccagugcgacggcuuccagaacaagaagugggaccuguucguggagagaagcaaggccuacagcaacugcuaccccuacgacgugcccgacuacgccagccugagaagccugguggccagcagcggcacccuggaguucaacaacgagagcuucaacuggaccggcgugacccagaacggcaccagcagcgccugcaucagaagaagcaacagcagcuucuucagcagacugaacuggcugacccaccugaacuucaaguaccccgcccugaacgugaccaugcccaacaacgagcaguucgacaagcuguacaucuggggcgugcaccaccccggcaccgacaaggaccagaucuuccuguacgcccagagcagcggcagaaucaccgugagcaccaagagaagccagcaggccgugauccccaacaucggcagcagacccagaaucagaaacauccccagcagaaucagcaucuacuggaccaucgugaagcccggcgacauccugcugaucaacagcaccggcaaccugaucgcccccagaggcuacuucaagaucagaagcggcaagagcagcaucaugagaagcgacgcccccaucggcaagugcaacagcgagugcaucacccccaacggcagcauccccaacgacaagcccuuccagaacgugaacagaaucaccuacggcgccugccccagauacgugaagcagagcacccugaagcuggccaccggcaugagaaacgugcccgagaagcagaccagaggcaucuucggcgccaucgccggcuucaucgagaacggcugggagggcaugguggacggcugguacggcuucagacaccagaacagcgagggcagaggccaggccgccgaccugaagagcacccaggccgccaucgaccagaucaacggcaagcugaacagacugaucggcaagaccaacgagaaguuccaccagaucgagaaggaguucagcgagguggagggcagaauccaggaccuggagaaguacguggaggacaccaagaucgaccuguggagcuacaacgccgagcugcugguggcccuggagaaccagcacaccaucgaccugaccgacagcgagaugaacaagcuguucgagaagaccaagaagcagcugagagagaacgccgaggacaugggcaacggcugcuucaagaucuaccacaagugcgacaacgccugcaucggcagcaucagaaacggcaccuacaaccacgacguguacagagacgaggcccugaacaacagauuccagaucaagggcguggagcugaagagcggcuacaaggacuggauccuguggaucagcuucgccaucagcugcuuccugcugugcguggcccugcugggcuucaucaugugggccugccagaagggcaacaucagaugcaacaucugcaucuga

SEQ ID NO: 169509 - RNA, 1701 nt, Artificial Sequence; identical to SEQ ID NO: 169490
  derived and/or modified CDS sequence (opt4) from hemagglutinin__InfluenzaA__AFN19411

SEQ ID NO: 169510 - RNA, 1701 nt, Artificial Sequence; identical to SEQ ID NO: 169134
  derived and/or modified CDS sequence (opt4) from hemagglutinin__InfluenzaA__AFN19413

SEQ ID NO: 169511 - RNA, 1701 nt, Artificial Sequence
  derived and/or modified CDS sequence (opt4) from hemagglutinin__InfluenzaA__AFN19415
augaagaccaucaucgcccugagcuacauccugugccugguguucgcccagaagcugcccggcaacgacaacagcaccgccacccugugccugggccaccacgccgugcccaacggcaccaucgugaagaccaucaccaacgaccagaucgaggugaccaacgccaccgagcuggugcagagcagcagcaccggcgagaucugcgacagcccccaccagauccuggacggcgagaacugcacccugaucgacgcccugcugggcgacccccagugcgacggcuuccagaacaagaagugggaccuguucguggagagaagcaaggccuacagcaacugcuaccccuacgacgugcccgacuacgccagccugagaagccugguggccagcagcggcacccuggaguucaacaacgagagcuucaacuggaccggcgugacccagaacggcaccagcagcgccugcaucagaagaagcaacagcagcuucuucagcagacugaacuggcugacccaccugaacuucaaguaccccgcccugaacgugaccaugcccaacaacgagcaguucgacaagcuguacaucuggggcgugcaccaccccggcaccgacaaggaccagaucuuccuguacgcccagagcagcggcagaaucaccgugagcaccaagagaagccagcaggccgugauccccaacaucggcagcagacccagaaucagaaacauccccagcagaaucagcaucuacuggaccaucgugaagcccggcgacauccugcugaucaacagcaccggcaaccugaucgcccccagaggcuacuucaagaucagaagcggcaagagcagcgugaugagaagcgacgcccccaucggcaagugcaacagcgagugcaucacccccaacggcagcauccccaacgacaagcccuuccagaacgugaacagaaucaccuacggcgccugccccagauacgugaagcagagcacccugaagcuggccaccggcaugagaaacgugcccgagaagcagaccagaggcaucuucggcgccaucgccggcuucaucgagaacggcugggagggcaugguggacggcugguacggcuucagacaccagaacagcgagggcagaggccaggccgccgaccugaagagcacccaggccgccaucgaccagaucaacggcaagcugaacagacugaucggcaagaccaacgagaaguuccaccagaucgagaaggaguucagcgagguggagggcagaauccaggaccuggagaaguacguggaggacaccaagaucgaccuguggagcuacaacgccgagcugcugguggcccuggagaaccagcacaccaucgaccugaccgacagcgagaugaacaagcuguucgagaagaccaagaagcagcugagagagaacgccgaggacaugggcaacggcugcuucaagaucuaccacaagugcgacaacgccugcaucggcagcaucagaaacggcaccuacaaccacgacguguacagagacgaggcccugaacaacagauuccagaucaagggcguggagcugaagagcggcuacaaggacuggauccuguggaucagcuucgccaucagcugcuuccugcugugcguggcccugcugggcuucaucaugugggccugccagaagggcaacaucagaugcaacaucugcaucuga

SEQ ID NO: 169512 - RNA, 1701 nt, Artificial Sequence
  derived and/or modified CDS sequence (opt4) from hemagglutinin__InfluenzaA__AFN19417
augaagaccaucaucgcccugagcuacauccugugccugguguucgcccagaagcugcccggcaacgacaacagcaccgccacccugugccugggccaccacgccgugcccaacggcaccaucgugaagaccaucaccaacgaccagaucgaggugaccaacgccaccgagcuggugcagagcagcagcaccggcgagaucugcgacagcccccaccagauccuggacggcgagaacugcacccugaucgacgcccugcugggcgacccccagugcgacggcuuccagaacaagaagugggaccuguucguggagagaagcaaggccuacagcaacugcuaccccuacgacgugcccgacuacgccagccugagaagccugaucgccagcagcggcacccuggaguucaacaacgagagcuucaacuggaccggcgugacccagaacggcaccagcagcgccugcaucagaagaagcaacagcagcuucuucagcagacugaacuggcugacccaccugaacuucaaguaccccgcccugaacgugaccaugcccaacaacgagcaguucgacaagcuguacaucuggggcgugcaccaccccggcaccgacaaggaccagaucuuccuguacgcccagagcagcggcagaaucaccgugagcaccaagagaagccagcaggccgugauccccaacaucggcagcagacccagaaucagaaacauccccagcagaaucagcaucuacuggaccaucgugaagcccggcgacauccugcugaucaacagcaccggcaaccugaucgcccccagaggcuacuucaagaucagaagcggcaagagcagcaucaugagaagcgacgcccccaucggcaagugcaacagcgagugcaucacccccaacggcagcauccccaacgacaagcccuuccagaacgugaacagaaucaccuacggcgccugccccagauacgugaagcagagcacccugaagcuggccaccggcaugagaaacgugcccgagaagcagaccagaggcaucuucggcgccaucgccggcuucaucgagaacggcugggagggcaugguggacggcugguacggcuucagacaccagaacagcgagggcagaggccaggccgccgaccugaagagcacccaggccgccaucgaccagaucaacggcaagcugaacagacugaucggcaagaccaacgagaaguuccaccagaucgagaaggaguucagcgagguggagggcagaauccaggaccuggagaaguacguggaggacaccaagaucgaccuguggagcuacaacgccgagcugcugguggcccuggagaaccagcacaccaucgaccugaccgacagcgagaugaacaagcuguucgagaagaccaagaagcagcugagagagaacgccgaggacaugggcaacggcugcuucaagaucuaccacaagugcgacaacgccugcaucggcagcaucagaaacggcaccuacaaccacgacguguacagagacgaggcccugaacaacagauuccagaucaagggcguggagcugaagagcggcuacaaggacuggauccuguggaucagcuucgccaucagcugcuuccugcugugcguggcccugcugggcuucaucaugugggccugccagaagggcaacaucagaugcaacaucugcaucuga

SEQ ID NO: 169513 - RNA, 1701 nt, Artificial Sequence
  derived and/or modified CDS sequence (opt4) from hemagglutinin__InfluenzaA__AFN19423
augaagaccaucaucgcccugagcuacauccugugccugguguucgcccagaagcugcccggcaacgacaacagcaccgccacccugugccugggccaccacgccgugcccaacggcaccaucgugaagaccaucaccaacgacagaaucgaggugaccaacgccaccgagcuggugcagaacagcagcaucggcgagaucugcgacagcccccaccagauccuggacggcgagaacugcacccugaucgacgcccugcugggcgacccccagugcgacggcuuccagaacaagaagugggaccuguucguggagagaagcaaggccuacagcaacugcuaccccuacgacgugcccgacuacgccagccugagaagccugguggccagcagcggcacccuggaguucaacaacgagagcuucaacuggaccggcgugacccagaacggcaccagcagcgccugcaucagaagaagcaacaacagcuucuucagcagacugaacuggcugacccaccugaacuucaaguaccccgcccugaacgugaccaugcccaacaacgagcaguucgacaagcuguacaucuggggcgugcaccaccccggcaccgacaaggaccagaucuuccuguacgcccagagcagcggcagaaucaccgugagcaccaagagaagccagcaggccgugauccccaacaucggcagcagacccagaaucagaaacauccccagcagaaucagcaucuacuggaccaucgugaagcccggcgacauccugcugaucaacagcaccggcaaccugaucgcccccagaggcuacuucaagaucagaagcggcaagagcagcaucaugagaagcgacgcccccaucggcaagugcaagagcgagugcaucacccccaacggcagcauccccaacgacaagcccuuccagaacgugaacagaaucaccuacggcgccugccccagauacgugaagcagagcacccugaagcuggccaccggcaugagaaacgugcccgagaagcagaccagaggcaucuucggcgccaucgccggcuucaucgagaacggcugggagggcaugguggacggcugguacggcuucagacaccagaacagcgagggcagaggccaggccgccgaccugaagagcacccaggccgccaucgaccagaucaacggcaagcugaacagacugaucggcaagaccaacgagaaguuccaccagaucgagaaggaguucagcgagguggagggcagaauccaggaccuggagaaguacguggaggacaccaagaucgaccuguggagcuacaacgccgagcugcugguggcccuggagaaccagcacaccaucgaccugaccgacagcgagaugaacaagcuguucgagaagaccaagaagcagcugagagagaacgccgaggacaugggcaacggcugcuucaagaucuaccacaagugcgacaacgccugcaucggcagcaucagaaacggcaccuacgaccacgacguguacagagacgaggcccugaacaacagauuccagaucaagggcguggagcugaagagcggcuacaaggacuggauccuguggaucagcuucgccaucagcugcuuccugcugugcguggcccugcugggcuucaucaugugggccugccagaagggcaacaucagaugcaacaucugcaucuga

SEQ ID NO: 169514 - RNA, 1701 nt, Artificial Sequence; identical to SEQ ID NO: 169490
  derived and/or modified CDS sequence (opt4) from hemagglutinin__InfluenzaA__AFN19425

SEQ ID NO: 169515 - RNA, 1701 nt, Artificial Sequence
  derived and/or modified CDS sequence (opt4) from hemagglutinin__InfluenzaA__AFN19437
augaagaccaucaucgcccugagcuacauccugugccugguguucgcccagaagcugcccggcaacgacaacagcaccgccacccugugccugggccaccacgccgugcccaacggcaccaucgugaagaccaucaccaacgaccagaucgaggugaccaacgccaccgagcuggugcagaacagcagcaucggcgagaucugcgacagcccccaccagauccuggacggcgagaacugcacccugaucgacgcccugcugggcgacccccagugcgacggcuuccagaacaagaagugggaccuguucguggagagaagcaaggccuacagcaacugcuaccccuacgacgugcccgacuacgccagccugagaagccugguggccagcagcggcacccuggaguucaacaacgagagcuucaacuggaccggcgugacccagaacggcaccagcagcgccugcaucagaagaagcaacagcagcuucuucagcagacugaacuggcugacccaccugaacuucaaguaccccgcccugaacgugaccaugcccaacaacgagcaguucgacaagcuguacaucuggggcgugcaccaccccggcaccgacaaggaccagaucuuccuguacgcccagagcagcggcagaaucaccgugagcaccaagagaagccagcaggccgugauccccaacaucggcagcagacccagaaucagaaacauccccagcagaaucagcaucuacuggaccaucgugaagcccggcgacauccugcugaucaacagcaccggcaaccugaucgcccccagaggcuacuucagaaucagaagcggcaagagcagcaucaugagaagcgacgcccccaucggcaagugcaacagcgagugcaucacccccaacggcagcauccccaacgacaagcccuuccagaacgugaacagaaucaccuacggcgccugccccagauacgugaagcagagcacccugaagcuggccaccggcaugagaaacgugcccgagaagcagaccagaggcaucuucggcgccaucgccggcuucaucgagaacggcugggagggcaugguggacggcugguacggcuucagacaccagaacagcgagggcagaggccaggccgccgaccugaagagcacccaggccgccaucgaccagaucaacagaaagcugaacagacugaucggcaagaccaacgagaaguuccaccagaucgagaaggaguucagcgagguggagggcagaauccaggaccuggagaaguacguggaggacaccaagaucgaccuguggagcuacaacgccgagcugcugguggcccuggagaaccagcacaccaucgaccugaccgacagcgagaugaacaagcuguucgagaagaccaagaagcagcugagagagaacgccgaggacaugggcaacggcugcuucaagaucuaccacaagugcgacaacgccugcaucggcagcaucagaaacggcaccuacgaccacuacguguacagagacgaggcccugaacaacagauuccagaucaagggcguggagcugaagagcggcuacaaggacuggauccuguggaucagcuucgccaucagcugcuuccugcugugcguggcccugcugggcuucaucaugugggccugccagaagggcaacaucagaugcaacaucugcaucuga

SEQ ID NO: 169516 - RNA, 1701 nt, Artificial Sequence
  derived and/or modified CDS sequence (opt4) from hemagglutinin__InfluenzaA__AFN19439
augaagaccaucaucgcccugagccacauccugugccugguguucgcccagaagcugcccgagaacgacaacagcaccgccacccugugccugggccaccacgccgugcccaacggcaccaucgugaagaccaucaccaacgaccagaucgaggugaccaacgccaccgagcuggugcagagcagcagcaccggcgagaucugcgacagcccccaccagauccuggacggcaucaacugcacccugaucgacgcccugcugggcgacccccagugcgacggcuuccagaacaagaagugggaccuguucguggagagaagcaaggccuacagcaacugcuaccccuacgacgugcccgacuacgccagccugagaagccugguggccagcagcggcacccuggaguucaacaacgagagcuucaacuggaccggcgugacccagaacggcaccagcagcgccugcaucagaagaagcaacagcagcuucuucagcagacugaacuggcugacccaccugaacuucaaguaccccgcccugaacgugaccaugcccaacaacgagcaguucgacaagcuguacaucuggggcgugcaccaccccggcaccgacaaggaccagaucuuccuguacgcccagcccagcggcagaaucaccgugagcaccaagagaagccagcaggccgugauccccaacaucggcagcagacccagaaucagaaacauccccagcagaaucagcaucuacuggaccaucgugaagcccggcgacauccugcugaucaacagcaccggcaaccugaucgcccccagaggcuacuucaagaucagaagcggcaagagcagcaucaugagaagcgacgcccccaucggcaagugcaacagcgagugcaucacccccaacggcagcauccccaacgacaagcccuuccagaacgugaacagaaucaccuacggcgccugccccagauacgugaagcagagcacccugaagcuggccaccggcaugagaaacgugcccgagaagcagaccagaggcaucuucggcgccaucgccggcuucaucgagaacggcugggagggcaugguggacggcugguacggcuucagacaccagaacagcgagggcagaggccaggccgccgaccugaagagcacccaggccgccaucgaccagaucaacggcaagcugaacagacugaucggcaagaccaacgagaaguuccaccagaucgagaaggaguucagcgagguggagggcagaauccaggaccuggagaaguacguggaggacaccaagaucgaccuguggagcuacaacgccgagcugcugguggcccuggagaaccagcacaccaucgaccugaccgacagcgagaugaacaagcuguucgagaagaccaagaagcagcugagagagaacgccgaggacaugggcaacggcugcuucaagaucuaccacaagugcgacaacgccugcaucggcagcaucagaaacggcaccuacaaccacgacguguacagagacgaggcccugaacaacagauuccagaucaagggcguggagcugaagagcggcuacaaggacuggauccuguggaucagcuucgccaucagcugcuuccugcugugcguggcccugcugggcuucaucaugugggccugccagaagggcaacaucagaugcaacaucugcaucuga

SEQ ID NO: 169517 - RNA, 1701 nt, Artificial Sequence; identical to SEQ ID NO: 169491
  derived and/or modified CDS sequence (opt4) from hemagglutinin__InfluenzaA__AFN19443

SEQ ID NO: 169518 - RNA, 1701 nt, Artificial Sequence
  derived and/or modified CDS sequence (opt4) from hemagglutinin__InfluenzaA__AFN19445
augaagaccaucaucgcccugagcuacauccugugccugguguucgcccagaagcugcccggcaacgacaacagcaccgccacccugugccugggccaccacgccgugcccaacggcaccaucgugaagaccaucaccaacgacagaaucgaggugaccaacgccaccgagcuggugcagaacagcagcaucggcgagaucugcgacagcccccaccagauccuggacggcgagaacugcacccugaucgacgcccugcugggcgacccccagugcgacggcuuccagaacaagaagugggaccuguucguggagagaagcaaggccuacagcaacugcuaccccuacgacgugcccgacuacgccagccugagaagccugguggccagcagcggcacccuggaguucaacaacgagagcuucaacuggaccggcgugacccagaacggcaccagcagcgccugcaucagaagaagcaacaacagcuucuucagcagacugaacuggcugacccaccugaacuucaaguaccccgcccugaacgugaccaugcccaacaacgagcaguucgacaagcuguacaucuggggcgugcaccaccccggcaccgacaaggaccagaucuuccuguacgcccagagcagcggcagaaucaccgugagcaccaagagaagccagcaggccgugauccccaacaucggcagcagacccagaaucagaaacauccccagcagaaucagcaucuacuggaccaucgugaagcccggcgacauccugcugaucaacagcaccggcaaccugaucgcccccagaggcuacuucaagaucagaagcggcaagagcagcaucaugagaagcgacgcccccaucggcaagugcaagagcgagugcaucacccccaacggcagcauccccaacgacaagcccuuccagaacgugaacagaaucaccuacggcgccugccccagauacgugaagcagagcacccugagacuggccaccggcaugagaaacgugcccgagaagcagaccagaggcaucuucggcgccaucgccggcuucaucgagaacggcugggagggcaugguggacggcugguacggcuucagacaccagaacagcgagggcagaggccaggccgccgaccugaagagcacccaggccgccaucgaccagaucaacggcaagcugaacagacugaucggcaagaccaacgagaaguuccaccagaucgagaaggaguucagcgagguggagggcagaauccaggaccuggagaaguacguggaggacaccaagaucgaccuguggagcuacaacgccgagcugcugguggcccuggagaaccagcacaccaucgaccugaccgacagcgagaugaacaagcuguucgagaagaccaagaagcagcugagagagaacgccgaggacaugggcaacggcugcuucaagaucuaccacaagugcgacaacgccugcaucggcagcaucagaaacggcaccuacgaccacgacguguacagagacgaggcccugaacaacagauuccagaucaagggcguggagcugaagagcggcuacaaggacuggauccuguggaucagcuucgccaucagcugcuuccugcugugcguggcccugcugggcuucaucaugugggccugccagaagggcaacaucagaugcaacaucugcaucuga

SEQ ID NO: 169519 - RNA, 1701 nt, Artificial Sequence; identical to SEQ ID NO: 169513
  derived and/or modified CDS sequence (opt4) from hemagglutinin__InfluenzaA__AFN19447

SEQ ID NO: 169520 - RNA, 1701 nt, Artificial Sequence
  derived and/or modified CDS sequence (opt4) from hemagglutinin__InfluenzaA__AFN19451
augaagaccaucaucgcccugagcuacauccugugccugguguucgcccagaagcugcccggcaacgacaacagcaccgccacccugugccugggccaccacgccgugcccaacggcaccaucgugaagaccaucaccaacgaccagaucgaggugaccaacgccaccgagcuggugcagaacagcagcaucggcgagaucugcgacagcccccaccagauccuggacggcgagaacugcacccugaucgacgcccugcugggcgacccccagugcgacggcuuccagaacaagaagugggaccuguucguggagagaagcaaggccuacagcaacugcuaccccuacgacgugcccgacuacgccagccugagaagccugguggccagcagcggcacccuggaguucaacaacgagagcuucaacuggaccggcgugacccagaacggcaccagcagcgccugcaucagaagaagcaacagcagcuucuucagcagacugaacuggcugacccaccugaacuucaaguaccccgcccugaacgugaccaugcccaacaacgagcaguucgacaagcuguacaucuggggcgugcaccaccccggcaccgacaaggaccagaucuuccuguacgcccagagcagcggcagaaucaccgugagcaccaagagaagccagcaggccgugauccccaacaucggcagcagacccagaaucagaaacauccccagcagaaucagcaucuacuggaccaucgugaagcccggcgacauccugcugaucaacagcaccggcaaccugaucgcccccagaggcuacuucaagaucagaagcggcaagagcagcaucaugagaagcgacgcccccaucggcaagugcaacagcgagugcaucacccccaacggcagcauccccaacgacaagcccuuccagaacgugaacagaaucaccuacggcgccugccccagauacgugaagcagagcacccugaagcuggccaccggcaugagaaacgugcccgagaagcagaccagaggcaucuucggcgccaucgccggcuucaucgagaacggcugggagggcaugguggacggcugguacggcuucagacaccagaacagcgagggcagaggccaggccgccgaccugaagagcacccaggccgccaucgaccagaucaacggcaagcugaacagacugaucggcaagaccaacgagaaguuccaccagaucgagaaggaguucagcgagguggagggcagaauccaggaccuggagaaguacguggaggacaccaagaucgaccuguggagcuacaacgccgagcugcugguggcccuggagaaccagcacaccaucgaccugaccgacagcgagaugaacaagcuguucgagaagaccaagaagcagcugagagagaacgccgaggacaugggcaacggcugcuucaagaucuaccacaagugcgacaacgccugcaucggcagcaucagaaacggcaccuacgaccacgacguguacagagacgaggcccugaacaacagauuccagaucaacggcguggagcugaagagcggcuacaaggacuggauccuguggaucagcuucgccaucagcugcuuccugcugugcguggcccugcugggcuucaucaugugggccugccagaagggcaacaucagaugcaacaucugcaucuga

SEQ ID NO: 169521 - RNA, 1701 nt, Artificial Sequence
  derived and/or modified CDS sequence (opt4) from hemagglutinin__InfluenzaA__AFN19453
augaagaccaucaucgcccugagcuacauccugugccugguguucgcccagaagcugcccggcaacgacaacagcaccgccacccugugccugggccaccacgccgugcccaacggcaccaucgugaagaccaucaccaacgaccagaucgaggugaccaacgccaccgagcuggugcagaacagcagcaucggcgagaucugcgacagcccccaccagauccuggacggcgagaacugcacccugaucgacgcccugcugggcgacccccagugcgacggcuuccagaacaagaagugggaccuguucguggagagaagcaaggccuacagcaacugcuaccccuacgacgugcccgacuacgccagccugagaagccugguggccagcagcggcacccuggaguucaacaacgagagcuucaacuggaccggcgugacccagaacggcaccagcagcgccugcaucagaagaagcaacagcagcuucuucagcagacugaacuggcugacccaccugaacuucaaguaccccgcccugaacgugaccaugcccaacaacgagcaguucgacaagcuguacaucuggggcgugcaccaccccggcaccgacaaggaccagaucuuccuguacgcccagagcagcggcagaaucaccgugagcaccaagagaagccagcaggccgugauccccaacaucggcagcagacccagaaucagaaacauccccagcagaaucagcaucuacuggaccaucgugaagcccggcgacauccugcugaucaacagcaccggcaaccugaucgcccccagaggcuacuucaagaucagaagcggcaagagcagcaucaugagaagcgacgcccccaucggcaagugcaacagcgagugcaucacccccaacggcagcauccccaacgacaagcccuuccagaacgugaacagaaucaccuacggcgccugccccagauacgugaagcagagcacccugaagcuggccaccggcaugagaaacgugcccgagaagcagaccagaggcaucuucggcgccaucgccggcuucaucgagaacggcugggagggcaugguggacggcugguacggcuucagacaccagaacagcgagggcagaggccaggccgccgaccugaagagcacccaggccgccaucgaccagaucaacggcaagcugaacagacugaucggcaagaccaacgagaaguuccaccagaucgagaaggaguucagcgagguggagggcagaauccaggaccuggagaaguacguggaggacaccaagaucgaccuguggagcuacaacgccgagcugcugguggcccuggagaaccagcacaccaucgaccugaccgacagcgagaugaacaagcuguucgagaagaccaagaagcagcugagagagaacgccgaggacaugggcaacggcugcuucaagaucuaccacaagugcgacaacgccugcaucggcagcaucagaaacggcaccuacgaccacgacguguacagagacgaggcccugaacaacagauuccaggugaagggcguggagcugaagagcggcuacaaggacuggauccuguggaucagcuucgccaucagcugcuuccugcugugcguggcccugcugggcuucaucaugugggccugccagaagggcaacaucagaugcaacaucugcaucuga

SEQ ID NO: 169522 - RNA, 1701 nt, Artificial Sequence; identical to SEQ ID NO: 169513
  derived and/or modified CDS sequence (opt4) from hemagglutinin__InfluenzaA__AFN19455

SEQ ID NO: 169523 - RNA, 1701 nt, Artificial Sequence; identical to SEQ ID NO: 169134
  derived and/or modified CDS sequence (opt4) from hemagglutinin__InfluenzaA__AFN19457

SEQ ID NO: 169524 - RNA, 1701 nt, Artificial Sequence; identical to SEQ ID NO: 169134
  derived and/or modified CDS sequence (opt4) from hemagglutinin__InfluenzaA__AFN19459

SEQ ID NO: 169525 - RNA, 1701 nt, Artificial Sequence; identical to SEQ ID NO: 169491
  derived and/or modified CDS sequence (opt4) from hemagglutinin__InfluenzaA__AFN19461

SEQ ID NO: 169526 - RNA, 1701 nt, Artificial Sequence
  derived and/or modified CDS sequence (opt4) from hemagglutinin__InfluenzaA__AFN19465
augaagaccaucaucgcccugagcuacauccugugccugguguucgcccagaagcugcccggcaacgacaacagcaccgccacccugugccugggccaccacgccgugcccaacggcaccaucgugaagaccaucaccaacgaccagaucgaggugaccaacgccaccgagcuggugcagagcagcagcaccggcgagaucugcgacagcccccaccagauccuggacggcgagaacugcacccugaucgacgcccugcugggcgacccccagugcgacggcuuccagaacaagaagugggaccuguucguggagagaagcaaggccuacagcaacugcuaccccuacgacgugcccgacuacgccagccugagaagccugguggccagcagcggcacccuggaguucaacaacgagagcuucaacuggaccggcgugacccagaacggcaccagcagcgccugcaucagaagaagcaacagcagcuucuucagcagacugaacuggcugacccaccugaacuucaaguaccccgcccugaacgugaccaugcccaacaacgagcaguucgacaagcuguacaucuggggcgugcaccaccccggcaccgacaaggaccagaucuuccuguacgcccagagcagcggcagaaucaccgugagcaccaagagaagccagcaggccgugauccccaacaucggcagcagacccagaaucagaaacauccccagcagaaucagcaucuacuggaccaucgugaagcccggcgacauccugcugaucaacagcaccggcaaccugaucgcccccagaggcuacuucaagaucagaagcggcaagagcagcaucaugagaagcgacgcccccaucggcaagugcaacagcgagugcaucacccccaacggcagcauccccaacgacaagcccuuccagaacgugaacagaaucaccuacggcgccugccccagauacgugaagcagagcacccugaagcuggccaccggcaugagaaacgugcccgagaagcagaccagaggcaucuucggcgccaucgccggcuucaucgagaacggcugggagggcaugguggacggcugguacggcuucagacaccagaacagcgagggcagaggccaggccgccgaccugaagagcacccaggccgccaucgaccagaucaacggcaagcugaacagacugaucggcaagaccaacgagaaguuccaccagaucgagaaggaguucagcgagguggagggcagaauccaggaccuggagaaguacguggaggacaccaagaucgaccuguggagcuacaacgccgagcugcugguggcccuggagaaccagcacaccaucgaccugaccgacagcgagaugaacaagcuguucgagaagaccaagaagcagcugagagagaacgccgaggacaucggcaacggcugcuucaagaucuaccacaagugcgacaacgccugcaucggcagcaucagaaacggcaccuacaaccacgacguguacagagacgaggcccugaacaacagauuccagaucaagggcguggagcugaagagcggcuacaaggacuggauccuguggaucagcuucgccaucagcugcuuccugcugugcaucgcccugcugggcuucaucaugugggccugccagaagggcaacaucagaugcaacaucugcaucuga

SEQ ID NO: 169527 - RNA, 1701 nt, Artificial Sequence; identical to SEQ ID NO: 169513
  derived and/or modified CDS sequence (opt4) from hemagglutinin__InfluenzaA__AFN19467

SEQ ID NO: 169528 - RNA, 1701 nt, Artificial Sequence; identical to SEQ ID NO: 169521
  derived and/or modified CDS sequence (opt4) from hemagglutinin__InfluenzaA__AFN19469

SEQ ID NO: 169529 - RNA, 1701 nt, Artificial Sequence; identical to SEQ ID NO: 169134
  derived and/or modified CDS sequence (opt4) from hemagglutinin__InfluenzaA__AFN19471

SEQ ID NO: 169530 - RNA, 1701 nt, Artificial Sequence
  derived and/or modified CDS sequence (opt4) from hemagglutinin__InfluenzaA__AFN19473
augaagaccaucaucgcccugagcuacauccugugccugguguucgcccagaagcugcccggcaacgacaacagcaccgccacccugugccugggccaccacgccgugcccaacggcaccaucgugaagaccaucaccaacgaccagaucgaggugaccaacgccaccgagcuggugcagagcagcagcaccggcgagaucugcggcagcccccaccagauccuggacggcgagaacugcacccugaucgacgcccugcugggcgacccccagugcgacggcuuccagaacaagaagugggaccuguucguggagagaagcaaggccuacagcaacugcuaccccuacgacgugcccgacuacgccagccugagaagccugguggccagcagcggcacccuggaguucaacaacgagagcuucaacuggaccggcgugacccagaacggcaccagcagcgccugcaucagaagaagcaacagcagcuucuucagcagacugaacuggcugacccaccugaacuucaaguaccccgcccugaacgugaccaugcccaacaacgagcaguucgacaagcuguacaucuggggcgugcaccaccccggcaccgacaaggaccagaucuuccuguacgcccagagcagcggcagaaucaccgugagcaccaagagaagccagcaggccgugauccccaacaucggcagcagacccagaaucagaaacauccccagcagaaucagcaucuacuggaccaucgugaagcccggcgacauccugcugaucaacagcaccggcaaccugaucgcccccagaggcuacuucaagaucagaagcggcaagagcagcaucaugagaagcgacgcccccaucggcaagugcaacagcgagugcaucacccccaacggcagcauccccaacgacaagcccuuccagaacgugaacagaaucaccuacggcgccugccccagauacgugaagcagagcacccugaagcuggccaccggcaugagaaacgugcccgagaagcagaccagaggcaucuucggcgccaucgccggcuucaucgagaacggcugggagggcaugguggacggcugguacggcuucagacaccagaacagcgagggcagaggccaggccgccgaccugaagagcacccaggccgccaucgaccagaucaacggcaagcugaacagacugaucggcaagaccaacgagaaguuccaccagaucgagaaggaguucagcgagguggagggcagaauccaggaccuggagaaguacguggaggacaccaagaucgaccuguggagcuacaacgccgagcugcugguggcccuggagaaccagcacaccaucgaccugaccgacagcgagaugaacaagcuguucgagaagaccaagaagcagcugagagagaacgccgaggacaugggcaacggcugcuucaagaucuaccacaagugcgacaacgccugcaucggcagcaucagaaacggcaccuacaaccacgacguguacagagacgaggcccugaacaacagauuccagaucaagggcguggagcugaagagcggcuacaaggacuggauccuguggaucagcuucgccaucagcugcuuccugcugugcguggcccugcugggcuucaucaugugggccugccagaagggcaacaucagaugcaacaucugcaucuga

SEQ ID NO: 169531 - RNA, 1701 nt, Artificial Sequence; identical to SEQ ID NO: 169513
  derived and/or modified CDS sequence (opt4) from hemagglutinin__InfluenzaA__AFN19475

SEQ ID NO: 169532 - RNA, 1701 nt, Artificial Sequence; identical to SEQ ID NO: 169134
  derived and/or modified CDS sequence (opt4) from hemagglutinin__InfluenzaA__AFN19477

SEQ ID NO: 169533 - RNA, 1701 nt, Artificial Sequence
  derived and/or modified CDS sequence (opt4) from hemagglutinin__InfluenzaA__AFN19479
augaagaccaucaucgcccugagcugcauccugugccugguguucgcccagaagcugcccggcaacgacaacagcaccgccacccugugccugggccaccacgccgugcccaacggcaccaucgugaagaccaucaccaacgaccagaucgaggugaccaacgccaccgagcuggugcagaacagcagcaucggcgagaucugcgacagcccccaccagauccuggacggcgagaacugcacccugaucgacgcccugcugggcgacccccagugcgacggcuuccagaacaagaagugggaccuguucguggagagaagcaaggccuacagcaacugcuaccccuacgacgugcccgacuacgccagccugagaagccugguggccagcagcggcacccuggaguucaacaacgagagcuucaacuggaccggcgugacccagaacggcaccagcagcgccugcaucagaagaagcaacagcagcuucuucagcagacugaacuggcugacccaccugaacuucaaguaccccgcccugaacgugaccaugcccaacaacgagcaguucgacaagcuguacaucuggggcgugcaccaccccggcaccgacaaggaccagaucuuccuguacgcccagagcagcggcagaaucaccgugagcaccaagagaagccagcaggccgugauccccaacaucggcagcagacccagaaucagaaacauccccagcagaaucagcaucuacuggaccaucgugaagcccggcgacauccugcugaucaacagcaccggcaaccugaucgcccccagaggcuacuucaagaucagaagcggcaagagcagcaucaugagaagcgacgcccccaucggcaagugcaacagcgagugcaucacccccaacggcagcauccccaacgacaagcccuuccagaacgugaacagaaucaccuacggcgccugccccagauacgugaagcagagcacccugaagcuggccaccggcaugagaaacgugcccgagaagcagaccagaggcaucuucggcgccaucgccggcuucaucgagaacggcugggagggcaugguggacggcugguacggcuucagacaccagaacagcgagggcagaggccaggccgccgaccugaagagcacccaggccgccaucgaccagaucaacggcaagcugaacagacugaucggcaagaccaacgagaaguuccaccagaucgagaaggaguucagcgagguggagggcagaauccaggaccuggagaaguacguggaggacaccaagaucgaccuguggagcuacaacgccgagcugcugguggcccuggagaaccagcacaccaucgaccugaccgacagcgagaugaacaagcuguucgagaagaccaagaagcagcugagagagaacgccgaggacaugggcaacggcugcuucaagaucuaccacaagugcgacaacgccugcaucggcagcaucagaaacggcaccuacgaccacgacguguacagagacgaggcccugaacaacagauuccagaucaagggcguggagcugaagagcggcuacaaggacuggauccuguggaucagcuucgccaucagcugcuuccugcugugcguggcccugcugggcuucaucaugugggccugccagaagggcaacaucagaugcaacaucugcaucuga

SEQ ID NO: 169534 - RNA, 1701 nt, Artificial Sequence; identical to SEQ ID NO: 169513
  derived and/or modified CDS sequence (opt4) from hemagglutinin__InfluenzaA__AFN19483

SEQ ID NO: 169535 - RNA, 1701 nt, Artificial Sequence; identical to SEQ ID NO: 166915
  derived and/or modified CDS sequence (opt4) from hemagglutinin__InfluenzaA__AFN19485

SEQ ID NO: 169536 - RNA, 1701 nt, Artificial Sequence; identical to SEQ ID NO: 169134
  derived and/or modified CDS sequence (opt4) from hemagglutinin__InfluenzaA__AFN19487

SEQ ID NO: 169537 - RNA, 1701 nt, Artificial Sequence
  derived and/or modified CDS sequence (opt4) from hemagglutinin__InfluenzaA__AFN19491
augaagaccaucaucgcccugagcuacauccugugccugguguucgcccagaagcugcccggcaacgacaacagcaccgccacccugugccugggccaccacgccgugcccaacggcaccaucgugaagaccaucaccaacgaccagaucgaggugaccaacgccaccgagcuggugcagagcagcagcaccggcgagaucugcgacagcccccaccagauccuggacggcgagaacugcacccugaucgacgcccugcugggcgacccccagugcgacggcuuccagaacaagaagugggaccuguucguggagagaagcaaggccuacagcaacugcuaccccuacgacgugcccgacuacgccagccugagaagccugguggccagcagcggcacccuggaguucaacaacgagagcuucaacuggaccggcgugacccagaacggcaccagcagcgccugcaucagaagaagcaacagcagcuucuucagcagacugaacuggcugacccaccugaacuucaaguaccccgcccugaacgugaccaugcccaacaacgagcaguucgacaagcuguacaucuggggcgugcaccaccccggcaccgacaaggaccagaucuuccuguacgcccagagcagcggcagaaucaccgugagcaccaagagaagccagcaggccgugauccccaacaucggcagcagacccagaaucagaaacauccccagcagaaucagcaucuacuggaccaucgugaagcccggcgacauccugcugaucaacagcaccggcaaccugaucgcccccagaggcuacuucaagaucagaagcggcaagagcagcaucaugagaagcgacgcccccaucggcaagugcaacagcgagugcaucacccccaacggcagcauccccaacgacaagcccuuccagaacgugaacagaaucaccuacggcgccugccccagauacgugaagcagagcacccugaagcuggccaccggcaugagaaacgugcccgagaagcagaccagaggcaucuucggcgccaucgccggcuucaucgagaacggcugggagggcaugguggacggcugguacggcuucagacaccagaacagcgagggcagaggccaggccgccgaccugaagagcacccaggccgccaucgaccagaucaacggcaagcugaacagacugaucggcaagaccaacgagaaguuccaccagaucgagaaggaguucagcgagguggagggcagaauccaggaccuggagaaguacguggaggacaccaagaucgaccuguggagcuacaacgccgagcugcugguggcccuggagaaccagcacaccaucgaccugaccgacagcgagaugaacaagcuguucgagaagaccaagaagcagcugagagagaacgccgaggacaugggcaacggcugcuucaagaucuaccacaagugcgacaacgccugcaucggcagcaucagaaacggcaccuacaaccacgacguguacagagacgaggcccugaacaacagauuccagaucaagggcguggagcugaagagcggcuacaaggacuggauccuguggaucagcuucgccaucagcugcuuccugcugugcguggugcugcugggcuucaucaugugggccugccagaagggcaacaucagaugcaacaucugcaucuga

SEQ ID NO: 169538 - RNA, 1701 nt, Artificial Sequence
  derived and/or modified CDS sequence (opt4) from hemagglutinin__InfluenzaA__AFN19493
augaagaccaucaucgcccugagcuacauccugugccugguguucgcccagaagcugcccggcaacgacaacagcaccgccacccugugccugggccaccacgccgugcccaacggcaccaucgugaagaccaucaccaacgaccagaucgaggugaccaacgccaccgagcuggugcagagcagcagcaccggcgagaucugcaacagcccccaccagauccuggacggcgagaacugcacccugaucgacgcccugcugggcgacccccagugcgacggcuuccagaacaagaagugggaccuguucguggagagaagcaaggcccacagcaacugcuaccccuacgacgugcccgacuacgccagccugagaagccugguggccagcagcggcacccuggaguucaacaacgagagcuucaacuggaccggcgugacccagaacggcaccagcagcgccugcaucagaagaagcaacaacagcuucuucagcagacugaacuggcugacccaccugaacuucaaguaccccgcccugaacgugaccaugcccaacaacgagcaguucgacaagcuguacaucuggggcgugcaccaccccggcaccgacaaggaccagaucuuccuguacgcccaggccagcggcagaaucaccgugagcaccaagagaagccagcagaccgugauccccaacaucggcagcagacccagagugagaaacauccccagcagagugagcaucuacuggaccaucgugaagcccggcgacauccugcugaucaacagcaccggcaaccugaucgcccccagaggcuacuucaagaucagaagcggcaagagcagcaucaugagaagcgacgcccccaucggcaagugcaacagcgccugcaucacccccaacggcagcauccccaacgacaagcccuuccagaacgugaacagaaucaccuacggcgccugccccagauacgugaagcagaacacccugaagcuggccaccggcaugagaaacgugcccgagaagcagaccagaggcaucuucggcgccaucgccggcuucaucgagaacggcugggagggcaugguggacggcugguacggcuucagacaccagaacagcgagggcagaggccaggccgccgaccugaagagcacccaggccgccaucgaccagaucaacggcaagcugaacagacugaucggcaagaccaacgagaaguuccaccagaucgagaaggaguucagcgagguggagggcagaauccaggaccuggagaaguacguggaggacaccaagaucgaccuguggagcuacaacgccgagcugcugguggcccuggagaaccagcacaccaucgaccugaccgacagcgagaugaacaagcuguucgagaagaccaagaagcagcugagagagaacgccgaggacaugggcaacggcugcuucaagaucuaccacaagugcgacaacgccugcaucggcagcaucagaaacggcaccuacgaccacgacguguacagagacgaggcccugaacaacagauuccagaucaagggcguggagcugaagagcggcuacaaggacuggauccuguggaucagcuucgccaucagcugcuuccugcugugcguggcccugcugggcuucaucaugugggccugccagaagggcaacaucagaugcaacaucugcaucuga

SEQ ID NO: 169539 - RNA, 1701 nt, Artificial Sequence
  derived and/or modified CDS sequence (opt4) from hemagglutinin__InfluenzaA__AFN19495
augaagaccaucaucgcccugagcuacauccugugccugguguucgcccagaagauccccggcaacgacaacagcaccgccacccugugccugggccaccacgccgugcccaacggcaccaucgugaagaccaucaccaacgaccagaucgaggugaccaacgccaccgagcuggugcagagcagcagcgccggcgagaucugcgacagcccccaccacauccuggacggcgagaacugcacccugaucgacgcccugcugggcgacccccagugcgacggcuuccagaacaagaagugggaccuguucguggagagaagcagagccuacagcaacugcuaccccuacgacgugcccgacuacgccagccugagaagccugguggccagcagcggcacccuggaguucaacaacgagagcuucaacuggaccggcgugacccagaacggcaccagcagcgccugcaucagaagaagcaacaacagcuucuucagcagacugaacuggcugacccaccugaacuucaaguaccccgcccugaacgugaccaugcccaacaacgagcaguucgacaagcuguacaucuggggcgugcaccaccccggcaccgacaaggaccagaucuuccuguacgcccaggccagcggcagaaucaccgugagcaccaagagaagccagcaggccgugauccccaacaucggcagcagacccagagugagaaacauccccagcagaaucagcaucuacuggaccaucgugaagcccggcgacauccugcugaucaacagcaccggcaaccugaucgcccccagaggcuacuucaagaucagaagcggcaagagcagcaucaugagaagcgacgcccccaucggcaagugcaacagcgagugcaucacccccaacggcagcauccccaacgacaagcccuuccagaacgugaacagaaucaccuacggcgccugccccagauacgugaagcagagcacccugaagcuggccaccggcaugagaaacgugcccgagaagcagaccagaggcaucuucggcgccaucgccggcuucaucgagaacggcugggagggcaugauggacggcugguacggcuucagacaccagaacagcgagggcagaggccaggccgccgaccugaagagcacccaggccgccaucgaccagaucaacggcaagcugaacagacugaucggcaagaccaacgagaaguuccaccagaucgagaaggaguucagcgagguggagggcagaauccaggaccuggagaaguacguggaggacaccaagaucgaccuguggagcuacaacgccgagcugcugguggcccuggagaaccagcacaccaucgaccugaccgacagcgagaugaacaagcuguucgagaagaccaagaagcagcugagagagaacgccgaggacaugggcaacggcugcuucaagaucuaccacaagugcgacaacgccugcaucggcagcaucagaaacggcaccuacgaccacgacguguacagagacgaggcccugaacaacagauuccagaucaagggcguggagcugaagagcggcuacaaggacuggauccuguggaucagcuucgccaccagcugcuuccugcugugcguggcccugcugggcuucaucaugugggccugccagaagggcaacaucagaugcaacaucugcaucuga

SEQ ID NO: 169540 - RNA, 1701 nt, Artificial Sequence
  derived and/or modified CDS sequence (opt4) from hemagglutinin__InfluenzaA__AFN19497
augaagaccaucaucgcccugagcuacauccugugccugguguucgcccagaagcugcccgagaacgacaacagcaccgccacccugugccugggccaccacgccgugcccaacggcaccaucgugaagaccaucaccaacgaccagaucgaggugaccaacgccaccgagcuggugcagagcagcagcaccggcgagaucugcaacagcccccaccagauccuggacggcgagaacugcacccugaucgacgcccugcugggcgacccccagugcgacggcuuccagaacaagaagugggaccuguucguggagagaagcaaggcccacagcaacugcuaccccuacgacgugcccgacuacgccagccugagaagccugguggccagcagcggcacccuggaguucaacaacgagagcuucaacuggaccggcgugacccagaacggcaccagcagcgccugcaucagaagaagcaacaacagcuucuucagcagacugaacuggcugacccaccugaacuucaaguaccccgcccugaacgugaccaugcccaacaacgagcaguucgacaagcuguacaucuggggcgugcaccaccccggcaccgacaaggaccagaucuuccuguacgcccaggccagcggcagaaucaccgugagcaccaagagaagccagcaggccgugauccccaacaucggcagcagacccagagugagaaacauccccagcagagugagcaucuacuggaccaucgugaagcccggcgacauccugcugaucaacagcaccggcaaccugaucgcccccagaggcuacuucaagaucagaagcggcaagagcagcaucaugagaagcgacgcccccaucggcaagugcaacagcaccugcaucacccccaacggcagcauccccaacgacaagcccuuccagaacgugaacagaaucaccuacggcgccugccccagauacgugaagcagaacacccugaagcuggccaccggcaugagaaacgugcccgagaagcagaccagaggcaucuucggcgccaucgccggcuucaucgagaacggcugggagggcaugguggacggcugguacggcuucagacaccagaacagcgagggcagaggccaggccgccgaccugaagagcacccaggccgccaucgaccagaucaacggcaagcugaacagacugaucggcaagaccaacgagaaguuccaccagaucgagaaggaguucagcgagguggagggcagaauccaggaccuggagaaguacguggaggacaccaagaucgaccuguggagcuacaacgccgagcugcugguggcccuggagaaccagcacaccaucgaccugaccgacagcgagaugaacaagcuguucgagaagaccaagaagcagcugagagagaacgccgaggacaugggcaacggcugcuucaagaucuaccacaagugcgacaacgccugcaucggcagcaucagaaacggcaccuacgaccacgacguguacagagacgaggcccugaacaacagauuccagaucaagggcguggagcugaagagcggcuacaaggacuggauccuguggaucagcuucgccaucagcugcuuccugcugugcguggcccugcugggcuucaucaugugggccugccagaagggcaacaucagaugcaacaucugcaucuga

SEQ ID NO: 169541 - RNA, 1701 nt, Artificial Sequence; identical to SEQ ID NO: 169491
  derived and/or modified CDS sequence (opt4) from hemagglutinin__InfluenzaA__AFN19499

SEQ ID NO: 169542 - RNA, 1701 nt, Artificial Sequence; identical to SEQ ID NO: 169490
  derived and/or modified CDS sequence (opt4) from hemagglutinin__InfluenzaA__AFN19501

SEQ ID NO: 169543 - RNA, 1701 nt, Artificial Sequence; identical to SEQ ID NO: 167042
  derived and/or modified CDS sequence (opt4) from hemagglutinin__InfluenzaA__AFN19503

SEQ ID NO: 169544 - RNA, 1701 nt, Artificial Sequence; identical to SEQ ID NO: 169491
  derived and/or modified CDS sequence (opt4) from hemagglutinin__InfluenzaA__AFN19507

SEQ ID NO: 169545 - RNA, 1701 nt, Artificial Sequence; identical to SEQ ID NO: 169490
  derived and/or modified CDS sequence (opt4) from hemagglutinin__InfluenzaA__AFN19509

SEQ ID NO: 169546 - RNA, 1701 nt, Artificial Sequence; identical to SEQ ID NO: 169491
  derived and/or modified CDS sequence (opt4) from hemagglutinin__InfluenzaA__AFN19513

SEQ ID NO: 169547 - RNA, 1701 nt, Artificial Sequence; identical to SEQ ID NO: 169490
  derived and/or modified CDS sequence (opt4) from hemagglutinin__InfluenzaA__AFN19515

SEQ ID NO: 169548 - RNA, 1701 nt, Artificial Sequence; identical to SEQ ID NO: 169491
  derived and/or modified CDS sequence (opt4) from hemagglutinin__InfluenzaA__AFN19517

SEQ ID NO: 169549 - RNA, 1701 nt, Artificial Sequence; identical to SEQ ID NO: 169491
  derived and/or modified CDS sequence (opt4) from hemagglutinin__InfluenzaA__AFN19519

SEQ ID NO: 169550 - RNA, 1701 nt, Artificial Sequence; identical to SEQ ID NO: 169134
  derived and/or modified CDS sequence (opt4) from hemagglutinin__InfluenzaA__AFN19521

SEQ ID NO: 169551 - RNA, 1701 nt, Artificial Sequence; identical to SEQ ID NO: 169490
  derived and/or modified CDS sequence (opt4) from hemagglutinin__InfluenzaA__AFN19523

SEQ ID NO: 169552 - RNA, 1701 nt, Artificial Sequence
  derived and/or modified CDS sequence (opt4) from hemagglutinin__InfluenzaA__AFN19527
augaagaccaucaucgcccugagcuacacccugugccugguguucgcccagaagcugcccggcaacgacaacagcaccgccacccugugccugggccaccacgccgugcccaacggcaccaucgugaagaccaucaccaacgaccagaucgaggugaccaacgccaccgagcuggugcagaacagcagcaucggcgagaucugcgacagcccccaccagauccuggacggcgagaacugcacccugaucgacgcccugcugggcgacccccagugcgacggcuuccagaacaagaagugggaccuguucguggagagaagcaaggccuacagcaacugcuaccccuacgacgugcccgacuacgccagccugagaagccugguggccagcagcggcacccuggaguucaacaacgagagcuucaacuggaccggcgugacccagaacggcaccagcagcgccugcaucagaagaagcaacagcagcuucuucagcagacugaacuggcugacccaccugaacuucaaguaccccgcccugaacgugaccaugcccaacaacgagcaguucgacaagcuguacaucuggggcgugcaccaccccggcaccgacaaggaccagaucuuccuguacgcccagagcagcggcagaaucaccgugagcaccaagagaagccagcaggccgugauccccaacaucggcagcagacccagaaucagaaacauccccagcagaaucagcaucuacuggaccaucgugaagcccggcgacauccugcugaucaacagcaccggcaaccugaucgcccccagaggcuacuucaagaucagaagcggcaagagcagcaucaugagaagcgacgcccccaucggcaagugcaacagcgagugcaucacccccaacggcagcauccccaacgacaagcccuuccagaacgugaacagaaucaccuacggcgccugccccagauacgugaagcagagcacccugaagcuggccaccggcaugagaaacgugcccgagaagcagaccagaggcaucuucggcgccaucgccggcuucaucgagaacggcugggagggcaugguggacggcugguacggcuucagacaccagaacagcgagggcagaggccaggccgccgaccugaagagcacccaggccgccaucgaccagaucaacggcaagcugaacagacugaucggcaagaccaacgagaaguuccaccagaucgagaaggaguucagcgagguggagggcagaauccaggaccuggagaaguacguggaggacaccaagaucgaccuguggagcuacaacgccgagcugcugguggcccuggagaaccagcacaccaucgaccugaccgacagcgagaugaacaagcuguucgagaagaccaagaagcagcugagagagaacgccgaggacaugggcaacggcugcuucaagaucuaccacaagugcgacaacgccugcaucggcagcaucagaaacggcaccuacgaccacgacguguacagagacgaggcccugaacaacagauuccagaucaagggcguggagcugaagagcggcuacaaggacuggauccuguggaucagcuucgccaucagcugcuuccugcugugcguggcccugcugggcuucaucaugugggccugccagaagggcaacaucagaugcaacaucugcaucuga

SEQ ID NO: 169553 - RNA, 1701 nt, Artificial Sequence
  derived and/or modified CDS sequence (opt4) from hemagglutinin__InfluenzaA__AFN19529
augaagaccaucaucgcccugagcuacauccugugccugguguucgcccagaagcugcccggcaacgacaacagcaccgccacccugugccugggccaccacgccgugcccaacggcaccaucgugaagaccaucaccaacgaccagaucgaggugaccaacgccaccgagcuggugcagaacagcagcaucggcgagaucugcgacagcccccaccagauccuggacggcgagaacugcacccugaucgacgcccugcugggcgacccccagugcgacggcuuccagaacaagaagugggaccuguucguggagagaagcaaggccuacagcaacugcuaccccuacgacgugcccgacuacgccagccugagaagccugguggccagcagcggcacccuggaguucaacaacgagagcuucaacuggaccggcgugacccagaacggcaccagcagcgccugcaucagaagaagcaacagcagcuucuucagcagacugaacuggcugacccaccugaacuucaaguaccccgcccugaacgugaccaugcccaacaacgagcaguucgacaagcuguacaucuggggcgugcaccaccccggcaccgacaaggaccagaucuuccuguacgcccagagcagcggcagaaucaccgugagcaccaagagaagccagcaggccgugauccccaacaucggcagcagacccagaaucagaaacauccccagcagaaucagcaucuacuggaccaucgugaagcccggcgacauccugcugaucaacagcaccggcaaccugaucgcccccagaggcuacuucaagaucagaagcggcaagagcagcaucaugagaagcgacgcccccaucggcaagugcaacagcgagugcaucacccccaacggcagcauccccaacgacaagcccuuccagaacgugaacagaaucaccuacggcgccugccccagauacgugaagcagagcacccugaagcuggccaccggcaugagaaacgugcccgagaagcagaccagaggcaucuucggcgccaucgccggcuucaucgagaacggcugggagggcaugguggacggcugguacggcuucagacaccagaacagcgagggcagaggccaggccgccgaccugaagagcacccaggccgccaucgaccagaucaacggcaagcugaacagacugaucggcaagaccaacgagaaguuccaccagaucgagaaggaguucagcgagguggagggcagaauccaggaccuggagaaguacguggaggacaccaagaucgaccuguggagcuacaacgccgagcugcugguggcccuggagaaccagcacaccaucgaccugaccgacagcgagaugaacaagcuguucgagaagaccaagaagcagcugagagagaacgccgaggacaugggcaacggcugcuucaagaucuaccacaagugcgacaacgccugcaucggcagcaucagaaacggcaccuacgaccacgacguguacagagacgaggcccugaacaacagauuccagaucaagggcguggagcugaagagcggcuacaaggacuggauccuguggaucagcuucgccaucagcugcuuccugcugugcguggcccugcugggcuucaucaugugggccugccagaagggcaacaucagaugcaacaucugcaucuga

SEQ ID NO: 169554 - RNA, 1701 nt, Artificial Sequence; identical to SEQ ID NO: 169134
  derived and/or modified CDS sequence (opt4) from hemagglutinin__InfluenzaA__AFN19531

SEQ ID NO: 169555 - RNA, 1701 nt, Artificial Sequence; identical to SEQ ID NO: 169553
  derived and/or modified CDS sequence (opt4) from hemagglutinin__InfluenzaA__AFN19533

SEQ ID NO: 169556 - RNA, 1701 nt, Artificial Sequence
  derived and/or modified CDS sequence (opt4) from hemagglutinin__InfluenzaA__AFN19535
augaagaccaucaucgcccugagcuacauccugugccugguguucgcccagaagauccccggcaacgacaacagcaccgccacccugugccugggccaccacgccgugcccaacggcaccaucgugaagaccaucaccaacgaccagaucgaggugaccaacgccaccgagcuggugcagagcagcagcaccggcgagaucugcgacagcccccaccagauccuggacggcgagaacugcacccugaucgacgcccugcugggcgacccccagugcgacggcuuccagaacaagaagugggaccuguucguggagagaagcaaggccuacagcaacugcuaccccuacgacgugcccgacuacgccagccugagaagccugguggccagcagcggcacccuggaguucaacaacgagagcuucaacuggaccggcgugacccagaacggcaccagcagcgccugcaucagaagaagcaacagcagcuucuucagcagacugaacuggcugacccaccugaacuucaaguaccccgcccugaacgugaccaugcccaacaacgagcaguucgacaagcuguacaucuggggcgugcaccaccccggcaccgacaaggaccagaucuuccuguacgcccagagcagcggcagaaucaccgugagcaccaagagaagccagcaggccgugauccccaacaucggcagcagacccagaaucagaaacauccccagcagaaucagcaucuacuggaccaucgugaagcccggcgacauccugcugaucaacagcaccggcaaccugaucgcccccagaggcuacuucaagaucagaagcggcaagagcagcaucaugagaagcgacgcccccaucggcaagugcaacagcgagugcaucacccccaacggcagcauccccaacgacaagcccuuccagaacgugaacagaaucaccuacggcgccugccccagauacgugaagcagagcacccugaagcuggccaccggcaugagaaacgugcccgagaagcagaccagaggcaucuucggcgccaucgccggcuucaucgagaacggcugggagggcaugguggacggcugguacggcuucagacaccagaacagcgagggcagaggccaggccgccgaccugaagagcacccaggccgccaucgaccagaucaacggcaagcugaacagacugaucggcaagaccaacgagaaguuccaccagaucgagaaggaguucagcgagguggagggcagaauccaggaccuggagaaguacguggaggacaccaagaucgaccuguggagcuacaacgccgagcugcugguggcccuggagaaccagcacaccaucgaccugaccgacagcgagaugaacaagcuguucgagaagaccaagaagcagcugagagagaacgccgaggacaugggcaacggcugcuucaagaucuaccacaagugcgacaacgccugcaucggcagcaucagaaacggcaccuacaaccacgacguguacagagacgaggcccugaacaacagauuccagaucaagggcguggagcugaagagcggcuacaaggacuggauccuguggaucagcuucgccaucagcugcuuccugcugugcguggcccugcugggcuucaucaugugggccugccagaagggcaacaucagaugcaacaucugcaucuga

SEQ ID NO: 169557 - RNA, 1701 nt, Artificial Sequence; identical to SEQ ID NO: 169134
  derived and/or modified CDS sequence (opt4) from hemagglutinin__InfluenzaA__AFN19537

SEQ ID NO: 169558 - RNA, 1701 nt, Artificial Sequence; identical to SEQ ID NO: 169134
  derived and/or modified CDS sequence (opt4) from hemagglutinin__InfluenzaA__AFN19539

SEQ ID NO: 169559 - RNA, 1701 nt, Artificial Sequence; identical to SEQ ID NO: 169134
  derived and/or modified CDS sequence (opt4) from hemagglutinin__InfluenzaA__AFN19543

SEQ ID NO: 169560 - RNA, 1701 nt, Artificial Sequence
  derived and/or modified CDS sequence (opt4) from hemagglutinin__InfluenzaA__AFN19545
augaagaccaucaucgcccugagcuacauccugugccugguguucgcccagaagcugcccggcagcgacaacagcaccgccacccugugccugggccaccacgccgugcccaacggcaccaucgugaagaccaucaccaacgacagaaucgaggugaccaacgccaccgagcuggugcagaacagcagcaucggcgagaucugcgacagcccccaccagauccuggacggcgagaacugcacccugaucgacgcccugcugggcgacccccagugcgacggcuucaagaacaagaagugggaccuguucguggagagaagcaaggccuacagcaacugcuaccccuacgacgugcccgacuacgccagccugagaagccugguggccagcagcggcacccuggaguucaacaacgagagcuucaacuggaccggcgugacccagaacggcaccagcagcgccugcaucagaagaagcaacaacagcuucuucagcagacugaacuggcugacccaccugaacuucaaguaccccgcccugaacgugaccaugcccaacaacgagcaguucgacaagcuguacaucuggggcgugcaccaccccggcaccgacaaggaccagaucuuccuguacgcccagagcagcggcagaaucaccgugagcaccaagagaagccagcaggccgugauccccaacaucggcagcagacccagaaucagaaacauccccagcagaaucagcaucuacuggaccaucgugaagcccggcgacauccugcugaucaacagcaccggcaaccugaucgcccccagaggcuacuucaagauccagagcggcaagagcagcaucaugagaagcgacgcccccaucggcaagugcaagagcgagugcaucacccccaacggcagcauccccaacgacaagcccuuccagaacgugaacagaaucaccuacggcgccugccccagauacgugaagcagagcacccugaagcuggccaccggcaugagaaacgugcccgagaagcagaccagaggcaucuucggcgccaucgccggcuucaucgagaacggcugggagggcaugguggacggcugguacggcuucagacaccagaacagcgagggcagaggccaggccgccgaccugaagagcacccaggccgccaucgaccagaucaacggcaagcugaacagacugaucggcaagaccaacgagaaguuccaccagaucgagaaggaguucagcgagguggagggcagaauccaggaccuggagaaguacguggaggacaccaagaucgaccuguggagcuacaacgccgagcugcugguggcccuggagaaccagcacaccaucgaccugaccgacagcgagaugaacaagcuguucgagaagaccaagaagcagcugagagagaacgccgaggacaugggcaacggcugcuucaagaucuaccacaagugcgacaacgccugcaucggcagcaucagaaacggcaccuacgaccacgacguguacagagacgaggcccugaacaacagauuccagaucaagggcguggagcugaagagcggcuacaaggacuggauccuguggaucagcuucgccaucagcugcuuccugcugugcguggcccugcugggcuucaucaugugggccugccagaagggcaacaucagaugcaacaucugcaucuga

SEQ ID NO: 169561 - RNA, 1701 nt, Artificial Sequence; identical to SEQ ID NO: 169134
  derived and/or modified CDS sequence (opt4) from hemagglutinin__InfluenzaA__AFN19547

SEQ ID NO: 169562 - RNA, 1701 nt, Artificial Sequence
  derived and/or modified CDS sequence (opt4) from hemagglutinin__InfluenzaA__AFN19549
augaagaccaucaucgcccugagcuacauccugugccugguguucgcccagaagcugcccggcaacgacaacagcaccgccacccugugccugggccaccacgccgugcccaacggcaccaucgugaagaccaucaccaacgaccagaucgaggugaccaacgccaccgagcuggugcagagcagcagcaagggcgagaucugcaacagcccccaccagauccuggacggcggcaacugcacccugaucgacgcccugcugggcgacccccagugcgacggcuuccagaacaagaagugggaccuguucguggagagaagcaaggcccacagcaacugcuaccccuacgacgugcccgacuacgccagccugagaagccugguggccagcagcggcacccuggaguucaacaacgagagcuucaacuggaccggcgugacccagaacggcaccagcagcgccugcaugagaagaagcaacaacagcuucuucagcagacugaacuggcugacccaccugaacuucaaguaccccgcccugaacgugaccaugcccaacaacgagcaguucgacaagcuguacaucuggggcgugcaccaccccggcaccgacaaggaccagaucuuccuguacgcccaggccagcggcagaaucaccgugagcaccaagagaagccagcaggccgugauccccaacaucggcagcagacccagagugagaaacauccccagcagagugagcaucuacuggaccaucgugaagcccggcgacauccugcugaucaacagcaccggcaaccugaucgcccccagaggcuacuucaagaucagaagcggcaagagcagcaucaugagaagcgacgcccccaucggcaagugcaacagcgccugcaucacccccaacggcagcauccccaacgacaagcccuuccagaacgugaacagaaucaccuacggcgccugccccagauacgugaagcagaacacccugaagcuggccaccggcaugagaaacgugcccgagaagcagaccagaggcaucuucggcgccaucgccggcuucaucgagaacggcugggagggcaugguggacggcugguacggcuucagacaccagaacagcgagggcagaggccaggccgccgaccugaagagcacccaggccgccaucgaccagaucaacggcaagcugaacagacugaucggcaagaccaacgagaaguuccaccagaucgagaaggaguucagcgagguggagggcagaauccaggacaucgagaaguacguggaggacaccaagaucgaccuguggagcuacaacgccgagcugcugguggcccuggagaaccagcacaccaucgaccugaccgacagcgagaugaacaagcuguucgagaagaccaagaagcagcugagagagaacgccgaggacaugggcaacggcugcuucaagaucuaccacaagugcgacaacgccugcaucggcagcaucagaaacggcaccuacgaccacgacguguacagagacgaggcccugaacaacagauuccagaucaagggcguggagcugaagagcggcuacaaggacuggauccuguggaucagcuucgccaucagcugcuuccugcugugcguggcccugcugggcuucaucaugugggccugccagaagggcaacaucagaugcaacaucugcaucuga

SEQ ID NO: 169563 - RNA, 1701 nt, Artificial Sequence
  derived and/or modified CDS sequence (opt4) from hemagglutinin__InfluenzaA__AFN19551
augaagaccaucaucgcccugagcuacauccugugccugguguucgcccagaagauccccggcaacgacaacagcaccgccacccugugccugggccaccacgccgugcccaacggcaccaucgugaagaccaucaccaacgaccagaucgaggugaccaacgccaccgagcuggugcagagcagcagcaccggcgagaucugcgacagcccccaccagauccuggacggcgagaacugcacccugaucgacgcccugcugggcgacccccacugcgacggcuuccagaacaagaagugggaccuguucguggagagaagcaaggccuacagcaacugcuaccccuacgacgugcccgacuacgccagccugagaagccugguggccagcagcggcacccuggaguucaacaacgagagcuucaacuggaccggcgugacccagaacggcaccagcagcgccugcaucagaagaagcaacagcagcuucuucagcagacugaacuggcugacccaccugaacuucaaguaccccgcccugaacgugaccaugcccaacaacgagcaguucgacaagcuguacaucuggggcgugcaccaccccggcaccgacaaggaccagaucuuccuguacgcccagagcagcggcagaaucaccgugagcaccaagagaagccagcaggccgugauccccaacaucggcagcagacccagaaucagaaacauccccagcagaaucagcaucuacuggaccaucgugaagcccggcgacauccugcugaucaacagcaccggcaaccugaucgcccccagaggcuacuucaagaucagaagcggcaagagcagcaucaugagaagcgacgcccccaucggcaagugcaacagcgagugcaucacccccaacggcagcauccccaacgacaagcccuuccagaacgugaacagaaucaccuacggcgccugccccagauacgugaagcagagcacccugaagcuggccaccggcaugagaaacgugcccgagaagcagaccagaggcaucuucggcgccaucgccggcuucaucgagaacggcugggagggcaugguggacggcugguacggcuucagacaccagaacagcgagggcagaggccaggccgccgaccugaagagcacccaggccgccaucgaccagaucaacggcaagcugaacagacugaucggcaagaccaacgagaaguuccaccagaucgagaaggaguucagcgagguggagggcagaauccaggaccuggagaaguacguggaggacaccaagaucgaccuguggagcuacaacgccgagcugcugguggcccuggagaaccagcacaccaucgaccugaccgacagcgagaugaacaagcuguucgagaagaccaagaagcagcugagagagaacgccgaggacaugggcaacggcugcuucaagaucuaccacaagugcgacaacgccugcaucggcagcaucagaaacggcaccuacaaccacgacguguacagagacgaggcccugaacaacagauuccagaucaagggcguggagcugaagagcggcuacaaggacuggauccuguggaucagcuucgccaucagcugcuuccugcugugcguggcccugcugggcuucaucaugugggccugccagaagggcaacaucagaugcaacaucugcaucuga

SEQ ID NO: 169564 - RNA, 1701 nt, Artificial Sequence; identical to SEQ ID NO: 169513
  derived and/or modified CDS sequence (opt4) from hemagglutinin__InfluenzaA__AFN19553

SEQ ID NO: 169565 - RNA, 1701 nt, Artificial Sequence; identical to SEQ ID NO: 169513
  derived and/or modified CDS sequence (opt4) from hemagglutinin__InfluenzaA__AFN19555

SEQ ID NO: 169566 - RNA, 1701 nt, Artificial Sequence; identical to SEQ ID NO: 169134
  derived and/or modified CDS sequence (opt4) from hemagglutinin__InfluenzaA__AFN19557

SEQ ID NO: 169567 - RNA, 1701 nt, Artificial Sequence; identical to SEQ ID NO: 169513
  derived and/or modified CDS sequence (opt4) from hemagglutinin__InfluenzaA__AFN19559

SEQ ID NO: 169568 - RNA, 1701 nt, Artificial Sequence; identical to SEQ ID NO: 169521
  derived and/or modified CDS sequence (opt4) from hemagglutinin__InfluenzaA__AFN19561

SEQ ID NO: 169569 - RNA, 1701 nt, Artificial Sequence
  derived and/or modified CDS sequence (opt4) from hemagglutinin__InfluenzaA__AFN19563
augaagaccaucaucgcccugagcuacauccugugccugguguucgcccagaagcugcccggcaacgacaacagcaccgccacccugugccugggccaccacgccgugcccaacggcaccaucgugaagaccaucaccaacgacagaaucgaggugaccaacgccaccgagcuggugcagaacagcagcaucggcgagaucugcgacagcccccaccagauccuggacggcgagaacugcacccugaucgacgcccugcugggcgacccccagugcgacggcuuccagaacaagaagugggaccuguucguggagagaagcaaggccuacagcaacugcuaccccuacgacgugcccgacuacgccagccugagaagccugguggccagcagcggcacccuggaguucaacaacgagagcuucaacuggaccggcgugacccagaacggcaccagcagcgccugcaucagaagaagcaacaacagcuucuucagcagacugaacuggcugacccaccugaacuucaaguaccccgcccugaacgugaccaugcccaacaacgagcaguucgacaagcuguacaucuggggcgugcaccaccccggcaccgacaaggaccagaucuuccuguacgcccagagcagcggcagaaucaccgugagcaccaagagaagccagcaggccgugauccccaacaucggcagcagacccagaaucagaaacauccccagcagaaucagcaucuacuggaccaucgugaagcccggcgacauccugcugaucaacagcaccggcaaccugaucgcccccagaggcuacuucaagaucagaagcggcaagagcagcaucaugagaagcgacgcccccaucggcaagugcaagagcgagugcaucacccccaacggcagcauccccaacgacaagcccuuccagaacgugaacagaaucaccuacggcgccugccccagauacgugaagcagagcacccugaagcuggccaccggcaugagaaacgugcccgagaagcagaccagaggcaucuucggcgccaucgccggcuucaucgagaacggcugggagggcaugguggacggcugguacggcuucagacaccagaacagcgagggcagaggccaggccgccgaccugaagagcacccaggccgccaucgaccagaucaacggcaagcugaacagacugaucggcaagaccaacgagaaguuccaccagaucgagaaggaguucagcgagguggagggcagaauccaggaccuggagaaguacguggaggacaccaagaucgaccuguggagcuacaacgccgagcugcugguggcccuggagaaccagcacaccaucgaccugaccgacagcgagaugaacaagcuguucgagaagaccaagaagcagcugagagagaacgccgaggacaugggcaacggcugcuucaagaucuaccacaagugcgacaacgccugcaucggcagcaucagaaacggcaccuacgaccacgacguguacagagacgaggcccugaacaacagauuccagaucaagggcguggagcugaagagcggcuacaaggacuggauccuguggaucagcuucgccaccagcugcuuccugcugugcguggcccugcugggcuucaucaugugggccugccagaagggcaacaucagaugcaacaucugcaucuga

SEQ ID NO: 169570 - RNA, 1701 nt, Artificial Sequence; identical to SEQ ID NO: 169491
  derived and/or modified CDS sequence (opt4) from hemagglutinin__InfluenzaA__AFN19565

SEQ ID NO: 169571 - RNA, 1701 nt, Artificial Sequence
  derived and/or modified CDS sequence (opt4) from hemagglutinin__InfluenzaA__AFN19567
augaagaccaucaucgcccugagcuacauccugugccugguguucgcccagaagauccccggcaacgacaacagcaccgccacccugugccugggccaccacgccgugcccaacggcaccaucgugaagaccaucaccaacgacagaaucgaggugaccaacgccaccgagcuggugcagaacagcagcaucggcgagaucugcgacagcccccaccagauccuggacggcgagaacugcacccugaucgacgcccugcugggcgacccccagugcgacggcuuccagaacaagaagugggaccuguucguggagagaagcaaggccuacagcaacugcuaccccuacgacgugcccgacuacgccagccugagaagccugguggccagcagcggcacccuggaguucaacaacgagagcuucaacuggaccggcgugacccagaacggcaccagcagcgccugcaucagaagaagcaacaacagcuucuucagcagacugaacuggcugacccaccugaacuucaaguaccccgcccugaacgugaccaugcccaacaacgagcaguucgacaagcuguacaucuggggcgugcaccaccccggcaccgacaaggaccagaucuuccuguacgcccagagcagcggcagaaucaccgugagcaccaagagaagccagcaggccgugauccccaacaucggcagcagacccagaaucagaaacauccccagcagaaucagcaucuacuggaccaucgugaagcccggcgacauccugcugaucaacagcaccggcaaccugaucgcccccagaggcuacuucaagaucagaagcggcaagagcagcaucaugagaagcgacgcccccaucggcaagugcaagagcgagugcaucacccccaacggcagcauccccaacgacaagcccuuccagaacgugaacagaaucaccuacggcgccugccccagauacgugaagcagagcacccugaagcuggccaccggcaugagaaacgugcccgagaagcagaccagaggcaucuucggcgccaucgccggcuucaucgagaacggcugggagggcaugguggacggcugguacggcuucagacaccagaacagcgagggcagaggccaggccgccgaccugaagagcacccaggccgccaucgaccagaucaacggcaagcugaacagacugaucggcaagaccaacgagaaguuccaccagaucgagaaggaguucagcgagguggagggcagaauccaggaccuggagaaguacguggaggacaccaagaucgaccuguggagcuacaacgccgagcugcugguggcccuggagaaccagcacaccaucgaccugaccgacagcgagaugaacaagcuguucgagaagaccaagaagcagcugagagagaacgccgaggacaugggcaacggcugcuucaagaucuaccacaagugcgacaacgccugcaucggcagcaucagaaacggcaccuacgaccacgacguguacagagacgaggcccugaacaacagauuccagaucaagggcguggagcugaagagcggcuacaaggacuggauccuguggaucagcuucgccaucagcugcuuccugcugugcguggcccugcugggcuucaucaugugggccugccagaagggcaacaucagaugcaacaucugcaucuga

SEQ ID NO: 169572 - RNA, 1701 nt, Artificial Sequence; identical to SEQ ID NO: 169134
  derived and/or modified CDS sequence (opt4) from hemagglutinin__InfluenzaA__AFN19569

SEQ ID NO: 169573 - RNA, 1701 nt, Artificial Sequence
  derived and/or modified CDS sequence (opt4) from hemagglutinin__InfluenzaA__AFN19571
augaagaccaucaucgcccugagcuacauccugugccugguguucgcccagaagcugcccggcaacgacaacagcaccgccacccugugccugggccaccacgccgugcccaacggcaccaucgugaagaccaucaccaacgaccagaucgaggugaccaacgccaccgagcuggugcagagcagcagcaccggcgagaucugcgacagcccccaccagauccuggacggcgagaacugcacccugaucgacgcccugcugggcgacccccagugcgacggcuuccagaacaagaagugggaccuguucguggagagaagcaaggccuacagcaacugcuaccccuacgacgugcccgacuacgccagccugagaagccugguggccagcagcggcacccuggaguucaacaacgagagcuucaacuggaccggcgugacccagaacggcaccagcagcgccugcaucagaagaagcaacagcagcuucuucagcagacugaacuggcugacccaccugaacuucaaguaccccgcccugaacgugaccaugcccaacaacgagcaguucgacaagcuguacaucuggggcgugcaccaccccggcaccgacaaggaccagaucuuccuguacagccagagcagcggcagaaucaccgugagcaccaagagaagccagcaggccgugauccccaacaucggcagcagacccagaaucagaaacauccccagcagaaucagcaucuacuggaccaucgugaagcccggcgacauccugcugaucaacagcaccggcaaccugaucgcccccagaggcuacuucagaaucagaagcggcaagagcagcaucaugagaagcgacgcccccaucggcaagugcaacagcgagugcaucacccccaacggcagcauccccaacgacaagcccuuccagaacgugaacagaaucaccuacggccccugccccagauacgugaagcagagcacccugaagcuggccaccggcaugagaaacgugcccgagaagcagaccagaggcaucuucggcgccaucgccggcuucaucgagaacggcugggagggcaugguggacggcugguacggcuacagacaccagaacagcgagggcagaggccaggccgccgaccugaagagcacccaggccgccaucgaccagaucaacggcaagcugaacagacugaucggcaagaccaacgagaaguuccaccagaucgagaaggaguucagcgagguggagggcagaauccaggaccuggagaaguacguggaggacaccaagaucgaccuguggaccuacaacgccgagcugcugguggcccuggagaaccagcacaccaucgaccugaccgacagcgagaugaacaagcuguucgagaagaccaagaagcagcugagagagaacgccgaggacaugggcaacggcugcuucaagaucuaccacaagugcgacaacgccugcaucggcagcaucagaaacggcaccuacaaccacgacguguacagagacgaggcccugaacaacagauuccagaucaagggcguggagcugaagagcggcuacaaggacuggauccuguggaucagcuucgccaucagcugcuuccugcugugcguggcccugcugggcuucaucaugugggccugccagaagggcaacaucagaugcaacaucugcaucuga

SEQ ID NO: 169574 - RNA, 1701 nt, Artificial Sequence
  derived and/or modified CDS sequence (opt4) from hemagglutinin__InfluenzaA__AFN19573
augaagaccaucaucgcccugagcuacauccugugccugguguucgcccagaagcugcccggcaacgacaacagcaccgccacccugugccugggccaccacgccgugcccaacggcaccaucgugaagaccaucaccaacgaccagaucgaggugaccaacgccaccgagcuggugcagagcagcagcaccggcaagaucugcgacagcccccaccagauccuggacggcaagaacugcacccugaucgacgcccugcugggcgacccccagugcgacggcuuccagaacaagaagugggaccuguucguggagagaagcaaggccuacagcaacugcuaccccuacgacgugcccgacuacgccagccugagaagccugguggccagcagcggcacccuggaguucaacaacgagagcuucaacuggaccggcgugacccagaacggcaccagcagcgccugcaucagaagaagcaagaacagcuucuucagcagacugaacuggcugacccaccugaacuucaaguacagcgcccugaacgugaccaugcccaacaaggagcaguucgacaagcuguacaucuggggcgugcaccaccccggcaccgacaaggaccagaucagccuguacgcccaggccagcggcagaaucaccgugagcaccaagagaagccagcagaccgugauccccaacaucggcagcagacccagagugagaaacauccccagcagaaucagcaucuacuggaccaucgugaagcccggcgacauccugcugaucaacagcaccggcaaccugaucgcccccagaggcuacuucaagaugcagagcggcaagagcagcaucaugagaagcgacgcccccaucggcaagugcaacagcgagugcaucacccccaacggcagcauccccaacgacaagcccuuccagaacgugaacagaaucaccuacggcgccugccccagauacgugaagcagaacacccugaagcuggccaccggcaugagaaacgugcccgagaagcagaccagaggcaucuucggcgccaucgccggcuucaucgagaacggcugggagggcaugguggacggcugguacggcuucagacaccagaacagcgagggcagaggccaggccgccgaccugaagagcacccaggccgccaucgaccagaucaacggcaagcugaacagacugaucggcaagaccaacgagaaguuccaccagaucgagaaggaguucagcgagguggagggcagaauccaggaccuggagaaguacguggaggacaccaagaucgaccuguggagcuacaacgccgagcugcugguggcccuggagaaccagcacaccaucgaccugaccgacagcgagaugaacaagcuguucgagaagaccaagaagcagcugagagagaacgccgaggacaugggcaacggcugcuucaagaucuaccacaagugcgacaacgccugcaucggcagcaucagaaacggcaccuacgaccacgacguguacagagacgaggcccugaacaacagauuccagaucaagggcguggagcugaagagcggcuacaaggacuggauccuguggaucagcuucgccaucagcugcuuccugcugugcguggcccugcugggcuucaucaugugggccugccagaagggcaacaucagaugcaacaucugcaucuga

SEQ ID NO: 169575 - RNA, 1701 nt, Artificial Sequence
  derived and/or modified CDS sequence (opt4) from hemagglutinin__InfluenzaA__AFN19575
augaagaccaucaucgcccugagcuacauccugugccugguguucgcccagaagcugcccggcaacgacaacagcaccgccacccugugccugggccaccacgccgugcccaacggcaccaucgugaagaccaucaccaacgaccagaucgaggugaccaacgccaccgagcuggugcagagcagcagcaccggcgagaucugcgacaacccccaccagauccuggacggcgagaacugcacccugaucgacgcccugcugggcgacccccagugcgacggcuuccagaacaagaagugggaccuguucguggagagaagcaaggccuacagcaacugcuaccccuacgacgugcccgacuacgccagccugagaagccugguggccagcagcggcacccuggaguucaacaacgagagcuucaacuggaccggcgugacccagaacggcaccagcagcgccugcaucagaagaagcaacaacagcuucuucagcagacugaacuggcugacccaccugaacuucaaguaccccgcccugaacgugaccaugcccaacaacgagcaguucgacaagcuguacaucuggggcgugcaccaccccggcaccgacaaggaccagaucuuccuguacgcccagagcagcggcagaaucaccgugagcaccaagagaagccagcaggccgugauccccaacaucggcagcagacccagagugagaaacauccccagcagaaucagcaucuacuggaccaucgugaagcccggcgacauccugcugaucaacagcaccggcaaccugaucgcccccagaggcuacuucaagaucagaagcggcaagagcagcaucaugagaagcgacgcccccaucggcaagugcaacagcgagugcaucacccccaacggcagcauccccaacgacaagcccuuccagaacgugaacagaaucaccuacggcgccugccccagauacgugaagcagagcacccugaagcuggccaccggcaugagaaacgugcccgagaagcagaccagaggcaucuucggcgccaucgccggcuucaucgagaacggcugggagggcaugguggacggcugguacggcuucagacaccagaacagcgagggcagaggccaggccgccgaccugaagagcacccaggccgccaucgaccagaucaacggcaagcugaacagacugaucggcaagaccaacgagaaguuccaccagaucgagaaggaguucagcgagguggagggcagaauccaggaccuggagaaguacguggaggacaccaagaucgaccuguggagcuacaacgccgagcugcugguggcccuggagaaccagcacaccaucgaccugaccgacagcgagaugaacaagcuguucgagaagaccaagaagcagcugagagagaacgccgaggacaugggcaacggcugcuucaagaucuaccacaagugcgacaacgccugcaucggcagcaucagaaacggcaccuacgaccacgacguguacagagacgaggcccugaacaacagauuccagaucaagggcguggagcugaagagcggcuacaaggacuggauccuguggaucagcuucgccaucagcugcuuccugcugugcguggcccugcugggcuucaucaugugggccugccagaagggcaacaucagaugcaacaucugcaucuga

SEQ ID NO: 169576 - RNA, 1701 nt, Artificial Sequence; identical to SEQ ID NO: 169490
  derived and/or modified CDS sequence (opt4) from hemagglutinin__InfluenzaA__AFN19577

SEQ ID NO: 169577 - RNA, 1701 nt, Artificial Sequence; identical to SEQ ID NO: 169490
  derived and/or modified CDS sequence (opt4) from hemagglutinin__InfluenzaA__AFN19579

SEQ ID NO: 169578 - RNA, 1701 nt, Artificial Sequence; identical to SEQ ID NO: 169490
  derived and/or modified CDS sequence (opt4) from hemagglutinin__InfluenzaA__AFN19581

SEQ ID NO: 169579 - RNA, 1701 nt, Artificial Sequence; identical to SEQ ID NO: 169490
  derived and/or modified CDS sequence (opt4) from hemagglutinin__InfluenzaA__AFN19583

SEQ ID NO: 169580 - RNA, 1701 nt, Artificial Sequence
  derived and/or modified CDS sequence (opt4) from hemagglutinin__InfluenzaA__AFN19587
augaagaccaucaucgcccugagcuacauccugugccugguguucgcccagaagcugcccgagaacgacaacagcaccgccacccugugccugggccaccacgccgugcccaacggcaccaucgugaagaccaucaccaacgaccagaucgaggugaccaacgccaccgagcuggugcagagcagcagcaccggcgagaucugcgacagcccccaccagauccuggacggcgugaacugcacccugaucgacgcccugcugggcgacccccagugcgacggcuuccagaacaagaagugggaccuguucguggagagaagcaaggccuacagcaacugcuaccccuacgacgugcccgacuacgccagccugagaagccugguggccagcagcggcacccuggaguucaacaacgagagcuucaacuggaccggcgugacccagaacggcaccagcagcgccugcaucagaagaagcaacagcagcuucuucagcagacugaacuggcugacccaccugaacuucaaguaccccgcccugaacgugaccaugcccaacaacgagcaguucgacaagcuguacaucuggggcgugcaccaccccggcaccgacaaggaccagaucuuccuguacgcccagagcagcggcagaaucaccgugagcaccaagagaagccagcaggccgugauccccaacaucggcagcagacccagaaucagaaacauccccagcagaaucagcaucuacuggaccaucgugaagcccggcgacauccugcugaucaacagcaccggcaaccugaucgcccccagaggcuacuucaagaucagaagcggcaagagcagcaucaugagaagcgacgcccccaucggcaagugcaacagcgagugcaucacccccaacggcagcauccccaacgacaagcccuuccagaacgugaacagaaucaccuacggcgccugccccagauacgugaagcagagcacccugaagcuggccaccggcaugagaaacgugcccgagaagcagaccagaggcaucuucggcgccaucgccggcuucaucgagaacggcugggagggcaugguggacggcugguacggcuucagacaccagaacagcgagggcagaggccaggccgccgaccugaagagcacccaggccgccaucgaccagaucaacggcaagcugaacagacugaucggcaagaccaacgagaaguuccaccagaucgagaaggaguucagcgagguggagggcagaauccaggaccuggagaaguacguggaggacaccaagaucgaccuguggagcuacaacgccgagcugcugguggcccuggagaaccagcacaccaucgaccugaccgacagcgagaugaacaagcuguucgagaagaccaagaagcagcugagagagaacgccgaggacaugggcaacggcugcuucaagaucuaccacgagugcgacaacgccugcaucggcagcaucagaaacggcaccuacaaccacgacguguacagagacgaggcccugaacaacagauuccagaucaagggcguggagcugaagagcggcuacaaggacuggauccuguggaucagcuucgccaucagcugcuuccugcugugcguggcccugcugggcuucaucaugugggccugccagaagggcaacaucagaugcaacaucugcaucuga

SEQ ID NO: 169581 - RNA, 1701 nt, Artificial Sequence; identical to SEQ ID NO: 169490
  derived and/or modified CDS sequence (opt4) from hemagglutinin__InfluenzaA__AFN19589

SEQ ID NO: 169582 - RNA, 1701 nt, Artificial Sequence
  derived and/or modified CDS sequence (opt4) from hemagglutinin__InfluenzaA__AFN19591
augaagaccaucaucgcccugagcuacauccugugccugguguucgcccagaagcugcccggcaacgacaacagcaccgccacccugugccugggccaccacgccgugcccaacggcaccaucgugaagaccaucaccaacgaccagaucgaggugaccaacgccaccgagcuggugcagaacagcagcaucggcgagaucugcgacagcccccaccagauccuggacggcgagaacugcacccugaucgacgcccugcugggcgacccccagugcgacggcuuccagaacaagaagugggaccuguucguggagagaagcaaggccuacagcaacugcuaccccuacgacgugcccgacuacgccagccugagaagccugguggccagcagcggcacccuggaguucaacaacgagagcuucaacuggaccggcgugacccagaacggcaccagcagcgccugcaugagaagaagcaacagcagcuucuucagcagacugaacuggcugacccaccugaacuucaaguaccccgcccugaacgugaccaugcccaacaacgagcaguucgacaagcuguacaucuggggcgugcaccaccccggcaccgacaaggaccagaucuuccuguacgcccagagcagcggcagaaucaccgugagcaccaagagaagccagcaggccgugauccccaacaucggcagcagacccagaaucagaaacauccccagcagaaucagcaucuacuggaccaucgugaagcccggcgacauccugcugaucaacagcaccggcaaccugaucgcccccagaggcuacuucaagaucagaagcggcaagagcagcaucaugagaagcgacgcccccaucggcaagugcaacagcgagugcaucacccccaacggcagcauccccaacgacaagcccuuccagaacgugaacagaaucaccuacggcgccugccccagauacgugaagcagagcacccugaagcuggccaccggcaugagaaacgugcccgagaagcagaccagaggcaucuucggcgccaucgccggcuucaucgagaacggcugggagggcaugguggacggcugguacggcuucagacaccagaacagcgagggcagaggccaggccgccgaccugaagagcacccaggccgccaucgaccagaucaacggcaagcugaacagacugaucggcaagaccaacgagaaguuccaccagaucgagaaggaguucagcgagguggagggcagaauccaggaccuggagaaguacguggaggacaccaagaucgaccuguggagcuacaacgccgagcugcugguggcccuggagaaccagcacaccaucgaccugaccgacagcgagaugaacaagcuguucgagaagaccaagaagcagcugagagagaacgccgaggacaugggcaacggcugcuucaagaucuaccacaagugcgacaacgccugcaucggcagcaucagaaacggcaccuacgaccacgacguguacagagacgaggcccugaacaacagauuccagaucaagggcguggagcugaagagcggcuacaaggacuggauccuguggaucagcuucgccaucagcugcuuccugcugugcguggcccugcugggcuucaucaugugggccugccagaacggcaacaucagaugcaacaucugcaucuga

SEQ ID NO: 169583 - RNA, 1701 nt, Artificial Sequence; identical to SEQ ID NO: 169490
  derived and/or modified CDS sequence (opt4) from hemagglutinin__InfluenzaA__AFN19593

SEQ ID NO: 169584 - RNA, 1701 nt, Artificial Sequence; identical to SEQ ID NO: 169491
  derived and/or modified CDS sequence (opt4) from hemagglutinin__InfluenzaA__AFN19595

SEQ ID NO: 169585 - RNA, 1701 nt, Artificial Sequence; identical to SEQ ID NO: 169491
  derived and/or modified CDS sequence (opt4) from hemagglutinin__InfluenzaA__AFN19599

SEQ ID NO: 169586 - RNA, 1701 nt, Artificial Sequence; identical to SEQ ID NO: 169553
  derived and/or modified CDS sequence (opt4) from hemagglutinin__InfluenzaA__AFN19601

SEQ ID NO: 169587 - RNA, 1701 nt, Artificial Sequence; identical to SEQ ID NO: 169134
  derived and/or modified CDS sequence (opt4) from hemagglutinin__InfluenzaA__AFN19607

SEQ ID NO: 169588 - RNA, 1701 nt, Artificial Sequence; identical to SEQ ID NO: 169490
  derived and/or modified CDS sequence (opt4) from hemagglutinin__InfluenzaA__AFN19609

SEQ ID NO: 169589 - RNA, 1701 nt, Artificial Sequence
  derived and/or modified CDS sequence (opt4) from hemagglutinin__InfluenzaA__AFN19611
augaagaccaucaucgcccugagcuacauccugugccugguguucgcccagaagcugcccggcaacgacaacagcaccgccacccugugccugggccaccacgccgugcccaacggcaccaucgugaagaccaucaccaacgaccagaucgaggugaccaacgccaccgagcuggugcagaacagcagcaucggcgagaucugcgacagcccccaccagauccuggacggcgagaacugcacccugaucgacgcccugcugggcgacccccagugcgacggcuuccagaacaagaagugggaccuguucguggagagaagcaaggccuacagcaacugcuaccccuacgacgugcccgacuacgccagccugagaagccugguggccagcagcggcacccuggaguucaacaacgagagcuucaacuggaccggcgugacccagaacggcaccagcagcgccugcaucagaagaagcaacaacagcuucuucagcagacugaacuggcugacccaccugaacuucaaguaccccgcccugaacgugaccaugcccaacaacgagcaguucgacaagcuguacaucuggggcgugcaccaccccggcaccgacaaggaccagaucuuccuguacgcccagagcagcggcagaaucaccgugagcaccaagagaagccagcaggccgugauccccaacaucggcagcagacccagaaucagaaacauccccagcagaaucagcaucuacuggaccaucguggagcccggcgacauccugcugaucaacagcaccggcaaccugaucgcccccagaggcuacuucaagaucagaagcggcaagagcagcaucaugagaagcgacgcccccaucggcaagugcaacagcgagugcaucacccccaacggcagcauccccaacgacaagcccuuccagaacgugaacagaaucaccuacggcgccugccccagauacgugaagcagagcacccugaagcuggccaccggcaugagaaacgugcccgagaagcagaccagaggcaucuucggcgccaucgccggcuucaucgagaacggcugggagggcaugguggacggcugguacggcuucagacaccagaacagcgagggcagaggccaggccgccgaccugaagagcacccaggccgccaucgaccagaucaacggcaagcugaacagacugaucggcaagaccaacgagaaguuccaccagaucgagaaggaguucagcgagguggagggcagaauccaggaccuggagaaguacguggaggacaccaagaucgaccuguggagcuacaacgccgagcugcugguggcccuggagaaccagcacaccaucgaccugaccgacagcgagaugaacaagcuguucgagaagaccaagaagcagcugagagagaacgccgaggacaugggcaacggcugcuucaagaucuaccacaagugcgacaacgccugcaucggcagcaucagaaacggcaccuacgaccacgacguguacagagacgaggcccugaacaacagauuccagaucaagggcguggagcugaagagcggcuacaaggacuggauccuguggaucagcuucgccaucagcugcuuccugcugugcguggcccugcugggcuucaucaugugggccugccagaagggcaacaucagaugcaacaucugcaucuga

SEQ ID NO: 169590 - RNA, 1701 nt, Artificial Sequence; identical to SEQ ID NO: 169513
  derived and/or modified CDS sequence (opt4) from hemagglutinin__InfluenzaA__AFN19613

SEQ ID NO: 169591 - RNA, 1701 nt, Artificial Sequence; identical to SEQ ID NO: 169491
  derived and/or modified CDS sequence (opt4) from hemagglutinin__InfluenzaA__AFN19617

SEQ ID NO: 169592 - RNA, 1701 nt, Artificial Sequence
  derived and/or modified CDS sequence (opt4) from hemagglutinin__InfluenzaA__AFN19619
augaagaccaucaucgcccugagccacauccugugccugguguucgcccagaagcugcccggcaacgacaacagcaccgccacccugugccugggccaccacgccgugcccaacggcaccaucgugaagaccaucaccaacgaccagaucgaggugaccaacgccaccgagcuggugcagagcagcagcaccggcgagaucugcgacagcccccaccagauccuggacggcgagaacugcacccugaucgacgcccugcugggcgacccccagugcgacggcuuccagaacaagaagugggaccuguucguggagagaagcaaggccuacagcaacugcuaccccuacgacgugcccgacuacgccagccugagaagccugguggccagcagcggcacccuggaguucaacaacgagagcuucaacuggaccggcgugacccagaacggcaccagcagcgccugcaucagaagaagcaacagcagcuucuucagcagacugaacuggcugacccaccugaacuucaaguaccccgcccugaacgugaccaugcccaacaacgagcaguucgacaagcuguacaucuggggcgugcaccaccccggcaccgacaaggaccagaucuuccuguacgcccagagcagcggcagaaucaccgugagcaccaagagaagccagcaggccgugauccccaacaucggcagcaagcccagaaucagaaacauccccagcagaaucagcaucuacuggaccaucgugaagcccggcgacauccugcugaucaacagcaccggcaaccugaucgcccccagaggcuacuucaagaucagaagcggcaagagcagcaucaugagaagcgacgcccccaucggcaagugcaacagcgagugcaucacccccaacggcagcauccccaacgacaagcccuuccagaacgugaacagaaucaccuacggcgccugccccagauacgugaagcagagcacccugaagcuggccaccggcaugagaaacgugcccgagaagcagaccagaggcaucuucggcgccaucgccggcuucaucgagaacggcugggagggcaugguggacggcugguacggcuucagacaccagaacagcgagggcagaggccaggccgccgaccugaagagcacccaggccgccaucgaccagaucaacggcaagcugaacagacugaucggcaagaccaacgagaaguuccaccagaucgagaaggaguucagcgagguggagggcagaauccaggaccuggagaaguacguggaggacaccaagaucgaccuguggagcuacaacgccgagcugcugguggcccuggagaaccagcacaccaucgaccugaccgacagcgagaugaacaagcuguucgagaagaccaagaagcagcugagagagaacgccgaggacaugggcaacggcugcuucaagaucuaccacaagugcgacaacgccugcaucggcagcaucagaaacggcaccuacaaccacgacguguacagagacgaggcccugaacaacagauuccagaucaagggcguggagcugaagagcggcuacaaggacuggauccuguggaucagcuucgccaucagcugcuuccugcugugcguggugcugcugggcuucaucaugugggccugccagaagggcaacaucagaugcaacaucugcaucuga

SEQ ID NO: 169593 - RNA, 1701 nt, Artificial Sequence; identical to SEQ ID NO: 169553
  derived and/or modified CDS sequence (opt4) from hemagglutinin__InfluenzaA__AFN19623

SEQ ID NO: 169594 - RNA, 1701 nt, Artificial Sequence; identical to SEQ ID NO: 169490
  derived and/or modified CDS sequence (opt4) from hemagglutinin__InfluenzaA__AFN19629

SEQ ID NO: 169595 - RNA, 1701 nt, Artificial Sequence
  derived and/or modified CDS sequence (opt4) from hemagglutinin__InfluenzaA__AFN19631
augaagaccaucaucgcccugagcuacauccugugccugguguucgcccagaagcugcccgagaacgacuacagcaccgccacccugugccugggccaccacgccgugcccaacggcaccaucgugaagaccaucaccaacgaccagaucgaggugaccaacgccaccgagcuggugcagagcagcagcaccggcgagaucugcgacagcccccaccagauccuggacggcaucaacugcacccugaucgacgcccugcugggcgacccccagugcgacggcuuccagaacaagaagugggaccuguucguggagagaagcaaggccuacagcaacugcuaccccuacgacgugcccgacuacgccagccugagaagccugguggccagcagcggcacccuggaguucaacaacgagagcuucaacuggaccggcgugacccagaacggcaccagcagcgccugcaucagaagaagcaccagcagcuucuucagcagacugaacuggcugacccaccugaacuucaaguaccccgcccugaacgugaccaugcccaacaacgagcaguucgacaagcuguacaucuggggcgugcaccaccccggcaccgacaaggaccagaucuuccuguacgcccagcccagcggcagaaucaccgugagcaccaagagaagccagcaggccgugauccccaacaucggcagcagacccagaaucagaaacauccccagcagaaucagcaucuacuggaccaucgugaagcccggcgacauccugcugaucaacagcaccggcaaccugaucgcccccagaggcuacuucaagaucagaagcggcaagagcagcaucaugagaagcgacgcccccaucggcaagugcaacagcgagugcaucacccccaacggcagcauccccaacgacaagcccuuccagaacgugaacagaaucaccuacggcgccugccccagauacgugaagcagagcacccugaagcuggccaccggcaugagaaacgugcccgagaagcagaccagaggcaucuucggcgccaucgccggcuucaucgagaacggcugggagggcaugguggacggcugguacggcuucagacaccagaacagcgagggcagaggccaggccgccgaccugaagagcacccaggccgccaucgaccagaucaacggcaagcugaacagacugaucggcaagaccaacgagaaguuccaccagaucgagaaggaguucagcgagguggagggcagaauccaggaccuggagaaguacguggaggacaccaagaucgaccuguggagcuacaacgccgagcugcugguggcccuggagaaccagcacaccaucgaccugaccgacagcgagaugaacaagcuguucgagaagaccaagaagcagcugagagagaacgccgaggacaugggcaacggcugcuucaagaucuaccacaagugcgacaacgccugcaucggcagcaucagaaacggcaccuacaaccacgacguguacagagacgaggcccugaacaacagauuccagaucaagggcguggagcugaagagcggcuacaaggacuggauccuguggaucagcuucgccaucagcugcuuccugcugugcguggcccugcugggcuucaucaugugggccugccagaagggcaacaucagaugcaacaucugcaucuga

SEQ ID NO: 169596 - RNA, 1701 nt, Artificial Sequence
  derived and/or modified CDS sequence (opt4) from hemagglutinin__InfluenzaA__AFN19633
augaagaccaucaucgcccugagcuacauccugugccugguguucgcccagaagcugcccggcaacgacaacagcaccgccacccugugccugggccaccacgccgugcccaacggcaccaucgugaagaccaucaccaacgaccagaucgaggugaccaacgccaccgagcuggugcagagcagcagcaccggcgagaucugcgacagcccccaccagauccuggacggcgagaacugcacccugaucgacgcccugcugggcgacccccagugcgacggcuuccagaacaagaagugggaccuguucguggagagaagcaaggccuacagcaacugcuaccccuacgacgugcccgacuacgccagccugagaagccugguggccagcagcggcacccuggaguucaacaacgagagcuucaacuggaccggcgugacccagaacggcaccagcagcgccugcaucagaagaagcaacagcagcuucuucagcagacugaacuggcugacccaccugaacuucaaguaccccgcccugaacgugaccaugcccaacaacgagcaguucgacaagcuguacaucuggggcgugcaccaccccggcaccgacaaggaccagaucuuccuguacgcccagagcagcggcagaaucaccaucagcaccaagagaagccagcaggccgugauccccaacaucggcagcagacccagaaucagaaacauccccagcagaaucagcaucuacuggaccaucgugaagcccggcgacauccugcugaucaacagcaccggcaaccugaucgcccccagaggcuacuucaagaucagaagcggcaagagcagcaucaugagaagcgacgcccccaucggcaagugcaacagcgagugcaucacccccaacggcagcauccccaacgacaagcccuuccagaacgugaacagaaucaccuacggcgccugccccagauacgugaagcagagcacccugaagcuggccaccggcaugagaaacgugcccgagaagcagaccagaggcaucuucggcgccaucgccggcuucaucgagaacggcugggagggcaugguggacggcugguacggcuucagacaccagaacagcgagggcagaggccaggccgccgaccugaagagcacccaggccgccaucgaccagaucaacggcaagcugaacagacugaucggcaagaccaacgagaaguuccaccagaucgagaaggaguucagcgagguggagggcagaauccaggaccuggagaaguacguggaggacaccaagaucgaccuguggagcuacaacgccgagcugcugguggcccuggagaaccagcacaccaucgaccugaccgacagcgagaugaacaagcuguucgagaagaccaagaagcagcugagagagaacgccgaggacaugggcaacggcugcuucaagaucuaccacaagugcgacaacgccugcaucggcagcaucagaaacggcaccuacaaccacgacguguacagagacgaggcccugaacaacagauuccagaucaagggcguggagcugaagagcggcuacaaggacuggauccuguggaucagcuucgccaucagcugcuuccugcugugcguggcccugcugggcuucaucaugugggccugccagaagggcaacaucagaugcaacaucugcaucuga

SEQ ID NO: 169597 - RNA, 1701 nt, Artificial Sequence
  derived and/or modified CDS sequence (opt4) from hemagglutinin__InfluenzaA__AFN19635
augaagaccaucaucgcccugagcuacauccugugccugguguucgcccagaagcugcccgagaacgacaacagcaccgccacccugugccugggccaccacgccgugcccaacggcaccaucgugaagaccaucaccaacgaccagaucgaggugaccaacgccaccgagcuggugcagagcagcagcaccggcgagaucugcgacagcccccaccagauccuggacggcaucaacugcacccugaucgacgcccugcugggcgacccccagugcgacggcuuccagaacaagaagugggaccuguucguggagagaagcaaggccuacagcaacugcuaccccuacgacgugcccgacuacgccagccugagaagccugguggccagcagcggcacccuggaguucaacaacgagagcuucaacuggaccggcgugacccagaacggcaccagcagcgccugcaucagaagaagcaacagcagcuucuucagcagacugaacuggcugacccaccugaacuucaaguaccccgcccugaacgugaccaugcccaacaacgagcaguucgacaagcuguacaucuggggcgugcaccaccccggcaccgacaaggaccagaucuuccuguacgcccagcccagcggcagaaucaccgugagcaccaagagaagccagcaggccgugauccccaacaucggcagcagacccagaaucagaaacauccccagcagaaucagcaucuacuggaccaucgugaagcccggcgacauccugcugaucaacagcaccggcaaccugaucgcccccagaggcuacuucaagaucagaagcggcaagagcagcaucaugagaagcgacgcccccaucggcaagugcaacagcgagugcaucacccccaacggcagcauccccaacgacaagcccuuccagaacgugaacagaaucaccuacggcgccugccccagauacgugaagcagagcacccugaagcuggccaccggcaugagaaacgugcccgagaagcagaccagaggcaucuucggcgccaucgccggcuucaucgagaacggcugggagggcaugguggacggcugguacggcuucagacaccagaacagcgagggcagaggccaggccgccgaccugaagagcacccaggccgccaucgaccagaucaacggcaagcugaacagacugaucggcaagaccaacgagaaguuccaccagaucgagaaggaguucagcgagguggagggcagaauccaggaccuggagaaguacguggaggacaccaagaucgaccuguggagcuacaacgccgagcugcugguggcccuggagaaccagcacaccaucgaccugaccgacagcgagaugaacaagcuguucgagaagaccaagaagcagcugagagagaacgccgaggacaugggcaacggcugcuucaagaucuaccacaagugcgacaacgccugcaucggcagcaucagaaacggcaccuacaaccacgacguguacagagacgaggcccugaacaacagauuccagaucaagggcguggagcugaagagcggcuacaaggacuggauccuguggaucagcuucgccaucagcugcuuccugcugugcguggcccugcugggcuucaucaugugggccugccagaagggcaacaucagaugcaacaucugcaucuga

SEQ ID NO: 169598 - RNA, 1701 nt, Artificial Sequence; identical to SEQ ID NO: 169597
  derived and/or modified CDS sequence (opt4) from hemagglutinin__InfluenzaA__AFN19637

SEQ ID NO: 169599 - RNA, 1701 nt, Artificial Sequence; identical to SEQ ID NO: 169134
  derived and/or modified CDS sequence (opt4) from hemagglutinin__InfluenzaA__AFN19639

SEQ ID NO: 169600 - RNA, 1701 nt, Artificial Sequence; identical to SEQ ID NO: 169553
  derived and/or modified CDS sequence (opt4) from hemagglutinin__InfluenzaA__AFN19641

SEQ ID NO: 169601 - RNA, 1701 nt, Artificial Sequence; identical to SEQ ID NO: 169597
  derived and/or modified CDS sequence (opt4) from hemagglutinin__InfluenzaA__AFN19643

SEQ ID NO: 169602 - RNA, 1701 nt, Artificial Sequence; identical to SEQ ID NO: 169134
  derived and/or modified CDS sequence (opt4) from hemagglutinin__InfluenzaA__AFN19645

SEQ ID NO: 169603 - RNA, 1701 nt, Artificial Sequence
  derived and/or modified CDS sequence (opt4) from hemagglutinin__InfluenzaA__AFN19647
augaagaccaucaucgcccugagcuacauccugugccugguguucgcccagaagcugcccgagaacgacaacagcaccgccacccugugccugggccaccacgccgugcccaacggcaccaucgugaagaccaucaccaacgaccagaucgaggugaccaacgccaccgagcuggugcagagcagcagcaccggcgagaucugcgacagcccccaccagauccuggacggcgugaacugcacccugaucgacgcccugcugggcgacccccagugcgacggcuuccagaacaagaagugggaccuguucguggagagaagcaaggccuacagcaacugcuaccccuacgacgugcccgacuacgccagccugaagagccugguggccagcagcggcacccuggaguucaacaacgagagcuucaacuggaccggcgugacccagaacggcaccagcagcgccugcaucagaagaagcaacagcagcuucuucagcagacugaacuggcugacccaccugaacuucaaguaccccgcccugaacgugaccaugcccaacaacgagcaguucgacaagcuguacaucuggggcgugcaccaccccggcaccgacaaggaccagaucuuccuguacgcccagagcagcggcagaaucaccgugagcaccaagagaagccagcaggccgugauccccaacaucggcagcagacccagaaucagaaacauccccagcagaaucagcaucuacuggaccaucgugaagcccggcgacauccugcugaucaacagcaccggcaaccugaucgcccccagaggcuacuucaagauccagagcggcaagagcagcaucaugagaagcgacgcccccaucggcaagugcaacagcgagugcaucacccccaacggcagcauccccaacgacaagcccuuccagaacgugaacagaaucaccuacggcgccugccccagauacgugaagcagagcacccugaagcuggccaccggcaugagaaacgugcccgagaagcagaccagaggcaucuucggcgccaucgccggcuucaucgagaacggcugggagggcaugguggacggcugguacggcuucagacaccagaacagcgagggcagaggccaggccgccgaccugaagagcacccaggccgccaucgaccagaucaacggcaagcugaacagacugaucggcaagaccaacgagaaguuccaccagaucgagaaggaguucagcgagguggagggcagaauccaggaccuggagaaguacguggaggacaccaagaucgaccuguggagcuacaacgccgagcugcugguggcccuggagaaccagcacaccaucgaccugaccgacagcgagaugaacaagcuguucgagaagaccaagaagcagcugagagagaacgccgaggacaugggcaacggcugcuucaagaucuaccacaagugcgacaacgccugcaucggcagcaucagaaacggcaccuacaaccacgacguguacagagacgaggcccugaacaacagauuccagaucaagggcguggagcugaagagcggcuacaaggacuggauccuguggaucagcuucgccaucagcugcuuccugcugugcguggcccugcugggcuucaucaugugggccugccagaagggcaacaucagaugcaacaucugcaucuga

SEQ ID NO: 169604 - RNA, 1701 nt, Artificial Sequence
  derived and/or modified CDS sequence (opt4) from hemagglutinin__InfluenzaA__AFN19649
augaagaccaucaucgcccugagcuacauccugugccugguguucgcccagaagcugcccggcaacgacaacagcaccgccacccugugccugggccaccacgccgugcccaacggcaccaucgugaagaccaucaccaacgaccagaucgaggugaccaacgccaccgagcuggugcagaacagcagcaucagcgagaucugcgacagcccccaccagauccuggacggcgagaacugcacccugaucgacgcccugcugggcgacccccagugcgacggcuuccagaacaagaagugggaccuguucguggagagaagcaaggccuacagcaacugcuaccccuacgacgugcccgacuacgccagccugagaagccugguggccagcagcggcacccuggaguucaacaacgagagcuucaacuggaccggcgugacccagaacggcaccagcagcgccugcaucagaagaagcaacagcagcuucuucagcagacugaacuggcugacccaccugaacuucaaguaccccgcccugaacgugaccaugcccaacaacgagcaguucgacaagcuguacaucuggggcgugcaccaccccggcaccgacaaggaccagaucuuccuguacgcccagagcagcggcagaaucaccgugagcaccaagagaagccagcaggccgugauccccaacaucggcagcagacccagaaucagaaacauccccagcagaaucagcaucuacuggaccaucgugaagcccggcgacauccugcugaucaacagcaccggcaaccugaucgcccccagaggcuacuucaagaucagaagcggcaagagcagcaucaugagaagcgacgcccccaucggcaagugcaacagcgagugcaucacccccaacggcagcauccccaacgacaagcccuuccagaacgugaacagaaucaccuacggcgccugccccagauacgugaagcagagcacccugaagcuggccaccggcaugagaaacgugcccgagaagcagaccagaggcaucuucggcgccaucgccggcuucaucgagaacggcugggagggcaugauggacggcugguacggcuucagacaccagaacagcgagggcagaggccaggccgccgaccugaagagcacccaggccgccaucgaccagaucaacggcaagcugaacagacugaucggcaagaccaacgagaaguuccaccagaucgagaaggaguucagcgagguggagggcagaauccaggaccuggagaaguacguggaggacaccaagaucgaccuguggagcuacaacgccgagcugcugguggcccuggagaaccagcacaccaucgaccugaccgacagcgagaugaacaagcuguucgagaagaccaagaagcagcugagagagaacgccgaggacaugggcaacggcugcuucaagaucuaccacaagugcgacaacgccugcaucggcagcaucagaaacggcaccuacgaccacgacguguacagagacgaggcccugaacaacagauuccagaucaagggcguggagcugaagagcggcuacaaggacuggauccuguggaucagcuucgccaucagcugcuuccugcugugcguggcccugcugggcuucaucaugugggccugccagaagggcaacaucagaugcaacaucugcaucuga

SEQ ID NO: 169605 - RNA, 1701 nt, Artificial Sequence; identical to SEQ ID NO: 169597
  derived and/or modified CDS sequence (opt4) from hemagglutinin__InfluenzaA__AFN19653

SEQ ID NO: 169606 - RNA, 1701 nt, Artificial Sequence; identical to SEQ ID NO: 169513
  derived and/or modified CDS sequence (opt4) from hemagglutinin__InfluenzaA__AFN19663

SEQ ID NO: 169607 - RNA, 1701 nt, Artificial Sequence; identical to SEQ ID NO: 169521
  derived and/or modified CDS sequence (opt4) from hemagglutinin__InfluenzaA__AFN19665

SEQ ID NO: 169608 - RNA, 1701 nt, Artificial Sequence
  derived and/or modified CDS sequence (opt4) from hemagglutinin__InfluenzaA__AFN19667
augaagaccaucaucgcccugagcuacauccugugccugguguucgcccagaagcugcccggcaacgacaacagcaccgccacccugugccugggccaccacgccgugcccaacggcaccaucgugaagaccaucaccaacgaccagaucgaggugaccaacgccaccgagcuggugcagaacagcagcaucggcgagaucugcgacagcccccaccagauccuggacggcgagaacugcacccugaucgacgcccugcugggcgacccccagugcgacggcuuccagaacaagaagugggaccuguucguggagagaagcaaggccuacagcaacugcuaccccuacgacgugcccgacuacgccagccugagaagccugguggccagcagcggcacccuggaguucaacaacgagagcuucaacuggaccggcgugacccagaacggcaccagcagcgccugcaugagaagaagcaacagcagcuucuucagcagacugaacuggcugacccaccugaacuucaaguaccccgcccugaacgugaccaugcccaacaacgagcaguucgacaagcuguacaucuggggcgugcaccaccccggcaccgacaaggaccagaucuuccuguacgcccagagcagcggcagaaucaccgugagcaccaagagaagccagcaggccgugauccccaacaucggcagcagacccagaaucagaaacauccccagcagaaucagcaucuacuggaccaucgugaagcccggcgacauccugcugaucaacagcaccggcaaccugaucgcccccagaggcuacuucaagaucagaagcggcaagagcagcaucaugagaagcgacgcccccaucggcaagugcaacagcgagugcaucacccccaacggcagcauccccaacgacaagcccuuccagaacgugaacagaaucaccuacggcgccugccccagauacgugaagcagagcacccugaagcuggccaccggcaugagaaacgugcccgagaagcagaccagaggcaucuucggcgccaucgccggcuucaucgagaacggcugggagggcaugguggacggcugguacggcuucagacaccagaacagcgagggcagaggccaggccgccgaccugaagagcacccaggccgccaucgaccagaucaacggcaagcugaacagacugaucggcaagaccaacgagaaguuccaccagaucgagaaggaguucagcgagguggagggcagaauccaggaccuggagaaguacguggaggacaccaagaucgaccuguggagcuacaacgccgagcugcugguggcccuggagaaccagcacaccaucgaccugaccgacagcgagaugaacaagcuguucgagaagaccaagaagcagcugagagagaacgccgaggacaugggcaacggcugcuucaagaucuaccacaagugcgacaacgccugcaucggcagcaucagaaacggcaccuacgaccacgacguguacagagacgaggcccugaacaacagauuccagaucaagggcguggagcugaagagcggcuacaaggacuggauccuguggaucagcuucgccaucagcugcuuccugcugugcguggcccugcugggcuucaucaugugggccugccagaagggcaacaucagaugcaacaucugcaucuga

SEQ ID NO: 169609 - RNA, 1701 nt, Artificial Sequence
  derived and/or modified CDS sequence (opt4) from hemagglutinin__InfluenzaA__AFN19669
augaagaccaucaucgcccugagcuacauccugugcaugguguucgcccagaagcugcccggcaacgacaacagcaccgccacccugugccugggccaccacgccgugcccaacggcaccaucgugaagaccaucaccaacgaccagaucgaggugaccaacgccaccgagcuggugcagaacagcagcaucggcgagaucugcgacagcccccaccagauccuggacggcgagaacugcacccugaucgacgcccugcugggcgacccccagugcgacggcuuccagaacaagaagugggaccuguucguggagagaagcaaggccuacagcaacugcuaccccuacgacgugcccaacuacgccagccugagaagccugguggccagcagcggcacccuggaguucaacaacgagagcuucaacuggaccggcgugacccagaacggcaccagcagcgccugcaugagaagaagcaacagcagcuucuucagcagacugaacuggcugacccaccugaacuucaaguaccccgcccugaacgugaccaugcccaacaacgagcaguucgacaagcuguacaucuggggcgugcaccaccccggcaccgacaaggaccagaucuuccuguacgcccagagcagcggcagaaucaccgugagcaccaagagaagccagcaggccgugauccccaacaucggcagcagacccagaaucagaaacauccccagcagaaucagcaucuacuggaccaucgugaagcccggcgacauccugcugaucaacagcaccggcaaccugaucgcccccagaggcuacuucaagaucagaagcggcaagagcagcaucaugagaagcgacgcccccaucggcaagugcaacagcgagugcaucacccccaacggcagcauccccaacgacaagcccuuccagaacgugaacagaaucaccuacggcgccugccccagauacgugaagcagagcacccugaagcuggccaccggcaugagaaacgugcccgagaagcagaccagaggcaucuucggcgccaucgccggcuucaucgagaacggcugggagggcaugguggacggcugguacggcuucagacaccagaacagcgagggcagaggccaggccgccgaccugaagagcacccaggccgccaucgaccagaucaacggcaagcugaacagacugaucggcaagaccaacgagaaguuccaccagaucgagaaggaguucagcgagguggagggcagaauccaggaccuggagaaguacguggaggacaccaagaucgaccuguggagcuacaacgccgagcugcugguggcccuggagaaccagcacaccaucgaccugaccgacagcgagaugaacaagcuguucgagaagaccaagaagcagcugagagagaacgccgaggacaugggcaacggcugcuucaagaucuaccacaagugcgacaacgccugcaucggcagcaucagaaacggcaccuacgaccacgacguguacagagacgaggcccugaacaacagauuccagaucaagggcguggagcugaagagcggcuacaaggacuggauccuguggaucagcuucgccaucagcugcuuccugcugugcguggcccugcugggcuucaucaugugggccugccagaagggcaacaucagaugcaacaucugcaucuga

SEQ ID NO: 169610 - RNA, 1701 nt, Artificial Sequence
  derived and/or modified CDS sequence (opt4) from hemagglutinin__InfluenzaA__AFN19671
augaagaccaucaucgcccugagcuacauccugugccugguguucgcccagaagcugcccggcaacgacaacagcaccgccacccugugccugggccaccacgccgugcccaacggcaccaucgugaagaccaucaccaacgacagaaucgaggugaccaacgccaccgagcuggugcagaacagcagcaucggcgagaucugcgacagcccccaccagauccuggacggcgagaacugcacccugaucgacgcccugcugggcgacccccagugcgacggcuuccagaacaagaagugggaccuguucguggagagaagcaaggccuacagcaacugcuaccccuacgacgugcccgacuacgccagccugagaagccugguggccagcagcggcacccuggaguucaacaacgagagcuucaacuggaccggcgugacccagaacggcaccagcagcgccugcaucagaagaagcaacaacagcuucuucagcagacugaacuggcugacccaccugaacuucaaguaccccgcccugaacgugaccaugcccaacaacgagcaguucgacaagcuguacaucuggggcgugcaccaccccggcaccgacaaggaccagaucuuccuguacgcccagagcagcggcagaaucaccgugagcaccaagagaagccagcaggccgugauccccaacaucggcagcagacccagaaucagaaacauccccagcagaaucagcaucuacuggaccaucgugaagcccggcgacauccugcugaucaacagcaccggcaaccugaucgcccccagaggcuacuucaagaucagaagcggcaagagcagcaucaugagaagcgacgcccccaucggcaagugcaagagcgagugcaucacccccaacggcagcauccccaacgacaagcccuuccagaacgugaacagaaucaccuacggcgccugccccagauacgugaagcagagcacccugaagcuggccaccggcaugagaaacgugcccgagaagcagaccagaggcaucuucggcgccaucgccggcuucaucgagaacggcugggagggcaugguggacggcugguacggcuucagacaccagaacagcgagggcagaggccaggccgccgaccugaagagcacccaggccgccaucgaccagaucaacggcaagcugaacagacugaucggcaagaccaacgagaaguuccaccagaucgagaaggaguucagcgagguggagggcagaauccaggaccuggagaaguacguggaggacaccaagaucgaccuguggagcuacaacgccgagcugcugguggcccuggagaaccagcacaccaucgaccugaccgacagcgagaugaacaagcuguucgagaagaccaagaagcagcugagagagaacgccgaggacaugggcaacggcugcuucaagaucuaccacaagugcgacaacgccugcaucgagagcaucagaaacggcaccuacgaccacgacguguacagagacgaggcccugaacaacagauuccagaucaagggcguggagcugaagagcggcuacaaggacuggauccuguggaucagcuucgccaucagcugcuuccugcugugcguggcccugcugggcuucaucaugugggccugccagaagggcaacaucagaugcaacaucugcaucuga

SEQ ID NO: 169611 - RNA, 1701 nt, Artificial Sequence; identical to SEQ ID NO: 169134
  derived and/or modified CDS sequence (opt4) from hemagglutinin__InfluenzaA__AFN19674

SEQ ID NO: 169612 - RNA, 1701 nt, Artificial Sequence; identical to SEQ ID NO: 169134
  derived and/or modified CDS sequence (opt4) from hemagglutinin__InfluenzaA__AFN19676

SEQ ID NO: 169613 - RNA, 1701 nt, Artificial Sequence; identical to SEQ ID NO: 169521
  derived and/or modified CDS sequence (opt4) from hemagglutinin__InfluenzaA__AFN19678

SEQ ID NO: 169614 - RNA, 1701 nt, Artificial Sequence
  derived and/or modified CDS sequence (opt4) from hemagglutinin__InfluenzaA__AFN19682
augaagaccaucaucgcccugagcuacauccugugccugguguucgcccagaagcugcccggcaacgacaacagcaccgccacccugugccugggccaccacgccgugcccaacggcaccaucgugaagaccaucaccaacgaccagaucgaggugaccaacgccaccgagcuggugcagaacagcagcaucggcgagaucugcgacagcccccaccagauccuggacggcgagaacugcacccugaucgacgcccugcugggcgacccccagugcgacggcuuccagaacaagaagugggaccuguucguggagagaagcaaggccuacagcaacugcuaccccuacgacgugcccaacuacgccagccugagaagccugguggccagcagcggcacccuggaguucaacaacgagagcuucaacuggaccggcgugacccagaacggcaccagcagcgccugcaugagaagaagcaacagcagcuucuucagcagacugaacuggcugacccaccugaacuucaaguaccccgcccugaacgugaccaugcccaacaacgagcaguucgacaagcuguacaucuggggcgugcaccaccccggcaccgacaaggaccagaucuuccuguacgcccagagcagcggcagaaucaccgugagcaccaagagaagccagcaggccgugauccccaacaucggcagcagacccagaaucagaaacauccccagcagaaucagcaucuacuggaccaucgugaagcccggcgacauccugcugaucaacagcaccggcaaccugaucgcccccagaggcuacuucaagaucagaagcggcaagagcagcaucaugagaagcgacgcccccaucggcaagugcaacagcgagugcaucacccccaacggcagcauccccaacgacaagcccuuccagaacgugaacagaaucaccuacggcgccugccccagauacgugaagcagagcacccugaagcuggccaccggcaugagaaacgugcccgagaagcagaccagaggcaucuucggcgccaucgccggcuucaucgagaacggcugggagggcaugguggacggcugguacggcuucagacaccagaacagcgagggcagaggccaggccgccgaccugaagagcacccaggccgccaucgaccagaucaacggcaagcugaacagacugaucggcaagaccaacgagaaguuccaccagaucgagaaggaguucagcgagguggagggcagaauccaggaccuggagaaguacguggaggacaccaagaucgaccuguggagcuacaacgccgagcugcugguggcccuggagaaccagcacaccaucgaccugaccgacagcgagaugaacaagcuguucgagaagaccaagaagcagcugagagagaacgccgaggacaugggcaacggcugcuucaagaucuaccacaagugcgacaacgccugcaucggcagcaucagaaacggcaccuacgaccacgacguguacagagacgaggcccugaacaacagauuccagaucaagggcguggagcugaagagcggcuacaaggacuggauccuguggaucagcuucgccaucagcugcuuccugcugugcguggcccugcugggcuucaucaugugggccugccagaagggcaacaucaagugcaacaucugcaucuga

SEQ ID NO: 169615 - RNA, 1701 nt, Artificial Sequence
  derived and/or modified CDS sequence (opt4) from hemagglutinin__InfluenzaA__AFN19684
augaagaccaucaucgcccugagcuacauccugugccuggccuucgcccagaagcugcccggcaacgacaacagcaccgccacccugugccugggccaccacgccgugcccaacggcaccaucgugaagaccaucaccaacgaccagaucgaggugaccaacgccaccgagcuggugcagagcagcagcaccggcgagaucugcgacagcccccaccagauccuggacggcgagaacugcacccugaucgacgcccugcugggcgacccccagugcgacggcuuccagaacaagaagugggaccuguucguggagagaagcaaggccuacagcaacugcuaccccuacgacgugcccgacuacgccagccugagaagccugguggccagcagcggcacccuggaguucaacaacgagagcuucaacuggaccggcgugacccagaacggcaccagcagcgccugcaucagaggcagcaacagcagcuucuucagcagacugaacuggcugacccaccugaacuucaaguaccccgcccugaacgugaccaugcccaacaacgagcaguucgacaagcuguacaucuggggcgugcaccaccccggcaccgacaaggaccagaucuuccuguacgcccagagcagcggcagaaucaccgugagcaccaagagaagccagcaggccgugauccccaacaucggcagcagacccagaaucagaaacauccccagcagaaucagcaucuacuggaccaucgugaagcccggcgacauccugcugaucaacagcaccggcaaccugaucgcccccagaggcuacuucaagaucagaagcggcaagagcagcaucaugagaagcgacgcccccaucggcaagugcaacagcgagugcaucacccccaacggcagcauccccaacgacaagcccuuccagaacgugaacagaaucaccuacggcgccugccccagauacgugaagcagagcacccugaagcuggccaccggcaugagaaacgugcccgagaagcagaccagaggcaucuucggcgccaucgccggcuucaucgagaacggcugggagggcaugguggacggcugguacggcuucagacaccagaacagcgagggcagaggccaggccgccgaccugaagagcacccaggccgccaucgaccagaucaacggcaagcugaacagacugaucggcaagaccaacgagaaguuccaccagaucgagaaggaguucagcgagguggagggcagaauccaggaccuggagaaguacguggaggacaccaagaucgaccuguggagcuacaacgccgagcugcugguggcccuggagaaccagcacaccaucgaccugaccgacagcgagaugaacaagcuguucgagaagaccaagaagcagcugagagagaacgccgaggacaugggcaacggcugcuucaagaucuaccacaagugcgacaacgccugcaucggcagcaucagaaacggcaccuacaaccacaacguguacagagacgaggcccugaacaacagauuccagaucaagggcguggagcugaagagcggcuacaaggacuggauccuguggaucagcuucgccaucagcugcuuccugcugugcguggcccugcugggcuucaucaugugggccugccagaagggcaacaucagaugcaacaucugcaucuga

SEQ ID NO: 169616 - RNA, 1701 nt, Artificial Sequence
  derived and/or modified CDS sequence (opt4) from hemagglutinin__InfluenzaA__AFN19686
augaagaccaucaucgcccugagcuacauccugugccuggccuucgcccagaagcugcccggcaacgacaacagcaccgccacccugugccugggccaccacgccgugcccaacggcaccaucgugaagaccaucaccaacgaccagaucgaggugaccaacgccaccgagcuggugcagagcagcagcaccggcgagaucugcgacagcccccaccagauccuggacggcgagaacugcacccugaucgacgcccugcugggcgacccccagugcgacggcuuccagaacaagaagugggaccuguucguggagagaagcaaggccuacagcaacugcuaccccuacgacgugcccgacuacgccagccugagaagccugguggccagcagcggcacccuggaguucaacaacgagagcuucaacuggaccggcgugacccagaacggcaccagcagcgccugcaucagaagaagcaacagcagcuucuucagcagacugaacuggcugacccaccugaacuucaaguaccccgcccugaacgugaccaugcccaacaacgagcaguucgacaagcuguacaucuggggcgugcaccaccccggcaccgacaaggaccagaucuuccuguacgcccagagcagcggcagaaucaccgugagcaccaagagaagccagcaggccgugauccccaacaucggcagcagacccagaaucagaaacauccccagcagaaucagcaucuacuggaccaucgugaagcccggcgacauccugcugaucaacagcaccggcaaccugaucgcccccagaggcuacuucaagaucagaagcggcaagagcagcaucaugagaagcgacgcccccaucggcaagugcaacagcgagugcaucacccccaacggcagcauccccaacgacaagcccuuccagaacgugaacagaaucaccuacggcgccugccccagauacgugaagcagagcacccugaagcuggccaccggcaugagaaacauccccgagaagcagaccagaggcaucuucggcgccaucgccggcuucaucgagaacggcugggagggcaugguggacggcugguacggcuucagacaccagaacagcgagggcagaggccaggccgccgaccugaagagcacccaggccgccaucgaccagaucaacggcaagcugaacagacugaucggcaagaccaacgagaaguuccaccagaucgagaaggaguucagcgagguggagggcagaauccaggaccuggagaaguacguggaggacaccaagaucgaccuguggagcuacaacgccgagcugcugguggcccuggagaaccagcacaccaucgaccugaccgacagcgagaugaacaagcuguucgagaagaccaagaagcagcugagagagaacgccgaggacaugggcaacggcugcuucaagaucuaccacaagugcgacaacgccugcaucggcagcaucagaaacggcaccuacaaccacaacguguacagagacgaggcccugaacaacagauuccagaucaagggcguggagcugaagagcggcuacaaggacuggauccuguggaucagcuucgccaucagcugcuuccugcugugcguggcccugcugggcuucaucaugugggccugccagaagggcaacaucagaugcaacaucugcaucuga

SEQ ID NO: 169617 - RNA, 1701 nt, Artificial Sequence
  derived and/or modified CDS sequence (opt4) from hemagglutinin__InfluenzaA__AFN19688
augaagaccaucaucgcccugagcuacauccugugccugguguucgcccaggagcugcccggcaacgacaacagcaccgccacccugugccugggccaccacgccgugcccaacggcaccaucgugaagaccaucaccaacgaccagaucgaggugaccaacgccaccgagcuggugcagagcagcagcaccggcgagaucugcgacagcccccaccagauccuggacggcgagaacugcacccugaucgacgcccugcugggcgacccccagugcgacggcuuccagaacaagaagugggaccuguucguggagagaagcaaggccuacagcaacugcuaccccuacgacgugcccgacuacgccagccugagaagccugguggccagcagcggcacccuggaguucaacaacgagagcuucaacuggaccggcgugacccagaacggcaccagcagcgccugcaucagaagaagcaacagcagcuucuucagcagacugaacuggcugacccaccugaacuucaaguaccccgcccugaacgugaccaugcccaacaacgagcaguucgacaagcuguacaucuggggcgugcaccaccccggcaccgacaaggaccagaucuuccuguacgcccagagcagcggcagaaucaccgugagcaccaagagaagccagcaggccgugauccccaacaucggcagcagacccagaaucagaaacauccccagcagaaucagcaucuacuggaccaucgugaagcccggcgacauccugcugaucaacagcaccggcaaccugaucgcccccagaggcuacuucaagaucagaagcggcaagagcagcaucaugagaagcgacgcccccaucggcaagugcaacagcgagugcaucacccccaacggcagcauccccaacgacaagcccuuccagaacgugaacagaaucaccuacggcgccugccccagauacgugaagcagagcacccugaagcuggccaccggcaugagaaacgugcccgagaagcagaccagaggcaucuucggcgccaucgccggcuucaucgagaacggcugggagggcaugguggacggcugguacggcuucagacaccagaacagcgagggcagaggccaggccgccgaccugaagagcacccaggccgccaucgaccagaucaacggcaagcugaacagacugaucggcaagaccaacgagaaguuccaccagaucgagaaggaguucagcgagguggagggcagaauccaggaccuggagaaguacguggaggacaccaagaucgaccuguggagcuacaacgccgagcugcugguggcccuggagaaccagcacaccaucgaccugaccgacagcgagaugaacaagcuguucgagaagaccaagaagcagcugagagagaacgccgaggacaugggcaacggcugcuucaagaucuaccacaagugcgacaacgccugcaucggcagcaucagaaacggcaccuacaaccacgacguguacagagacgaggcccugaacaacagauuccagaucaagggcguggagcugaagagcggcuacaaggacuggauccuguggaucagcuucgccaucagcugcuuccugcugugcguggcccugcugggcuucaucaugugggccugccagaagggcaacaucagaugcaacaucugcaucuga

SEQ ID NO: 169618 - RNA, 1701 nt, Artificial Sequence
  derived and/or modified CDS sequence (opt4) from hemagglutinin__InfluenzaA__AFN19690
augaagaccaccaucgcccugagcuacauccugugccugguguucgcccagaagcugcccggcaacgacaacagcaccgccacccugugccugggccaccacgccgugcccaacggcaccaucgugaagaccaucaccaacgacagaaucgaggugaccaacgccaccgagcuggugcagaacagcagcaucggcgagaucugcgacagcccccaccagauccuggacggcgagaacugcacccugaucgacgcccugcugggcgacccccagugcgacggcuuccagaacaagaagugggaccuguucguggagagaagcaaggccuacagcaacugcuaccccuacgacgugcccgacuacgccagccugagaagccugguggccagcagcggcacccuggaguucaacaacgagagcuucaacuggaccggcgugacccagaacggcaccagcagcgccugcaucagaagaagcaacaacagcuucuucagcagacugaacuggcugacccaccugaacuucaaguaccccgcccugaacgugaccaugcccaacaacgagcaguucgacaagcuguacaucuggggcgugcaccaccccggcaccgacaaggaccagaucuuccuguacgcccagagcagcggcagaaucaccgugagcaccaagagaagccagcaggccgugauccccaacaucggcagcagacccagaaucagaaacauccccagcagaaucagcaucuacuggaccaucgugaagcccggcgacauccugcugaucaacagcaccggcaaccugaucgcccccagaggcuacuucaagaucagaagcggcaagagcagcaucaugagaagcgacgcccccaucggcaagugcaagagcgagugcaucacccccaacggcagcauccccaacgacaagcccuuccagaacgugaacagaaucaccuacggcgccugccccagauacgugaagcagagcacccugaagcuggccaccggcaugagaaacgugcccgagaagcagaccagaggcaucuucggcgccaucgccggcuucaucgagaacggcugggagggcaugguggacggcugguacggcuucagacaccagaacagcgagggcagaggccaggccgccgaccugaagagcacccaggccgccaucgaccagaucaacggcaagcugaacagacugaucggcaagaccaacgagaaguuccaccagaucgagaaggaguucagcgagguggagggcagaauccaggaccuggagaaguacguggaggacaccaagaucgaccuguggagcuacaacgccgagcugcugguggcccuggagaaccagcacaccaucgaccugaccgacagcgagaugaacaagcuguucgagaagaccaagaagcagcugagagagaacgccgaggacaugggcaacggcugcuucaagaucuaccacaagugcgacaacgccugcaucggcagcaucagaaacggcaccuacgaccacgacguguacagagacgaggcccugaacaacagauuccagaucaagggcguggaccugaagagcggcuacaaggacuggauccuguggaucagcuucgccaucagcugcuuccugcugugcguggcccugcugggcuucaucaugugggccugccagaagggcaacaucagaugcaacaucugcaucuga

SEQ ID NO: 169619 - RNA, 1701 nt, Artificial Sequence
  derived and/or modified CDS sequence (opt4) from hemagglutinin__InfluenzaA__AFN19692
augaagaccaucaucgcccugagcuacauccugugccugguguucgcccagaagauccccggcaacgacaacagcaccgccacccugugccugggccaccacgccgugcccaacggcaccaucgugaagaccaucaccaacgaccagaucgaggugaccaacgccaccgagcuggugcagagcagcagcaccggcgagaucugcgacagcccccaccagauccuggacggcgagaacugcacccugaucgacgcccugcugggcgacccccagugcgacggcuuccagaacaagaagugggaccuguucguggagagaagcaaggccuacagcaacugcuaccccuacgacgugcccgacuacgccagccugagaagccugguggccagcagcggcacccuggaguucaacaacgagagcuucaacuggaccggcgugacccagaacggcaccagcagcgccugcaucagaagaagcgacagcagcuucuucagcagacugaacuggcugacccaccugaacuucaaguaccccgcccugaacgugaccaugcccaacaacgagcaguucgacaagcuguacaucuggggcgugcaccaccccggcaccgacaaggaccagaucuuccuguacgcccaggccagcggcagaaucaccgugagcaccaagagaagccagcaggccgugauccccaacaucggcagcagacccagaaucagaaacauccccagcagaaucagcaucuacuggaccaucgugaagcccggcgacauccugcugaucaacagcaccggcaaccugaucgcccccagaggcuacuucaagaucagaagcggcaagagcagcaucaugagaagcgacgcccccaucggcaagugcaacagcgagugcaucacccccaacggcagcauccccaacgacaagcccuuccagaacgugaacagaaucaccuacggcgccugccccagauacgugaagcagaacacccugaagcuggccaccggcaugagaaacgugcccgagaagcagaccagaggcaucuucggcgccaucgccggcuucaucgagaacggcugggagggcaugguggacggcugguacggcuucagacaccagaacagcgagggcagaggccaggccgccgaccugaagagcacccaggccgccaucgaccagaucaacggcaagcugaacagacugaucggcaagaccaacgagaaguuccaccagaucgagaaggaguucagcgagguggagggcagaauccaggaccuggagaaguacguggaggacaccaagaucgaccuguggagcuacaacgccgagcugcugguggcccuggagaaccagcacaccaucgaccugaccgacagcgagaugaacaagcuguucgagaagaccaagaagcagcugagagagaacgccgaggacaugggcaacggcugcuucaagaucuaccacaagugcgacaacgccugcaucggcagcaucagaaacggcaccuacaaccacgacguguacagagacgaggcccugaacaacagauuccagaucaagggcguggagcugaagagcggcuacaaggacuggauccuguggaucagcuucgccaucagcugcuuccugcugugcguggcccugcugggcuucaucaugugggccugccagaagggcaacaucagaugcaacaucugcaucuga

SEQ ID NO: 169620 - RNA, 1701 nt, Artificial Sequence
  derived and/or modified CDS sequence (opt4) from hemagglutinin__InfluenzaA__AFN19694
augaagaccaucaucgcccugagcuacauccugugccugguguucgcccagaagcugcccggcaacgacaacagcaccgccacccugugccugggccaccacgccgugcccaacggcaccaucgugaagaccaucaccaacgacagaaucgaggugaccaacgccaccgagcuggugcagaacagccccaucggcgagaucugcgacagcccccaccagauccuggacggcgagaacugcacccugaucgacgcccugcugggcgacccccagugcgacggcuuccagaacaagaagugggaccuguucguggagagaagcaaggccuacagcaacugcuaccccuacgacgugcccgacuacgccagccugagaagccugguggccagcagcggcacccuggaguucaacaacgagagcuucaacuggaccggcgugacccagaacggcaccagcagcgccugcaucagaagaagcaacaacagcuucuucagcagacugaacuggcugacccaccugaacuucaaguaccccgcccugaacgugaccaugcccaacaacgagcaguucgacaagcuguacaucuggggcgugcaccaccccggcaccgacaaggaccagaucuuccuguacgcccagagcagcggcagaaucaccgugagcaccaagagaagccagcaggccgugauccccaacaucggcagcagacccagaaucagaaacauccccagcagaaucagcaucuacuggaccaucgugaagcccggcgacauccugcugaucaacagcaccggcaaccugaucgcccccagaggcuacuucaagaucagaagcggcaagagcagcaucaugagaagcgacgcccccaucggcaagugcaagagcgagugcaucacccccaacggcagcauccccaacgacaagcccuuccagaacgugaacagaaucaccuacggcgccugccccagauacgugaagcagagcacccugaagcuggccaccggcaugagaaacgugcccgagaagcagaccagaggcaucuucggcgccaucgccggcuucaucgagaacggcugggagggcaugguggacggcugguacggcuucagacaccagaacagcgagggcagaggccaggccgccgaccugaagagcacccaggccgccaucgaccagaucaacggcaagcugaacagacugaucggcaagaccaacgagaaguuccaccagaucgagaaggaguucagcgagguggagggcagaauccaggaccuggagaaguacguggaggacaccaagaucgaccuguggagcuacaacgccgagcugcugguggcccuggagaaccagcacaccaucgaccugaccgacagcgagaugaacaagcuguucgagaagaccaagaagcagcugagagagaacgccgaggacaugggcaacggcugcuucaagaucuaccacaagugcgacaacgccugcaucggcagcaucagaaacggcaccuacgaccacgacguguacagagacgaggcccugaacaacagauuccagaucaagggcguggagcugaagagcggcuacaaggacuggauccuguggaucagcuucgccaucagcugcuuccugcugugcguggcccugcugggcuucaucaugugggccugccagaagggcaacaucagaugcaacaucugcaucuga

SEQ ID NO: 169621 - RNA, 1701 nt, Artificial Sequence
  derived and/or modified CDS sequence (opt4) from hemagglutinin__InfluenzaA__AFN19700
augaagaccaucaucgcccugagcuacauccugugccugguguucgcccagaagcugcccggcaacgacaacagcaccgccacccugugccugggccaccacgccgugcccaacggcaccaucgugaagaccaucaccaacgaccagaucgaggugaccaacgccaccgagcuggugcagaacagcagcaucggcgagaucugcgacagcccccaccagauccuggacggcgagaacugcacccugaucgacgcccugcugggcgacccccagugcgacggcuuccagaacaagaagugggaccuguucguggagagaagcaaggccuacagcaacugcuaccccuacgacgugcccgacuacgccagccugagaagccugguggccagcagcggcacccuggaguucaacaacgagagauucaacuggagcggcgugacccagaacggcaccagcagcgccugcaugagaagaagcaacagcagcuucuucagcagacugaacuggcugacccaccugaacuucaaguaccccgcccugaacgugaccaugcccaacaacgagcaguucgacaagcuguacaucuggggcgugcaccaccccggcaccgacaaggaccagaucuuccuguacgcccagagcagcggcagaaucaccgugagcaccaagagaagccagcaggccgugauccccaacaucggcagcagacccagaaucagaaacauccccagcagaaucagcaucuacuggaccaucgugaagcccggcgacauccugcugaucaacagcaccggcaaccugaucgcccccagaggcuacuucaagaucagaagcggcaagagcagcaucaugagaagcgacgcccccaucggcaagugcaacagcgagugcaucacccccaacggcagcauccccaacgacaagcccuuccagaacgugaacagaaucaccuacggcgccugccccagauacgugaagcagagcacccugaagcuggccaccggcaugagaaacgugcccgagaagcagaccagaggcaucuucggcgccaucgccggcuucaucgagaacggcugggagggcaugguggacggcugguacggcuucagacaccagaacagcgagggcagaggccaggccgccgaccugaagagcacccaggccgccaucgaccagaucaacggcaagcugaacagacugaucggcaagaccaacgagaaguuccaccagaucgagaaggaguucagcgagguggagggcagaauccaggaccuggagaaguacguggaggacaccaagaucgaccuguggagcuacaacgccgagcugcugguggcccuggagaaccagcacaccaucgaccugaccgacagcgagaugaacaagcuguucgagaagaccaagaagcagcugagagagaacgccgaggacaugggcaacggcugcuucaagaucuaccacaagugcgacaacgccugcaucggcagcaucagaaacggcaccuacgaccacgacguguacagagacgaggcccugaacaacagauuccagaucaagggcguggagcugaagagcggcuacaaggacuggauccuguggaucagcuucgccaucagcugcuuccugcugugcguggcccugcugggcuucaucaugugggccugccagaagggcaacaucagaugcaacaucugcaucuga

SEQ ID NO: 169622 - RNA, 1701 nt, Artificial Sequence
  derived and/or modified CDS sequence (opt4) from hemagglutinin__InfluenzaA__AFN19702
augaagaccaucaucgcccugagcuacauccugugccugguguucgcccagaagcugcccggcaacgacaacagcaccgccacccugugccugggccaccacgccgugcccaacggcaccaucgugaagaccaucaccaacgacagaaucgaggugaccaacgccaccgagcuggugcagaacagcagcaucggcgagaucugcgacagcccccaccagauccuggacggcgagaacugcacccugaucgacgcccugcugggcgacccccagugcgacggcuuccagaacaagaagugggaccuguucguggagagaggcaaggccuacagcaacugcuaccccuacgacgugcccgacuacgccagccugagaagccugguggccagcagcggcacccuggaguucaacaacgagagcuucaacuggaccggcgugacccagaacggcaccagcagcgccugcaucagaagaagcaacaacagcuucuucagcagacugaacuggcugacccaccugaacuucaaguaccccgcccugaacgugaccaugcccaacaacgagcaguucgacaagcuguacaucuggggcgugcaccaccccggcaccgacaaggaccagaucuuccuguacgcccagagcagcggcagaaucaccgugagcaccaagagaagccagcaggccgugauccccaacaucggcagcagacccagaaucagaaacauccccagcagaaucagcaucuacuggaccaucgugaagcccggcgacauccugcugaucaacagcaccggcaaccugaucgcccccagaggcuacuucaagaucagaagcggcaagagcagcaucaugagaagcgacgcccccaucggcaagugcaagagcgagugcaucacccccaacggcagcauccccaacgacaagcccuuccagaacgugaacagaaucaccuacggcgccugccccagauacgugaagcagagcacccugaagcuggccaccggcaugagaaacgugcccgagaagcagaccagaggcaucuucggcgccaucgccggcuucaucgagaacggcugggagggcaugguggacggcugguacggcuucagacaccagaacagcgagggcagaggccaggccgccgaccugaagagcacccaggccgccaucgaccagaucaacggcaagcugaacagacugaucggcaagaccaacgagaaguuccaccagaucgagaaggaguucagcgagguggagggcagaauccaggaccuggagaaguacguggaggacaccaagaucgaccuguggagcuacaacgccgagcugcugguggcccuggagaaccagcacaccaucgaccugaccgacagcgagaugaacaagcuguucgagaagaccaagaagcagcugagagagaacgccgaggacaugggcaacggcugcuucaagaucuaccacaagugcgacaacgccugcaucggcagcaucagaaacggcaccuacgaccacgacguguacagagacgaggcccugaacaacagauuccagaucaagggcguggagcugaagagcggcuacaaggacuggauccuguggaucagcuucgccaucagcugcuuccugcugugcguggcccugcugggcuucaucaugugggccugccagaagggcaacaucagaugcaacaucugcaucuga

SEQ ID NO: 169623 - RNA, 1701 nt, Artificial Sequence; identical to SEQ ID NO: 166875
  derived and/or modified CDS sequence (opt4) from hemagglutinin__InfluenzaA__AFN19709

SEQ ID NO: 169624 - RNA, 1701 nt, Artificial Sequence
  derived and/or modified CDS sequence (opt4) from hemagglutinin__InfluenzaA__AFN19719
augaaggccauccugguggugcugcuguacaccuucgccaccgccaacgccgacacccugugcaucggcuaccacgccaacaacagcaccgacaccguggacaccgugcuggagaagaacgugaccgugacccacagcgugaaccugcuggaggacaagcacaacggcaagcugugcaagcugagaggcguggccccccugcaccugggcaagugcaacaucgccggcuggauccugggcaaccccgagugcgagagccugagcaccgccagcagcuggagcuacaucguggagaccagcagcagcgacaacggcaccugcuaccccggcgacuucaucgacuacgaggagcugagagagcagcugagcagcgugagcagcuucgagagauucgagaucuuccccaagaccagcagcuggcccaaccacgacagcaacaagggcgugaccgccgccugcccccacgccggcgccaagagcuucuacaagaaccugaucuggcuggugaagaagggcaacagcuaccccaagcugagcaagagcuacaucaacgacaagggcaaggaggugcuggugcuguggggcauccaccaccccagcaccaccgccgaccagcagagccuguaccagaacgccgacaccuacguguucgugggcaccagcagauacagcaagaaguucaagcccgagaucgccaucagacccaaggugagagaccaggagggcagaaugaacuacuacuggacccugguggagcccggcgacaagaucaccuucgaggccaccggcaaccugguggugcccagauacgccuucgccauggagagaaacgccggcagcggcaucaucaucagcgacacccccgugcacgacugcaacaccaccugccagacccccaagggcgccaucaacaccagccugcccuuccagaacauccaccccaucaccaucggcaagugccccaaguacgugaagagcaccaagcugagacuggccaccggccugagaaacgugcccagcauccagagcagaggccuguucggcgccaucgccggcuucaucgagggcggcuggaccggcaugguggacggcugguacggcuaccaccaccagaacgagcagggcagcggcuacgccgccgaccugaagagcacccagaacgccaucgacaagaucaccaacaaggugaacagcgugaucgagaagaugaacacccaguucaccgccgugggcaaggaguucaaccaccuggagaagagaaucgagaaccugaacaagaagguggacgacggcuuccuggacaucuggaccuacaacgccgagcugcuggugcugcuggagaacgagagaacccuggacuaccacgacagcaacgugaagaaccuguacgagaaggugagaacccagcugaagaacaacgccaaggagaucggcaacggcugcuucgaguucuaccacaagugcgacaacaccugcauggagagcgugaagaacggcaccuacgacuaccccaaguacagcgaggaggccaagcugaacagagaggagaucgacggcgugaagcuggagagcaccagaguguaccagauccuggccaucuacagcaccguggccagcagccuggugcugguggugagccugggcgccaucagcuucuggaugugcagcaacggcagccugcagugcagaaucugcaucuga

SEQ ID NO: 169625 - RNA, 1701 nt, Artificial Sequence; identical to SEQ ID NO: 166495
  derived and/or modified CDS sequence (opt4) from hemagglutinin__InfluenzaA__AFN19730

SEQ ID NO: 169626 - RNA, 1701 nt, Artificial Sequence; identical to SEQ ID NO: 166875
  derived and/or modified CDS sequence (opt4) from hemagglutinin__InfluenzaA__AFN19736

SEQ ID NO: 169627 - RNA, 1701 nt, Artificial Sequence
  derived and/or modified CDS sequence (opt4) from hemagglutinin__InfluenzaA__AFN19748
augaaggccauccugguggugcugcuguacaccuucgccaccgccaacgccgacacccugugcaucggcuaccacgccaacaacagcaccgacaccguggacaccgugcuggagaagaacgugaccgugacccacagcgugaaccugcuggaggacaagcacaacggcaagcugugcaagcugagaggcguggccccccugcaccugggcaagugcaacaucgccggcuggauccugggcaaccccgagugcgagagccugagcaccgccagcagcuggagcuacaucguggagaccagcagcagcgacaacggcaccugcuaccccggcgacuucaucgacuacgaggagcugagagagcagcugagcagcgugagcagcuucgagagauucgagaucuuccccaagaccagcagcuggcccaaccacgacagcaacaagggcgugaccgccgccugcccccacgccggcgccaagagcuucuacaagaaccugaucuggcuggugaagaccggcaacagcuaccccaagcugagcaagagcuacaucaacgacaagggcaaggaggugcuggugcuguggggcauccaccaccccagcaccaccgccgaccagcagagccuguaccagaacgccgacaccuacguguucgugggcaccagcagauacagcaagaaguucaagcccgagaucgccaucagacccaaggugagagaccaggagggcagaaugaacuacuacuggacccugguggagcccggcgacaagaucaccuucgaggccaccggcaaccugguggugcccagauacgccuucgccauggagagaaacgccggcagcggcaucaucaucagcgacacccccgugcacgacugcaacaccaccugccagacccccaagggcgccaucaacaccagccugcccuuccagaacauccaccccaucaccaucggcaagugccccaaguacgugaagagcaccaagcugagacuggccaccggccugagaaacgugcccagcauccagagcagaggccuguucggcgccaucgccggcuucaucgagggcggcuggaccggcaugguggacggcugguacggcuaccaccaccagaacgagcagggcagcggcuacgccgccgaccugaagagcacccagaacgccaucgacaagaucaccaacaaggugaacagcgugaucgagaagaugaacacccaguucaccgccgugggcaaggaguucaaccaccuggagaagagaaucgagaaccugaacaagaagguggacgacggcuuccuggacaucuggaccuacaacgccgagcugcuggugcugcuggagaacgagagaacccuggacuaccacgacagcaacgugaagaaccuguacgagaaggugagaaaccagcugaagaacaacgccaaggagaccggcaacggcugcuucgaguucuaccacaagugcgacaacaccugcauggagagcgugaagaacggcaccuacgacuaccccaaguacagcgaggaggccaagcugaacagagaggagaucgacggcgugaagcuggagagcaccagaaucuaccagauccuggccaucuacagcaccguggccagcagccuggugcugguggugagccugggcgccaucagcuucuggaugugcagcaacggcagccugcagugcagaaucugcaucuga

SEQ ID NO: 169628 - RNA, 1701 nt, Artificial Sequence; identical to SEQ ID NO: 166884
  derived and/or modified CDS sequence (opt4) from hemagglutinin__InfluenzaA__AFN19757

SEQ ID NO: 169629 - RNA, 1701 nt, Artificial Sequence; identical to SEQ ID NO: 166875
  derived and/or modified CDS sequence (opt4) from hemagglutinin__InfluenzaA__AFN19768

SEQ ID NO: 169630 - RNA, 1701 nt, Artificial Sequence
  derived and/or modified CDS sequence (opt4) from hemagglutinin__InfluenzaA__AFN19781
augaaggccauccugguggugcugcuguacaccuucgccaccgccaacgccgacacccugugcaucggcuaccacgccaacaacagcaccgacaccguggacaccgugcuggagaagaacgugaccgugacccacagcgugaaccugcuggaggacaagcacaacggcaagcugugcaagcugagaggcguggccccccugcaccugggcaagugcaacaucgccggcuggauccugggcaaccccgagugcgagagccugagcaccgccagcagcuggagcuacaucguggagaccagcagcagcgacaacggcaccugcuaccccggcgacuucaucgacuacgaggagcugagagagcagcugagcagcgugagcagcuucgagagauucgagaucuuccccaagaccagcagcuggcccaaccacgacagcaacaagggcgugaccgccgccugcccccacgccggcgccaagagcuucuacaagaaccugaucuggcuggugaagaagggcaacagcuaccccaagcugagcaagagcuacaucaacgacaagggcaaggaggugcuggugcuguggggcauccaccaccccagcaccaccgccgaccagcagagccuguaccagaacgccgacaccuacguguucgugggcaccagcagauacagcaagaaguucaagcccgagaucgccaucagacccaaggugagagaccaggagggcagaaugaacuacuacuggacccugguggagcccggcgacaagaucaccuucgaggccaccggcaaccugguggugcccagauacgccuucgccguggagagaaacgccggcagcggcaucaucaucagcgacacccccgugcacgacugcaacaccaccugccagacccccaagggcgccaucaacaccagccugcccuuccagaacauccaccccaucaccaucggcaagugccccaaguacgugaagagcaccaagcugagacuggccaccggccugagaaacgugcccagcauccagagcagaggccuguucggcgccaucgccggcuucaucgagggcggcuggaccggcaugguggacggcugguacggcuaccaccaccagaacgagcagggcagcggcuacgccgccgaccugaagagcacccagaacgccaucgacaagaucaccaacaaggugaacagcgugaucgagaagaugaacacccaguucaccgccgugggcaaggaguucaaccaccuggagaagagaaucgagaaccugaacaagaagguggacgacggcuuccuggacaucuggaccuacaacgccgagcugcuggugcugcuggagaacgagagaacccuggacuaccacgacagcaacgugaagaaccuguacgagaaggugagaaaccagcugaagaacaacgccaaggagaucggcaacggcugcuucgaguucuaccacaagugcgacaacaccugcauggagagcgugaagaacggcaccuacgacuaccccaaguacagcgaggaggccaagcugaacagagaggagaucgacggcgugaagcuggagagcaccagaaucuaccagauccuggccaucuacagcaccguggccagcagccuggugcugguggugagccugggcgccaucagcuucuggaugugcagcaacggcagccugcagugcagaaucugcaucuga

SEQ ID NO: 169631 - RNA, 1701 nt, Artificial Sequence
  derived and/or modified CDS sequence (opt4) from hemagglutinin__InfluenzaA__AFN19791
augaaggccauccugguggugcugcuguacaccuucgccaucgccaacgccgacacccugugcaucggcuaccacgccaacaacagcaccgacaccguggacaccgugcuggagaagaacgugaccgugacccacagcgugaaccugcuggaggacaagcacaacggcaagcugugcaagcugagaggcguggccccccugcaccugggcaagugcaacaucgccggcuggauccugggcaaccccgagugcgagagccugagcaccgccagcagcuggagcuacaucguggagaccagcagcagcgacaacggcaccugcuaccccggcgacuucaucaacuacgaggagcugagagagcagcugagcagcgugagcagcuucgagagauucgagaucuuccccaagaccagcagcuggcccaaccacgacagcaacaagggcgugaccgccgccugcccccacgccggcgccaagagcuucuacaagaaccugaucuggcuggugaagaagggcaacagcuaccccaagcugagcaagagcuacaucaacgacaagggcaaggaggugcuggugcuguggggcauccaccaccccagcaccagcgccgaccagcagagccuguaccagaacgccgacgccuacguguucgugggcaccagcaaguacagcaagaaguucaagcccgagaucgccgugagacccaaggugagagaccaggagggcagaaugaacuacuacuggacccugguggagcccggcgacaagaucaccuucgaggccaccggcaaccugcuggugcccagauacgccuucgccauggagagaaacgccggcagcggcaucaucaucagcgacacccccgugcacgacugcaacaccaccugccagacccccgagggcgccaucaacaccagccugcccuuccagaacauccaccccaucaccaucggcaagugccccaaguacgugaagagcaccaagcugagacuggccaccggccugagaaacgugcccagcauccagagcagaggccuguucggcgccaucgccggcuucaucgagggcggcuggaccggcaugguggacggcugguacggcuaccaccaccagaacgagcagggcagcggcuacgccgccgaccugaagagcacccagaacgccaucgacaagaucaccaacaaggugaacagcgugaucgagaagaugaacacccaguucaccgccgugggcaaggaguucaaccaccuggagaagagaaucgagaaccugaacaagaagguggacgacggcuuccuggacaucuggaccuacaacgccgagcugcuggugcugcuggagaacgagagaacccuggacuaccacgacagcaacgugaagaaccuguacgagaaggugagaagccagcugaagaacaacgccaaggagaucggcaacggcugcuucgaguucuaccacaagugcgacaacaccugcauggagagcgugaagaacggcaccuacgacuaccccaaguacagcgaggaggccaagcugaacagagaggagaucgacggcgugaagcuggagagcaccagaaucuaccagauccuggccaucuacagcaccguggccagcagccuggugcugaucgugagccugggcgccaucagcuucuggaugugcagcaacggcagccugcagugcagaaucugcaucuga

SEQ ID NO: 169632 - RNA, 1701 nt, Artificial Sequence; identical to SEQ ID NO: 166875
  derived and/or modified CDS sequence (opt4) from hemagglutinin__InfluenzaA__AFN19806

SEQ ID NO: 169633 - RNA, 1701 nt, Artificial Sequence
  derived and/or modified CDS sequence (opt4) from hemagglutinin__InfluenzaA__AFN19808
augaaggccauccugguggugcugcuguacaccuucgccaccgccaacgccgacacccugugcaucggcuaccacgccaacaacagcaccgacaccguggacaccgugcuggagaagaacgugaccgugacccacagcgugaaccugcuggaggacaagcacaacggcaagcugugcaagcugagaggcguggccccccugcaccugggcaagugcaacaucgccggcuggauccugggcaaccccgagugcgagagccugagcaccgccaacagcuggagcuacaucguggagaccagcagcagcgacaacggcaccugcuaccccggcgacuucaucgacuacgaggagcugagagagcagcugagcagcgugagcagcuucgagagauucgagaucuuccccaagaccaacagcuggcccaaccacgacagcaacaagggcgugaccgccgccugcccccacgccggcgccaagagcuucuacaagaaccugaucuggcuggugaagaagggcaacagcuaccccaagcugagcaagagcuacaucaacgacaagggcaaggaggugcuggugcuguggggcauccaccaccccagcaccagcgccgaccagcagagccuguaccagaacgccgacgccuacguguucgugggcaccagcagauacagcaagaaguucaagcccgagaucgccaucagacccaaggugagagaccaggagggcagaaugaacuacuacuggacccugguggagcccggcgacaagaucaccuucgaggccaccggcaaccugguggugcccagauacgccuucgccauggagagaaacgccggcagcggcaucaucaucagcgacacccccgcccacgacugcaacaccaccugccagacccccaagggcgccaucaacaccagccugcccuuccagaacauccaccccaucaccaucggcaagugccccaaguacgugaacagcaccaagcugagacuggccaccggccugagaaacgugcccagcauccagagcagaggccuguucggcgccaucgccggcuucaucgagggcggcuggaccggcaugguggacggcugguacggcuaccaccaccagaacgagcagggcagcggcuacgccgccgaccugaagagcacccagaacgccaucgacaagaucaccaacaaggugaacagcgugaucgagaagaugaacacccaguucaccgccgugggcaaggaguucaaccaccuggagaagagaaucgagaaccugaacaagaagguggacgacggcuuccuggacaucuggaccuacaacgccgagcugcuggugcugcuggagaacgagagaacccuggacuaccacgacagcaacgugaagaaccuguacgagaaggugagaagccagcugaagaacaacgccaaggagaucggcaacggcugcuucgaguucuaccacaagugcgacaacaccugcauggagagcgugaagaacggcaccuacgacuaccccaaguacagcgaggaggccaagcugaacagagaggagaucgacggcgugaagcuggagagcaccagaaucuaccagauccuggccaucuacagcaccguggccagcagccuggugcugguggugagccugggcgccaucagcuucuggaugugcagcaacggcagccugcagugcagaaucugcaucuga

SEQ ID NO: 169634 - RNA, 1701 nt, Artificial Sequence; identical to SEQ ID NO: 166884
  derived and/or modified CDS sequence (opt4) from hemagglutinin__InfluenzaA__AFN19814

SEQ ID NO: 169635 - RNA, 1701 nt, Artificial Sequence
  derived and/or modified CDS sequence (opt4) from hemagglutinin__InfluenzaA__AFN19816
augaaggccauccugguggugcugcuguacaccuucgccaccgccaacgccgacacccugugcaucggcuaccacgccaacaacagcaccgacaccguggacaccgugcuggagaagaacgugaccgugacccacagcgugaaccugcuggaggacaagcacaacggcaagcugugcaagcugagaggcguggccccccugcaccugggcaagugcaacaucgccggcuggauccugggcaaccccgagugcgagagccugagcaccgccagcagcuggagcuacaucguggagaccagcagcagcgacaacggcaccugcuaccccggcgacuucaucgacuacgaggagcugagagagcagcugagcagcgugagcagcuucgagagauucgagaucuuccccaagaccagcagcuggcccaaccacgacagcaacaagggcgugaccgccgccugcccccacgccggcgccaagggcuucuacaagaaccugaucuggcuggugaagaagggcaacagcuaccccaagcugagcaagagcuacaucaacgacaagggcaaggaggugcuggugcuguggggcauccaccaccccagcaccaccgccgaccagcagagccuguaccagaacgccgacaccuacguguucgugggcaccagcagauacagcaagaaguucaagcccgagaucgccaucagacccaaggugagagaccaggagggcagaaugaacuacuacuggacccugguggagcccggcgacaagaucaccuucgaggccaccggcaaccugguggugcccagauacgccuucgccauggagagagacgccggcagcggcaucaucaucagcgacacccccgugcacgacugcaacaccaccugccagacccccaagggcgccaucaacaccagccugcccuuccagaacauccaccccaucaccaucggcaagugccccaaguacgugaagagcaccaagcugagacuggccaccggccugagaaacgugcccagcauccagagcagaggccuguucggcgccaucgccggcuucaucgagggcggcuggaccggcaugguggacggcugguacggcuaccaccaccagaacgagcagggcagcggcuacgccgccgaccugaagagcacccagaacgccaucgacaagaucaccaacaaggugaacagcgugaucgagaagaugaacacccaguucaccgccgugggcaaggaguucaaccaccuggagaagagaaucgagaaccugaacaagaagguggacgacggcuuccuggacaucuggaccuacaacgccgagcugcuggugcugcuggagaacgagagaacccuggacuaccacgacagcaacgugaagaaccuguacgagaaggugagaaaccagcugaagaacaacgccaaggagaucggcaacggcugcuucgaguucuaccacaagugcgacaacaccugcauggagagcgugaagaacggcaccuacgacuaccccaaguacagcgaggaggccaagcugaacagagaggagaucgacggcgugaagcuggagagcaccagaaucuaccagauccuggccaucuacagcaccguggccagcagccuggugcugguggugagccugggcgccaucagcuucuggaugugcagcaacggcagccugcagugcagaaucugcaucuga

SEQ ID NO: 169636 - RNA, 1701 nt, Artificial Sequence
  derived and/or modified CDS sequence (opt4) from hemagglutinin__InfluenzaA__AFN19821
augaaggccauccugguggugcugcuguacaccuucgccaccgccaacgccgacacccugugcaucggcuaccacgccaacaacagcaccgacaccguggacaccgugcuggagaagaacgugaccgugacccacagcgugaaccugcuggaggacaagcacaacggcaagcugugcaagcugagaggcguggccccccugcaccugggcaagugcaacaucgccggcuggauccugggcaaccccgagugcgagagccugagcaccgccagcagcuggagcuacaucguggagaccagcagcagcgacaacggcaccugcuaccccggcgacuucaucgacuacgaggagcugagagagcagcugagcagcgugagcagcuucgagagauucgagaucuuccccaagaccagcagcuggcccaaccacgacagcaacaagggcgugaccgccgccugcccccacgccggcgccaagagcuucuacaagaaccugaucuggcuggugaagaagggcaacagcuaccccaagcugagcaagagcuacaucaacgacaagggcaaggaggugcuggugcuguggggcauccaccaccccagcaccaccgccgaccagcagagccuguaccagaacgccgacaccuacguguucgugggcaccagcagauacagcaagaagcugaagcccgagaucgccaucagacccaaggugagagaccaggagggcagaaugaacuacuacuggacccugguggagcccggcggcaagaucaccuucgaggccaccggcaaccugguggugcccagauacgccuucgccauggagagaaacgccggcagcggcaucaucaucagcgacacccccgugcacgacugcaacaccaccugccagacccccaagggcgccaucaacaccagccugcccuuccagaacauccaccccaucaccaucggcaagugccccaaguacgugaagagcaccaagcugagacuggccaccggccugagaaacgugcccagcauccagagcagaggccuguucggcgccaucgccggcuucaucgagggcggcuggaccggcaugguggacggcugguacggcuaccaccaccagaacgagcagggcagcggcuacgccgccgaccugaagagcacccagaacgccaucgacaagaucaccaacaaggugaacagcgugaucgagaagaugaacacccaguucaccgccgugggcaaggaguucaaccaccuggagaagagaaucgagaaccugaacaagaagguggacgacggcuuccuggacaucuggaccuacaacgccgagcugcuggugcugcuggagaacgagagaacccuggacuaccacgacagcaacgugaagaaccuguacgagaaggugagaaaccagcugaagaacaacgccaaggagaucggcaacggcugcuucgaguucuaccacaagugcgacaacaccugcauggagagcgugaagaacggcaccuacgacuaccccaaguacagcgaggaggccaagcugaacagagaggagaucgacggcgugaagcuggagagcaccagaaucuaccagauccuggccaucuacagcaccguggccagcagccuggugcugguggugagccugggcgccaucagcuucuggaugugcagcaacggcagccugcagugcagaaucugcaucuga

SEQ ID NO: 169637 - RNA, 1701 nt, Artificial Sequence; identical to SEQ ID NO: 166495
  derived and/or modified CDS sequence (opt4) from hemagglutinin__InfluenzaA__AFN19831

SEQ ID NO: 169638 - RNA, 1701 nt, Artificial Sequence
  derived and/or modified CDS sequence (opt4) from hemagglutinin__InfluenzaA__AFN19849
augaaggccauccugguggugcugcuguacaccuucgccaccgccaacgccgacacccugugcaucggcuaccacgccaacaacagcaccgacaccguggacaccgugcuggagaagaacgugaccgugacccacagcgugaaccugcuggaggacaagcacaacggcaagcugugcaagcugagaggcguggccccccugcaccugggcaagugcgacaucgccggcuggauccugggcaaccccgagugcgagagccugagcaccgccagcagcuggagcuacaucguggagaccagcagcagcgacaacggcaccugcuaccccggcgacuucaucaacuacgaggagcugagagagcagcugagcagcgugagcagcuucgagagauucgagaucuuccccaagaccagcagcuggcccaaccacgacagcaacaagggcgugaccgccgccugcccccaggccggcgccaagagcuucuacaagaaccugaucuggcuggugaagaagggcaacagcuaccccaagcugagcaagagcuacaucaacgacaagggcaaggaggugcuggugcuguggggcauccaccaccccagcaccagcgccgaccagcagagccuguaccagaacgccgacgccuacguguucgugggcaccagcaaguacagcaagaaguucaagcccgagaucgccgugagacccaaggugagagaccaggagggcagaaugaacuacuacuggacccugguggagcccggcgacaagaucaccuucgaggccaccggcaaccugcuggugcccagauacgccuucgccauggagagaaacgccggcagcggcaucaucaucagcgacacccccgugcacgacugcaacaccaccugccagacccccaagggcgccaucaacaccagccugcccuuccagaacauccaccccaucaccaucggcaagugccccaaguacgugaagagcaccaagcugagacuggccaccggccugagaaacgugcccagcauccagagcagaggccuguucggcgccaucgccggcuucaucgagggcggcuggaccggcaugguggacggcugguacggcuaccaccaccagaacgcccagggcagcggcuacgccgccgaccugaagagcacccagaacgccaucgacaagaucaccaacaaggugaacagcgugaucgagaagaugaacacccaguucaccgccgugggcaaggaguucaaccaccuggagaagagaaucgagaaccugaacaagaagguggacgacggcuuccuggacaucuggaccuacaacgccgagcugcuggugcugcuggagaacgagagaacccuggacuaccacgacagcaacgugaagaaccuguacgagaaggugagaagccagcugaagaacaacgccaaggagaucggcgacggcugcuucgaguucuaccacaagugcgacaacaccugcauggagagcgugaagaacggcaccuacgacuaccccaaguacagcgaggaggccaagcugaacagagaggagaucgacggcgugaagcuggagagcaccagaaucuaccagauccuggccaucuacagcaccguggccagcagccuggugcugguggugagccugggcgccaucagcuucuggaugugcagcaacggcagccugcagugcagaaucugcaucuga

SEQ ID NO: 169639 - RNA, 1701 nt, Artificial Sequence
  derived and/or modified CDS sequence (opt4) from hemagglutinin__InfluenzaA__AFN19865
augaaggccauccugguggugcugcuguacaccuucgccaccgccaacgccgacacccugugcaucggcuaccacgccaacaacagcaccgacaccguggacaccgugcuggagaagaacgugaccgugacccacagcgugaaccugcuggaggacaagcacaacggcaagcugugcaagcugagaggcguggccccccugcaccugggcaagugcaacaucgccggcuggauccugggcaaccccgagugcgagagccugagcaccgccagcagcuggagcuacaucguggagaccagcagcagcgacaacggcaccugcuaccccggcgacuucaucgacuacgaggagcugagagagcagcugagcagcgugagcagcuucgagagauucgagaucuuccccaagaccagcagcuggcccaaccacgacagcaacaagggcgugaccgccgccugcccccacgccggcgccaagagcuucuacaagaaccugaucuggcuggugaagaagggcaacagcuaccccaagcugagcaagagcuacaucaacgacaagggcaaggaggugcuggugcuguggggcauccaccaccccagcaccaccgccgaccagcagagccuguaccagaacgccgacgccuacguguucgugggcaccagcagauacagcaagaaguucaagcccgagaucgccaucagacccaaggugagagaccaggagggcagaaugaacuacuacuggacccugguggagcccggcgacaagaucaccuucgaggccaccggcaaccugguggugcccagauacgccuucgccauggagagaaacgccggcagcggcaucaucaucagcgacacccuggugcacgacugcaacaccaccugccagacccccaagggcgccaucaacaccagccugcccuuccagaacauccaccccaucaccaucggcaagugccccaaguacgugaagagcaccaagcugagacuggccaccggccugagaaacgugcccagcauccagagcagaggccuguucggcgccaucgccggcuucaucgagggcggcuggaccggcaugguggacggcugguacggcuaccaccaccagaacgagcagggcagcggcuacgccgccgaccugaagagcacccagaacgccaucgacaagaucaccaacaaggugaacagcgugaucgagaagaugaacacccaguucaccgccgugggcaaggaguucaaccaccuggagaagagaaucgagaaccugaacaagaagguggacgacggcuuccuggacaucuggaccuacaacgccgagcugcuggugcugcuggagaacgagagaacccuggacuaccacgacagcaacgugaagaaccuguacgagaaggugagaaaccagcugaagaacaacgccaaggagaucggcaacggcugcuucgaguucuaccacaagugcgacaacaccugcauggagagcgugaagaacggcaccuacgacuaccccaaguacagcgaggaggccaagcugaacagagaggagaucgacggcgugaagcuggagagcaccagaaucuaccagauccuggccaucuacagcaccguggccagcagccuggugcugguggugagccugggcgccaucagcuucuggaugugcagcaacggcagccugcagugcagaaucugcaucuga

SEQ ID NO: 169640 - RNA, 1701 nt, Artificial Sequence
  derived and/or modified CDS sequence (opt4) from hemagglutinin__InfluenzaA__AFN19875
augaaggccauccugguggugcugcuguacaccuucgccaccgccaacgccgacacccugugcaucggcuaccacgccaacaacagcaccgacaccguggacaccgugcuggagaagaacgugaccgugacccacagcgugaaccugcuggaggacaagcacaacggcaagcugugcaagcugagaggcguggccccccugcaccugggcaagugcaacaucgccggcuggauccugggcaaccccgagugcgagagccugagcaccgccagcagcuggagcuacaucguggagaccagcagcagcgacaacggcaccugcuaccccggcgacuucaucaacuacgaggagcugagagagcagcugagcagcgugagcagcuucgagagauucgagaucuuccccaagaccagcagcuggcccaaccacgacagcaacaagggcgugaccgccgccugcccccacgccggcgagaagagcuucuacaagaaccugaucuggcuggugaagaagggcaacagcuaccccaagcugagcaagagcuacaucaacgacaagggcaaggaggugcuggugcuguggggcauccaccaccccagcaccagcgccgaccagcagagccuguaccagaacgccgacgccuacguguucgugggcaccagcaaguacagcaagaaguucaagcccgagaucgccgugagacccaaggugagagaccaggagggcagaaugaacuacuacuggacccugguggagcccggcgacaagaucaccuucgaggccaccggcaaccugcuggugcccagauacgccuucgccauggagagaaacgccggcagcggcaucaucaucagcgacacccccgugcacgacugcaacaccaccugccagacccccaagggcgccaucaacaccagccugcccuuccagaacauccaccccaucaccaucggcaagugccccaaguacgugaagagcaccaagcugagacuggccaccggccugagaaacgugcccagcauccagagcagaggccuguucggcgccaucgccggcuucaucgagggcggcuggaccggcaugguggacggcugguacggcuaccaccaccagaacgagcagggcagcggcuacgccgccgaccugaagagcacccagaacgccaucgacaagaucaccaacaaggugaacagcgugaucgagaagaugaacacccaguucaccgccgugggcaaggaguucaaccaccuggagaagagaaucgagaaccugaacaagaagguggacgacggcuuccuggacaucuggaccuacaacgccgagcugcuggugcugcuggagaacgagagaacccuggacuaccacgacagcaacgugaagaaccuguacgagaaggugagaagccagcugaagaacaacgccaaggagaucggcaacggcugcuucgaguucuaccacaagugcgacaacaccugcauggagagcgugaagaacggcaccuacgacuaccccaaguacagcgaggaggccaagcugaacagagaggagaucgacggcgugaagcuggagagcaccagaaucuaccagauccuggccaucuacagcaccguggccagcagccuggugcugguggugagccugggcgccaucagcuucuggaugugcagcaacggcagccugcagugcagaaucugcaucuga

SEQ ID NO: 169641 - RNA, 1701 nt, Artificial Sequence
  derived and/or modified CDS sequence (opt4) from hemagglutinin__InfluenzaA__AFN19895
augaaggccauccugguggugcugcuguacaccuucgccaccgccaacgccgacacccugugcaucggcuaccacgccaacaacagcaccgacaccguggacaccgugcuggagaagaacgugaccgugacccacagcgugaaccugcuggaggacaagcacaacggcaagcugugcaagcugagaggcguggccccccugcaccugggcaagugcaacaucgccggcuggauccugggcaaccccgagugcgagagccugagcaccgccagcagcuggagcuacaucguggagaccagcagcagcgacaacggcaccugcuaccccggcgacuucaucgacuacgaggagcugagagagcagcugagcagcgugagcagcuucgagagauucgagaucuuccccaagaccagcagcuggcccaaccacgacagcaacaagggcgugaccgccgccugcccccacgccggcgccaagagcuucuacaagaaccugaucuggcuggugaagaagggcaacagcuaccccaagaucagcaagagcuacaucaacgacaagggcaaggaggugcuggugcuguggggcauccaccaccccagcaccaccgccgaccagcagagccuguaccagaacgccgacaccuacguguucgugggcaccagcagauacagcaagaaguucaagcccgagaucgccaucagacccaaggugagagaccaggagggcagaaugaacuacuacuggacccugguggagcccggcgacaagaucaccuucgaggccaccggcaaccugguggugcccagauacgccuucgccauggagagaaacgccggcagcggcaucaucaucagcgacacccccgugcacgacugcaacaccaccugccagacccccaagggcgccaucaacaccagccugcccuuccagaacauccaccccaucaccaucggcagaugccccaaguacgugaagagcaccaagcugagacuggccaccggccugagaaacgugcccagcauccagagcagaggccuguucggcgccaucgccggcuucaucgagggcggcuggaccggcaugguggacggcugguacggcuaccaccaccagaacgagcagggcagcggcuacgccgccgaccugaagagcacccagaacgccaucgacaagaucaccaacaaggugaacagcgugaucgagaagaugaacacccaguucaccgccgugggcaaggaguucaaccaccuggagaagagaaucgagaaccugaacaagaagguggacgacggcuuccuggacaucuggaccuacaacgccgagcugcuggugcugcuggagaacgagagaacccuggacuaccacgacagcaacgugaagaaccuguacgagaaggugagaaaccagcugaagaacaacgccaaggagaccggcaacggcugcuucgaguucuaccacaagugcgacaacaccugcauggagagcgugaagaacggcaccuacgacuaccccaaguacagcgaggaggccaagcugaacagagaggugaucgacggcgugaagcuggagagcaccagaaucuaccagauccuggccaucuacagcaccguggccagcagccuggugcugguggugagccugggcgccaucagcuucuggaugugcagcaacggcagccugcagugcagaaucugcaucuga

SEQ ID NO: 169642 - RNA, 1701 nt, Artificial Sequence
  derived and/or modified CDS sequence (opt4) from hemagglutinin__InfluenzaA__AFN19905
augaaggccauccugguggugcugcuguacaccuucgccaccgccaacgccgacacccugugcaucggcuaccacgccaacaacagcaccgacaccguggacaccgugcuggagaagaacgugaccgugacccacagcgugaaccugcuggaggacaagcacaacggcaagcugugcaagcugagaggcguggccccccugcaccugggcaagugcaacaucgccggcuggauccugggcaaccccgagugcgagagccugagcaccgccagcagcuggagcuacaucguggagaccagcagcagcgacaacggcaccugcuaccccggcgacuucaucgacuacgaggagcugagagagcagcugagcagcgugagcagcuucgagagauucgagaucuuccccaagaccagcagcuggcccaaccacgacagcaacaagggcgugaccgccgccugcccccacgccggcgccaagggcuucuacaagaaccugaucuggcuggugaagaagggcaacagcuaccccaagcugagcaagagcuacaucaacgacaagggcaaggaggugcuggugcuguggggcauccaccaccccagcaccaccgccgaccagcagagccuguaccagaacgccgacaccuacguguucgugggcaccagcagauacagcaagaaguucaagcccgagaucgccaucagacccaaggugagagaccaggagggcagaaugaacuacuacuggacccugguggagcccggcgacaagaucaccuucgaggccaccggcaaccugguggugcccagauacgccuucgccauggagagaaacgccggcagcggcaucaucaucagcgacacccccgugcacgacugcaacaccaccugccagacccccaagggcgccaucaacaccagccugcccuuccagaacauccaccccaucaccaucggcaagugccccaaguacgugaagagcaccaagcugagacuggccaccggccugagaaacgugcccagcauccagagcagaggccuguucggcgccaucgccggcuucaucgagggcggcuggaccggcaugguggacggcugguacggcuaccaccaccagaacgagcagggcagcggcuacgccgccgaccugaagagcacccagaacgccguggacaagaucaccaacaaggugaacagcgugaucgagaagaugaacacccaguucaccgccgugggcaaggaguucaaccaccuggagaagagaaucgagaaccugaacaagaagguggacgacggcuuccuggacaucuggaccuacaacgccgagcugcuggugcugcuggagaacgagagaacccuggacuaccacgacagcaacgugaagaaccuguacgagaaggugagaaaccagcugaagaacaacgccaaggagaucggcaacggcugcuucgaguucuaccacaagugcgacaacaccugcauggagagcgugaagaacggcaccuacgacuaccccaaguacagcgaggaggccaagcugaacagagagaagaucgacggcgugaagcuggagagcaccagaaucuaccagauccuggccaucuacagcaccguggccagcagccuggugcugaucgugagccugggcgccaucagcuucuggaugugcagcaacggcagccugcagugcagaaucugcaucuga

SEQ ID NO: 169643 - RNA, 1701 nt, Artificial Sequence
  derived and/or modified CDS sequence (opt4) from hemagglutinin__InfluenzaA__AFN19915
augaaggccauccugguggugcugcuguacaccuucgccaccgccaacgccgacacccugugcaucggcuaccacgccaacaacagcaccgacaccguggacaccgugcuggagaagaacgugaccgugacccacagcgugaaccugcuggaggacaagcacaacggcaagcugugcaagcugagaggcguggccccccugcaccugggcaagugcaacaucgccggcuggauccugggcaaccccgagugcgagagccugagcaccgccagcagcuggagcuacaucguggagaccagcagcagcgacaacggcaccugcuaccccggcgacuucaucaacuacgaggagcugagagagcagcugagcagcgugagcagcuucgagagauucgagaucuuccccaagaccagcagcuggcccaaccacgacagcaacaagggcgugaccgccgccugcccccaggccggcgccaagagcuucuacaagaaccugaucuggcuggugaagaagggcaacagcuaccccaagcugagcagcagcuacaucaacgacaagggcaaggaggugcuggugcuguggggcauccaccaccccagcaccagcgccgaccagcagagccuguaccagaacgccgacgccuacguguucgugggcaccagcgaguacagcaagaaguucaagcccgagaucgccgugagacccaaggugagagaccaggagggcagaaugaacuacuacuggacccugguggagcccggcgacaagaucaccuucgaggccaccggcaaccugcuggugcccagauacgccuucgccauggagagaaacgccggcagcggcaucaucaucagcgacacccccgugcacgacugcaacaccaccugccagacccccaagggcgccaucaacaccagccugcccuuccagaacauccaccccaucaccaucggcaagugccccaaguacgugaagagcaccaagcugagacuggccaccggccugagaaacgugcccagcauccagagcagaggccuguucggcgccaucgccggcuucaucgagggcggcuggaccggcaugguggacggcugguacggcuaccaccaccagaacgcccagggcagcggcuacgccgccgaccugaagagcacccagaacgccaucgacaagaucaccaacaaggugaacagcgugaucgagaagaugaacacccaguucaccgccgugggcaaggaguucaaccaccuggagaagagaaucgagaaccugaacaagaagguggacgacggcuuccuggacaucuggaccuacaacgccgagcugcuggugcugcuggagaacgagagaacccuggacuaccacgacagcaacgugaagaaccuguacgagaaggugagaagccagcugaagaacaacgccaaggagaucggcaacggcugcuucgaguucuaccacaagugcgacaacaccugcauggagagcgugaagaacggcaccuacgacuaccccaaguacagcgaggaggccaagcugaacagagaggagaucgacggcgugaagcuggagagcaccagaaucuaccagauccuggccaucuacagcaccguggccagcagccuggugcugguggugagccugggcgccaucagcuucuggaugugcagcaacggcagccugcagugcagaaucugcaucuga

SEQ ID NO: 169644 - RNA, 1701 nt, Artificial Sequence
  derived and/or modified CDS sequence (opt4) from hemagglutinin__InfluenzaA__AFN19922
augaaggccauccuggugguggugcuguacaccuucgccaccgccaacgccgacacccugugcaucggcuaccacgccaacaacagcaccgacaccguggacaccgugcuggagaagaacgugaccgugacccacagcgugaaccugcuggaggacaagcacaacggcaagcugugcaagcugagaggcguggccccccugcaccugggcaagugcaacaucgccggcuggauccugggcaaccccgagugcgagagccugagcaccgccagcagcuggagcuacaucguggagaccagcagcagcgacaacggcaccugcuaccccggcgacuucaucgacuacgaggagcugagagagcagcugagcagcgugagcagcuucgagagauucgagaucuuccccaagaccagcagcuggcccaaccacgacagcaacaagggcgugaccgccgccugcccccacgccggcgccaagggcuucuacaagaaccugaucuggcuggugaagaagggcaacagcuaccccaagcugagcagaagcuacaucaacgacaagggcaaggaggugcuggugcuguggggcauccaccaccccagcaccaccgccgaccagcagagccuguaccagaacgccgacaccuacguguucgugggcaccagcagauacagcaagaaguucaagcccgagaucgccaucagacccaaggugagagaccaggagggcagaaugaacuacuacuggacccugguggagcccggcgacaagaucaccuucgaggccaccggcaaccugguggugcccagauacgccuucgccauggagagaaacgccggcagcggcaucaucaucagcgacacccccgcccaggacugcaacaccaccugccagacccccaagggcgccaucaacaccagccugcccuuccagaacauccaccccaucaccaucggcaagugccccaaguacgugaagagcaccaagcugagacuggccaccggccugagaaacgugcccagcauccagagcagaggccuguucggcgccaucgccggcuucaucgagggcggcuggaccggcaugguggacggcugguacggcuaccaccaccagaacgagcagggcagcggcuacgccgccgaccugaagagcacccagaacgccaucgacaagaucaccaacaaggugaacagcgugaucgagaagaugaacacccaguucaccgccgugggcaaggaguucaaccaccuggagaagagaaucgagaaccugaacaagaagguggacgacggcuuccuggacaucuggaccuacaacgccgagcugcuggugcugcuggagaacgagagaacccuggacuaccacgacagcaacgugaagaaccuguacgagaaggugagaaaccagcugaagaacaacgccaaggagaucggcaacggcugcuucgaguucuaccacaagugcgacaacaccugcauggagagcgugaagaacggcaccuacgacuaccccaaguacagcgaggaggccaagcugaacagagaggagaucgacggcgugaagcuggagagcaccagaaucuaccagauccuggccaucuacagcaccguggccagcagccuggugcugguggugagccugggcgccaucagcuucuggaugugcagcaacggcagccugcagugcagaaucugcaucuga

SEQ ID NO: 169645 - RNA, 1701 nt, Artificial Sequence; identical to SEQ ID NO: 166514
  derived and/or modified CDS sequence (opt4) from hemagglutinin__InfluenzaA__AFN19931

SEQ ID NO: 169646 - RNA, 1701 nt, Artificial Sequence
  derived and/or modified CDS sequence (opt4) from hemagglutinin__InfluenzaA__AFN19941
augaaggccauccugguggugcugcuguacaccuucgccaccgccaacgccgacacccugugcaucggcuaccacgccaacaacagcaccgacaccguggacaccgugcuggagaagaacgugaccgugacccacagcgugaaccugcuggaggacaagcacaacggcaagcugugcaagcugagaggcguggccccccugcaccugggcaagugcaacaucgccggcuggauccugggcaaccccgagugcgagagccugagcaccgccagcagcuggagcuacaucguggagaccagcaucagcgacaacggcaccugcuaccccggcgacuucaucaacuacgaggagcugagagagcagcugagcagcgugagcagcuucgagagauucgagaucuuccccaagaccagcagcuggcccaaccacgacagcaacaagggcgugaccgccgccugcccccaggccggcgccaagagcuucuacaagaaccugaucuggcuggugaagaagggcaacagcuaccccaagcugagcaagagcuacaucaacgacaagggcaaggaggugcuggugcuguggggcauccaccaccccagcaccagcgccgaccagcagagccuguaccagaacgccgacgccuacguguucgugggcaccagcaaguacagcaagaaguucaagcccgagaucgccgugagacccaaggugagagaccaggagggcagaaugaacuacuacuggacccugguggagcccggcgacaagaucaccuucgaggccaccggcaaccugcuggugcccagauacgccuucgccauggagagaaacgccggcagcggcaucaucaucagcgacacccccgugcacgacugcaacaccaccugccagacccccaagggcgccaucaacaccagccugcccuuccagaacauccaccccaucaccaucggcaagugccccaaguacgugaagagcaccaagcugagacuggccaccggccugagaaacgugcccagcauccagagcagaggccuguucggcgccaucgccggcuucaucgagggcggcuggaccggcaugguggacggcugguacggcuaccaccaccagaacgcccagggcagcggcuacgccgccgaccugaagagcacccagaacgccaucgacaagaucaccaacaaggugaacagcgugaucgagaagaugaacacccaguucaccgccgugggcaaggaguucaaccaccuggagaagagaaucgagaaccugaacaagaagguggacgacggcuuccuggacaucuggaccuacaacgccgagcugcuggugcugcuggagaacgagagaacccuggacuaccacgacagcaacgugaagaaccuguacgagaaggugagaagccagcugaagaacaacgccaaggagaucggcaacggcugcuucgaguucuaccacaagugcgacaacaccugcauggagagcgugaagaacggcaccuacgacuaccccaaguacagcgaggaggccaagcugaacagagaggagaucgacggcgugaagcuggagagcaccagaaucuaccagauccuggccaucuacagcaccguggccagcagccuggugcugguggugagccugggcgccaucagcuucuggaugugcagcaacggcagccugcagugcagaaucugcaucuga

SEQ ID NO: 169647 - RNA, 1701 nt, Artificial Sequence
  derived and/or modified CDS sequence (opt4) from hemagglutinin__InfluenzaA__AFN19951
augaaggccauccugguggugcugcuguacaccuucgccaccgccaacgccgacacccugugcaucggcuaccacgccaacaacagcaccgacaccguggacaccgugcuggagaagaacgugaccgugacccacagcgugaaccugcuggaggacaagcacaacggcaagcugugcaagcugagaggcguggccccccugcaccugggcaagugcaacaucgccggcuggauccugggcaaccccgagugcgagagccugagcaccgccagcagcuggagcuacaucguggagaccagcagcagcgacaacggcaccugcuaccccggcgacuucaucgacuacgaggagcugagagagcagcugagcagcgugagcagcuucgagagauucgagaucuuccccaagaccagcagcuggcccaaccacgacagcaacaagggcgugaccgccgccugcccccacgccggcgccaagagcuucuacaagaaccugaucuggcuggugaagaagggcaacagcuaccccaagcugagcaagagcuacaucaacgacaagggcaaggaggugcuggugcuguggggcauccaccaccccagcaccaccgccgaccagcagagccuguaccagaacgccgacaccuacguguucgugggcaccagcagauacagcaagaaguucaagcccgagaucgccaucagacccaaggugagagaccaggagggcagaaugaacuacuacuggacccugguggagcccggcgacaagaucaccuucgaggccaccggcaaccugguggugcccagauacgccuucgccauggagagaaacgccggcagcggcaucaucaucagcgacacccccgugcacgacugcaacaccaccugccagacccccaagggcgccaucaacaccagccugcccuuccagaacauccaccccaucaccaucggcaagugccccaaguacgugaagagcaccaagcugagacuggccaccggccugagaaacgugcccagcauccagagcagaggccuguucggcgccaucgccggcuucaucgagggcggcuggaccggcaugguggacggcugguacggcuaccaccaccagaacgagcagggcagcggcuacgccgccgaccugaagagcacccagaacgccaucgacaagaucaccaacaaggugaacagcgugaucgagaagaugaacacccaguucaccgccgugggcaaggaguucaaccaccuggagaagagaaucgagaaccugaacaagaagguggacgacggcuuccuggacaucuggaccuacaacgccgagcugcuggugcugcuggagaacgagagaacccuggacuaccacgacagcaacgugaagaaccuguacgagaaggugagaaaccagcugaagaacaacgccaaggagaccggcaacggcugcuucgaguucuaccacaagugcgacaacaccugcauggagagcgugaagaacggcaccuacgacuaccccaaguacagcgaggaggccaagcugaacagagaggagaucgacggcgugaagcuggagagcaccagaaucuaccagauccuggccaucuacagcaccgccgccagcagccuggugcugguggugagccugggcgccaucagcuucuggaugugcagcaacggcagccugcagugcagaaucugcaucuga

SEQ ID NO: 169648 - RNA, 1701 nt, Artificial Sequence; identical to SEQ ID NO: 166875
  derived and/or modified CDS sequence (opt4) from hemagglutinin__InfluenzaA__AFN19966

SEQ ID NO: 169649 - RNA, 1701 nt, Artificial Sequence
  derived and/or modified CDS sequence (opt4) from hemagglutinin__InfluenzaA__AFN19972
augaaggccauccugguggugcugcuguacaccuucgccaccgccaacgccgacacccugugcaucggcuaccacgccaacaacagcaccgacaccguggacaccgugcuggagaagaacgugaccgugacccacagcgugaaccugcuggaggacaagcacaacggcaagcugugcaagcugagaggcguggccccccugcaccugggcaagugcaacaucgccggcuggauccugggcaaccccgagugcgagagccugagcaccgccagcagcuggagcuacaucguggagaccagcagcagcgacaacggcaccugcuaccccggcgacuucaucgacaacgaggagcugagagagcagcugagcagcgugagcagcuucgagagauucgagaucuuccccaagaccagcagcuggcccaaccacgacagcaacaagggcgugaccgccgccugcccccacgccggcgccaagagcuucuacaagaaccugaucuggcuggugaagaagggcaacagcuaccccaagcugagcaagagcuacaucaacgacaagggcaaggaggugcuggugcuguggggcauccaccaccccagcaccaccgccgaccagcagagccuguaccagaacgccgacaccuacguguucgugggcaccagcagauacagcaagaaguucaagcccgagaucgccaucagacccaaggugagagaccaggagggcagaaugaacuacuacuggacccugguggagcccggcgacaagaucaccuucgaggccaccggcaaccugguggugcccagauacgccuucgccauggagagaaacgccggcagcggcaucaucaucagcgacacccccgugcacgacugcaacaccaccugccagacccccaagggcgccaucaacaccagccugcccuuccagaacauccaccccaucaccaucggcaagugccccaaguacgugaagagcaccaagcugagacuggccaccggccugagaaacgugcccagcauccagagcagaggccuguucggcgccaucgccggcuucaucgagggcggcuggaccggcaugguggacggcugguacggcuaccaccaccagaacgagcagggcagcggcuacgccgccgaccugaagagcacccagaacgccaucgacaagaucaccaacaaggugaacagcgugaucgagaagaugaacacccaguucaccgccgugggcaaggaguucaaccaccuggagaagagaaucgagaaccugaacaagaagguggacgacggcuuccuggacaucuggaccuacaacgccgagcugcuggugcugcuggagaacgagagaacccuggacuaccacgacagcaacgugaagaaccuguacgagaaggugagaaaccagcugaagaacaacgccaaggagaucggcaacggcugcuucgaguucuaccacaagugcgacaacaccugcauggagagcgugaagaacggcaccuacgacuaccccaaguacagcgaggaggccaagcugaacagagaggagaucgacggcgugaagcuggagagcaccagaguguaccagauccuggccaucuacagcaccguggccagcagccuggugcugguggugagccugggcgccaucagcuucuggaugugcagcaacggcagccugcagugcagaaucugcaucuga

SEQ ID NO: 169650 - RNA, 1701 nt, Artificial Sequence
  derived and/or modified CDS sequence (opt4) from hemagglutinin__InfluenzaA__AFN19978
augaaggccauccugguggugaugcuguacaccuucgccaccgccaacgccgacacccugugcaucggcuaccacgccaacaacagcaccgacaccguggacaccgugcuggagaagaacgugaccgugacccacagcgugaaccugcuggaggacaagcacaacggcaagcugugcaagcugagaggcguggccccccugcaccugggcaagugcaacaucgccggcuggauccugggcaaccccgagugcgagagccugagcaccgccagcagcuggagcuacaucguggagaccagcagcagcgacaacggcaccugcuaccccggcgacuucaucgacuacgaggagcugagagagcagcugagcagcgugagcagcuucgagagauucgagaucuuccccaagaccagcagcuggcccaaccacgacagcaacaagggcgugaccgccgccugcccccacgccggcgccaagggcuucuacaagaaccugaucuggcuggugaagaagggcaacagcuaccccaagcugagcaagagcuacaucaacgacaagggcaaggaggugcuggugcuguggggcauccaccaccccagcaccaccgccgaccagcagagccuguaccagaacgccgacaccuacguguucgugggcaccagcagauacagcaagaaguucaagcccgagaucgccaucagacccaaggugagagaccaggagggcagaaugaacuacuacuggacccugguggagcccggcgacaagaucaccuucgaggccaccggcaaccugguggugcccagauacgccuucgccauggagagaaacgccggcagcggcaucaucaucagcgacacccccgugcacgacugcaacaccaccugccagacccccaagggcgccaucaacaccagccugcccuuccagaacauccaccccaucaccaucggcaagugccccaaguacgugaagagcaccaagcugagacuggccaccggccugagaaacgugcccagcauccagagcagaggccuguucggcgccaucgccggcuucaucgagggcggcuggaccggcaugguggacggcugguacggcuaccaccaccagaacgagcagggcagcggcuacgccgccgaccugaagagcacccagaacgccaucgacaagaucaccaacaaggugaacagcgugaucgagaagaugaacacccaguucaccgccgugggcaaggaguucaaccaccuggagaagagaaucgagaaccugaacaagaagguggacgacggcuuccuggacaucuggaccuacaacgccgagcugcuggugcugcuggagaacgagagaacccuggacuaccacgacagcaacgugaagaaccuguacgagaaggugagaaaccagcugaagaacaacgccaaggagaucggcaacggcugcuucgaguucuaccacaagugcgacaacaccugcauggagagcgugaagaacggcaccuacgacuaccccaaguacagcgaggaggccaagcugaacagagagaagaucgacggcgugaagcuggagagcaccagaaucuaccagauccuggccaucuacagcaccguggccagcagccuggugcugguggugagccugggcgccaucagcuucuggaugugcagcaacggcagccugcagugcagaaucugcaucuga

SEQ ID NO: 169651 - RNA, 1701 nt, Artificial Sequence; identical to SEQ ID NO: 166875
  derived and/or modified CDS sequence (opt4) from hemagglutinin__InfluenzaA__AFN19983

SEQ ID NO: 169652 - RNA, 1701 nt, Artificial Sequence
  derived and/or modified CDS sequence (opt4) from hemagglutinin__InfluenzaA__AFN19993
augaaggccauccugguggugcugcuguacaccguggccaccaccaacgccgacacccugugcaucggcuaccacgccaacaacagcaccgacaccguggacaccgugcuggagaagaacgugaccgugacccacagcgugaaccugcuggaggacaagcacaacggcaagcugugcaagcugagaggcguggccccccugcaccugggcaagugcaacaucgccggcuggauccugggcaaccccgagugcgagagccugagcaccgccagcagcuggagcuacaucguggagaccagcagcagcgacaacggcaccugcuaccccggcgacuucaucgacuacgaggagcugagagagcagcugagcagcgugagcagcuucgagagauucgagaucuuccccaagaccagcagcuggcccaaccacgacagcaacaagggcgugaccgccgccugcccccacgccggcgccaagggcuucuacaagaaccugaucuggcuggugaagaagggcaacagcuaccccaagcugagcaagagcuacaucaacgacaagggcaaggaggugcuggugcuguggggcauccaccaccccagcaccaccgccgaccagcagagccuguaccagaacgccgacaccuacguguucgugggcaccagcagauacagcaagaaguucaagcccgagaucgccaucagacccaaggugagagaccaggagggcagaaugaacuacuacuggacccugguggagcccggcgacaagaucaccuucgaggccaccggcaaccugguggugcccagauacgccuucgccauggagagaaacgccggcagcggcaucaucaucagcgacacccccgugcacgacugcaacaccaccugccagacccccaagggcgccaucaacaccagccugcccuuccagaacauccaccccaucaccaucggcaagugccccaaguacgugaagagcaccaagcugagacuggccaccggccugagaaacgugcccagcauccagagcagaggccuguucggcgccaucgccggcuucaucgagggcggcuggaccggcaugguggacggcugguacggcuaccaccaccagaacgagcagggcagcggcuacgccgccgaccugaagagcacccagaacgccaucgacaagaucaccaacaaggugaacagcgugaucgagaagaugaacacccaguucaccgccgugggcaaggaguucaaccaccuggagaagagaaucgagaaccugaacaagaagguggacgacggcuuccuggacaucuggaccuacaacgccgagcugcuggugcugcuggagaacgagagaacccuggacuaccacgacagcaacgugaagaaccuguacgagaaggugagaaaccagcugaagaacaacgccaaggagaucggcaacggcugcuucgaguucuaccacaagugcgacaacaccugcauggagagcgugaagaacggcaccuacgacuaccccaaguacagcgaggaggccaagcugaacagagaggagaucgacggcgugaagcuggagagcaccagaaucuaccagauccuggccaucuacagcaccguggccagcagccuggugcugguggugagccugggcgccaucagcuucuggaugugcagcaacggcagccugcagugcagaaucugcaucuga

SEQ ID NO: 169653 - RNA, 1701 nt, Artificial Sequence; identical to SEQ ID NO: 166875
  derived and/or modified CDS sequence (opt4) from hemagglutinin__InfluenzaA__AFN20000

SEQ ID NO: 169654 - RNA, 1701 nt, Artificial Sequence; identical to SEQ ID NO: 166882
  derived and/or modified CDS sequence (opt4) from hemagglutinin__InfluenzaA__AFN20006

SEQ ID NO: 169655 - RNA, 1701 nt, Artificial Sequence; identical to SEQ ID NO: 166514
  derived and/or modified CDS sequence (opt4) from hemagglutinin__InfluenzaA__AFN20012

SEQ ID NO: 169656 - RNA, 1701 nt, Artificial Sequence
  derived and/or modified CDS sequence (opt4) from hemagglutinin__InfluenzaA__AFN20018
augaaggccauccugguggugcugcuguacaccuucgccaccgccaacgccgacacccugugcaucggcuaccacgccaacaacagcaccgacaccguggacaccgugcuggagaagaacgugaccgugacccacagcgugaaccugcuggaggacaagcacaacggcaagcugugcaagcugagaggcguggccccccugcaccugggcaagugcaacaucgccggcuggauccugggcaaccccgagugcgagagccugagcaccgccagcagcuggagcuacaucguggagaccagcagcagcgacaacggcaccugcuaccccggcgacuucaucaacuacgaggagcugagagagcagcugagcagcgugagcagcuucgagagauucgagaucuuccccaagaccagcagcuggcccaaccacgacagcaacaagggcgugaccgccgccugcccccaggccggcgccaagagcuucuacaagaaccugaucuggcuggugaagaagggcaacagcuaccccaagcugagcaacagcuacaucaacgacaagggcaaggaggugcuggugcuguggggcauccaccaccccagcaccagcgccgaccagcagagccuguaccagaacgccgacgccuacguguucgugggcaccagcaaguacagcaagaaguucaagcccgagaucgccgugagacccaaggugagagaccaggagggcagaaugaacuacuacuggacccugguggagcccggcgacaagaucaccuucgaggccaccggcaaccugcuggugcccagauacgccuucgccauggagagaaacgccggcagcggcaucaucaucagcgacacccccgugcacgacugcaacaccaccugccagacccccaagggcgccaucaacaccagccugcccuuccagaacauccaccccaucaccaucggcaagugccccaaguacgugaagagcaccaagcugagacuggccaccggccugagaaacgugcccagcauccagagcagaggccuguucggcgccaucgccggcuucaucgagggcggcuggaccggcaugguggacggcugguacggcuaccaccaccagaacgcccagggcagcggcuacgccgccgaccugaagagcacccagaacgccaucgacaagaucaccaacaaggugaacagcgugaucgagaagaugaacacccaguucaccgccgugggcaaggaguucaaccaccuggagaagagaaucgagaaccugaacaagaagguggacgacggcuuccuggacaucuggaccuacaacgccgagcugcuggugcugcuggagaacgagagaacccuggacuaccacgacagcaacgugaagaaccuguacgagaaggugagaagccagcugaagaacaacgccaaggagaucggcaacggcugcuucgaguucuaccacaagugcgacaacaccugcauggagagcgugaagaacggcaccuacgacuaccccaaguacagcgaggaggccaagcugaacagagaggagaucgacggcgugaagcuggagagcaccagaaucuaccagauccuggccaucuacagcaccguggccagcagccuggugcugguggugagccugggcgccaucagcuucuggaugugcagcaacggcagccugcagugcagaaucugcaucuga

SEQ ID NO: 169657 - RNA, 1701 nt, Artificial Sequence; identical to SEQ ID NO: 166884
  derived and/or modified CDS sequence (opt4) from hemagglutinin__InfluenzaA__AFN20019

SEQ ID NO: 169658 - RNA, 1701 nt, Artificial Sequence; identical to SEQ ID NO: 166514
  derived and/or modified CDS sequence (opt4) from hemagglutinin__InfluenzaA__AFN20021

SEQ ID NO: 169659 - RNA, 1701 nt, Artificial Sequence; identical to SEQ ID NO: 166884
  derived and/or modified CDS sequence (opt4) from hemagglutinin__InfluenzaA__AFN20034

SEQ ID NO: 169660 - RNA, 1701 nt, Artificial Sequence; identical to SEQ ID NO: 166875
  derived and/or modified CDS sequence (opt4) from hemagglutinin__InfluenzaA__AFN20040

SEQ ID NO: 169661 - RNA, 1701 nt, Artificial Sequence; identical to SEQ ID NO: 169647
  derived and/or modified CDS sequence (opt4) from hemagglutinin__InfluenzaA__AFN20046

SEQ ID NO: 169662 - RNA, 1701 nt, Artificial Sequence; identical to SEQ ID NO: 166884
  derived and/or modified CDS sequence (opt4) from hemagglutinin__InfluenzaA__AFN20052

SEQ ID NO: 169663 - RNA, 1701 nt, Artificial Sequence; identical to SEQ ID NO: 166884
  derived and/or modified CDS sequence (opt4) from hemagglutinin__InfluenzaA__AFN20061

SEQ ID NO: 169664 - RNA, 1701 nt, Artificial Sequence
  derived and/or modified CDS sequence (opt4) from hemagglutinin__InfluenzaA__AFN20076
augaaggccauccugguggugcugcuguacaccuucgccaccgccaacgccgacacccugugcaucggcuaccacgccaacaacagcaccgacaccguggacaccgugcuggagaagaacgugaccgugacccacagcgugaaccugcuggaggacaagcacaacggcaagcugugcaagcugagaggcguggccccccugcaccugggcaagugcaacaucgccggcuggauccugggcaaccccgacugcgagagccugagcaccgccagcagcuggagcuacaucguggagaccagcagcagcgacaacggcaccugcuaccccggcgacuucaucgacuacgaggagcugagagagcagcugagcagcgugagcagcuucgagagauucgagaucuuccccaagaccagcagcuggcccaaccacgacagcaacaagggcgugaccgccgccugcccccacgccggcgccaagagcuucuacaagaaccugaucuggcuggugaagaagggcaacagcuaccccaagcugagcaagagcuacaucaacgacaagggcaaggaggugcuggugcuguggggcauccaccaccccagcaccaccgccgaccagcagagccuguaccagaacgccgacaccuacguguucgugggcaccagcagauacagcaagaaguucaagcccgagaucgccaucagacccaaggugagagaccaggagggcagaaugaacuacuacuggacccugguggagcccggcgacaagaucaccuucgaggccaccggcaaccugguggugcccagauacgccuucgccauggagagaaacgccggcagcggcaucaucaucagcgacacccccgugcacgacugcaacaccaccugccagacccccaagggcgccaucaacaccagccugcccuuccagaacauccaccccaucaccaucggcaagugccccaaguacgugaagagcaccaagcugagacuggccaccggccugagaaacgugcccagcauccagagcagaggccuguucggcgccaucgccggcuucaucgagggcggcuggaccggcaugguggacggcugguacggcuaccaccaccagaacgagcagggcagcggcuacgccgccgaccugaagagcacccagaacgccaucgacaagaucaccaacaaggugaacagcgugaucgagaagaugaacacccaguucaccgccgugggcaaggaguucaaccaccuggagaagagaaucgagaaccugaacaagaagguggacgacggcuuccuggacaucuggaccuacaacgccgagcugcuggugcugcuggagaacgagagaacccuggacuaccacgacagcaacgugaagaaccuguacgagaaggugagaaaccagcugaagaacaacgccaaggagaccggcaacggcugcuucgaguucuaccacaagugcgacaacaccugcauggagagcgugaagaacggcaccuacgacuaccccaaguacagcgaggaggccaagcugaacagagaggagaucgacggcgugaagcuggagagcaccagaaucuaccagauccuggccaucuacagcaccguggccagcagccuggugcugguggugagccugggcgccaucagcuucuggaugugcagcaacggcagccugcagugcagaaucugcaucuga

SEQ ID NO: 169665 - RNA, 1701 nt, Artificial Sequence
  derived and/or modified CDS sequence (opt4) from hemagglutinin__InfluenzaA__AFN20081
augaaggccauccugguggugcugcuguacaccuucgccaccgccaacgccgacacccugugcaucggcuaccacgccaacaacagcaccgacaccguggacaccgugcuggagaagaacgugaccgugacccacagcgugaaccugcuggaggacaagcacaacggcaagcugugcaagcugagaggcguggccccccugcaccugggcaagugcaacaucgccggcuggauccugggcaaccccgagugcgagagccugagcaccgccagcagcuggagcuacaucguggagaccagcagcagcgacaacggcaccugcuaccccggcgacuucaucgacuacgaggagcugagagagcagcugagcagcgugagcagcuucgagagauucgagaucuuccccaagaccagcagcuggcccaaccacgacagcaacaagggcgugaccgccgccugcccccacgccggcgccaagagcuucuacaagaaccugaucuggcuggugaagaagggcaacagcuaccccaagaucagcaagagcuacaucaacgacaagggcaaggaggugcuggugcuguggggcauccaccaccccagcaccaccgccgaccagcagagccuguaccagaacgccgacaccuacguguucgugggcaccagcagauacagcaagaaguucaagcccgagaucgccaucagacccaaggugagagaccaggagggcagaaugaacuacuacuggacccugguggagcccggcgacaagaucaccuucgaggccaccggcaaccuggugauccccagauacgccuucgccauggagagaaacgccggcagcggcaucaucaucagcgacacccccgugcacgacugcaacaccaccugccagacccccaagggcgccaucaacaccagccugcccuuccagaacauccaccccaucaccaucggcagaugccccaaguacgugaagagcaccaagcugagacuggccaccggccugagaaacgugcccagcauccagagcagaggccuguucggcgccaucgccggcuucaucgagggcggcuggaccggcaugguggacggcugguacggcuaccaccaccagaacgagcagggcagcggcuacgccgccgaccugaagagcacccagaacgccaucgacaagaucaccaacaaggugaacagcgugaucgagaagaugaacacccaguucaccgccgugggcaaggaguucaaccaccuggagaagagaaucgagaaccugaacaagaagguggacgacggcuuccuggacaucuggaccuacaacgccgagcugcuggugcugcuggagaacgagagaacccuggacuaccacgacagcaacgugaagaaccuguacgagaaggugagaaaccagcugaagaacaacgccaaggagaccggcaacggcugcuucgaguucuaccacaagugcgacaacaccugcauggagagcgugaagaacggcaccuacgacuaccccaaguacagcgaggaggccaagcugaacagagaggugaucgacggcgugaagcuggagagcaccagaaucuaccagauccuggccaucuacagcaccguggccagcagccuggugcugguggugagccugggcgccaucagcuucuggaugugcagcaacggcagccugcagugcagaaucugcaucuga

SEQ ID NO: 169666 - RNA, 1701 nt, Artificial Sequence; identical to SEQ ID NO: 166884
  derived and/or modified CDS sequence (opt4) from hemagglutinin__InfluenzaA__AFN20092

SEQ ID NO: 169667 - RNA, 1701 nt, Artificial Sequence; identical to SEQ ID NO: 169646
  derived and/or modified CDS sequence (opt4) from hemagglutinin__InfluenzaA__AFN20099

SEQ ID NO: 169668 - RNA, 1701 nt, Artificial Sequence
  derived and/or modified CDS sequence (opt4) from hemagglutinin__InfluenzaA__AFN20112
augaaggccauccugguggugcugcuguacaccuucgccaccgccaacgccgacacccugugcaucggcuaccacgccaacaacagcaccgacaccguggacaccgugcuggagaagaacgugaccgugacccacagcgugaaccugcuggaggacaagcacaacggcaagcugugcaagcugagaggcguggccccccugcaccugggcaagugcaacaucgccggcuggauccugggcaaccccgagugcaagagccugagcaccgccagcagcuggagcuacaucguggagaccagcagcagcgacaacggcaccugcuaccccggcgacuucaucgacuacgaggagcugagagagcagcugagcagcgugagcagcuucgagagauucgagaucuuccccaagaccagcagcuggcccaaccacaaccccaacaagggcgugaccgccgccugcccccacgccggcgccaagagcuucuacaagaaccugaucuggcuggugaagaacggcaacagcuaccccaagcugaacaccagcuacaucaacgacaagggcaaggaggugcuggugcuguggggcauccaccaccccagcaccagcgccgaccagcagagccuguaccagaacgccgacgccuacgccuucgugggcaccagcagauacagcaagaaguucaagcccgagaucgccaucagacccaaggugagagaccaggagggcagaaugaacuacuacuggacccugguggagcccggcgacaagaucaccuucgaggccaccggcaaccugguggugcccagauacgccuucgccauggagagaaacgccggcagcggcaucaucaucagcgacaccagcgugcacgacugcaacaccaccugccagacccccaagggcgccaucaacaccagccugcccuuccagaacgugcaccccaucaccaucggcaagugccccaaguacgugaagagcaccaagcugagacuggccaccggccugagaaacgugcccagcauccagagcagaggccuguucggcgccaucgccggcuucaucgagggcggcuggaccggcaugguggacggcugguacggcuaccaccaccagaacgagcagggcagcggcuacgccgccgaccugaagagcacccagaacgccuucgacaagaucaccaacaaggugaacagcgugaucgagaagaugaacacccaguucaccgccgugggcaaggaguucaaccaccuggagaagagaaucgagaaccugaacaagaagguggacgacggcuuccuggacaucuggaccuacaacgccgagcugcuggugcugcuggagaacgagagaacccuggacuaccacgacagcaacgugaagaaccuguacgagaaggugagaagccagcugaagaccaacgccaaggagaucggcaacggcugcuucgaguucuaccacaagugcgacaacaccugcauggagagcgugaagaacggcaccuacgacuaccccaaguacagcgaggaggccaagcugaacagagaggagaucgacggcgugaagcuggagagcaccagaaucuaccagauccuggccaucuacagcaccguggccagcagccuggugcugguggugagccugggcgccaucagcuucuggaugugcagcaacggcagccugcagugcagaaucugcaucuga

SEQ ID NO: 169669 - RNA, 1701 nt, Artificial Sequence
  derived and/or modified CDS sequence (opt4) from hemagglutinin__InfluenzaA__AFN87924
augaaggccauccugguggugcugcuguacaccuucgccaccgccaacgccgacacccugugcaucggcuaccacgccaacaacagcaccgacaccguggacaccgugcuggagaagaacgugaccgugacccacagcgugaaccugcuggaggacaagcacaacggcaagcugugcaagcugagaggcguggccccccugcaccugggcaagugcaacaucgccggcuggauccugggcaaccccgagugcgagagccugagcaccgccagcagcuggagcuacaucguggagaccagcagcagcgacaacggcaccugcuaccccggcgacuucaucgacuacgaggagcugagagagcagcugagcagcgugagcagcuucgagagauucgagaucuuccccaagaccagcagcuggcccaaccacgaccccaacaagggcgugaccgccgccugcccccacgccggcgccaagagcuucuacaagaaccugaucuggcuggugaagaagggcaacagcuaccccaagcugagcaccagcuacaucaacgacaagagaaaggaggugcuggugcuguggggcauccaccaccccagcaccagcgccgaccagcagagccuguaccagaacgccgacgccuacgccuucgugggcaccagcagauacagcaagaaguucaagcccgagaucgccaucagacccaaggugagagaccaggagggcagaaugaacuacuacuggacccugguggagcccggcgacaagaucaccuucgaggccaccggcaaccugguggugcccagauacgccuucgccauggagagaaacgccggcagcggcaucaucaucagcgacaccagcgugcacgacugcaacaccaccugccagacccccaagggcgccaucaacaccagccugcccuuccagaacgugcaccccaucaccaucggcaagugccccaaguacgugaagagcaccaagcugagacuggccaccggccugagaaacgugcccagcauccagagcagaggccuguucggcgccaucgccggcuucaucgagggcggcuggaccggcaugguggacggcugguacggcuaccaccaccagaacgagcagggcagcggcuacgccgccgaccugaagagcacccagaacgccuucgacaagaucaccaacaaggugaacagcgugaucgagaagaugaacacccaguucaccgccgugggcaaggaguucaaccaccuggagaagagaaucgagaaccugaacaagaagguggacgacggcuuccuggacaucuggaccuacaacgccgagcugcuggugcugcuggagaacgagagaacccuggacuaccacgacagcaacgugaagaaccuguacgagaaggugagaagccagcugaagaacaacgccaaggagaucggcaacggcugcuucgaguucuaccacaagugcgacaacaccugcauggagagcgugaagaacggcaccuacgacuaccccaaguacagcgaggaggccaagcugaacagagaggagaucgacggcgugaagcuggagagcaccagaaucuaccagauccuggccaucuacagcaccguggccagcagccuggugcugguggugagccugggcgccaucagcuucuggaugugcagcaacggcagccugcagugcagaaucugcaucuga

SEQ ID NO: 169670 - RNA, 1701 nt, Artificial Sequence; identical to SEQ ID NO: 162729
  derived and/or modified CDS sequence (opt4) from hemagglutinin__InfluenzaA__AFN87926

SEQ ID NO: 169671 - RNA, 1701 nt, Artificial Sequence
  derived and/or modified CDS sequence (opt4) from hemagglutinin__InfluenzaA__AFN87927
augaaggccauccugguggugcugcuguacaccuucgccaccgccaacgccgacacccugugcaucggcuaccacgccaacaacagcaccgacaccguggacaccgugcuggagaagaacgugaccgugacccacagcgugaaccugcuggaggacaagcacaacggcaagcugugcaagcugagaggcguggccccccugcaccugggcaagugcaacaucgccggcuggauccugggcaaccccgagugcgagagccugagcaccgccagcagcuggagcuacaucguggagaccagcagcagcgacaacggcaccugcuaccccggcgacuucaucgacuacgaggagcugagagagcagcugagcagcgugagcagcuucgagagauucgagaucuuccccaagaccagcagcuggcccaaccacgacagcaacaagggcgugaccgccgccugcccccacgccggcgccaagagcuucuacaagaaccugaucuggcuggugaagaagggcaacagcuaccccaagcugagcaagagcuacaucaacgacaagagaaaggaggugcuggugcuguggggcauccaccaccccagcaccagcgccgaccagcagagccuguaccagaacgccgacgccuacguguucgugggcaccagcagauacagcaagaaguucaagcccgagaucgccaucagacccaaggugagagaccaggagggcagaaugaacuacuacuggacccugguggagcccggcgacaagaucaccuucgaggccaccggcaaccugguggugcccagauacgccuucgccauggagagaaacgccggcagcggcaucaucaucagcggcacccccgugcacgacugcaacaccaccugccagacccccaagggcgccaucaacaccagccugcccuuccagaacauccaccccaucaccaucggcaagugccccaaguacgugaagagcaccaagcugagacuggccaccggccugagaaacgugcccagcauccagagcagaggccuguucggcgccaucgccggcuucaucgagggcggcuggaccggcaugguggacggcugguacggcuaccaccaccagaacgagcagggcagcggcuacgccgccgaccugaagagcacccagaacgccaucgacaagaucaccaacagagugaacagcgugaucgagaagaugaacacccaguucaccgccgugggcaaggaguucaaccaccuggagaagagaaucgagaaccugaacaagaagguggacgacggcuuccuggacaucuggaccuacaacgccgagcugcuggugcugcuggagaacgagagaacccuggacuaccacgacagcaacgugaagaaccuguacgagaaggugagaagccagcugaagaacaacgccaaggagaucggcaacggcugcuucgaguucuaccacaagugcgacaacaccugcauggagagcgugaagaacggcaccuacgacuaccccaaguacagcgaggaggccaagcugaacagagaggagaucgacggcgugaagcuggagagcaccagaaucuaccagauccuggccaucuacagcaccguggccagcagccuggugcugguggugagccugggcgccaucagcuucuggaugugcagcaacggcagccugcagugcagaaucugcaucuga

SEQ ID NO: 169672 - RNA, 1701 nt, Artificial Sequence
  derived and/or modified CDS sequence (opt4) from hemagglutinin__InfluenzaA__AFN87928
augaaggccauccugguggugcugcuguacaccuucgccaccgccaacgccgacacccugugcaucggcuaccacgccaacaacagcaccgacaccguggacaccgugcuggagaagaacgugaccgugacccacagcgugaaccugcuggaggacaagcacaacggcaagcugugcaagcugagaggcguggccccccugcaccugggcaagugcaacaucgccggcuggauccugggcaaccccgagugcgagagccugagcaccgccagcagcuggagcuacaucguggagaccagcagcagcgacaacggcaccugcuaccccggcgacuucaucgacuacgaggagcugagagagcagcugagcagcgugagcagcuucgagagauucgagaucuuccccaagaccagcagcuggcccaaccacgacagcaacaagggcgugaccgccgccugcccccacgccggcgccaagagcuucuacaagaaccugaucuggcuggugaagaagggcaacagcuaccccaagcugagcaagagcuacaucaacgacaagggcaaggaggugcuggugcuguggggcauccaccaccccagcaccagcgccgaccagcagagccuguaccagaacgccgacgccuacguguucgugggcaccagcagauacagcaagaaguucaagcccgagaucgccaucagacccaaggugagagacagagagggcagaaugaacuacuacuggacccugguggagcccggcgacaagaucaccuucgaggccaccggcaaccugguggugcccagauacgccuucgccauggagagaaacgccggcagcggcaucaucaucagcgacacccccgugcacgacugcaacaccaccugccagacccccaagggcgccaucaacaccagccugcccuuccagaacauccaccccaucaccaucggcaagugccccaaguacgugaagagcaccaagcugagacuggccaccggccugagaaacgugcccagcauccagagcagaggccuguucggcgccaucgccggcuucaucgagggcggcuggaccggcaugguggacggcugguacggcuaccaccaccagaacgagcagggcagcggcuacgccgccgaccugaagagcacccagaacgccaucgacaagaucaccaacaaggugaacagcgugaucgagaagaugaacacccaguucaccgccgugggcaaggaguucaaccaccuggagaagagaaucgagaaccugaacaagaagguggacgacggcuuccuggacaucuggaccuacaacgccgagcugcuggugcugcuggagaacgagagaacccuggacuaccacgacagcaacgugaagaaccuguacgagaaggugagaagccagcugaagaacaacgccaaggagaucggcaacggcugcuucgaguucuaccacaagugcgacaacaccugcauggagagcgugaagaacggcaccuacgacuaccccaaguacagcgaggaggccaagcugaacagagaggagaucgacggcgugaagcuggagagcaccagaaucuaccagauccuggccaucuacagcaccguggccagcagccuggugcuggccgugagccugggcgccaucagcuucuggaugugcagcaacggcagccugcagugcagaaucugcaucuga

SEQ ID NO: 169673 - RNA, 1701 nt, Artificial Sequence; identical to SEQ ID NO: 163893
  derived and/or modified CDS sequence (opt4) from hemagglutinin__InfluenzaA__AFN87929

SEQ ID NO: 169674 - RNA, 1701 nt, Artificial Sequence; identical to SEQ ID NO: 163893
  derived and/or modified CDS sequence (opt4) from hemagglutinin__InfluenzaA__AFN87930

SEQ ID NO: 169675 - RNA, 1701 nt, Artificial Sequence
  derived and/or modified CDS sequence (opt4) from hemagglutinin__InfluenzaA__AFN87931
augaaggccauccugguggugcugcuguacaccuucgccaccgccaacgccgacacccugugcaucggcuaccacgccaacaacagcaccgacaccguggacaccgugcuggagaagaacgugaccgugacccacagcgugaaccugcuggaggagaagcacaacggcaagcugugcaagcugagaggcguggccccccugcaccugggcaagugcaacaucgccggcuggauccugggcaaccccgagugcgagagccugagcaccgccagcagcuggagcuacaucguggagaccagcagcagcgacaacggcaccugcuaccccggcgacuucaucgacuacgaggagcugagagagcagcugagcagcgugagcagcuucgagagauucgagaucuuccccaagaccagcagcuggcccaaccacgacagcaacaagggcgugaccgccgccugcccccacgccggcgccaagagcuucuacaagaaccugaucuggcuggugaagaagggcaacagcuaccccaagcugagcaagagcuacaucaacgacaagggcaaggaggugcuggugcuguggggcauccaccaccccagcaccagcgccgaccagcagagcaucuaccagaacgccgacgccuacguguucgugggcaccagcagauacagcaagaaguucaagcccgagaucgccaucagacccaaggugagagaccaggagggcagaaugaacuacuacuggacccugguggagcccggcgacaagaucaccuucgaggccaccggcaaccugguggugcccagauacgccuucaccauggagagaaacgccggcagcggcaucaucaucagcgacacccccgugcacgacugcaacaccaccugccagacccccaagggcgccaucaacaccagccugcccuuccagaacauccaccccaucaccaucggcaagugccccaaguacgugaagagcaccaagcugagacuggccaccggccugagaaacgugcccagcauccagagcagaggccuguucggcgccaucgccggcuucaucgagggcggcuggaccggcaugguggacggcugguacggcuaccaccaccagaacgagcagggcagcggcuacgccgccgaccugaagagcacccagaacgccaucgacaagaucaccaacaaggugaacagcgugaucgagaagaugaacacccaguucaccgccgugggcaaggaguucaaccaccuggagaagagaaucgagaaccugaacaagaagguggacgacggcuuccuggacaucuggaccuacaacgccgagcugcuggugcugcuggagaacgagagaacccuggacuaccacgacagcaacgugaagaaccuguacgagaaggugagaagccagcugaagaacaacgccaaggagaucggcaacggcugcuucgaguucuaccacaagugcgacaacaccugcauggagagcgugaagaacggcaccuacgacuaccccaaguacagcgaggaggccaagcugaacagagaggagaucgacggcgugaagcuggagagcaccagaaucuaccagauccuggccaucuacagcaccguggccagcagccuggugcugguggugagccugggcgccaucagcuucuggaugugcagcaacggcagccugcagugcagaaucugcaucuga

SEQ ID NO: 169676 - RNA, 1701 nt, Artificial Sequence
  derived and/or modified CDS sequence (opt4) from hemagglutinin__InfluenzaA__AFN87932
auggaggccauccugguggugcugcuguacaccuucgccaccgccaacgccgacacccugugcaucggcuaccacgccaacaacagcaccgacaccguggacaccgugcuggagaagaacgugaccgugacccacagcgugaaccugcuggaggacaagcacaacggcaagcugugcaagcugagaggcguggccccccugcaccugggcaagugcaacaucgccggcuggauccugggcaaccccgagugcgagagccugagcaccgccagcagcuggagcuacaucguggagaccagcagcagcgacaacggcaccugcuaccccggcgacuucaucgacuacgaggagcugagagagcagcugagcagcgugagcagcuucgagagauucgagaucuuccccaagaccagcagcuggcccaaccacgacagcaacaagggcgugaccgccgccugcccccacgccggcgccaagagcuucuacaagaaccugaucuggcuggugaagaagggcaacagcuaccccaagcugagcaagagcuacaucaacgacaagggcaaggaggugcuggugcuguggggcauccaccaccccagcaccagcgccgaccagcagagccuguaccagaacgccgacgccuacguguucgugggcagcagcagauacagcaagaaguucaagcccgagaucgccaucagacccaaggugagagacagagagggcagaaugaacuacuacuggacccugguggagcccggcgacaagaucaccuucgaggccaccggcaaccugguggugcccagauacgccuucgccauggagagaaacgccggcagcggcaucaucaucagcgacacccccgugcacgacugcaacaccaccugccagacccccaagggcgccaucaacaccagccugcccuuccacaacauccaccccaucaccaucggcaagugccccaaguacgugaagagcaccaagcugagacuggccaccggccugagaaacgugcccagcauccagagcagaggccuguucggcgccaucgccggcuucaucgagggcggcuggaccggcaugguggacggcugguacggcuaccaccaccagaacgagcagggcagcggcuacgccgccgaccugaagagcacccagaacgccaucgacgagaucaccaacaaggugaacagcgugaucgagaagaugaacacccaguucaccgccgugggcaaggaguucaaccaccuggagaagagaaucgagaaccugaacaagaagguggacgacggcuuccuggacaucuggaccuacaacgccgagcugcuggugcugcuggagaacgagagaacccuggacuaccacgacagcaacgugaagaaccuguacgagaaggugagaagccagcugaagaacaacgccaaggagaucggcaacggcugcuucgaguucuaccacaagugcgacaacaccugcauggagagcgugaagaacggcaccuacgacuaccccaaguacagcgaggaggccaagcugaacagagaggagaucgacggcgugaagcuggagagcaccagaaucuaccagauccuggccaucuacagcaccguggccagcagccuggugcugguggugagccugggcgccaucagcuucuggaugugcagcaacggcagccugcagugcagaaucugcaucuga

SEQ ID NO: 169677 - RNA, 1701 nt, Artificial Sequence; identical to SEQ ID NO: 163893
  derived and/or modified CDS sequence (opt4) from hemagglutinin__InfluenzaA__AFN87933

SEQ ID NO: 169678 - RNA, 1701 nt, Artificial Sequence
  derived and/or modified CDS sequence (opt4) from hemagglutinin__InfluenzaA__AFN87934
augaaggccauccugguggugaugcuguacaccuucgccaccgccaacgccgacacccugugcaucggcuaccacgccaacaacagcaccgacaccguggacaccgugcuggagaagaacgugaccgugacccacagcgugaaccugcuggaggacaagcacaacggcaagcugugcaagcugagaggcguggccccccugcagcugggcaagugcaacaucgccggcuggauccugggcaaccccgagugcgagagccugagcaccgccagcagcuggagcuacaucguggagaccagcagcagcgacaacggcaccugcuaccccggcgacuucaucgacuacgaggagcugagagagcagcugagcagcgugagcagcuucgagagauucgagaucuuccccaagaccagcagcuggcccaaccacgacagcaacaagggcgugaccgccgccugcccccacgccggcgccaagggcuucuacaagaaccugaucuggcuggugaagaagggcaacagcuaccccaagcugagcaagagcuacaucaacgacaagggcaaggaggugcuggugcuguggggcauccaccaccccagcaccagcgccgaccagcagagccuguaccagaacgccgacaccuacguguucgugggcaccagcagauacagcaagaaguucaagcccgagaucgccaucagacccaaggugagagaccaggagggcagaaugaacuacuacuggacccugguggagcccggcgacaagaucaccuucgaggccaccggcaaccugguggugcccagauacgccuucgccauggagagaaacgccggcagcggcaucaucaucagcgacacccccgugcacgacugcaacaccaccugccagacccccaagggcgccaucaacaccagccugcccuuccagaacauccaccccaucaccaucggcaagugccccaaguacgugaagagcaccaagcugagacuggccaccggccugagaaacgugcccagcauccagagcagaggccuguucggcgccaucgccggcuucaucgagggcggcuggaccggcaugguggacggcugguacggcuaccaccaccagaacgagcagggcagcggcuacgccgccgaccugaagagcacccagaacgccaucgacaagaucaccaacaaggugaacagcgugaucgagaagaugaacacccaguucaccgccgugggcaaggaguucaaccaccuggagaagagaaucgagaaccugaacaagaagguggacgacggcuuccuggacaucuggaccuacaacgccgagcugcuggugcugcuggagaacgagagaacccuggacuaccacgacagcaacgugaagaaccuguacgagaaggugagaagccagcugaagaacaacgccaaggagaucggcaacggcugcuucgaguucuaccacaagugcgacaacaccugcauggagagcgugaagaacggcaccuacgacuaccccaaguacagcgaggaggccaagcugaacagagaggagaucgacggcgugaagcuggagagcaccagaaucuaccagauccuggccaucuacagcaccguggccagcagccuggugcugguggugagccugggcgccaucagcuucuggaugugcagcaacggcagccugcagugcagaaucugcaucuga

SEQ ID NO: 169679 - RNA, 1701 nt, Artificial Sequence
  derived and/or modified CDS sequence (opt4) from hemagglutinin__InfluenzaA__AFN87936
augaaggccauccugguggugcugcuguacaccuucgccaccgccaacgccgacacccugugcaucggcuaccacgccaacaacagcaccgacaccguggacaccgugcuggagaagaacgugaccgugacccacagcgugaaccugcuggaggacaagcacaacggcaagcugugcaagcugagaggcguggccccccugcaccugggcaagugcaacaucgccggcuggauccugggcaaccccgagugcgagagccugagcaccgccagcagcuggagcuacaucguggagaccagcaucagcgacaacggcaccugcuaccccggcgacuucaucgacuacgaggagcugagagagcagcugagcagcgugagcagcuucgagagauucgagaucuuccccaagaccagcagcuggcccaaccacgaccccaacaagggcgugaccgccgccugcccccacgccggcgccaagagcuucuacaagaaccugaucuggcuggugaagaagggcaacagcuaccccaagcugagcaccagcuacaucaacgacaagggcaaggaggugcuggugcuguggggcauccaccaccccagcaccagcgccgaccagcagagccuguaccagaacgccgacgccuacgccuucgugggcaccagcagauacagcaagaaguucaagcccgagaucgccaucagacccaaggugagagaccaggagggcagaaugaacuacuacuggacccugguggagcccggcgacaagaucaccuucgaggccaccggcaaccugguggugcccagauacgccuucgccauggagagaaacgccggcagcggcaucaucaucagcgacaccagcgugcacgacugcaacaccaccugccagacccccaagggcgccaucaacaccagccugcccuuccagaacgugcaccccaucaccaucggcaagugccccaaguacgugaagagcaccaagcugagacuggccaccggccugagaaucgugcccagcauccagagcagaggccuguucggcgccaucgccggcuucaucgagggcggcuggaccggcaugguggacggcugguacggcuaccaccaccagaacgagcagggcagcggcuacgccgccgaccugaagagcacccagaacgccuucgacaagaucaccaacaaggugaacagcgugaucgagaagaugaacacccaguucaccgccgugggcaaggaguucaaccaccuggagaagagaaucgagaaccugaacaagaagguggacgacggcuuccuggacaucuggaccuacaacgccgagcugcuggugcugcuggagaacgagagaacccuggacuaccacgacagcaacgugaagaaccuguacgagaaggugagaagccagcugaagaacaacgccaaggagaucggcaacggcugcuucgaguucuaccacaagugcgacaacaccugcauggagagcgugaagaacggcaccuacgacuaccccaaguacagcgaggaggccaagcugaacagagaggagaucgacggcgugaagcuggagagcaccagaaucuaccagauccuggccaucuacagcaccguggccagcagccuggugcugguggugagccugggcgccaucagcuucuggaugugcagcaacggcagccugcagugcagaaucugcaucuga

SEQ ID NO: 169680 - RNA, 1701 nt, Artificial Sequence
  derived and/or modified CDS sequence (opt4) from hemagglutinin__InfluenzaA__AFN87938
augaaggccauccugguggugcugcuguacaccuucgccaccgccaacgccgacacccugugcaucggcuaccacgccaacaacagcaccgacaccguggacaccgugcuggagaagaacgugaccgugacccacagcgugaaccugcuggaggacaagcacaacggcaagcugugcaagcugagaggcguggccccccugcaccugggcaagugcaacaucgccggcuggauccugggcaaccccgagugcgagagccugagcaccgccagcagcuggagcuacaucguggagaccagcagcagcgacaacggcaccugcuaccccggcgacuucaucgacuacgaggagcugagagagcagcugagcagcgugagcagcuucgagagauucgagaucuuccccaagaccagcagcuggcccaaccacgaccccaacaagggcgugaccgccgccugcccccacgccggcgccaagagcuucuacaagaaccugaucuggcuggugaagaagggcaacagcuaccccaagcugagcaagagcuacaucaacgacaagggcaaggaggugcuggugcuguggggcauccaccaccccagcaccagcgccgaccagcagagccuguaccagaacgccgacgccuacguguucgugggcaccagcagauacagcaagaaguucaagcccgagaucgccaucagacccaaggugagagaccaggagggcagaaugaacuacuacuggacccugguggagcccggcgacaagaucaccuucgaggccaccggcaaccugguggugcccagauacgccuucgccauggagagaaacgccggcagcggcaucaucaucagcgacacccccgugcacgacugcaacaccaccugccagaccagcaagggcgccaucaacaccagccugcccuuccagaacauccaccccaucaccaucggcaagugccccaaguacgugaagagcaccaagcugagacuggccaccggccugagaaacgugcccagcauccagagcagaggccuguucggcgccaucgccggcuucaucgagggcggcuggaccggcaugguggacggcugguacggcuaccaccaccagaacgagcagggcagcggcuacgccgccgaccugaagagcacccagaacgccaucgacgagaucaccaacaaggugaacagcgugaucgagaagaugaacacccaguucaccgccgugggcaaggaguucaaccaccuggagaagagaaucgagaaccugaacaagaagguggacgacggcuuccuggacaucuggaccuacaacgccgagcugcuggugcugcuggagaacgagagaacccuggacuaccacgacagcaacgugaagaaccuguacgagaaggugagaaaccagcugaagaacaacgccaaggagaucggcaacggcugcuucgaguucuaccacaagugcgacaacaccugcauggagagcgugaagaacggcaccuacgacuaccccaaguacagcgaggaggccaagcugaacagagaggagaucgacggcgugaagcuggagagcaccagaaucuaccagauccuggccaucuacagcaccguggccagcagccuggugcugguggugagccugggcgccaucagcuucuggaugugcagcaacggcagccugcagugcagaaucugcaucuga

SEQ ID NO: 169681 - RNA, 1701 nt, Artificial Sequence
  derived and/or modified CDS sequence (opt4) from hemagglutinin__InfluenzaA__AFN87939
augaaggccauccugguggugcugcuguacaccuucgccaccgccaacgccgacacccugugcaucggcuaccacgccaacaacagcaccgacaccguggacaccgugcuggagaagaacgugaccgugacccacagcgugaaccugcuggaggacaagcacaacggcaagcugugcaagcugagaggcguggccccccugcaccugggcaagugcaacaucgccggcuggauccugggcaaccccgagugcgagagccugagcaccgccagcagcuggagcuacaucguggagaccagcagcagcgacaacggcaccugcuaccccggcgacuucaucgacuacgaggagcugagagagcagcugagcagcgugagcagcuucgagagauucgagaucuuccccaagaccagcagcuggcccaaccacgaccccaacaagggcgugaccgccgccugcccccacgccggcgccaagagcuucuacaagaaccugaucuggcuggugaagaagggcaacagcuaccccaagcugagcaccagcuacaucaacgacaagggcaaggaggugcuggugcuguggggcauccaccaccccagcaccagcgccgaccagcagagccuguaccagaacgccgacgccuacgccuucgugggcaccagcagauacagcaagaaguucaagcccgagaucgccaucagacccaaggugagagaccaggagggcagaaugaacuacuacuggacccugguggagcccggcgacaagaucaccuucgaggccaccggcaaccugguggugcccagauacgccuucgccauggagagaaacgccggcagcggcaucaucaucagcgacaccagcgugcacgacugcaacaccaccugccagacccccaagggcgccaucaacaccagccugcccuuccagaacgugcaccccaucaccaucggcaagugccccaaguacgugaagagcaccaagcugagacuggccaccggccugagaaacgugcccagcauccagagcagaggccuguucggcgccaucgccggcuucaucgagggcggcuggaccggcaugguggacggcugguacggcuaccaccaccagaacgagcagggcagcggcuacgccgccgaccugaagagcacccagaacgccaucgacgagaucaccaacaaggugaacagcgugaucgagaagaugaacacccaguucaccgccgugggcaaggaguucaaccaccuggagaagagaaucgagaaccugaacaagaagguggacgacggcuuccuggacaucuggaccuacaacgccgagcugcuggugcugcuggagaacgagagaacccuggacuaccacgacagcaacgugaagaaccuguacgagaaggugagaagccagcugaagaacaacgccaaggagaucggcaacggcugcuucgaguucuaccacaagugcgacaacaccugcauggagagcgugaagaacggcaccuacgacuaccccaaguacagcgaggaggccaagcugaacagagaggagaucgacggcgugaagcuggagagcaccagaaucuaccagauccuggccaucuacagcaccguggccagcagccuggugcugguggugagccugggcgccaucagcuucuggaugugcagcaacggcagccugcagugcagaaucugcaucuga

SEQ ID NO: 169682 - RNA, 1701 nt, Artificial Sequence
  derived and/or modified CDS sequence (opt4) from hemagglutinin__InfluenzaA__AFN87941
augaaggccauccugguggugcugcuguacaccuucgccaccgccaacgccgacacccugugcaucggcuaccacgccaacaacagcaccgacaccguggacaccgugcuggagaagaacgugaccgugacccacagcgugaaccugcuggaggacaagcacaacggcaagcugugcaagcugagaggcguggccccccugcaccugggcaagugcaacaucgccggcuggauccugggcaaccccgagugcgagagccugagcaccgccagcagcuggagcuacaucguggagaccagcagcagcgacaacggcaccugcuaccccggcgacuucaucgacuacgaggagcugagagagcagcugagcagcgugagcagcuucgagagauucgagaucuuccccaagaccagcagcuggcccaaccacgaccccaacaagggcgugaccgccgccugcccccacgccggcgccaagagcuucuacaagaaccugaucuggcuggugaagaagggcaacagcuaccccaagcugagcaagagcuacaucaacgacaagggcaaggaggugcuggugcuguggggcauccaccaccccagcaccagcgccgaccagcagagccuguaccagaacgccgacgccuacguguucgugggcaccagcagauacagcaagaaguucaagcccgagaucgccaucagacccaaggugagagaccaggagggcagaaugaacuacuacuggacccugguggagcccggcgacaagaucaccuucgaggccaccggcaaccugguggugcccagauacgccuucgccauggagagaaacgccggcagcggcaucaucaucagcgacacccccgugcacgacugcaacaccaccugccagacccccaagggcgccaucaacaccagccugcccuuccagaacauccaccccaucaccaucggcaagugccccaaguacgugaagagcaccaagcugagacuggccaccggccugagaaacgugcccagcauccagagcagaggccuguucggcgccaucgccggcuucaucgagggcggcuggaccggcaugguggacggcugguacggcuaccaccaccagaacgagcagggcagcggcuacgccgccgaccugaagagcacccagaacgccaucgacgagaucaccaacaaggugaacagcgugaucgagaagaugaacacccaguucaccgccgugggcaaggaguucaaccaccuggagaagagaaucgagaaccugaacaagaagguggacgacggcuuccuggacaucuggaccuacaacgccgagcugcuggugcugcuggagaacgagagaacccuggacuaccacgacagcaacgugaagaaccuguacgagaaggugagaaaccagcugaagaacaacgccaaggagaucggcaacggcugcuucgaguucuaccacaagugcgacaacaccugcauggagagcgugaagaacggcaccuacgacuaccccaaguacagcgaggaggccaagcugaacagagaggagaucgacggcgugaagcuggagagcaccagaaucuaccagauccuggccaucuacagcaccguggccagcagccuggugcugguggugagccugggcgccaucagcuucuggaugugcagcaacggcagccugcagugcagaaucugcaucuga

SEQ ID NO: 169683 - RNA, 1701 nt, Artificial Sequence
  derived and/or modified CDS sequence (opt4) from hemagglutinin__InfluenzaA__AFN87943
augaaggccauccugguggugcugcuguacaccuucgccaccgccaacgccgacacccugugcaucggcuaccacgccaacaacagcaccgacaccguggacaccgugcuggagaagaacgugaccgugacccacagcgugaaccugcuggaggacaagcacaacggcaagcugugcaagcugagaggcguggccccccugcaccugggcaagugcaacaucgccggcuggauccugggcaaccccgagugcgagagccugagcaccgccagcagcuggagcuacaucguggagaccagcaucagcgacaacggcaccugcuaccccggcgacuucaucgacuacgaggagcugagagagcagcugagcagcgugagcagcuucgagagauucgagaucuuccccaagaccagcagcuggcccaaccacgaccccaacaagggcgugaccgccgccugcccccacgccggcgccaagagcuucuacaagaaccugaucuggcuggugaagaagggcaacagcuaccccaagcugagcaccagcuacaucaacgacaagggcaaggaggugcuggugcuguggggcauccaccaccccagcaccagcgccgaccagcagagccuguaccagaacgccgacgccuacgccuucgugggcaccagcagauacagcaagaaguucaagcccgagaucgccaucagacccaaggugagagaccaggagggcagaaugaacuacuacuggacccugguggagcccggcgacaagaucaccuucgaggccaccggcaaccugguggugcccagauacgccuucgccauggagagaaacgccggcagcggcaucaucaucagcgacaccagcgugcacgacugcaacaccaccugccagacccccaagggcgccaucaacaccagccugcccuuccagaacgugcaccccaucaccaucggcaagugccccaaguacgugaagagcaccaagcugagacuggccaccggccugagaaacgugcccagcauccagagcagaggccuguucggcgccaucgccggcuucaucgagggcggcuggaccggcaugguggacggcugguacggcuaccaccaccagaacgagcagggcagcggcuacgccgccgaccugaagagcacccagaacgccaucgacgagaucaccaacaaggugaacagcgugaucgagaagaugaacacccaguucaccgccgugggcaaggaguucaaccaccuggagaagagaaucgagaaccugaacaagaagguggacgacggcuuccuggacaucuggaccuacaacgccgagcugcuggugcugcuggagaacgagagaacccuggacuaccacgacagcaacgugaagaaccuguacgagaaggugagaagccagcugaagaacaacgccaaggagaucggcaacggcugcuucgaguucuaccacaagugcgacaacaccugcauggagagcgugaagaacggcaccuacgacuaccccaaguacagcgaggaggccaagcugaacagagaggagaucgacggcgugaagcuggagagcaccagaaucuaccagauccuggccaucuacagcaccguggccagcagccuggugcugguggugagccugggcgccaucagcuucuggaugugcagcaacggcagccugcagugcagaaucugcaucuga

SEQ ID NO: 169684 - RNA, 1701 nt, Artificial Sequence
  derived and/or modified CDS sequence (opt4) from hemagglutinin__InfluenzaA__AFN87945
augaaggccauccugguggugcugcuguacaccuucgccaccgccaacgccgacacccugugcaucggcuaccacgccaacaacagcaccgacaccguggacaccgugcuggagaagaacgugaccgugacccacagcgugaaccugcuggaggacaagcacgacggcaagcugugcaagcugagaggcguggccccccugcaccugggcaagugcaacaucgccggcuggauccugggcaaccccgagugcgagagccugagcaccgccagcagcuggagcuacaucguggagaccagcagcagcgacaacggcaccugcuaccccggcgacuucaucgacuacgaggagcugagagagcagcugagcagcgugagcagcuucgagagauucgagaucuuccccaagaccagcagcuggcccaaccacgacagcaacaagggcgugaccgccgccugcccccacgccggcgccaagagcuucuacaagaaccugaucuggcuggugaagaagggcaacagcuaccccaagcugagccagagcuacaucaacgacaagggcaaggaggugcuggugcuguggggcauccaccaccccagcaccagcgccgaccagcagagccuguaccagaacgccgacgccuacguguucgugggcaccagcagauacagcaagaaguucaagcccgagaucgccaucagacccaaggugagagaccaggagggcagaaugaacuacuacuggacccugguggagcccggcgacaagaucaccuucgaggccaccggcaaccugguggugcccagauacgccuucgccauggagagaaacgccggcagcggcaucaucaucagcgacacccccgugcacgacugcaacaccaccugccagacccccaagggcgccaucaacaccagccugcccuuccagaacauccaccccaucaccaucggcaagugccccaaguacgugaagagcaccaagcugagacuggccaccggccugagaaacgugcccagcauccagagcagaggccuguucggcgccaucgccggcuucaucgagggcggcuggaccggcaugguggacggcugguacggcuaccaccaccagaacgagcagggcagcggcuacgccgccgaccugaagagcacccagaacgccaucgacaagaucaccaacaaggugaacagcgugaucgagaagaugaacacccaguucaccgccgugggcaaggaguucaaccaccuggagaagagaaucgagaaccugaacaagaagguggacgacggcuuccuggacaucuggaccuacaacgccgagcugcuggugcugcuggagaacgagagaacccuggacuaccacgacagcaacgugaagaaccuguacgagaaggugagaagccagcugaagaacaacgccaaggagaucggcaacggcugcuucgaguucuaccacaagugcgacaacaccugcauggagagcgugaagaacggcaccuacgacuaccccaaguacagcgaggaggccaagcugaacagagaggagaucgacggcgugaagcuggagagcaccagaaucuaccagauccuggccaucuacagcaccguggccagcagccuggugcugguggugagccugggcgccaucagcuucuggaugugcagcaacggcagccugcagugcagaaucugcaucuga

SEQ ID NO: 169685 - RNA, 1701 nt, Artificial Sequence
  derived and/or modified CDS sequence (opt4) from hemagglutinin__InfluenzaA__AFN87947
augaaggccauccugguggugcugcuguacaccuucgccaccgccaacgccgacacccugugcaucggcuaccacgccaacaacagcaccgacaccguggacaccgugcuggagaagaacgugaccgugacccacagcgugaaccugcuggaggacaagcacaacggcaagcugugcaagcugagaggcguggccccccugcaccugggcaagugcaacaucgccggcuggauccugggcaaccccgagugcgagagccugagcaccgccagcagcuggagcuacaucguggagaccagcagcagcgacaacggcaccugcuaccccggcgacuucaucgacuacgaggagcugagagagcagcugagcagcgugagcagcuucgagagauucgagaucuuccccaagaccagcagcuggcccaaccacgaccccaacaagggcgugaccgccgccugcccccacgccggcgccaagagcuucuacaagaaccugaucuggcuggugaagaagggcaacagcuaccccaagcugagcaccagcuacaucaacgacaagggcaaggaggugcuggugcuguggggcauccaccaccccagcaccagcgccgaccagcagagccuguaccagaacgccgacgccuacgccuucgugggcaccagcagauacagcaagaaguucaagcccgagaucgccaucagacccaaggugagagaccaggagggcagaaugaacuacuacuggacccugguggagcccggcgacaagaucaccuucgaggccaccggcaaccugguggugcccagauacgccuucgccauggagagaaacgccggcagcggcaucaucaucagcgacaccagcgugcacgacugcaacaccaccugccagacccccaagggcgccaucaacaccagccugcccuuccagaacgugcaccccaucaccaucggcaagugccccaaguacgugaagagcaccaagcugagacuggccaccggccugagaaacgugcccagcauccagagcagaggccuguucggcgccaucgccggcuucaucgagggcggcuggaccggcaugguggacggcugguacggcuaccaccaccagaacgagcagggcagcggcuacgccgccgaccugaagagcacccagaacgccuucgacgagaucaccaacaaggugaacagcgugaucgagaagaugaacacccaguucaccgccgugggcaaggaguucaaccaccuggagaagagaaucgagaaccugaacaagaagguggacgacggcuuccuggacaucuggaccuacaacgccgagcugcuggugcugcuggagaacgagagaacccuggacuaccacgacagcaacgugaagaaccuguacgagaaggugagaagccagcugaagaacaacgccaaggagaucggcaacggcugcuucgaguucuaccacaagugcgacaacaccugcauggagagcgugaagaacggcaccuacgacuaccccaaguacagcgaggaggccaagcugaacagagaggagaucgacggcgugaagcuggagagcaccagaaucuaccagauccuggccaucuacagcaccguggccagcagccuggugcugguggugagccugggcgccaucagcuucuggaugugcagcaacggcagccugcagugcagaaucugcaucuga

SEQ ID NO: 169686 - RNA, 1701 nt, Artificial Sequence
  derived and/or modified CDS sequence (opt4) from hemagglutinin__InfluenzaA__AFN87949
augaaggccauccugguggugaugcuguacaccuucgccaccgccaacgccgacacccugugcaucggcuaccacgccaacaacagcaccgacaccguggacaccgugcuggagaagaacgugaccgugacccacagcgugaaccugcuggaggacaagcacaacggcaagcugugcaagcugagaggcguggccccccugcaccugggcaagugcaacaucgccggcuggauccugggcaaccccgagugcgagagccugagcaccgccagcagcuggagcuacaucguggagaccagcagcagcgacaacggcaccugcuaccccggcgacuucaucgacuacgaggagcugagagagcagcugagcagcgugagcagcuucgagagauucgagaucuuccccaagaccagcagcuggcccaaccacgacagcaacaagggcgugaccgccgccugcccccacgccggcgccaagggcuucuacaagaaccugaucuggcuggugaagaagggcaacagcuaccccaagcugagcaagagcuacaucaacgacaagggcaaggaggugcuggugcuguggggcauccaccaccccagcaccagcgccgaccagcagagccuguaccagaacgccgacaccuacguguucgugggcaccagcagauacagcaagaaguucaagcccgagaucgccaucagacccaaggugagagaccaggagggcagaaugaacuacuacuggacccugguggagcccggcgacaagaucaccuucgaggccaccggcaaccugguggugcccagauacgccuucgccauggagagaaacgccggcagcggcaucaucaucagcgacacccccgugcacgacugcaacaccaccugccagacccccaagggcgccaucaacaccagccugcccuuccagaacauccaccccaucaccaucggcaagugccccaaguacgugaagagcaccaagcugagacuggccaccggccugagaaacgugcccagcauccagagcagaggccuguucggcgccaucgccggcuucaucgagggcggcuggaccggcaugguggacggcugguacggcuaccaccaccagaacgagcagggcagcggcuacgccgccgaccugaagagcacccagaacgccaucgacaagaucaccaacaaggugaacagcgugaucgagaagaugaacacccaguucaccgccgugggcaaggaguucaaccaccuggagaagagaaucgagaaccugaacaagaagguggacgacggcuuccuggacaucuggaccuacaacgccgagcugcuggugcugcuggagaacgagagaacccuggacuaccacgacagcaacgugaagaaccuguacgagaaggugagaagccagcugaagaacaacgccaaggagaucggcaacggcugcuucgaguucuaccacaagugcgacaacaccugcauggagagcgugaagaacggcaccuacgacuaccccaaguacagcgaggaggccaagcugaacagagaggagaucgacggcgugaagcuggagagcaccagaaucuaccagauccuggccaucuacagcaccguggccagcagccuggugcugguggugagccugggcgccaucagcuucuggaugugcagcaacggcagccugcagugcagaaucugcaucuga

SEQ ID NO: 169687 - RNA, 1701 nt, Artificial Sequence; identical to SEQ ID NO: 167000
  derived and/or modified CDS sequence (opt4) from hemagglutinin__InfluenzaA__AFN87951

SEQ ID NO: 169688 - RNA, 1701 nt, Artificial Sequence
  derived and/or modified CDS sequence (opt4) from hemagglutinin__InfluenzaA__AFN87953
augaaggccauccugguggugcugcuguacaccuucgccaccgccaacgccgacacccugugcaucggcuaccacgccaacaacagcaccgacaccguggacaccgugcuggagaagaacgugaccgugacccacagcgccaaccugcuggaggacaagcacaacggcaagcugugcaagcugagaggcguggccccccugcaccugggcaagugcaacaucgccggcuggauccugggcaaccccgagugcgagagccugagcaccgccagcagcuggagcuacaucguggagaccagcagcagcgacaacggcaccugcuaccccggcgacuucaucgacuacgaggagcugagagagcagcugagcagcgugagcagcuucgagagauucgagaucuuccccaagaccagcagcuggcccaaccacgaccugaacaagggcgugaccgccgccugcccccacgccggcgccaagagcuucuacaagaaccugaucuggcuggugaagaagggcaacagcuaccccaagcugagcaagagcuacaucaacgacaagggcaaggaggugcuggugcuguggggcauccaccaccccagcaccagcgccgaccagcagagccuguaccagaacgccgacgccuacguguucgugggcaccagcagauacagcaagaaguucaagcccgagaucgccaucagacccaaggugagagaccaggagggcagaaugaacuacuacuggacccugguggagcccggcgacaagaucaccuucgaggccaccggcaaccugguggugcccagauacgccuucgccauggagagaaacgccggcagcggcaucaucaucagcgacacccccgugcacgacugcaacaccaccugccagacccccaagggcgccaucaacaccagccugcccuuccagaacauccaccccaucaccaucggcaagugccccaaguacgugaagagcaccaagcugagacuggccaccggccugagaaacgugcccagcauccagagcagaggccuguucggcgccaucgccggcuucaucgagggcggcuggaccggcaugguggacggcugguacggcuaccaccaccagaacgagcagggcagcggcuacgccgccgaccugaagagcacccagaacgccaucgacgagaucaccaacaaggugaacagcgugaucgagaagaugaacacccaguucaccgccgugggcaaggaguucaaccaccuggagaagagaaucgagaaccugaacaagaagguggacgacggcuuccuggacaucuggaccuacaacgccgagcugcuggugcugcuggagaacgagagaacccuggacuaccacgacagcaacgugaagaaccuguacgagaaggugagaagccagcugaagaacaacgccaaggagaucggcaacggcugcuucgaguucuaccacaagugcgacaacaccugcauggagagcgugaagaacggcaccuacgacuaccccaaguacagcgaggaggccaagcugaacagagaggagaucgacggcgugaagcuggagagcaccagaaucuaccagauccuggccaucuacagcaccguggccagcagccuggugcugguggugagccugggcgccaucagcuucuggaugugcagcaacggcagccugcagugcagaaucugcaucuga

SEQ ID NO: 169689 - RNA, 1701 nt, Artificial Sequence
  derived and/or modified CDS sequence (opt4) from hemagglutinin__InfluenzaA__AFN87955
augaaggccauccugguggugaugcuguacaccuucgccaccgccaacgccgacacccugugcaucggcuaccacgccaacaacagcaccgacaccguggacaccgugcuggagaagaacgugaccgugacccacagcgugaaccugcuggaggacaagcacaacggcaagcugugcaagcugagaggcguggccccccugcaccugggcaagugcaacaucgccggcuggauccugggcaaccccgagugcgagagccugagcaccgccagcagcuggagcuacaucguggagaccagcagcagcgacaacggcaccugcuaccccggcgacuucaucgacuacgaggagcugagagagcagcugagcagcgugagcagcuucgagagauucgagaucuuccccaagaccagcagcuggcccaaccacgacagcaacaagggcgugaccgccgccugcccccacgccggcgccaagggcuucuacaagaaccugaucuggcuggugaagaagggcaacagcuaccccaagcugagcaagagcuacaucaacgacaagggcaaggaggugcuggugcuguggggcauccaccaccccagcaccaccgccgaccagcagagccuguaccagaacgccgacaccuacguguucgugggcaccagcagauacagcaagaaguucaagcccgagaucgccaucagacccaaggugagagaccaggagggcagaaugaacuacuacuggacccugguggagcccggcgacaagaucaccuucgaggccaccggcaaccugguggugcccagauacgccuucgccauggagagaaacgccggcagcggcaucaucaucagcgacacccccgugcacgacugcaacaccaccugccagacccccaagggcgccaucaacaccagccugcccuuccagaacauccaccccaucaccaucggcaagugccccaaguacgugaagagcaccaagcugagacuggccaccggccugagaaacgugcccagcauccagagcagaggccuguucggcgccaucgccggcuucaucgagggcggcuggaccggcaugguggacggcugguacggcuaccaccaccagaacgagcagggcagcggcuacgccgccgaccugaagagcacccagaacgccaucgacgagaucaccaacaaggugaacagcgugaucgagaagaugaacacccaguucaccgccgugggcaaggaguucaaccaccuggagaagagaaucgagaaccugaacaagaagguggacgacggcuuccuggacaucuggaccuacaacgccgagcugcuggugcugcuggagaacgagagaacccuggacuaccacgacagcaacgugaagaaccuguacgagaaggugagaagccagcugaagaacaacgccaaggagaucggcaacggcugcuucgaguucuaccacaagugcgacaacaccugcauggagagcgugaagaacggcaccuacgacuaccccaaguacagcgaggaggccaagcugaacagagaggagaucgacggcgugaagcuggagagcaccagaaucuaccagauccuggccaucuacagcaccguggccagcagccuggugcugguggugagccugggcgccaucagcuucuggaugugcagcaacggcagccugcagugcagaaucugcaucuga

SEQ ID NO: 169690 - RNA, 1701 nt, Artificial Sequence
  derived and/or modified CDS sequence (opt4) from hemagglutinin__InfluenzaA__AFN87957
augaaggccauccugguggugcugcuguacaccuucgccaccgccaacgccgacacccugugcaucggcuaccacgccaacaacagcaccgacaccguggacaccgugcuggagaagaacgugaccgugacccacagcgugaaccugcuggaggacaagcacaacggcaagcugugcaagcugagaggcguggccccccugcaccugggcaagugcaacaucgccggcuggauccugggcaaccccgagugcgagagccugagcaccgccagcagcuggagcuacaucguggagaccagcaucagcgacaacggcaccugcuaccccggcgacuucaucgacuacgaggagcugagagagcagcugagcagcgugagcagcuucgagagauucgagaucuuccccaagaccagcagcuggcccaaccacgaccccaacaagggcgugaccgccgccugcccccacgccggcgccaagagcuucuacaagaaccugaucuggcuggugaagaagggcaacagcuaccccaagcugagcaccagcuacaucaacgacaagggcaaggaggugcuggugcuguggggcauccaccaccccagcaccagcgccgaccagcagagccuguaccagaacgccgacgccuacgccuucgugggcaccagcagauacagcaagaaguucaagcccgagaucgccaucagacccaaggugagagaccaggagggcagaaugaacuacuacuggacccugguggagcccggcgacaagaucaccuucgaggccaccggcaaccugguggugcccagauacgccuucgccauggagagaaacgccggcagcggcaucaucaucagcgacaccagcgugcacgacugcaacaccaccugccagacccccaagggcgccaucaacaccagccugcccuuccagaacgugcaccccaucaccaucggcaagugccccaaguacgugaagagcaccaagcugagacuggccaccggccugagaaacgugcccagcauccagagcagaggccuguucggcgccaucgccggcuucaucgagggcggcuggaccggcaugguggacggcugguacggcuaccaccaccagaacgagcagggcagcggcuacgccgccgaccugaagagcacccagaacgccuucgacgagaucaccaacaaggugaacagcgugaucgagaagaugaacacccaguucaccgccgugggcaaggaguucaaccaccuggagaagagaaucgagaaccugaacaagaagguggacgacggcuuccuggacaucuggaccuacaacgccgagcugcuggugcugcuggagaacgagagaacccuggacuaccacgacagcaacgugaagaaccuguacgagaaggugagaagccagcugaagaacaacgccaaggagaucggcaacggcugcuucgaguucuaccacaagugcgacaacaagugcauggagagcgugaagaacggcaccuacgacuaccccaaguacagcgaggaggccaagcugaacagagaggagaucgacggcgugaagcuggagagcaccagaaucuaccagauccuggccaucuacagcaccguggccagcagccuggugcugguggugagccugggcgccaucagcuucuggaugugcagcaacggcagccugcagugcagaaucugcaucuga

SEQ ID NO: 169691 - RNA, 1701 nt, Artificial Sequence
  derived and/or modified CDS sequence (opt4) from hemagglutinin__InfluenzaA__AFN87959
augaaggccauccugguggugaugcuguacaccuucgccaccgccaacgccgacacccugugcaucggcuaccacgccaacaacagcaccgacaccguggacaccgugcuggagaagaacgugaccgugacccacagcgugaaccugcuggaggacaagcacaacggcaagcugugcaagcugagaggcguggccccccugcaccugggcaagugcaacaucgccggcuggauccugggcaaccccgagugcgagagccugagcaccgccagcagcuggagcuacaucguggagaccagcagcagcgacaacggcaccugcuaccccggcgacuucaucgacuacgaggagcugagagagcagcugagcagcgugagcagcuucgagagauucgagaucuuccccaagaccagcagcuggcccaaccacgacagcaacaagggcgugaccgccgccugcccccacgccggcgccaagggcuucuacaagaaccugaucuggcuggugaagaagggcaacagcuaccccaagcugagcaagagcuacaucaacgacaagggcaaggaggugcuggugcuguggggcauccaccaccccagcaccagcgccgaccagcagagccuguaccagaacgccgacaccuacguguucgugggcaccagcagauacagcaagaaguucaagcccgagaucgccaucagacccaaggugagagaccaggagggcagaaugaacuacuacuggacccugguggagcccggcgacaagaucaccuucgaggccaccggcaaccugguggugcccagauacgccuucgccauggagagaaacgccggcagcggcaucaucaucagcgacacccccgugcacgacugcaacaccaccugccagacccccaagggcgccaucaacaccagccugcccuuccagaacauccaccccaucaccaucggcaagugccccaaguacgugaagagcaccaagcugagacuggccaccggccugagaaacgugcccagcauccagagcagaggccuguucggcgccaucgccggcuucaucgagggcggcuggaccggcaugguggacggcugguacggcuaccaccaccagaacgagcagggcagcggcuacgccgccgaccugaagagcacccagaacgccaucgacaagaucaccaacaaggugaacagcgugaucgagaagaugaacacccaguucaccgccgugggcaaggaguucaaccaccuggagaagagaaucgagaaccugaacaagaagguggacgacggcuuccuggacaucuggaccuacaacgccgagcugcuggugcugcuggagaacgagagaacccuggacuaccacgacagcaacgugaagaaccuguacgagaaggugagaaaccagcugaagaacaacgccaaggagaucggcaacggcugcuucgaguucuaccacaagugcgacaacaccugcauggagagcgugaagaacggcaccuacgacuaccccaaguacagcgaggaggccaagcugaacagagaggagaucgacggcgugaagcuggagagcaccagaaucuaccagauccuggccaucuacagcaccguggccagcagccuggugcugguggugagccugggcgccaucagcuucuggaugugcagcaacggcagccugcagugcagaaucugcaucuga

SEQ ID NO: 169692 - RNA, 1701 nt, Artificial Sequence; identical to SEQ ID NO: 163214
  derived and/or modified CDS sequence (opt4) from hemagglutinin__InfluenzaA__AFN87961

SEQ ID NO: 169693 - RNA, 1698 nt, Artificial Sequence
  derived and/or modified CDS sequence (opt4) from hemagglutinin__InfluenzaA__AFO64802
augaaggccaagcugcuggugcugcugugcaccuucaccgccaccuacgccgacaccaucugcaucggcuaccacgccaacaacagcaccgacaccguggacaccgugcuggagaagaacgugaccgugacccacagcgugaaccugcuggaggacagccacaacggcaagcugugccugcugaagggcaucgccccccugcagcugggcaacugcagcguggccggcuggauccugggcaaccccgagugcgagcugcugaucagcaaggagagcuggagcuacaucguggagacccccaaccccgagaacggcaccugcuaccccggcuacuucgccgacuacgaggagcugagagagcagcugagcagcgugagcagcuucgagagauucgagaucuuccccaaggagagcagcuggcccaaccacaccgugaccggcgugagcgccagcugcagccacaacggcaagagcagcuucuacagaaaccugcuguggcugaccgugaagaacggccuguaccccaaccugagcaagagcuacgugaacaacaagggcaaggaggugcuggugcuguggggcgugcaccaccccagcaacaucagagaccagagagccaucuaccacaccgagaacgccuacgugagcguggugagcagccacuacagcagaagauucacccccgagaucgccaagagacccaaggugagagaccaggagggcagaaucaacuacuacuggacccugcuggagcccggcgacaccaucaucuucgaggccaacggcaaccugaucgcccccugguacgccuucgcccugagcagaggcuucggcagcggcaucaucaccagcaacgcccccauggacgagugcgacgccaagugccagaccccccagggcgccaucaacagcagccugcccuuccagaacgugcaccccgugaccaucggcgagugccccaaguacgugagaagcgccaagcugagaauggugaccggccugagaaacauccccagcauccagagcagaggccuguucggcgccaucgccggcuucaucgagggcggcuggaccggcaugaucgacggcugguacggcuaccaccaccagaacgagcagggcagcggcuacgccgccgaccagaagagcacccagaacgccaucaacggcaucaccaacaaggugaacagcgugaucgagaagaugaacacccaguucaccgccgugggcaaggaguucaacaagcuggagagaagaauggagaaccugaacaagaagguggacgacggcuuccuggacaucuggaccuacaacgccgagcugcuggugcugcuggagaacgagagaacccuggacuuccacgacagcaacgugaagaaccuguacgagaaggugaagagccagcugaagaacaacgccaaggagaucggcaacggcugcuucgaguucuaccacaagugcaacaacgagugcauggagagcgugaagaacggcaccuacgacuaccccaaguacagcgaggagagcaagcugaacagagagaagaucgacggcgugaagcuggagagcaugggcguguaccagauccuggccaucuacagcaccguggccagcagccuggugcugcuggugagccugggcgccaucagcuucuggaugugcagcaacggcagccugcagugcagaaucugcaucuga

SEQ ID NO: 169694 - RNA, 1701 nt, Artificial Sequence
  derived and/or modified CDS sequence (opt4) from hemagglutinin__InfluenzaA__AFO64813
augaaggccaagcugcuggugcugcugugcgccuucaccgccaccgacgccgacaccaucugcaucggcuaccacgccaacaacagcaccgacaccguggacaccgugcuggagaagaacgugaccgugacccacagcgugaaccugcuggaggacagccacaacggcaagcugugcagacugaagggcaucgccccccugcagcugggcaacugcagcaucgccggcuggauccugggcaaccccgagugcgagagccuguucagcaagaagagcuggagcuacaucgccgagacccccaacagcgagaacggcaccugcuaccccggcuacuucgccgacuacgaggagcugagagagcagcugagcagcgugagcagcuucgagagauucgagaucuuccccaaggagagcagcuggcccaaccacaccgugaccaagggcgugaccgccagcugcagccacaagggcagaagcagcuucuacagaaaccugcuguggcugaccgagaagaacggcagcuaccccaaccugagcaagagcuacgugaacaacaaggagaaggaggugcuggugcuguggggcgugcaccaccccagcaacaucagagaccagagagccaucuaccacaccgagaacgccuacgugagcguggugagcagccacuacaacagaagauucacccccgagaucgccaagagacccaaggugagagaccaggagggcagaaucaacuacuacuggacccugcuggagcccggcgacaccaucaucuucgaggccaacggcaaccugaucgcccccugguacgccuucgcccugagcagaggcuucggcagcggcaucaucaccagcaacgccagcauggacgagugcgacgccaagugccagaccccccagggcgccaucaacagcagccugcccuuccagaacgugcaccccgugaccaucggcgagugccccaaguacgugagaagcaccaagcugagaauggugaccggccugagaaacauccccagcauccagagcagaggccuguucggcgccaucgccggcuucaucgagggcggcuggaccggcaugaucgacggcugguacggcuaccaccaccagaacgagcagggcagcggcuacgccgccgaccagaagagcacccagaacgccaucaacggcaucaccaacaaggugaacagcgugaucgagaagaugaacacccaguucaccgccgugggcaaggaguucaacaagcuggagagaagaauggagaaccugaacaagaagguggacgacggcuuccuggacaucuggaccuacaacgccgagcugcuggugcugcuggagaacgagagaacccuggacuuccacgacagcaacgugaagaaccuguacgagaaggugaagagccagcugaagaacaacgccaaggagaucggcaacggcugcuucgaguucuaccacaagugcaacaacgagugcauggagagcgugaagaacggcaccuacgacuaccccaaguacagcgaggagagcaagcugaacagagagaagaucgacggcgugaagcuggagagcaugggcguguaccagauccuggccaucuacagcaccguggccagcagccuggugcugcuggugagccugggcgccaucagcuucuggaugugcagcaacggcagccugcagugcagaaucugcaucuga

SEQ ID NO: 169695 - RNA, 1701 nt, Artificial Sequence
  derived and/or modified CDS sequence (opt4) from hemagglutinin__InfluenzaA__AFO64824
augaaggccauccugcuggugcugcugugcgccuucaccgccaccgacgccgacaccaucugcaucggcuaccacgccaacaacagcaccgacaccguggacaccgugcuggagaagaacgugaccgugacccacagcgugaaccugcuggaggacagccacaacggcaagcugugcagacugaagggcaucgccccccugcagcugggcaacugcagcaucgccggcuggauccugggcaaccccgagugcgagagccuguucagcaagaagagcuggagcuacaucgccgagacccccaacagcgagaacggcaccugcuaccccggcuacuucgccgacuacgaggagcugagagagcagcugagcagcgugagcagcuucgagagauucgagaucuuccccaaggagagcagcuggcccaaccacaccgugaccaagggcgugaccgccagcugcagccacaagggcagaagcagcuucuacagaaaccugcuguggcugaccgagaagaacggccuguaccccaaccugagcaagagcuacgugaacaacaaggagaaggaggugcuggugcuguggggcgugcaccaccccagcaacaucggcgaccagagagccaucuaccacaccgagaacgccuacgugagcguggugagcagccacuacaacagaagauucacccccgagaucgccaagagacccaaggugagaggccaggagggcagaaucaacuacuacuggacccugcuggagcccggcgacaccaucaucuucgaggccaacggcaaccugaucgcccccugguacgccuucgcccugagcagaggcuucggcagcggcaucaucaccagcaacgccagcauggacgagugcgacgccaagugccagaccccccagggcgccaucaacagcagccugcccuuccagaacgugcaccccgugaccaucggcgagugccccaaguacgugagaagcaccaagcugaagauggugaccggccugagaaacauccccagcauccagagcagaggccuguucggcgccaucgccggcuucaucgagggcggcuggaccggcaugaucgacggcugguacggcuaccaccaccagaacgagcagggcagcggcuacgccgccgaccagaagagcacccagaacgccaucaacggcaucaccaacaaggugaacagcgugaucgagaagaugaacacccaguucaccgccgugggcaaggaguucaacaagcuggagaagagaauggagaaccugaacaagaagguggacgacggcuuccuggacaucuggaccuacaacgccgagcugcuggugcugcuggagaacgagagaacccuggacuuccacgacagcaacgugaagaaccuguacgagaaggugaagaaccagcugaagaacaacgccaaggagaucggcaacggcugcuucgaguucuaccacaagugcaacaacgagugcauggagagcgugaagaacggcaccuacgacuaccccaaguacagcgaggagagcaagcugaacagagagaagaucgacggcgugaagcuggagagcaugggcguguaccagauccuggccaucuacagcaccguggccagcagccuggugcugcuggugagccugggcgccaucagcuucuggaugugcagcaacggcagccugcagugcagaaucugcaucuga

SEQ ID NO: 169696 - RNA, 1701 nt, Artificial Sequence
  derived and/or modified CDS sequence (opt4) from hemagglutinin__InfluenzaA__AFO64835
augaaggccaagcugcuggugcugcugugcgccuucaccgccaccuacgccgacaccaucugcaucggcuaccacgccaacaacagcaccgacaccguggacaccgugcuggagaagaacgugaccgugacccacagcgugaaccugcuggaggacagccacaacggcaagcugugcagacugaagggcaucgccccccugcagcugggcaacugcagcguggccggcuggauccugggcaaccccgagugcgagagccuguucagcaaggagagcuggagcuacaucgccgagacccccgaccccgagaacggcaccugcuaccccggcuacuucgccgacuacgaggagcugagagagcagcugagcagcgugagcagcuucgagagauucgagaucuuccccaaggagagcagcuggcccaaccacaccgugaccaagggcgugaccgccagcugcagccacaacggcaagagcagcuucuacagaaaccugcuguggcugaccaagaagaacggccuguaccccaaccugagcaagagcuacgugaacaacaaggagaaggaggugcuggugcuguggggcgugcaccaccccagcaacaucggcgagcagagagccaucuaccacaccgagaacgccuacgugagcguggugagcagccacuacagcagaagauucacccccgagaucgccaagagacccaaggugagagaccaggagggcagaaucaacuacuacuggacccugcuggagcccggcgacaccaucaucuucgaggccaacggcaaccugaucgcccccugguacgccuucgcccugagcagaggcuucggcagcggcaucaucaccagcaacgccagcauggacgagugcgacgccaagugccagaccccccagggcgccaucaacagcagccugcccuuccagaacgugcaccccgugaccaucggcgagugccccaaguacgugagaagcaccaagcugagaauggugaccggccugagaaacauccccagcauccagagcagaggccuguucggcgccaucgccggcuucaucgagggcggcuggaccggcaugaucgacggcugguacggcuaccaccaccagaacgagcagggcagcggcuacgccgccgaccagaagagcacccagaacgccaucaacggcaucaccaacaaggugaacagcgugaucgagaagaugaacacccaguucaccgccgugggcaaggaguucaacaagcuggagagaagaauggagaaccugaacaagaagguggacgacggcuuccuggacaucuggaccuacaacgccgagcugcuggugcugcuggagaacgagagaacccuggacuuccacgacagcaacgugaagaaccuguacgagaaggugaagaaccagcugaagaacaacgccaaggagaucggcaacggcugcuucgaguucuaccacaagugcaacaacgagugcauggagagcgugaagaacggcaccuacgacuaccccaaguacagcgaggagagcaagcugaacagagagaagaucgacggcgugaagcuggagagcaugggcguguaccagauccuggccaucuacagcaccguggccagcagccuggugcugcuggugagccugggcgccaucagcuucuggaugugcagcaacggcagccugcagugcagaaucugcaucuga

SEQ ID NO: 169697 - RNA, 1701 nt, Artificial Sequence
  derived and/or modified CDS sequence (opt4) from hemagglutinin__InfluenzaA__AFO64846
augaaggccaagcugcuggugcugcugugcgccuucaccgccaccuacgccgacaccaucugcaucggcuaccacgccaacaacagcaccgacaccguggacaccgugcuggagaagaacgugaccgugacccacagcgugaaccugcuggaggacagccacaacggcaagcugugcagacugaagggcaucgccccccugcagcugggcaacugcagcguggccggcuggauccugggcaaccccgagugcgagagccuguucaccaaggagagcuggagcuacaucgccgagacccccaaccccgagaacggcaccugcuaccccggcuacuucgccgacuacgaggagcugagagagcagcugagcagcgugagcagcuucgagagauucgagaucuuccccaaggagagcagcuggcccaaccacaccgugaccaagggcgugaccgccagcugcagccacaacggcaagagcagcuucuacagaaaccugcuguggcugaccgagaagaacggccuguaccccaaccugagcaagagcuacgugaacaacaaggagaaggaggugcuggugcuguggggcgugcaccaccccagcaacaugggcgaccagagagccaucuaccacaccgagaacgccuacgugagcguggugagcagccacuacagcagaagauucacccccgagaucgccaagagacccaaggugagaggccaggagggcagaaucaacuacuacuggacccugcuggagcccggcgacaccaucaucuucgaggccaacggcaaccugaucgcccccagauacgccuucgcccugagcagaggcuucggcagcggcaucaucaccagcaacgccagcauggacgagugcgacgccaagugccagaccccccagggcgccaucaacagcagccugcccuuccagaacgugcaccccgugaccaucggcgagugccccaaguacgugagaagcaccaagcugagaauggugaccggccugagaaacauccccagcauccagagcagaggccuguucggcgccaucgccggcuucaucgagggcggcuggaccggcaugaucgacggcugguacggcuaccaccaccagaacgagcagggcagcggcuacgccgccgaccagaagagcacccagaacgccaucaacggcaucaccaacaaggugaacagcgugaucgagaagaugaacacccaguucaccgccgugggcaaggaguucaacaagcuggagagaagaauggagaaccugaacaagaagguggacgacggcuuccuggacaucuggaccuacaacgccgagcugcuggugcugcuggagaacgagagaacccuggacuuccacgacagcaacgugaagaaccuguacgagaaggugaagagccagcugaagaacaacgccaaggagaucggcaacggcugcuucgaguucuaccacaagugcaacaacgagugcauggagagcgugaagaacggcaccuacgacuaccccaaguacagcgaggagagcaagcugaacagagagaagaucgacggcgugaagcuggagagcaugggcguguaccagauccuggccaucuacagcaccguggccagcagccuggugcugcuggugagccugggcgccaucagcuucuggaugugcagcaacggcagccugcagugcagaaucugcaucuga

SEQ ID NO: 169698 - RNA, 1701 nt, Artificial Sequence
  derived and/or modified CDS sequence (opt4) from hemagglutinin__InfluenzaA__AFO64857
augaaggccaagcugcuggugcugcugugcgccuucaccgccaccuacgccgacaccaucugcaucggcuaccacgccaacaacagcaccgacaccguggacaccgugcuggagaagaacgugaccgugacccacagcgugaaccugcuggaggacagccacaacggcaagcugugcagacugaagggcaccgccccccugcagcugggcaacugcagcguggccggcuggauccugggcaaccccgagugcgagagccuguucagcaaggagagcuggagcuacaucgccgagacccccaaccccgagaacggcaccugcuaccccggcuacuucgccgacuacgaggagcugagagagcagcugagcagcgugagcagcuucgagagauucgagaucuuccccaaggagagcagcuggcccaaccacaccgugaccaagggcgugaccgccagcugcagccacaacggcaagagcagcuucuacaagaaccugcuguggcugaccgagaagaacggccuguaccccaaccugagcaagagcuacgugaacaacaaggagaaggaggugcuggugcuguggggcgugcaccaccccagcaacaucggcgaccagagagccaucuaccacaccgagaacgccuacgugagcguggugagcagccacuacagcagaagauucacccccgagaucgccaagagacccaaggugagaggccaggagggcagaaucaacuacuacuggacccugcuggagcccggcgacaccaucaucuucgaggccaacggcaaccugaucgcccccugguacgccuucgcccugagcagaggcuucggcagcggcaucaucaccagcaccgccagcaugggcgagugcgacgccaagugccagaccccccagggcgccaucaacagcagccugcccuuccagaacgugcaccccgugaccaucggcgagugccccaaguacgugagaagcaccaagcugagaauggugaccggccugagaaacauccccagcauccagagcagaggccuguucggcgccaucgccggcuucaucgagggcggcuggaccggcaugaucgacggcugguacggcuaccaccaccagaacgagcagggcagcggcuacgccgccgaccagaagagcacccagaacgccaucgacggcaucaccaacaaggugaacagcgugaucgagaagaugaacacccaguucaccgccgugggcaaggaguucaacaagcuggagagaagaauggagaaccugaacaagaagguggacgacggcuuccuggacaucuggaccuacaacgccgagcugcuggugcugcuggagaacggcagaacccuggacuuccacgacagcaacgugaagaaccuguacgagaaggugaagaaccagcugaagaacaacgccaaggagaucggcaacggcugcuucgaguucuaccacaagugcaacaacgagugcauggagagcgugaagaacggcaccuacgacuaccccaaguacagcgaggagagcaagcugaacagagagaagaucgacggcgugaagcuggagagcaugggcguguaccagauccuggccaucuacagcaccguggccagcagccuggugcugcuggugagccugggcgccaucagcuucuggaugugcagcaacggcagccugcagugcagaaucugcaucuga

SEQ ID NO: 169699 - RNA, 1701 nt, Artificial Sequence
  derived and/or modified CDS sequence (opt4) from hemagglutinin__InfluenzaA__AFO64868
augaaggugaagcugcuggugcugcugugcgccuucaccgccaccuacgccgacaccaucugcaucggcuaccacgccaacaacagcaccgacaccguggacaccgugcuggagaagaacgugaccgugacccacagcgugaaccugcuggaggacagccacaacggcaagcugugcagacugaagggcaccgccccccugcagcugggcaacugcagcguggccggcuggauccugggcaaccccgagugcgagagccuguucagcaaggagagcuggagcuacaucgccgagacccccaaccccgagaacggcaccugcuaccccggcugcuucgccgacuacgaggagcugagagagcagcugagcagcgugagcagcuucgagagauucgagaucuuccccaaggagagcagcuggcccaaccacaccgugaccaagggcgugaccgccagcugcagccacaacggcaagagcagcuucuacaagaaccugcuguggcugaccgagaagaacggccuguaccccaaccugagcaagagcuacgugaacaacaaggagaaggaggugcuggugcuguggggcgugcaccaccccagcaacaucagagaccagagagccaucuaccacaccgagaacgccuacgugagcguggugagcagccacuacagcagaagauucacccccgagaucgccaagagacccaaggugagaggccaggagggcagaaucaacuacuacuggacccugcuggagcccggcgacaccaucaucuucgaggccaacggcaaccugaucgcccccugguacgccuucgcccugagcagaggcuucggcagcggcaucaucaccagcaacgccagcaugggcgagugcgacgccaagugccagaccccccagggcgccaucaacagcagccugcccuuccagaacgugcaccccgugaccaucggcgagugccccaaguacgugagaagcaccaagcugagaauggugaccggccugagaaacauccccagcauccagagcagaggccuguucggcgccaucgccggcuucaucgagggcggcuggaccggcaugaucgacggcugguacggcuaccaccaccagaacgagcagggcagcggcuacgccgccgaccagaagagcacccagaacgccaucgacggcaucaccaacaaggugaacagcgugaucgagaagaugaacacccaguucaccgccgugggcaaggaguucaacaagcuggagagaagaauggagaaccugaacaagaagguggacgacggcuuccuggacaucuggaccuacaacgccgagcugcuggugcugcuggagaacgagagaacccuggacuuccacgacagcaacgugaagaaccuguacgagaaggugaagaaccagcugaagaacaacgccaaggagaucggcaacggcugcuucgaguucuaccacaagugcaacaacgagugcauggagagcgugaagaacggcaccuacgacuaccccaaguacagcgaggagagcaagcugaacagagagaagaucgacggcgugaagcuggagagcaugggcguguaccagauccuggccaucuacagcaccguggccagcagccuggugcugcuggugagccugggcgccaucagcuucuggaugugcagcaacggcagccugcagugcagaaucugcaucuga

SEQ ID NO: 169700 - RNA, 1698 nt, Artificial Sequence
  derived and/or modified CDS sequence (opt4) from hemagglutinin__InfluenzaA__AFO64879
augaaggccaagcugcuggugcugcugugcaccuucaccgccaccuacgccgacaccaucugcaucggcuaccacgccaacaacagcaccgacaccguggacaccgugcuggagaagaacgugaccgugacccacagcgugaaccugcuggaggacagccacaacggcaagcugugccugcugaagggcaucgccccccugcagcugggcaacugcagcguggccggcuggauccugggcaaccccgagugcgagagccugaucuucaaggagagcuggagcuacaucguggagacccccaaccccgagaacggcaccugcuaccccggcuacuucgccgacuacgaggagcugagagagcagcugagcagcgugagcagcuucgagagauucgagaucuuccccaaggagagcagcuggcccaaccacaccgugaccggcgugagcgccagcugcagccacaacggcaagagcagcuucuacagaaaccugcuguggcugaccgagaagaacggccuguaccccaaccugagcaagagcuacgugaacaacaaggagaaggaggugcuggugcuguggggcgugcaccaccccagcaacaucagagaccagagagccaucuaccacaccgagaacgccuacgugagcguggugagcagccacuacagcagaagauucacccccgagaucgccaagagacccaaggugagaggccaggagggcagaaucaacuacuacuggacccugcuggagcccggcgacaccaucaucuucgaggccaacggcaaccugaucgcccccugguacgccuucgcccugagcagaggcuucggcagcggcaucaucaccagcaacgcccccauggacgagugcgacgccaagugccagaccccccagggcgccaucaacagcagccugcccuuccagaacgugcaccccgugaccaucggcgagugccccaaguacgugagaagcgccaagcugagaauggugaccggccugagaaacauccccagcauccagagcagaggccuguucggcgccaucgccggcuucaucgagggcggcuggaccggcaugaucgacggcugguacggcuaccaccaccagaacgagcagggcagcggcuacgccgccgaccagaagagcacccagaacgccaucaacggcaucaccaacaaggugaacagcgugaucgagaagaugaacacccaguucaccgccgugggcaaggaguucaacaagcuggagagaagaauggagaaccugaacaagaagguggacgacggcuuccuggacaucuggaccuacaacgccgagcugcuggugcugcuggagaacgagagaacccuggacuuccacgacagcaacgugaagaaccuguacgagaaggugaagagccagcugaagaacaacgccaaggagaucggcaacggcugcuucgaguucuaccacaagugcaacaacgagugcauggagagcgugaagaacggcaccuacgacuaccccaaguacagcgaggagagcaagcugaacagagagaagaucgacggcgugaagcuggagagcaugggcguguaccagauccuggccaucuacagcaccguggccagcagccuggugcugcuggugagccugggcgccaucagcuucuggaugugcagcaacggcagccugcagugcagaaucugcaucuga

SEQ ID NO: 169701 - RNA, 1698 nt, Artificial Sequence
  derived and/or modified CDS sequence (opt4) from hemagglutinin__InfluenzaA__AFO64890
augaaggccaagcugcuggugcugcugugcaccuucaccgccaccuacgccgacaccaucugcaucggcuaccacgccaacaacagcaccgacaccguggacaccgugcuggagaagaacgugaccgugacccacagcgugaaccugcuggaggacagccacaacggcaagcugugccugcugaagggcaucgccccccugcagcugggcaacugcagcguggccggcuggauccugggcaaccccgagugcgagagccugaucagcaaggagagcuggagcuacaucguggagacccccaaccccgagaacggcaccugcuaccccggcuacuucgccgacuacgaggagcugagagagcagcugagcagcgugagcagcuucgagagauucgagaucuuccccaaggagagcagcuggcccaaccacaccgugaccggcgugagcgccagcugcagccacaacggcaagagcagcuucuacagaaaccugcuguggcugaccgagaagaacggccuguaccccaaccugagcaagagcuacgugaacaacaaggagaaggaggugcuggugcuguggggcgugcaccaccccagcaacaucagagaccagagagccaucuaccacaccgagaacgccuacgugagcguggugagcagccacuacagcagaagauucacccccgagaucgccaagagacccaaggugagaggccaggagggcagaaucaacuacuacuggacccugcuggagcccggcgacaccaucaucuucgaggccaacggcaaccugaucgcccccugguacgccuucgcccugagcagaggcuucggcagcggcaucaucaccagcaacgcccccauggacgagugcgacgugaagugccagaccccccagggcgccaucaacagcagccugcccuuccagaacgugcaccccgugaccaucggcgagugccccaaguacgugagaagcgccaagcugagaauggugaccggccugagaaacauccccagcauccagagcagaggccuguucggcgccaucgccggcuucaucgagggcggcuggaccggcaugaucgacggcugguacggcuaccaccaccagaacgagcagggcagcggcuacgccgccgaccagaagagcacccagaacgccaucaacggcaucaccaacaaggugaacagcgugaucgagaagaugaacacccaguucaccgccgugggcaaggaguucaacaagcuggagagaagaauggagaaccugaacaagaagguggacgacggcuuccuggacaucuggaccuacaacgccgagcugcuggugcugcuggagaacgagagaacccuggacuuccacgacagcaacgugaagaaccuguacgagaaggugaagagccagcugaagaacaacgccaaggagaucggcaacggcugcuucgaguucuaccacaagugcaacaacgagugcauggagagcgugaagaacggcaccuacgacuaccccaaguacagcgaggagagcaagcugaacagagagaagaucgacggcgugaagcuggagagcaugggcguguaccagauccuggccaucuacagcaccguggccagcagccuggugcugcuggugagccugggcgccaucagcuucuggaugugcagcaacggcagccugcagugcagaaucugcaucuga

SEQ ID NO: 169702 - RNA, 1701 nt, Artificial Sequence
  derived and/or modified CDS sequence (opt4) from hemagglutinin__InfluenzaA__AFO64901
augaaggccaagcugcuggugcugcugugcgccuucaccgccaccuacgccgacaccaucugcaucggcuaccacgccaacaacagcaccgacaccguggacaccgugcuggagaagaacgugaccgugacccacagcgugaaccugcuggaggacagccacaacggcaagcugugcagacugaagggcaccgccccccugcagcugggcaacugcagcaucgccggcuggauccugggcaaccccgagugcgagagccuguucagcaaggagagcuggagcuacaucgccgagacccccaaccccgagaacggcaccugcuaccccggcuacuucgccgacuacgaggagcugagagagcagcugagcagcgugagcagcuucgagagauucgagaucuuccccaaggagagcagcuggcccaaccacaccgugaccaagggcgugaccgccagcugcagccacaacggcaagagcagcuucuacaagaaccugcuguggcugaccgagaagaacggccuguaccccaaccugagcaagagcuacgugaacaacaagaagaaggaggugcuggugcuguggggcgugcaccaccccagcaacaucggcgaccagagagccaucuaccacaccgagaacgccuacgugagcguggugagcagccacuacagcagaagauucacccccgagaucgccaagagacccaaggugagaaaccaggagggcagaaucaacuacuacuggacccugcuggagcccggcgacaccaucaucuucgaggccaacggcaaccugaucgcccccugguacgccuucgcccugagcagaggcuucgagagcggcaucaucaccagcaacgccagcaugggcgagugcgacgccaagugccagaccccccagggcgccaucaacagcagccugcccuuccagaacgugcaccccgugaccaucggcgagugccccaaguacgugagaagcaccaagcugagaauggugaccggccugagaaacauccccagcauccagagcagaggccuguucggcgccaucgccggcuucaucgagggcggcuggaccggcaugaucgacggcugguacggcuaccaccaccagaacgagcagggcagcggcuacgccgccgaccagaagagcacccagaacgccaucaacggcaucaccaacaaggugaacagcaucaucgagaagaugaacacccaguucaccgccgugggcaaggaguucaacaagcuggagagaagaauggagaaccugaacaagaagguggacgacggcuuccuggacaucuggaccuacaacgccgagcugcuggugcugcuggagaacgagagaacccuggacuuccacgacagcaacgugaagaaccuguacgagaaggugaagaaccagcugaagaacaacgccaaggagaucggcaacggcugcuucgaguucuaccacaagugcaacaacgagugcauggagagcgugaagaacggcaccuacgacuaccccaaguacagcaaggagagcaagcugaacagagagaagaucgacggcgugaagcuggagagcaugggcguguaccagauccuggccaucuacagcaccguggccagcagccuggugcugcuggugagccugggcgccaucagcuucuggaugugcagcaacggcagccugcagugcagaaucugcaucuga

SEQ ID NO: 169703 - RNA, 1698 nt, Artificial Sequence
  derived and/or modified CDS sequence (opt4) from hemagglutinin__InfluenzaA__AFO65016
augaaggccaagcugcuggugcugcugugcaccuucaccgccaccuacgccgacaccaucugcaucggcuaccacgccaacaacagcaccgacaccguggacaccgugcuggagaagaacgugaccgugacccacagcgugaaccugcuggaggacagccacaacggcaagcugugccugcugaagggcaucgccccccugcagcugggcaacugcagcguggccggcuggauccugggcaaccccgagugcgagagccugaucagcaaggagagcuggagcuacaucguggagacccccaaccccgagaacggcaccugcuaccccggcuacuucgccgacuacgaggagcugagagagcagcugagcagcgugagcagcuucgagagauucgagaucuuccccaaggagagcagcuggcccaaccacaccgugaccggcgugagcgccagcugcagccacaacggcaagagcagcuucuacagaaaccugcuguggcugaccaagaagaacggccuguaccccaaccugagcaagagcuacgugaacaacaaggagaaggaggugcuggugcuguggggcgugcaccaccccagcaacaucggcgaccagagaaccaucuaccacaccgagaacgccuacgugagcguggugagcagccacuacagcagaagauucacccccgagaucgccaagagacccaaggugagagaccaggagggcagaaucaacuacuacuggacccugcuggagcccggcgacaccaucaucuucgaggccaacggcaaccugaucgcccccugguacgccuucgcccugagcagaggcuucggcagcggcaucaucaccagcaacgcccccauggacgagugcgacgccaagugccagaccccccagggcgccaucaacagcagccugcccuuccagaacgugcaccccaucaccaucggcgagugccccaaguacgugagaagcgccaagcugagaauggugaccggccugagaaacauccccagcauccagagcagaggccuguucggcgccaucgccggcuucaucgagggcggcuggaccggcaugaucgacggcugguacggcuaccaccaccagaacgagcagggcagcggcuacgccgccgaccagaagagcacccagaacgccaucaacggcaucaccaacaaggugaacagcgugaucgagaagaugaacacccaguucaccgccgugggcaaggaguucaacaaccuggagagaagaauggagaaccugaacaagaagguggacgacggcuuccuggacaucuggaccuacaacgccgagcugcuggugcugcuggagaacgagagaacccuggacuuccacgacagcaacgugaagaaccuguacgagaaggugaagagccagcugaagaacaacgccaaggagaucggcaacggcugcuucgaguucuaccacaagugcaacaacgagugcauggagagcgugaagaacggcaccuacgacuaccccaaguacagcgaggagagcaagcugaacagagagaagaucgacggcgugaagcuggagagcaugggcguguaccagauccuggccaucuacagcaccguggccagcagccuggugcugcuggugagccugggcgccaucagcuucuggaugugcagcaacggcagccugcagugcagaaucugcaucuga

SEQ ID NO: 169704 - RNA, 1698 nt, Artificial Sequence; identical to SEQ ID NO: 162175
  derived and/or modified CDS sequence (opt4) from hemagglutinin__InfluenzaA__AFO65027

SEQ ID NO: 169705 - RNA, 1698 nt, Artificial Sequence
  derived and/or modified CDS sequence (opt4) from hemagglutinin__InfluenzaA__AFO65038
augaaggccaagcugcuggugcugcugugcaccuucaccgccaccuacgccgacaccaucugcaucggcuaccacgccaacaacagcaccgacaccguggacaccgugcuggagaagaacgugaccgugacccacagcgugaaccugcuggaggacagccacaacggcaagcugugccugcugaagggcaucgccccccugcagcugggcaacugcagcguggccggcuggauccugggcaaccccgagugcgagcugcugaucagcaaggagagcuggagcuacaucguggagacccccaaccccgagaacggcaccugcuaccccggcuacuucgccgacuacgaggagcugagagagcagcugagcagcgugagcagcuucgagagauucgagaucuuccccaaggagagcagcuggcccaaccacaccgugaccggcgugagcgccagcugcagccacaacggcaagagcagcuucuacagaaaccugcuguggcugaccggcaagaacggccuguaccccaaccugagcaugagcuacgugaacaacaaggagaaggaggugcuggugcuguggggcgugcaccacccccccaacaucggcaaccagagagcccuguaccacaccgagaacgccuacgugagcguggugagcagccacuacagcagaagauucacccccgagaucgccaagagacccaaggugagagaccaggagggcagaaucaacuacuacuggacccugcuggagcccggcgacaccaucaucuucgaggccaacggcaaccugaucgcccccugguacgccuucgcccugagcagaggcuucggcagcggcaucaucaccagcaacgcccccauggacgagugcgacgccaagugccagaccccccagggcgccaucaacagcagccugcccuuccagaacgugcaccccgugaccaucggcgagugccccaaguacgugagaagcgccaagcugagaauggugaccggccugagaaacauccccagcauccagagcagaggccuguucggcgccaucgccggcuucaucgagggcggcuggaccggcaugguggacggcugguacggcuaccaccaccagaacgagcagggcagcggcuacgccgccgaccagaagagcacccagaacgccaucaacggcaucaccaacaaggugaacagcgugaucgagaagaugaacacccaguucaccgccgugggcaaggaguucaacaagcuggagagaagaauggagaaccugaacaagaagguggacgacggcuuccuggacaucuggaccuacaacgccgagcugcuggugcugcuggagaacgagagaacccuggacuuccacgacagcaacgugaagaaccuguacgagaaggugaagagccagcugaagaacaacgccaaggagaucggcaacggcugcuucgaguucuaccacaagugcaacaacgagugcauggagagcgugaagaacggcaccuacgacuaccccaaguacagcgaggagagcaagcugaacagagagaagaucgacggcgugaagcuggagagcaugggcguguaccagauccuggccaucuacagcaccguggccagcagccuggugcugcuggugagccugggcgccaucagcuucuggaugugcagcaacggcagccugcagugcagaaucugcaucuga

SEQ ID NO: 169706 - RNA, 1698 nt, Artificial Sequence
  derived and/or modified CDS sequence (opt4) from hemagglutinin__InfluenzaA__AFO66136
augaaggugaagcugcuggugcugcugugcaccuucaccgccaccuacgccgacaccaucugcaucggcuaccacgccaacaacagcaccgacaccguggacaccgugcuggagaagaacgugaccgugacccacagcgugaaccugcuggaggacagccacaacggcaagcugugccugcugaagggcaucgccccccugcagcugggcaacugcagcguggccggcuggauccugggcaaccccgagugcgagcugcugaucagcaaggagagcuggagcuacaucguggagacccccaaccccgagaacggcaccugcuaccccggcuacuucgccgacuacgaggagcugagagagcagcugagcagcgugagcagcuucgagagauucgagaucuuccccaaggagagcagcuggcccaaccacaccgugaccggcgugagcgccagcugcagccacaacggcaagagcagcuucuacagaaaccugcuguggcugaccggcaagaacggccuguaccccaaccugagcaagagcuacgccaacaacaaggagaaggaggugcuggugcuguggggcgugcaccacccccccaacaucggcaaccagagagcccuguaccacaccgagaacgccuacgugagcguggugagcagccacuacagcagaagauucacccccgagaucgccaagagacccaaggugagagaccaggagggcagaaucaacuacuacuggacccugcuggagcccggcgacaccaucaucuucgaggccaacggcaaccugaucgcccccagauacgccuucgcccugagcagaggcuucggcagcggcaucaucaccagcaacgcccccauggacgagugcgacgccaagugccagaccccccagggcgccaucaacagcagccugcccuuccagaacgugcaccccgugaccaucggcgagugccccaaguacgugagaagcgccaagcugagaauggugaccggccugagaaacauccccagcauccagagcagaggccuguucggcgccaucgccggcuucaucgagggcggcuggaccggcaugguggacggcugguacggcuaccaccaccagaacgagcagggcagcggcuacgccgccgaccagaagagcacccagaacgccaucaacggcaucaccaacaaggugaacagcgugaucgagaagaugaacacccaguucaccgccgugggcaaggaguucaacaagcuggagagaagaauggagaaccugaacaagaagguggacgacggcuuccuggacaucuggaccuacaacgccgagcugcuggugcugcuggagaacgagagaacccuggacuuccacgacagcaacgugaagaaccuguacgagaaggugaagagccagcugaagaacaacgccaaggagaucggcaacggcugcuucgaguucuaccacaagugcaacaacgagugcauggagagcgugaagaacggcaccuacgacuaccccaaguacagcgaggagagcaagcugaacagagagaagaucgacggcgugaagcuggagagcaugggcguguaccagauccuggccaucuacagcaccguggccagcagccuggugcugcuggugagccugggcgccaucagcuucuggaugugcagcaacggcagccugcagugcagaaucugcaucuga

SEQ ID NO: 169707 - RNA, 1701 nt, Artificial Sequence
  derived and/or modified CDS sequence (opt4) from hemagglutinin__InfluenzaA__AFO66147
augaaggccaagcugcuggugcugcugugcgccuucaccaccaccuacgccgacaccaucugcaucggcuaccacgccaacaacagcaccgacaccguggacaccgugcuggagaagaacgugaccgugacccacagcgugaaccugcuggaggacagccacaacggcaagcugugcagacugaagggcaccgccccccugcagcugggcaacugcagcaucgccggcuggauccugggcaaccccgagugcgagagccuguucagcaaggagagcuggagcuacaucgccgagacccccaaccccaagaacggcaccugcuaccccggcuacuucgccgacuacgaggagcugagagagcagcugagcagcgugagcagcuucgagagauucgagaucuuccccaaggacagcagcuggcccaaccacaccgugaccaagggcgugaccgccagcugcagccacaacggcaagagcagcuucuacaagaaccugcuguggcugaccggcaagaacggccuguaccccaaccugagcaagagcuacgugaacaagaagggcaaggaggugcuggugcuguggggcgugcaccaccccagcaacaugggcgaccagagagccaucuaccacaaggagaacgccuacgugagcgugcugagcagccacuacagcagaagauucacccccgagaucgccaagagacccaaggugagagaccaggagggcagaaucaacuacuacuggacccugcuggagcccggcgacaccaucaucuucgaggccaacggcaaccugaucgcccccugguacgccuucgcccugagcagaggcuucggcagcggcaucaucaucagcaacgccagcaugggcgagugcgacgccaagugccagaccccccagggcgccaucaacagcagccugcccuuccagaacgugcaccccgugaccaucggcgagugccccaaguacgugagaagcaccaagcugagaauggugaccggccugagaaacgugcccagcauccagagcagaggccuguucggcgccaucgccggcuucaucgagggcggcuggaccggcaugaucgacggcugguacggcuaccaccaccagaacgagcagggcagcggcuacgccgccgaccagaagagcacccagaacgccaucaacggcaucaccaacaaggugaacagcaucaucgagaagaugaacacccaguucaccgccgugggcaaggaguucaacaagcuggagagaagaauggagaaccugaacaagaagguggacgacggcuuccuggacaucuggaccuacaacgccgagcugcuggugcugcuggagaacgagagaacccuggacuuccacgacagcaacgugaagaaccuguacgagaaggugaagaaccagcugaagaacaacgccaaggagaucggcaacggcugcuucgaguucuaccacaagugcaacaacgagugcauggagagcgugaagaacggcaccuacgacuaccccaaguacagcaaggagagcaagcugaacagagagaagaucgacggcgugaagcuggagagcaugggcguguaccagauccuggccaucuacagcaccguggccagcagccuggugcugcuggugagccugggcgccaucagcuucuggaugugcagcaacggcagccugcagugcagaaucugcaucuga

SEQ ID NO: 169708 - RNA, 1698 nt, Artificial Sequence
  derived and/or modified CDS sequence (opt4) from hemagglutinin__InfluenzaA__AFO66158
augaaggccaagcugcuggugcugcugugcaccuucaccgccaccuacgccgacaccaucugcaucggcuaccacgccaacaacagcaccgacaccguggacaccgugcuggagaagaacgugaccgugacccacagcgugaaccugcuggaggacagccacaacggcaagcugugccugcugaagggcaucgccccccugcagcugggcaacugcagcguggccggcuggauccugggcaaccccgagugcgagcugcugaucagcaagggcagcuggagcuacaucguggagacccccaaccccgagaacggcaccugcuaccccggcuacuucgccgacuacgaggagcugagagagcagcugagcagcgugagcagcuucgagagauucgagaucuuccccaagggcagcagcuggcccaaccacaccgugaccggcgugagcgccagcugcagccacaacggcaagagcagcuucuacagaaaccugcuguggcugaccggcaagaacggccuguaccccaaccugagcaugagcuacgugaacaacaaggagaaggaggugcuggugcuguggggcgugcaccacccccccaacaucggcaaccagagagcccuguaccacaccgagaacgccuacgugagcguggugagcagccacuacagcagaagauucacccccgagaucgccaagagacccaaggugagagaccaggagggcagaaucaacuacuacuggacccugcuggagcccggcgacaccaucaucuucgaggccaacggcaaccugaucgcccccugguacgccuucgcccugagcagaggcuucggcagcggcaucaucaccagcaacgcccccaugggcgagugcgacgccaagugccagaccccccagggcgccaucaacagcagccugcccuuccagaacgugcaccccgugaccaucggcgagugccccaaguacgugagaagcgccaagcugagaauggugaccggccugagaaacauccccagcauccagagcagaggccuguucggcgccaucgccggcuucaucgagggcggcuggaccggcaugguggacggcugguacggcuaccaccaccagaacgagcagggcagcggcuacgccgccgaccagaagagcacccagaacgccaucaacggcaucaccaacaaggugaacagcgugaucgagaagaugaacacccaguucaccgccgugggcaaggaguucaacaagcuggagagaagaauggagaaccugaacaagaagguggacgacggcuuccuggacaucuggaccuacaacgccgagcugcuggugcugcuggagaacgagagaacccuggacuuccacgacagcaacgugaagaaccuguacgagaaggugaagagccagcugaagaacaacgccaaggagaucggcaacggcugcuucgaguucuaccacaagugcaacaacgagugcauggagagcgugaagaacggcaccuacgacuaccccaaguacagcgaggagagcaagcugaacagagagaagaucgacggcgugaagcuggagagcaugggcguguaccagauccuggccaucuacagcaccguggccagcagccuggugcugcuggugagccugggcgccaucagcuucuggaugugcagcaacggcagccugcagugcagaaucugcaucuga

SEQ ID NO: 169709 - RNA, 1698 nt, Artificial Sequence
  derived and/or modified CDS sequence (opt4) from hemagglutinin__InfluenzaA__AFO66169
augaaggugaagcugcuggugcugcugugcaccuucaccgccaccuacgccgacaccaucugcaucggcuaccacgccaacaacagcaccgacaccguggacaccgugcuggagaagaacgugaccgugacccacagcgugaaccugcuggaggacagccacaacggcaagcugugccugcugaagggcaucgccccccugcagcugggcaacugcagcguggccggcuggauccugggcaaccccgagugcgagcugcugaucagcaaggagagcuggagcuacaucguggagaccagcaaccccgagaacggcaccugcuaccccggcuacuucaccgacuacgaggagcugagagagcagcugagcagcgugagcagcuucgagagauucgagaucuuccccaaggagagcagcuggcccaaccacaccgugaccggcgugagcgccagcugcagccacaacggcaagagcagcuucuacaagaaccugcuguggcugaccggcaagaacggccuguaccccaaccugagcaagagcuacgccaacaacaaggagaaggaggugcuggugcuguggggcgugcaccacccccccaacaucggcgaccagagagcccuguaccacaccgagaacgccuacgugagcguggugagcagccacuacagcagaagauucacccccgagaucgccaagagacccaaggugagagaccaggagggcagaaucaacuacuacuggacccugcuggagcccggcgacaccaucaucuucgaggccaacggcaaccugaucgcccccagauacgccuucgcccugagcagaggcuucggcagcggcaucaucaccagcaacgcccccauggacgagugcgacgccaagugccagaccccccacggcgccaucaacagcagccugcccuuccagaacgugcaccccgugaccaucggcgagugccccaaguacgugagaagcgccaagcugagaauggugaccggccugagaaacauccccagcauccagagcagaggccuguucggcgccaucgccggcuucaucgagggcggcuggaccggcaugguggacggcugguacggcuaccaccaccagaacgagcagggcagcggcuacgccgccgaccagaagagcacccagaacgccaucaacggcaucaccaacaaggugaacagcgugaucgagaagaugaacacccaguucaccgccgugggcaaggaguucaacaagcuggagagaagaauggagaaccugaacaagaagguggacgacggcuucaucgacaucuggaccuacaacgccgagcugcuggugcugcuggagaacgagagaacccuggacuuccacgacagcaacgugaagaaccuguacgagaaggugaagagccagcugaagaacaacgccaaggagaucggcaacggcugcuucgaguucuaccacaagugcaacgacgagugcauggagagcgugaagaacggcaccuacgacuaccccaaguacagcgaggagagcaagcugaacagagagaagaucgacggcgugaagcuggagagcaugggcguguaccagauccuggccaucuacagcaccguggccagcagccuggugcugcuggugagccugggcgccaucagcuucuggaugugcagcaacggcagccugcagugcagaaucugcaucuga

SEQ ID NO: 169710 - RNA, 1698 nt, Artificial Sequence
  derived and/or modified CDS sequence (opt4) from hemagglutinin__InfluenzaA__AFO66180
augaaggccaagcugcuggugcugcugugcaccuucaccgccaccuacgccgacaccaucugcaucggcuaccacgccaacaacagcaccgacaccguggacaccgugcuggagaagaacgugaccgugacccacagcgugaaccugcuggaggacagccacaacggcaagcugugccugcugaagggcaucgccccccugcagcugggcaacugcagcguggccggcuggauccugggcaaccccgagugcgagcugcugaucagcaaggagagcuggagcuacaucguggagacccccaaccccgagaacggcaccugcuaccccggcuacuucgccgacuacgaggagcugagagagcagcugagcagcgugagcagcuucgagagauucgagaucuuccccaagggcagcagcuggcccaaccacaccgugaccggcgugagcgccagcugcagccacaacggcaagagcagcuucuacagaaaccugcuguggcugaccggcaagaacggccuguaccccaaccugagcaugagcuacgugaacaacaaggagaaggaggugcuggugcuguggggcgugcaccacccccccaacaucggcgaccagagagcccuguaccacaccgagaacgccuacgugagcguggugagcagccacuacagcagaagauucacccccgagaucgccaagagacccaaggugagaaaccaggagggcagaaucaacuacuacuggacccugcuggagcccggcgacaccaucaucuucgaggccaacggcaaccugaucgcccccugguacgccuucgcccugagcagaggcuucggcagcggcaucaucaccagcaacgcccccaugggcgagugcgacgccaagugccagaccccccagggcgccaucaacagcagccugcccuuccagaacgugcaccccgugaccaucggcgagugccccaaguacgugagaagcgccaagcugagaauggugaccggccugagaaacauccccagcauccagagcagaggccuguucggcgccaucgccggcuucaucgagggcggcuggaccggcaugguggacggcugguacggcuaccaccaccagaacgagcagggcagcggcuacgccgccgaccagaagagcacccagaacgccaucaacggcaucaccaacaaggugaacagcgugaucgagaagaugaacacccaguucaccgccgugggcaaggaguucaacaagcuggagagaagaauggagaaccugaacaagaagguggacgacggcuuccuggacaucuggaccuacaacgccgagcugcuggugcugcuggagaacgagagaacccuggacuuccacgacagcaacgugaagaaccuguacgagaaggugaagagccagcugaagaacaacgccaaggagaucggcaacggcugcuucgaguucuaccacaagugcaacaacgagugcauggagagcgugaagaacggcaccuacgacuaccccaaguacagcgaggagagcaagcugaacagagagaagaucgacggcgugaagcuggagagcaugggcguguaccagauccuggccaucuacagcaccguggccagcagccuggugcugcuggugagccugggcgccaucagcuucuggaugugcagcaacggcagccugcagugcagaaucugcaucuga

SEQ ID NO: 169711 - RNA, 1698 nt, Artificial Sequence
  derived and/or modified CDS sequence (opt4) from hemagglutinin__InfluenzaA__AFO66191
augaaggccaagcugcuggugcugcugugcaccuucaccgccaccuacgccgacaccaucugcaucggcuaccacgccaacaacagcaccgacaccguggacaccgugcuggagaagaacgugaccgugacccacagcgugaaccugcuggaggacagccacaacggcaagcugugccugcugaagggcaucgccccccugcagcugggcaacugcagcguggccggcuggauccugggcaaccccgagugcgagcugcugaucagcaaggagagcuggagcuacaucguggagacccccaaccccgagaacggcaccugcuaccccggcuacuucgccgacuacgaggagcugagagagcagcugagcagcgugagcagcuucgagagauucgagaucuuccccaagggcagcagcuggcccaaccacaccgugaccggcgugagcgccagcugcagccacaacggcaagagcagcuucuacagaaaccugcuguggcugaccggcaagaacggccuguaccccaaccugagcaugagcuacgugaacaacaaggagaaggaggugcuggugcuguggggcgugcaccacccccccaacaucggcaaccagagagcccuguaccacaccgagaacgccuacgugagcguggugagcagccacuacagcagaagauucacccccgagaucgccaagagacccaaggugagagaccaggagggcagaaucaacuacuacuggacccugcuggagcccggcgacaccaucaucuucgaggccaacggcaaccugaucgcccccugguacgccuucgcccugagcagaggcuucggcagcggcaucaucaccagcaacgcccccauggacgagugcgacgccaagugccagaccccccagggcgccaucaacagcagccugcccuuccagaacgugcaccccgugaccaucggcgagugccccaaguacgugagaagcgccaagcugagaauggugaccggccugagaaacauccccagcauccagagcagaggccuguucggcgccaucgccggcuucaucgagggcggcuggaccggcaugguggacggcugguacggcuaccaccaccagaacgagcagggcagcggcuacgccgccgaccagaagagcacccagaacgccaucaacggcaucaccaacaaggugaacagcgugaucgagaagaugaacacccaguucaccgccgugggcaaggaguucaacaagcuggagagaagaauggagaaccugaacaagaagguggacgacggcuuccuggacaucuggaccuacaacgccgagcugcuggugcugcuggagaacgagagaacccuggacuuccacgacagcaacgugaagaaccuguacgagaaggugaagagccagcugaagaacaacgccaaggagaucggcaacggcugcuucgaguucuaccacaagugcaacaacgagugcauggagagcgugaagaacggcaccuacgacuaccccaaguacagcgaggagagcaagcugaacagagagaagaucgacggcgugaagcuggagagcaugggcguguaccagauccuggccaucuacagcaccguggccagcagccuggugcugcuggugagccugggcgccaucagcuucuggaugugcagcaacggcagccugcagugcagaaucugcaucuga

SEQ ID NO: 169712 - RNA, 1698 nt, Artificial Sequence; identical to SEQ ID NO: 160572
  derived and/or modified CDS sequence (opt4) from hemagglutinin__InfluenzaA__AFO66202

SEQ ID NO: 169713 - RNA, 1698 nt, Artificial Sequence
  derived and/or modified CDS sequence (opt4) from hemagglutinin__InfluenzaA__AFO66213
augaaggugaagcugcuggugcugcugugcaccuucaccgccaccuacgccgacaccaucugcaucggcuaccacgccaacaacagcaccgacaccguggacaccgugcuggagaagaacgugaccgugacccacagcgugaaccugcuggaggacagccacaacggcaagcugugccugcugaagggcaucgccccccugcagcugggcaacugcagcguggccggcuggauccugggcaaccccgagugcgagcugcugaucagcaaggagagcuggagcuacaucguggagacccccaaccccgagaacggcaccugcuaccccggcuacuucgccgacuacgaggagcugagagagcagcugagcagcgugagcagcuucgagagauucgagaucuuccccaaggagagcagcuggcccaaccacaccgugaccggcgugagcgccagcugcagccacaacggcaagagcagcuucuacagaaaccugcuguggcugaccggcaagaacggccuguaccccaaccugagcaagagcuacgccaacaacaagaagaaggaggugcuggugcuguggggcgugcaccacccccccaacaucggcaaccagagagcccuguaccacaccgagaacgccuacgugagcguggugagcagccacuacagcagaagauucacccccgagaucgccaagagacccaaggugagagaccaggagggcagaaucaacuacuacuggacccugcuggagcccggcgacaccaucaucuucgaggccaacggcaaccugaucgcccccagauacgccuucgcccugagcagaggcuucggcagcggcaucaucaccagcaacgcccccauggacgagugcgacgccaagugccagaccccccagggcgccaucaacagcagccugcccuuccagaacgugcaccccgugaccaucggcgagugccccaaguacgugagaagcgccaagcugagaauggugaccggccugagaaacauccccagcauccagagcagaggccuguucggcgccaucgccggcuucaucgagggcggcuggaccggcaugguggacggcugguacggcuaccaccaccagaacgagcagggcagcggcuacgccgccgaccagaagagcacccagaacgccaucaacggcaucaccaacaaggugaacagcgugaucgagaagaugaacacccaguucaccgccgugggcaaggaguucaacaagcuggagagaagaauggagaaccugaacaagaagguggacgacggcuuccuggacaucuggaccuacaacgccgagcugcuggugcugcuggagaacgagagaacccuggacuuccacgacagcaacgugaagaaccuguacgagaaggugaagagccagcugaagaacaacgccaaggagaucggcaacggcugcuucgaguucuaccacaagugcaacgacgagugcauggagagcgugaagaacggcaccuacgacuaccccaaguacagcgaggagagcaagcugaacagagagaagaucgacggcgugaagcuggagagcaugggcguguaccagauccuggccaucuacagcaccguggccagcagccuggugcugcuggugagccugggcgccaucagcuucuggaugugcagcaacggcagccugcagugcagaaucugcaucuga

SEQ ID NO: 169714 - RNA, 1698 nt, Artificial Sequence
  derived and/or modified CDS sequence (opt4) from hemagglutinin__InfluenzaA__AFO66224
augaaggugaagcugcuggugcugcugugcaccuucaccgccaccuacgccgacaccaucugcaucggcuaccacgccaacaacagcaccgacaccguggacaccgugcuggagaagaacgugaccgugacccacagcgugaaccugcuggaggacagccacaacggcaagcugugccugcugaagggcaucgccccccugcagcugggcaacugcagcguggccggcuggauccugggcaaccccgagugcgagcugcugaucagcaaggagagcuggagcuacaucguggagacccccaaccccgagaacggcaccugcuaccccggcuacuucgccgacuacgaggagcugagagagcagcugagcagcgugagcagcuucgagagauucgagaucuuccccaaggagagcagcuggcccaaccacaccgugaccggcgugagcgccagcugcagccacaacggcaagagcagcuucuacagaaaccugcuguggcugaccggcaagaacggccuguaccccaaccugagcaagagcuacgccaacaacaaggagaaggaggugcuggugcuguggggcgugcaccacccccccaacaucggcaaccagagagcccuguaccacaccgagaacgccuacgugagcguggugagcagccacuacagcagaagauucacccccgagaucgccaagagacccaaggugagagaccaggagggcagaaucaacuacuacuggacccugcuggagcccggcgacaccaucaucuucgaggccaacggcaaccugaucgcccccagauacgccuucgcccugagcagaggcuucggcagcggcaucaucaccagcaacgcccccauggacgagugcgacgccaagugccagaccccccagggcgccaucaacagcagccugcccuuccagaacgugcaccccgugaccaucggcgagugccccaaguacgugagaagcgccaagcugagaauggugaccggccugagaaacauccccagcauccagagcagaggccuguucggcgccaucgccggcuucaucgagggcggcuggaccggcaugguggacggcugguacggcuaccaccaccagaacgagcagggcagcggcuacgccgccgaccagaagagcacccagaacgccaucaacggcaucaccaacaaggugaacagcgugaucgagaagaugaacacccaguucaccgccgugggcaaggaguucaacaagcuggagagaagaauggagaaccugaacaagaagguggacgacggcuuccuggacaucuggaccuacaacgccgagcugcuggugcugcuggagaacgagagaacccuggacuuccacgacagcaacgugaagaaccuguacgagaaggugaagagccagcugaagaacaacgccaaggagaucggcaacggcugcuucgaguucuaccacaagugcaacgacgagugcauggagagcgugaagaacggcaccuacgacuaccccaaguacagcgaggagagcaagcugaacagagagaagaucgacggcgugaagcuggagagcaugggcguguaccagauccuggccaucuacagcaccguggccagcagccuggugcugcuggugagccugggcgccaucagcuucuggaugugcagcaacggcagccugcagugcagaaucugcaucuga

SEQ ID NO: 169715 - RNA, 1698 nt, Artificial Sequence
  derived and/or modified CDS sequence (opt4) from hemagglutinin__InfluenzaA__AFO66235
augaaggugaagcugcuggugcugcugugcaccuucaccgccaccuacgccgacaccaucugcaucggcuaccacgccaacaacagcaccgacaccguggacaccgugcuggagaagaacgugaccgugacccacagcgugaaccugcuggaggacagccacaacggcaagcugugccugcugaagggcaucgccccccugcagcugggcaacugcagcguggccggcuggauccugggcaaccccgagugcgagcugcugaucagcaaggagagcuggagcuacaucguggagaagcccaaccccgagaacggcaccugcuaccccggccacuucgccgacuacgaggagcugagagagcagcugagcagcgugagcagcuucgagagauucgagaucuuccccaaggagagcagcuggcccaaccacaccgugaccggcgugagcgccagcugcagccacaacggcaagagcagcuucuacaagaaccugcuguggcugaccggcaagaacggccuguaccccaaccugagcaagagcuacgccaacaacaaggagaaggaggugcuggugcuguggggcgugcaccacccccccaacaucggcgugcagagagcccuguaccacaccgagaacgccuacgugagcguggugagcagccacuacagcagaaaguucacccccgagaucgccaagagacccaaggugagagaccaggagggcagaaucaacuacuacuggacccugcuggagcccggcgacaccaucaucuucgaggccaacggcaaccugaucgcccccagauacgccuucgcccugagcagaggcuucggcagcggcaucaucaacagcaacgcccccauggacgagugcgacgccaagugccagaccccccagggcgccaucaacagcagccugcccuuccagaacgugcaccccgugaccaucggcgagugccccaaguacgugagaagcgccaagcugagaauggugaccggccugagaaacauccccagcauccagagcagaggccuguucggcgccaucgccggcuucaucgagggcggcuggaccggcaugguggacggcugguacggcuaccaccaccagaacgagcagggcagcggcuacgccgccgaccagaagagcacccagaacgccaucaacggcaucaccaacaaggugaacagcgugaucgagaagaugaacacccaguucaccgccgugggcaaggaguucaacaagcuggagagaagaauggagaaccugaacaagaagguggacgacggcuucaucgacaucuggaccuacaacgccgagcugcuggugcugcuggagaacgagagaacccuggacuuccacgacagcaacgugaagaaccuguacgagaaggugaagagccagcugaagaacaacgccaaggagaucggcaacggcugcuucgaguucuaccacaagugcaacgacgagugcauggagagcgugaagaacggcaccuacgacuaccccaaguacagcgaggagagcaagcugaacagagagaagaucgacggcgugaagcuggagagcaugggcguguaccagauccuggccaucuacagcaccguggccagcagccuggugcugcuggugagccugggcgccaucagcuucuggaugugcagcaacggcagccugcagugcagaaucugcaucuga

SEQ ID NO: 169716 - RNA, 1698 nt, Artificial Sequence
  derived and/or modified CDS sequence (opt4) from hemagglutinin__InfluenzaA__AFO66246
augaaggugaagcugcuggugcugcugugcaccuucaccgccaccuacgccgacaccaucugcaucggcuaccacgccaacaacagcaccgacaccguggacaccgugcuggagaagaacgugaccgugacccacagcgugaaccugcuggaggacagccacaacggcaagcugugccugcugaagggcaucgccccccugcagcugggcaacugcagcguggccggcuggauccugggcaaccccgagugcgagcugcugaucagcaaggagagcuggagcuacaucguggagaagcccaaccccgagaacggcaccugcuaccccggccacuucgccgacuacgaggagcugagagagcagcugagcagcgugagcagcuucgagagauucgagaucuuccccaaggagagcagcuggcccaaccacaccgugaccggcgugagcgccagcugcagccacaacggcaagagcagcuucuacaagaaccugcuguggcugaccggcaagaacggccuguaccccaaccugagcaagagcuacgccaacaacaaggagaaggaggugcuggugcuguggggcgugcaccacccccccaacaucggcaaccagagagcccuguaccacaccgagaacgccuacgugagcguggugagcagccacuacagcagaaaguucacccccgagaucgccaagagacccaaggugagagaccaggagggcagaaucaacuacuacuggacccugcuggagcccggcgacaccaucaucuucgaggccaacggcaaccugaucgcccccagauacgccuucgcccugagcagaggcuucggcagcggcaucaucaacagcaacgcccccauggacgagugcgacgccgagugccagaccccccagggcgccaucaacagcagccugcccuuccagaacgugcaccccgugaccaucggcgagugccccaaguacgugagaagcgccaagcugagaauggugaccggccugagaaacauccccagcauccagagcagaggccuguucggcgccaucgccggcuucaucgagggcggcuggaccggcaugguggacggcugguacggcuaccaccaccagaacgagcagggcagcggcuacgccgccgaccagaagagcacccagaacgccaucaacggcaucaccaacaaggugaacagcgugaucgagaagaugaacacccaguucaccgccgugggcaaggaguucaacaagcuggagagaagaauggagaaccugaacaagaagguggacgacggcuucaucgacaucuggaccuacaacgccgagcugcuggugcugcuggagaacgagagaacccuggacuuccacgacagcaacgugaagaaccuguacgagaaggugaagagccagcugaagaacaacgccaaggagaucggcaacggcugcuucgaguucuaccacaagugcaacgacgagugcauggagagcgugaagaacggcaccuacgacuaccccaaguacagcgaggagagcaagcugaacagagagaagaucgacggcgugaagcuggagagcaugggcguguaccagauccuggccaucuacagcaccguggccagcagccuggugcugcuggugagccugggcgccaucagcuucuggaugugcagcaacggcagccugcagugcagaaucugcaucuga

SEQ ID NO: 169717 - RNA, 1701 nt, Artificial Sequence
  derived and/or modified CDS sequence (opt4) from hemagglutinin__InfluenzaA__AFP33324
augaaggccaagcugcuggugcugcugugcaccuucaccgccaccuacgccgacaccaucugcaucggcuaccacgccaacaacagcaccgacaccguggacaccgugcuggagaagaacgugaccgugacccacagcgugaaccugcuggaggacagccacaacggcaagcugugcagacugaagggcaccgccccccugcagcugggcaacugcagcaucgccggcuggauccugggcaaccccgagugcgagagccuguucagcaaggagagcuggagcuacaucgccgagacccccaaccccaagaacggcaccugcuaccccggcuacuucgccgacuacgaggagcugagagagcagcugagcagcgugagcagcuucgagagauucgagaucuuccccaaggacagcagcuggcccaaccacaccgugaccaagggcgugaccgccagcugcagccacaacggcaagagcagcuucuacaagaaccugcuguggcugaccggcaagaacggccuguaccccaaccugagcaagagcuacgugaacaagaagggcaaggaggugcuggugcuguggggcgugcaccaccccagcaacaugggcgaccagagagccaucuaccacaaggagaacgccuacgugagcgugcugagcagccacuacagcagaagauucacccccgagaucgccaagagacccaaggugagagaccaggagggcagaaucaacuacuacuggacccugcuggagcccggcgacaccaucaucuucgaggccaacggcaaccugaucgcccccugguacgccuucgcccugagcagaggcuucggcagcggcaucaucaucagcaacgccagcaugggcgagugcgacgccaagugccagaccccccagggcgccaucaacagcagccugcccuuccagaacgugcaccccgugaccaucggcgagugccccaaguacgugagaagcaccaagcugagaauggugaccggccugagaaacgugcccagcauccagagcagaggccuguucggcgccaucgccggcuucaucgagggcggcuggaccggcaugaucgacggcugguacggcuaccaccaccagaacgagcagggcagcggcuacgccgccgaccagaagagcacccagaacgccaucaacggcaucaccaacaaggugaacagcaucaucgagaagaugaacacccaguucaccgccgugggcaaggaguucaacaagcuggagagaagaauggagaaccugaacaagaagguggacgacggcuuccuggacaucuggaccuacaacgccgagcugcuggugcugcuggagaacgagagaacccuggacuuccacgacagcaacgugaagaaccuguacgagaaggugaagacccagcugaagaacaacgccaaggagaucggcaacggcugcuucgaguucuaccacaagugcaacaacgagugcauggagagcgugaagaacggcaccuacgacuaccccaaguacagcaaggagagcaagcugaacagagagaagaucgacggcgugaagcuggagagcaugggcguguaccagauccuggccaucuacagcaccguggccagcagccuggugcugcuggugagccugggcgccaucagcuucuggaugugcagcaacggcagccugcagugcagaaucugcaucuga

SEQ ID NO: 169718 - RNA, 1698 nt, Artificial Sequence
  derived and/or modified CDS sequence (opt4) from hemagglutinin__InfluenzaA__AFP33325
augaaggugaagcugcuggugcugcugugcaccuucaccgccaccuacgccgacaccaucugcaucggcuaccacgccaacaacagcaccgacaccguggacaccgugcuggagaagaacgugaccgugacccacagcgugaaccugcuggaggacagccacaacggcaagcugugccugcugaagggcaucgccccccugcagcugggcaacugcagcguggccggcuggauccugggcaaccccgagugcgagcugcugauccccaaggagagcuggagcuacaucguggagacccccaaccccgagaacggcaccugcuaccccggcuacuucgccgacuacgaggagcugagagagcagcugagcagcgugagcagcuucgagagauucgagaucuuccccaaggagagcagcuggcccagccacaccgugaccggcgugagcgccagcugcagccacaacggcaagagcagcuucuacagaaaccugcuguggcugaccggcaagaacggccuguaccccaaccugagcaagagcuacagcaacaacaaggagaaggaggugcuggugcuguggggcgugcaccacccccccaacaucggcgaccagagagcccuguaccacaccgagaacgccuacgugagcguggugagcagccacuacagcagaagauucacccccgagaucgccaagagacccaaggugagaggccaggagggcagaaucaacuacuacuggacccugcuggagcccggcgacaccaucaucuucgaggccaacggcaaccugaucgcccccugguacgccuucgcccugagcagaggcuucggcagcggcaucaucaccagcaacgcccccauggacgagugcgacgccaagugccagaccccccagggcgccaucaacagcagccugcccuuccagaacgugcaccccgugaccaucggcgagugccccaaguacgugagaagcgccaagcugagaauggugaccggccugagaaacauccccagcauccagagcagaggccuguucggcgccaucgccggcuucaucgagggcggcuggaccggcaugguggacggcugguacggcuaccaccaccagaacgagcagggcagcggcuacgccgccgaccagaagagcacccagaacgccaucaacggcaucaccaacaaggugaacagcgugaucgagaagaugaacacccaguucaccgccgugggcaaggaguucaacaagcuggagagaagaauggagaaccugaacaagaagguggacgacggcuuccuggacaucuggaccuacaacgccgagcugcuggugcugcuggagaacgagagaacccuggacuuccacgacagcaacgugaagaaccuguacgagaaggugaagagccagcugaagaacaacgccaaggagaucggcaacggcugcuucgaguucuaccacaagugcaacgacgagugcauggagagcgugaagaacggcaccuacgacuaccccaaguacagcgaggagagcaagcugaacagagagaagaucgacggcgugaagcuggagagcaugggcguguaccagauccuggccaucuacagcaccguggccagcagccuggugcugcuggugagccugggcgccaucagcuucuggaugugcagcaacggcagccugcagugcagaaucugcaucuga

SEQ ID NO: 169719 - RNA, 1701 nt, Artificial Sequence
  derived and/or modified CDS sequence (opt4) from hemagglutinin__InfluenzaA__AFQ32573
augaagaccaucaucgcccugagcuacauccugugccugguguucgcccagaagcugcccggcaacgacaacagcaccgccacccugugccugggccaccacgccgugcccaacggcaccaucgugaagaccaucaccaacgaccagaucgaggugaccaacgccaccgagcuggugcagagcagcagcaccggcgagaucugcaacagcccccaccagauccuggacggcgagaacugcacccugaucgacgcccugcugggcgacccccagugcgacggcuuccagaacaagaagugggaccuguucguggagagaagcaaggcccacagcaacugcuaccccuacgacgugcccgacuacgccagccugagaagccugguggccagcagcggcacccuggaguucaacaacgagagcuucaacuggaccggcgugacccagaacggcaccagcagcgccugcaucagaagaagcaacaacagcuucuucagcagacugaacuggcugacccaccugaacuucaaguaccccgcccugaacgugaccaugcccaacaacgagcaguucgacaagcuguacaucuggggcgugcaccaccccggcaccgacaaggaccagaucuuccuguacgcccaggccagcggcagaaucaccgugagcaccaagagaagccagcaggccgugauccccaacaucggcagcagacccagagugagaaacauccccagcagagugagcaucuacuggaccaucgugaagcccggcgacauccugcugaucaacagcaccggcaaccugaucgcccccagaggcuacuucaagaucagaagcggcaagagcagcaucaugagaagcgacgcccccaucggcaagugcaacagcgccugcaucacccccaacggcagcauccccaacgacaagcccuuccagaacgugaacagaaucaccuacggcgccugccccagauacgugaagcagaacacccugaagcuggccaccggcaugagaaacgugcccgagaagcagaccagaggcaucuucggcgccaucgccggcuucaucgagaacggcugggagggcaugguggacggcugguacggcuucagacaccagaacagcgagggcagaggccaggccgccgaccugaagagcacccaggccgccaucgaccagaucaacggcaagcugaacagacugaucggcaagaccaacgagaaguuccaccagaucgagaaggaguucagcgagguggagggcagaauccaggaccuggagaaguacgugggcgacaccaagaucgaccuguggagcuacaacgccgagcugcugguggcccuggagaaccagcacaccaucgaccugaccgacagcgagaugaacaagcuguucgagaagaccaagaagcagcugagagagaacgccgaggacaugggcaacggcugcuucaagaucuaccacaagugcgacaacgccugcaucggcagcaucagaaacggcaccuacgaccacgacguguacagagacgaggcccugaacaacagauuccagaucaagggcguggagcugaagagcggcuacaaggacuggauccuguggaucagcuucgccaucagcugcuuccugcugugcguggcccugcugggcuucaucaugugggccugccagaagggcaacaucagaugcaacaucugcaucuga

SEQ ID NO: 169720 - RNA, 1701 nt, Artificial Sequence
  derived and/or modified CDS sequence (opt4) from hemagglutinin__InfluenzaA__AFQ37281
augaaggccauccugguggugcugcuguacaccuucgccaccaccaacgccgacacccugugcaucggcuaccacgccaacaacagcaccgacaccguggacaccgugcuggagaagaacgugaccgugacccacagcgugaaccugcuggaggacaagcacaacggcaagcugugcaagcugagaggcguggccccccugcaccugggcaagugcaacaucgccggcuggauccugggcaaccccgagugcgagagccugagcaccgccagcagcuggagcuacaucguggagaccagcagcagcgacaacggcaccugcuaccccggcgacuucaucgacuacgaggagcugagagagcagcugagcagcgugagcagcuucgagagauucgagaucuuccccaagaccagcagcuggcccaaccacgacagcaacaagggcgugaccgccgccugcccccacgccggcgccaagagcuucuacaagaaccugaucuggcuggugaagaagggcaacagcuaccccaagcugagcaagagcuacaucaacgacaagggcaaggaggugcuggugcuguggggcauccaccaccccagcaccagcaccgaccagcagagccuguaccagaacgccgacgccuacguguucgugggcaccagcagauacagcaagaaguucaagcccgagaucgccaucagacccaaggugagagacagagagggcagaaugaacuacuacuggacccugguggagcccggcgacaagaucaccuucgaggccaccggcaaccugguggugcccagauacgccuucgccauggagagaaacgccggcagcggcaucaucaucagcgacacccccgcccacgacugcaacaccaccugccagacccccaagggcgccaucaacaccagccugcccuuccagaacgugcaccccaucaccaucggcaagugccccaaguacgugaagagcaccaagcugagacuggccaccggccugagaaacgugcccagcauccagagcagaggccuguucggcgccaucgccggcuucaucgagggcggcuggaccggcaugguggacggcugguacggcuaccaccaccagaacgagcagggcagcggcuacgccgccgaccugaagagcacccagaacgccaucgacaagaucaccaacaaggugaacagcgugaucgagaagaugaacacccaguucaccgccgugggcaaggaguucaaccaccuggagaagagaaucgagaaccugaacaagaagguggacgacggcuuccuggacaucuggaccuacaacgccgagcugcuggugcugcuggagaacgagagaacccuggacuaccacgacagcaacgugaagaaccuguacgagaaggugagaagccagcugaagaacaacgccaaggagaucggcaacggcugcuucgaguucuaccacaagugcgacgacaagugcauggagagcgugaagaacggcaccuacgacuaccccaaguacagcgaggaggccaagcugaacagagaggagaucgacggcgugaagcuggagagcaccagaaucuaccagauccuggccaucuacagcaccgccgccagcagccuggugcugguggugagccugggcgccaucagcuucuggaugugcagcaacggcagccugcagugcagaaucugcaucuga

SEQ ID NO: 169721 - RNA, 1707 nt, Artificial Sequence
  derived and/or modified CDS sequence (opt4) from hemagglutinin__InfluenzaA__AFQ55689
augaacacccagauccuggcccugaucgccugcaugcugaucggcgccaagggcgacaagaucugccugggccaccacgccguggccaacggcaccaaggugaacacccugaccgagagaggcaucgagguggugaacgccaccgagaccguggagaccgccaacaccaagaagaucugcacccagggcaagagacccaccgaccugggccagugcggccugcugggcacccugaucggccccccccagugcgaccaguuccuggaguucgacgccgaccugaucaucgagagaagagagggcaccgacgugugcuaccccggcaaguucaccaacgaggagagccugagacagauccugagaggcagcggcggcaucgacaaggagagcaugggcuucaccuacagcggcaucagaaccaacggcgccaccagcgccugcagaagaagcggcagcagcuucuacgccgagaugaaguggcugcugagcaacagcgacaacgccgccuucccccagaugaccaagagcuacagaaaccccagaaacaagcccgcccugaucaucuggggcgugcaccacagcggcagcgccaccgagcagaccaagcuguacggcagcggcaacaagcugaucaccgugggcagcagcaaguaccagcagagcuucacccccagccccggcgccagaccccaggugaacggccagagcggcagaaucgacuuccacuggcugcugcuggaccccaacgacaccgugaccuucaccuucaacggcgccuucaucgcccccgacagagccagcuucuucagaggcgagagcaucggcgugcagagcgacgugccccuggacagcggcugcgagggcgacugcuuccacaacggcggcaccaucgugagcagccugcccuuccagaacaucaaccccagaaccgugggcaagugccccagauacgugaagcagaccagccugcugcuggccaccggcaugagaaacgugcccgagaaccccaaggacagaaagagcagacacagaagaaccagaggccuguucggcgccaucgccggcuucaucgagaacggcugggagggccugaucgacggcugguacggcuucagacaccagaacgcccagggcgagggcaccgccgccgacuacaagagcacccagagcgccaucgaccagaucaccggcaagcugaacagacugaucgacaagaccaaccagcaguucgagcugaucgacaacgaguucagcgagaucgagcagcagaucggcaacgugaucaacuggaccagagacagcaugaccgagguguggagcuacaacgccgagcugcugguggccauggagaaccagcacaccaucgaccuggccgacagcgagaugaacaagcuguacgagagagugagaaagcagcugagagagaacgccgaggaggacggcaccggcugcuucgagaucuuccacaagugcgacgaccagugcauggagagcaucagaaacaacaccuacgaccacacccaguacagagccgagagccugcagaacagaauccagaucgaccccgugaagcugagcagcggcuacaaggacaucauccugugguucagcuucggcgccagcugcuuccugcugcuggccaucgccaugggccugguguucaucugcaucaagaacggcaacaugagaugcaccaucugcaucuga

SEQ ID NO: 169722 - RNA, 1701 nt, Artificial Sequence; identical to SEQ ID NO: 168246
  derived and/or modified CDS sequence (opt4) from hemagglutinin__InfluenzaA__AFR68153

SEQ ID NO: 169723 - RNA, 1701 nt, Artificial Sequence
  derived and/or modified CDS sequence (opt4) from hemagglutinin__InfluenzaA__AFR68163
augaaggccacccugguggugcugcuguacaccuucgccaccgccaacgccgacacccugugcaucggcuaccacgccaacaacagcaccgacaccguggacaccgugcuggagaagaacgugaccgugacccacagcgccaaccugcuggaggacaagcacaacggcaagcugugcaagcugagaggcguggccccccugcaccugggcaagugcaacaucgccggcuggauccugggcaaccccgagugcgagacccugagcaccgccagcagcuggagcuacaucguggagaccagcagcagcgacaacggcaccugcuaccccggcgacuucaucgacuacgaggagcugagagagcagcugagcagcgugagcagcuucgagagauucgagaucuuccccaagaccagcagcuggcccaaccacgacagcaacaagggcgugaccgccgccugcccccacgccggcgccaagggcuucuacaagaaccugaucuggcuggugaagaagggcaacagcuaccccaagcugagcaagagcuacaucaacgacaagggcaaggaggugcuggugcuguggggcauccaccaccccagcaccaccgccgaccagcagagccuguaccagaacgccgacaccuacguguucgugggcaccagcagauacagcaagaaguucaagcccgagaucgccaucagacccaaggugagagaccaggagggcagaaugaacuacuacuggacccugguggagcccggcgacaagaucaccuucgaggccaccggcaaccugguggugcccagauacgccuucgccauggagagagacgccggcagcggcaucaucaucagcgacacccccgugcacgacugcaacaccaccugccagacccccaagggcgccaucaacaccagccugcccuuccagaacauccaccccaucaccaucggcaagugccccaaguacgugaagagcaccaagcugagacuggccaccggccugagaaacgugcccagcauccagagcagaggccuguucggcgccaucgccggcuucaucgagggcggcuggaccggcaugguggacggcugguacggcuaccaccaccagaacgagcagggcagcggcuacgccgccgaccugaagagcacccagaacgccaucgacaagaucaccaacaaggugaacagcgugaucgagaagaugaacacccaguucaccgccgugggcaaggaguucaaccaccuggagaagagaaucgagaaccugaacaagaagguggacgacggcuuccuggacaucuggaccuacaacgccgagcugcuggugcugcuggagaacgagagaacccuggacuaccacgacagcaacgugaagaaccuguacgagaaggugagaaaccagcugaagaacaacgccaaggagaucggcaacggcugcuucgaguucuaccacaagugcgacaacaccugcauggagagcgugaagaacggcaccuacgacuaccccaaguacagcgaggaggccaagcugaacagagaggagaucgacggcgugaagcuggagagcaccagaaucuaccagauccuggccaucuacagcaccgccgccagcagccuggugcugguggugagccugggcgccaucagcuucuggaugugcagcaacggcagccugcagugcagaaucugcaucuga

SEQ ID NO: 169724 - RNA, 1701 nt, Artificial Sequence
  derived and/or modified CDS sequence (opt4) from hemagglutinin__InfluenzaA__AFR68173
augaagaccaucaucgcccugagcuacauccugugccugguguucgcccagaagcugcccggcaacgacaacagcaccgccacccugugccugggccaccacgccgugcccaacggcaccaucgugaagaccaucaccaacgaccagaucgaggugaccaacgccaccgagcuggugcagagcagcagcaccggcgagaucugcgacagcccccaccagauccuggacggcgagaacugcacccugaucgacgcccugcugggcgacccccagugcgacggcuuccagaacaagaagugggaccuguucguggagagaagcaaggccuacagcaacugcuaccccuacgacgugcccgacuacgccagccugagaagccugguggccagcagcggcacccuggaguucaacaacgagagcuucaacuggaccggcgugacccagaacggcaccagcagcgccugcaucagaagaagcaacagcagcuucuucagcagacugaacuggcugacccaccugaacuucaaguaccccgcccugaacgugaccaugcccaacaacgagcaguucgacaagcuguacaucuggggcgugcaccaccccggcaccgacaaggaccagaucuuccuguacgcccaggccagcggcagaaucaccgugagcaccaagagaagccagcagagcgugauccccaacaucggcagcagacccagaaucagaaacauccccagcagaaucagcaucuacuggaccaucgugaagcccggcgacauccugcugaucaacagcaccggcaaccugaucgcccccagaggcuacuucaagaucagaagcggcaagagcagcaucaugagaagcgacgcccccaucggcaagugcaacagcgagugcaucacccccaacggcagcauccccaacgacaagcccuuccagaacgugaacagaaucaccuacggcgccugccccagauacgugaagcagaacacccugaagcuggccaccggcaugagaaacgugcccgagaagcagaccagaggcaucuucggcgccaucgccggcuucaucgagaacggcugggagggcaugguggacggcugguacggcuucagacaccagaacagcgagggcagaggccaggccgccgaccugaagagcacccaggccgccaucgaccagaucaacggcaagcugaacagacugaucggcaagaccaacgagaaguuccaccagaucgagaaggaguucagcgagguggagggcagaauccaggaccuggagaaguacguggaggacaccaagaucgaccuguggagcuacaacgccgagcugcugguggcccuggagaaccagcacaccaucgaccugaccgacagcgagaugaacaagcuguucgagaagaccaagaagcagcugagagagaacgccgaggacaugggcaacggcugcuucaagaucuaccacaagugcgacaacgccugcaucggcagcaucagaaacggcaccuacaaccacgacguguacagagacgaggcccugaacaacagauuccagaucaagggcguggagcugaagagcggcuacaaggacuggauccuguggaucagcuucgccaucagcugcuuccugcugugcguggcccugcugggcuucaucaugugggccugccagaagggcaacaucagaugcaacaucugcaucuga

SEQ ID NO: 169725 - RNA, 1701 nt, Artificial Sequence; identical to SEQ ID NO: 162729
  derived and/or modified CDS sequence (opt4) from hemagglutinin__InfluenzaA__AFR84675

SEQ ID NO: 169726 - RNA, 1701 nt, Artificial Sequence; identical to SEQ ID NO: 163082
  derived and/or modified CDS sequence (opt4) from hemagglutinin__InfluenzaA__AFR84685

SEQ ID NO: 169727 - RNA, 1701 nt, Artificial Sequence; identical to SEQ ID NO: 162909
  derived and/or modified CDS sequence (opt4) from hemagglutinin__InfluenzaA__AFR84694

SEQ ID NO: 169728 - RNA, 1701 nt, Artificial Sequence; identical to SEQ ID NO: 162716
  derived and/or modified CDS sequence (opt4) from hemagglutinin__InfluenzaA__AFR84704

SEQ ID NO: 169729 - RNA, 1701 nt, Artificial Sequence
  derived and/or modified CDS sequence (opt4) from hemagglutinin__InfluenzaA__AFR84714
augaaggccauccugguggugcugcuguacaccuucgccaccgccaacgccgacacccugugcaucggcuacagagccaacaacagcaccgacaccguggacaccgugcuggagaagaacgugaccgugacccacagcgugaacauccuggaggacaagcacaacggcaagcugugcaagcugagaggcguggccccccugcaccugggcaagugcaacaucgccggcuggauccugggcaaccccgagugcgagagccugagcaccgccagcagcuggagcuacaucguggagaccagcagcagcgacaacggcaccugcuaccccggcgacuucaucgacuacgaggagcugagagagcagcugagcagcgugagcagcuucgagagauucgagaucuuccccaagaccagcagcuggcccaaccacgacagcaacaagggcgugaccgccgccugcccccacgccggcgccaagagcuucuacaagaaccugaucuggcuggugaagaagggcaacagcuaccccaagcugagcaagagcuacaucaacgacaagggcaaggaggugcuggugcuguggggcauccaccaccccagcaccagcgccgaccagcagagccuguaccagaacgccgacgccuacguguucgugggcagcagcagauacagcaagaaguucaagcccgagaucgccaucagacccaaggugagagaccaggagggcagaaugaacuacuacuggacccugguggagcccggcgacaagaucaccuucgaggccaccggcaaccugguggugcccagauacgccuucgccauggagagaaacgccggcagcggcaucaucaucagcgacacccccgugcacgacugcaacaccaccugccagacccccaagggcgccaucaacaccagccugcccuuccagaacauccaccccaucaccaucggcaagugccccaaguacgugaagagcaccaagcugagacuggccaccggccugagaaacgugcccagcauccagagcagaggccuguucggcgccaucgccggcuucaucgagggcggcuggaccggcaugguggacggcugguacggcuaccaccaccagaacgagcagggcagcggcuacgccgccgaccugaagagcacccagaacgccaucgacgagaucaccaacaaggugaacagcgugaucgagaagaugaacacccaguucaccgccgugggcaaggaguucaaccaccuggagaagagaaucgagaaccugaacaagaagguggacgacggcuuccuggacaucuggaccuacaacgccgagcugcuggugcugcuggagaacgagagaacccuggacuaccacgacagcaacgugaagaaccuguacgagaaggugagaagccagcugaagaacaacgccaaggagaucggcaacggcugcuucgaguucuaccacaagugcgacaacaccugcauggagagcgugaagaacggcaccuacgacuaccccaaguacagcgaggaggccaagcugaacagagaggagaucgacggcgugaagcuggagagcaccagaaucuaccagauccuggccaucuacagcaccguggccagcagccuggugcugguggugagccugggcgccaucagcuucuggaugugcagcaacggcagccugcagugcagaaucugcaucuga

SEQ ID NO: 169730 - RNA, 1701 nt, Artificial Sequence; identical to SEQ ID NO: 162909
  derived and/or modified CDS sequence (opt4) from hemagglutinin__InfluenzaA__AFR84724

SEQ ID NO: 169731 - RNA, 1701 nt, Artificial Sequence; identical to SEQ ID NO: 162909
  derived and/or modified CDS sequence (opt4) from hemagglutinin__InfluenzaA__AFR84734

SEQ ID NO: 169732 - RNA, 1701 nt, Artificial Sequence; identical to SEQ ID NO: 162909
  derived and/or modified CDS sequence (opt4) from hemagglutinin__InfluenzaA__AFR84754

SEQ ID NO: 169733 - RNA, 1701 nt, Artificial Sequence; identical to SEQ ID NO: 162909
  derived and/or modified CDS sequence (opt4) from hemagglutinin__InfluenzaA__AFR84764

SEQ ID NO: 169734 - RNA, 1701 nt, Artificial Sequence; identical to SEQ ID NO: 162909
  derived and/or modified CDS sequence (opt4) from hemagglutinin__InfluenzaA__AFR84774

SEQ ID NO: 169735 - RNA, 1701 nt, Artificial Sequence
  derived and/or modified CDS sequence (opt4) from hemagglutinin__InfluenzaA__AFR84784
augaaggccauccuggugggccugcuguacaccuucgccaccgccaacgccgacacccugugcaucggcuaccacgccaacaacagcaccgacaccguggacaccgugcuggagaagaacgugaccgugacccacagcgugaacauccuggaggacaagcacaacggcaagcugugcaagcugagaggcguggccccccugcaccugggcaagugcaacaucgccggcuggauccugggcaaccccgagugcgagagccugagcaccgccagcagcuggagcuacaucguggagaccagcagcagcgacaacggcaccugcuaccccggcgacuucaucgacuacgaggagcugagagagcagcugagcagcgugagcagcuucgagagauucgagaucuuccccaagaccagcagcuggcccaaccacgacagcaacaagggcgugaccgccgccugcccccacgccggcgccaagagcuucuacaagaaccugaucuggcuggugaagaagggcaacagcuaccccaagcugagcaagagcuacaucaacgacaagggcaaggaggugcuggugcuguggggcauccaccaccccagcaccagcgccgaccagcagagccuguaccagaacgccgacgccuacguguucgugggcagcagcagauacagcaagaaguucaagcccgagaucgccaucagacccaaggugagagaccaggagggcagaaugaacuacuacuggacccugguggagcccggcgacaagaucaccuucgaggccaccggcaaccugguggugcccagauacgccuucgccauggagagaaacgccggcagcggcaucaucaucagcgacacccccgugcacgacugcaacaccaccugccagacccccaagggcgccaucaacaccagccugcccuuccagaacauccaccccaucaccaucggcaagugccccaaguacgugaagagcaccaagcugagacuggccaccggccugagaaacgugcccagcauccagagcagaggccuguucggcgccaucgccggcuucaucgagggcggcuggaccggcaugguggacggcugguacggcuaccaccaccagaacgagcagggcagcggcuacgccgccgaccugaagagcacccagaacgccaucgacgagaucaccaacaaggugaacagcgugaucgagaagaugaacacccaguucaccgccgugggcaaggaguucaaccaccuggagaagagaaucgagaaccugaacaagaagguggacgacggcuuccuggacaucuggaccuacaacgccgagcugcuggugcugcuggagaacgagagaacccuggacuaccacgacagcaacgugaagaaccuguacgagaaggugagaagccagcugaagaacaacgccaaggagaucggcaacggcugcuucgaguucuaccacaagugcgacaacaccugcauggagagcgugaagaacggcaccuacgacuaccccaaguacagcgaggaggccaagcugaacagagaggagaucgacggcgugaagcuggagagcaccagaaucuaccagauccuggccaucuacagcaccguggccagcagccuggcccugguggugagccugggcgccaucagcuucuggaugugcagcaacggcagccugcagugcagaaucugcaucuga

SEQ ID NO: 169736 - RNA, 1701 nt, Artificial Sequence; identical to SEQ ID NO: 162909
  derived and/or modified CDS sequence (opt4) from hemagglutinin__InfluenzaA__AFR84794

SEQ ID NO: 169737 - RNA, 1701 nt, Artificial Sequence; identical to SEQ ID NO: 162729
  derived and/or modified CDS sequence (opt4) from hemagglutinin__InfluenzaA__AFR84804

SEQ ID NO: 169738 - RNA, 1701 nt, Artificial Sequence; identical to SEQ ID NO: 162909
  derived and/or modified CDS sequence (opt4) from hemagglutinin__InfluenzaA__AFR84814

SEQ ID NO: 169739 - RNA, 1701 nt, Artificial Sequence; identical to SEQ ID NO: 162729
  derived and/or modified CDS sequence (opt4) from hemagglutinin__InfluenzaA__AFR84824

SEQ ID NO: 169740 - RNA, 1701 nt, Artificial Sequence; identical to SEQ ID NO: 162755
  derived and/or modified CDS sequence (opt4) from hemagglutinin__InfluenzaA__AFR84834

SEQ ID NO: 169741 - RNA, 1701 nt, Artificial Sequence; identical to SEQ ID NO: 167929
  derived and/or modified CDS sequence (opt4) from hemagglutinin__InfluenzaA__AFR84844

SEQ ID NO: 169742 - RNA, 1701 nt, Artificial Sequence; identical to SEQ ID NO: 162971
  derived and/or modified CDS sequence (opt4) from hemagglutinin__InfluenzaA__AFR84854

SEQ ID NO: 169743 - RNA, 1701 nt, Artificial Sequence; identical to SEQ ID NO: 162729
  derived and/or modified CDS sequence (opt4) from hemagglutinin__InfluenzaA__AFR84864

SEQ ID NO: 169744 - RNA, 1701 nt, Artificial Sequence; identical to SEQ ID NO: 162909
  derived and/or modified CDS sequence (opt4) from hemagglutinin__InfluenzaA__AFR84874

SEQ ID NO: 169745 - RNA, 1701 nt, Artificial Sequence; identical to SEQ ID NO: 162716
  derived and/or modified CDS sequence (opt4) from hemagglutinin__InfluenzaA__AFR84893

SEQ ID NO: 169746 - RNA, 1701 nt, Artificial Sequence; identical to SEQ ID NO: 162716
  derived and/or modified CDS sequence (opt4) from hemagglutinin__InfluenzaA__AFR84903

SEQ ID NO: 169747 - RNA, 1701 nt, Artificial Sequence; identical to SEQ ID NO: 162716
  derived and/or modified CDS sequence (opt4) from hemagglutinin__InfluenzaA__AFR84913

SEQ ID NO: 169748 - RNA, 1701 nt, Artificial Sequence; identical to SEQ ID NO: 162716
  derived and/or modified CDS sequence (opt4) from hemagglutinin__InfluenzaA__AFR84923

SEQ ID NO: 169749 - RNA, 1689 nt, Artificial Sequence
  derived and/or modified CDS sequence (opt4) from hemagglutinin__InfluenzaA__AFV53205
auggccaucaucuaccugauccugcuguucgccaccgugagaggcgaccagaucugcaucggcuaccacgccaacaacagcaccgagaagguggacaccauccuggagagaaacgugaccgugacccacgccaaggacauccuggagaagacccacaacggcaagcugugcaagcugaacggcauccccccccuggagcugggcgacugcagcaucgccggcuggcugcugggcaaccccgagugcgacagacugcugagagugcccgaguggagcuacaucauggagaaggagaaccccagauacagccugugcuaccccggcagccugaacgacuacgaggagcugaagcaccugcugagcagcgugagacacuucgagaaggugagaauccugcccaaggacagauggacccagcacaccaccaccggcgacagcaaggccugcgccgugagcggcaagcccagcuucuucagaaacaugguguggcugaccaagaagggccccgacuaccccguggccaagggcagcuacaacaacaccagcggcgagcagaugcugaucaucuggggcgugcaccaccccaucgacgaggccgagcagagagagcuguaccagaaggugggcaccuacgugagcgccagcaccagcacccugaacaagagaagcauccccgagaucgccgccagacccgaggugaacggccugagaagcagaauggaguucagcuggacccugcuggacgugugggacaccaucaacuucgagagcaccggcaaccugaucgcccccgaguacggcuucaagaucagcaagagaggcagcagcggcaucaugaagaccgagggcacccugggcaacugcgagaccaagugccagaccccccugggcgccaucaacaccacccugcccuuccacaacgugcacccccugaccaucggcgagugccccaaguacgugaagagcgagaagcuggugcuggccaccggccugagaaacgugccccagaucgagagcagaggccuguucggcgccaucgccggcuucaucgagggcggcuggcagggcaugguggacggcugguacggcuaccaccacagcaacgaccagggcagcggcuacgccgccgacaaggagagcacccagaaggccuucgacgagaucaccaacaaggugaacagcgugaucgagaagaugaacacccaguucgaggccgugggcaaggaguucaacaaccuggagaagagacuggagaaccugaacaagaagauggaggacggcuuccuggacguguggaccuacaacgccgagcugcuggugcugauggagaacgagagaacccuggacuuccacgacagcaacgugaagaaccuguacgagaaggugagaaugcagcugagagacaacgugaaggagcugggcaacggcugcuucgaguucuaccacaagugcgacgacgagugcaucaacagcgugaagaacggcaccuacgacuaccccaaguacgaggaggagagcaagcugaagagaaacgagaucaagggcgugaagcugagcagcaugggcguguaccagauccuggccaucuacgccaccguggccggcagccugagccuggccaucaugauggccggcaucagcuucuggaugugcagcaacggcagccugcagugcagaaucugcaucuga

SEQ ID NO: 169750 - RNA, 1689 nt, Artificial Sequence
  derived and/or modified CDS sequence (opt4) from hemagglutinin__InfluenzaA__AFV53216
auggccaucaucuaccugauccugcuguucaccgccgugagaggcgaccagaucugcaucggcuaccacgccaacaacagcaccgagaagguggacaccauccuggagagaaacgugaccgugacccacgccaaggacauccuggagaagacccacaacggcaagcugugcaagcugaacggcauccccccccuggagcugggcgacugcagcaucgccggcuggcugcugggcaaccccgagugcgacagacugcugagcgugcccgaguggagcuacaucauggagaaggagaaccccagagacggccugugcuaccccggcagcuucaacgacuacgaggagcugaagcaccugcugagcagcgugaagcacuucgagaaggugaagauccugcccaaggacagauggacccagcacaccaccaccggcggcagcagagccugcgccgugagcggcaaccccagcuucuucagaaacaugguguggcugaccgagaagggcagcaacuaccccguggccaagggcagcuacaacaacaccagcggcgagcagaugcugaucaucuggggcgugcaccaccccaacgacgagaccgagcagagaacccuguaccagaacgugggcaccuacgugagcgugggcaccagcacccugaacaagagaagcacccccgacaucgccaccagacccaaggugaacggccagggcggcagaauggaguucagcuggacccugcuggacaugugggacaccaucaacuucgagagcaccggcaaccugaucgcccccgaguacggcuucaagaucagcaagagaggcagcagcggcaucaugaagaccgagggcacccugggcaacugcgagaccaagugccagaccccccugggcgccaucaacaccacccugcccuuccacaacgugcacccccugaccaucggcgagugccccaaguacgugaagagcgagaagcuggugcuggccaccggccugagaaacgugccccagaucgagagcagaggccuguucggcgccaucgccggcuucaucgagggcggcuggcagggcaugguggacggcugguacggcuaccaccacagcaacgaccagggcagcggcuacgccgccgacaaggagagcacccagaaggccuucgacggcaucaccaacaaggugaacagcgugaucgagaagaugaacacccaguucgaggccguggagaaggaguucagcaaccuggagagaagacuggagaaccugaacaagaagauggaggacggcuuccuggacguguggaccuacaacgccgagcugcuggugcugauggagaacgagagaacccuggacuuccacgacagcaacgugaagaaccuguacgacaaggugagaaugcagcugagagacaacgugaaggagcugggcaacggcugcuucgaguucuaccacaagugcgacgacgagugcaugaacagcgugaagaacggcaccuacgacuaccccaaguacgaggaggagagcaagcugaacagaaacgagaucaagggcgugaagcugagcagcaugggcaucuaccagauccuggccaucuacgccaccguggccggcagccugagccuggccaucaugauggccggcaucagcuucuggaugugcagcaacggcagccugcagugcagaaucugcaucuga

SEQ ID NO: 169751 - RNA, 1689 nt, Artificial Sequence
  derived and/or modified CDS sequence (opt4) from hemagglutinin__InfluenzaA__AFV53227
augaucaucaucuaccugauccugcuguucaccgccgugagaggcgaccagaucugcaucggcuaccacgccaacaacagcaccgagaagguggacaccauccuggagagaaacgugaccgugacccacgccaaggacauccuggagaagacccacaacggcaagcugugcaagcugaacggcauccccccccuggagcugggcgacugcagcaucgccggcuggcugcugggcaaccccgagugcgacagacugcugagagugcccgaguggagcuacaucauggagaaggagaaccccagauacagccugugcuaccccggcagcuucaacgacuacgaggagcugaagcaccugcugagcagcgugaagcacuucgagaaggugaagauccugcccaaggacggcuggacccagcacaagaccgacggcggcagcaaggccugcgccgugagcggcaaggccagcuucuucagaaacaugguguggcugaccaaggagggccccaacuaccagguggccaagagaagcuacaacaacaccagcggcgagcagaugcugaucaucuggggcgugcaccaccccaaggacgaggccgagcagaucgcccuguaccagaaggugggcaccuacgugagcgccagcaccagcacccugaacaagagaagcacccccgagaucgccgccagacccgaggugaacggccugggcagcagaauggaguucagcuggacccugcuggacgugugggacaccaucaacuucgagagcaccggcaaccugguggcccccgaguacggcuucaagaucagcaagagaggcagcagcggcaucaugaagaccgagggcacccugggcaacugcgagaccaagugccagaccccccugggcgccaucaacaccacccugcccuuccacaacgugcacccccugaccaucggcgagugccccaaguacgugaagagcgagaagcuggugcuggccaccggccugagaaacgugccccagaucgagagcagaggccuguucggcgccaucgccggcuucaucgagggcggcuggcagggcaugguggacggcugguacggcuaccaccacagcaacgaccagggcagcggcuacgccgccgacaaggagagcacccagaaggccuucgacagaaucaccaacaaggugaacagcgugaucgagaagaugaacauccaguucgaggccgugggcaaggaguucagcaaccuggagaagagacuggagaaccugaacaagaagauggaggacggcuuccuggacguguggaccuacaacgccgagcugcuggugcugauggagaacgagagaacccuggacuuccacgacagcaacgugaagaaccuguacgacaaggugagaaugcagcugagagacaacgugaaggagcugggcaacggcugcuucgaguucuaccacaagugcgacgacgagugcaugaacagcgugaagaacggcaccuacgacuaccccaaguacgaggaggagagcaagcugaagagaaacgagaucaagggcgugaagcugagcagcaugggcguguaccagauccuggccaucuacgccaccguggccggcagccugagccuggccaucaugaucgccggcaucagcuucuggaugugcagcaacggcagccugcagugcagagugugcaucuga

SEQ ID NO: 169752 - RNA, 1689 nt, Artificial Sequence
  derived and/or modified CDS sequence (opt4) from hemagglutinin__InfluenzaA__AFV53238
auggccaucaucuaccugauccugcuguucaccgccgugagaggcgaccagaucugcaucggcuaccacgccaacaacagcaccgagaagguggacaccauccuggagagaaacgugaccgugacccacgccaaggacauccuggagaagacccacaacggcaagcugugcaagcugaacggcauccccccccuggagcugggcgacugcagcaucgccggcuggcugcugggcaaccccgagugcgacagacugcugagagugcccgaguggagcuacaucauggagaaggagaaccccagauacagccugugcuaccccggcagcuucaacgacuacgaggagcugaagcaccugcugagcagcgugaagcacuucgagaaggugaagauccugcccaaggacagauggacccagcacaccaccaccggcggcagcauggccugcgccgugagcggcaagcccagcuucuucagaaacaugguguggcugaccaccaagggccccaacuaccccguggcccagggcagcuacaacaacaccagcggcgagcagaugcugaucaucuggggcgugcaccaccccaacgacgaggccgagcagagagcccuguaccagaaggugggcaccuacgugagcgccagcaccagcacccuguacaagagaagcauccccgagaucgccgccagacccaaggugaacggccugggcagcagaauggaguucagcuggacccugcuggacaugugggacaccaucaacuucgagagcaccggcaaccugguggcccccgaguacggcuucaagaucagcaagagaggcagcagcggcaucaugaagaccgagggcacccuggagaacugcgagaccaagugccagaccccccugggcgccaucaacaccacccugcccuuccacaacgugcacccccugaccaucggcgagugccccaaguacgugaagagcgagaagcuggugcuggccaccggccugagaaacgugccccagaucgagagcagaggccuguucggcgccaucgccggcuucaucgagggcggcuggcagggcaugguggacggcugguacggcuaccaccacagcaacgaccagggcagcggcuacgccgccgacaaggagagcacccagaaggccuucgacggcaucaccaacaaggugaacagcgugaucgagaagaugaacacccaguucgaggccgugggcaaggaguucagcaaccuggagaagagacuggagaaccugaacaagaagauggaggacggcuuccuggacguguggaccuacaacgccgagcugcuggugcugauggagaacgagagaacccuggacuuccacgacagcaacgugaagaaccuguacgacaaggugagaaugcagcugagagacaacgugaaggagcugggcaacggcugcuucgaguucuaccacaagugcgacaacgagugcauggacagcgugaagaacggcaccuacgacuaccccaaguacgaggaggagagcaagcugaacagaaacgagaucaagggcgugaagcugagcagcaugggcguguaccagauccuggccaucuacgccaccguggccggcagccugagccuggccaucaugauggccggcaucagcuucuggaugugcagcaacggcagccugcagugcagaaucugcaucuga

SEQ ID NO: 169753 - RNA, 1689 nt, Artificial Sequence
  derived and/or modified CDS sequence (opt4) from hemagglutinin__InfluenzaA__AFV53249
auggccaucaucuaccugauccugcuguucgccaccgugagaggcgaccagaucugcaucggcuaccacgccaacaacagcaccgagaccguggacaccauccuggagagaaacgugaccgugacccacgccaaggacauccuggagaagacccacaacggcaagcugugcaagcugaacggcauccccccccuggagcugggcgacugcagcaucgccggcuggcugcugggcaaccccgagugcgacagacugcugagagugcccgaguggagcuacaucauggagaaggagaaccccagauacagccugugcuaccccggcagccugaacgacuacgaggagcugaagcaccugcugagcagcgugaagcacuucgagaaggugagaauccugcccaaggacagauggaccaaccacaccaccaccggcggcagcaaggccugcgccgugagcggcgagcccagcuucuucagaaacaugguguggcugaccaagaagggccccaacuaccccguggccaagggcagcuacaacaacaccagcggcgagcagaugcugaucaucuggggcgugcaccaccccaacgacgaggccgagcagagagcccuguaccagaaggugggcaccuacgugagcgccagcaccagcacccuguacaagagaagcauccccgagaucgccgccagacccaaggugaacggccugggcagcagaauggaguucagcuggacccugcugaacgugugggacaccaucaacuucgagagcaccggcaaccugguggcccccgaguacggcuucaagaucagcaagagaggcagaagcggcaucaugaagaccgagggcacccugggcaacugcgagaccaagugccagaccccccugggcgccaucaacaccacccugcccuuccacaacgugcacccccugaccaucggcgagugccccaaguacgugaagagcgagaagcuggugcuggccaccggccugagaaacgugccccagaucgagagcagaggccuguucggcgccaucgccggcuucaucgagggcggcuggcagggcaugguggacggcugguacggcuaccaccacagcaacgaccagggcagcggcuacgccgccgacaaggagagcacccagaaggccuucgacggcaucaccaacaaggugaacagcgugaucgagaagaugaacacccaguucgaggccgugggcaaggaguucaacaaccuggagaagagacuggagaaccugaacaagaagauggaggacggcuuccuggacguguggaccuacaacgccgagcugcuggugcugauggagaacgagagaacccuggacuuccacgacagcaacgugaagaaccuguacgagaaggugagaaugcagcugagagacaacgugaaggagcugggcaacggcugcuucgaguucuaccacaagugcgacgacgagugcaugaacagcgugaagaacggcaccuacgacuaccccaaguacgaggaggagagcaagcugaagagaaacgagaucaagggcgugaagcugagcagcaugggcguguaccagauccuggccaucuacgccaccguggccggcagccugagccuggccaucaugguggccggcaucagcuucuggaugugcagcaacggcagccugcagugcagaaucugcaucuga

SEQ ID NO: 169754 - RNA, 1698 nt, Artificial Sequence
  derived and/or modified CDS sequence (opt4) from hemagglutinin__InfluenzaA__AFV53260
augaaggccaagcugcugauccugcugugcgcccugagcgccaccgacgccgacaccaucugcaucggcuaccacgccaacaacagcaccgacaccguggacaccgugcuggagaagaacgugaccgugacccacagcgugaaccugcuggaggacagccacaacggcaagcugugcagacugaagggcaaggccccccugcagcugggcaacugcaacaucgccggcugggugcugggcaaccccgagugcgagagccugcugagcaacagaagcuggagcuacaucgccgagacccccaacagcgagaacggcaccugcuaccccggcgacuucgccgacuacgaggagcugagagagcagcugagcagcgugagcagcuucgagagauucgagaucuuccccaaggagagaagcuggcccaaccacaccaccagaggcgugaccgccgccugcccccacgccaugaagagcagcuucuacaagaaccugguguggcugaccgaggccaacggcagcuaccccaaccugagcagaagcuacgugaacaaccaggagaaggaggugcuggugcuguggggcgugcaccaccccagcaacaucgaggaccagagaacccuguacagaaaggacaacgccuacgugagcguggugagcagcaacuacaacagaagauucacccccgagaucgccaagagacccaaggugagaggccagagcggcagaaucaacuacuacuggacccugcuggagcccggcgacaccaucaucuucgaggccaccggcaaccugaucgcccccugguacgccuucgcccugagcagaggccccggcagcggcaucaucaccagcaacgccccccuggacgagugcgacaccaagugccagaccccccagggcgccaucaacagcagccugcccuuccagaacauccaccccgugaccaucggcgagugccccaaguacgugagaagcaccaagcugagaauggugaccggccugagaaacauccccagcuuccagagcagaggccuguucggcgccaucgccggcuucaucgagggcggcuggaccggcaugauggacggcugguacggcuaccaccaccagaacgagcagggcagcggcuacgccgccgaccagaagagcacccagaacgccaucaacggcaucaccaacaaggugaacagcgugaucgagaagaugaacacccaguucaccgccgugggcaaggaguucaacaagcuggagaagagaauggagaaccugaacaagaagguggacgacggcuuccuggacaucuggaccuacaacgccgagcugcuggugcugcuggagaacgagagaacccuggacuuccacgacagcaacgugaagaaccuguacgagaaggugaagaaccagcugagaaacaacgccaaggagcugggcaacggcugcuucgaguucuaccacaagugcgacaacgagugcauggagagcgugaagaacggcaccuacgacuaccccaaguacagcgaggagagcaagcugaacagagagaagaucgacggcgugaagcuggagagcaugggcguguacagaauccuggccaucuacagcaccguggccagcagccuggugcugcuggugagccugggcgccaucagcuucuggaugugcagcaacggcagccugcagugcagaaucugcaucuga

SEQ ID NO: 169755 - RNA, 1689 nt, Artificial Sequence
  derived and/or modified CDS sequence (opt4) from hemagglutinin__InfluenzaA__AFV53271
auggccaucaccuaccugauccugcuguucaccgccgugagaggcgaccagaucugcaucggcuaccacgccaacaacagcaccgagaagguggacaccauccuggagagaaacgugaccgugacccacgccaaggacauccuggagaagacccacaacggcaagcugugcaagcugaacggcauccccccccuggagcugggcgacugcagcaucgccggcuggcugcugggcaaccccgagugcgacagauuccugagagugcccgaguggagcuacaucauggagaaggagaaccccagauacagccugugcuaccccggcagcuucaacgacuacgaggagcugaagcaccugcugagcagcgugaagcacuucgagaaggugaagauccugcccaaggacggcuggacccagcacaccaccaccggcggcagcauggccugcgccgugagcggcaagcccagcuucuucagaaacaugguguggcugaccgagaagggccagaacuaccccguggccaagggcagcuacaacaacaccagcggcgagcagaugcugaucaucuggggcgugcaccaccccaacgacgaggccgagcagagagcccuguaccagaaggugggcaccuacgugagcgccagcaccagcacccugaacaagagaagcacccccgagaucgccgccagacccaaggugaacggccugggcagcagaauggaguucagcuggacccugcuggacaugugggacaccaucaacuucgagagcaccggcaaccugguggcccccgaguacggcuucaagaucagcaagagaggcagcagcggcaucaugaagaccgagggcacccuggagaacugcgagaccaagugccagaccccccugggcgccaucaacaccacccugcccuuccacaacgugcacccccugaccaucggcgagugccccaaguacgugaagagcgagaagcuggugcuggccaccggccugagaaacaucccccagaucgagagcagaggccuguucggcgccaucgccggcuucaucgagggcggcuggcagggcaugguggacggcugguacggcuaccaccacagcaacgaccagggcagcggcuacgccgccgacaaggagagcacccagaaggccuucgacggcaucaccaacaaggugaacagcgugaucgagaagaugaacacccaguucgaggccgugggcaaggaguucagcaaccuggagaagagacuggagaaccugaacaagaagauggaggacggcuuccuggacguguggaccuacaacgccgagcugcuggugcugauggagaacgagagaacccuggacuuccacgacagcaacgugaagaaccuguacgacaaggugagaaugcagcugagagacaacgugaaggagcugggcaacggcugcuucgaguucuaccacaagugcgacaacgagugcauggacagcgugaagaacggcaccuacgacuaccccaaguacgaggaggagagcaagcugaacagaaacgagaucaagggcgugaagcugagcagcaugggcguguaccagauccuggccaucuacgccaccguggccggcagccugagccuggccaucaugauggccggcaucagcuucuggaugugcagcaacggcagccugcagugcagaaucugcaucuga

SEQ ID NO: 169756 - RNA, 1689 nt, Artificial Sequence
  derived and/or modified CDS sequence (opt4) from hemagglutinin__InfluenzaA__AFV53282
auggccaucaucuaccugauccugcuguucaccgccgugagaggcgaccagaucugcaucggcuaccacgccaacaacagcaccgagaagguggacaccauccuggagagaaacgugaccgugacccacgccaaggacauccuggagaagacccacaacggcaagcugugcaagcugaacggcauccccccccuggagcugggcgacugcagcaucgccggcuggcugcugggcaaccccgagugcgacagacugcugagcgugcccgaguggagcuacaucauggagaaggagaaccccagagacggccugugcuaccccggcagcuucaacgacuacgaggagcugaagcaccugcugagcagcgugaagcacuucgagaaggugaagauccugcccaaggacagauggacccagcacaccaccaccggcggcagcagagccugcgccgugagcggcaaccccagcuucuucagaaacaugguguggcugaccaagaagggcaccaacuaccccguggccaagggcagcuacaacaacaccagcggcgagcagaugcugaucaucuggggcgugcaccaccccaacgacgagaccgagcagagaacccuguaccagaacgugggcaccuacgugagcgugggcaccagcacccugaacaagagaagcacccccgagaucgccaccagacccaaggugaacggccugggcagcagaauggaguucagcuggacccugcuggacaugugggacaccaucaacuucgagagcaccggcaaccugaucgcccccgaguacggcuucaagaucagcaagagaggcagcagcggcaucaugaagaccgagggcacccuggagaacugcgagaccaagugccagaccccccugggcgccaucaacaccacccugcccuuccacaacgugcacccccugaccaucggcgagugccccaaguacgugaagcuggagaagcuggugcuggccaccggccugagaaacgugccccagaucgagagcagaggccuguucggcgccaucgccggcuucaucgagggcggcuggcagggcaugguggacggcugguacggcuaccaccacagcaacgaccagggcagcggcuacgccgccgacaaggagagcacccagaaggccuucgacgugaucaccaacaaggugaacagcgugaucgagaagaugaacacccaguucgaggccgugggcaaggaguucagcaaccuggagagaagacuggagaaccugaacaagaagauggaggacggcuuccuggacguguggaccuacaacgccgagcugcuggugcugauggagaacgagagaacccuggacuuccacgacagcaacgugaagaaccuguacgacaaggugagaaugcagcugagagacaacgugaaggagcugggcaacggcugcuucgaguucuaccacaagugcgacgacgagugcaugaacagcgugaagaacggcaccuacgacuaccccaaguacgaggaggagagcaagcugaacagaaacgagaucaagggcgugaagcugagcagcaugggcguguaccagauccuggccaucuacgccaccguggccggcagccugagccuggccaucaugauggccggcaucagcuucuggaugugcagcaacggcagccugcagugcagaaucugcaucuga

SEQ ID NO: 169757 - RNA, 1689 nt, Artificial Sequence
  derived and/or modified CDS sequence (opt4) from hemagglutinin__InfluenzaA__AFV53293
auggccaucaucuaccugauccugcuguucaccagcgugagaggcgaccagaucugcaucggcuaccacgccaacaacagcaccgagaagguggacaccauccuggagagaaacgugaccgugacccacgccaagaacauccuggagaagacccacaacggcaagcugugcaagcugaacggcauccccccccuggagcugggcgacugcagcaucgccggcuggcugcugggcaaccccgagugcgacagacugcugagagugcccgaguggagcuacaucauggagaaggagaaccccaaguacagccugugcuaccccggcagcuucaacgacuacgaggagcugaagcaccugcugagcagcgugaagcacuucgagaaggugaagauccugcccaaggacggcuggacccagcacaccaccaacggcggcagcagagccugcgccgugagcggcaaccccagcuucuucagaaacaugguguggcugaccaagaagggccccaacuaccccguggccaagggcagcuacaacaacaccagcggcgagcagaugcugaucaucuggggcgugcaccaccccaacgacgaggccgagcagagagcccuguaccaggaggugggcaccuacgugagcgccagcaccagcacccugaacaagagaagcacccccgagaucgccgccagacccaaggugaacggccugggcagcagaauggaguucagcuggacccugcuggacaugugggacaccaucaacuucgagagcaccggcaaccugguggcccccgaguacggcuucaagaucagcaagagaggcagcagcggcgugaugaagaccgagggcacccuggagaacugcgagaccaagugccagaccccccugggcgccaucaacaccacccugcccuuccacaacgugcacccccugaccaucggcgagugccccaaguacgugaagagcgagaagcuggugcuggccaccggccugagaaacgugccccagaucgagagcagaggccuguucggcgccaucgccggcuucaucgagggcggcuggcagggcaugguggacggcugguacggcuaccaccacagcaacgaccagggcagcggcuacgccgccgacaaggagagcacccagaaggccuucgacggcaucaccaacaaggugaacagcgugaucgagaagaugaacacccaguucgaggccgugggcaaggaguucagcaaccuggagaagagacuggagaaccugaacaagaagauggaggacggcuuccuggacguguggaccuacaacgccgagcugcuggugcugauggagaacgagagaacccuggacuuccacgacagcaacgugaagaaccuguacgacaaggugagaaugcagcugagagacaacgugaaggagcugggcaacggcugcuucgaguucuaccacaagugcgacgacgagugcauggacagcgugaagaacggcaccuacgacuaccccaaguacgaggaggagagcaagcugaacagaaacgagaucaagggcgugaagcugagcagcaugggcguguaccagauccuggccaucuacgccaccguggccggcagccugagccuggccaucaugauggccggcaucagcuucuggaugugcagcaacggcagccugcagugcagaaucugcaucuga

SEQ ID NO: 169758 - RNA, 1689 nt, Artificial Sequence
  derived and/or modified CDS sequence (opt4) from hemagglutinin__InfluenzaA__AFV53304
auggccaucaucuaccugauccugcuguucaccgccgugagaggcgaccagaucugcaucggcuaccacgccaacaacagcaccgagaagguggacaccauccuggagcagaacgugaccgugacccacgccaaggacauccuggagaagacccacaacggcaagcugugcaagcugaacggcauccccccccuggagcugggcgacugcagcaucgccggcuggcugcugggcaaccccgagugcgacagacugcugagcgugcccgaguggagcuacaucauggagaaggagaaccccagagacggccugugcuaccccggcagcuucaacgacuacgaggagcugaagcaccugcugagcagcgugaagcacuucgagaaggugaagauccugcccaaggacagauggacccagcacaccaccaccggcggcagcagagccugcgccgugagcggcaaccccagcuucuucagaaacaugguguggcugaccaagaaggagagcaacuaccccguggccaagggcagcuacaacaacaccagcggcgagcagaugcugaucaucuggggcgugcaccaccccaacgacgagaccgagcagagaacccuguaccagaacgugggcaccuacgugagcgugggcaccagcacccugaacaagagaagcacccccaacaucgccaccagacccaaggugaacggccugggcagcagaauggaguucagcuggacccugcuggacaugugggacaccaucaacuucgagagcaccggcaaccugaucgcccccgaguacggcuucaagaucagcaagagaggcagcagcggcaucaugaagaccgagggcacccuggagaacugcgagaccaagugccagaccccccugggcgccaucaacaccacccugcccuuccacaacgugcacccccugaccaucggcgagugccccaaguacgugaagagcgagaagcuggugcuggccaccggccugagaaacgugccccagaucgagagcagaggccuguucggcgccaucgccggcuucaucgagggcggcuggcagggcaugguggacggcugguacggcuaccaccacagcaacgaccagggcagcggcuacgccgccgacaaggagagcacccagaaggccuucgacggcaucaccaacaaggugaacagcgugaucgagaagaugaacacccaguucgaggccgugggcaaggaguucagcaaccuggagagaagacuggagaaccugaacaagaagauggaggacggcuuccuggacguguggaccuacaacgccgagcugcuggugcugauggagaacgagagaacccuggacuuccacgacagcaacgugaagaaccuguacgacaaggugagaaugcagcugagagacaacgugaaggagcugggcaacggcugcuucgaguucuaccacaagugcgacgacgagugcaugaacagcgugaagaacggcaccuacgacuaccccaaguacgaggaggagagcaagcugaacagaaacgagaucaagggcgugaagcugagcagcaugggcguguaccagauccuggccaucuacgccaccguggccggcagccugagccuggccaucaugauggccggcaucagcuucuggaugugcagcaacggcagccugcagugcagaaucugcaucuga

SEQ ID NO: 169759 - RNA, 1689 nt, Artificial Sequence
  derived and/or modified CDS sequence (opt4) from hemagglutinin__InfluenzaA__AFV53314
auggccaucaucuaccugauccugcuguucaccgccgugagaggcgacaagaucugcaucggcuaccacgccaacaacagcaccgagaccguggacaccauccuggagagaaacgugaccgugacccacgccaaggacauccuggagaagacccacaacggcaagcugugcaagcugaacggcauccccccccuggagcugggcgacugcagcaucgccggcuggcugcugggcaaccccgagugcgacagacugcugagcgugcccgaguggagcuacaucauggagaaggagaaccccagaaacggccugugcuaccccggcaacuucaacgacuacgaggagcugaagcaccugcugagcagcgugaagcacuucgagaaggugaagauccugcccaaggacagauggacccagcacaccaccaccggcggcagccaggccugcgccgugagcggcaaccccagcuucuucagaaacaugguguggcugaccgagaaggagagcaacuaccccguggccaagggcagcuacaacaacaccagcggcgagcagaugcugaucaucuggggcgugcaccaccccaucgacgagaccgagcagagaacccuguaccagaacgugggcaccuacgugagcgugggcaccagcacccugaacaagagaagcacccccgagaucgccaagagacccaaggugaacggccugggcagcagaauggaguucagcuggacccugcuggacaugugggacaccaucaccuucgagagcaccggcaaccugaucgcccccgaguacggcuucaagaucagcaagagaggcagcagcggcaucaugaagaccgagggcacccuggagaacugcgagaccaagugccagaccccccugggcgccaucaacaccacccugcccuuccacaacgugcacccccugaccaucggcgagugccccaaguacgugaagagcgagaagcuggugcuggccaccggccugagaaacgugccccagaucgagagcagaggccuguucggcgccaucgccggcuucaucgagggcggcuggcagggcaugguggacggcugguacggcuaccaccacagcaacgaccagggcagcggcuacgccgccgacaaggagagcacccagaaggccuucgacggcaucaccaacaaggugaacgccgugaucgagaagaucaacacccaguucgaggccgugggcaaggaguucagcaaccuggagagaagacuggagaaccugaacaagaagauggaggacggcuuccuggacguguggaccuacaacgccgagcugcuggugcugauggagaacgagagaacccuggacuuccacgacagcaacgugaagaaccuguacgacaaggugagaaugcagcugagagacaacgugaaggagcugggcaacggcugcuucgaguucuaccacaagugcgacgacgagugcaugaacagcgugaagaacggcaccuacgacuaccccaaguacgaggaggagagcaagcugaacagaaacgagaucaagggcgugaagcugagcagcaugggcguguaccagauccuggccaucuacgccaccguggccggcagccugagccuggccaucaugauggccggcaucagcuucuggaugugcagcaacggcagccugcagugcagaaucugcaucuga

SEQ ID NO: 169760 - RNA, 1689 nt, Artificial Sequence
  derived and/or modified CDS sequence (opt4) from hemagglutinin__InfluenzaA__AFV53325
auggccaucaucuaccugauccugcuguucaccgccgugagaggcgaccagaucugcaucggcuaccacgccaacaacagcaccgagaagguggacaccauccuggagagaaacgugaccgugacccacgccaaggacauccuggagaagacccacaacggcaagcugugcaagcugaacggcauccccccccuggagcugggcgacugcagcaucgccggcuggcugcugggcaaccccgagugcgacagacugcugagcgugcccgaguggagcuacaucauggagaaggagaaccccagagacggccugugcuaccccggcagcuucaacgacuacgaggagcugaagcaccugcugagcagcgugaagcacuucgagaaggugaagauccugcccaaggacagauggacccagcacaccaccaccggcggcagcagagccugcgccgugagcggcaaccccagcuucuucagaaacaugguguggcugaccaagaagggcagcaacuacaccguggccaagggcagcuacaacaacaccagcggcgagcagaugcugaucaucuggggcgugcaccaccccaacgacgagaccgagcagagaacccuguaccagaacgugggcaccuacgugagcgugagcaccagcacccugaacaagagaagcacccccgagaucgccaccagacccaaggugaacggccugggcagcagaauggaguucagcuggacccugcuggacaugugggacaccaucaacuucgagagcaccggcaaccugaucgcccccgaguacggcuucaagaucagcaagagaggcagcagcggcaucaugaagaccgagggcacccuggagaacugcgagaccaagugccagaccccccugggcgccaucaacaccacccugcccuuccacaacgugcacccccugaccaucggcgagugccccaaguacgugaagagcgagaagcuggugcuggccaccggccugagaaacgugccccagaucgagagcagaggccuguucggcgccaucgccggcuucaucgagggcggcuggcagggcaugguggacggcugguacggcuaccaccacagcaacgaccagggcagcggcuacgccgccgacaaggagagcacccagaaggccuucgacggcaucaccaacaaggugaacagcgugaucgagaagaugaacacccaguucgaggccgugggcaaggaguucagcaaccuggagagaagacuggagaaccugaacaagaagauggaggacggcuuccuggacguguggaccuacaacgccgagcugcuggugcugauggagaacgagagaacccuggacuuccacgacagcaacgugaagaaccuguacgacaaggugagaaugcagcugagagacaacgugaaggagcugggcaacggcugcuucgaguucuaccacaagugcgacgacgagugcaugaacagcgugaagaacggcaccuacgacuaccccaaguacgaggaggagagcaagcugaacagaaacgagaucaagggcgugaagcugagcagcaugggcguguaccagauccuggccaucuacgccaccguggccggcagccugagccuggccaucaugauggccggcaucagcuucuggaugugcagcaacggcagccugcagugcagaaucugcaucuga

SEQ ID NO: 169761 - RNA, 1689 nt, Artificial Sequence
  derived and/or modified CDS sequence (opt4) from hemagglutinin__InfluenzaA__AFV53336
auggccaucaucuaccugauccugcuguucaccgccgugagaggcgaccagaucugcaucggcuaccacgccaacaacagcaccgagaagguggacaccauccuggagagaaacgugaccgugacccacgccaaggacauccuggagaagacccacaacggcaagcugugcaagcugaacggcauccccccccuggagcugggcgacugcagcaucgccggcuggcugcugggcaaccccgagugcgacagacugcugagagugcccgaguggagcuacaucauggagaaggagaaccccagauacagccugugcuaccccggcagcuucaacgacuacgaggagcugaagcaccugcugagcagcgugaagcaccuggagaaggugaagauccugcccaaggacggcuggacccagcacgagaccgacggcggcagcaaggccugcgccgugagcggcaagcccagcuucuucagaaacaugguguggcugaccaagaagggccccaacuaccccguggccaagagaagcuacaacaacaccagcggcgagcagaugcugaucaucuggggcgugcaccaccccaacgacgaggccgagcagagagcccuguaccagaaggugggcaccuacgugagcgccagcaccagcacccugaacaagagaagcacccccgagaucgccgccagacccgaggugagcggccugggcagcagaauggaguucagcuggacccugcuggacgugugggacaccaucagcuucgagagcaccggcaaccugguggcccccgaguacggcuucaagaucagcaagagaggcagcagcggcaucaugaagaccgagggcacccugggcaacugcgagaccaagugccagaccccccugggcgccaucaacaccacccugcccuuccacaacgugcacccccugaccaucggcgagugccccaaguacgugaagagcgagaagcuggugcuggccaccggccugagaaacgugccccagaucgagagcagaggccuguucggcgccaucgccggcuucaucgagggcggcuggcagggcaugguggacggcugguacggcuaccaccacagcaacgaccagggcagcggcuacgccgccgacaaggagagcacccagaaggccuucgacagaaucaccaacaaggugaacagcgugaucgagaagaugaacacccaguucgaggccgugggcaaggaguucagcaaccuggagaagagacuggagaaccugaacaagaagauggaggacggcuuccuggacguguggaccuacaacgccgagcugcuggugcugauggagaacgagagaauccuggacuuccacgacagcaacgugaagaaccuguacgacaaggugagaaugcagcugagagacaacgugaaggagcugggcaacggcugcuucgaguucuaccacaagugcgacgacgagugcaugaacagcgugaagaacggcaccuacgacuaccccaaguacgaggaggagagcaagcugaagagaaacgagaucaagggcgugaagcugagcagcaugggcguguaccagauccuggccaucuacgccaccguggccggcagccugagccuggccaucaugaucgccggcaucagcuucuggaugugcagcaacggcagccugcagugcagaaucugcaucuga

SEQ ID NO: 169762 - RNA, 1701 nt, Artificial Sequence
  derived and/or modified CDS sequence (opt4) from hemagglutinin__InfluenzaA__AFV68720
augaagaccaucaucgcccugagcuacauccugugccugguguucgcccagaagcugcccggcaacgacaacagcaccgccacccugugccugggccaccacgccgugcccaacggcaccaucgugaagaccaucaccaacgaccagaucgaggugaccaacgccaccgagcuggugcagagcagcagcaccggcgagaucugcgacagcccccaccagauccuggacggcgagaacugcacccugaucgacgcccugcugggcgacccccagugcgacggcuuccagaacaagaagugggaccuguucguggagagaagcaaggccuacagcaacugcuaccccuacgacgugcccgacuacgccagccugagaagccugguggccagcagcggcacccuggaguucaacaacgagagcuucaacuggaccggcgugacccagaacggcaccagcagcgccugcaucagaagaagcgacagcagcuucuucagcagacugaacuggcugacccaccugaacuucaaguaccccgcccugaacgugaccaugcccaacaacgagcaguucgacaagcuguacaucuggggcgugcaccaccccggcaccgacaaggaccagaucuuccuguacgcccaggccagcggcagaaucaccgugagcaccaagagaagccagcaggccgugauccccaacaucggcagcagacccagaaucagaaacauccccagcagaaucagcaucuacuggaccaucgugaagcccggcgacauccugcugaucaacagcaccggcaaccugaucgcccccagaggcuacuucaagaucagaagcggcaagagcagcaucaugagaagcgacgcccccaucggcaagugcaacagcgagugcaucacccccaacggcagcauccccaacgacaagcccuuccagaacgugaacagaaucaccuacggcgccugccccagauacgugaagcagaacacccugaagcuggccaccggcaugagaaacgugcccgagaagcagaccagaggcaucuucggcgccaucgccggcuucaucgagaacggcugggagggcaugguggacggcugguacggcuucagacaccagaacagcgagggcagaggccaggccgccgaccugaagagcacccaggccgccaucgaccagaucaacggcaagcugaacagacugaucggcaagaccaacgagaaguuccaccagaucgagaaggaguucagcgagguggagggcagaauccaggaccuggagaaguacguggaggacaccaagaucgaccuguggagcuacaacgccgagcugcugguggcccuggagaaccagcacaccaucgaccugaccgacagcgagaugaacaagcuguucgagaagaccaagaagcagcugagagagaacgccgaggacaugggcaacggcugcuucaagaucuaccacaagugcgacaacgccugcaucggcagcaucagaaacggcaccuacaaccacgacguguacagagacgaggcccugaacaacagauuccagaucaagggcguggagcugaagagcggcuacaaggacuggauccuguggaucagcuucgccaucagcugcuuccugcugugcguggcccugcugggcuucaucaugugggccugccagaagggcaacaucagaugcaacaucugcaucuga

SEQ ID NO: 169763 - RNA, 1701 nt, Artificial Sequence; identical to SEQ ID NO: 162729
  derived and/or modified CDS sequence (opt4) from hemagglutinin__InfluenzaA__AFX96347

SEQ ID NO: 169764 - RNA, 1701 nt, Artificial Sequence
  derived and/or modified CDS sequence (opt4) from hemagglutinin__InfluenzaA__AFX96359
augaaggccauccugguggugcugcuguacaccuucgccaccgccaacgccgacacccugugcaucggcuaccacgccaacaacagcaccgacaccguggacaccgugcuggagaagaacgugaccgugacccacagcgugaaccugcuggaggacaagcacaacggcaagcugugcaagcugagaggcguggccccccugcaccugggcaagugcaacaucgccggcuggauccugggcaaccccgagugcgagagccugagcaccgccagcagcuggagcuacaucguggagaccagcagcagcgacaacggcaccugcuaccccggcgacuucaucgacuacgaggagcugagagagcagcugagcagcgugagcagcuucgagagauucgagaucuuccccaagaccagcagcuggcccaaccacgacagcaacaagggcgugaccgccgccugcccccacgccggcgccaagagcuucuacaagaaccugaucuggcuggugaagaagggcaacagcuaccccaagcugagcaagagcuacaucaacgacaagggcaaggaggugcuggugcuguggggcauccaccaccccagcaccagcgccgaccagcagagccuguaccagaacgccgacaccuacguguucgugggcaccagcagauacagcaagaaguucaagcccgagaucgccaucagacccaaggugagagaccaggagggcagaaugaacuacuacuggacccugguggagcccggcgacaagaucaccuucgaggccaccggcaaccugguggugcccagauacgccuucgccauggagagaaacgccggcagcggcaucaucaucagcgacacccccgugcacgacugcaacaccaccugccagacccccaagggcgccaucaacaccagccugcccuuccagaacauccaccccaucaccaucggcaagugccccaaguacgugaagagcaccaagcugagacuggccaccggccugagaaacgugcccagcauccagagcagaggccuguucggcgccaucgccggcuucaucgagggcggcuggaccggcaugguggacggcugguacggcuaccaccaccagaacgagcagggcagcggcuacgccgccgaccugaagagcacccagaacgccaucgacgagaucaccaacaaggugaacagcgugaucgagaagaugaacacccaguucaccgccgugggcaaggaguucaaccaccuggagaagagaaucgagaaccugaacaagaagaucgacgacggcuuccuggacaucuggaccuacaacgccgagcugcuggugcugcuggagaacgagagaacccuggacuaccacgacagcaacgugaagaaccuguacgagaaggugagaagccagcugaagaacaacgccaaggagaucggcaacggcugcuucgaguucuaccacaagugcgacaacaccugcauggagagcgugaagaacggcaccuacgacuaccccaaguacagcgaggaggccaagcugaacagagaggagaucaacggcgugaagcuggagagcaccagaaucuaccagauccuggccaucuacagcaccguggccagcagccuggugcugguggugagccugggcgccaucagcuucuggaugugcagcaacggcagccugcagugcagaaucugcaucuga

SEQ ID NO: 169765 - RNA, 1701 nt, Artificial Sequence
  derived and/or modified CDS sequence (opt4) from hemagglutinin__InfluenzaA__AFX96366
augaaggccauccugguggugcugcuguacaccuucgccaccgccaacgccgacacccugugcaucggcuaccacgccaacaacagcaccgacaccguggacaccgugcuggagaagaacgugaccgugacccacagcgugaaccugcuggaggacaagcacaacggcaagcugugcaagcugagaggcguggccccccugcaccugggcaagugcaacaucgccggcuggauccugggcaaccccgagugcgagagccugagcaccgccagcagcuggagcuacaucguggagaccagcagcagcgacaacggcaccugcuaccccggcgacuucaucgacuacgaggagcugagagagcagcugagcagcgugagcagcuucgagagauucgagaucuuccccaagaccagcagcuggcccaaccacgacagcaacaagggcgugaccgccgccugcccccacgccggcgccaagagcuucuacaagaaccugaucuggcuggugaagaagggcaacagcuaccccaagcugagcaagagcuacaucaacgacagaggcaaggaggugcuggugcuguggggcauccaccaccccagcaccagcgccgaccagcagagccuguaccagaacgccgacgccuacguguucgugggcaccagcagauacagcaagaaguucaagcccgagaucgccaucagacccaaggugagagaccaggagggcagaaugaacuacuacuggacccugguggagcccggcgacaagaucaccuucgaggccaccggcaaccugguggugcccagauacgccuucgccauggagagaaacgccggcagcggcaucaucaucagcgacacccccgugcacgacugcaacaccaccugccagacccccaagggcgccaucaacaccagccugcccuuccagaacauccaccccaucaccaucggcaagugccccaaguacgugaagagcaccaagcugagacuggccaccggccugagaaacgugcccagcauccagagcagaggccuguucggcgccaucgccggcuucaucgagggcggcuggaccggcaugguggacggcugguacggcuaccaccaccagaacgagcagggcagcggcuacgccgccgaccugaagagcacccagaacgccaucgacaagaucaccaacaaggugaacagcgugaucgagaagaugaacacccaguucaccgccgugggcaaggaguucaaccagcuggagaagagaaucgagaaccugaacaagaagguggacgacggcuuccuggacaucuggaccuacaacgccgagcugcuggugcugcuggagaacgagagaacccuggacuaccacgacagcaacgugaagaaccuguacgagaaggugagaagccagcugaagaacaacgccaaggagaucggcaacggcugcuucgaguucuaccacaagugcgacaacaccugcauggagagcgugaagaacggcaccuacgacuaccccaaguacagcgaggaggccaagcugaacagagaggagaucgacggcgugaagcuggagagcaccagaaucuaccagauccuggccaucuacagcaccguggccagcagccuggugcugguggugagccugggcgccaucagcuucuggaugugcagcaacggcagccugcagugcagaaucugcaucuga

SEQ ID NO: 169766 - RNA, 1701 nt, Artificial Sequence; identical to SEQ ID NO: 164229
  derived and/or modified CDS sequence (opt4) from hemagglutinin__InfluenzaA__AFX96383

SEQ ID NO: 169767 - RNA, 1701 nt, Artificial Sequence; identical to SEQ ID NO: 162729
  derived and/or modified CDS sequence (opt4) from hemagglutinin__InfluenzaA__AFX96398

SEQ ID NO: 169768 - RNA, 1701 nt, Artificial Sequence; identical to SEQ ID NO: 162729
  derived and/or modified CDS sequence (opt4) from hemagglutinin__InfluenzaA__AFX96408

SEQ ID NO: 169769 - RNA, 1701 nt, Artificial Sequence; identical to SEQ ID NO: 162729
  derived and/or modified CDS sequence (opt4) from hemagglutinin__InfluenzaA__AFX96418

SEQ ID NO: 169770 - RNA, 1701 nt, Artificial Sequence; identical to SEQ ID NO: 162729
  derived and/or modified CDS sequence (opt4) from hemagglutinin__InfluenzaA__AFX96428

SEQ ID NO: 169771 - RNA, 1701 nt, Artificial Sequence; identical to SEQ ID NO: 162729
  derived and/or modified CDS sequence (opt4) from hemagglutinin__InfluenzaA__AFX96438

SEQ ID NO: 169772 - RNA, 1701 nt, Artificial Sequence; identical to SEQ ID NO: 162729
  derived and/or modified CDS sequence (opt4) from hemagglutinin__InfluenzaA__AFX96448

SEQ ID NO: 169773 - RNA, 1701 nt, Artificial Sequence; identical to SEQ ID NO: 162729
  derived and/or modified CDS sequence (opt4) from hemagglutinin__InfluenzaA__AFX96458

SEQ ID NO: 169774 - RNA, 1701 nt, Artificial Sequence; identical to SEQ ID NO: 162729
  derived and/or modified CDS sequence (opt4) from hemagglutinin__InfluenzaA__AFX96468

SEQ ID NO: 169775 - RNA, 1701 nt, Artificial Sequence; identical to SEQ ID NO: 162729
  derived and/or modified CDS sequence (opt4) from hemagglutinin__InfluenzaA__AFX96478

SEQ ID NO: 169776 - RNA, 1701 nt, Artificial Sequence; identical to SEQ ID NO: 162729
  derived and/or modified CDS sequence (opt4) from hemagglutinin__InfluenzaA__AFX96488

SEQ ID NO: 169777 - RNA, 1701 nt, Artificial Sequence
  derived and/or modified CDS sequence (opt4) from hemagglutinin__InfluenzaA__AFX96498
augaaggccauccugguggugcugcuguacaccuucgccaccgccaacgccgacacccugugcaucggcuaccacgccaacaacagcaccgacaccguggacaccgugcuggagaagaacgugaccgugacccacagcgugaaccugcuggaggacaagcacaacggcaagcugugcaagcugagaggcguggccccccugcaccugggcaagugcaacaucgccggcuggauccugggcaaccccgagugcgagagccugagcaccgccagcagcuggagcuacaucguggagaccagcagcagcgacaacggcaccugcuaccccggcgacuucaucgacuacgaggagcugagagagcagcugagcagcgugagcagcuucgagagauucgagaucuuccccaagaccagcagcuggcccaaccacgacagcaacaagggcgugaccgccgccugcccccacgccggcgccaagagcuucuacaagaaccugaucuggcuggugaagaagggcaacagcuaccccaagaucagcaagagcuacaucaacgacaagggcaaggaggugcuggugcuguggggcauccaccaccccagcaccagcgccgaccagcagagccuguaccagaacgccgacgccuacguguucgugggcaccagcagauacagcaagaaguucaagcccgagaucgccaucagacccaaggugagagaccaggagggcagaaugaacuacuacuggacccugguggagcccggcgacaagaucaccuucgaggccaccggcaaccugguggugcccagauacgccuucgccauggagagaaacgccggcagcggcaucaucaucagcgacacccccgugcacgacugcaacaccaccugccagacccccaagggcgccaucaacaccagccugcccuuccagaacauccaccccaucaccaucggcaagugccccaaguacgugaagagcaccaagcugagacuggccaccggccugagaaacgugcccagcauccagagcagaggccuguucggcgccaucgccggcuucaucgagggcggcuggaccggcaugguggacggcugguacggcuaccaccaccagaacgagcagggcagcggcuacgccgccgaccugaagagcacccagaacgccaucgacgagaucaccaacaaggugaacagcgugaucgagaagaugaacacccaguucaccgccgugggcaaggaguucaaccaccuggagaagagaaucgagaaccugaacaagaagguggacgacggcuuccuggacaucuggaccuacaacgccgagcugcuggugcugcuggagaacgagagaacccuggacuaccacgacagcaacgugaagaaccuguacgagaaggugagaagccagcugaagaacaacgccaaggagaucggcaacggcugcuucgaguucuaccacaagugcgacaacaccugcauggagagcgugaagaacggcaccuacgacuaccccaaguacagcgaggaggccaagcugaacagagaggagaucgacggcgugaagcuggagagcaccagaaucuaccagauccuggccaucuacagcaccguggccagcagccuggugcugguggugagccugggcgccaucagcuucuggaugugcagcaacggcagccugcagugcagaaucugcaucuga

SEQ ID NO: 169778 - RNA, 1701 nt, Artificial Sequence; identical to SEQ ID NO: 162729
  derived and/or modified CDS sequence (opt4) from hemagglutinin__InfluenzaA__AFX96508

SEQ ID NO: 169779 - RNA, 1701 nt, Artificial Sequence; identical to SEQ ID NO: 164229
  derived and/or modified CDS sequence (opt4) from hemagglutinin__InfluenzaA__AFX96518

SEQ ID NO: 169780 - RNA, 1701 nt, Artificial Sequence; identical to SEQ ID NO: 162729
  derived and/or modified CDS sequence (opt4) from hemagglutinin__InfluenzaA__AFX96528

SEQ ID NO: 169781 - RNA, 1701 nt, Artificial Sequence; identical to SEQ ID NO: 164229
  derived and/or modified CDS sequence (opt4) from hemagglutinin__InfluenzaA__AFX96538

SEQ ID NO: 169782 - RNA, 1701 nt, Artificial Sequence
  derived and/or modified CDS sequence (opt4) from hemagglutinin__InfluenzaA__AFX96548
augaaggccauccugguggugcugcuguacaccuucgccaccgccaacgccgacacccugugcaucggcuaccacgccaacaacagcaccgacaccguggacaccgugcuggagaagaacgugaccgugacccacagcgugaaccugcuggaggacaagcacaacggcaagcugugcaagcugagaggcguggccccccugcaccugggcaagugcaacaucgccggcuggauccugggcaaccccgagugcgagagccugagcaccgccagcagcuggagcuacaucguggagaccagcagcagcgacaacggcaccugcuaccccggcgacuucaucgacuacgaggagcugagagagcagcugagcagcgugagcagcuucgagagauucgagaucuuccccaagaccagcagcuggcccaaccacgacagcaacaagggcgugaccgccgccugcccccacgccggcgccaagagcuucuacaagaaccugaucuggcuggugaagaagggcaacagcuaccccaagcugagcaagagcuacaucaacgacaagggcaaggaggugcuggugcuguggggcauccaccaccccagcaccagcgccgaccagcagagccuguaccagaacgccgacaccuacguguucgugggcaccagcagauacagcaagaaguucaagcccgagaucgccaucagacccaaggugagagaccaggagggcagaaugaacuacuacuggacccugguggagcccggcgacaagaucaccuucgaggccaccggcaaccugguggugcccagauacgccuucgccauggagagaaacgccggcagcggcaucaucaucagcgacacccccgugcacgacugcaacaccaccugccagacccccaagggcgccaucaacaccagccugcccuuccagaacauccaccccaucaccaucggcaagugccccaaguacgugaagagcaccaagcugagacuggccaccggccugagaaacgugcccagcauccagagcagaggccuguucggcgccaucgccggcuucaucgagggcggcuggaccggcaugguggacggcugguacggcuaccaccaccagaacgagcagggcagcggcuacgccgccgaccugaagagcacccagaacgccaucgacaagaucaccaacaaggugaacagcgugaucgagaagaugaacacccaguucaccgccgugggcaaggaguucaaccaccuggagaagagaaucgagaaccugaacaagaagaucgacgacggcuuccuggacaucuggaccuacaacgccgagcugcuggugcugcuggagaacgagagaacccuggacuaccacgacagcaacgugaagaaccuguacgagaaggugagaagccagcugaagaacaacgccaaggagaucggcaacggcugcuucgaguucuaccacaagugcgacaacaccugcauggagagcgugaagaacggcaccuacgacuaccccaaguacagcgaggaggccaagcugaacagagaggagaucgacggcgugaagcuggagagcaccagaaucuaccagauccuggccaucuacagcaccguggccagcagccuggugcugguggugagccugggcgccaucagcuucuggaugugcagcaacggcagccugcagugcagaaucugcaucuga

SEQ ID NO: 169783 - RNA, 1701 nt, Artificial Sequence; identical to SEQ ID NO: 162729
  derived and/or modified CDS sequence (opt4) from hemagglutinin__InfluenzaA__AFX96558

SEQ ID NO: 169784 - RNA, 1701 nt, Artificial Sequence; identical to SEQ ID NO: 163889
  derived and/or modified CDS sequence (opt4) from hemagglutinin__InfluenzaA__AFX96568

SEQ ID NO: 169785 - RNA, 1701 nt, Artificial Sequence; identical to SEQ ID NO: 163889
  derived and/or modified CDS sequence (opt4) from hemagglutinin__InfluenzaA__AFX96578

SEQ ID NO: 169786 - RNA, 1701 nt, Artificial Sequence; identical to SEQ ID NO: 162729
  derived and/or modified CDS sequence (opt4) from hemagglutinin__InfluenzaA__AFX96588

SEQ ID NO: 169787 - RNA, 1701 nt, Artificial Sequence; identical to SEQ ID NO: 162729
  derived and/or modified CDS sequence (opt4) from hemagglutinin__InfluenzaA__AFX96598

SEQ ID NO: 169788 - RNA, 1701 nt, Artificial Sequence
  derived and/or modified CDS sequence (opt4) from hemagglutinin__InfluenzaA__AFX96608
augaaggccauccugguggugcugcuguacaccuucgccaccgccaacgccgacacccugugcaucggcuaccacgccaacaacagcaccgacaccguggacaccgugcuggagaagaacgugaccgugacccacagcgugaaccugcuggaggacaagcacaacggcaagcugugcaagcugagaggcguggccccccugcaccugggcaagugcaacaucgccggcuggauccugggcaaccccgagugcgagagccugagcaccgccagcagcuggagcuacaucguggagaccagcagcagcgacaacggcaccugcuaccccggcgacuucaucgacuacgaggagcugagagagcagcugagcagcgugagcagcuucgagagauucgagaucuuccccaagaccagcagcuggcccaaccacgacagcaacaagggcgugaccgccgccugcccccacgccggcgccaagagcuucuacaagaaccugaucuggcuggugaagaagggcaacagcuaccccaagcugagcaagagcuacaucaacgacaagggcaaggaggugcuggugcuguggggcauccaccaccccagcaccagcgccgaccagcagagccuguaccagaacgccgacgccuacguguucgugggcaccagcagauacagcaagaaguucaagcccgagaucgccaucagacccaaggugagagaccaggagggcagaaugaacuacuacuggacccugguggagcccggcgacaagaucaccuucgaggccaccggcaaccugguggugcccagauacgccuucgccauggagagaaacgccggcagcggcaucaucaucagcgacacccccgugcacgacugcaacaccaccugccagacccccaagggcgccaucaacaccagccugcccuuccagaacauccaccccaucaccaucggcaagugccccaaguacgugaagagcaccaagcugagacuggccaccggccugagaaacgugcccagcauccagagcagaggccuguucggcgccaucgccggcuucaucgagggcggcuggaccggcaugguggacggcugguacggcuaccaccaccagaacgagcagggcagcggcuacgccgccgaccugaagagcacccagaacgccaucgacgagaucaccaacaaggugaacagcgugaucgagaagaugaacacccaguucaccgccgugggcaaggaguucaaccaccuggagaagagaaucgagaaccugaacaagaagguggacgacggcuuccuggacaucuggaccuacaacgccgagcugcuggugcugcuggagaacgagagaacccuggacuaccacgacagcaacgugaagaaccuguacgagaaggugagaagccagcugaagaacaacgccaaggagaucggcaacggcugcuucgaguucuaccacaagugcgacaacaccugcauggagagcgugaagaacggcaccuacgacuaccccaaguacagcgaggaggccaagcugaacagagagaagaucgacggcgugaagcuggagagcaccagaaucuaccagauccuggccaucuacagcacccuggccagcagccuggugcugguggugagccugggcgccaucagcuucuggaugugcagcaacggcagccugcagugcagaaucugcaucuga

SEQ ID NO: 169789 - RNA, 1701 nt, Artificial Sequence; identical to SEQ ID NO: 162729
  derived and/or modified CDS sequence (opt4) from hemagglutinin__InfluenzaA__AFX96618

SEQ ID NO: 169790 - RNA, 1701 nt, Artificial Sequence; identical to SEQ ID NO: 163889
  derived and/or modified CDS sequence (opt4) from hemagglutinin__InfluenzaA__AFX96628

SEQ ID NO: 169791 - RNA, 1701 nt, Artificial Sequence
  derived and/or modified CDS sequence (opt4) from hemagglutinin__InfluenzaA__AFX96638
augaaggccauccugguggugcugcuguacaccuucgccaccgccaacgccgacacccugugcaucggcuaccacgccaacaacagcaccgacaccguggacaccgugcuggagaagaacgugaccgugacccacagcgugaaccugcuggaggacaagcacaacggcaagcugugcaagcugagaggcguggccccccugcaccugggcaagugcaacaucgccggcuggauccugggcaaccccgagugcgagagccugagcaccgccagcagcuggagcuacaucguggagaccagcagcagcgacaacggcaccugcuaccccggcgacuucaucaacuacgaggagcugagagagcagcugagcagcgugagcagcuucgagagauucgagaucuuccccaagaccagcagcuggcccaaccacgacagcaacaagggcgugaccgccgccugcccccacgccggcgccaagagcuucuacaagaaccugguguggcuggugaagaagggcaacagcuaccccaagcugagcaagagcuacaucaacgacaagggcaaggaggugcuggugcuguggggcauccaccaccccagcaccagcgccgaccagcagagccuguaccagaacgccgacgccuacguguucgugggcaccagcagauacagcaagaaguucaagcccgagaucgccaucagacccaaggugagagaccaggagggcagaaugaacuacuacuggacccugguggagcccggcgacaagaucaccuucgaggccaccggcaaccugauggugcccagauacgccuucgccauggagagaaacgccggcagcggcaucaucaucagcgacacccccgugcacgacugcaacaccaccugccagacccccaagggcgccaucaacaccagccugcccuuccagaacauccaccccaucaccaucggcaagugccccaaguacgugaagagcaccaagcugagacuggccaccggccugagaaacgugcccagcauccagagcagaggccuguucggcgccaucgccggcuucaucgagggcggcuggaccggcaugguggacggcugguacggcuaccaccaccagaacgagcagggcagcggcuacgccgccgaccugaagagcacccagaacgccaucgacgagaucaccaacaaggugaacagcgugaucgagaagaugaacacccaguucaccgccgugggcaaggaguucaaccaccuggagaagagaaucgagaaccugaacaagaagguggacgacggcuuccuggacaucuggaccuacaacgccgagcugcuggugcugcuggagaacgagagaacccuggacuaccacgacagcaacgugaagaaccuguacgagaaggugagaagccagcugaagaacaacgccaaggagaucggcaacggcugcuucgaguucuaccacaagugcgacaacaccugcauggagagcgugaagaacggcaccuacgacuaccccaaguacagcgaggaggccaagcugaacagagaggagaucgacggcgugaagcuggagagcaccagaaucuaccagauccuggccaucuacagcaccguggccagcagccuggugcugguggugagccugggcgccaucagcuucuggaugugcagcaacggcagccugcagugcagaaucugcaucuga

SEQ ID NO: 169792 - RNA, 1701 nt, Artificial Sequence; identical to SEQ ID NO: 162729
  derived and/or modified CDS sequence (opt4) from hemagglutinin__InfluenzaA__AFX96648

SEQ ID NO: 169793 - RNA, 1701 nt, Artificial Sequence; identical to SEQ ID NO: 163889
  derived and/or modified CDS sequence (opt4) from hemagglutinin__InfluenzaA__AFX96658

SEQ ID NO: 169794 - RNA, 1701 nt, Artificial Sequence
  derived and/or modified CDS sequence (opt4) from hemagglutinin__InfluenzaA__AFX96668
augaaggccauccugguggugcugcuguacaccuucgccaccgccaacgccgacacccugugcaucggcuaccacgccaacaacagcaccgacaccguggacaccgugcuggagaagaacgugaccgugacccacagcgugaaccugcuggaggacaagcacaacggcaagcugugcaagcugagaggcguggccccccugcaccugggcaagugcaacaucgccggcuggauccugggcaaccccgagugcgagagccugagcaccgccagcagcuggagcuacaucguggagaccagcagcagcgacaacggcaccugcuaccccggcgacuucaucgacuacgaggagcugagagagcagcugagcagcgugagcagcuucgagagauucgagaucuuccccaagaccagcagcuggcccaaccacgacagcaacaagggcgugaccgccgccugcccccacgccggcgccaagagcuucuacaagaaccugaucuggcuggugaagaagggcaacagcuaccccaagcugagcaagagcuacaucaacgacaagggcaaggaggugcuggugcuguggggcauccaccaccccagcaccagcgccgaccagcagagccuguaccagaacgccgacgccuacguguucgugggcaccagcagauacagcaagaaguucaagcccgagaucgccaucagacccaaggugagagaccaggagggcagaaugaacuacuacuggacccugguggagcccggcgacaagaucaccuucgaggccaccggcaaccugguggugcccagauacgccuucgccauggagagaaacgccggcagcggcaucaucaucagcgacacccccgugcacgacugcaacaccaccugccagacccccaagggcgccaucaacaccagccugcccuuccagaacauccaccccaucaccaucggcaagugcagcaaguacgugaagagcaccaagcugagacuggccaccggccugagaaacgugcccagcauccagagcagaggccuguucggcgccaucgccggcuucaucgagggcggcuggaccggcaugguggacggcugguacggcuaccaccaccagaacgagcagggcagcggcuacgccgccgaccugaagagcacccagaacgccaucgacgagaucaccaacaaggugaacagcgugaucgagaagaugaacacccaguucaccgccgugggcaaggaguucaaccaccuggagaagagaaucgagaaccugaacaagaagguggacgacggcuuccuggacaucuggaccuacaacgccgagcugcuggugcugcuggagaacgagagaacccuggacuaccacgacagcaacgugaagaaccuguacgagaaggugagaagccagcugaagaacaacgccaaggagaucggcaacggcugcuucgaguucuaccacaagugcgacaacaccugcauggagagcgugaagaacggcaccuacgacuaccccaaguacagcgaggaggccaagcugaacagagaggagaucgacggcgugaagcuggagagcaccagaaucuaccagauccuggccaucuacagcaccguggccagcagccuggugcugguggugagccugggcgccaucagcuucuggaugugcagcaacggcagccugcagugcagaaucugcaucuga

SEQ ID NO: 169795 - RNA, 1701 nt, Artificial Sequence
  derived and/or modified CDS sequence (opt4) from hemagglutinin__InfluenzaA__AFX96678
augaaggccauccugguggugcugcuguacaccuucgccaccgccaacgccgacacccugugcaucggcuaccacgccaacaacagcaccgacaccguggacaccgugcuggagaagaacgugaccgugacccacagcgugaaccugcuggaggacaagcacaacggcaagcugugcaagcugagaggcguggccccccugcaccugggcaagugcaacaucgccggcuggauccugggcaaccccgagugcgagagccugagcaccgccagcagcuggagcuacaucguggagaccagcagcagcgacaacggcaccugcuaccccggcgacuucaucgacuacgaggagcugagagagcagcugagcagcgugagcagcuucgagagauucgagaucuuccccaagaccagcagcuggcccaaccacgacagcaacaagggcgugaccgccgccugcagccacgccggcgccaagagcuucuacaagaaccugaucuggcuggugaagaagggcaacagcuaccccaagcugagcaagagcuacaucaacgacaagggcaaggaggugcuggugcuguggggcauccaccaccccagcaccagcgccgaccagcagagccuguaccagaacgccgacgccuacguguucgugggcaccagcagauacagcaagaaguucaagcccgagaucgccaucagacccaaggugagagaccaggagggcagaaugaacuacuacuggacccugguggagcccggcgacaagaucaccuucgaggccaccggcaaccugguggugcccagauacgccuucgccauggagagaaacgccggcagcggcaucaucaucagcgacacccccgugcacgacugcaacaccaccugccagacccccaagggcgccaucaacaccagccugcccuuccagaacauccaccccaucaccaucggcaagugccccaaguacgugaagagcaccaagcugagacuggccaccggccugagaaacgugcccagcauccagagcagaggccuguucggcgccaucgccggcuucaucgagggcggcuggaccggcaugguggacggcugguacggcuaccaccaccagaacgagcagggcagcggcuacgccgccgaccugaagagcacccagaacgccaucgacgagaucaccaacaaggugaacagcgugaucgagaagaugaacacccaguucaccgccgugggcaaggaguucaaccaccuggagaagagaaucgagaaccugaacaagaagguggacgacggcuuccuggacaucuggaccuacaacgccgagcugcuggugcugcuggagaacgagagaacccuggacuaccacgacagcaacgugaagaaccuguacgagaaggugagaagccagcugaagaacaacgccaaggagaucggcaacggcugcuucgaguucuaccacaagugcgacaacaccugcauggagagcgugaagaacggcaccuacgacuaccccaaguacagcgaggaggccaagcugaacagagaggagaucgacggcgugaagcuggagagcaccagaaucuaccagauccuggccaucuacagcaccguggccagcagccuggugcugguggugagccugggcgccaucagcuucuggaugugcagcaacggcagccugcagugcagaaucugcaucuga

SEQ ID NO: 169796 - RNA, 1701 nt, Artificial Sequence
  derived and/or modified CDS sequence (opt4) from hemagglutinin__InfluenzaA__AFX96688
augaaggccauccugguggugcugcuguacaccuucgccaccgccaacgccgacacccugugcaucggcuaccacgccaacaacagcaccgacaccguggacaccgugcuggagaagaacgugaccgugacccacagcgugaaccugcuggaggacaagcacaacggcaagcugugcaagcugagaggcguggccccccugcaccugggcaagugcaacaucgccggcuggauccugggcaaccccgacugcgagagccugagcaccgccagcagcuggagcuacaucguggagaccagcagcagcgacaacggcaccugcuaccccggcgacuucaucgacuacgaggagcugagagagcagcugagcagcgugagcagcuucgagagauucgagauguuccccaagaccagcagcuggcccaaccacgacagcaacaagggcgugaccgccgccugcccccacgccggcgccaagagcuucuacaagaaccugaucuggcuggugaagaagggcaacagcuaccccaagcugagcaagagcuacaucaacgacaagggcaaggaggugcuggugcuguggggcauccaccaccccagcaccagcgccgaccagcagagccuguaccagaacgccgacgccuacguguucgugggcaccagcagauacagcaagaaguucaagcccgagaucgccaucagacccaaggugagagaccaggagggcagaaugaacuacuacuggacccugguggagcccggcgacaagaucaccuucgaggccaccggcaaccugguggugcccagauacgccuucgccauggagagaaacgacggcagcggcaucaucaucagcgacacccccgugcacgacugcaacaccaccugccagacccccaagggcgccaucaacaccagccugcccuuccagaacauccaccccaucaccaucggcaagugccccaaguacgugaagagcaccaagcugagacuggccaccggccugagaaacgugcccagcauccagagcagaggccuguucggcgccaucgccggcuucaucgagggcggcuggaccggcaugguggacggcugguacggcuaccaccaccagaacgagcagggcagcggcuacgccgccgaccugaagagcacccagaacgccaucgacgagaucaccaacaaggugaacagcgugaucgagaagaugaacacccaguucaccgccgugggcaaggaguucaaccaccuggagaagagaaucgagaaccugaacaagaagguggacgacggcuuccuggacaucuggaccuacaacgccgagcugcuggugcugcuggagaacgagagaacccuggacuaccacgacagcaacgugaagaaccuguacgagaaggugagaagccagcugaagaacaacgccaaggagaucggcaacggcugcuucgaguucuaccacaagugcgacaacaccugcauggagagcgugaagaacggcaccuacgacuaccccaaguacagcgaggaggccaagcugaacagagaggagaucgacggcgugaagcuggagagcaccagaaucuaccagauccuggccaucuacagcaccguggccagcagccuggugcugguggugagccugggcgccaucagcuucuggaugugcagcaacggcagccugcagugcagaaucugcaucuga

SEQ ID NO: 169797 - RNA, 1701 nt, Artificial Sequence; identical to SEQ ID NO: 162729
  derived and/or modified CDS sequence (opt4) from hemagglutinin__InfluenzaA__AFX96698

SEQ ID NO: 169798 - RNA, 1701 nt, Artificial Sequence
  derived and/or modified CDS sequence (opt4) from hemagglutinin__InfluenzaA__AFX96718
augaaggccauccugguggugcugcuguacaccuucgccaccgccaacgccgacacccugugcaucggcuaccacgccaacaacagcaccgacaccguggacaccgugcuggagaagaacgugaccgugacccacagcgugaaccugcuggaggacaagcacaacggcaagcugugcaagcugagaggcguggccccccugcaccugggcaagugcaacaucgccggcuggauccugggcaaccccgagugcgagagccugagcaccgccagcagcuggagcuacaucguggagaccagcagcagcgacaacggcaccugcuaccccggcgacuucaucgacuacgaggagcugagagagcagcugagcagcgugagcagcuucgagagauucgagaucuuccccaagaccagcagcuggcccaaccacgacagcaacaagggcgugaccgccgccugcccccacgccggcgccaagagcuucuacaagaaccugaucuggcuggugaagaagggcaacagcuaccccaagaucagcaagagcuacaucaacgacaagggcaaggaggugcuggugcuguggggcauccaccaccccagcaccagcgccgaccagcagagccuguaccagaacgccgacaccuacguguucgugggcaccagcagauacagcaagaaguucaagcccgagaucgccaucagacccaaggugagagaccaggagggcagaaugaacuacuacuggacccugguggagcccggcgacaagaucaccuucgaggccaccggcaaccugguggugcccagauacgccuucgccauggagagaaacgccggcagcggcaucaucaucagcgacacccccgugcacgacugcaacaccaccugccagacccccaagggcgccaucaacaccagccugcccuuccagaacauccaccccaucaccaucggcaagugccccaaguacgugaagagcaccaagcugagacuggccaccggccugagaaacgugcccagcauccagagcagaggccuguucggcgccaucgccggcuucaucgagggcggcuggaccggcaugguggacggcugguacggcuaccaccaccagaacgagcagggcagcggcuacgccgccgaccugaagagcacccagaaggccaucgacgagaucaccaacaaggugaacagcgugaucgagaagaugaacacccaguucaccgccgugggcaaggaguucaaccaccuggagaagagaaucgagaaccugaacaagaagaucgacgacggcuuccuggacaucuggaccuacaacgccgagcugcuggugcugcuggagaacgagagaacccuggacuaccacgacagcaacgugaagaaccuguacgagaaggugagaagccagcugaagaacaacgccaaggagaucggcaacggcugcuucgaguucuaccacaagugcgacaacaccugcauggagagcgugaagaacggcaccuacgacuaccccaaguacagcgaggaggccaagcugaacagagaggagaucgacggcgugaagcuggagagcaccagaaucuaccagauccuggccaucuacagcaccguggccagcagccuggugcugguggugagccugggcgccaucagcuucuggaugugcagcaacggcagccugcagugcagaaucugcaucuga

SEQ ID NO: 169799 - RNA, 1701 nt, Artificial Sequence; identical to SEQ ID NO: 169798
  derived and/or modified CDS sequence (opt4) from hemagglutinin__InfluenzaA__AFX96728

SEQ ID NO: 169800 - RNA, 1701 nt, Artificial Sequence; identical to SEQ ID NO: 163199
  derived and/or modified CDS sequence (opt4) from hemagglutinin__InfluenzaA__AFX96738

SEQ ID NO: 169801 - RNA, 1701 nt, Artificial Sequence
  derived and/or modified CDS sequence (opt4) from hemagglutinin__InfluenzaA__AFX96748
augaaggccauccugguggugcugcuguacaccaucgccaccgccaacgccgacacccugugcaucggcuaccacgccaacaacagcaccgacaccguggacaccgugaucgagaagaacgugaccgugacccacagcgugaaccugcuggaggacaagcacaacggcaagcugugcaagcugagaggcguggccccccugcaccugggcaagugcaacaucgccggcuggauccugggcaaccccgagugcgagagccugagcaccgccagcagcuggagcuacaucguggagaccagcagcagcgacaacggcaccugcuaccccggcgacuucaucgacuacgaggagcugagagagcagcugagcagcgugagcagcuucgagagauucgagauguuccccaagaccagcagcuggcccaaccacgacagcaacaagggcgugaccgccgccugcccccacgccggcgccaagagcuucuacaagaaccugaucuggcuggugaagaagggcaacagcuaccccaagcugagcaagagcuacaucaacgacaagggcaaggaggugcuggugcuguggggcauccaccaccccagcaccagcgccgaccagcagagccuguaccagaacgccgacgccuacguguucgugggcaccagcagauacagcaagaaguucaagcccgagaucgccaucagacccaaggugagagaccaggagggcagaaugaacuacuacuggacccugguggagcccggcgacaagaucaccuucgaggccaccggcaaccugguggugcccagauacgccuucgccauggagagaaacgccggcagcggcaucaucaucagcgacacccccgugcacgacugcaacaccaccugccagacccccaagggcgccaucaacaccagccugcccuuccagaacauccaccccaucaccaucggcaagugccccaaguacgugaagagcaccaagcugagacuggccaccggccugagaaacgugcccagcauccagagcagaggccuguucggcgccaucgccggcuucaucgagggcggcuggaccggcaugguggacggcugguacggcuaccaccaccagaacgagcagggcagcggcuacgccgccgaccugaagagcacccagaacgccaucgacgagaucaccaacaaggugaacagcgugaucgagaagaugaacacccaguucaccgccgugggcaaggaguucaaccaccuggagaagagaaucgagaaccugaacaagaagguggacgacggcuuccuggacaucuggaccuacaacgccgagcugcuggugcugcuggagaacgagagaacccuggacuaccacgacagcaacgugaagaaccuguacgagaaggugagaagccagcugaagaacaacgccaaggagaucggcaacggcugcuucgaguucuaccacaagugcgacaacaccugcauggagagcgugaagaacggcaccuacgacuaccccaaguacagcgaggaggccaagcugaacagagaggagaucgacggcgugaagcuggagagcaccagaaucuaccagauccuggccaucuacagcaccguggccagcagccuggugcugguggugagccugggcgccaucagcuucuggaugugcagcaacggcagccugcagugcagaaucugcaucuga

SEQ ID NO: 169802 - RNA, 1701 nt, Artificial Sequence
  derived and/or modified CDS sequence (opt4) from hemagglutinin__InfluenzaA__AFX96758
augaaggccauccugguggugcugcuguacaccuucgccaccgccaacgccgacacccugugcaucggcuaccacgccaacaacagcaccgacaccguggacaccgugcuggagaagaacgugaccgugacccacagcgugaaccugcuggaggacaagcacaacggcaagcugugcaagcugagaggcguggccccccugcaccugggcaagugcaacaucgccggcuggauccugggcaaccccgagugcgagagccugagcaccgccagcagcuggagcuacaucguggagaccagcagcagcgacaacggcaccugcuaccccggcgacuucaucgacuacgaggagcugagagagcagcugagcagcgugagcagcuucgagagauucgagauguuccccaagaccagcagcuggcccaaccacgacagcaacaagggcgugaccgccgccugcccccacgccggcgccaagagcuucuacaagaaccugaucuggcuggugaagaagggcaacagcuaccccaagcugagcaagagcuacaucaacgacaagggcaaggaggugcuggugcuguggggcauccaccaccccagcaccagcgccgaccagcagagccuguaccagaacgccgacaccuacguguucgugggcaccagcagauacagcaagaaguucaagcccgagaucgccaucagacccaaggugagagaccaggagggcagaaugaacuacuacuggacccugguggagcccggcgacaagaucaccuucgaggccaccggcaaccugguggugcccagauacgccuucgccauggagagaaacgccggcagcggcaucaucaucagcgacacccccgugcacgacugcaacaccaccugccagacccccaagggcgccaucaacaccagccugcccuuccagaacauccaccccaucaccaucggcaagugccccaaguacgugaagagcaccaagcugagacuggccaccggccugagaaacgugcccagcauccagagcagaggccuguucggcgccaucgccggcuucaucgagggcggcuggaccggcaugguggacggcugguacggcuaccaccaccagaacgagcagggcagcggcuacgccgccgaccugaagagcacccagaacgccaucgacgagaucaccaacaaggugaacagcgugaucgagaagaugaacacccaguucaccgccgugggcaaggaguucaaccaccuggagaagagaaucgagaaccugaacaagaagaucgacgacggcuuccuggacaucuggaccuacaacgccgagcugcuggugcugcuggagaacgagagaacccuggacuaccacgacagcaacgugaagaaccuguacgagaaggugagaagccagcugaagaacaacgccaaggagaucggcaacggcugcuucgaguucuaccacaagugcgacaacaccugcauggagagcgugaagaacggcaccuacgacuaccccaaguacagcgaggaggccaagcugaacagagaggagaucgacggcgugaagcuggagagcaccagaaucuaccagauccuggccaucuacagcaccguggccagcagccuggugcugguggugagccugggcgccaucagcuucuggaugugcagcaacggcagccugcagugcagaaucugcaucuga

SEQ ID NO: 169803 - RNA, 1701 nt, Artificial Sequence
  derived and/or modified CDS sequence (opt4) from hemagglutinin__InfluenzaA__AFX96768
augaaggccauccugguggugcugcuguacaccuucgccaccgccaacgccgacacccugugcaucggcuaccacgccaacaacagcaccgacaccguggacaccgugcuggagaagaacgugaccgugacccacagcgugaaccugcuggaggacaagcacaacggcaagcugugcaagcugagaggcguggccccccugcaccugggcaagugcaacaucgccggcuggauccugggcaaccccgagugcgagagccugagcaccgccaucagcuggagcuacaucguggagaccagcagcagcgacaacggcaccugcuaccccggcgacuucaucgacuacgaggagcugagagagcagcugagcagcgugagcagcuucgagagauucgagaucuuccccaagaccagcagcuggcccaaccacgacagcaacaagggcgugaccgccgccugcccccacgccggcgccaagagcuucuacaagaaccugaucuggcuggugaagaagggcaacagcuaccccaagcugagcaagagcuacaucaacgacaagggcaaggaggugcuggugcuguggggcauccaccaccccagcaccagcgccgaccagcagagccuguaccagaacgccgacgccuacguguucgugggcaccagcagauacagcaagaaguucaagcccgagaucgccaucagacccaaggugagagaccaggagggcagaaugaacuacuacuggacccugguggagcccggcgacaagaucaccuucgaggccaccggcaaccugguggugcccagauacgccuucgccauggagagaaacgccggcagcggcaucaucaucagcgacacccccgugcacgacugcaacaccaccugccagacccccaagggcgccaucaacaccagccugcccuuccagaacauccaccccaucaccaucggcaagugccccaaguacgugaagagcaccaagcugagacuggccaccggccugagaaacgugcccagcauccagagcagaggccuguucggcgccaucgccggcuucaucgagggcggcuggaccggcaugguggacggcugguacggcuaccaccaccagaacgagcagggcagcggcuacgccgccgaccugaagagcacccagaacgccaucgacgagaucaccaacaaggugaacagcgugaucgagaagaugaacacccaguucaccgccgugggcaaggaguucaaccaccuggagaagagaaucgagaaccugaacaagaagguggacgacggcuuccuggacaucuggaccuacaacgccgagcugcuggugcugcuggagaacgagagaacccuggacuaccacgacagcaacgugaagaaccuguacgagaaggugagaagccagcugaagaacaacgccaaggagaucggcaacggcugcuucgaguucuaccacaagugcgacaacaccugcauggagagcgugaagaacggcaccuacgacuaccccaaguacagcgaggaggccaagcugaacagagaggagaucgacggcgugaagcuggagagcaccaagaucuaccagauccuggccaucuacagcaccguggccagcagccuggugcugguggugagccugggcgccaucagcuucuggaugugcagcaacggcagccugcagugcagaaucugcaucuga

SEQ ID NO: 169804 - RNA, 1701 nt, Artificial Sequence
  derived and/or modified CDS sequence (opt4) from hemagglutinin__InfluenzaA__AFX96778
augaaggccauccuggugauccugcuguacaccuucgccaccgccaacgccgacacccugugcaucggcuaccacgccaacaacagcaccgacaccguggacaccauccuggagaagaacgugaccgugacccacagcgugaaccugcuggaggacaagcacaacggcaagcugugcaagcugagaggcguggccccccugcaccugggcaagugcaacaucgccggcuggauccugggcaaccccgagugcgagagccugagcaccgccagcagcuggagcuacaucguggagaccagcagcagcgacaacggcaccugcuaccccggcgacuucaucgacuacgaggagcugagagagcagcugagcagcgugagcagcuucgagagauucgagaucuuccccaagaccagcagcuggcccaaccacgacagcaacaagggcgugaccgccgccugcccccacgccggcgccaagagcuucuacaagaaccugaucuggcuggugaagaagggcaacagcuaccccaagcugagcaagagcuacaucaacgacaagggcaaggaggugcuggugcuguggggcauccaccaccccagcaccagcgccgaccagcagagccuguaccagaacgccgacgccuacguguucgugggcaccagcagauacagcaagaaguucaagcccgagaucgccaucagacccaaggugagagaccaggagggcagaaugaacuacuacuggacccugguggagcccggcgacaagaucaccuucgaggccaccggcaaccugguggugcccagauacgccuucgccauggagagaaacgccggcagcggcaucaucaucagcgacacccccgugcacgacugcaacaccaccugccagacccccaagggcgccaucaacaccagccugcccuuccagaacauccaccccaucaccaucggcaagugccccaaguacgugaagagcaccaagcugagacuggccaccggccugagaaacgugcccagcauccagagcagaggccuguucggcgccaucgccggcuucaucgagggcggcuggaccggcaugguggacggcugguacggcuaccaccaccagaacgagcagggcagcggcuacgccgccgaccugaagagcacccagaacgccaucgacgagaucaccaacaaggugaacagcgugaucgagaagaugaacacccaguucaccgccgugggcaaggaguucaaccaccuggagaagagaaucgagaaccugaacaagaagguggacgacggcuuccuggacaucuggaccuacaacgccgagcugcuggugcugcuggagaacgagagaacccuggacuaccacgacagcaacgugaagaaccuguacgagaaggugagaagccagcugaagaacaacgccaaggagaucggcaacggcugcuucgaguucuaccacaagugcgacaacaccugcauggagagcgugaagaacggcaccuacgacuaccccaaguacagcgaggaggccaagcugaacagagaggagaucgacggcgugaagcuggagagcaccagaaucuaccagauccuggccaucuacagcaccguggccagcagccuggugcugguggugagccugggcgccaucagcuucuggaugugcagcaacggcagccugcagugcagaaucugcaucuga

SEQ ID NO: 169805 - RNA, 1701 nt, Artificial Sequence
  derived and/or modified CDS sequence (opt4) from hemagglutinin__InfluenzaA__AFX96788
augaaggccauccugguggugcugcuguacaccuucgccaccgccaacgccgacacccugugcaucggcuaccacgccaacaacagcaccgacaccguggacaccgugcuggagaagaacgugaccgugacccacagcgugaaccugcuggaggacaagcacaacggcaagcugugcaagcugagaggcguggccccccugcaccugggcaagugcaacaucgccggcuggauccugggcaaccccgagugcgagagccugagcaccgccagcagcuggagcuacaucguggagaccagcagcagcgacaacggcaccugcuaccccggcgacuucaucgacuacgaggagcugagagagcagcugagcagcgugagcagcuucgagagauucgagaucuuccccaagaccagcagcuggcccaaccacgacagcaacaagggcgugaccgccgccugcccccacgccggcgccaagagcuucuacaagaaccugaucuggcuggugaagaagggcaacagcuaccccaagcugagcaagagcuacaucaacgacaagggcaaggaggugcuggugcuguggggcauccaccaccccagcaccagcgccgaccagcagagccuguaccagaacgccgacgccuacguguucgugggcaccagcagauacagcaagaaguucaagcccgagaucgccaucagacccaaggugagagaccaggagggcagaaugaacuacuacuggacccugguggagcccggcgacaagaucaccuucgaggccaccggcaaccugguggugcccagauacgccuucgccauggagaagaacgccggcagcggcaucaucaucagcgacacccccgugcacgacugcaacaccaccugccagacccccaagggcgccaucaacaccagccugcccuuccagaacauccaccccaucaccaucggcaagugccccaaguacgugaagagcaccaagcugagacuggccaccggccugagaaacgugcccagcauccagagcagaggccuguucggcgccaucgccggcuucaucgagggcggcuggaccggcaugguggacggcugguacggcuaccaccaccagaacgagcagggcagcggcuacgccgccgaccugaagagcacccagaacgccaucgacaagaucaccaacaaggugaacagcgugaucgagaagaugaacacccaguucaccgccgugggcaaggaguucaaccaccuggagaagagaaucgagaaccugaacaagaagguggacgacggcuuccuggacaucuggaccuacaacgccgagcugcuggugcugcuggagaacgagagaacccuggacuaccacgacagcaacgugaagaaccuguacgagaaggugagaagccagcugaagaacaacgccaaggagaucggcaacggcugcuucgaguucuaccacaagugcgacaacaccugcauggagagcgugaagaacggcaccuacgacuaccccaaguacagcgaggaggccaagcugaacagagaggagaucgacggcgugaagcuggagagcaccagaaucuaccagauccuggccaucuacagcaccguggccagcagccuggugcugguggugagccugggcgccaucagcuucuggaugugcagcaacggcagccugcagugcagaaucugcaucuga

SEQ ID NO: 169806 - RNA, 1701 nt, Artificial Sequence; identical to SEQ ID NO: 169805
  derived and/or modified CDS sequence (opt4) from hemagglutinin__InfluenzaA__AFX96798

SEQ ID NO: 169807 - RNA, 1701 nt, Artificial Sequence; identical to SEQ ID NO: 163889
  derived and/or modified CDS sequence (opt4) from hemagglutinin__InfluenzaA__AFX96808

SEQ ID NO: 169808 - RNA, 1701 nt, Artificial Sequence; identical to SEQ ID NO: 166969
  derived and/or modified CDS sequence (opt4) from hemagglutinin__InfluenzaA__AFX96818

SEQ ID NO: 169809 - RNA, 1701 nt, Artificial Sequence; identical to SEQ ID NO: 169805
  derived and/or modified CDS sequence (opt4) from hemagglutinin__InfluenzaA__AFX96828

SEQ ID NO: 169810 - RNA, 1701 nt, Artificial Sequence; identical to SEQ ID NO: 165326
  derived and/or modified CDS sequence (opt4) from hemagglutinin__InfluenzaA__AFX96838

SEQ ID NO: 169811 - RNA, 1701 nt, Artificial Sequence
  derived and/or modified CDS sequence (opt4) from hemagglutinin__InfluenzaA__AFX96856
augaaggccauccugguggugcugcuguacaccuucgccaccgccaacgccgacacccugugcaucggcuaccacgccaacaacagcaccgacaccguggacaccgugcuggagaagaacgugaccgugacccacagcgugaaccugcuggaggacaagcacaacggcaagcugugcaagcugagaggcguggccccccugcaccugggcaagugcaacaucgccggcuggauccugggcaaccccgagugcgagagccugagcaccgccagcagcuggagcuacaucguggagaccagcagcagcgacaacggcaccugcuaccccggcgacuucaucgacuacgaggagcugagagagcagcugagcagcgugagcagcuucgagagauucgagaucuuccccaagaccagcagcuggcccaaccacgacagcaacaagggcgugaccgccgccugcacccacgccggcgccaagagcuucuacaagaaccugaucuggcuggugaagaagggcaacagcuaccccaagcugagcaagagcuacaucaacgacaagggcaaggaggugcuggugcuguggggcauccaccaccccagcaccagcgccgaccagcagagccuguaccagaacgccgacgccuacguguucgugggcaccagcagauacagcaagaaguucaagcccgagaucgccaucagacccaaggugagagaccaggagggcagaaugaacuacuacuggacccugguggagcccggcgacaagaucaccuucgaggccaccggcaaccugguggugcccagauacgccuucgccauggagagaaacgccggcagcggcaucaucaucagcgacacccccgugcacgacugcaacaccaccugccagacccccaagggcgccaucaacaccagccugcccuuccagaacauccaccccaucaccaucggcaagugccccaaguacgugaagagcaccaagcugagacuggccaccggccugagaaacgugcccagcauccagagcagaggccuguucggcgccaucgccggcuucaucgagggcggcuggaccggcaugguggacggcugguacggcuaccaccaccagaacgagcagggcagcggcuacgccgccgaccugaagagcacccagaacgccaucgacgagaucaccaacaaggugaacagcgugaucgagaagaugaacacccaguucaccgccgugggcaaggaguucaaccaccuggagaagagaaucgagaaccugaacaagaagguggacgacggcuuccuggacaucuggaccuacaacgccgagcugcuggugcugcuggagaacgagagaacccuggacuaccacgacagcaacgugaagaaccuguacgagaaggugagaagccagcugaagaacaacgccaaggagaucggcaacggcugcuucgaguucuaccacaagugcgacaacaccugcauggagagcgugaagaacggcaccuacgacuaccccaaguacagcgaggaggccaagcugaacagagaggagaucgacggcgugaagcuggagagcaccagaaucuaccagauccuggccaucuacagcaccguggccagcagccuggugcugguggugagccugggcgccaucagcuucuggaugugcagcaacggcagccugcagugcagaaucugcaucuga

SEQ ID NO: 169812 - RNA, 1701 nt, Artificial Sequence; identical to SEQ ID NO: 169794
  derived and/or modified CDS sequence (opt4) from hemagglutinin__InfluenzaA__AFX96904

SEQ ID NO: 169813 - RNA, 1701 nt, Artificial Sequence; identical to SEQ ID NO: 164229
  derived and/or modified CDS sequence (opt4) from hemagglutinin__InfluenzaA__AFX96914

SEQ ID NO: 169814 - RNA, 1701 nt, Artificial Sequence
  derived and/or modified CDS sequence (opt4) from hemagglutinin__InfluenzaA__AFX96924
augaaggccauccugguggugcugcuguacaccuucgccaccgccaacgccgacacccugugcaucggcuaccacgccaacaacagcaccgacaccguggacaccgugcuggagaagaacgugaccgugacccacagcgugaaccugcuggaggacaagcacaacggcaagcugugcaagcugagaggcguggccccccugcaccugggcaagugcaacaucgccggcuggauccugggcaaccccgagugcgagagccugagcaccgccagcagcuggagcuacaucguggagaccagcagcagcgacaacggcaccugcuaccccggcgacuucaucgacuacgaggagcugagagagcagcugagcagcgugagcagcuucgagagauucgagaucuuccccaagaccagcagcuggcccaaccacgacagcaacaagggcgugaccgccgccugcccccacgccggcgccaagagcuucuacaagaaccugaucuggcuggugaagaagggcaacagcuaccccaagcugagcaagagcuacaucaacgacaagggcaaggaggugcuggugcuguggggcauccaccaccccagcaccagcgccgaccagcagagccuguaccagaacgccgacgccuacguguucgugggcaccagcagauacagcaagagauucaagcccgagaucgccaucagacccaaggugagagaccaggagggcagaaugaacuacuacuggacccugguggagcccggcgacaagaucaccuucgaggccaccggcaaccugguggugcccagauacgccuucgccauggagagaaacgccggcagcggcaucaucaucagcgacacccccgugcacgacugcaacaccaccugccagacccccaagggcgccaucaacaccagccugcccuuccagaacauccaccccaucaccaucggcaagugccccaaguacgugaagagcaccaagcugagacuggccaccggccugagaaacgugcccagcauccagagcagaggccuguucggcgccaucgccggcuucaucgagggcggcuggaccggcaugguggacggcugguacggcuaccaccaccagaacgagcagggcagcggcuacgccgccgaccugaagagcacccagaacgccaucgacgagaucaccaacaaggugaacagcgugaucgagaagaugaacacccaguucaccgccgugggcaaggaguucaaccaccuggagaagagaaucgagaaccugaacaagaagguggacgacggcuuccuggacaucuggaccuacaacgccgagcugcuggugcugcuggagaacgagagaacccuggacuaccacgacagcaacgugaagaaccuguacgagaaggugagaagccagcugaagaacaacgccaaggagaucggcaacggcugcuucgaguucuaccacaagugcgacaacaccugcauggagagcgugaagaacggcaccuacgacuaccccaaguacagcgaggaggccaagcugaacagagaggagaucgacggcgugaagcuggagagcaccagaaucuaccagauccuggccaucuacagcaccguggccagcagccuggugcugguggugagccugggcgccaucagcuucuggaugugcagcaacggcagccugcagugcagaaucugcaucuga

SEQ ID NO: 169815 - RNA, 1701 nt, Artificial Sequence; identical to SEQ ID NO: 162729
  derived and/or modified CDS sequence (opt4) from hemagglutinin__InfluenzaA__AFX96934

SEQ ID NO: 169816 - RNA, 1701 nt, Artificial Sequence
  derived and/or modified CDS sequence (opt4) from hemagglutinin__InfluenzaA__AFY24097
augaaggccauccugguggugcugcuguacaccuucgccaccgccaacgccgacacccugugcaucggcuaccacgccgacaacagcaccgacaccguggacaccgugcuggagaagaacgugaccgugacccacagcguggaccugcuggaggacaagcacaacggcaagcugugcaagcugagaggcguggccccccugcaccugggcaagugcaacaucgccggcuggauccugggcaaccccgagugcgagagccugagcaccgccagcagcuggagcuacaucguggagaccagcagcagcgacaacggcaccugcuaccccggcgacuucaucgacuacgaggagcugagagagcagcugagcagcgugagcagcuucgagagauucgagaucuuccccaagaccagcagcuggcccaaccacgacagcaacaagggcgugaccgccgccugcccccacgccggcgccaagagcuucuacaagaaccugaucuggcuggugaagaagggcaacagcuaccccaagcugaacaagagcuacaucaacgacaagggcaaggaggugcuggugcuguggggcauccaccaccccagcaccagcaccgaccagcagagccuguaccagaacgccgacgccuacguguucgugggcaccagcagauacagcaagaaguucaagcccgagaucgccaucagacccaaggugagagaccaggagggcagaaugaacuacuacuggacccugguggagcccggcgacaagaucaccuucgaggccaccggcaaccugguggugcccagauacgccuucgccauggagagaaacgccggcagcggcaucaucaucagcgacacccccgugcacgacugcaacaccaccugccagacccccaagggcgccaucaacaccagccugcccuuccagaacauccaccccaucaccaucggcaagugccccaaguacgugaagagcaccaagcugagacuggccaccggccugagaaacgugcccagcauccagagcagaggccuguucggcgccaucgccggcuucaucgagggcggcuggaccggcaugguggacggcugguacggcuaccaccaccagaacgagcagggcagcggcuacgccgccgaccugaagagcacccagaacgccaucgacgagaucaccaacaaggugaacagcgugaucgagaagaugaacacccaguucaccgccgugggcaaggaguucaaccaccuggagaagagaaucgagaaccugaacaagaagguggacgacggcuuccuggacaucuggaccuacaacgccgagcugcuggugcugcuggagaacgagagaacccuggacuaccacgacagcaacgugaagaaccuguacgagaaggugagaagccagcugaagaacaacgccaaggagaucggcaacggcugcuucgaguucuaccacaagugcgacaacaccugcauggagagcgugaagaacggcaccuacgacuaccccaaguacagcgaggaggccaagcugaacagagaggagaucgacggcgugaagcuggagagcaccagaaucuaccagauccuggccaucuacagcaccguggccagcagccuggugcugguggugagccugggcgccaucagcuucuggaugugcagcaacggcagccugcagugcagaaucugcaucuga

SEQ ID NO: 169817 - RNA, 1701 nt, Artificial Sequence; identical to SEQ ID NO: 160690
  derived and/or modified CDS sequence (opt4) from hemagglutinin__InfluenzaA__AFY24162

SEQ ID NO: 169818 - RNA, 1701 nt, Artificial Sequence
  derived and/or modified CDS sequence (opt4) from hemagglutinin__InfluenzaA__AFY24195
augaagaccaucaucgcccugagcuacauccugugccugguguucgcccagaagcugcccggcaacgacaacagcaccgccacccugugccugggccaccacgccgugcccaacggcaccaucgugaagaccaucaccaacgaccagaucgaggugaccaacgccaccgagcuggugcagagcagcagcaccggcggcaucugcgacagcccccaccagauccuggacggcgagaacugcacccugaucgacgcccugcugggcgacccccagugcgacggcuuccagaacaagaagugggaccuguucguggagagaagcaaggccuacagcaacugcuaccccuacgacgugcccgacuacgccagccugagaagccugguggccagcagcggcacccuggaguucaacaacgagagcuucaacuggaccggcgugacccagaacggcaccagcagcgccugcaagagaagaagcaacaacagcuucuucagcagacugaacuggcugacccaccugaaguucaaguaccccgcccugaacgugaccaugcccaacaacgagaaguucgacaagcuguacaucuggggcgugcaccaccccggcaccgacaacgaccagaucuuccuguacgcccaggccagcggcagaaucaccgugagcaccaagagaagccagcagaccgugauccccaacaucggcagcagacccagaaucagaaacauccccagcagaaucagcaucuacuggaccaucgugaagcccggcgacauccugcugaucaacagcaccggcaaccugaucgcccccagaggcuacuucaagaucagaagcggcaagagcagcaucaugagaagcgacgcccccaucggcaagugcaacagcgagugcaucacccccaacggcagcauccccaacgacaagcccuuccagaacgugaacagaaucaccuacggcgccugccccagauacgugaagcagaacacccugaagcuggccaccggcaugagaaacgugcccgagaagcagaccagaggcaucuucggcgccaucgccggcuucaucgagaacggcugggagggcaugguggacggcugguacggcuucagacaccagaacagcgagggcaucggccaggccgccgaccugaagagcacccaggccgccaucaaccagaucaacggcaagcugaacagacugaucggcaagaccaacgagaaguuccaccagaucgagaaggaguucagcgagguggagggcagaauccaggaccuggagaaguacguggaggacaccaagaucgaccuguggagcuacaacgccgagcugcugguggcccuggagaaccagcacaccaucgaccugaccgacagcgagaugaacaagcuguucgagagaaccaagaagcagcugagagagaacgccgaggacaugggcaacggcugcuucaagaucuaccacaagugcgacaacgccugcaucggcagcaucagaaacggcaccuacgaccacgacguguacagagacgaggcccugaacaacagauuccagaucaagggcguggagcugaagagcggcuacaaggacuggauccuguggaucagcuucgccaucagcugcuuccugcugugcguggcccugcugggcuucaucaugugggccugccagaagggcaacaucagaugcaacaucugcaucuga

SEQ ID NO: 169819 - RNA, 1701 nt, Artificial Sequence; identical to SEQ ID NO: 160245
  derived and/or modified CDS sequence (opt4) from hemagglutinin__InfluenzaA__AFY24217

SEQ ID NO: 169820 - RNA, 1701 nt, Artificial Sequence
  derived and/or modified CDS sequence (opt4) from hemagglutinin__InfluenzaA__AGB08294
augaaggccauccugguggugcugcuguacaccuucgccaccgccaacgccgacacccugugcaucggcuaccacgccaacaacagcaccgacaccguggacaccgugcuggagaagaacgugaccgugacccacagcgugaaccugcuggaggacaagcacaacggcaagcugugcaagcugagaggcguggccccccugcaccugggcaagugcaacaucgccggcuggauccugggcaaccccgagugcgagagccugagcaccgccagcagcuggagcuacaucguggagaccagcagcagcgacaacggcaccugcuaccccggcgacuucaucaacuacgaggagcugagagagcagcugagcagcgugagcagcuucgagagauucgagaucuuccccaagaccagcagcuggcccaaccacgacagcaacaagggcgugaccgccgccugcccccaggccggcgccaagagcuucuacaagaaccugaucuggcuggugaagaagggcaacagcuaccccaagcugaucaagagcuacaucaacgacaagggcaaggaggugcuggugcuguggggcauccaccaccccagcaccagcgccgaccagcagagccuguaccagaacgccgacgccuacguguucgugggcaccagcaaguacagcaagaaguucaagcccgagaucgccgugagacccaaggugagagaccaggagggcagaaugaacuacuacuggacccugguggagcccggcgacaagaucaccuucgaggccaccggcaaccugcuggugcccagauacgccuucgugauggagagaaacgccggcagcggcaucaucaucagcgacacccccgugcacgacugcaacaccaccugccagacccccaagggcgccaucaacaccagccugcccuuccagaacauccaccccaucaccaucggcaagugccccaaguacgugaagagcaccaagcugagacuggccaccggccugagaaacauccccagcauccagagcagaggccuguucggcgccaucgccggcuucaucgagggcggcuggaccggcaugguggacggcugguacggcuaccaccaccagaacgcccagggcagcggcuacgccgccgaccugaagagcacccagaacgccaucgacaagaucaccaacaaggugaacagcgugaucgagaagaugaacacccaguucaccgccgugggcaaggaguucaaccaccuggagaagagaaucgagaaccugaacaagaagguggacgacggcuuccuggacaucuggaccuacaacgccgagcugcuggugcugcuggagaacgagagaacccuggacuaccacgacagcaacgugaagaaccuguacgagaaggugagaagccagcugaagaacaacgccaaggagaucggcaacggcugcuucgaguucuaccacaagugcgacaacaccugcauggagagcgugaagaacggcaccuacgacuaccccagauacagcgaggaggccaagcugaacagagaggagaucgacggcgugaagcuggagagcaccagaaucuaccagauccuggccaucuacagcaccguggccagcagccuggugcugguggugagccugggcgccaucagcuucuggaugugcagcaacggcagccugcagugcagaaucugcaucuga

SEQ ID NO: 169821 - RNA, 1701 nt, Artificial Sequence
  derived and/or modified CDS sequence (opt4) from hemagglutinin__InfluenzaA__AGB08295
augaaggccauccugguggugcugcuguacaccuucgccaccgccaacgccgacacccugugcaucggcuaccacgccaacaacagcaccgacaccguggacaccgugaucgagaagaacgugaccgugacccacagcgugaaccugcuggaggacaagcacaacggcaagcugugcaagcugagaggcguggccccccugcaccugggcaagugcaacaucgccggcuggauccugggcaaccccgagugcgagagccugagcaccgccagcagcuggagcuacaucguggagaccagcagcagcgacaacggcaccugcuaccccggcgacuucaucaacuacgaggagcugagagagcagcugagcagcgugagcagcuucgagagauucgagaucuuccccaagaccagcagcuggcccaaccacgacagcaacaagggcgugaccgccgccugcccccacgccggcgccaagagcuucuacaagaaccugaucuggcuggugaagaagggcaacagcuaccccaagcugagcaagagcuacaucaacgacaagagaaaggaggugcuggugcuguggggcauccaccaccccagcaccaccgccgaccagcagagccuguaccagaacgccgacgccuacguguucgugggcaccagcagauacagcaagaaguucaagcccgagaucgccaucagacccaaggugagagaccaggagggcagaaugaacuacuacuggacccugguggagcccggcgacaagaucaccuucgaggccaccggcaaccugguggugcccagauacgccuucgccauggagagaaccgccggcagcggcaucaucaucagcgacacccccgugcacgacugcaacaccaccugccagacccccaagggcgccaucaacaccagccugcccuuccagaacauccaccccaucaccaucggcaagugccccaaguacgugaagagcaccaagcugagacuggccaccggccugagaaacauccccagcauccagagcagaggccuguucggcgccaucgccggcuucaucgagggcggcuggaccggcaugguggacggcugguacggcuaccaccaccagaacgagcagggcagcggcuacgccgccgaccugaagagcacccagaacgccaucgacaagaucaccaacaaggugaacagcgugaucgagaagaugaacacccaguucaccgccgugggcaaggaguucaaccaccuggagaagagaaucgagaaccugaacaagaagguggacgacggcuuccuggacaucuggaccuacaacgccgagcugcuggugcugcuggagaacgagagaacccuggacuaccacgacagcaacgugaagaaccuguacgagaaggugagaaaccagcugaagaacaacgccaaggagaucggcaacggcugcuucgaguucuaccacaagugcgacaacaccugcauggagagcgugaagaacggcaccuacgacuaccccaaguacagcgaggaggccaagcugaacagagaggagaucgacggcgugaagcuggagagcaccagaaucuaccagauccuggccaucuacagcaccguggccagcagccuggugcugguggugagccugggcgccaucagcuucuggaugugcagcaacggcagccugcagugcagaaucugcaucuga

SEQ ID NO: 169822 - RNA, 1701 nt, Artificial Sequence
  derived and/or modified CDS sequence (opt4) from hemagglutinin__InfluenzaA__AGB08296
augaaggccauccugguggugcugcuguacaccuucgccaccgccaacgccgacacccugugcaucggcuaccacgccaacaacagcaccgacaccguggacaccgugcuggagaagaacgugaccgugacccacagcgugaaccugcuggaggacaagcacaacggcaagcugugcaagcugagaggcguggccccccugcaccugggcaagugcaacaucgccggcuggauccugggcaaccccgagugcgagagccugagcaccgccagcagcuggagcuacaucguggagaccagcagcagcgacaacggcaccugcuaccccggcgacuucaucaacuacgaggagcugagagagcagcugagcagcgugagcagcuucgagagauucgagaucuuccccaagaccagcagcuggcccaaccacgacagcaacaagggcgugaccgccgccugcccccacgccggcgccaagagcuucuacaagaaccugaucuggcuggugaagaagggcaacagcuaccccaagcugagcaagagcuacaucaacgacaagggcaaggaggugcuggugcuguggggcauccaccaccccagcaccaccgccgaccagcagagccuguaccagaacgccgacgccuacguguucgugggcaccagcagauacagcaagaaguucaagcccgagaucgccaucagacccaaggugagaggccaggagggcagaaugaacuacuacuggacccugguggagcccggcgacaagaucaccuucgaggccaccggcaaccugguggugcccagauacgccuucgccauggagagaaccgccggcagcggcaucaucaucagcgacacccccgugcacgacugcaacaccaccugccagacccccaagggcgccaucaacaccagccugcccuuccagaacauccaccccaucaccaucggcaagugccccaaguacgugaagagcaccaagcugagacuggccaccggccugagaaacgugcccagcauccagagcagaggccuguucggcgccaucgccggcuucaucgagggcggcuggaccggcaugguggacggcugguacggcuaccaccaccagaacgagcagggcagcggcuacgccgccgaccugaagagcacccagaacgccaucgacaagaucaccaacaaggugaacagcgugaucgagaagaugaacacccaguucaccgccgugggcaaggaguucaaccaccuggagaagagaaucgagaaccugaacaagaagguggacgacggcuuccuggacaucuggaccuacaacgccgagcugcuggugcugcuggagaacgagagaacccuggacuaccacgacagcaacgugaagaaccuguacgagaaggugagaaaccagcugaagaacaacgccaaggagaucggcaacggcugcuucgaguucuaccacaagugcgacaacaccugcauggagagcgugaagaacggcaccuacgacuaccccaaguacagcgaggaggccaagcugaacagagaggagaucgacggcgugaagcuggagagcaccagaaucuaccagauccuggccaucuacagcaccguggccagcagccuggugcugguggugagccugggcgccaucagcuucuggaugugcagcaacggcagccugcagugcagaaucugcaucuga

SEQ ID NO: 169823 - RNA, 1701 nt, Artificial Sequence
  derived and/or modified CDS sequence (opt4) from hemagglutinin__InfluenzaA__AGB08297
augaaggccauccugguggugcugcuguacaccuucgccaccgccaacgccgacacccugugcaucggcuaccacgccaacaacagcaccgacaccguggacaccgugcuggagaagaacgugaccgugacccacagcgugaaccugcuggaggacaagcacaacggcaagcugugcaagcugagaggcguggccccccugcaccugggcaagugcaacaucgccggcuggauccugggcaaccccgagugcgagagccugagcaccgccagcagcuggagcuacaucguggagaccagcagcagcgacaacggcaccugcuaccccggcgacuucaucaacuacgaggagcugagagagcagcugagcagcgugagcagcuucgagagauucgagaucuuccccaagaccagcagcuggcccaaccacgacagcaacaagggcgugaccgccgccugcccccacgccggcgccaagagcuucuacaagaaccugaucuggcuggugaagaagggcaacagcuaccccaagcugagcgagagcuacaucaacgacaagggcaaggaggugcuggugcuguggggcauccaccaccccagcaccaccgccgaccagcagagccuguaccagaacgccgacgccuacguguucgugggcaccagcagauacagcaagaaguucaagcccgagaucgccaucagacccaaggugagagaccaggagggcagaaugaacuacuacuggacccugguggagcccggcgacaagaucaccuucgaggccaccggcaaccugguggugcccagauacgccuucgccauggagagaaccgccggcagcggcaucaucaucagcgacacccccgugcacgacugcaacaccaccugccagacccccaagggcgccaucaacaccagccugcccuuccagaacauccaccccaucaccaucggcaagugccccaaguacgugaagagcaccaagcugagacuggccaccggccugagaaacgugcccagcauccagagcagaggccuguucggcgccaucgccggcuucaucgagggcggcuggaccggcaugguggacggcugguacggcuaccaccaccagaacgagcagggcagcggcuacgccgccgaccugaagagcacccagaacgccaucgacaagaucaccaacaaggugaacagcgugaucgagaagaugaacacccaguucaccgccgugggcaaggaguucaaccaccuggagaagagaaucgagaaccugaacaagaagguggacgacggcuuccuggacaucuggaccuacaacgccgagcugcuggugcugcuggagaacgagagaacccuggacuaccacgacagcaacgugaagaaccuguacgagaaggugagaaaccagcugaagaacaacgccaaggagaucggcaacggcugcuucgaguucuaccacaagugcgacaacaccugcauggagagcgugaagaacggcaccuacgacuaccccaaguacagcgaggaggccaagcugaacagagaggagaucgacggcgugaagcuggagagcaccagaaucuaccagauccuggccaucuacagcaccguggccagcagccuggugcugguggugagccugggcgccaucagcuucuggaugugcagcaacggcagccugcagugcagaaucugcaucuga

SEQ ID NO: 169824 - RNA, 1701 nt, Artificial Sequence
  derived and/or modified CDS sequence (opt4) from hemagglutinin__InfluenzaA__AGB08298
augaaggccauccugguggugcugcuguacaccuucgccaccgccaacgccgacacccugugcaucggcuaccacgccaacaacagcaccgacaccguggacaccgugcuggagaagaacgugaccgugacccacagcgugaaccugcuggaggacaagcacaacggcaagcugugcaagcugagaggcaucgccccccugcaccugggcaagugcaacaucgccggcuggauccugggcaaccccgagugcgagagccugagcaccgccagcagcuggagcuacaucguggagaccagcagcagcgacaacggcaccugcuaccccggcgacuucaucaacuacgaggagcugagagagcagcugagcagcgugagcagcuucgagagauucgagaucuuccccaagaccagcagcuggcccaaccacgacagcaacaagggcgugaccgccgccugcccccacgccggcgccaagagcuucuacaagaaccugaucuggcuggugaagaagggcaacagcuaccccagacugagcaagagcuacaucaacgacaagggcaaggaggugcuggugcuguggggcauccaccaccccagcaccaccgccgaccagcagagccuguaccagaacgccgacgccuacguguucgugggcaccagcagauacagcaagaaguucaagcccgagaucgccaucagacccaaggugagagaccaggagggcagaaugaacuacuacuggacccugguggagcccggcgacaagaucaccuucgaggccaccggcaaccugguggugcccagauacgccuucgccauggagagaaccgccggcagcggcaucaucaucagcgacacccccgugcacgacugcaacaccaccugccagacccccaagggcgccaucaacaccagccugcccuuccagaacauccaccccaucaccaucggcaagugccccaaguacgugaagagcaccaagcugagacuggccaccggccugagaaacgugcccagcauccagagcagaggccuguucggcgccaucgccggcuucaucgagggcggcuggaccggcaugguggacggcugguacggcuaccaccaccagaacgagcagggcagcggcuacgccgccgaccugaagagcacccagaacgccaucgacaagaucaccaacaaggugaacagcgugaucgagaagaugaacacccaguucaccgccgugggcaaggaguucaaccagcuggagaagagaaucgagaaccugaacaagaagguggacgacggcuuccuggacaucuggaccuacaacgccgagcugcuggugcugcuggagaacgagagaacccuggacuaccacgacagcaacgugaagaaccuguacgagaaggugagaaaccagcugaagaacaacgccaaggagaucggcaacggcugcuucgaguucuaccacaagugcgacaacaccugcauggagagcgugaagaacggcaccuacgacuaccccaaguacagcgaggaggccaagcugaacagagaggagaucgacggcgugaagcuggagagcaccagaaucuaccagauccuggccaucuacagcaccguggccagcagccuggugcugguggugagccugggcgccaucagcuucuggaugugcagcaacggcagccugcagugcagaaucugcaucuga

SEQ ID NO: 169825 - RNA, 1701 nt, Artificial Sequence
  derived and/or modified CDS sequence (opt4) from hemagglutinin__InfluenzaA__AGB08301
augaagaccaucaucgcccugagcuacauccugugccugguguucgcccaggagcugcccggcaacgacgacagcaccgccacccugugccugggccaccacgccgugcccaacggcaccaucgugaagaccaucaccaacgaccagaucgaggugaccaacgccaccgagcuggugcagagcagcagcaccggcgagaucugcaacagcccccaccagauccuggacggcgagaacugcacccugaucgacgcccugcugggcgacccccagugcgacggcuuccagaacaagaagugggaccuguucguggagagaagcaaggcccacagcaacugcuaccccuacgacgugcccgacuacgccagccugagaagccugguggccagcagcggcacccuggaguucaacaacgagagcuucaacuggaccggcgugacccagaacggcaccagcagcgccugcaucagaagaagcaacaacagcuucuucagcagacugaacuggcugacccaccugaacuucaaguaccccgcccugaacgugaccaugcccaacaacgagcaguucgacaagcuguacaucuggggcgugcaccaccccggcaccgacaaggaccagaucuuccuguacgcccaggccagcggcagaaucaccgugagcaccaagagaagccagcaggccgugauccccaacaucggcagcagacccagagugagaaacauccccagcagagugagcaucuacuggaccguggugaagcccggcgacauccugcugaucaacagcaccggcaaccugaucgcccccagaggcuacuucaagaucagaagcggcaagagcagcaucaugagaagcgacgcccccaucggcaagugcaacagcgccugcaucacccccaacggcagcauccccaacgacaagcccuuccagaacgugaacagaaucaccuacggcgccugccccagauacgugaagcagaacacccugaagcuggccaccggcaugagaaacgugcccgagaagcagaccagaggcaucuucggcgccaucgccggcuucaucgagaacggcugggagggcaugguggacggcugguacggcuucagacaccagaacagcgagggcagaggccaggccgccgaccugaagagcacccaggccgccaucgaccagaucaacggcaagcugaacagacugaucggcaagaccaacgagaaguuccaccagaucgagaaggaguucagcgagguggagggcagaauccaggaccuggagaaguacguggaggacaccaagaucgaccuguggagcuacaacgccgagcugcugguggcccuggagaaccagcacaccaucgaccugaccgacagcgagaugaacaagcuguucgagaagaccaagaagcagcugagagagaacgccgaggacaugggcaacggcugcuucaagaucuaccacaagugcgacaacgccugcaucggcagcaucagaaacggcaccuacgaccacaacguguacagagacgaggcccugaacaacagauuccagaucaagggcguggagcugaagagcggcuacaaggacuggauccuguggaucagcuucgccaucagcugcuuccugcugugcguggcccugcugggcuucaucaugugggccugccagaagggcaacaucagaugcaacaucugcaucuga

SEQ ID NO: 169826 - RNA, 1701 nt, Artificial Sequence
  derived and/or modified CDS sequence (opt4) from hemagglutinin__InfluenzaA__AGB08343
augaagaccaucaucgcccugagcuacaucuucugccuggugcuggcccaggaccugcccggcaacgacaacagcaccgccacccugugccugggccaccacgccgugcccaacggcacccuggugaagaccaucaccaacgaccagaucgaggugaccaacgccaccgagcuggugcagagcagcagcaccggcagaaucugcaacaacccccacagaauccuggacggcaucaacugcacccugaucgacgcccugcugggcgacccccacugcgacggcuuccagaacaagaagugggaccuguucguggagagaagcaaggccuucagcaacugcuaccccuacgacgugcccgacuacgccagccugagaagccugguggccagcagcggcacccuggaguucaucaacgagggcuucaacuggaccggcgugacccagaacggcggcagcuacgccugcaagagaggccccgacaacggcuucuucagcagacugaacuggcuguacaagagcgagagcaccuaccccgugcugaacgugaccaugcccaacaacgacaacuucgacaagcuguacaucuggggcgugcaccaccccagcaccgacaaggagcagaccaaccuguacgugcaggccagcggcagagugaccgugagcaccaagagaagccagcagaccaucauccccaacgugggcagcagacccugggugagaggccugagcagcagaaucagcaucuacuggaccaucgugaagcccggcgacauccuggugaucaacagcaacggcaaccugaucgcccccagaggcuacuucaagaucagaaacggcaagagcagcaucaugagaagcgacgcccccaucggcaccugcagcagcgagugcaucacccccaacggcagcauccccaacgacaagcccuuccagaacgugaacaagaucaccuacggcgccugccccaaguacgugaagcagaacacccugaagcuggccaccggcaugagaaacgugcccgagaagcagaccagaggcaucuucggcgccaucgccggcuucaucgagaacggcugggagggcaugaucgacggcugguacggcuucagacaccagaacagcgagggcaccggccaggccgccgaccugaagagcacccaggccgccaucgaccagaucaacggcaagcugaacagagugaucgagaagaccaacgagaaguuccaccagaucgagaaggaguucagcgagguggagggcagaauccaggaccuggagaaguacguggaggacaccaagaucgaccuguggagcuacaacgccgagcugcugguggcccuggagaaccagcacaccaucgaccugaccgacagcgagaugaacaagcuguucgagaagaccagaagacagcugagagagaacgccgaggacaugggcaacggcugcuucaagaucuaccacaagugcgacaacgccugcaucggcagcaucagaaacggcaccuacgaccacgacguguacagagacgaggcccugaacaacagauuccagaucaagggcguggagcugaagagcggcuacaaggacuggauccuguggaucagcuucgccaucagcugcuuccugcugugcguggugcugcugggcuucaucaugugggccugccagaagggcaacaucagaugcaacaucugcaucuga

SEQ ID NO: 169827 - RNA, 1701 nt, Artificial Sequence
  derived and/or modified CDS sequence (opt4) from hemagglutinin__InfluenzaA__AGB08362
augaagaccaucaucgcccugagcuacaucuucugccuggcccugggccaggaccugcccggcaacgacaacagcaccgccacccugugccugggccaccacgccgugcccaacggcacccuggugaagaccaucaccgacgaccagaucgaggugaccaacgccaccgagcuggugcagagcagcagcaccggcaagaucugcaacaacccccacagaauccuggacggcaucaacugcacccugaucgacgcccugcugggcgacccccacugcgacguguuccaggacgagaccugggaccuguucguggagagaagcaaggccuucagcaacugcuaccccuacgacgugcccgacuacgccagccugagaagccugguggccagcagcggcacccuggaguucaucaccgagggcuucaccuggaccggcgugacccagaacggcggcagcaacgccugcaagagaggccccggcagcggcuucuucagcagacugaacuggcugaccaagagcggcagcaccuaccccgugcugaacgugaccaugcccaacaacgacaacuucgacaagcuguacaucuggggcgugcaccaccccagcaccaaccaggagcagaccagccuguacgugcaggccagcggcagagugaccgugagcaccagaagaagccagcagaccaucauccccaacaucggcagcagacccugggugagaggccugagcagcagaaucagcaucuacuggaccaucgugaagcccggcgacgugcuggugaucaacagcaacggcaaccugaucgcccccagaggcuacuucaagaugagaaccggcaagagcagcaucaugagaagcgacgcccccaucgacaccugcaucagcgagugcaucacccccaacggcagcauccccaacgacaagcccuuccagaacgugaacaagaucaccuacggcgccugccccaaguacgugaagcagaacacccugaagcuggccaccggcaugagaaacgugcccgagaagcagaccagaggccuguucggcgccaucgccggcuucaucgagaacggcugggagggcaugaucgacggcugguacggcuucagacaccagaacagcgagggcaccggccaggccgccgaccugaagagcacccaggccgccaucgaccagaucaacggcaagcugaacagagugaucgagaagaccaacgagaaguuccaccagaucgagaaggaguucagcgagguggagggcagaauccaggaccuggagaaguacguggaggacaccaagaucgaccuguggagcuacaacgccgagcugcugguggcccuggagaaccagcacaccaucgaccugaccgacagcgagaugaacaagcuguucgacaagaccagaagacagcugagagagaacgccgaggacaugggcaacggcugcuucaagaucuaccacaagugcgacaacgccugcaucgagagcaucagaaacggcaccuacgaccacgacguguacagagacgaggcccugaacaacagauuccagaucaagggcguggagcugaagagcggcuacaaggacuggauccuguggaucagcuucgccaucagcugcuuccugcugugcguggugcugcugggcuucaucaugugggccugccagagaggcaacaucagaugcaacaucugcaucuga

SEQ ID NO: 169828 - RNA, 1701 nt, Artificial Sequence; identical to SEQ ID NO: 166882
  derived and/or modified CDS sequence (opt4) from hemagglutinin__InfluenzaA__AGB12986

SEQ ID NO: 169829 - RNA, 1701 nt, Artificial Sequence; identical to SEQ ID NO: 167146
  derived and/or modified CDS sequence (opt4) from hemagglutinin__InfluenzaA__AGB13006

SEQ ID NO: 169830 - RNA, 1701 nt, Artificial Sequence
  derived and/or modified CDS sequence (opt4) from hemagglutinin__InfluenzaA__AGB13016
augaaggccauccugguggugcugcuguacaccaucgccaccgccaacgccgacacccugugcaucggcuaccacgccaacaacagcaccgacaccguggacaccgugcuggagaagaacgugaccgugacccacagcgugaaccugcuggaggacaagcacaacggcaagcugugcaagcugagaggcguggccccccugcaccugggcaagugcaacaucgccggcuggauccugggcaaccccgagugcgagagccugagcaccgccagcagcuggagcuacaucguggagaccagcagcagcgacaacggcaccugcuaccccggcgacuucaucaacuacgaggagcugagagagcagcugagcagcgugagcagcuucgagagauucgagaucuuccccaagaccagcagcuggcccaaccacgacagcaacaagggcgugaccgccgccugcccccacgccggcgccaagagcuucuacaagaaccugaucuggcuggugaagaagggcaacagcuaccccaagcugagcaagagcuacaucaacgacaagggcaaggaggugcuggugcuguggggcauccaccaccccagcaccaccgccgaccagcagagccuguaccagaacgccgacgccuacguguucgugggcaccagcagauacagcaagaaguucaagcccgagaucgccaucagacccaaggugagagaccaggagggcagaaugaacuacuacuggacccugguggagcccggcgacaagaucaccuucgaggccaucggcaaccugguggugcccagauacgccuucgccauggagaagaacgccggcagcggcaucaucaucagcgacacccccgugcacgacugcaacaccaccugccagacccccaagggcgccaucaacaccagccugcccuuccagaacauccaccccaucaccaucggcaagugccccaaguacgugaagagcaccaagcugagacuggccaccggccugagaaacgugcccagcauccagagcagaggccuguucggcgccaucgccggcuucaucgagggcggcuggaccggcaugguggacggcugguacggcuaccaccaccagaacgagcagggcagcggcuacgccgccgaccugaagagcacccagaacgccaucgacaagaucaccaacaaggugaacagcgugaucgagaagaugaacacccaguucaccgccgugggcaaggaguucaaccaccuggagaagagaaucgagaaccugaacaagaagguggacgacggcuuccuggacaucuggaccuacaacgccgagcugcuggugcugcuggagaacgagagaacccuggacuaccacgacagcaacgugaagaaccuguacgagaaggugagaaaccagcugaagaacaacgccaaggagaucggcaacggcugcuucgaguucuaccacaagugcgacaacaccugcauggagagcgugaagaacggcaccuacgacuaccccaaguacagcgaggaggccaagcugaacagagaggagaucgacggcgugaagcuggagagcgccagaguguaccagauccuggccaucuacagcaccguggccagcagccuggugcugguggugagccugggcgccaucagcuucuggaugugcagcaacggcagccugcagugcagaaucugcaucuga

SEQ ID NO: 169831 - RNA, 1701 nt, Artificial Sequence; identical to SEQ ID NO: 166927
  derived and/or modified CDS sequence (opt4) from hemagglutinin__InfluenzaA__AGB13026

SEQ ID NO: 169832 - RNA, 1701 nt, Artificial Sequence; identical to SEQ ID NO: 166869
  derived and/or modified CDS sequence (opt4) from hemagglutinin__InfluenzaA__AGB13036

SEQ ID NO: 169833 - RNA, 1701 nt, Artificial Sequence
  derived and/or modified CDS sequence (opt4) from hemagglutinin__InfluenzaA__AGB13048
augaaggccauccugguggugcugcuguacaccuucgccaccgccaacgccgacacccugugcaucggcuaccacgccaacaacagcaccgacaccguggacaccgugcuggagaagaacgugaccgugacccacagcgugaaccugcuggaggacaagcacaacggcaagcugugcaagcugagaggcguggccccccugcaccugggcaagugcaacaucgccggcuggauccugggcaaccccgagugcgagagccugagcaccgccagcagcuggagcuacaucguggagaccagcagcagcgacaacggcaccugcuaccccggcgacuucaucaacuacgaggagcugagagagcagcugagcagcgugagcagcuucgagagauucgagaucuuccccaagaccagcagcuggcccaaccacgacagcaacaagggcgugaccgccgccugcccccacgccggcgccaagagcuucuacaagaaccugaucuggcuggugaagaagggcaacagcuaccccaagcugagcaagagcuacaucaacgacaagggcaaggaggugcuggugcuguggggcauccaccaccccagcaccaccgccgaccagcagagccuguaccagaacgccgacgccuacguguucgugggcaccagcagauacagcaagaaguucaagcccgagaucgccaucagacccaaggugagagaccaggagggcagaaugaacuacuacuggacccugguggagcccggcgacaagaucaccuucgaggccaccggcaaccugguggugcccagauacgccuucgccauggagagaaacgccggcagcggcaucaucaucagcgacacccccgugcacgacugcaacaccaccugccagacccccaagggcgccaucaacaccagccugcccuuccagaacauccaccccaucaccaucggcaagugccccaaguacgugaagagcaccaagcugagacuggccaccggccugagaaacgugcccagcauccagagcagaggccuguucggcgccaucgccggcuucaucgagggcggcuggaccggcaugguggacggcugguacggcuaccaccaccagaacgagcagggcagcggcuacgccgccgaccugaagagcacccagaacgccaucgacaagaucaccaacaaggugaacagcgugaucgagaagaugaacacccaguucaccgccgugggcaaggaguucaaccaccuggagaagagaaucgagaaccugaacaagaagguggacgacggcuuccuggacaucuggaccuacaacgccgagcugcuggugcugcuggagaacgagagaacccuggacuaccacgacagcaacgugaagaaccuguacgagaaggugagaaaccagcugaagaacaacgccaaggagaucggcaacggcugcuucgaguucuaccacaagugcgacaacaccugcaucgagagcgugaagaacggcaccuacgacuaccccaaguacagcgaggaggccaagcugaacagagaggagaucgacggcgugaagcuggagagcaccagaaucuaccagauccuggccaucuacagcaccguggccagcagccuggugcugguggugagccugggcgccaucagcuucuggaugugcagcaacggcagccugcagugcagaaucugcaucuga

SEQ ID NO: 169834 - RNA, 1701 nt, Artificial Sequence
  derived and/or modified CDS sequence (opt4) from hemagglutinin__InfluenzaA__AGB13066
augaaggccauccugguggugcugcuguacaccuucgccaccgccaacgccgacacccugugcaucggcuaccacgccaacaacagcaccgacaccguggacaccgugcuggagaagaacgugaccgugacccacagcgugaaccugcuggaggacaagcacaacggcaagcugugcaagcugagaggcguggccccccugcaccugggcaagugcaacaucgccggcuggauccugggcaaccccgagugcgagagccugagcaccgccagcagcuggagcuacaucguggagaccagcagcagcgacaacggcaccugcuaccccggcgacuucaucgacuacgaggagcugagagagcagcugagcagcgugagcagcuucgagagauucgagaucuuccccaagaccagcagcuggcccaaccacgacagcaacaagggcgugaccgccgccugcccccacgccggcgccaagagcuucuacaagaaccugaucuggcuggugaagaagggcaacagcuaccccaagcugagcaagagcuacaucaacgacaagggcaaggaggugcuggugcuguggggcauccaccaccccagcaccagcgccgaccagcagagccuguaccagaacgccgacgccuacguguucgugggcaccagcagauacagcaagaaguucaagcccgagaucgccaucagacccaaggugagagaccaggagggcagaaugaacuacuacuggacccugguggagcccggcgacaagaucaccuucgaggccaccggcaaccugguggugcccagauacgccuucgccauggagagaaacgccggcagcggcaucaucaucagcgacacccccgugcacgacugcaacaccaccugccagacccccaagggcgccaucaacaccagccugcccuuccagaacauccaccccaucaccaucggcaagugccccaaguacgugaagggcaccaagcugagacuggccaccggccugagaaacgugcccagcauccagagcagaggccuguucggcgccaucgccggcuucaucgagggcggcuggaccggcaugguggacggcugguacggcuaccaccaccagaacgagcagggcagcggcuacgccgccgaccugaagagcacccagcacgccaucgacgagaucaccaacaaggugaacagcgugaucgagaagaugaacacccaguucaccgccgugggcaaggaguucaaccaccuggagaagagaaucgagaaccugaacaagaagguggacgacggcuuccuggacaucuggaccuacaacgccgagcugcuggugcugcuggagaacgagagaacccuggacuaccacgacagcaacgugaagaaccuguacgagaaggugagaagccagcugaagaacaacgccaaggagaucggcaacggcugcuucgaguucuaccacaagugcgacaacaccugcauggagagcgugaagaacggcaccuacgacuaccccaaguacagcgaggaggccaagcugaacagagaggagaucgacggcgugaagcuggagagcaccagaaucuaccagauccuggccaucuacagcaccguggccagcagccuggugcugguggugagccugggcgccaucagcuucuggaugugcagcaacggcagccugcagugcagaaucugcaucuga

SEQ ID NO: 169835 - RNA, 1701 nt, Artificial Sequence; identical to SEQ ID NO: 166969
  derived and/or modified CDS sequence (opt4) from hemagglutinin__InfluenzaA__AGB13082

SEQ ID NO: 169836 - RNA, 1701 nt, Artificial Sequence; identical to SEQ ID NO: 166869
  derived and/or modified CDS sequence (opt4) from hemagglutinin__InfluenzaA__AGB13105

SEQ ID NO: 169837 - RNA, 1701 nt, Artificial Sequence; identical to SEQ ID NO: 166927
  derived and/or modified CDS sequence (opt4) from hemagglutinin__InfluenzaA__AGB13125

SEQ ID NO: 169838 - RNA, 1701 nt, Artificial Sequence; identical to SEQ ID NO: 166927
  derived and/or modified CDS sequence (opt4) from hemagglutinin__InfluenzaA__AGB13130

SEQ ID NO: 169839 - RNA, 1701 nt, Artificial Sequence
  derived and/or modified CDS sequence (opt4) from hemagglutinin__InfluenzaA__AGB13140
augaaggccauccugguggugcugcuguacaccuucgccaccgccaacgccgacacccugugcaucggcuaccacgccaacaacagcaccgacaccguggacaccgugcuggagaagaacgugaccgugacccacagcgugaaccugcuggaggacaagcacaacggcaagcugugcaagcugagaggcguggccccccugcaccugggcaagugcaacaucgccggcuggauccugggcaaccccgagugcgagagccugagcaccgccagccuguggagcuacaucguggagaccagcagcagcgacaacggcaccugcuaccccggcgacuucaucgacuacgaggagcugagagagcagcugagcagcgugagcagcuucgagagauucgagaucuuccccaagaccagcagcuggcccaaccacgacagcaacaagggcgugaccgccgccugcccccacgccggcgccaagagcuucuacaagaaccugaucuggcuggugaagaagggcaacagcuaccccaagcugagcaagagcuacaucaacgacaagggcaaggaggugcuggugcuguggggcauccaccaccccagcaccaccgccgaccagcagagccuguaccagaacgccgacaccuacguguucgugggcaccagcagauacagcaagaaguucaagcccgagaucgccaucagacccaaggugagagaccaggagggcagaaugaacuacuacuggacccugguggagcccggcgacaagaucaccuucgaggccaccggcaaccugguggugcccagauacgccuucgccauggagagaaacgccggcagcggcaucaucaucagcgacacccccgugcacgacugcaacaccaccugccagacccccaagggcgccaucaacaccagccugcccuuccagaacauccaccccaucaccaucggcaagugccccaaguacgugaagagcaccaagcugagacuggccaccggccugagaaacgugcccagcauccagagcagaggccuguucggcgccaucgccggcuucaucgagggcggcuggaccggcaugguggacggcugguacggcuaccaccaccagaacgagcagggcagcggcuacgccgccgaccugaagagcacccagaacgccaucgacaagaucaccaacaaggugaacagcgugaucgagaagaugaacacccaguucaccgccgugggcaaggaguucaaccaccuggagaagagaaucgagaaccugaacaagaagguggacgacggcuuccuggacaucuggaccuacaacgccgagcugcuggugcugcuggagaacgagagaacccuggacuaccacgacagcaacgugaagaaccuguacgagaaggugagaaaccagcugaagaacaacgccaaggagaucggcaacggcugcuucgaguucuaccacaagugcgacaacaccugcauggagagcgugaagaacggcaccuacgacuaccccaaguacagcgaggaggccaagcugaacagagaggagaucgacggcgugaagcuggagagcaccagaaucuaccagauccuggccaucuacagcaccguggccagcagccuggugcugguggugagccugggcgccaucagcuucuggaugugcagcaacggcagccugcagugcagaaucugcaucuga

SEQ ID NO: 169840 - RNA, 1701 nt, Artificial Sequence
  derived and/or modified CDS sequence (opt4) from hemagglutinin__InfluenzaA__AGB13159
augaaggccauccugguggugaugcuguacaccuucgccaccgccaacgccgacacccugugcaucggcuaccacgccaacaacagcaccgacaccguggacaccgugcuggagaagaacgugaccgugacccacagcgugaaccugcuggaggacaagcacaacggcaagcugugcaagcugagaggcguggccagccugcaccugggcaagugcaacaucgccggcuggauccugggcaaccccgagugcgagagccugagcaccgccagcagcuggagcuacaucguggagaccagcagcagcgacaacggcaccugcuaccccggcgacuucaucgacuacgaggagcugagagagcagcugagcagcgugagcagcuucgagagauucgagaucuuccccaagaccagcagcuggcccaaccacgacagcaacaagggcgugaccgccgccugcccccacgccggcgccaagggcuucuacaagaaccugaucuggcuggugaagaagggcaacagcuaccccaagcugagcaagagcuacaucaacgacaagggcaaggaggugcuggugcuguggggcauccaccaccccagcaccaccgccgaccagcagagccuguaccagaacgccgacaccuacguguucgugggcaccagcagauacagcaagaaguucaagcccgagaucgccaucagacccaaggugagagaccaggagggcagaaugaacuacuacuggacccugguggagcccggcgacaagaucaccuucgaggccaccggcaaccugguggugcccagauacgccuucgccauggagagaaacgccggcagcggcaucaucaucagcgacacccccgugcacgacugcaacaccaccugccagacccccaagggcgccaucaacaccagccugcccuuccagaacauccaccccaucaccaucggcaagugccccaaguacgugaagagcaccaagcugagacuggccaccggccugagaaacgugcccagcauccagagcagaggccuguucggcgccaucgccggcuucaucgagggcggcuggaccggcaugguggacggcugguacggcuaccaccaccagaacgagcagggcagcggcuacgccgccgaccugaagagcacccagaacgccaucgacaagaucaccaacaaggugaacagcgugaucgagaagaugaacacccaguucaccgccgugggcaaggaguucaaccaccuggagaagagaaucgagaaccugaacaagaagguggacgacggcuuccuggacaucuggaccuacaacgccgagcugcuggugcugcuggagaacgagagaacccuggacuaccacgacagcaacgugaagaaccuguacgagaaggugagaaaccagcugaagaacaacgccaaggagaucggcaacggcugcuucgaguucuaccacaagugcgacaacaccugcauggagagcgugaagaacggcaccuacgacuaccccaaguacagcgaggaggccaagcugaacagagaggagaucgacggcgugaagcuggagagcaccagaaucuaccagauccuggccaucuacagcaccguggccagcagccuggugcugguggugagccugggcgccaucagcuucuggaugugcagcaacggcagccugcagugcagaaucugcaucuga

SEQ ID NO: 169841 - RNA, 1701 nt, Artificial Sequence; identical to SEQ ID NO: 166884
  derived and/or modified CDS sequence (opt4) from hemagglutinin__InfluenzaA__AGB13170

SEQ ID NO: 169842 - RNA, 1701 nt, Artificial Sequence
  derived and/or modified CDS sequence (opt4) from hemagglutinin__InfluenzaA__AGB13180
augaaggccauccugguggugcugcuguacaccuucgccaccgccaacgccgacacccugugcaucggcuaccacgccaacaacagcaccgacaccguggacaccgugcuggagaagaacgugaccgugacccacagcgugaaccugcuggaggacaagcacaacggcaagcugugcaagcugagaggcguggccccccugcaccugggcaagugcaacaucgccggcuggauccugggcaaccccgagugcgagagccugagcaccgccagcagcuggagcuacaucguggagaccagcagcagcgacaacggcaccugcuaccccggcgacuucaucaacuacgaggagcugagagagcagcugagcagcgugagcagcuucgagagauucgagaucuuccccaagaccagcagcuggcccaaccacgacagcaacaagggcgugaccgccgccugcccccacgccggcgccaagagcuucuacaagaaccugaucuggcuggugaagaagggcaacagcuaccccaagcugagcaagagcuacaucaacgacaagggcaaggaggugcuggugcuguggggcauccaccaccccagcaccaccgccgaccagcagagccuguaccagaacgccgacgccuacguguucgugggcaccagcagauacagcaagaaguucaagcccgagaucgccaucagacccaaggugagagaccaggagggcagaaugaacuacuacuggacccugguggagcccggcgacaagaucaccuucgaggccaccggcaaccugguggugcccagauacgccuucgccauggagagaaacgccggcagcggcaucaucaucagcgacaccagcgugcacgacugcaacaccaccugccagacccccaagggcgccaucaacaccagccugcccuuccagaacauccaccccaucaccaucggcaagugccccaaguacgugaagagcaccaagcugagacuggccaccggccugagaaacgugcccagcauccagagcagaggccuguucggcgccaucgccggcuucaucgagggcggcuggaccggcaugguggacggcugguacggcuaccaccaccagaacgagcagggcagcggcuacgccgccgaccugaagagcacccagaacgccaucgacaagaucaccaacaaggugaacagcgugaucgagaagaugaacacccaguucaccgccgugggcaaggaguucaaccaccuggagaagagaaucgagaaccugaacaagaagguggacgacggcuuccuggacaucuggaccuacaacgccgagcugcuggugcugcuggagaacgagagaacccuggacuaccacgacagcaacgugaagaaccuguacgagaaggugagaaaccagcugaagaacaacgccaaggagaucggcaacggcugcuucgaguucuaccacaagugcgacaacaccugcauggagagcgugaagaacggcaccuacgacuaccccaaguacagcgaggaggccaagcugaacagagaggagaucgacggcgugaagcuggagagcaccagaaucuaccagauccuggccaucuacagcaccguggccagcagccuggugcugguggugagccugggcgccaucagcuucuggaugugcagcaacggcagccugcagugcagaaucugcaucuga

SEQ ID NO: 169843 - RNA, 1701 nt, Artificial Sequence; identical to SEQ ID NO: 166927
  derived and/or modified CDS sequence (opt4) from hemagglutinin__InfluenzaA__AGB13190

SEQ ID NO: 169844 - RNA, 1701 nt, Artificial Sequence
  derived and/or modified CDS sequence (opt4) from hemagglutinin__InfluenzaA__AGB13200
augaaggccauccugguggugcugcuguacaccuucgccaccgccaacgccgacacccugugcaucggcuaccacgccaacaacagcaccgacaccguggacaccgugcuggagaagaacgugaccgugacccacagcgugaaccugcuggaggacaagcacaacggcaagcugugcaagcugagaggcguggccccccugcaccugggcaagugcaacaucgccggcuggauccugggcaaccccgagugcgagagccugagcaccgccagcagcuggagcuacaucguggagaccagcagcagcgacaacggcaccugcuaccccggcgacuucaucaacuacgaggagcugagagagcagcugagcagcgugagcagcuucgagagauucgagaucuuccccaagaccagcagcuggcccaaccacgacagcaacaagggcgugaccgccgccugcccccacgccggcgugaagagcuucuacaagaaccugaucuggcuggugaagaagggcaacagcuaccccaagcugagcaagagcuacaucaacgacaagggcaaggaggugcuggugcuguggggcauccaccaccccagcaccaccaccgaccagcagagccuguaccagaacgccgacgccuacguguucgugggcaccagcaaguacagcaagaaguucaagcccgagaucgccaucagacccaaggugagagaccaggagggcagaaugaacuacuacuggacccugguggagcccggcgacaagaucaccuucgaggccaccggcaaccugguggugcccagauacgccuucgccauggagagaaacgccggcagcggcaucaucaucagcgacacccccgugcacgacugcaacaccaccugccagacccccaagggcgccaucaacaccagccugcccuuccagaacauccaccccaucaccaucggcaagugccccaaguacgugaagagcaccaagcugagacuggccaccggccugagaaacgugcccagcauccagagcagaggccuguucggcgccaucgccggcuucaucgagggcggcuggaccggcaugguggacggcugguacggcuaccaccaccagaacgagcagggcagcggcuacgccgccgaccugaagagcacccagaacgccaucgacaagaucaccaacaaggugaacagcgugaucgagaagaugaacacccaguucaccgccgugggcaaggaguucaaccaccuggagaagagaaucgagaaccugaacaagaagguggacgacggcuuccuggacaucuggaccuacaacgccgagcugcuggugcugcuggagaacgagagaacccuggacuaccacgacagcaacgugaagaaccuguacgagaaggugagaaaccagcugaagaacaacgccaaggagaucggcaacggcugcuucgaguucuaccacaagugcgacaacaccugcauggagagcgugaagaacggcaccuacgacuaccccaaguacagcgaggaggccaagcugaacagagaggagaucgacggcgugaagcuggagagcaccagaaucuaccagauccuggccaucuacagcaccguggccagcagccuggugcugguggugagccugggcgccaucagcuucuggaugugcagcaacggcagccugcagugcagaaucugcaucuga

SEQ ID NO: 169845 - RNA, 1701 nt, Artificial Sequence
  derived and/or modified CDS sequence (opt4) from hemagglutinin__InfluenzaA__AGB13210
augaaggccacccugguggugcugcuguacaccuucgccaccgccaacgccgacacccugugcaucggcuaccacgccaacaacagcaccgacaccguggacaccgugcuggagaagaacgugaccgugacccacagcgugaaccugcuggaggacaagcacaacggcaagcugugcaagcugagaggcguggccccccugcaccugggcaagugcaacaucgccggcuggauccugggcaaccccgagugcgagagccugagcaccgccagcagcuggagcuacaucguggagaccagcagcagcgacaacggcaccugcuaccccggcgacuucaucaacuacgaggagcugagagagcagcugagcagcgugagcagcuucgagagauucgagaucuuccccaagaccagcagcuggcccaaccacgacagcaacaagggcgugaccgccgccugcccccacgccggcgccaagagcuucuacaagaaccugaucuggcuggugaagaagggcaacagcuaccccaagcugagcaagagcuacaucaacgacaagggcaaggaggugcuggugcuguggggcauccaccaccccagcaccagcgccgaccagcagagccuguaccagaacgccgacgccuacguguucgugggcaccagcaaguacagcaagaaguucaagcccgagaucgccgugagacccaaggugagagaccaggagggcagaaugaacuacuacuggacccugguggagcccggcgacaagaucaccuucgaggccaccggcaaccugcuggugcccagauacgccuucgccauggagagaaacgccggcagcggcaucaucaucagcgacacccccgugcacgacugcaacaccaccugccagacccccaagggcgccaucaacaccagccugcccuuccagaacauccaccccaucaccaucggcaagugccccaaguacgugaagagcaccaagcugagacuggccaccggccugagaaacgugcccagcauccagagcagaggccuguucggcgccaucgccggcuucaucgagggcggcuggaccggcaugguggacggcugguacggcuaccaccaccagaacgagcagggcagcggcuacgccgccgaccugaagagcacccagaacgccaucgacaagaucaccaacaaggugaacagcgugaucgagaagaugaacacccaguucaccgccgugggcaaggaguucaaccaccuggagaagagaaucgagaaccugaacaagaagguggacgacggcuuccuggacaucuggaccuacaacgccgagcugcuggugcugcuggagaacgagagaacccuggacuaccacgacagcaacgugaagaaccuguacgagaaggugagaagccagcugaagaacaacgccaaggagaucggcaacggcugcuucgaguucuaccacaagugcgacaacaccugcauggagagcgugaagaacggcaccuacgacuaccccaaguacagcgaggaggccaagcugaacagagaggagaucgacggcgugaagcuggagagcaccagaaucuaccagauccuggccaucuacagcaccguggccagcagccuggugcugguggugagccugggcgccaucagcuucuggaugugcagcaacggcagccugcagugcagaaucugcaucuga

SEQ ID NO: 169846 - RNA, 1701 nt, Artificial Sequence
  derived and/or modified CDS sequence (opt4) from hemagglutinin__InfluenzaA__AGB13220
augaaggccauccugguggugcugcuguacaccuucgccaccgccaacgccgacacccugugcaucggcuaccacgccaacaacagcaccgacaccguggacaccgugcuggagaagaacgugaccgugacccacagcgugaaccugcuggaggacaagcacaacggcaagcugugcaagcugagaggcguggccccccugcaccugggcaagugcaacaucgccggcuggauccugggcaaccccgagugcgagagccugagcaccgccagcagcuggagcuacaucguggagaccagcaucagcgacaacggcaccugcuaccccggcgacuucaucaacuacgaggagcugagagagcagcugagcagcgugagcagcuucgagagauucgagaucuuccccaagaccagcagcuggcccaaccacgacagcaacaagggcgugaccgccgccugcccccacgccggcgccaagagcuucuacaagaaccugaucuggcuggugaagaagggcaacagcuaccccaagcugagcaagagcuacaucaacgacaagggcaaggaggugcuggugcuguggggcauccaccaccccagcaccaccgccgaccagcagagccuguaccagaacgccgacgccuacguguucgugggcaccagcaaguacagcaagaaguucaagcccgagaucgccaucagacccaaggugagagaccaggagggcagaaugaacuacuacuggacccugguggagcccggcgacaagaucaccuucgaggccaccggcaaccugguggugcccagauacgccuucgccauggagagaaacgccggcagcggcaucaucaucagcgacacccccgugcacgacugcaacaccaccugccagacccccaagggcgccaucaacaccagccugcccuuccagaacauccaccccaucaccaucggcaagugccccaaguacgugaagagcaccaagcugagacuggccaccggccugagaaacgugcccagcauccagagcagaggccuguucggcgccaucgccggcuucaucgagggcggcuggaccggcaugguggacggcugguacggcuaccaccaccagaacgagcagggcagcggcuacgccgccgaccugaagagcacccagaacgccaucgacaagaucaccaacaaggugaacagcgugaucgagaagaugaacacccaguucaccgccgugggcaaggaguucaaccaccuggagaagagaaucgagaaccugaacaagaagguggacgacggcuuccuggacaucuggaccuacaacgccgagcugcuggugcugcuggagaacgagagaacccuggacuaccacgacagcaacgugaagaaccuguacgagaaggugagaaaccagcugaagaacaacgccaaggagaucggcaacggcugcuucgaguucuaccacaagugcgacaacaccugcauggagagcgugaagaacggcaccuacgacuaccccaaguacagcgaggaggccaagcugaacagagaggagaucgacggcgugaagcuggagagcaccagaaucuaccagauccuggccaucuacagcaccguggccagcagccuggugcugguggugagccugggcgccaucagcuucuggaugugcagcaacggcagccugcagugcagaaucugcaucuga

SEQ ID NO: 169847 - RNA, 1701 nt, Artificial Sequence
  derived and/or modified CDS sequence (opt4) from hemagglutinin__InfluenzaA__AGB13230
augaaggccauccugguggugcugcuguacaccuucgccaccgccaacgccgacacccugugcaucggcuaccacgccaacaacagcaccgacaccguggacaccgugcuggagaagaacgugaccgugacccacagcgugaaccugcuggaggacaaccacaacggcaagcugugcaagcugagaggcguggccccccugcaccugggcaagugcaacaucgccggcuggauccugggcaaccccgagugcgagagccugagcaccgccagcagcuggagcuacaucguggagaccagcagcagcgacaacggcaccugcuaccccggcgacuucaucaacuacgaggagcugagagagcagcugagcagcgugagcagcuucgagagauucgagaucuuccccaagaccagcagcuggcccaaccacgacagcaacaagggcgugaccgccgccugcccccacgccggcgccaagagcuucuacaagaaccugaucuggcuggugaagaagggcaacagcuaccccaagcugagcaagagcuacaucaacgacaagggcaaggaggugcuggugcuguggggcauccaccaccccagcaccaccgccgaccagcagagccuguaccagaacgccgacgccuacguguucgugggcaccagcagauacagcaagaaguucaagcccgagaucgccaucagacccaaggugagagaccaggagggcagaaugaacuacuacuggacccugguggagcccggcgacaagaucaccuucgaggccaccggcaaccugguggugcccagauacgccuucgccauggagagaaacgccggcagcggcaucaucaucagcgacacccccgugcacgacugcaacaccaccugccagacccccaagggcgccaucaacaccagccugcccuuccagaacauccaccccaucaccaucggcaagugccccaaguacgugaagagcaccaagcugagacuggccaccggccugagaaacgugcccagcauccagagcagaggccuguucggcgccaucgccggcuucaucgagggcggcuggaccggcaugguggacggcugguacggcuaccaccaccagaacgagcagggcagcggcuacgccgccgaccugaagagcacccagaacgccaucgacaagaucaccaacaaggugaacagcgugaucgagaagaugaacacccaguucaccgccgugggcaaggaguucaacagacuggagaagagaaucgagaaccugaacaagaagguggacgacggcuuccuggacaucuggaccuacaacgccgagcugcuggugcugcuggagaacgagagaacccuggacuaccacgacagcaacgugaagaaccuguacgagaaggugagaaaccagcugaagaacaacgccaaggagaucggcaacggcugcuucgaguucuaccacaagugcgacaacaccugcauggagagcgugaagaacggcaccuacgacuaccccaaguacagcgaggaggccaagcugaacagagaggagaucgacggcgugaagcuggagagcaccagaaucuaccagauccuggccaucuacagcaccguggccagcagccuggugcugguggugagccugggcgccaucagcuucuggaugugcagcaacggcagccugcagugcagaaucugcaucuga

SEQ ID NO: 169848 - RNA, 1701 nt, Artificial Sequence; identical to SEQ ID NO: 166927
  derived and/or modified CDS sequence (opt4) from hemagglutinin__InfluenzaA__AGB13240

SEQ ID NO: 169849 - RNA, 1701 nt, Artificial Sequence; identical to SEQ ID NO: 166927
  derived and/or modified CDS sequence (opt4) from hemagglutinin__InfluenzaA__AGB13250

SEQ ID NO: 169850 - RNA, 1701 nt, Artificial Sequence
  derived and/or modified CDS sequence (opt4) from hemagglutinin__InfluenzaA__AGB13260
augaaggccauccugguggugcugcuguacaccuucgccaccgccaacgccgacacccugugcaucggcuaccacgccaacaacagcaccgacaccguggacaccgugcuggagaagaacgugaccgugacccacagcgugaaccugcuggaggacaagcacaacggcaagcugugcaagcugagaggcguggccccccugcaccugggcaagugcaacaucgccggcuggauccugggcaaccccgagugcgagagccugagcaccgccagcagcuggagcuacaucguggagaccagcagcagcgacaacggcaccugcuaccccggcgacuucaucgacuacgaggagcugagagagcagcugagcagcgugagcagcuucgagagauucgagaucuuccccaagaccagcagcuggcccaaccacgacagcaacaagggcgugaccaccgccugcccccacgccggcagcaagagcuucuacaagaaccugaucuggcuggugaagaagggcaacagcuaccccaagcugagcaagagcuacaucaacgacaagggcaaggaggugcuggugcuguggggcauccaccacccccccaccagcgccgaccagcagagccuguaccagaacgccgacgccuacguguucgugggcaccagcagauacagcaagaaguucaagcccgagaucgccaucagacccaaggugagagaccaggagggcagaaugaacuacuacuggacccugguggagcccggcgacaagaucaccuucgaggccaccggcaaccugguggugcccagauacgccuucgccauggagagaaacgccggcagcggcaucaucaucagcgacacccccgugcacgacugcaacaccaccugccagacccccaagggcgccaucaacaccagccugcccuuccagaacgugcaccccaucaccaucggcaagugccccaaguacgugaagagcaccaagcugagacuggccaccggccugagaaacgugcccagcauccagagcagaggccuguucggcgccaucgccggcuucaucgagggcggcuggaccggcaugguggacggcugguacggcuaccaccaccagaacgagcagggcagcggcuacgccgccgaccugaagagcacccagaacgccaucgacgagaucaccaacaaggugaacagcgugaucgagaagaugaacacccaguucaccgccgugggcaaggaguucaaccaccuggagaagagaaucgagaaccugaacaagaagguggacgacggcuuccuggacaucuggaccuacaacgccgagcugcuggugcugcuggagaacgagagaacccuggacuaccacgacagcaacgugaagaaccuguacgagaaggugagaagccagcugaagaacaacgccaaggagaucggcaacggcugcuucgaguucuaccacaagugcgacaacaccugcauggagagcaucaagaacggcaccuacgacuaccccaaguacagcgaggaggccaagcugaacagagaggagaucgacggcgugaagcuggagagcaccagaaucuaccagauccuggccaucuacagcaccguggccagcagccuggugcugguggugagccugggcgccaucagcuucuggaugugcagcaacggcagccugcagugcagaaucugcaucuga

SEQ ID NO: 169851 - RNA, 1701 nt, Artificial Sequence
  derived and/or modified CDS sequence (opt4) from hemagglutinin__InfluenzaA__AGB13270
augaaggccauccugguggugcugcuguacaccuucgccaccgccaacgccgacacccugugcaucggcuaccacgccaacaacagcaccgacaccguggacaccgugcuggagaagaacgugaccgugacccacagcgugaaccugcuggaggacaagcacaacggcaagcugugcaagcugagaggcguggccccccugcaccugggcaagugcaacaucgccggcuggauccugggcaaccccgagugcgagagccugagcaccgccagcagcuggagcuacaucguggagaccagcagcagcgacaacggcaccugcuaccccggcgacuucaucaacuacgaggagcugagagagcagcugagcagcgugagcagcuucgagagauucgagaucuuccccaagaccagcagcuggcccaaccacgacagcaacaagggcgugaccgccgccugcccccacgccggcgccaagagcuucuacaagaaccugaucuggcuggugaagaagggcaacagcuaccccaagcugagcaagagcuacaucaacgacaagggcaaggaggugcuggugcuguggggcauccaccaccccagcaccagcgccgaccagcagagccuguaccagaacgccgacgccuacguguucgugggcaccagcaaguacagcaagaaguucaagcccgagaucgccgugagacccaaggugagagaccaggagggcagaaugaacuacuacuggacccugguggagcccggcgacaagaucaccuucgaggccaccggcaaccugcuggugcccagauacgccuucgccauggagagaaacgccggcagcggcaucaucaucagcgacacccccgugcacgacugcaacaccaccugccagacccccaagggcgccaucaacaccagccugcccuuccagaacauccaccccaucaccaucggcaagugccccaaguacgugaagagcaccaagcugagacuggccaccggccugagaaacgugcccagcauccagagcagaggccuguucggcgccaucgccggcuucaucgagggcggcuggaccggcaugguggacggcugguacggcuaccaccaccagaacgagcagggcagcggcuacgccgccgaccugaagagcacccagaacgccaucgacaagaucaccaacaaggugaacagcgugaucgagaagaugaacacccaguucaccgccgugggcaaggaguucaaccaccuggagaagagaaucgagaaccugaacaagaagguggacgacggcuuccuggacaucuggaccuacaacgccgagcugcuggugcugcuggagaacgagagaacccuggacuaccacgacagcaacgugaagaaccuguacgagaaggugagaagccagcugaagaacaacgccaaggagaucggcaacggcugcuucgaguucuaccacaagugcgacaacaccugcauggagagcgugaagaacggcaccuacgacuaccccaaguacagcgaggaggccaagcugaacagagagaagaucgacggcgugaagcuggagagcaccagaaucuaccagauccuggccaucuacagcaccguggccagcagccuggugcugguggugagccugggcgccaucagcuucuggaugugcagcaacggcagccugcagugcagaaucugcaucuga

SEQ ID NO: 169852 - RNA, 1701 nt, Artificial Sequence
  derived and/or modified CDS sequence (opt4) from hemagglutinin__InfluenzaA__AGB13280
augaaggccauccugguggugcugcuguacaccuucgccaccgccaacgccgacacccugugcaucggcuaccacgccaacaacagcaccgacaccguggacaccgugcuggagaagaacgugaccgugacccacagcgugaaccugcuggaggacaagcacaacggcaagcugugcaagcugagaggcguggccccccugcaccugggcaagugcaacaucgccggcuggauccugggcaaccccgagugcgagagccugagcaccgccagcagcuggagcuacaucguggagaccagcagcagcgacaacggcaccugcuaccccggcgacuucaucaacuacgaggagcugagagagcagcugagcagcgugagcagcuucgagagauucgagaucuuccccaagaccagcagcuggcccaaccacgacagcaacaagggcgugaccgccgccugcccccacgccggcgccaagagcuucuacaagaaccugaucuggcuggugaagaagggcaacagcuaccccaagcugagcaagagcuacaucaacgacaagggcaaggaggugcuggugcuguggggcauccaccaccccagcaccaacgccgaccagcagagccuguaccagaacgccgacgccuacguguucgugggcaccagcaaguacagcaagaaguucaagcccgagaucgccgugagacccaaggugagagaccaggagggcagaaugaacuacuacuggacccugguggagcccggcgacaagaucaccuucgaggccaccggcaaccugcuggugcccagauacgccuucgccauggagagaaacgccggcagcggcaucaucaucagcgacacccccgugcacgacugcaacaccaccugccagacccccaagggcgccaucaacaccagccugcccuuccagaacauccaccccaucaccaucggcaagugccccaaguacgugaagagcaccaagcugagacuggccaccggccugagaaacgugcccagcauccagagcagaggccuguucggcgccaucgccggcuucaucgagggcggcuggaccggcaugguggacggcugguacggcuaccaccaccagaacggccagggcagcggcuacgccgccgaccugaagagcacccagaacgccaucgacaagaucaccaacaaggugaacagcgugaucgagaagaugaacacccaguucaccgccgugggcaaggaguucaaccaccuggagaagagaaucgagaaccugaacaagaagguggacgacggcuuccuggacaucuggaccuacaacgccgagcugcuggugcugcuggagaacgagagaacccuggacuaccacgacagcaacgugaagaaccuguacgagaaggugagaagccagcugaagaacaacgccaaggagaucggcaacggcugcuucgaguucuaccacaagugcgacaacaccugcauggagagcgugaagaacggcaccuacgacuaccccaaguacagcgaggaggccaagcugaacagagaggagaucgacggcgugaagcuggagagcaccagaaucuaccagauccuggccaucuacagcaccguggccagcagccuggugcugguggugagccugggcgccaucagcuucuggaugugcagcaacggcagccugcagugcagaaucugcaucuga

SEQ ID NO: 169853 - RNA, 1701 nt, Artificial Sequence
  derived and/or modified CDS sequence (opt4) from hemagglutinin__InfluenzaA__AGB13290
augaaggccauccugguggugcugcuguacaccuucgccaccgccaacgccgacacccugugcaucggcuaccacgccaacaacagcaccgacaccguggacaccgugcuggagaagaacgugaccgugacccacagcgugaaccugcuggaggugaagcacaacggcaagcugugcaagcugagaggcguggccccccugcaccugggcaagugcaacaucgccggcuggauccugggcaaccccgagugcgagagccugagcaccgccagcagcuggagcuacaucguggagaccagcagcagcgacaacggcaccugcuaccccggcgacuucaucaacuacgaggagcugagagagcagcugagcagcgugagcagcuucgagagauucgagaucuuccccaagaccagcagcuggcccaaccacgacagcaacaagggcgugaccgccgccugcccccacgccggcgccaagagcuucuacaagaaccugaucuggcuggugaagaagggcaacagcuaccccaagcugagcaagagcuacaucaacgacaagggcaaggaggugcuggugcuguggggcauccaccaccccagcaccaccgccgaccagcagagccuguaccagaacgccgacgccuacguguucgugggcaccagcagauacagcaagaaguucaagcccgagaucgccaucagacccaaggugagagaccaggagggcagaaugaacuacuacuggacccugguggagcccggcgacaagaucaccuucgaggccaccggcaaccugguggugcccagauacgccuucgccauggagagaaacgccggcagcggcaucaucaucagcgacacccccgugcacgacugcaacaccaccugccagacccccaagggcgccaucaacaccagccugcccuuccagaacauccaccccaucaccaucggcaagugccccaaguacgugaagagcaccaagcugagacuggccaccggccugagaaacgugcccagcauccagagcagaggccuguucggcgccaucgccggcuucaucgagggcggcuggaccggcaugguggacggcugguacggcuaccaccaccagaacgagcagggcagcggcuacgccgccgaccugaagagcacccagaacgccaucgacaagaucaccaacaaggugaacagcgugaucgagaagaugaacacccaguucaccgccgugggcaaggaguucaaccaccuggagaagagaaucgagaaccugaacaagaagguggacgacggcuuccuggacaucuggaccuacaacgccgagcugcuggugcugcuggagaacgagagaacccuggacuaccacgacagcaacgugaagaaccuguacgagaaggugagaaaccagcugaagaacaacgccaaggagaucggcaacggcugcuucgaguucuaccacaagugcgacaacaccugcauggagagcgugaagaacggcaccuacgacuaccccaaguacagcgaggaggccaagcugaacagagaggagaucgacggcgugaagcuggagagcaccagaaucuaccagauccuggccaucuacagcaccguggccagcagccuggugcugguggugagccugggcgccaucagcuucuggaugugcagcaacggcagccugcagugcagaaucugcaucuga

SEQ ID NO: 169854 - RNA, 1701 nt, Artificial Sequence; identical to SEQ ID NO: 166927
  derived and/or modified CDS sequence (opt4) from hemagglutinin__InfluenzaA__AGB13300

SEQ ID NO: 169855 - RNA, 1701 nt, Artificial Sequence
  derived and/or modified CDS sequence (opt4) from hemagglutinin__InfluenzaA__AGB13310
augaaggccauccugguggugcugcuguacaccuucgccaccgccaacgccgacacccugugcaucggcuaccacgccaacaacagcaccgacaccguggacaccgugcuggagaagaacgugaccgugacccacagcgugaaccugcuggaggacaagcacaacggcaagcugugcaagcugagaggcguggccccccugcaccugggcaagugcaacaucgccggcuggauccugggcaaccccgagugcgagagccugagcaccgccagcagcuggagcuacaucguggagaccagcagcagcgacaacggcaccugcuaccccggcgacuucaucgacuacgaggagcugagagagcagcugagcagcgugagcagcuucgagagauucgagaucuuccccaagaccagcagcuggcccaaccacgacagcaacaagggcgugaccgccgccugcccccacgccggcgccaagagcuucuacaagaaccugaucuggcuggugaagaagggcaacagcuaccccaagcugagcaagagcuacaucaacgacaagggcaaggaggugcuggugcuguggggcgugcaccaccccagcaccagcgccgaccagcagagccuguaccagaacgccgacgccuacguguucgugggcaccagcagauacagcaagaaguucaagcccgagaucgccaucagacccaaggugagagaccaggagggcagaaugaacuacuacuggacccugguggagcccggcgacaagaucaccuucgaggccaccggcaaccugguggugcccagauacgccuucgccauggagagaaacgccggcagcggcaucaucaucagcgacacccccgugcacgacugcaacaccaccugccagacccccaagggcgccaucaacaccagccugcccuuccagaacauccaccccaucaccaucggcaagugccccaaguacgugaagagcaccaagcugagacuggccaccggccugagaaacgugcccagcauccagagcagaggccuguucggcgccaucgccggcuucaucgagggcggcuggaccggcaugguggacggcugguacggcuaccaccaccagaacgagcagggcagcggcuacgccgccgaccugaagagcacccagcacgccaucgacgagaucaccaacaaggugaacagcgugaucgagaagaugaacacccaguucaccgccgugggcaaggaguucaaccaccuggagaagagaaucgagaaccugaacaagaagguggacgacggcuuccuggacaucuggaccuacaacgccgagcugcuggugcugcuggagaacgagagaacccuggacuaccacgacagcaacgugaagaaccuguacgagaaggugagaagccagcugaagaacaacgccaaggagaucggcaacggcugcuucgaguucuaccacaagugcgacaacaccugcauggagagcgugaagaacggcaccuacgacuaccccaaguacagcgaggaggccaagcugaacagagaggagaucgacggcgugaagcuggagagcaccagaaucuaccagauccuggccaucuacagcaccguggccagcagccuggugcugguggugagccugggcgccaucagcuucuggaugugcagcaacggcagccugcagugcagaaucugcaucuga

SEQ ID NO: 169856 - RNA, 1701 nt, Artificial Sequence
  derived and/or modified CDS sequence (opt4) from hemagglutinin__InfluenzaA__AGB13320
augaaggccauccugguggugcugcuguacaccaucgccaccgccaacgccgacacccugugcaucggcuaccacgccaacaacagcaccgacaccguggacaccgugcuggagaagaacgugaccgugacccacagcgugaaccugcuggaggacaagcacaacggcaagcugugcaagcugagaggcguggccccccugcaccugggcaagugcaacaucgccggcuggauccugggcaaccccgagugcgagagccugagcaccgccagcagcuggagcuacaucguggagaccagcagcagcgacaacggcaccugcuaccccggcgacuucaucaacuacgaggagcugagagagcagcugagcagcgugagcagcuucgagagauucgagaucuuccccaagaccagcagcuggcccaaccacgacagcaacaagggcgugaccgccgccugcccccacgccggcgccaagagcuucuacaagaaccugaucuggcuggugaagaagggcaacagcuaccccaagcugagcaagagcuacaucaacgacaagggcaaggaggugcuggugcuguggggcauccaccaccccagcaccaccgccgaccagcagagccuguaccagaacgccgacgccuacguguucgugggcaccagcagauacagcaagaaguucaagcccgagaucgccaucagacccaaggugagagaccaggagggcagaaugaacuacuacuggacccugguggagcccggcgacaagaucaccuucgaggccaccggcaaccugguggugcccagauacgccuucgccauggagaagaacgccggcagcggcaucaucaucagcgacacccccgugcacgacugcaacaccaccugccagacccccaagggcgccaucaacaccagccugcccuuccagaacauccaccccaucaccaucggcaagugccccaaguacgugaagagcaccaagcugagacuggccaccggccugagaaacgugcccagcauccagagcagaggccuguucggcgccaucgccggcuucaucgagggcggcuggaccggcaugguggacggcugguacggcuaccaccaccagaacgagcagggcagcggcuacgccgccgaccugaagagcacccagaacgccaucgacaagaucaccaacaaggugaacagcgugaucgagaagaugaacacccaguucaccgccgugggcaaggaguucaaccaccuggagaagagaaucgagaaccugaacaagaagguggacgacggcuuccuggacaucuggaccuacaacgccgagcugcuggugcugcuggagaacgagagaacccuggacuaccacgacagcaacgugaagaaccuguacgagaaggugagaaaccagcugaagaacaacgccaaggagaucggcaacggcugcuucgaguucuaccacaagugcgacaacaccugcauggagagcgugaagaacggcaccuacgacuaccccaaguacagcgaggaggccaagcugaacagagaggagaucgacggcgugaagcuggagagcgccagaguguaccagauccuggccaucuacagcaccguggccagcagccuggugcugguggugagccugggcgccaucagcuucuggaugugcagcaacggcagccugcagugcagaaucugcaucuga

SEQ ID NO: 169857 - RNA, 1701 nt, Artificial Sequence
  derived and/or modified CDS sequence (opt4) from hemagglutinin__InfluenzaA__AGB13330
augaaggccauccugguggugaugcuguacaccuucgccaccgccaacgccgacacccugugcaucggcuaccacgccaacaacagcaccgacaccguggacaccgugcuggagaagaacgugaccgugacccacagcgugaaccugcuggaggacaagcacaacggcaagcugugcaagcugagaggcguggccccccugcaccugggcaagugcaacaucgccggcuggauccugggcaaccccgagugcgagagccugagcaccgccagcagcuggagcuacaucguggagaccagcagcagcgacaacggcaccugcuaccccggcgacuucaucgacuacgaggagcugagagagcagcugagcagcgugagcagcuucgagagauucgagaucuuccccaagaccagcagcuggcccaaccacgacagcaacaagggcgugaccgccgccugcccccacgccggcgccaagggcuucuacaagaaccugaucuggcuggugaagaagggcaacagcuaccccaagcugagcaagagcuacagcaacgacaagggcaaggaggugcuggugcuguggggcauccaccaccccagcaccaccgccgaccagcagagccuguaccagaacgccgacaccuacguguucgugggcaccagcagauacagcaagaaguucaagcccgagaucgccaucagacccaaggugagagaccaggagggcagaaugaacuacuacuggacccugguggagcccggcgacaagaucaccuucgaggccaccggcaaccugguggugcccagauacgccuucgccauggagagaaacgccggcagcggcaucaucaucagcgacacccccgugcacgacugcaacaccaccugccagacccccaagggcgccaucaacaccagccugcccuuccagaacauccaccccaucaccaucggcaagugccccaaguacgugaagagcaccaagcugagacuggccaccggccugagaaacgugcccagcauccagagcagaggccuguucggcgccaucgccggcuucaucgagggcggcuggaccggcaugguggacggcugguacggcuaccaccaccagaacgagcagggcagcggcuacgccgccgaccugaagagcacccagaacgccaucgacaagaucaccaacaaggugaacagcgugaucgagaagaugaacacccaguucaccgccgugggcaaggaguucaaccaccuggagaagagaaucgagaaccugaacaagaagguggacgacggcuuccuggacaucuggaccuacaacgccgagcugcuggugcugcuggagaacgagagaacccuggacuaccacgacagcaacgugaagaaccuguacgagaaggugagaaaccagcugaagaacaacgccaaggagaucggcaacggcugcuucgaguucuaccacaagugcgacaacaccugcauggagagcgugaagaacggcaccuacgacuaccccaaguacagcgaggaggccaagcugaacagagaggagaucgacggcgugaagcuggagagcaccagaaucuaccagauccuggccaucuacagcaccguggccagcagccuggugcugguggugagccugggcgccaucagcuucuggaugugcagcaacggcagccugcagugcagaaucugcaucuga

SEQ ID NO: 169858 - RNA, 1701 nt, Artificial Sequence; identical to SEQ ID NO: 166927
  derived and/or modified CDS sequence (opt4) from hemagglutinin__InfluenzaA__AGB13340

SEQ ID NO: 169859 - RNA, 1701 nt, Artificial Sequence
  derived and/or modified CDS sequence (opt4) from hemagglutinin__InfluenzaA__AGB13350
augaaggccauccugguggugcugcuguacaccuucgccaccgccaacgccgacacccugugcaucggcuaccacgccaacaacagcaccgagaccguggacaccgugcuggagaagaacgugaccgugacccacagcgugaaccugcuggaggacaagcacaacggcaagcugugcaagcugagaggcguggccccccugcaccugggcaagugcaacaucgccggcuggauccugggcaaccccgagugcgagagccugagcaccgccagcagcuggagcuacaucguggagaccagcagcagcgacaacggcaccugcuaccccggcgacuucaucaacuacgaggagcugagagagcagcugagcagcgugagcagcuucgagagauucgagaucuuccccaagaccagcagcuggcccaaccacgacagcaacaagggcgugaccgccgccugcccccaggccggcgccaagagcuucuacaagaaccugaucuggcuggugaagaagggcaacagcuaccccaagcugagcaagagcuacaucaacgacaagggcaaggaggugcuggugcuguggggcauccaccaccccagcaccagcgccgaccagcagagccuguaccagaacgccgacgccuacguguucgugggcaccagcaaguacagcaagaaguucaagcccgagaucgccgugagacccaaggugagagaccaggagggcagaaugaacuacuacuggacccugguggagcccggcgacaagaucaccuucgaggccaccggcaaccugcuggugcccagauacgccuucgccauggagagaaacgccggcagcggcaucaucaucagcgacacccccgugcacgacugcaacaccaccugccagacccccaagggcgccaucaacaccagccugcccuuccagaacauccaccccaucaccaucggcaagugccccaaguacgugaagagcaccaagcugagacuggccaccggccugagaaacgugcccagcauccagagcagaggccuguucggcgccaucgccggcuucaucgagggcggcuggaccggcaugguggacggcugguacggcuaccaccaccagaacgcccagggcagcggcuacgccgccgaccugaagagcacccagaacgccaucgacaagaucaccaacaaggugaacagcgugaucgagaagaugaacacccaguucaccgccgugggcaaggaguucaaccaccuggagaagagaaucgagaaccugaacaagaagguggacgacggcuuccuggacaucuggaccuacaacgccgagcugcuggugcugcuggagaacgagagaacccuggacuaccacgacagcaacgugaagaaccuguacgagaaggugagaagccagcugaagaacaacgccaaggagaucggcaacggcugcuucgaguucuaccacaagugcgacaacaccugcauggagagcgugaagaacggcaccuacgacuaccccaaguacagcgaggaggccaagcugaacagagaggagaucgacggcgugaagcuggagagcaccagaaucuaccagauccuggccaucuacagcaccguggccagcagccuggugcugguggugagccugggcgccaucagcuucuggaugugcagcaacggcagccugcagugcagaaucugcaucuga

SEQ ID NO: 169860 - RNA, 1701 nt, Artificial Sequence
  derived and/or modified CDS sequence (opt4) from hemagglutinin__InfluenzaA__AGB13360
augaaggccauccugguggugcugcuguacaccuucgccaccgccaacgccgacacccugugcaucggcuaccacgccaacaacagcaccgacaccguggacaccgugcuggagaagaacgugaccgugacccacagcgugaaccugcuggaggacaagcacaacggcaagcugugcaagcugagaggcguggccccccugcaccugggcaagugcaacaucgccggcuggauccugggcaaccccgagugcgagagccugagcaccgccagcagcuggagcuacaucguggagaccagcagcagcgacaacggcaccugcuaccccggcgacuucaucaacuacgaggagcugagagagcagcugagcagcgugagcagcuucgagagauucgagaucuuccccaagaccagcagcuggcccaaccacgacagcaacaagggcgugaccgccgccugcccccacgccggcgccaagagcuucuacaagaaccugaucuggcuggugaagaagggcaacagcuaccccaagcugagcaagagcuacaucaacgacaagggcaaggaggugcuggugcuguggggcauccaccaccccagcaccagcgccgaccagcagagccuguaccagaacgccgacgccuacguguucgugggcaccagcaaguacagcaagaaguucaagcccgagaucgccgugagacccaaggugagagaccaggagggcagaaugaacuacuacuggacccugguggagcccggcgacaagaucaccuucgaggccaccggcaaccugcuggugcccagauacgccuucgccauggagagaaacgccggcagcggcaucaucaucagcgacacccccgugcacgacugcaacaccaccugccagacccccaagggcgccaucaacaccagccugcccuuccagaacauccaccccaucaccaucggcaagugccccaaguacgugaagagcaccaagcugagacuggccaccggccugagaaacgugcccagcauccagagcagaggccuguucggcgccaucgccggcuucaucgagggcggcuggaccggcaugguggacggcugguacggcuaccaccaccagaacgagcagggcagcggcuacgccgccgaccugaagagcacccagaacgccaucgacaagaucaccaacaaggugaacagcgugaucgagaagaugaacacccaguucaccgccgugggcaaggaguucaaccaccuggagaagagaaucgagaaccugaacaagaagguggacgacggcuuccuggacaucuggaccuacaacgccgagaugcuggugcugcuggagaacgagaagacccuggacuaccacgacagcaacgugaagaaccuguacgagaaggugagaagccagcugaagaacaacgccaaggagaucggcaacggcugcuucgaguucuaccacaagugcgacaacaccugcauggagagcgugaagaacggcaccuacgacuaccccaaguacagcgaggaggccaagcugaacagagaggagaucgacggcgugaagcuggagagcaccagaaucuaccagauccuggccaucuacagcaccguggccagcagccuggugcugguggugagccugggcgccaucagcuucuggaugugcagcaacggcagccugcagugcagaaucugcaucuga

SEQ ID NO: 169861 - RNA, 1701 nt, Artificial Sequence
  derived and/or modified CDS sequence (opt4) from hemagglutinin__InfluenzaA__AGB13380
augaaggccauccugguggugcugcuguacaccuucgccaccgccaaggccgacacccugugcaucggcuaccacgccaacaacagcaccgacaccguggacaccgugcuggagaagaacgugaccgugacccacagcgugaaccugcuggaggacaagcacaacggcaagcugugcaagcugagaggcguggccccccugcaccugggcaagugcaacaucgccggcuggauccugggcaaccccgagugcgagagccugagcaccgccagcagcuggagcuacaucguggagaccagcagcagcgacaacggcaccugcuaccccggcgacuucaucaacuacgaggagcugagagagcagcugagcagcgugagcagcuucgagagauucgagaucuuccccaagaccagcagcuggcccaaccacgacagcaacaagggcgugaccgccgccugcccccacgccggcgccaagagcuucuacaagaaccugaucuggcuggugaagaagggcaacagcuaccccaagcugagcaagagcuacaucaacgacaagggcaaggaggugcuggugcuguggggcauccaccaccccagcaccaccgccgaccagcagagccuguaccagaacgccgacgccuacguguucgugggcaccagcagauacagcaagaaguucaagcccgagaucgccaucagacccaaggugagagaccaggagggcagaaugaacuacuacuggacccugguggagcccggcgacaagaucaccuucgaggccaccggcaaccugguggugcccagauacgccuucgccauggagagaaaccccggcagcggcaucaucaucagcgacacccccgugcacgacugcaacaccaccugccagacccccaagggcgccaucaacaccagccugcccuuccagaacauccaccccaucaccaucggcaagugccccaaguacgugaagagcaccaagcugagacuggccaccggccugagaaacgugcccagcauccagagcagaggccuguucggcgccaucgccggcuucaucgagggcggcuggaccggcaugguggacggcugguacggcuaccaccaccagaacgagcagggcagcggcuacgccgccgaccugaagagcacccagaacgccaucgacaagaucaccaacaaggugaacagcgugaucgagaagaugaacacccaguucaccgccgugggcaaggaguucaaccaccuggagaagagaaucgagaaccugaacaagaagguggacgacggcuuccuggacaucuggaccuacaacgccgagcugcuggugcugcuggagaacgagagaacccuggacuaccacgacagcaacgugaagaaccuguacgagaaggugagaaaccagcugaagaacaacgccaaggagaucggcaacggcugcuucgaguucuaccacaagugcgacaacaccugcauggagagcgugaagaacggcaccuacgacuaccccaaguacagcgaggaggccaagcugaacagagaggagaucgacggcgugaagcuggagagcaccagaaucuaccagauccuggccaucuacagcaccguggccagcagccuggugcugguggugagccugggcgccaucagcuucuggaugugcagcaacggcagccugcagugcagaaucugcaucuga

SEQ ID NO: 169862 - RNA, 1701 nt, Artificial Sequence; identical to SEQ ID NO: 166495
  derived and/or modified CDS sequence (opt4) from hemagglutinin__InfluenzaA__AGB13390

SEQ ID NO: 169863 - RNA, 1701 nt, Artificial Sequence; identical to SEQ ID NO: 167102
  derived and/or modified CDS sequence (opt4) from hemagglutinin__InfluenzaA__AGB13400

SEQ ID NO: 169864 - RNA, 1701 nt, Artificial Sequence; identical to SEQ ID NO: 166495
  derived and/or modified CDS sequence (opt4) from hemagglutinin__InfluenzaA__AGB13410

SEQ ID NO: 169865 - RNA, 1701 nt, Artificial Sequence; identical to SEQ ID NO: 166514
  derived and/or modified CDS sequence (opt4) from hemagglutinin__InfluenzaA__AGB13420

SEQ ID NO: 169866 - RNA, 1701 nt, Artificial Sequence
  derived and/or modified CDS sequence (opt4) from hemagglutinin__InfluenzaA__AGB13430
augaaggccauccugguggugcugcuguacaccuucgccaccgccaacgccgacacccugugcaucggcuaccacgccaacaacagcaccgacaccguggacaccgugcuggagaagaacgugaccgugacccacagcgugaaccugcuggaggacaagcacaacggcaagcugugcaagcugagaggcguggccccccugcaccugggcaagugcaacaucgccggcuggauccugggcaaccccgagugcgagagccugagcaccgccagcagcuggagcuacaucguggagaccagcagcagcgacaacggcaccugcuaccccggcgacuucaucgacuacgaggagcugagagagcagcugagcagcgugagcagcuucgagagauucgagauguuccccaagaccagcagcuggcccaaccacgacagcaacaagggcgugaccaccgccugcccccacgccggcgccaagagcuucuacaagaaccugaucuggcuggugaagaagggcaacagcuaccccaagcugagcaagagcuacaucaacgacaagggcaaggaggugcuggugcuguggggcauccaccacccccccaccagcgccgaccagcagagccuguaccagaacgccgacgccuacguguucgugggcaccagcagauacagcaagaaguucaagcccgagaucgccaucagacccaaggugagagaccaggagggcagaaugaacuacuacuggacccugguggagcccggcgacaagaucaccuucgaggccaccggcaaccugguggugcccagauacgccuucgccauggagagaaacgccggcagcggcaucaucaucagcgacacccccgugcacgacugcaacaccaccugccagacccccaagggcgccaucaacaccagccugcccuuccagaacauccaccccaucaccaucggcaagugccccaaguacgugaagagcaccaagcugagacuggccaccggccugagaaacgugcccagcauccagagcagaggccuguucggcgccaucgccggcuucaucgagggcggcuggaccggcaugguggacggcugguacggcuaccaccaccagaacgagcagggcagcggcuacgccgccgaccugaagagcacccagaacgccaucgacggcaucaccaacaaggugaacagcgugaucgagaagaugaacacccaguucaccgccgugggcaaggaguucaaccaccuggagaagagaaucgagaaccugaacaagaagguggacgacggcuuccuggacaucuggaccuacaacgccgagcugcuggugcugcuggagaacgagagaacccuggacuaccacgacagcaacgugaagaaccuguacgagaaggugagaagccagcugaagaacaacgccaaggagaucggcaacggcugcuucgaguucuaccacaagugcgacaacaccugcauggagagcgugaagaacggcaccuacgacuaccccaaguacagcgaggaggccaagcugaacagagaggagaucgacggcgugaagcuggagagcaccaugaucuaccagauccuggccaucuacagcaccguggccagcagccuggugcugguggugagccugggcgccaucagcuucuggaugugcagcaacggcagccugcagugcagaaucugcaucuga

SEQ ID NO: 169867 - RNA, 1701 nt, Artificial Sequence; identical to SEQ ID NO: 167102
  derived and/or modified CDS sequence (opt4) from hemagglutinin__InfluenzaA__AGB13440

SEQ ID NO: 169868 - RNA, 1701 nt, Artificial Sequence; identical to SEQ ID NO: 166514
  derived and/or modified CDS sequence (opt4) from hemagglutinin__InfluenzaA__AGB13450

SEQ ID NO: 169869 - RNA, 1701 nt, Artificial Sequence; identical to SEQ ID NO: 166495
  derived and/or modified CDS sequence (opt4) from hemagglutinin__InfluenzaA__AGB13460

SEQ ID NO: 169870 - RNA, 1701 nt, Artificial Sequence; identical to SEQ ID NO: 166927
  derived and/or modified CDS sequence (opt4) from hemagglutinin__InfluenzaA__AGB13470

SEQ ID NO: 169871 - RNA, 1701 nt, Artificial Sequence; identical to SEQ ID NO: 166514
  derived and/or modified CDS sequence (opt4) from hemagglutinin__InfluenzaA__AGB13480

SEQ ID NO: 169872 - RNA, 1701 nt, Artificial Sequence; identical to SEQ ID NO: 166927
  derived and/or modified CDS sequence (opt4) from hemagglutinin__InfluenzaA__AGB13490

SEQ ID NO: 169873 - RNA, 1701 nt, Artificial Sequence
  derived and/or modified CDS sequence (opt4) from hemagglutinin__InfluenzaA__AGB13500
augaaggccauccugguggugcugcuguacaccuucgccaccgccaacgccgacacccugugcaucggcuaccacgccaacaacagcaccgacaccguggacaccgugcuggagaagaacgugaccgugacccacagcgugaaccugcuggaggacaagcacaacggcaagcugugcaagcugagaggcguggccccccugcaccugggcaagugcaacaucgccggcuggauccugggcaaccccgagugcgagagccugagcaccgccagcagcuggagcuacaucguggagaccagcagcagcgacaacggcaccugcuaccccggcaacuucaucgacuacgaggagcugagagagcagcugagcagcgugagcagcuucgagagauucgagaucuuccccaagaccagcagcuggcccgaccacgacagcaacaagggcgugaccgccgccugcccccacgccggcgccaagggcuucuacaagaaccugaucuggcuggugaagaagggcaacagcuaccccaagcugagcaagagcuacaucaacgacaagggcaaggaggugcuggugcuguggggcauccaccaccccagcaccagcgccgaccagcagagccuguaccagaacgccgacgccuacguguucgugggcaccagcagauacagcaagaaguucaagcccgagaucgccaucagacccaaggugagagaccaggagggcagaaugaacuacuacuggacccugguggagcccggcgacaagaucaccuucgaggccaccggcaaccugguggcccccagauacgccuucgccauggagagaaacgccggcagcggcaucaucaucagcgacacccccgugcacgacugcaacaccaccugccagacccccaagggcgccaucaacaccagccugcccuuccagaacauccaccccaucaccaucggcaagugccccaaguacgugaagagcaccaagcugagacuggccaccggccugagaaacgugcccagcauccagagcagaggccuguucggcgccaucgccggcuucaucgagggcggcuggaccggcaugguggacggcugguacggcuaccaccaccagaacgagcagggcagcggcuacgccgccgaccugaagagcacccagaacgccaucgacaagaucaccaacaaggugaacagcgugaucgagaagaugaacacccaguucaccgccgugggcaaggaguucaaccaccuggagaagagaaucgagaaccugaacaagaagguggacgacggcuuccuggacaucuggaccuacaacgccgagcugcuggugcugcuggagaacgagagaacccuggacuaccacgacagcaacgugaagaaccuguacgagaaggugagaagccagcugaagaacaacgccaaggagaucggcaacggcugcuucgaguucuaccacaagugcgacaacaccugcauggagagcgugaagaacggcaccuacgacuaccccaaguacagcgaggaggccaagcugaacagagaggagaucgacggcgugaagcuggagagcaccagaaucuaccagauccuggccaucuacagcaccguggccagcagccuggugcugguggugagccugggcgccaucagcuucuggaugugcagcaacggcagccugcagugcagaaucugcaucuga

SEQ ID NO: 169874 - RNA, 1701 nt, Artificial Sequence; identical to SEQ ID NO: 167132
  derived and/or modified CDS sequence (opt4) from hemagglutinin__InfluenzaA__AGB13520

SEQ ID NO: 169875 - RNA, 1701 nt, Artificial Sequence
  derived and/or modified CDS sequence (opt4) from hemagglutinin__InfluenzaA__AGB13530
augaaggccauccugguggugcugcuguacaccuucgccaccgccaacgccgacacccugugcaucggcuaccacgccaacaacagcaccgacaccguggacaccgugcuggagaagaacgugaccgugacccacagcgugaaccugcuggaggacaagcacaacggcaagcugugcaagcugagaggcguggccccccugcaccugggcaagugcaacaucgccggcuggauccugggcaaccccgagugcgagagccugagcaccgccagcagcuggagcuacaucguggagaccagcagcagcgacaacggcaccugcuaccccggcgacuucaucgacuacgaggagcugagagagcagcugagcagcgugagcagcuucgagagauucgagaucuuccccaagaccagcagcuggcccaaccacgacagcaacaagggcgugaccgccgccugcccccacgccggcgccaagagcuucuacaagaaccugaucuggcuggugaagaagggcaacagcuaccccaagcugaacaagagcuacaucaacgacaagggcaaggaggugcuggugcuguggggcauccaccaccccagcaccaccgccgaccagcagagccuguaccagaacgccgacgccuacguguucgugggcaccagcagauacagcaagaaguucaagcccgagaucgccaucagacccaaggugagagaccaggagggcagaaugaacuacuacuggacccugguggagcccggcgacaagaucaccuucgaggccaccggcaaccugguggugcccagauacgccuucgccauggagagaaacgccggcagcggcaucaucaucagcgacacccccgugcacgacugcaacaccaccugccagacccccaagggcgccaucaacaccagccugcccuuccagaacauccaccccaucaccaucggcaagugccccaaguacgugaagagcaccaagcugagacuggccaccggccugagaaacgugcccagcauccagagcagaggccuguucggcgccaucgccggcuucaucgagggcggcuggaccggcaugguggacggcugguacggcuaccaccaccagaacgagcagggcagcggcuacgccgccgaccugaagagcacccagaacgccaucgacaagaucaccaacaaggugaacagcgugaucgagaagaugaacacccaguucaccgccgugggcaaggaguucaaccaccuggagaagagaaucgagaaccugaacaagaagguggacgacggcuuccuggacaucuggaccuacaacgccgagcugcuggugcugcuggagaacgagagaacccuggacuaccacgacagcaacgugaagaaccuguacgagaaggugagaaaccagcugaagaacaacgccaaggagaucggcaacggcugcuucgaguucuaccacaagugcgacaacaccugcauggagagcgugaagaacggcaccuacgacuaccccaaguacagcgaggaggccaagcugaacagagaggagaucaacggcgugaagcuggagagcaccagaaucuaccagauccuggccaucuacagcaccguggccagcagccuggugcugguggugagccugggcgccaucagcuucuggaugugcagcaacggcagccugcagugcagaaucugcaucuga

SEQ ID NO: 169876 - RNA, 1701 nt, Artificial Sequence; identical to SEQ ID NO: 167146
  derived and/or modified CDS sequence (opt4) from hemagglutinin__InfluenzaA__AGB13540

SEQ ID NO: 169877 - RNA, 1701 nt, Artificial Sequence; identical to SEQ ID NO: 167110
  derived and/or modified CDS sequence (opt4) from hemagglutinin__InfluenzaA__AGB13550

SEQ ID NO: 169878 - RNA, 1701 nt, Artificial Sequence; identical to SEQ ID NO: 167110
  derived and/or modified CDS sequence (opt4) from hemagglutinin__InfluenzaA__AGB13560

SEQ ID NO: 169879 - RNA, 1701 nt, Artificial Sequence; identical to SEQ ID NO: 166927
  derived and/or modified CDS sequence (opt4) from hemagglutinin__InfluenzaA__AGB13570

SEQ ID NO: 169880 - RNA, 1701 nt, Artificial Sequence
  derived and/or modified CDS sequence (opt4) from hemagglutinin__InfluenzaA__AGB13580
augaaggccauccugguggugcugcuguacaccuucgccaccgccaacgccgacacccugugcaucggcuaccacgccaacaacagcaccgacaccguggacaccgugcuggagaagaacgugaccgugacccacagcgugaaccugcuggaggacaagcacaacggcaagcugugcaagcugagaggcguggccccccugcaccugggcaagugcaacaucgccggcuggauccugggcaaccccgagugcgagagccugagcaccgccagcagcuggagcuacaucguggagaccagcagcagcgacaacggcaccugcuaccccggcgacuucaucaacuacgaggagcugagagagcagcugagcagcgugagcagcuucgagagauucgagaucuuccccaagaccagcagcuggcccaaccacgacagcaacaagggcgugaccgccgccugcccccacgccggcgccaagagcuucuacaagaaccugaucuggcuggugaagaagggcaacagcuaccccaagcugagcaagagcuacaucaacgacaagggcaaggaggugcuggugcuguggggcauccaccaccccagcaccaccgccgaccagcagagccuguaccagaacgccgacgccuacguguucgugggcaccagcagauacagcaagaaguucaagcccgagaucgccaucagacccaaggugagagaccaggagggcagaaugaacuacuacuggacccugguggagcccggcgacaagaucaccuucgaggccaccggcaaccugguggugcccagauacgccuucgccauggagagaaacgccggcagcggcaucaucaucagcgacacccccgugcacgacugcaacaccaccugccagacccccaagggcgccaucaacaccagccugcccuuccagaacauccaccccaucaccaucggcaagugccccaaguacgugaagagcaccaagcugagacuggccaccggccugagaaacgugcccagcauccagagcagaggccuguucggcgccaucgccggcuucaucgagggcggcuggaccggcaugguggacggcugguacggcuaccaccaccagaacgagcagggcagcggcuacgccgccgaccugaagagcacccagaacgccaucgacaagaucaccaacaaggugaacagcgugaucgagaagaugaacacccaguucaccgccgugggcaaggaguucaaccaccuggagaagagaaucgagaaccugaacaagaagguggacgacggcuuccuggacaucuggaccuacaacgccgagcugcuggugcugcuggagaacgagagaacccuggacuaccacgacagcaacgugaagaaccuguacgagaaggugagaaaccagcugaagaacaacgccaaggagaucggcaacggcugcuucgaguucuaccacaagugcaacaacaccugcauggagagcgugaagaacggcaccuacgacuaccccaaguacagcgaggaggccaagcugaacagagaggagaucgacggcgugaagcuggagagcaccagaaucuaccagauccuggccaucuacagcaccguggccagcagccuggugcugguggugagccugggcgccaucagcuucuggaugugcagcaacggcagccugcagugcagaaucugcaucuga

SEQ ID NO: 169881 - RNA, 1701 nt, Artificial Sequence
  derived and/or modified CDS sequence (opt4) from hemagglutinin__InfluenzaA__AGB13590
augaaggccauccugguggugcugcuguacaccuucgccaccgccaacgccgacacccugugcaucggcuaccacgccaacaacagcaccgacaccguggacaccgugcuggagaagaacgugaccgugacccacagcgugaaccugcuggaggacaagcacaacggcaagcugugcaagcugagaggcguggccccccugcaccugggcaagugcaacaucgccggcuggauccugggcaaccccgagugcgagagccugagcaccgccagcagcuggagcuacaucguggagaccagcagcagcgacaacggcaccugcuaccccggcgacuucaucaacuacgaggagcugagagagcagcugagcagcgugagcagcuucgagagauucgagaucuuccccaagaccagcagcuggcccaaccacgacagcaacaagggcgugaccgccgccugcccccacgccggcgccaagagcuucuacaagaaccugaucuggcuggugaagaagggcaacagcuaccccaagcugagccagagcuacaucaacgacaagggcaaggaggugcuggugcuguggggcauccaccaccccagcaccaccgccgaccagcagagccuguaccagaacgccgacgccuacguguucgugggcaccagcagauacagcaagaaguucaagcccgagaucgccaucagacccaaggugagagaccaggagggcagaaugaacuacuacuggacccugguggagcccggcgacaagaucaccuucgaggccaccggcaaccugguggugcccagauacgccuucgccauggagagaaacgccggcagcggcaucaucaucagcgacacccccgugcacgacugcaacaccaccugccagacccccaagggcgccaucaacaccagccugcccuuccagaacauccaccccaucaccaucggcaagugccccaaguacgugaagagcaccaagcugagacuggccaccggccugagaaacgugcccagcauccagagcagaggccuguucggcgccaucgccggcuucaucgagggcggcuggaccggcaugguggacggcugguacggcuaccaccaccagaacgagcagggcagcggcuacgccgccgaccugaagagcacccagaacgccaucgacaagaucaccaacaaggugaacagcgugaucgagaagaugaacacccaguucaccgccgugggcaaggaguucaaccaccuggagaagagaaucgagaaccugaacaagaagguggacgacggcuuccuggacaucuggaccuacaacgccgagcugcuggugcugcuggagaacgagagaacccuggacuaccacgacagcaacgugaagaaccuguacgagaaggugagaaaccagcugaagaacaacgccaaggagaucggcaacggcugcuucgaguucuaccacaagugcgacaacaccugcauggagagcgugaagaacggcaccuacgacuaccccaaguacagcgaggaggccaagcugaacagagaggagaucgacggcgugaagcuggagagcaccagaaucuaccagauccuggccaucuacagcaccguggccagcagccuggugcugguggugagccugggcgccaucagcuucuggaugugcagcaacggcagccugcagugcagaaucugcaucuga

SEQ ID NO: 169882 - RNA, 1701 nt, Artificial Sequence
  derived and/or modified CDS sequence (opt4) from hemagglutinin__InfluenzaA__AGB13600
augaaggccauccugguggugcugcuguacaccuucgccaccgccaacgccgacacccugugcaucggcuaccacgccaacaacagcaccgacaccguggacaccgugcuggagaagaacgugaccgugacccacagcgugaaccugcuggaggacaagcacaacggcaagcugugcaagcugagaggcguggccccccugcaccugggcaagugcaacaucgccggcuggauccugggcaaccccgagugcgagagccugagcaccgccagcagcuggagcuacaucguggagaccagcagcagcgacaacggcaccugcuaccccggcgacuucaucaacuacgaggagcugagagagcagcugagcagcgugagcagcuucgagagauucgagaucuuccccaagaccagcagcuggcccaaccacgacagcaacaagggcgugaccgccgccugcccccacgccggcgccaagagcuucuacaagaaccugaucuggcuggugaagaagggcaacagcuaccccaagcugaacaagagcuacaucaacgacaagggcaaggaggugcuggugcuguggggcauccaccaccccagcaccaccgccgaccagcagagccuguaccagaacgccgacgccuacguguucgugggcaccagcagauacagcaagaaguucaagcccgagaucgccaucagacccaaggugagagaccaggagggcagaaugaacuacuacuggacccugguggagcccggcgacaagaucaccuucgaggccaccggcaaccugguggugcccagauacgccuucgccauggagagaaacgccggcagcggcaucaucaucagcgacacccccgugcacgacugcaacaccaccugccagacccccaagggcgccaucaacaccagccugcccuuccagaacauccaccccaucaccaucggcaagugccccaaguacgugaagagcaccaagcugagacuggccaccggccugagaaacgugcccagcauccagagcagaggccuguucggcgccaucgccggcuucaucgagggcggcuggaccggcaugguggacggcugguacggcuaccaccaccagaacgagcagggcagcggcuacgccgccgaccugaagagcacccagaacgccaucgacaagaucaccaacaaggugaacagcgugaucgagaagaugaacacccaguucaccgccgugggcaaggaguucaaccaccuggagaagagaaucgagaaccugaacaagaagguggacgacggcuuccuggacaucuggaccuacaacgccgagcugcuggugcugcuggagaacgagagaacccuggacuaccacgacagcaacgugaagaaccuguacgagaaggugagaaaccagcugaagaacaacgccaaggagaucggcaacggcugcuucgaguucuaccacaagugcgacaacaccugcauggagagcgugaagaacggcaccuacgacuaccccaaguacagcgaggaggccaagcugaacagagaggagaucgacggcgugaagcuggagagcaccagaaucuaccagauccuggccaucuacagcaccguggccagcagccuggugcugguggugagccugggcgccaucagcuucuggaugugcagcaacggcagccugcagugcagaaucugcaucuga

SEQ ID NO: 169883 - RNA, 1701 nt, Artificial Sequence; identical to SEQ ID NO: 166927
  derived and/or modified CDS sequence (opt4) from hemagglutinin__InfluenzaA__AGB13610

SEQ ID NO: 169884 - RNA, 1701 nt, Artificial Sequence; identical to SEQ ID NO: 167146
  derived and/or modified CDS sequence (opt4) from hemagglutinin__InfluenzaA__AGB13620

SEQ ID NO: 169885 - RNA, 1701 nt, Artificial Sequence; identical to SEQ ID NO: 166514
  derived and/or modified CDS sequence (opt4) from hemagglutinin__InfluenzaA__AGB13630

SEQ ID NO: 169886 - RNA, 1701 nt, Artificial Sequence
  derived and/or modified CDS sequence (opt4) from hemagglutinin__InfluenzaA__AGB13640
augaaggccauccugguggugcugcuguacaccuucgccaccgccaacgccgacacccugugcaucggcuaccacgccaacaacagcaccgacaccguggacaccgugcuggagaagaacgugaccgugacccacagcgugaaccugcuggaggacaagcacaacggcaagcugugcaagcugagaggcguggccccccugcaccugggcaagugcaacaucgccggcuggauccugggcaaccccgagugcgagagccugagcaccgccagcagcuggagcuacaucguggagaccagcagcagcgacaacggcaccugcuaccccggcgacuucaucgacuacgaggagcugagagagcagcugagcagcgugagcagcuucgagagauucgagaucuuccccaagaccagcagcuggcccaaccacgacagcaacaagggcgugaccaccgccugcccccacgccggcgccaagagcuucuacaagaaccugaucuggcuggugaagaagggcaacagcuaccccaagcugagcaagagcuacaucaacgacaagggcaaggaggugcuggugcuguggggcauccaccacccccccaccagcgccgaccagcagagccuguaccagaacgccgacgccuacguguucgugggcaccagcagauacagcaagaaguucaagcccgagaucgccaucagacccaaggugagagaccaggagggcagaaugaacuacuacuggacccugguggagcccggcgacaagaucaccuucgaggccaccggcaaccugguggugcccagauacgccuucgccauggagagaaacgccggcagcggcaucaucaucagcgacacccccgugcacgacugcaacaccaccugccagacccccaagggcgccaucaacaccagccugcccuuccagaacauccaccccaucaccaucggcaagugccccaaguacgugaagagcaccaagcugagacuggccaccggccugagaaacgugcccagcauccagagcagaggccuguucggcgccaucgccggcuucaucgagggcggcuggaccggcaugguggacggcugguacggcuaccaccaccagaacgagcagggcagcggcuacgccgccgaccugaagagcacccagaacgccaucgacggcaucaccaacaaggugaacagcgugaucgagaagaugaacacccaguucaccgccgugggcaaggaguucaaccaccuggagaagagaaucgagaaccugaacaagaagguggacgacggcuuccuggacaucuggaccuacaacgccgagcugcuggugcugcuggagaacgagagaacccuggacuaccacgacagcaacgugaagaaccuguacgagaaggugagaagccagcugaagaacaacgccaaggagaucggcaacggcugcuucgaguucuaccacaagugcgacaacaccugcauggagagcgugaagaacggcaccuacgacuaccccaaguacagcgaggaggccaagcugaacagagaggagaucgacggcgugaagcuggagagcaccaugaucuaccagauccuggccaucuacagcaccguggccagcagccuggugcugaucgugagccugggcgccaucagcuucuggaugugcagcaacggcagccugcagugcagaaucugcaucuga

SEQ ID NO: 169887 - RNA, 1701 nt, Artificial Sequence
  derived and/or modified CDS sequence (opt4) from hemagglutinin__InfluenzaA__AGB13650
augaaggccauccugguggugcugcuguacaccuucgccaccgccaacgccgacacccugugcaucggcuaccacgccaacaacagcaccgacaccguggacaccgugcuggagaagaacgugaccgugacccacagcgugaaccugcuggaggacaagcacaacggcaagcugugcaagcugagaggcguggccccccugcaccugggcaagugcaacaucgccggcuggauccugggcaaccccgagugcgagagccugagcaccgccagcagcuggagcuacaucguggagaccagcagcagcgacaacggcaccugcuaccccggcgacuucaucgacuacgaggagcugagagagcagcugagcagcgugagcagcuucgagagauucgagaucuuccccaagaccagcagcuggcccaaccacgacagcaacaagggcgugaccaccgccugcccccacgccggcgccaagagcuucuacaagaaccugaucuggcuggugaagaagggcaacagcuaccccaagcugagcaagagcuacaucaacgacaagggcaaggaggugcuggugcuguggggcauccaccacccccccaccagcgccgaccagcagagccuguaccagaacgccgacgccuacguguucgugggcaccagcagauacagcaagaaguucaagcccgagaucgccaucagacccaaggugagagaccaggagggcagaaugaacuacuacuggacccugguggagcccggcgacaagaucaccuucgaggccaccggcaaccugguggugcccagauacgccuucgccauggagagaaacgccggcagcggcaucaucaucagcgacacccccgugcacgacugcaacaccaccugccagacccccaagggcgccaucaacaccagccugcccuuccagaacauccaccccaucaccaucggcaagugccccaaguacgugaagagcaccaagcugagacuggccaccggccugagaaacgugcccagcauccagagcagaggccuguucggcgccaucgccggcuucaucgagggcggcuggaccggcaugguggacggcugguacggcuaccaccaccagaacgagcagggcagcggcuacgccgccgaccugaagagcacccagaacgccaucgacggcaucaccaacaaggugaacagcgugaucgagaagaugaacacccaguucaccgccgugggcaaggaguucaaccaccuggagaagagaaucgagaaccugaacaagaagguggacgacggcuuccuggacaucuggaccuacaacgccgagcugcugauccugcuggagaacgagagaacccuggacuaccacgacagcaacgugaagaaccuguacgagaaggugagaagccagcugaagaacaacgccaaggagaucggcaacggcugcuucgaguucuaccacaagugcgacaacaccugcauggagagcgugaagaacggcaccuacgacuaccccaaguacagcgaggaggccaagcugaacagagaggagaucgacggcgugaagcuggagagcaccaugaucuaccagauccuggccaucuacagcaccguggccagcagccuggugcugaucgugagccugggcgccaucagcuucuggaugugcagcaacggcagccugcagugcagaaucugcaucuga

SEQ ID NO: 169888 - RNA, 1701 nt, Artificial Sequence; identical to SEQ ID NO: 166884
  derived and/or modified CDS sequence (opt4) from hemagglutinin__InfluenzaA__AGB13660

SEQ ID NO: 169889 - RNA, 1701 nt, Artificial Sequence; identical to SEQ ID NO: 166495
  derived and/or modified CDS sequence (opt4) from hemagglutinin__InfluenzaA__AGB13721

SEQ ID NO: 169890 - RNA, 1701 nt, Artificial Sequence; identical to SEQ ID NO: 166927
  derived and/or modified CDS sequence (opt4) from hemagglutinin__InfluenzaA__AGB13731

SEQ ID NO: 169891 - RNA, 1701 nt, Artificial Sequence
  derived and/or modified CDS sequence (opt4) from hemagglutinin__InfluenzaA__AGB51356
augaaggccauccugcuggugcugcugugcaccuucgccgccaccaacgccgacacccugugcaucggcuaccacgccaacaacagcaccgacaccguggacaccgugcuggagaagaacgugaccgugacccacagcgugaaccugcuggaggacagacacaacggcaagcugugcaagcugggcggcaucgccccccugcaccugggcaagugcaacaucgccggcuggcugcugggcaaccccgagugcgagcugcugcugaccgugagcagcuggagcuacaucguggagaccagcaacagcgacaacggcaccugcuaccccggcgacuucaucaacuacgaggagcugagagagcagcugagcagcgugagcagcuucgagagauucgagaucuuccccaagaccagcagcuggcccaaccacgagaccaacagaggcgugaccgccgccugccccuacgccggcgccaacagcuucuacagaaaccugaucuggcugguggagaagggcaacagcuaccccaagcugagcaagagcuacgugaacaacaagggcaaggaggugcuggugcuguggggcauccaccacccccccaccagcaccgaccagcagagccuguaccagaacgccgacgccuacguguucgugggcagcagcaaguacaacagaaaguucaagcccgagaucgccgccagacccaaggugagaggccaggccggcagaaugaacuacuacuggacccugaucgagcccggcgacaccaucaccuucgaggccaccggcaaccugguggugcccagauacgccuucgccaugaacagaggcagcggcagcggcaucaucaucagcgacgcccccgugcacgacugcaacaccaagugccagacccccaagggcgccaucaacaccagccugcccuuccagaacauccaccccgugaccaucggcgagugccccaaguacgugaagagcaccaagcugagaauggccaccggccugagaaacauccccagcauccagagcagaggccuguucggcgccaucgccggcuucaucgagggcggcuggaccggcaugaucgacggcugguacggcuaccaccaccagaacgagcagggcagcggcuacgccgccgaccagagaagcacccagaacgccaucgacggcaucaccaacaaggugaacagcgugaucgagaagaugaacacccaguucaccgccgugggcaaggaguucaaccaccuggagaagagaaucgagaaccugaacaagaagguggacgacggcuuccuggacaucuggaccuacaacgccgagcugcuggugcugcuggagaacgagagaacccuggacuuccacgacagcaacgugaagaaccuguacgagaaggugagaagccagcugagaaacaacgccaaggagaucggcaacggcugcuucgaguucuaccacaagugcgacgacaccugcauggagagcgugaagaacggcaccuacgacuaccccaaguacagcgaggagagcaagcugaacagagaggagaucgacggcgugaagcuggagagcaccagaaucuaccagauccuggccaucuacagcaccguggccagcagccuggugcugcuggugagccugggcgccaucagcuucuggaugugcagcaacggcagccugcagugcagaaucugcaucuga

SEQ ID NO: 169892 - RNA, 1701 nt, Artificial Sequence
  derived and/or modified CDS sequence (opt4) from hemagglutinin__InfluenzaA__AGB97269
augaaggccauccugguggugcugcuguacaccuucgccaccgccaacgccgacacccugugcaucggcuaccacgccaacaacagcaccgacaccguggacaccgugcuggagaagaacaucaccgugacccacagcgugaaccugcuggaggacaagcacaacggcaagcugugcaagcugagaggcguggccccccugcaccugggcaagugcaacaucgccggcuggauccugggcaaccccgagugcgagacccugagcaccgccagcagcuggagcuacaucguggagaccagcagcagcgacaacggcaccugcuaccccggcgacuucaucgacuacgaggagcugagagagcagcugagcagcgugagcagcuucgagagauucgagaucuuccccaagaccagcagcuggcccaaccacgacagcaacaagggcgugaccgccgccugcccccacgccggcgccaagggcuucuacaagaaccugaucuggcuggugaagaagggcaacagcuaccccaagcugagcaagagcuacaucaacgacaagggcaaggaggugcuggugcuguggggcauccaccaccccagcaccaccgccgaccagcagagccuguaccagaacgccgacaccuacguguucgugggcaccagcagauacagcaagaaguucaagcccgagaucgccaucagacccaaggugagagaccaggagggcagaaugaacuacuacuggacccugguggagcccggcgacaagaucaccuucgaggccaccggcaaccugguggugcccagauacgccuucgccauggagagagacgccggcagcggcaucaucaucagcgacacccccgugcacgacugcaacaccaccugccagacccccaagggcgccaucaacaccagccugcccuuccagaacauccaccccaucaccaucggcaagugccccaaguacgugaagagcaccaagcugagacuggccaccggccugagaaacgugcccagcauccagagcagaggccuguucggcgccaucgccggcuucaucgagggcggcuggaccggcaugguggacggcugguacggcuaccaccaccagaacgagcagggcagcggcuacgccgccgaccugaagagcacccagaacgccaucgacaagaucaccaacaaggugaacagcgugaucgagaagaugaacacccaguucaccgccgugggcaaggaguucaaccaccuggagaagagaaucgagaaccugaacaagaagguggacgacggcuuccuggacaucuggaccuacaacgccgagcugcuggugcugcuggagaacgagagaacccuggacuaccacgacagcaacgugaagaaccuguacgagaaggugagaaaccagcugaagaacaacgccaaggagaucggcaacggcugcuucgaguucuaccacaagugcgacaacaccugcauggagagcgugaagaacggcaccuacgacuaccccaaguacagcgaggaggccaagcugaacagagaggagaucgacggcgugaagcuggagagcaccagaaucuaccagauccuggccaucuacagcaccgccgccagcagccuggugcugguggugagccugggcgccaucagcuucuggaugugcagcaacggcagccugcagugcagaaucugcaucuga

SEQ ID NO: 169893 - RNA, 1701 nt, Artificial Sequence; identical to SEQ ID NO: 168246
  derived and/or modified CDS sequence (opt4) from hemagglutinin__InfluenzaA__AGB97273

SEQ ID NO: 169894 - RNA, 1701 nt, Artificial Sequence
  derived and/or modified CDS sequence (opt4) from hemagglutinin__InfluenzaA__AGB97288
augaagaccaucaucgcccugggcuacauccugugccugguguucgcccagaagcugcccggcaacgacaacagcaccgccacccugugccugggccaccacgccgugcccaacggcaccaucgugaagaccaucaccaacgacagaaucgaggugaccaacgccaccgagcuggugcagaacagcagcaucggcgagaucugcgacagcccccaccagauccuggacggcaagaacugcacccugaucgacgcccugcugggcgacccccagugcgacggcuuccagaacaagaagugggaccuguucaucgagagaagcaaggccuacagcaacugcuaccccuacgacgugcccgacuacgccagccugagaagccugguggccagcagcggcacccuggaguucaacaacgagagcuucaacuggaccggcgugacccagaacggcaccagcagcgccugcaucagaagaagcaacagcagcuucuucagcagacugaacuggcugacccaccugaacuucaaguaccccgcccugaacgugaccaugcccaacaacgagcaguucgacaagcuguacaucuggggcgugcaccaccccggcaccgacaaggaccagaucuuccuguacgccaagagcagcggcagaaucaccgugagcaccaagagaagccagcaggccgugauccccaacaucggcagcagacccagaaucagaaacauccccagcagaaucagcaucuacuggaccaucgugaagcccggcgacauccugcugaucaacagcaccggcaaccugaucgcccccagaggcuacuucaagaucagaagcggcaagagcagcaucaugagaagcgacgcccccaucggcaagugcaagagcgagugcaucacccccaacggcagcauccccaacgacaagcccuuccagaacgugaacagaaucaccuacggcgccugccccagauacgugaagcagagcacccugaagcuggccaccggcaugagaaacgugcccgagaagcagaccagaggcaucuucggcgccaucgccggcuucaucgagaacggcugggagggcaugguggacggcugguacggcuucagacaccagaacagcgagggcagaggccaggccgccgaccugaagagcacccaggccgccaucgaccagaucaacggcaagcugaacagacugaucggcaagaccaacgagaaguuccaccagaucgagaaggaguucagcgagguggagggcagaauccaggaccuggagaaguacguggaggacaccaagaucgaccuguggagcuacaacgccgagcugcugguggcccuggagaaccagcacaccaucgaccugaccgacagcgagaugaacaagcuguucgagaagaccaagaagcagcugagagagaacgccgaggacaugggcaacggcugcuucaagaucuaccacaagugcgacaacgccugcaucggcagcaucagaaacggcaccuacgaccacaacguguacagagacgaggcccugaacaacagauuccagaucaagggcguggagcugaagagcggcuacaaggacuggauccuguggaucagcuucgccaucagcugcuuccugcugugcguggcccugcugggcuucaucaugugggccugccagaagggcaacaucagaugcaacaucugcaucuga

SEQ ID NO: 169895 - RNA, 1701 nt, Artificial Sequence
  derived and/or modified CDS sequence (opt4) from hemagglutinin__InfluenzaA__AGB97292
augaagaccaucaucgcccugagcuacauccugugccugguguucgcccaggagcugcccggcaacgacgacagcaccgccacccugugccugggccaccacgccgugcccaacggcaccaucgugaagaccaucaccaacgaccagaucgaggugaccaacgccaccgagcuggugcagagcagcagcaccggcgagaucugcaacagcccccaccagauccuggacggcgagaacugcacccugaucgacgcccugcugggcgacccccagugcgacggcuuccagaacaagaagugggaccuguucguggagagaagcaaggcccacagcaacugcuaccccuacgacgugcccgacuacgccagccugagaagccugguggccagcagcggcacccuggaguucaacaacgagagcuucaacuggaccggcgugacccagaacggcaccagcagcgccugcaucagaagaagcaacaacagcuucuucagcagacugaacuggcugacccaccugaacuucaaguaccccgcccugaacgugaccaugcccaacaacgagcaguucgacaagcuguacaucuggggcgugcaccaccccggcaccgacaaggaccagaucuuccuguacgcccaggccagcggcagaaucaccgugagcaccaagagaagccagcaggccgugauccccaacaucggcagcagacccagagugagaaacauccccagcagagugagcaucuacuggaccaucgugaagcccggcgacauccugcugaucaacagcaccggcaaccugaucgcccccagaggcuacuucaagaucagaagcggcaagagcagcaucaugagaagcgacgcccccaucggcaagugcaacagcgccugcaucacccccaacggcagcauccccaacgacaagcccuuccagaacgugaacagaaucaccuacggcgccugccccagauacgugaagcagaacacccugaagcuggccaccggcaugagaaacgugcccgagaagcagaccagaggcaucuucggcgccaucgccggcuucaucgagaacggcugggagggcaugguggacggcugguacggcuucagacaccagaacagcgagggcagaggccaggccgccgaccugaagagcacccaggccgccaucgaccagaucaacggcaagcugaacagacugaucggcaagaccaacgagaaguuccaccagaucgagaaggaguucagcgagguggagggcagaauccaggaccuggagaaguacguggaggacaccaagaucgaccuguggagcuacaacgccgagcugcugguggcccuggagaaccagcacaccaucgaccugaccgacagcgagaugaacaagcuguucgagaagaccaagaagcagcugagagagaacgccgaggacaugggcaacggcugcuucaagaucuaccacaagugcgacaacgccugcaucggcagcaucagaaacggcaccuacgaccacgacguguacagagacgaggcccugaacaacagauuccagaucaagggcguggagcugaagagcggcuacaaggacuggauccuguggaucagcuucgccaucagcugcuuccugcugugcguggcccugcugggcuucaucaugugggccugccagaagggcaacaucagaugcaacaucugcaucuga

SEQ ID NO: 169896 - RNA, 1701 nt, Artificial Sequence
  derived and/or modified CDS sequence (opt4) from hemagglutinin__InfluenzaA__AGB97300
augaagaccaucaucgcccugagcuacauccugugccugguguucgcccagaagcugcccggcaacgacaacagcaccgccacccugugccugggccaccacgccgugcccaacggcaccaucgugaagaccaucaccaacgacagaaucgaggugaccaacgccaccgagcuggugcagaacagcagcaucggcgagaucugcgacagcccccaccagauccuggacggcgagaacugcacccugaucgacgcccugcugggcgacccccagugcgacggcuuccagaacaagaagugggaccuguucguggagagaagcaaggccuacagcaacugcuaccccuacgacgugcccgacuacgccagccugagaagccugguggccagcagcggcacccuggaguucaacaacgagagcuucaacuggaccggcgugacccagaacggcaccagcagcgccugcaucagaagaagcaacagcagcuucuucagcagacugaacuggcugacccaccugaacuucaaguaccccgcccugaacgugaccaugcccaacaacgagcaguucgacaagcuguacaucuggggcgugcaccaccccggcaccgacaaggaccagaucuuccuguacgcccagagcagcggcagaaucaccgugagcaccaagagaagccagcaggccgugauccccaacaucggcagcagacccagaaucagaaacauccccagcagaaucagcaucuacuggaccaucgugaagcccggcgacauccugcugaucaacagcaccggcaaccugaucgcccccagaggcuacuucaagaucagaagcggcaagagcagcaucaugagaagcgacgcccccaucggcaagugcaagagcgagugcaucacccccaacggcagcauccccaacgacaagcccuuccagaacgugaacagaaucaccuacggcgccugccccagauacgugaagcagagcacccugaagcuggccaccggcaugagaaacgugcccgagaagcagaccagaggcaucuucggcgccaucgccggcuucaucgagaacggcugggagggcaugguggacggcugguacggcuucagacaccagaacagcgagggcagaggccaggccgccgaccugaagagcacccaggccgccaucgaccagaucaacggcaagcugaacagacugaucggcaagaccaacgagaaguuccaccagaucgagaaggaguucagcgagguggagggcagaauccaggaccuggagaaguacguggaggacaccaagaucgaccuguggagcuacaacgccgagcugcugguggcccuggagaaccagcacaccaucgaccugaccgacagcgagaugaacaagcuguucgagaagaccagaaagcagcugagagagaacgccgaggacaugggcaacggcugcuucaagaucuaccacaagugcgacaacgccugcaucggcagcaucagaaacggcaccuacgaccacgacguguacagagacgaggcccugaacaacagauuccagaucaagggcguggagcugaagagcggcuacaaggacuggauccuguggaucagcuucgccaucagcugcuuccugcugugcguggcccugcugggcuucaucaugugggccugccagaagggcaacaucagaugcaacaucugcaucuga

SEQ ID NO: 169897 - RNA, 1701 nt, Artificial Sequence
  derived and/or modified CDS sequence (opt4) from hemagglutinin__InfluenzaA__AGE89267
augaaggccauccugaucgugcugcuguacaccuucgccaccgccaacgccgacacccugugcaucggcuaccacgccaacaacagcaccgacaccguggacaccgugcuggagaagaacgugaccgugacccacagcguggaccugcuggaggacaagcacaacggcaagcugugcaagcugagaggcguggccccccugcaccugggcaagugcaacaucgccggcuggauccugggcaaccccgagugcgagagccugagcaccgccagcagcuggagcuacaucguggagaccagcagcagcgacaacggcaccugcuaccccggcgacuucaucgacuacgaggagcugagagagcagcugagcagcgugagcagcuucgagagauucgagaucuuccccaagaccagcagcuggcccaaccacgacagcaacaagggcgugaccgccgccugcccccacgccggcgagaagagcuucuacaagaaccugaucuggcuggugaagaagggcaacagcuaccccaagcugaacaagagcuacaucaacgacaagggcaaggaggugcuggugcuguggggcauccaccaccccagcaccagcaccgaccagcagagccuguaccagaacgccgacgccuacguguucgugggcaccagcagauacagcaagaaguucaagcccgagaucgccaucagacccaaggugagagaccaggagggcagaaugaacuacuacuggacccugguggagcccggcgacaagaucaccuucgaggccaccggcaaccugguggugcccagauacgccuucgccauggagagaaacgccggcagcggcaucaucaucagcgacacccccauccacgacugcaacaccaccugccagacccccaagggcgccaucaacaccagccugcccuuccagaacauccaccccaucaccaucggcaagugccccaaguacgugaagagcaccaagcugagacuggccaccggccugagaaacgugcccagcauccagagcagaggccuguucggcgccaucgccggcuucaucgagggcggcuggaccggcaugguggacggcugguacggcuaccaccaccagaacgagcagggcagcggcuacgccgccgaccugaagagcacccagaacgccaucgacgagaucaccaacaaggugaacagcgugaucgagaagaugaacacccaguucaccgccgugggcaaggaguucaaccaccuggagaagagaaucgagaaccugaacaagaagguggacgacggcuuccuggacaucuggaccuacaacgccgagcugcuggugcugcuggagaacgagagaacccuggacuaccacgacagcaacgugaagaaccuguacgagaaggugaagagccagcugaagaacaacgccaaggagaucggcaacggcugcuucgaguucuaccacaagugcgacaacaccugcauggagagcgugaagaacggcaccuacgacuaccccaaguacagcgaggaggccaagcugaacagagagaagaucgacggcgugaagcuggagagcaccagaaucuaccagauccuggccaucuacagcaccguggccagcagccuggugcugguggugagccugggcgccaucagcuucuggaugugcagcaacggcagccugcagugcagaaucugcaucuga

SEQ ID NO: 169898 - RNA, 1701 nt, Artificial Sequence
  derived and/or modified CDS sequence (opt4) from hemagglutinin__InfluenzaA__AGE89277
augaaggccauccugaucgugcugcuguacaccuucgccaccgccaacgccgacacccugugcaucggcuaccacgccaacaacagcaccgacaccguggacaccgugcuggagaagaacgugaccgugacccacagcguggaccugcuggaggacaagcacaacggcaagcugugcaagcugagaggcguggccccccugcaccugggcaagugcaacaucgccggcuggauccugggcaaccccgagugcgagagccugagcaccgccagcagcuggagcuacaucguggagaccagcagcagcgacaacggcaccugcuaccccggcgacuucaucgacuacgaggagcugagagagcagcugaacagcgugagcagcuucgagagauucgagaucuuccccaagaccagcagcuggcccaaccacgacagcaacaagggcgugaccgccgccugcccccacgccggcgagaagagcuucuacaagaaccugaucuggcuggugaagaagggcaacagcuaccccaagcugaacaagagcuacaucaacgacaagggcaaggaggugcuggugcuguggggcauccaccaccccagcaccagcaccgaccagcagagccuguaccagaacgccgacgccuacguguucgugggcaccagcagauacagcaagaaguucaagcccgagaucgccaucagacccaaggugagagaccaggagggcagaaugaacuacuacuggacccugguggagcccggcgacaagaucaccuucgaggccaccggcaaccugguggugcccagauacgccuucgccauggagagaaacgccggcagcggcaucaucaucagcgacacccccauccacgacugcaacaccaccugccagacccccaagggcgccaucaacaccagccugcccuuccagaacauccaccccaucaccaucggcaagugccccaaguacgugaagagcaccaagcugagacuggccaccggccugagaaacgugcccagcauccagagcagaggccuguucggcgccaucgccggcuucaucgagggcggcuggaccggcaugguggacggcugguacggcuaccaccaccagaacgagcagggcagcggcuacgccgccgaccugaagagcacccagaacgccaucgacgagaucaccaacaaggugaacagcgugaucgagaagaugaacacccaguucaccgccgugggcaaggaguucaaccaccuggagaagagaaucgagaaccugaacaagaagguggacgacggcuuccuggacaucuggaccuacaacgccgagcugcuggugcugcuggagaacgagagaacccuggacuaccacgacagcaacgugaagaaccuguacgagaaggugaagagccagcugaagaacaacgccaaggagaucggcaacggcugcuucgaguucuaccacaagugcgacaacaccugcauggagagcgugaagaacggcaccuacgacuaccccaaguacagcgaggaggccaagcugaacagagagaagaucgacggcgugaagcuggagagcaccagaaucuaccagauccuggccaucuacagcaccguggccagcagccuggugcugguggugagccugggcgccaucagcuucuggaugugcagcaacggcagccugcagugcagaaucugcaucuga

SEQ ID NO: 169899 - RNA, 1701 nt, Artificial Sequence; identical to SEQ ID NO: 168416
  derived and/or modified CDS sequence (opt4) from hemagglutinin__InfluenzaA__AGE89287

SEQ ID NO: 169900 - RNA, 1701 nt, Artificial Sequence
  derived and/or modified CDS sequence (opt4) from hemagglutinin__InfluenzaA__AGE89298
augaaggccauccugguggugcugcuguacaccuucgccaccgccaacgccgacacccugugcaucggcuaccacgccaacaacagcaccgacaccguggacaccgugcuggagaagaacgugaccgugacccacagcgugaaccugcuggaggacaagcacaacggcaagcugugcaagcugagaggcguggccccccugcaccugggcaagugcaacaucgccggcuggauccugggcaaccccgagugcgagagccugagcaccgccagcagcuggagcuacaucguggagaccagcagcagcgacaacggcaccugcuaccccggcgacuucaucgacuacgaggagcugagagagcagcugagcagcgugagcagcuucgagagauucgagaucuuccccaagaccagcagcuggcccaaccacgacagcaacaagggcgugaccgccgccugcccccacgccggcgccaagggcuucuacaagaaccugaucuggcuggugaagaagggcaacagcuaccccaagcugagcaagagcuacaucaacgacaagggcaaggaggugcuggugcuguggggcauccaccaccccagcaccaccgccgaccagcagagccuguaccagaacgccgacaccuacguguucgugggcaccagcagauacagcaagaaguucaagcccgagaucgccaucagacccaaggugagagaccaggagggcagaaugaacuacuacuggacccugguggagcccggcgacaagaucaccuucgaggccaccggcaaccugguggugcccagauacgccuucgccauggagagaaacgccggcagcggcaucaucaucagcgacacccccgugcacgacugcaacaccaccugccagacccccaagggcgccaucaacaccagccugcccuuccagaacauccaccccaucaccaucggcaagugccccaaguacgugaagagcaccaagcugagacuggccaccggccugagaaacgugcccagcauccagagcagaggccuguucggcgccaucgccggcuucaucgagggcggcuggaccggcaugguggacggcugguacggcuaccaccaccagaacgagcagggcagcggcuacgccgccgaccugaagagcacccagaacgccaucgacaagaucaccaacaaggugaacagcgugaucgagaagaugaacacccaguucaccgccgugggcaaggaguucaaccaccuggagaagagaaucgagaaccugaacaagaagguggacgacggcuuccuggacaucuggaccuacaacgccgagcugcuggugcugcuggagaacgagagaacccuggacuaccacgacagcaacgugaagaaccuguacgagaaggugagaaaccagcugaagaacaacgccaaggagaucggcaacggcugcuucgaguucuaccacaagugcgacaacaccugcauggagagcgugaagaacggcaccuacgacuaccccaaguacagcgaggaggccaagcugaacagagaggagaucgacggcgugaagcuggagagcaccagaaucuaccagauccuggccaucuacagcaccguggccagcagccugauccugguggugagccugggcgccaucagcuucuggaugugcagcaacggcagccugcagugcagaaucugcaucuga

SEQ ID NO: 169901 - RNA, 1701 nt, Artificial Sequence; identical to SEQ ID NO: 166969
  derived and/or modified CDS sequence (opt4) from hemagglutinin__InfluenzaA__AGE89308

SEQ ID NO: 169902 - RNA, 1701 nt, Artificial Sequence; identical to SEQ ID NO: 168411
  derived and/or modified CDS sequence (opt4) from hemagglutinin__InfluenzaA__AGE89318

SEQ ID NO: 169903 - RNA, 1701 nt, Artificial Sequence
  derived and/or modified CDS sequence (opt4) from hemagglutinin__InfluenzaA__AGE89329
augaagaccaucaucgcccugagcuacauccugugccugguguucgcccagaagcugcccggcaacgacgacagcaccgccacccugugccugggccaccacgccgugcccaacggcaccaucgugaagaccaucaccaacgaccagaucgaggugaccaacgccaccgagcuggugcagagcagcagcaccggcgagaucugcaacagcccccaccagauccuggacggcgagaacugcacccugaucgacgcccugcugggcgacccccagugcgacggcuuccagaacaagaagugggaccuguucguggagagaagcaaggcccacagcaacugcuaccccuacgacgugcccgacuacgccagccugagaagccugguggccagcagcggcacccuggaguucaacaacgagagcuucaacuggaccggcgugacccagaacggcaccagcagcgccugcaucagaagaagcaacaacagcuucuucagcagacugaacuggcugacccaccugaacuucaaguaccccgcccugaacgugaccaugcccaacaacgagcaguucgacaagcuguacaucuggggcgugcaccaccccggcaccgacaaggaccagaucuuccuguacgcccaggccagcggcagaaucaccgugagcaccaagagaagccagcaggccgugauccccaacaucggcagcagacccagagugagaaacauccccagcagagugagcaucuacuggaccaucgugaagcccggcgacauccugcugaucaacagcaccggcaaccugaucgcccccagaggcuacuucaagaucagaagcggcaagagcagcaucaugagaagcgacgcccccaucggcaagugcaacagcgccugcaucacccccaacggcagcauccccaacgacaagcccuuccagaacgugaacagaaucaccuacggcgccugccccagauacgugaagcagaacacccugaagcuggccaccggcaugagaaacgugcccgagaagcagaccagaggcaucuucggcgccaucgccggcuucaucgagaacggcugggagggcaugguggacggcugguacggcuucagacaccagaacagcgagggcagaggccaggccgccgaccugaagagcacccaggccgccaucgaccagaucaacggcaagcugaacagacugaucggcaagaccaacgagaaguuccaccagaucgagaaggaguucagcgagguggagggcagaauccaggaccuggagaaguacguggaggacaccaagaucgaccuguggagcuacaacgccgagcugcugguggcccuggagaaccagcacaccaucgaccugaccgacagcgagaugaacaagcuguucgagaagaccaagaagcagcugagagagaacgccgaggacaugggcaacggcugcuucaagaucuaccacaagugcgacaacgccugcaucggcagcaucagaaacggcaccuacgaccacgacguguacagagacgaggcccugaacaacagauuccagaucaagggcguggagcugaagagcggcuacaaggacuggauccuguggaucagcuucgccaucagcugcuuccugcugugcguggcccugcugggcuucaucaugugggccugccagaagggcaacaucagaugcaacaucugcaucuga

SEQ ID NO: 169904 - RNA, 1701 nt, Artificial Sequence; identical to SEQ ID NO: 166514
  derived and/or modified CDS sequence (opt4) from hemagglutinin__InfluenzaA__AGE89340

SEQ ID NO: 169905 - RNA, 1701 nt, Artificial Sequence; identical to SEQ ID NO: 168414
  derived and/or modified CDS sequence (opt4) from hemagglutinin__InfluenzaA__AGE89350

SEQ ID NO: 169906 - RNA, 1701 nt, Artificial Sequence
  derived and/or modified CDS sequence (opt4) from hemagglutinin__InfluenzaA__AGE89361
augaaggccauccugguggugcugcuguacaccuucgccaccgccaacgccgacacccugugcaucggcuaccacgccaacaacagcaccgacaccguggacaccgugcuggagaagaacgugaccgugacccacagcgugaaccugcuggaggacaagcacaacggcaagcugugcaagcugagaggcguggccccccugcaccugggcaagugcaacaucgccggcuggauccugggcaaccccgagugcgagagccugagcaccgccagcagcuggagcuacaucguggagaccagcagcagcgacaacggcaccugcuaccccggcgacuucaucaacuacgaggagcugagagagcagcugagcagcgugagcagcuucgagagauucgagaucuuccccaagaccagcagcuggcccaaccacgacagcaacaagggcgugaccgccgccugcccccacgccggcgccaagagcuucuacaagaaccugaucuggcuggugaagaagggcaacagcuaccccaagcugagcaagagcuacaucaacgacaagggcaaggaggugcuggugcuguggggcauccaccaccccagcaccaccaccgaccagcagagccuguaccagaacgccgacgccuacguguucgugggcaccagcagauacagcaagaaguucaagcccgagaucgccaucagacccaaggugagagaccaggagggcagaaugaacuacuacuggacccugguggagcccggcgacaagaucaccuucgaggccaccggcaaccugguggugcccagauacgccuucgccauggagagaaacgccggcagcggcaucaucaucagcgacacccccgugcacgacugcaacaccaccugccagacccccaagggcgccaucaacaccagccugcccuuccagaacauccaccccaucaccaucggcaagugccccaaguacgugaagagcaccaagcugagacuggccaccggccugagaaacgugcccagcauccagagcagaggccuguucggcgccaucgccggcuucaucgagggcggcuggaccggcaugguggacggcugguacggcuaccaccaccagaacgagcagggcagcggcuacgccgccgaccugaagagcacccagaacgccaucgacaagaucaccaacaaggugaacagcgugaucgagaagaugaacacccaguucaccgccgugggcaaggaguucaaccaccuggagaagagaaucgagaaccugaacaagaagguggacgacggcuuccuggacaucuggaccuacaacgccgagcugcuggugcugcuggagaacgagagaacccuggacuaccacgacagcaacgugaagaaccuguacgagaaggugagaaaccagcugaagaacaacgccaaggagaucggcaacggcugcuucgaguucuaccacaagugcgacaacaccugcauggagagcgugaagaacggcaccuacgacuaccccaaguacagcgaggaggccaagcugaacagagaggagaucgacggcgugaagcuggagagcaccagaaucuaccagauccuggccaucuacagcaccguggccagcagccuggugcugguggugagccugggcgccaucagcuucuggaugugcagcaacggcagccugcagugcagaaucugcaucuga

SEQ ID NO: 169907 - RNA, 1701 nt, Artificial Sequence; identical to SEQ ID NO: 168411
  derived and/or modified CDS sequence (opt4) from hemagglutinin__InfluenzaA__AGE89371

SEQ ID NO: 169908 - RNA, 1701 nt, Artificial Sequence
  derived and/or modified CDS sequence (opt4) from hemagglutinin__InfluenzaA__AGE89382
augaaggccauccugguggugcugcuguacaccuucgccaccgccaacgccgacacccugugcaucggcuaccacgccaacaacagcaccgacaccguggacaccgugcuggagaagaacgugaccgugacccacagcgugaaccugcuggaggacaagcacaacggcaagcugugcaagcugagaggcguggccccccugcaccugggcaagugcaacaucgccggcuggauccugggcaaccccgagugcgagagccugagcaccgccagcagcuggagcuacaucguggagaccagcagcagcgacaacggcaccugcuaccccggcgacuucaucaacuacgaggagcugagagagcagcugagcagcgugagcagcuucgagagauucgagaucuuccccaagaccagcagcuggcccaaccacgacagcaacaagggcgugaccgccgccugcccccacgccggcgccaagagcuucuacaagaaccugaucuggcuggugaagaagggcaacagcuaccccaagcugagcaagagcuacaucaacgacaagggcaaggaggugcuggugcuguggggcauccaccaccccagcaccagcgccgaccagcagagccuguaccagaacgccgacgccuacguguucgugggcaccagcaaguacagcaagaaguucaagcccgagaucgccgugagacccaaggugagagaccaggagggcagaaugaacuacuacuggacccuggugaagcccggcgacaagaucaccuucgaggccaccggcaaccugcuggugcccagauacgccuucgccauggagagaaacgccggcagcggcaucaucaucagcgacacccccgugcacgacugcaacaccaccugccagacccccaagggcgccaucaacaccagccugcccuuccagaacauccaccccaucaccaucggcaagugccccaaguacgugaagagcaccaagcugagacuggccaccggccugagaaacgugcccagcauccagagcagaggccuguucggcgccaucgccggcuucaucgagggcggcuggaccggcaugguggacggcugguacggcuaccaccaccagaacgagcagggcagcggcuacgccgccgaccugaagagcacccagaacgccaucgacaagaucaccaacaaggugaacagcgugaucgagaagaugaacacccaguucaccgccgugggcaaggaguucaaccaccuggagaagagaaucgagaaccugaacaagaagguggacgacggcuuccuggacaucuggaccuacaacgccgagcugcuggugcugcuggagaacgagagaacccuggacuaccacgacagcaacgugaagaaccuguacgagaaggugagaagccagcugaagaacaacgccaaggagaucggcaacggcugcuucgaguucuaccacaagugcgacaacaccugcauggagagcgugaagaacggcaccuacgacuaccccaaguacagcgaggaggccaagcugaacagagaggagaucgacggcgugaagcuggagagcaccagaaucuaccagauccuggccaucuacagcaccguggccagcagccuggugcugguggugagccugggcgccaucagcuucuggaugugcagcaacggcagccugcagugcagaaucugcaucuga

SEQ ID NO: 169909 - RNA, 1701 nt, Artificial Sequence
  derived and/or modified CDS sequence (opt4) from hemagglutinin__InfluenzaA__AGE89392
augaagaccaucaucgcccugagcuacauccugugccugguguucgcccaggagcugcccggcaacgacaacagcaccgccacccugugccugggccaccacgccgugcccaacggcaccaucgugaagaccaucaccaacgaccagaucgaggugaccaacgccaccgagcuggugcagagcagcagcaccggcgagaucugcaacagcccccaccagauccuggacggcgagaacugcacccugaucgacgcccugcugggcgacccccagugcgacggcuuccagaacaagaagugggaccuguucguggagagaagcaaggcccacagcaacugcuaccccuacgacgugcccgacuacgccagccugagaagccugguggccagcagcggcacccuggaguucaacaacgagagcuucaacuggaccggcgugacccagaacggcaccagcagcgccugcaucagaagaagcaacaacagcuucuucagcagacugaacuggcugacccaccugaacuucaaguaccccgcccugaacgugaccaugcccaacaacgagcaguucgacaagcuguacaucuggggcgugcaccaccccggcaccgacaaggaccagaucuuccuguacgcccaggccagcggcagaaucaccgugagcaccaagagaagccagcaggccgugauccccaacaucggcagcagacccagagugagaaacauccccagcagagugagcaucuacuggaccaucgugaagcccggcgacauccugcugaucaacagcaccggcaaccugaucgcccccagaggcuacuucaagaucagaagcggcaagagcagcaucaugagaagcgacgcccccaucggcaagugcaacagcgccugcaucacccccaacggcagcauccccaacgacaagcccuuccagaacgugaacagaaucaccuacggcgccugccccagauacgugaagcagaacacccugaagcuggccaccggcaugagaaacgugcccgagaagcagaccagaggcaucuucggcgccaucgccggcuucaucgagaacggcugggagggcaugguggacggcugguacggcuucagacaccagaacagcgagggcagaggccaggccgccgaccugaagagcacccaggccgccaucgaccagaucaacggcaagcugaacagacugaucggcaagaccaacgagaaguuccaccagaucgagaaggaguucagcgagguggagggcagaauccaggaccuggagaaguacguggaggacaccaagaucgaccuguggagcuacaacgccgagcugcugguggcccuggagaaccagcacaccaucgaccugaccgacagcgagaugaacaagcuguucgagaagaccaagaagcagcugagagagaacgccgaggacaugggcaacggcugcuucaagaucuaccacaagugcgacaacgccugcaucggcagcaucagaaacggcaccuacgaccacgacguguacagagacgaggcccugaacaacagauuccagaucaagggcguggagcugaagagcggcuacaaggacuggauccuguggaucagcuucgccaucagcugcuuccugcugugcguggcccugcugggcuucaucaugugggccugccagaagggcaacaucagaugcaacaucugcaucuga

SEQ ID NO: 169910 - RNA, 1701 nt, Artificial Sequence; identical to SEQ ID NO: 169897
  derived and/or modified CDS sequence (opt4) from hemagglutinin__InfluenzaA__AGE89422

SEQ ID NO: 169911 - RNA, 1701 nt, Artificial Sequence; identical to SEQ ID NO: 168394
  derived and/or modified CDS sequence (opt4) from hemagglutinin__InfluenzaA__AGE89719

SEQ ID NO: 169912 - RNA, 1701 nt, Artificial Sequence
  derived and/or modified CDS sequence (opt4) from hemagglutinin__InfluenzaA__AGE89730
augaaggccauccugguggugcugcuguacaccuucgccaccgccaacgccgacacccugugcaucggcuaccacgccaacaacagcaccgacaccguggacaccgugcuggagaagaacgugaccgugacccacagcgugaaccugcuggaggacaagcacaacggcaagcugugcaagcugagaggcguggccccccugcaccugggcaagugcaacaucgccggcuggauccugggcaaccccgagugcgagagccugagcaccgccagcagcuggagcuacaucguggagaccagcagcagcgacaacggcaccugcuaccccggcgacuucaucaacuacgaggagcugagagagcagcugagcagcgugagcagcuucgagagauucgagaucuuccccaagaccagcagcuggcccaaccacgacagcaacaagggcgugaccgccgccugcccccacgccggcgccaagagcuucuacaagaaccugaucuggcuggugaagaagggcaacagcuaccccaagcugagcaagagcuacaucaacgacaagggcaaggaggugcuggugcuguggggcauccaccaccccagcaccagcgccgaccagcagagccuguaccagaacgccgacgccuacguguucgugggcaccagcaaguacagcaagaaguucaagcccgagaucgccgugagacccaaggugagagaccaggagggcagaaugaacuacuacuggacccugguggagcccggcgacaagaucaccuucgaggccaccggcaaccugcuggugcccagauacgccuucgccauggagagaaacgccggcagcggcaucaucaucagcgacacccccgugcacgacugcaacaccaccugccagacccccaagggcgccaucaacaccagccugcccuuccagaacauccaccccaucaccaucggcaagugccccaaguacgugaagagcaccaagcugagacuggccaccggccugagaaacgugcccagcauccagagcagaggccuguucggcgccaucgccggcuucaucgagggcggcuggaccggcaugguggacggcugguacggcuaccaccaccagaacggccagggcagcggcuacgccgccgaccugaagagcacccagaacgccaucgacaagaucaccaacaaggugaacagcgugaucgagaagaugaacacccaguucaccgccgugggcaaggaguucaaccaccuggagaagagaaucgagaaccugaacaagaagguggacgacggcuuccuggacaucuggaccuacaacgccgagcugcuggugcugcuggagaacgagagaacccuggacuaccacgacagcaacgugaagaaccuguacgagaaggugagaagccagcugaagaacaacgccaaggagaucggcaacggcugcuucgaguucuaccacaagugcgacaacaccugcauggagagcgugaagaacggcaccuacgacuaccccaaguacagcgaggaggccaagcugaacagagaggagaucgacggcgugaagcuggagagcaccagaaucuaccagauccuggccaucuacagcaccguggccagcagccuggugcugguggugagccugggcgccaucagcuucuggaugugcagcaacggcagccugcagugcagaaucugcaucuga

SEQ ID NO: 169913 - RNA, 1701 nt, Artificial Sequence; identical to SEQ ID NO: 168411
  derived and/or modified CDS sequence (opt4) from hemagglutinin__InfluenzaA__AGE89740

SEQ ID NO: 169914 - RNA, 1701 nt, Artificial Sequence
  derived and/or modified CDS sequence (opt4) from hemagglutinin__InfluenzaA__AGE89751
augaagaccaucaucgcccugagcuacauccugugccugguguucgcccagaagcugcccggcaacgacaacagcaccgccacccugugccugggccaccacgccgugcccaacggcaccaucgugaagaccaucaccaacgaccagaucgaggugaccaacgccaccgagcuggugcagagcagcagcgccggcgagaucugcgacagcccccaccacauccuggacggcgagaacugcacccugaucgacgcccugcugggcgacccccagugcgacggcuuccagaacaagaagugggaccuguucguggagagaagcagagccuacagcaacugcuaccccuacgacgugcccgacuacgccagccugagaagccugguggccagcagcggcacccuggaguucaacaacgagagcuucaacuggaccggcgugacccagaacggcaccagcagcgccugcaucagaagaagcaacaacagcuucuucagcagacugaacuggcugacccaccugaacuucaaguaccccgcccugaacgugaccaugcccaacaacgagcaguucgacaagcuguacaucuggggcgugcaccaccccggcaccgacaaggaccagaucuuccuguacgcccaggccagcggcagaaucaccgugagcaccaagagaagccagcaggccgugauccccaacaucggcagcagacccagagugagaaacauccccagcagaaucagcaucuacuggaccaucgugaagcccggcgacauccugcugaucaacagcaccggcaaccugaucgcccccagaggcuacuucaagaucagaagcggcaagagcagcaucaugagaagcgacgcccccaucggcaagugcaacagcgagugcaucacccccaacggcagcauccccaacgacaagcccuuccagaacgugaacagaaucaccuacggcgccugccccagauacgugaagcagagcacccugaagcuggccaccggcaugagaaacgugcccgagaagcagaccagaggcaucuucggcgccaucgccggcuucaucgagaacggcugggagggcaugauggacggcugguacggcuucagacaccagaacagcgagggcagaggccaggccgccgaccugaagagcacccaggccgccaucgaccagaucaacggcaagcugaacagacugaucggcaagaccaacgagaaguuccaccagaucgagaaggaguucagcgagguggagggcagaauccaggaccuggagaaguacguggaggacaccaagaucgaccuguggagcuacaacgccgagcugcugguggccauggagaaccagcacaccaucgaccugaccgacagcgagaugaacaagcuguucgagaagaccaagaagcagcugagagagaacgccgaggacaugggcaacggcugcuucaagaucuaccacaagugcgacaacgccugcaucggcagcaucagaaacggcaccuacgaccacgacguguacagagacgaggcccugagcaacagauuccagaucaagggcguggagcugaagagcggcuacaaggacuggauccuguggaucagcuucgccaucagcugcuuccugcugugcguggcccugcugggcuucaucaugugggccugccagaagggcaacaucagaugcaacaucugcaucuga

SEQ ID NO: 169915 - RNA, 1701 nt, Artificial Sequence; identical to SEQ ID NO: 168414
  derived and/or modified CDS sequence (opt4) from hemagglutinin__InfluenzaA__AGE89762

SEQ ID NO: 169916 - RNA, 1701 nt, Artificial Sequence
  derived and/or modified CDS sequence (opt4) from hemagglutinin__InfluenzaA__AGF44891
augaaggccauccugguggugcugcuguacaccuucgccaccgccaacgccgacacccugugcaucggcuaccacgccaacaacagcaccgacaccguggacaccgugcuggagaagaacgugaccgugacccacagcgugaaccugcuggaggacaagcacaacggcaagcugugcaagcugagaggcguggccccccugcaccugggcaagugcaacaucgccggcuggauccugggcaaccccgagugcgagagccugagcaccgccagcagcuggagcuacaucguggagaccagcagcagcgacaacggcaccugcuaccccggcgacuucaucaacuacgaggagcugagagagcagcugagcagcgugagcagcuucgagagauucgagaucuuccccaagaccagcagcuggcccaaccacgacagcaacaagggcgugaccgccgccugcccccacgccggcgccaagagcuucuacaagaaccugaucuggcuggugaagaagggcaacagcuaccccaagcugagcaagagcuacaucaacgacaagggcaaggaggugcuggugcuguggggcauccaccaccccagcaccaccgccgaccagcagagccuguaccagaacgccgacgccuacguguucgugggcaccagcagauacagcaagaaguucaagcccgagaucgccaucagacccaaggugagagaccaggagggcagaaugaacuacuacuggacccugaucgagcccggcgacaagaucaccuucgaggccaccggcaaccugguggugcccagauacgccuucgccauggagagaaacgccggcagcggcaucaucaucagcgacacccccgugcacgacugcaacaccaccugccagacccccgagggcgccaucaacaccagccugcccuuccagaacauccaccccaucaccaucggcaagugccccaaguacgugaagagcaccaagcugagacuggccaccggccugagaaacgugcccagcauccagagcagaggccuguucggcgccaucgccggcuucaucgagggcggcuggaccggcaugguggacggcugguacggcuaccaccaccagaacgagcagggcagcggcuacgccgccgaccugaagagcacccagaacgccguggacaagaucaccaacaaggugaacagcgugaucgagaagaugaacacccaguucaccgccgugggcaaggaguucaaccaccuggagaagagaaucgagaaccugaacaagaagguggacgacggcuuccuggacaucuggaccuacaacgccgagcugcuggugcugcuggagaacgagagaacccuggacuaccacgacagcaacgugaagaaccuguacgagaaggugagaaaccagcugaagaacaacgccaaggagaucggcaacggcugcuucgaguucuaccacaagugcgacaacaccugcauggagagcgugaagaacggcaccuacgacuaccccaaguacagcgaggaggccaagcugaacagagagaagaucgacggcgugaagcuggagagcaccagaaucuaccagauccuggccaucuacagcaccguggccagcagccuggugcugguggugagccugggcgccaucagcuucuggaugugcagcaacggcagccugcagugcagaaucugcaucuga

SEQ ID NO: 169917 - RNA, 1701 nt, Artificial Sequence; identical to SEQ ID NO: 169916
  derived and/or modified CDS sequence (opt4) from hemagglutinin__InfluenzaA__AGF44892

SEQ ID NO: 169918 - RNA, 1701 nt, Artificial Sequence
  derived and/or modified CDS sequence (opt4) from hemagglutinin__InfluenzaA__AGF44895
augaagaccaucaucgcccugagcuacauccugugccugguguucgcccagaagcugcccggcaacgacaacagcaccgccacccugugccugggccaccacgccgugcccaacggcaccaucgugaagaccaucaccaacgacagaaucgaggugaccaacgccaccgagcuggugcagaacagcagcaucggcgagaucugcgacagcccccaccagauccuggacggcgagaacugcacccugaucgacgcccugcugggcgacccccagugcgacggcuuccagaacaagaagugggaccuguucguggagagaagcaaggccuacagcaacugcuaccccuacgacgugcccgacuacgccagccugagaagccugguggccagcagcggcacccuggaguucaacaacgagagcuucaacuggaccggcgugacccagaacggcaccagcagcgccugcaucagaagaagcaacagcagcuucuucagcagacugaacuggcugacccaccugaacuucaaguaccccgcccugaacgugaccaugcccaacaacgagcaguucgacaagcuguacaucuggggcgugcaccaccccggcaccgacaaggaccagaucuuccuguacgcccagagcagcggcagaaucaccgugagcaccaagagaagccagcaggccgugauccccaacaucggcagcagacccagaaucagaaacauccccagcagaaucagcaucuacuggaccaucgugaagcccggcgacauccugcugaucaacagcaccggcaaccugaucgcccccagaggcuacuucaagaucagaagcggcaagagcagcaucaugagaagcgacgcccccaucggcaagugcaagagcgagugcaucacccccaacggcagcauccccaacgacaagcccuuccagaacgugaacagaaucaccuacggcgccugccccagauacgugaagcagagcacccugaagcuggccaccggcaugagaaacgugcccgagaagcagaccagaggcaucuucggcgccaucgccggcuucaucgagaacggcugggagggcaugguggacggcugguacggcuucagacaccagaacagcgagggcagaggccaggccgccgaccugaagagcacccaggccgccaucgaccagaucaacggcaagcugaacagacugaucggcaagaccaacgagaaguuccaccagaucgagaaggaguucagcgagguggagggcagaauccaggaccuggagaaguacguggaggacaccaagaucgaccuguggagcuacaacgccgagcugcugguggcccuggagaaccagcacaccaucgaccugaccgacagcgagaugaacaagcuguucgagaagaccaagaagcagcugagagagaacgccgaggacaugggcaacggcugcuucaagaucuaccacaagugcgacaacgccugcaucggcagcaucagaaacggcaccuacgaccacaacguguacagagacgaggcccugaacaacagauuccagaucaagggcguggagcugaagagcggcuacaaggacuggauccuguggaucagcuucgccaucagcugcuuccugcugugcguggcccugcugggcuucaucaugugggccugccagaagggcaacaucagaugcaacaucugcaucuga

SEQ ID NO: 169919 - RNA, 1701 nt, Artificial Sequence; identical to SEQ ID NO: 169895
  derived and/or modified CDS sequence (opt4) from hemagglutinin__InfluenzaA__AGF44896

SEQ ID NO: 169920 - RNA, 1701 nt, Artificial Sequence
  derived and/or modified CDS sequence (opt4) from hemagglutinin__InfluenzaA__AGF44897
augaagaccaucaucgcccugagcuacauccugugccugguguucgcccaggagcugcccggcaacgacgacagcaccgccacccugugccugggccaccacgccgugcccaacggcaccaucgugaagaccaucaccaacgaccagaucgaggugaccaacgccaccgagcuggugcagagcagcagcaccggcgagaucugcaacagcccccaccagauccuggacggcgagaacugcacccugaucgacgcccugcugggcgacccccagugcgacggcuuccagaacaagaagugggaccuguucguggagagaagcaaggcccacagcaacugcuaccccuacgacgugcccgacuacgccagccugagaagccugguggccagcagcggcacccuggaguucaacaacgagagcuucaacuggaccggcgugacccagaacggcaccagcagcgccugcaugagaagaagcaacaacagcuucuucagcagacugaacuggcugacccaccugaacuucaaguaccccgcccugaacgugaccaugcccaacaacgagcaguucgacaagcuguacaucuggggcgugcaccaccccggcaccgacaaggaccagaucuuccuguacgcccaggccagcggcagaaucaccgugagcaccaagagaagccagcaggccgugauccccaacaucggcagcagacccagagugagaaacauccccagcagagugagcaucuacuggaccaucgugaagcccggcgacauccugcugaucaacagcaccggcaaccugaucgcccccagaggcuacuucaagauccagagcggcaagagcagcaucaugagaagcgacgcccccaucggcaagugcaacagcgccugcaucacccccaacggcagcauccccaacgacaagcccuuccagaacgugaacagaaucaccuacggcgccugccccagauacgugaagcagaacacccugaagcuggccaccggcaugagaaacgugcccgagaagcagaccagaggcaucuucggcgccaucgccggcuucaucgagaacggcugggagggcaugguggacggcugguacggcuucagacaccagaacagcgagggcagaggccaggccgccgaccugaagagcacccaggccgccaucgaccagaucaacggcaagcugaacagacugaucggcaagaccaacgagaaguuccaccagaucgagaaggaguucagcgagguggagggcagaauccaggaccuggagaaguacguggaggacaccaagaucgaccuguggagcuacaacgccgagcugcugguggcccuggagaaccagcacaccaucgaccugaccgacagcgagaugaacaagcuguucgagaagaccaagaagcagcugagagagaacgccgaggacaugggcaacggcugcuucaagaucuaccacaagugcgacaacgccugcaucggcagcaucagaaacggcaccuacgaccacgacguguacagagacgaggcccugaacaacagauuccagaucaagggcguggagcugaagagcggcuacaaggacuggauccuguggaucagcuucgccaucagcugcuuccugcugugcguggcccugcugggcuucaucaugugggccugccagaagggcaacaucagaugcaacaucugcaucuga

SEQ ID NO: 169921 - RNA, 1701 nt, Artificial Sequence; identical to SEQ ID NO: 169918
  derived and/or modified CDS sequence (opt4) from hemagglutinin__InfluenzaA__AGF44900

SEQ ID NO: 169922 - RNA, 1701 nt, Artificial Sequence; identical to SEQ ID NO: 169918
  derived and/or modified CDS sequence (opt4) from hemagglutinin__InfluenzaA__AGF44901

SEQ ID NO: 169923 - RNA, 1701 nt, Artificial Sequence; identical to SEQ ID NO: 169918
  derived and/or modified CDS sequence (opt4) from hemagglutinin__InfluenzaA__AGF44902

SEQ ID NO: 169924 - RNA, 1701 nt, Artificial Sequence; identical to SEQ ID NO: 169918
  derived and/or modified CDS sequence (opt4) from hemagglutinin__InfluenzaA__AGF44903

SEQ ID NO: 169925 - RNA, 1701 nt, Artificial Sequence; identical to SEQ ID NO: 169918
  derived and/or modified CDS sequence (opt4) from hemagglutinin__InfluenzaA__AGF44904

SEQ ID NO: 169926 - RNA, 1701 nt, Artificial Sequence
  derived and/or modified CDS sequence (opt4) from hemagglutinin__InfluenzaA__AGF44905
augaagaccaucaucgcccugagcuacauccugugccugguguucgcccagaagcugcccggcaacgacaacagcaccgccacccugugccugggccaccacgccgugcccaacggcaccaucgugaagaccaucaccaacgacagaaucgaggugaccaacgccaccgagcuggugcagaacagcagcaucggcgagaucugcgacagcccccaccagauccuggacggcgagaacugcacccugaucgacgcccugcugggcgacccccagugcgacggcuuccagaacaagaagugggaccuguucguggagagaagcaaggccuacagcaacugcuaccccuacgacgugcccgacuacgccagccugagaagccugguggccagcagcggcacccuggaguucaacaacgagagcuucaacuggaccggcgugacccagaacggcaccagcagcgccugcaucagaagaagcaacagcagcuucuucagcagacugaacuggcugacccaccugaacuucaaguaccccgcccugaacgugaccaugcccaacaacgagcaguucgacaagcuguacaucuggggcgugcaccaccccggcaccgacaaggaccagaucuuccuguacgcccagagcagcggcagaaucaccgugagcaccaagagaagccagcaggccgugauccccaacaucggcagcagacccagaaucagaaacauccccagcagaaucagcaucuacuggaccaucgugaagcccggcgacauccugcugaucaacagcaccggcaaccugaucgcccccagaggcuacuucaagaucagaagcggcaagagcagcaucaugagaagcgacgcccccaucggcaagugcaagagcgagugcaucacccccaacggcagcauccccaacgacaagcccuuccagaacgugaacagaaacaccuacggcgccugccccagauacgugaagcagagcacccugaagcuggccaccggcaugagaaacgugcccgagaagcagaccagaggcaucuucggcgccaucgccggcuucaucgagaacggcugggagggcaugguggacggcugguacggcuucagacaccagaacagcgagggcagaggccaggccgccgaccugaagagcacccaggccgccaucgaccagaucaacggcaagcugaacagacugaucggcaagaccaacgagaaguuccaccagaucgagaaggaguucagcgagguggagggcagaauccaggaccuggagaaguacguggaggacaccaagaucgaccuguggagcuacaacgccgagcugcugguggcccuggagaaccagcacaccaucgaccugaccgacagcgagaugaacaagcuguucgagaagaccaagaagcagcugagagagaacgccgaggacaugggcaacggcugcuucaagaucuaccacaagugcgacaacgccugcaucggcagcaucagaaacggcaccuacgaccacaacguguacagagacgaggcccugaacaacagauuccagaucaagggcguggagcugaagagcggcuacaaggacuggauccuguggaucagcuucgccaucagcugcuuccugcugugcguggcccugcugggcuucaucaugugggccugccagaagggcaacaucagaugcaacaucugcaucuga

SEQ ID NO: 169927 - RNA, 1701 nt, Artificial Sequence; identical to SEQ ID NO: 169918
  derived and/or modified CDS sequence (opt4) from hemagglutinin__InfluenzaA__AGF44906

SEQ ID NO: 169928 - RNA, 1701 nt, Artificial Sequence
  derived and/or modified CDS sequence (opt4) from hemagglutinin__InfluenzaA__AGF44908
augaagaccaucaucgcccugagcuacauccugugccugguguucgcccagaagcugcccggcaacgacaacagcaccgccacccugugccugggccaccacgccgugcccaacggcaccaucgugaagaccaucaccaacgacagaaucgaggugaccaacgccaccgagcuggugcagaacagcagcaucggcgagaucugcgacagcccccaccagauccuggacggcgagaacugcacccugaucgacgcccugcugggcgacccccagugcgacggcuuccagaacaagaagugggaccuguucguggagagaagcaaggccuacagcaacugcuaccccuacgacgugcccgacuacgccagccugagaagccugguggccagcagcggcacccuggaguucaacaacgagagcuucaacugggccggcgugacccagaacggcaccagcagcgccugcaucagaggcagcaacagcagcuucuucagcagacugaacuggcugacccaccugaacuucaaguaccccgcccugaacgugaccaugcccaacaacgagcaguucgacaagcuguacaucuggggcgugcaccaccccggcaccgacaaggaccagaucuuccuguacgcccagagcagcggcagaaucaccgugagcaccaagagaagccagcaggccgugauccccaacaucggcagcagacccagaaucagaaacauccccagcagaaucagcaucuacuggaccaucgugaagcccggcgacauccugcugaucaacagcaccggcaaccugaucgcccccagaggcuacuucaagaucagaagcggcaagagcagcaucaugagaagcgacgcccccaucggcaagugcaagagcgagugcaucacccccaacggcagcauccccaacgacaagcccuuccagaacgugaacagaaucaccuacggcgccugccccagauacgugaagcagagcacccugaagcuggccaccggcaugagaaacgugcccgagaagcagaccagaggcaucuucggcgccaucgccggcuucaucgagaacggcugggagggcaugauggacggcugguacggcuucagacaccagaacagcgagggcagaggccaggccgccgaccugaagagcacccaggccgccaucgaccagaucaacggcaagcugaacagacugaucggcaagaccaacgagaaguuccaccagaucgagaaggaguucagcgagguggagggcagaauccaggaccuggagaaguacguggaggacaccaagaucgaccuguggagcuacaacgccgagcugcugguggcccuggagaaccagcacaccaucgaccugaccgacagcgagaugaacaagcuguucgagaagaccaagaagcagcugagagagaacgccgaggacaugggcaacggcugcuucaagaucuaccacaagugcgacaacgccugcaucggcagcaucagaaacggcaccuacgaccacgacguguacagagacgaggcccugaacaacagauuccagaucaagggcguggagcugaagagcggcuacaaggacuggauccuguggaucagcuucgccaucagcugcuuccugcugugcguggcccugcugggcuucaucaugugggccugccagaagggcaacaucagaugcaacaucugcaucuga

SEQ ID NO: 169929 - RNA, 1701 nt, Artificial Sequence; identical to SEQ ID NO: 169918
  derived and/or modified CDS sequence (opt4) from hemagglutinin__InfluenzaA__AGF44909

SEQ ID NO: 169930 - RNA, 1701 nt, Artificial Sequence; identical to SEQ ID NO: 169918
  derived and/or modified CDS sequence (opt4) from hemagglutinin__InfluenzaA__AGF44910

SEQ ID NO: 169931 - RNA, 1701 nt, Artificial Sequence
  derived and/or modified CDS sequence (opt4) from hemagglutinin__InfluenzaA__AGF44911
augaagaccaucaucgcccugagcuacauccugugccugguguucgcccagaagcugcccggcaacgacaacagcaccgccacccugugccugggccaccacgccgugcccaacggcaccaucgugaagaccaucaccaacgacagaaucgaggugaccaacgccaccgagcuggugcagaacagcagcaucggcgagaucugcgacagcccccaccagauccuggacggcgagaacugcacccugaucgacgcccugcugggcgacccccagugcgacggcuuccagaacaagaagugggaccuguucguggagagaagcaaggccuacagcaacugcuaccccuacgacgugcccgacuacgccagccugagaagccugguggccagcagcggcacccuggaguucaacaacgagagcuucaacugggccggcgugacccagaacggcaccagcagcgccugcaucagaggcagcaacagcagcuucuucagcagacugaacuggcugacccaccugaacuucaaguaccccgcccugaacgugaccaugcccaacaacgagcaguucgacaagcuguacaucuggggcgugcaccaccccggcaccgacaaggaccagaucuuccuguacgcccagagcagcggcagaaucaccgugagcaccaagagaagccagcaggccgugauccccaacaucggcagcagacccagaaucagaaacauccccagcagaaucagcaucuacuggaccaucgugaagcccggcgacauccugcugaucaacagcaccggcaaccugaucgcccccagaggcuacuucaagaucagaagcggcaagagcagcaucaugagaagcgacgcccccaucggcaagugcaagagcgagugcaucacccccaacggcagcauccccaacgacaagcccuuccagaacgugaacagaaucaccuacggcgccugccccagauacgugaagcagagcacccugaagcuggccaccggcaugagaaacgugcccgagaagcagaccagaggcaucuucggcgccaucgccggcuucaucgagaacggcugggagggcaugguggacggcugguacggcuucagacaccagaacagcgagggcagaggccaggccgccgaccugaagagcacccaggccgccaucgaccagaucaacggcaagcugaacagacugaucggcaagaccaacgagaaguuccaccagaucgagaaggaguucagcgagguggagggcagaauccaggaccuggagaaguacguggaggacaccaagaucgaccuguggagcuacaacgccgagcugcugguggcccuggagaaccagcacaccaucgaccugaccgacagcgagaugaacaagcuguucgagaagaccaagaagcagcugagagagaacgccgaggacaugggcaacggcugcuucaagaucuaccacaagugcgacaacgccugcaucggcagcaucagaaacggcaccuacgaccacgacguguacagagacgaggcccugaacaacagauuccagaucaagggcguggagcugaagagcggcuacaaggacuggauccuguggaucagcuucgccaccagcugcuuccugcugugcguggcccugcugggcuucaucaugugggccugccagaagggcaacaucagaugcaacaucugcaucuga

SEQ ID NO: 169932 - RNA, 1701 nt, Artificial Sequence; identical to SEQ ID NO: 169918
  derived and/or modified CDS sequence (opt4) from hemagglutinin__InfluenzaA__AGF44912

SEQ ID NO: 169933 - RNA, 1701 nt, Artificial Sequence; identical to SEQ ID NO: 169918
  derived and/or modified CDS sequence (opt4) from hemagglutinin__InfluenzaA__AGF44913

SEQ ID NO: 169934 - RNA, 1701 nt, Artificial Sequence
  derived and/or modified CDS sequence (opt4) from hemagglutinin__InfluenzaA__AGF44914
augaagaccaucaucgcccugagcuacauccugugccugguguucgcccagaagcugcccggcaacgacaacagcaccgccacccugugccugggccaccacgccgugcccaacggcaccaucgugaagaccaucaccaacgacagaaucgaggugaccaacgccaccgagcuggugcagaacagcagcaucggcgagaucugcgacagcccccaccagauccuggacggcgagaacugcacccugaucgacgcccugcugggcgacccccagugcgacggcuuccagaacaagaagugggaccuguucguggagagaagcaaggccuacagcaacugcuaccccuacgacgugcccgacuacgccagccugagaagccugguggccagcagcggcacccuggaguucaacaacgagagcuucaacuggaccggcgugacccagaacggcaccagcagcgccugcaucagaagaagcaacagcagcuucuucagcagacugaacuggcugacccaccugaacuucaaguaccccgcccugaacgugaccaugcccaacaacgagcaguucgacaagcuguacaucuggggcgugcaccaccccggcaccgacaaggaccagaucuuccuguacgcccagagcagcggcagaaucaccgugagcaccaagagaagccagcaggccgugauccccaacaucggcagcagacccagaaucagaaacauccccagcagaaucagcaucuacuggaccaucgugaagcccggcgacauccugcugaucaacagcaccggcaaccugaucgcccccagaggcuacuucaagaucagaagcggcaagagcagcaucaugagaagcgacgcccccaucggcaagugcaagagcgagugcaucacccccaacggcagcauccccaacgacaagcccuuccagaacgugaacaagaucaccuacggcgccugccccagauacgugaagcagagcacccugaagcuggccaccggcaugagaaacgugcccgagaagcagaccagaggcaucuucggcgccaucgccggcuucaucgagaacggcugggagggcaugguggacggcugguacggcuucagacaccagaacagcgagggcagaggccaggccgccgaccugaagagcacccaggccgccaucgaccagaucaacggcaagcugaacagacugaucggcaagaccaacgagaaguuccaccagaucgagaaggaguucagcgagguggagggcagaauccaggaccuggagaaguacguggaggacaccaagaucgaccuguggagcuacaacgccgagcugcugguggcccuggagaaccagcacaccaucgaccugaccgacagcgagaugaacaagcuguucgagaagaccaagaagcagcugagagagaacgccgaggacaugggcaacggcugcuucaagaucuaccacaagugcgacaacgccugcaucggcagcaucagaaacggcaccuacgaccacaacguguacagagacgaggcccugaacaacagauuccagaucaagggcguggagcugaagagcggcuacaaggacuggauccuguggaucagcuucgccaucagcugcuuccugcugugcguggcccugcugggcuucaucaugugggccugccagaagggcaacaucagaugcaacaucugcaucuga

SEQ ID NO: 169935 - RNA, 1701 nt, Artificial Sequence; identical to SEQ ID NO: 169895
  derived and/or modified CDS sequence (opt4) from hemagglutinin__InfluenzaA__AGF44916

SEQ ID NO: 169936 - RNA, 1701 nt, Artificial Sequence
  derived and/or modified CDS sequence (opt4) from hemagglutinin__InfluenzaA__AGF44917
augaagaccaucaucgcccugagcuacauccugugccugguguucgcccagaagauccccggcaacgacaacagcaccgccacccugugccugggccaccacgccgugcccaacggcaccaucgugaagaccaucaccaacgagcagaucgaggugaccaacgccaccgagcuggugcagagcagcagcaccggcgagaucugcaacagcccccaccagauccuggacggcgagaacugcacccugaucgacgcccugcugggcgacccccagugcgacggcuuccagaacaagaagugggaccuguucguggagagaagcaaggccuacagcaacugcuaccccuacgacgugcccgacuacgccagccugagaagccugguggccagcagcggcacccuggaguucaacaacgagagcuucaacuggaccggcgugacccagaacggcaccagcagcgccugcaucagaggcagcgacagcagcuucuucagcagacugaacuggcugacccaccugaacuucaaguaccccgcccugaacgugaccaugcccaacaacgagcaguucgacaagcuguacaucuggggcgugcaccaccccggcaccgacaaggaccagaucuuccuguacgcccaggccagcggcagaaucaccgugagcaccaagagaagccagcaggccgugauccccaacaucggcagcagacccagaaucagaaacauccccagcagaaucagcaucuacuggaccaucgugaagcccggcgacauccugcugaucaacagcaccggcaaccugaucgcccccagaggcuacuucaagaucagaagcggcaagagcagcaucaugagaagcgacgcccccaucggcaagugcaacagcgagugcaucacccccaacggcagcauccccaacgacaagcccuuccagaacgugaacagaaucaccuacggcgccugccccagauacgugaagcagaacacccugaagcuggccaccggcaugagaaacgugcccgagaagcagaccagaggcaucuucggcgccaucgccggcuucaucgagaacggcugggagggcaugauggacggcugguacggcuucagacaccagaacagcgagggcagaggccaggccgccgaccugaagagcacccaggccgccaucgaccagaucaacggcaagcugaacagacugaucggcaagaccaacgagaaguuccaccagaucgagaaggaguucagcgagguggagggcagaauccaggaccuggagaaguacguggaggacaccaagaucgaccuguggagcuacaacgccgagcugcugguggcccuggagaaccagcacaccaucgaccugaccgacagcgagaugaacaagcuguucgagaagaccaagaagcagcugagagagaacgccgaggacaugggcaacggcugcuucaagaucuaccacaagugcgacaacgccugcaucggcagcaucagaaacggcaccuacaaccacgacguguacagagacgaggcccugaacaacagauuccagaucaagggcguggagcugaagagcggcuacaaggacuggauccuguggaucagcuucgccaucagcugcuuccugcugugcguggcccugcugggcuucaucaugugggccugccagaagggcaacaucagaugcaacaucugcaucuga

SEQ ID NO: 169937 - RNA, 1701 nt, Artificial Sequence; identical to SEQ ID NO: 169895
  derived and/or modified CDS sequence (opt4) from hemagglutinin__InfluenzaA__AGF44918

SEQ ID NO: 169938 - RNA, 1701 nt, Artificial Sequence
  derived and/or modified CDS sequence (opt4) from hemagglutinin__InfluenzaA__AGF44919
augaagaccaucaucgcccugagcuacauccugugccugguguucgcccagaagcugcccggcaacgacaacagcaccgccacccugugccugggccaccacgccgugcccaacggcaccaucgugaagaccaucaccaacgacagaaucgaggugaccaacgccaccgagcuggugcagaacagcagcaucggcgagaucugcgacagcccccaccagauccuggacggcgagaacugcacccugaucgacgcccugcugggcgacccccagugcgacggcuuccagaacaagaagugggaccuguucguggagagaagcaaggccuacagcaacugcuaccccuacgacgugcccgacuacgccagccugagaagccugguggccagcagcggcacccuggaguucaacaacgagagcuucaacugggccggcgugacccagaacggcaccagcagcgccugcaucagaggcagcaacagcagcuucuucagcagacugaacuggcugacccaccugaacuucaaguaccccgcccugaacgugaccaugcccaacaacgagcaguucgacaagcuguacaucuggggcgugcaccaccccggcaccgacaaggaccagaucuuccuguacgcccagagcagcggcagaaucaccgugagcaccaagagaagccagcaggccgugauccccaacaucggcagcagacccagaaucagaaacauccccagcagaaucagcaucuacuggaccaucgugaagcccggcgacauccugcugaucaacagcaccggcaaccugaucgcccccagaggcuacuucaagaucagaagcggcaagagcagcaucaugagaagcgacgcccccaucggcaagugcaagagcgagugcaucacccccaacggcagcauccccaacgacaagcccuuccagaacgugaacagaaucaccuacggcgccugccccagauacgugaagcagagcacccugaagcuggccaccggcaugagaaacgugcccgagaagcagaccagaggcaucuucggcgccaucgccggcuucaucgagaacggcugggagggcaugguggacggcugguacggcuucagacaccagaacagcgagggcagaggccaggccgccgaccugaagagcacccaggccgccaucgaccagaucaacggcaagcugaacagacugaucggcaagaccaacgagaaguuccaccagaucgagaaggaguucagcgagguggagggcagaauccaggaccuggagaaguacguggaggacaccaagaucgaccuguggagcuacaacgccgagcugcugguggcccuggagaaccagcacaccaucgaccugaccgacagcgagaugaacaagcuguucgagaagaccaagaagcagcugagagagaacgccgaggacaugggcaacggcugcuucaagaucuaccacaagugcgacaacgccugcaucggcagcaucagaaacggcaccuacgaccacuacguguacagagacgaggcccugaacaacagauuccagaucaagggcguggagcugaagagcggcuacaaggacuggauccuguggaucagcuucgccaucagcugcuuccugcugugcguggcccugcugggcuucaucaugugggccugccagaagggcaacaucagaugcaacaucugcaucuga

SEQ ID NO: 169939 - RNA, 1701 nt, Artificial Sequence; identical to SEQ ID NO: 169895
  derived and/or modified CDS sequence (opt4) from hemagglutinin__InfluenzaA__AGF44920

SEQ ID NO: 169940 - RNA, 1701 nt, Artificial Sequence; identical to SEQ ID NO: 169918
  derived and/or modified CDS sequence (opt4) from hemagglutinin__InfluenzaA__AGF44921

SEQ ID NO: 169941 - RNA, 1701 nt, Artificial Sequence
  derived and/or modified CDS sequence (opt4) from hemagglutinin__InfluenzaA__AGG13411
augaagaccaucaucgcccugagcuacauccugugccugguguucgcccaggagcugcccggcaacgacgacagcaccgccacccugugccugggccaccacgccgugcccaacggcaccaucgugaagaccaucaccaacgacagaaucgaggugaccaacgccaccgagcuggugcagagcagcagcaccggcgagaucugcaacagcccccaccagauccuggacggcgagaacugcacccugaucgacgcccugcugggcgacccccagugcgacggcuuccagaacaagaagugggaccuguucguggagagaagcaaggcccacagcaacugcuaccccuacgacgugcccgacuacgccagccugagaagccugguggccagcagcggcacccuggaguucaacaacgagagcuucaacuggaccggcgugacccagaacggcaccagcagcgccugcaucagaagaagcaacaacagcuucuucagcagacugaacuggcugacccaccugaacuucaaguaccccgcccugaacgugaccaugcccaacaacgagcaguucgacaagcuguacaucuggggcgugcaccaccccggcaccgacaaggaccagaucuuccuguacgcccaggccagcggcagaaucaccgugagcaccaagagaaaccagcagaccgugauccccaacaucggcagcagacccagagugagaaacauccccagcagagugagcaucuacuggaccaucgugaagcccggcgacauccugcugaucaacagcaccggcaaccugaucgcccccagaggcuacuucaagaucagaagcggcaagagcagcaucaugagaagcgacgcccccaucggcaagugcaacagcgccugcaucacccccaacggcagcauccccaacgacaagcccuuccagaacgugaacagaaucaccuacggcgccugccccagauacgugaagcagaacacccugaagcuggccaccggcaugagaaacgugcccgagaagcagaccagaggcaucuucggcgccaucgccggcuucaucgagaacggcugggagggcaugguggacggcugguacggcuucagacaccagaacagcgagggcagaggccaggccgccgaccugaagagcacccaggccgccaucgaccagaucaacggcaagcugaacagacugaucggcaagaccaacgagaaguuccaccagaucgagaaggaguucagcgagguggagggcagaauccaggaccuggagaaguacguggaggacaccaagaucgaccuguggagcuacaacgccgagcugcugguggcccuggagaaccagcacaccaucgaccugaccgacagcgagaugaacaagcuguucgagaagaccaagaagcagcugagagagaacgccgaggacaugggcaacggcugcuucaagaucuaccacaagugcgacaacgccugcaucggcagcaucagaaacggcaccuacgaccacgacguguacagagacgaggcccugaacaacagauuccagaucaagggcguggagcugaagagcggcuacaaggacuggauccuguggaucagcuucgccaucagcugcuuccugcugugcguggcccugcugggcuucaucaugugggccugccagaagggcaacaucagaugcaacaucugcaucuga

SEQ ID NO: 169942 - RNA, 1701 nt, Artificial Sequence
  derived and/or modified CDS sequence (opt4) from hemagglutinin__InfluenzaA__AGG13447
augaagaccaucaucgcccugagcuacauccugugccugguguucgcccaggagcugcccggcaacgacgacagcaccgccacccugugccugggccaccacgccgugcccaacggcaccaucgugaagaccaucaccaacgacagaaucgaggugaccaacgccaccgagcuggugcagagcagcagcaccggcgagaucugcaacagcccccaccagauccuggacggcgagaacugcacccugaucgacgcccugcugggcgacccccagugcgacggcuuccagaacaagaagugggaccuguucguggagagaagcaaggcccacagcaacugcuaccccuacgacgugcccgacuacgccagccugagaagccugguggccagcagcggcacccuggaguucaacaacgagagcuucaacuggaccggcgugacccagaacggcaccagcagcgccugcaucagaagaagcaacaacagcuucuucagcagacugaacuggcugacccaccugaacuucaaguaccccgcccugaacgugaccaugcccaacaacgagcaguucgacaagcuguacaucuggggcgugcaccaccccggcaccgacaaggaccagaucuuccuguacgcccaggccagcggcagaaucaccgugagcaccaagagaagccagcagaccgugauccccaacaucggcagcagacccagagugagaaacauccccagcagagugagcaucuacuggaccaucgugaagcccggcgacauccugcugaucaacagcaccggcaaccugaucgcccccagaggcuacuucaagaucagaagcggcaagagcagcaucaugagaagcgacgcccccaucggcaagugcaacagcgccugcaucacccccaacggcagcauccccaacgacaagcccuuccagaacgugaacagaaucaccuacggcgccugccccagauacgugaagcagaacacccugaagcuggccaccggcaugagaaacgugcccgagaagcagaccagaggcaucuucggcgccaucgccggcuucaucgagaacggcugggagggcaugguggacggcugguacggcuucagacaccagaacagcgagggcagaggccaggccgccgaccugaagagcacccaggccgccaucgaccagaucaacggcaagcugaacagacugaucggcaagaccaacgagaaguuccaccagaucgagaaggaguucagcgagguggagggcagaauccaggaccuggagaaguacguggaggacaccaagaucgaccuguggagcuacaacgccgagcugcugguggcccuggagaaccagcacaccaucgaccugaccgacagcgagaugaacaagcuguucgagaagacccagaagcagcugagagagaacgccgaggacaugggcaacggcugcuucaagaucuaccacaagugcgacaacgccugcaucggcagcaucagaaacggcaccuacgaccacgacguguacagagacgaggcccugaacaacagauuccagaucaagggcguggagcugaagagcggcuacaaggacuggauccuguggaucagcuucgccaucagcugcuuccugcugugcguggcccugcugggcuucaucaugugggccugccagaagggcaacaucagaugcaacaucugcaucuga

SEQ ID NO: 169943 - RNA, 1701 nt, Artificial Sequence
  derived and/or modified CDS sequence (opt4) from hemagglutinin__InfluenzaA__AGG13459
augaagaccaucaucgcccugagcuacauccugugccugguguucgcccagaagcugcccggcaacgacaacagcaccgccacccugugccugggccaccacgccgugcccaacggcaccaucgugaagaccaucaccaacgacagaaucgaggugaccaacgccaccgagcuggugcagaacagcagcaucggcgagaucugcgacagcccccaccagauccuggacggcgagaacugcacccugaucgacgcccugcugggcgacccccagugcgacggcuuccagaacaagaagugggaccuguucguggagagaagcaaggccuacagcaacugcuaccccuacgacgugcccgacuacgccagccugagaagccugguggccagcagcggcacccuggaguucaacaacgagagcuucaacuggaccggcgugacccagaacggcaccagcagcgccugcaucagaagaagcaacagcagcuucuucagcagacugaacuggcugacccaccugaacuucaaguaccccgcccugaacgugaccaugcccaacaacgagcaguucgacaagcuguacaucuggggcgugcaccaccccggcaccgacaaggaccagaucuuccuguacgcccagagcagcggcagaaucaccgugagcaccaagagaagccagcaggccgugauccccaacaucggcagcagacccagaaucagaaacauccccagcagaaucagcaucuacuggaccaucgugaagcccggcgacauccugcugaucaacagcaccggcaaccugaucgcccccagaggcuacuucaagaucagaagcggcaagagcagcaucaugagaagcgacgcccccaucggcaagugcaagagcgagugcaucacccccaacggcagcauccccaacgacaagcccuuccagaacgugaacagaaucaccuacggcgccugccccagauacgugaagcagagcacccugaagcuggccaccggcaugagaaacgugcccgagaagcagaccagaggcaucuucggcgccaucgccggcuucaucgagaacggcugggagggcaugguggacggcugguacggcuucagacaccagaacagcgagggcagaggccaggccgccgaccugaagagcacccaggccgccaucgaccagaucaacggcaagcugaacagacugaucggcaagaccaacgagaaguuccaccagaucgagaaggaguucagcgagguggagggcagaauccaggaccuggagaaguacguggaggacaccaagaucgaccuguggagcuacaacgccgagcugcugguggcccuggagaaccagcacaccaucgaccugaccgacagcgagaugaacaagcuguucgagaagaccaagaagcagcugagagagaacgccgaggacaugggcaacggcugcuucaagaucuaccacaagugcgacaacgccugcaucggcagcaucagaaacggcaccuacgaccacgacguguacagagacgaggcccugaacaacagauuccagaucaagggcguggagcugaagagcggcuacaaggacuggauccuguggaucagcuucgccaucagcugcuuccugcugugcguggcccugcugggcuucaucaugugggccugccagaagggcaacaucagaugcaacaucugcaucuga

SEQ ID NO: 169944 - RNA, 1701 nt, Artificial Sequence
  derived and/or modified CDS sequence (opt4) from hemagglutinin__InfluenzaA__AGG13495
augaagaccaucaucgcccugagcuacauccugugccugguguucgcccagaagcugcccggcaacgacaacagcaccgccacccugugccugggccaccacgccgugcccaacggcaccaucgugaagaccaucaccaacgaccagaucgaggugaccaacgccaccgagcuggugcagagcagcagcaccggcgagaucugcgacagcccccaccagauccuggacggcgagaacugcacccugaucgacgcccugcugggcgacccccagugcgacggcuuccagaacaagaagugggaccuguucguggagagaagcaaggccuacagcaacugcuaccccuacgacgugcccgacuacgccagccugagaagccugguggccagcagcggcacccuggaguucaacaacgagagcuucaacuggaccggcgugacccagaacggcaccagcagcgccugcaucagaagaagcgacagcagcuucuucagcagacugaacuggcugacccaccugaacuucaaguaccccgcccugaacgugaccaugcccaacaacgagcaguucgacaagcuguacaucuggggcgugcaccaccccggcaccgacaaggaccagaucuuccuguacgcccaggccagcggcagaaucaccgugagcaccaagagaagccagcagagcgugauccccaacaucggcagcagacccagaaucagaaacauccccagcagaaucagcaucuacuggaccaucgugaagcccggcgacauccugcugaucaacagcaccggcaaccugaucgcccccagaggcuacuucaagauccagagcggcaagagcagcaucaugagaagcgacgcccccaucggcaagugcaacagcgagugcaucacccccaacggcagcauccccaacgacaagcccuuccagaacgugaacagaaucaccuacggcgccugccccagauacgugaagcagaacacccugaagcuggccaccggcaugagaaacgugcccgagaagcagaccagaggcaucuucggcgccaucgccggcuucaucgagaacggcugggagggcaugguggacggcugguacggcuucagacaccagaacagcgagggcagaggccaggccgccgaccugaagagcacccaggccgccaucgaccagaucaacggcaagcugaacagacugaucggcaagaccaacgagaaguuccaccagaucgagaaggaguucagcgagguggagggcagaauccaggaccuggagaaguacguggaggacaccaagaucgaccuguggagcuacaacgccgagcugcugguggcccuggagaaccagcacaccaucgaccugaccgacagcgagaugaacaagcuguucgagaagaccaagaagcagcugagagagaacgccgaggacaugggcaacggcugcuucaagaucuaccacaagugcgacaacgccugcaucggcagcaucagaaacggcaccuacaaccacgacguguacagagacgaggcccugaacaacagauuccagaucaagggcguggagcugaagagcggcuacaaggacuggauccuguggaucagcuucgccaucagcugcuuccugcugugcguggcccugcugggcuucaucaugugggccugccagaagggcaacaucagaugcaacaucugcaucuga

SEQ ID NO: 169945 - RNA, 1701 nt, Artificial Sequence; identical to SEQ ID NO: 169943
  derived and/or modified CDS sequence (opt4) from hemagglutinin__InfluenzaA__AGG13507

SEQ ID NO: 169946 - RNA, 1701 nt, Artificial Sequence
  derived and/or modified CDS sequence (opt4) from hemagglutinin__InfluenzaA__AGG13519
augaagaccaucaucgcccugagcuacauccugugccugguguucgcccagaagcugcccggcaacgacaacagcaccgccacccugugccugggccaccacgccgugcccaacggcaccaucgugaagaccaucaccaacgaccagaucgaggugaccaacgccaccgagcuggugcagagcagcagcaccggcgagaucugcgacagcccccaccagauccuggacggcgagaacugcacccugaucgacgcccugcugggcgacccccagugcgacggcuuccagaacaagaagugggaccuguucguggagagaagcaaggccuacagcaacugcuaccccuacgacgugcccgacuacgccagccugagaagccugguggccagcagcggcacccuggaguucaacaacgagagcuucaacuggaccggcgugacccagaacggcaccagcagcgccugcaucagaagaagcgacagcagcuucuucagcagacugaacuggcugacccaccugaacuucaaguaccccgcccugaacgugaccaugcccaacaacgagcaguucgacaagcuguacaucuggggcgugcaccaccccggcaccgacaaggaccagaucuuccuguacgcccaggccagcggcagaaucaccgugagcaccaagagaagccagcagagcgugauccccaacaucggcagcagacccagaaucagaaacauccccagcagaaucagcaucuacuggaccaucgugaagcccggcgacauccugcugaucaacagcaccggcaaccugaucgcccccagaggcuacuucaagauccagagcggcaagagcagcaucaugagaagcgacgcccccaucggcaagugcaacagcgagugcaucacccccaacggcagcauccccaacgacaagcccuuccagaacgugaacagaaucaccuacggcgccugccccagauacgugaagcagaacacccugaagcuggccaccggcaugagaaacgugcccgagaagcagaccagaggcaucuucggcgccaucgccggcuucaucgagaacggcugggagggcaugguggacggcugguacggcuucagacaccagaacagcgagggcagaggccaggccgccgaccugaagagcacccaggccgccaucgaccagaucaacggcaagcugaacagacugaucggcaagaccaacgagaaguuccaccagaucgagaaggaguucagcgagguggagggcagagugcaggaccuggagaaguacguggaggacaccaagaucgaccuguggagcuacaacgccgagcugcugguggcccuggagaaccagcacaccaucgaccugaccgacagcgagaugaacaagcuguucgagaagaccaagaagcagcugagagagaacgccgaggacaugggcaacggcugcuucaagaucuaccacaagugcgacaacgccugcaucggcagcaucagaaacggcaccuacaaccacgacguguacagagacgaggcccugaacaacagauuccagaucaagggcguggagcugaagagcggcuacaaggacuggauccuguggaucagcuucgccaucagcugcuuccugcugugcguggcccugcugggcuucaucaugugggccugccagaagggcaacaucagaugcaacaucugcaucuga

SEQ ID NO: 169947 - RNA, 1701 nt, Artificial Sequence; identical to SEQ ID NO: 169943
  derived and/or modified CDS sequence (opt4) from hemagglutinin__InfluenzaA__AGG13531

SEQ ID NO: 169948 - RNA, 1701 nt, Artificial Sequence
  derived and/or modified CDS sequence (opt4) from hemagglutinin__InfluenzaA__AGG13543
augaagaccaucaucgcccugagcuacauccugugccugguguucgcccagaagcugcccggcaacgacaacagcaccgccacccugugccugggccaccacgccgugcccaacggcaccaucgugaagaccaucaccaacgacagaaucgaggugaccaacgccaccgagcuggugcagaacagcagcaucggcgagaucugcgacagcccccaccagauccuggacggcgagaacugcacccugaucgacgcccugcugggcgacccccagugcgacggcuuccagaacaagaagugggaccuguucguggagagaagcaaggccuacagcaacugcuaccccuacgacgugcccgacuacgccagccugagaagccugguggccagcagcggcacccuggaguucaacaacgagagcuucaacuggaccggcgugacccagaacggcaccagcagcgccugcaucagaagaagcaacagcagcuucuucagcagacugaacuggcugacccaccugaacuucaaguaccccgcccugaacgugaccaugcccaacaacgagcaguucgacaagcuguacaucuggggcgugcaccaccccggcaccgacaaggaccagaucuuccuguacgcccagagcagcggcagaaucaccgugagcaccaagagaagccagcaggccgugauccccaacaucggcagcagacccagaaucagaaacauccccagcagaaucagcaucuacuggaccaucgugaagcccggcgacauccugcugaucaacagcaccggcaaccugaucgcccccagaggcuacuucaagaucagaagcggcaagagcagcaucaugagaagcgacgcccccaucggcaagugcaagagcgagugcaucacccccaacggcagcauccccaacgacaagcccuuccagaacgugaacagaaucaccuacggcgccugccccagauacgugaagcagagcacccugaagcuggccaccggcaugagaaacgugcccgagaagcagaccagaggcaucuucggcgccaucgccggcuucaucgagaacggcugggagggcaugguggacggcugguacggcuucagacaccagaacagcgagggcagaggccaggccgccgaccugaagagcacccaggccgccaucgaccagaucaacggcaagcugaacagacugaucggcaagaccaacgagaaguuccaccagaucgagaaggaguucagcgagguggagggcagaauccaggacaucgagaaguacguggaggacaccaagaucgaccuguggagcuacaacgccgagcugcugguggcccuggagaaccagcacaccaucgaccugaccgacagcgagaugaacaagcuguucgagaagaccaagaagcagcugagagagaacgccgaggacaugggcaacggcugcuucaagaucuaccacaagugcgacaacgccugcaucggcagcaucagaaacggcaccuacgaccacaacguguacagagacgaggcccugaacaacagauuccagaucaagggcguggagcugaagagcggcuacaaggacuggauccuguggaucagcuucgccaucagcugcuuccugcugugcguggcccugcugggcuucaucaugugggccugccagaagggcaacaucagaugcaacaucugcaucuga

SEQ ID NO: 169949 - RNA, 1701 nt, Artificial Sequence; identical to SEQ ID NO: 169943
  derived and/or modified CDS sequence (opt4) from hemagglutinin__InfluenzaA__AGG13555

SEQ ID NO: 169950 - RNA, 1701 nt, Artificial Sequence; identical to SEQ ID NO: 169943
  derived and/or modified CDS sequence (opt4) from hemagglutinin__InfluenzaA__AGG13567

SEQ ID NO: 169951 - RNA, 1701 nt, Artificial Sequence
  derived and/or modified CDS sequence (opt4) from hemagglutinin__InfluenzaA__AGG13591
augaagaccaucaucgcccugagcuacauccugugccugguguucgcccagaagcugcccggcaacgacaacagcaccgccacccugugccugggccaccacgccgugcccaacggcaccaucgugaagaccaucaccaacgacagaaucgaggugaccaacgccaccgagcuggugcagaacagcagcaucggcgagaucugcgacagcccccaccagauccuggacggcgagaacugcacccugaucgacgcccugcugggcgacccccagugcgacggcuuccagaacaagaagugggaccuguucguggagagaagcaaggccuacagcaacugcuaccccuacgacgugcccgacuacgccagccugagaagccugguggccagcagcggcacccuggaguucaacaacgagaacuucaacuggaccggcgugacccagaacggcaccagcagcgccugcaucagaagaagcaacagcagcuucuucagcagacugaacuggcugacccaccugaacuucaaguaccccgcccugaacgugaccaugcccaacaacgagcaguucgacaagcuguacaucuggggcgugcaccaccccggcaccgacaaggaccagaucuuccuguacgcccagagcagcggcagaaucaccgugagcaccaagagaagccagcaggccgugauccccaacaucggcagcagacccagaaucagaaacauccccagcagaaucagcaucuacuggaccaucgugaagcccggcgacauccugcugaucaacagcaccggcaaccugaucgcccccagaggcuacuucaagaucagaagcggcaagagcagcaucaugagaagcgacgcccccaucggcaagugcaagagcgagugcaucacccccaacggcagcauccccaacgacagacccuuccagaacgugaacagaaucaccuacggcgccugccccagauacgugaagcagagcacccugaagcuggccaccggcaugagaaacgugcccgagaagcagaccagaggcaucuucggcgccaucgccggcuucaucgagaacggcugggagggcaugguggacggcugguacggcuucagacaccagaacagcgagggcagaggccaggccgccgaccugaagagcacccaggccgccaucgaccagaucaacggcaagcugaacagacugaucggcaagaccaacgagaaguuccaccagaucgagaaggaguucagcgagguggagggcagaauccaggaccuggagaaguacguggaggacaccaagaucgaccuguggagcuacaacgccgagcugcugguggcccuggagaaccagcacaccaucgaccugaccgacagcgagaugaacaagcuguucgagaagaccaagaagcagcugagagagaacgccgaggacaugggcaacggcugcuucaagaucuaccacaagugcgacaacgccugcaucggcagcaucagaaacggcaccuacgaccacgacguguacagagacgaggcccugaacaacagauuccagaucaagggcguggagcugaagagcggcuacaaggacuggauccuguggaucagcuucgccaucagcugcuuccugcugugcguggcccugcugggcuucaucaugugggccugccagaagggcaacaucagaugcaacaucugcaucuga

SEQ ID NO: 169952 - RNA, 1701 nt, Artificial Sequence
  derived and/or modified CDS sequence (opt4) from hemagglutinin__InfluenzaA__AGG13615
augaagaccaucaucgcccugagcuacauccugugccugguguucgcccagaagauccccggcaacgacaacagcaccgccacccugugccugggccaccacgccgugcccaacggcaccaucgugaagaccaucaccaacgacagaaucgaggugaccaacgccaccgagcuggugcagaacagcagcaucggcgagaucugcgacagcccccaccagauccuggacggcgagaacugcacccugaucgacgcccugcugggcgacccccagugcgacggcuuccagaacaagaagugggaccuguucguggagagaagcaaggccuacagcaacugcuaccccuacgacgugcccgacuacgccagccugagaagccugguggccagcagcggcacccuggaguucaacaacgagagcuucaacuggaccggcgugacccagaacggcaccagcagcgccugcaucagaagaagcaacagcagcuucuucagcagacugaacuggcugacccaccugaacuucaaguaccccgcccugaacgugaccaugcccaacaacgagcaguucgacaagcuguacaucuggggcgugcaccaccccggcaccgacaaggaccagaucuuccuguacgcccagagcagcggcagaaucaccgugagcaccaagagaagccagcaggccgugauccccaacaucggcagcagacccagaaucagaaacauccccagcagaaucagcaucuacuggaccaucgugaagcccggcgacauccugcugaucaacagcaccggcaaccugaucgcccccagaggcuacuucaagaucagaagcggcaagagcagcaucaugagaagcgacgcccccaucggcaagugcaagagcgagugcaucacccccaacggcagcauccccagcgacaagcccuuccagaacgugaacagaaucaccuacggcgccugccccagauacgugaagcagagcacccugaagcuggccaccggcaugagaaacgugcccgagaagcagaccagaggcaucuucggcgccaucgccggcuucaucgagaacggcugggagggcaugguggacggcugguacggcuucagacaccagaacagcgagggcagaggccaggccgccgaccugaagagcacccaggccgccaucgaccagaucaacggcaagcugaacagacugaucggcaagaccaacgagaaguuccaccagaucgagaaggaguucagcgagguggagggcagaauccaggaccuggagaaguacguggaggacaccaagaucgaccuguggagcuacaacgccgagcugcugguggcccuggagaaccagcacaccaucgaccugaccgacagcgagaugaacaagcuguucgagaagaccaagaagcagcugagagagaacgccgaggacaugggcaacggcugcuucaagaucuaccacaagugcgacaacgccugcaucggcagcaucagaaacggcaccuacgaccacgacguguacagagacgaggcccugaacaacagauuccagaucaagggcguggagcugaagagcggcuacaaggacuggauccuguggaucagcuucgccaucagcugcuuccugcugugcguggcccugcugggcuucaucaugugggccugccagaagggcaacaucagaugcaacaucugcaucuga

SEQ ID NO: 169953 - RNA, 1701 nt, Artificial Sequence; identical to SEQ ID NO: 169951
  derived and/or modified CDS sequence (opt4) from hemagglutinin__InfluenzaA__AGG13627

SEQ ID NO: 169954 - RNA, 1701 nt, Artificial Sequence
  derived and/or modified CDS sequence (opt4) from hemagglutinin__InfluenzaA__AGG13639
augaagaccaucaucgcccugagcuacauccugugccugguguucgcccagaagcugcccggcaacgacaacagcaccgccacccugugccugggccaccacgccgugcccaacggcaccaucgugaagaccaucaccaacgacagaaucgaggugaccaacgccaccgagcuggugcagaacagcagcaucggcgagaucugcgacagcccccaccagauccuggacggcgagaacugcacccugaucgacgcccugcugggcgacccccagugcgacggcuuccagaacaagaagugggaccuguucguggagagaagcaaggccuacagcaacugcuaccccuacgacgugcccgacuacgccagccugagaagccugguggccagcagcggcacccuggaguucaacaacgagagcuucaacugggccggcgugacccagaacggcaccagcagcgccugcaucagaggcagcaacagcagcuucuucagcagacugaacuggcugacccaccugaacuucaaguaccccgcccugaacgugaccaugcccaacaacgagcaguucgacaagcuguacaucuggggcgugcaccaccccggcaccaacaaggaccagaucuuccuguacgcccagagcagcggcagaaucaccgugagcaccaagagaagccagcaggccgugauccccaacaucggcagcagacccagaaucagaaacauccccagcagaaucagcaucuacuggaccaucgugaagcccggcgacauccugcugaucaacagcaccggcaaccugaucgcccccagaggcuacuucaagaucagaagcggcaagagcagcaucaugagaagcgacgcccccaucggcaagugcaagagcgagugcaucacccccaacggcagcauccccaacgacaagcccuuccagaacgugaacagaaucaccuacggcgccugccccagauacgugaagcagagcacccugaagcuggccaccggcaugagaaacgugcccgagaagcagaccagaggcaucuucggcgccaucgccggcuucaucgagaacggcugggagggcaugguggacggcugguacggcuucagacaccagaacagcgagggcagaggccaggccgccgaccugaagagcacccaggccgccaucgaccagaucaacggcaagcugaacagacugaucggcaagaccaacgagaaguuccaccagaucgagaaggaguucagcgagguggagggcagaauccaggaccuggagaaguacguggaggacaccaagaucgaccuguggagcuacaacgccgagcugcugguggcccuggagaaccagcacaccaucgaccugaccgacagcgagaugaacaagcuguucgagaagaccaagaagcagcugagagagaacgccgaggacaugggcaacggcugcuucaagaucuaccacaagugcgacaacgccugcaucggcagcaucagaaacggcaccuacgaccacgacguguacagagacgaggcccugaacaacagauuccagaucaagggcguggagcugaagagcggcuacaaggacuggauccuguggaucagcuucgccaucagcugcuuccugcugugcguggcccugcugggcuucaucaugugggccugccagaagggcaacaucagaugcaacaucugcaucuga

SEQ ID NO: 169955 - RNA, 1701 nt, Artificial Sequence; identical to SEQ ID NO: 169944
  derived and/or modified CDS sequence (opt4) from hemagglutinin__InfluenzaA__AGG13651

SEQ ID NO: 169956 - RNA, 1701 nt, Artificial Sequence; identical to SEQ ID NO: 169943
  derived and/or modified CDS sequence (opt4) from hemagglutinin__InfluenzaA__AGG13663

SEQ ID NO: 169957 - RNA, 1701 nt, Artificial Sequence; identical to SEQ ID NO: 169944
  derived and/or modified CDS sequence (opt4) from hemagglutinin__InfluenzaA__AGG13675

SEQ ID NO: 169958 - RNA, 1701 nt, Artificial Sequence; identical to SEQ ID NO: 169943
  derived and/or modified CDS sequence (opt4) from hemagglutinin__InfluenzaA__AGG13687

SEQ ID NO: 169959 - RNA, 1701 nt, Artificial Sequence; identical to SEQ ID NO: 169944
  derived and/or modified CDS sequence (opt4) from hemagglutinin__InfluenzaA__AGG13711

SEQ ID NO: 169960 - RNA, 1701 nt, Artificial Sequence; identical to SEQ ID NO: 169943
  derived and/or modified CDS sequence (opt4) from hemagglutinin__InfluenzaA__AGG13723

SEQ ID NO: 169961 - RNA, 1701 nt, Artificial Sequence; identical to SEQ ID NO: 169943
  derived and/or modified CDS sequence (opt4) from hemagglutinin__InfluenzaA__AGG13735

SEQ ID NO: 169962 - RNA, 1701 nt, Artificial Sequence; identical to SEQ ID NO: 169943
  derived and/or modified CDS sequence (opt4) from hemagglutinin__InfluenzaA__AGG13747

SEQ ID NO: 169963 - RNA, 1701 nt, Artificial Sequence
  derived and/or modified CDS sequence (opt4) from hemagglutinin__InfluenzaA__AGG13759
augaagaccaucaucgcccugagcuacauccugugccugguguucgcccaggagcugcccggcaacgacgacagcaccgccacccugugccugggccaccacgccgugcccaacggcaccaucgugaagaccaucaccaacgacagaaucgaggugaccaacgccaccgagcuggugcagagcagcagcaccggcgagaucugcaacagcccccaccagauccuggacggcgagaacugcacccugaucgacgcccugcugggcgacccccagugcgacggcuuccagaacaagaagugggaccuguucguggagagaagcaaggcccacagcaacugcuaccccuacgacgugcccgacuacgccagccugagaagccugguggccagcagcggcacccuggaguucaacaacgagagcuucaacuggaccggcgugacccagaacggcaccagcagcgccugcaucagaagaagcaacaacagcuucuucagcagacugaacuggcugacccaccugaacuucaaguaccccgcccugaacgugaccaugcccaacaacgagcaguucgacaagcuguacaucuggggcgugcaccaccccggcaccgacaaggaccagaucuuccuguacgcccaggccagcggcagaaucaccgugagcaccaagagaagccagcagaccgugauccccaacaucggcagcagacccagagugagaaacauccccagcagagugagcaucuacuggaccaucgugaagcccggcgacauccugcugaucaacagcaccggcaaccugaucgcccccagaggcuacuucaagaucagaagcggcaagagcagcaucaugagaagcgacgcccccaucggcaagugcaacagcgccugcaucacccccaacggcagcauccccaacgacaagcccuuccagaacgugaacagaaucaccuacggcgccugccccagauacgugaagcagaacacccugaagcuggccaccggcaugagaaacgugcccgagaagcagaccagaggcaucuucggcgccaucgccggcuucaucgagaacggcugggagggcaugguggacggcugguacggcuucagacaccagaacagcgagggcagaggccaggccgccgaccugaagagcacccaggccgccaucgaccagaucaacggcaagcugaacagacugaucggcaagaccaacgagaaguuccaccagaucgagaaggaguucagcgagguggagggcagaauccaggaccuggagaaguacguggaggacaccaagaucgaccuguggagcuacaacgccgagcugcugguggcccuggagaaccagcacaccaucgaccugaccgacagcgagaugaacaagcuguucgagaagaccaagaagcagcugagagagaacgccgaggacaugggcaacggcugcuucaagaucuaccacaagugcgacaacgccugcaucggcagcaucagaaacggcaccuacgaccacgacguguacagagacgaggcccugaacaacagauuccagaucaagggcguggagcugaagagcggcuacaaggacuggauccuguggaucagcuucgccaucagcugcuuccugcugugcguggcccugcugggcuucaucaugugggccugccagaagggcaacaucagaugcaacaucugcaucuga

SEQ ID NO: 169964 - RNA, 1701 nt, Artificial Sequence
  derived and/or modified CDS sequence (opt4) from hemagglutinin__InfluenzaA__AGG13771
augaagaccaucaucgcccugagcuacauccugugccugguguucgcccagaagcugcccggcaacgacaacagcaccgccacccugugccugggccaccacgccgugcccaacggcaccaucgugaagaccaucaccaacgaccagaucgaggugaccaacgccaccgagcuggugcagagcagcagcaccggcgagaucugcgacagcccccaccagauccuggacggcgagaacugcacccugaucgacgcccugcugggcgacccccagugcgacggcuuccagaacaagaagugggaccuguucguggagagaagcaaggccuacagcaacugcuaccccuacgacgugcccgacuacgccagccugagaagccugguggccagcagcggcacccuggaguucaacaacgagagcuucaacuggaccggcgugacccagaacggcaccagcagcgccugcaucagaagaagcgacagcagcuucuucagcagacugaacuggcugacccaccugaacuucaaguaccccgcccugaacgugaccaugcccaacaacgagcaguucgacaagcuguacaucuggggcgugcaccaccccggcaccgacaaggaccagaucuuccuguacgcccaggccagcggcagaaucaccgugagcaccaagagaagccagcagagcgugauccccaacaucggcagcagacccagaaucagaaacauccccagcagaaucagcaucuacuggaccaucgugaagcccggcgacauccugcugaucaacagcaccggcaaccugaucgcccccagaggcuacuucaagauccagagcggcaagagcagcaucaugagaagcgacgcccccaucggcaagugcaacagcgagugcaucacccccaacggcagcauccccaacgacaagcccuuccagaacgugaacagaaucaccuacggcgccugccccagauacgugaagcagaacacccugaagcuggccaccggcaugagaaacgugcccgagaagcagaccagaggcaucuucggcgccaucgccggcuucaucgagaacggcugggagggcaugguggacggcugguacggcuucagacaccagaacagcgagggcagaggccaggccgccgaccugaagagcacccaggccgccaucgaccagaucaacggcaagcugaacagacugaucggcaagaccaacgagaaguuccaccagaucgagaaggaguucagcgagguggagggcagaauccaggaccuggagaaguacguggaggacaacaagaucgaccuguggagcuacaacgccgagcugcugguggcccuggagaaccagcacaccaucgaccugaccgacagcgagaugaacaagcuguucgagaagaccaagaagcagcugagagagaacgccgaggacaugggcaacggcugcuucaagaucuaccacaagugcgacaacgccugcaucggcagcaucagaaacggcaccuacaaccacgacguguacagagacgaggcccugaacaacagauuccagaucaagggcguggagcugaagagcggcuacaaggacuggauccuguggaucagcuucgccaucagcugcuuccugcugugcguggcccugcugggcuucaucaugugggccugccagaagggcaacaucagaugcaacaucugcaucuga

SEQ ID NO: 169965 - RNA, 1701 nt, Artificial Sequence
  derived and/or modified CDS sequence (opt4) from hemagglutinin__InfluenzaA__AGG13783
augaagaccaucaucgcccugagcuacauccugugccugguguucgcccagaagcugcccggcaacgacaacagcaccgccacccugugccugggccaccacgccgugcccaacggcaccaucgugaagaccaucaccaacgaccagaucgaggugaccaacgccaccgagcuggugcagaacagcagcaugggcgagaucugcgacagcccccaccagauccuggacggcgagaacugcacccugaucgacgcccugcugggcgacccccagugcgacggcuuccagaacaagaagugggaccuguucguggagagaagcaaggccuacagcaacugcuaccccuacgacgugcccgacuacgccagccugagaagccugguggccagcagcggcacccuggaguucaacaacgagagcuucaacugggccggcgugacccagaacggcaccagcagcgccugcaucagaggcagcaacagcagcuucuucagcagacugaacuggcugacccaccugaacuucaaguaccccgcccugaacgugaccaugcccaacaacgagcaguucgacaagcuguacaucuggggcgugcaccaccccggcaccgacaaggaccagaucuuccuguacgcccagagcagcggcagaaucaccgugagcaccaagagaagccagcaggccgugauccccaacaucggcagcagacccagaaucagaaacgugcccagcagaaucagcaucuacuggaccaucgugaagcccggcgacauccugcugaucaacagcaccggcaaccugaucgcccccagaggcuacuucaagaucagaagcggcaagagcagcaucaugagaagcgacgcccccaucggcaagugcaagagcgagugcaucacccccaacggcagcauccccaacgacaagcccuuccagaacgugaacagaaucaccuacggcgccugccccagauacgugaagcagagcacccugaagcuggccaccggcaugagaaacgugcccgagaagcagaccagaggcaucuucggcgccaucgccggcuucaucgagaacggcugggagggcaugguggacggcugguacggcuucagacaccagaacagcgagggcagaggccaggccgccgaccugaagagcacccaggccgccaucgaccagaucaacggcaagcugaacagacugaucggcaagaccaacgagaaguuccaccagaucgagaaggaguucagcgagguggagggcagaauccaggaccuggagaaguacguggaggacaccaagaucgaccuguggagcuacaacgccgagcugcugguggcccuggagaaccagcacaccaucgaccugaccgacagcgagaugaacaagcuguucgagaagaccaagaagcagcugagagagaacgccgaggacaugggcaacggcugcuucaagaucuaccacaagugcgacaacgccugcaucggcagcaucagaaacggcaccuacgaccacgacguguacagagacgaggcccugaacaacagauuccagaucaagggcguggagcugaagagcggcuacaaggacuggauccuguggaucagcuucgccaucagcugcuuccugcugugcguggcccugcugggcuucaucaugugggccugccagaagggcaacaucagaugcaacaucugcaucuga

SEQ ID NO: 169966 - RNA, 1701 nt, Artificial Sequence; identical to SEQ ID NO: 169944
  derived and/or modified CDS sequence (opt4) from hemagglutinin__InfluenzaA__AGG13795

SEQ ID NO: 169967 - RNA, 1701 nt, Artificial Sequence; identical to SEQ ID NO: 169895
  derived and/or modified CDS sequence (opt4) from hemagglutinin__InfluenzaA__AGG13807

SEQ ID NO: 169968 - RNA, 1701 nt, Artificial Sequence; identical to SEQ ID NO: 169944
  derived and/or modified CDS sequence (opt4) from hemagglutinin__InfluenzaA__AGG13819

SEQ ID NO: 169969 - RNA, 1701 nt, Artificial Sequence; identical to SEQ ID NO: 169944
  derived and/or modified CDS sequence (opt4) from hemagglutinin__InfluenzaA__AGG13831

SEQ ID NO: 169970 - RNA, 1701 nt, Artificial Sequence; identical to SEQ ID NO: 169943
  derived and/or modified CDS sequence (opt4) from hemagglutinin__InfluenzaA__AGG13855

SEQ ID NO: 169971 - RNA, 1701 nt, Artificial Sequence
  derived and/or modified CDS sequence (opt4) from hemagglutinin__InfluenzaA__AGG13867
augaagaccaucaucgcccugagcuacauccugugccugguguucgcccagaagcugcccggcaacgacaacagcaccgccacccugugccugggccaccacgccgugcccaacggcaccaucgugaagaccaucaccaacgacagaaucgaggugaccaacgccaccgagcuggugcagaacagcagcaucggcaagaucugcgacagcccccaccagauccuggacggcgagaacugcacccugauggacgcccugcugggcgacccccagugcgacggcuuccagaacaagaagugggaccuguucguggagagaagcaaggccuacagcaacugcuaccccuacgacgugcccgacuacgccagccugagaagccugguggccagcagcggcacccuggaguucaacaacgagagcuucaacuggaccggcgugacccagaacggcaccagcagcgccugcaucagaagaagcaacagcagcuucuucagcagacugaacuggcugacccaccugaacuucaaguaccccgcccugaacgugaccaugcccaacaacgagcaguucgacaagcuguacaucuggggcgugcaccaccccggcaccgacaaggaccagaucuuccuguacgcccagagcagcggcagaaucaccgugagcaccaagagaagccagcaggccgugauccccaacaucggcagcagacccagaaucagaaacauccccagcagaaucagcaucuacuggaccaucgugaagcccggcgacauccugcugaucaacagcaccggcaaccugaucgcccccagaggcuacuucaagaucagaagcggcaagagcagcaucaugagaagcgacgcccccaucggcaagugcaagagcgagugcaucacccccaacggcagcauccccaacgacaagcccuuccagaacgugaacagaaucaccuacggcgccugccccagauacgugaagcagagcacccugaagcuggccaccggcaugagaaacgugcccgagaagcagaccagaggcaucuucggcgccaucgccggcuucaucgagaacggcugggagggcaugguggacggcugguacggcuucagacaccagaacagcgagggcagaggccaggccgccgaccugaagagcacccaggccgccaucgaccagaucaacggcaagcugaacagacugaucggcaagaccaacgagaaguuccaccagaucgagaaggaguucagcgagguggagggcagaauccaggaccuggagaaguacguggaggacaccaagaucgaccuguggagcuacaacgccgagcugcugguggcccuggagaaccagcacaccaucgaccugaccgacagcgagaugaacaagcuguucgagaagaccaagaagcagcugagagagaacgccgaggacaugggcaacggcugcuucaagaucuaccacaagugcgacaacgccugcaucggcagcaucagaaacggcaccuacgaccacaacguguacagagacgaggcccugaacaacagauuccagaucaagggcguggagcugaagagcggcuacaaggacuggauccuguggaucagcuucgccaucagcugcuuccugcugugcguggcccugcugggcuucaucaugugggccugccagaagggcaacaucagaugcaacaucugcaucuga

SEQ ID NO: 169972 - RNA, 1701 nt, Artificial Sequence; identical to SEQ ID NO: 169943
  derived and/or modified CDS sequence (opt4) from hemagglutinin__InfluenzaA__AGG13879

SEQ ID NO: 169973 - RNA, 1701 nt, Artificial Sequence; identical to SEQ ID NO: 169943
  derived and/or modified CDS sequence (opt4) from hemagglutinin__InfluenzaA__AGG13891

SEQ ID NO: 169974 - RNA, 1701 nt, Artificial Sequence
  derived and/or modified CDS sequence (opt4) from hemagglutinin__InfluenzaA__AGG13903
augaagaccaucaucgcccugagcuacauccugugccugguguucgcccagaagcugcccggcaacgacaacagcaccgccacccugugccugggccaccacgccgugcccaacggcaccaucgugaagaccaucaccaacgaccagaucgaggugaccaacgccaccgagcuggugcagagcagcagcaccggcgagaucugcgacagcccccaccagauccuggacggcgagaacugcacccugaucgacgcccugcugggcgacccccagugcgacggcuuccagaacaagaagugggaccuguucguggagagaagcaaggccuacagcaacugcuaccccuacgacgugcccgacuacgccagccugagaagccugguggccagcagcggcacccuggaguucaacaacgagagcuucaacuggaccggcgugacccagaacggcaccagcagcgccugcaucagaagaagcgacagcagcuucuucagcagacugaacuggcugacccaccugaacuucaaguaccccgcccugaacgugaccaugcccaacaacgagcaguucgacaagcuguacaucuggggcgugcaccaccccggcaccgacaaggaccagaucuuccuguacgcccaggccagcggcagaaucaccgugagcaccaagagaagccagcagagcgugcugcccaacaucggcagcagacccagaaucagaaacauccccagcagaaucagcaucuacuggaccaucgugaagcccggcgacauccugcugaucaacagcaccggcaaccugaucgcccccagaggcuacuucaagauccagagcggcaagagcagcaucaugagaagcgacgcccccaucggcaagugcaacagcgagugcaucacccccaacggcagcauccccaacgacaagcccuuccagaacgugaacagaaucaccuacggcgccugccccagauacgugaagcagaacacccugaagcuggccaccggcaugagaaacgugcccgagaagcagaccagaggcaucuucggcgccaucgccggcuucaucgagaacggcugggagggcaugguggacggcugguacggcuucagacaccagaacagcgagggcagaggccaggccgccgaccugaagagcacccaggccgccaucgaccagaucaacggcaagcugaacagacugaucggcaagaccaacgagaaguuccaccagaucgagaaggaguucagcgagguggagggcagaauccaggaccuggagaaguacguggaggacaccaagaucgaccuguggagcuacaacgccgagcugcugguggcccuggagaaccagcacaccaucgaccugaccgacagcgagaugaacaagcuguucgagaagaccaagaagcagcugagagagaacgccgaggacaugggcaacggcugcuucaagaucuaccacaagugcgacaacgccugcaucggcagcaucagaaacggcaccuacaaccacgacguguacagagacgaggcccugaacaacagauuccagaucaagggcguggagcugaagagcggcuacaaggacuggauccuguggaucagcuucgccaucagcugcuuccugcugugcguggcccugcugggcuucaucaugugggccugccagaagggcaacaucagaugcaacaucugcaucuga

SEQ ID NO: 169975 - RNA, 1701 nt, Artificial Sequence; identical to SEQ ID NO: 169943
  derived and/or modified CDS sequence (opt4) from hemagglutinin__InfluenzaA__AGG13927

SEQ ID NO: 169976 - RNA, 1701 nt, Artificial Sequence; identical to SEQ ID NO: 169951
  derived and/or modified CDS sequence (opt4) from hemagglutinin__InfluenzaA__AGG13939

SEQ ID NO: 169977 - RNA, 1701 nt, Artificial Sequence
  derived and/or modified CDS sequence (opt4) from hemagglutinin__InfluenzaA__AGG13962
augaaggccauccugguggugcugcuguacaccuucgccaccgccaacgccgacacccugugcaucggcuaccacgccaacaacagcaccgacaccguggacaccgugcuggagaagaacgugaccgugacccacagcgugaaccugcuggaggacaagcacaacggcaagcugugcaagcugagaggcguggccccccugcaccugggcaagugcaacaucgccggcuggauccugggcaaccccgagugcgagagccugagcaccgccagcagcuggagcuacaucguggagaccagcagcagcgacaacggcaccugcuaccccggcgacuucaucaacuacgaggagcugagagagcagcugagcagcgugagcagcuucgagggcuucgagaucuuccccaagaccagcagcuggcccaaccacgacagcaacaagggcgugaccgccgccugcccccacgccggcgccaagagcuucuacaagaaccugaucuggcuggugaagaagggcaacagcuaccccaagcugagcaagagcuacaucaacgacaagggcaaggaggugcuggugcuguggggcauccaccaccccagcaccaccgccgaccagcagagccuguaccagaacgccgacgccuacguguucgugggcaccagcagauacagcaagaaguucaagcccgagaucgccaucagacccaaggugagagaccaggagggcagaaugaacuacuacuggacccugaucgagcccggcgacaagaucaccuucgaggccaccggcaaccugguggugcccagauacgccuucgccauggagagaaacgccgagagcggcaucaucaucagcgacacccccgugcacgacugcaacaccaccugccagacccccgagggcgccaucaacaccagccugcccuuccagaacauccaccccaucaccaucggcaagugccccaaguacgugaagagcaccaagcugagacuggccaccggccugagaaacgugcccagcauccagagcagaggccuguucggcgccaucgccggcuucaucgagggcggcuggaccggcaugguggacggcugguacggcuaccaccaccagaacgagcagggcagcggcuacgccgccgaccugaagagcacccagaacgccaucgacaagaucaccaacaaggugaacagcgugaucgagaagaugaacacccaguucaccgccgugggcaaggaguucaaccaccuggagaagagaaucgagaaccugaacaagaagguggacgacggcuuccuggacaucuggaccuacaacgccgagcugcuggugcugcuggagaacgagagaacccuggacuaccacgacagcaacgugaagaaccuguacgagaaggugagaaaccagcugaagaacaacgccaaggagaucggcaacggcugcuucgaguucuaccacaagugcgacaacaccugcauggagagcgugaagaacggcaccuacgacuaccccaaguacagcgaggaggccaagcugaacagagagaagaucgacggcgugaagcuggagagcaccagaaucuaccagauccuggccaucuacagcaccguggccagcagccuggugcugguggugagccugggcgccaucagcuucuggaugugcagcaacggcagccugcagugcagaaucugcaucuga

SEQ ID NO: 169978 - RNA, 1701 nt, Artificial Sequence; identical to SEQ ID NO: 169943
  derived and/or modified CDS sequence (opt4) from hemagglutinin__InfluenzaA__AGG13973

SEQ ID NO: 169979 - RNA, 1701 nt, Artificial Sequence; identical to SEQ ID NO: 169943
  derived and/or modified CDS sequence (opt4) from hemagglutinin__InfluenzaA__AGG13985

SEQ ID NO: 169980 - RNA, 1701 nt, Artificial Sequence; identical to SEQ ID NO: 169943
  derived and/or modified CDS sequence (opt4) from hemagglutinin__InfluenzaA__AGG13997

SEQ ID NO: 169981 - RNA, 1701 nt, Artificial Sequence; identical to SEQ ID NO: 169943
  derived and/or modified CDS sequence (opt4) from hemagglutinin__InfluenzaA__AGG14009

SEQ ID NO: 169982 - RNA, 1701 nt, Artificial Sequence
  derived and/or modified CDS sequence (opt4) from hemagglutinin__InfluenzaA__AGG14021
augaagaccaucaucgcccugagcuacauccugugccugguguucgcccaggagcugcccggcaacgacgacagcaccgccacccugugccugggccaccacgccgugcccaacggcaccaucgugaagaccaucaccaacgaccagaucgaggugaccaacgccaccgagcuggugcagagcagcagcaccggcgagaucugcaacagcccccaccagauccuggacggcgagaacugcacccugaucgacgcccugcugggcgacccccagugcgacggcuuccagaacaagaagugggaccuguucguggagagaagcaaggcccacagcaacugcuaccccuacgacgugcccgacuacgccagccugagaagccugguggccagcagcggcacccuggaguucaacaacgagagcuucaacuggaccggcgugacccagaacggcaccagcagcgccugcaucagaagaagcaacaacagcuucuucagcagacugaacuggcugacccaccugaacuucaaguaccccgcccugaacgugaccaugcccaacaacgagcaguucgacaagcuguacaucuggggcgugcaccaccccggcaccgacaaggaccagaucuuccuguacgcccaggccagcggcagaaucaccgugagcaccaagagaagccagcaggccgugauccccaacaucggcagcagacccagagugagaaacauccccagcagagugagcaucuacuggaccaucgugaagcccggcgacauccugcugaucaacagcaccggcaaccugaucgcccccagaggcuacuucaagaucagaagcggcaagagcagcaucaugagaagcgacgcccccaucggcaagugcaacagcgccugcaucacccccaacggcagcauccccaacgacaagcccuuccagaacgugaacagaaucaccuacggcgccugccccagauacgugaagcagaacacccugaagcuggccaccggcaugagaaacgugcccgagaagcagaccagaggcaucuucggcgccaucgccggcuucaucgagaacggcugggagggcaugguggacggcugguacggcuucagacaccagaacagcgagggcagaggccaggccgccgaccugaagagcacccaggccgccaucgaccagaucaacggcaagcugaacagacugaucggcaagaccaacgagaaguuccaccagaucgagaaggaguucagcgagguggagggcagaauccaggaccuggagaaguacguggaggacaccaagaucgaccuguggagcuacaacgccgagcugcugguggcccuggagaaccagcacaccaucgaccugaccgacagcgagaugaacaagcuguucgagaagaccaagaagcagcugagagagaacgccgaggacaugggcaacggcugcuucaagaucuaccacaagugcgacaacgccugcaucggcagcaucagaaacggcaccuacgaccacgacguguacagagacgaggcccugaacaacagauuccagaucaagggcaucgagcugaagagcggcuacaaggacuggauccuguggaucagcuucgccaucagcugcuuccugcugugcguggcccugcugggcuucaucaugugggccugccagaagggcaacaucagaugcaacaucugcaucuga

SEQ ID NO: 169983 - RNA, 1701 nt, Artificial Sequence; identical to SEQ ID NO: 169944
  derived and/or modified CDS sequence (opt4) from hemagglutinin__InfluenzaA__AGG14033

SEQ ID NO: 169984 - RNA, 1701 nt, Artificial Sequence; identical to SEQ ID NO: 169963
  derived and/or modified CDS sequence (opt4) from hemagglutinin__InfluenzaA__AGG14318

SEQ ID NO: 169985 - RNA, 1701 nt, Artificial Sequence
  derived and/or modified CDS sequence (opt4) from hemagglutinin__InfluenzaA__AGG14330
augaagaccaucaucgcccugagcuacauccugugccugguguucgcccagaagcugcccggcaacgacaacagcaccgccacccugugccugggccaccacgccgugcccaacggcaccaucgugaagaccaucaccaacgacagaaucgaggugaccaacgccaccgagcuggugcagaacagcagcaucggcgagaucugcgacagcccccaccagauccuggacggcgagaacugcacccugaucgacgcccugcugggcgacccccagugcgacggcuuccagaacaagaagugggaccuguucguggagagaagcaaggccuacagcaacugcuaccccuacgacgugcccgacuacgccagccugagaagccugguggccagcagcggcacccuggaguucaacaacgagagcuucaacuggaccggcgugacccagaacggcaccagcagcgccugcaucagaagaagcaacagcagcuucuucagcagacugaacuggcugacccaccugaacuucaaguaccccgcccugaacgugaccaugcccaacaacgagcaguucgacaagcuguacaucuggggcgugcaccaccccggcaccgacaaggaccagaucuuccuguacgcccagagcagcggcagaaucaccgugagcaccaagagaagccagcaggccgugauccccaacaucggcagcagacccagaaucagaaacauccccagcagaaucagcaucuacuggaccaucgugaagcccggcgacauccugcugaucaacagcaccggcaaccugaucgcccccagaggcuacuucaagaucagaagcggcaagagcagcaucaucagaagcgacgcccccaucggcaagugcaagagcgagugcaucacccccaacggcagcauccccaacgacaagcccuuccagaacgugaacagaaucaccuacggcgccugccccagauacgugaagcagagcacccugaagcuggccaccggcaugagaaacgugcccgagaagcagaccagaggcaucuucggcgccaucgccggcuucaucgagaacggcugggagggcaugguggacggcugguacggcuucagacaccagaacagcgagggcagaggccaggccgccgaccugaagagcacccaggccgccaucgaccagaucaacggcaagcugaacagacugaucggcaagaccaacgagaaguuccaccagaucgagaaggaguucagcgagguggagggcagaauccaggaccuggagaaguacguggaggacaccaagaucgaccuguggagcuacaacgccgagcugcugguggcccuggagaaccagcacaccaucgaccugaccgacagcgagaugaacaagcuguucgagaagaccaagaagcagcugagagagaacgccgaggacaugggcaacggcugcuucaagaucuaccacaagugcgacaacgccugcaucggcagcaucagaaacggcaccuacgaccacgacguguacagagacgaggcccugaacaacagauuccagaucaagggcguggagcugaagagcggcuacaaggacuggauccuguggaucagcuucgccaucagcugcuuccugcugugcguggcccugcugggcuucaucaugugggccugccagaagggcaacaucagaugcaacaucugcaucuga

SEQ ID NO: 169986 - RNA, 1701 nt, Artificial Sequence
  derived and/or modified CDS sequence (opt4) from hemagglutinin__InfluenzaA__AGG84179
augaagaccaucaucgcccugagcuacauccugugccugguguucgcccagaagcugcccggcaacgacaacagcaccgccacccugugccugggccaccacgccgugcccaacggcaccaucgugaagaccaucaccaacgaccagaucgaggugaccaacgccaccgagcuggugcagagcagcagcgccagcgagaucugcgacagcccccaccacauccuggacggcgagaacugcacccugaucgacgcccugcugggcgacccccagugcgacggcuuccagaacaagaagugggaccuguucguggagagaagcagagccuacagcaacugcuaccccuacgacgugcccgacuacgccagccugagaagccugguggccagcagcggcacccuggaguucaacaacgagagcuucaacuggaccggcgugacccagaacggcaccagcagcgccugcaucagaagaagcaacaacagcuucuucagcagacugaacuggcugacccaccugaacuucaaguaccccgcccugaacgugaccaugcccaacaacgagcaguucgacaagcuguacaucuggggcgugcaccaccccggcaccgacaaggaccagaucuuccuguacgcccaggccagcggcagaaucaccgugagcaccaagagaagccagcaggccgugauccccaacaucggcagcagacccagagugagaaacauccccagcagaaucagcaucuacuggaccaucgugaagcccggcgacauccugcugaucaacagcaccggcaaccugaucgcccccagaggcuacuucaagaucagaagcggcaagagcagcaucaugagaagcgacgcccccaucggcaagugcaacagcgagugcaucacccccaacggcagcauccccaacgacaagcccuuccagaacgugaacagaaucaccuacggcgccugccccagauacgugaagcagagcacccugaagcuggccaccggcaugagaaacgugcccgagaagcagaccagaggcaucuucggcgccaucgccggcuucaucgagaacggcugggagggcaugauggacggcugguacggcuucagacaccagaacagcgagggcagaggccaggccgccgaccugaagagcacccaggccgccaucgaccagaucaacggcaagcugaacagacugaucggcaagaccaacgagaaguuccaccagaucgagaaggaguucagcgagguggagggcagaauccaggaccuggagaaguacguggaggacaccaagaucgaccuguggagcuacaacgccgagcugcugguggcccuggagaaccagcacaccaucgaccugaccgacagcgagaugaacaagcuguucgagaagaccaagaagcagcugagagagaacgccgaggacaugggcaacggcugcuucaagaucuaccacaagugcgacaacgccugcaucggcagcaucagaaacggcaccuacgaccacgacguguacagagacgaggcccugaacaacagauuccagaucaagggcguggagcugaagagcggcuacaaggacuggauccuguggaucagcuucgccaucagcugcuuccugcugugcguggcccugcugggcuucaucaugugggccugccagaagggcaacaucagaugcaacaucugcaucuga

SEQ ID NO: 169987 - RNA, 1704 nt, Artificial Sequence
  derived and/or modified CDS sequence (opt4) from hemagglutinin__InfluenzaA__AGI02564
auggagaagaucgugcugcugcuggccaucgugagccuggugaagagcgaccagaucugcaucggcuaccacgccaacaacagcaccgagcagguggacaccaucauggagaagaacgugaccgugacccacgcccaggacauccuggagaagacccacaacggcaagcugugcgaccuggacggcgugaagccccugauccugagagacugcagcguggccggcuggcugcugggcaaccccaugugcgacgaguucaucaacgugcccgaguggagcuacaucguggagaaggccaaccccaccaacgaccugugcuaccccggcaacuucaacgacuacgaggagcugaagcaccugcugagcagaaucaaccacuucgagaagauccagaucauccccaagagcagcuggagcggccacgaggccagcagcggcgugagcagcgccugccccuaccagggcacccccagcuucuucagaaacgugguguggcugaucaagaagaacaacaccuaccccaccaucaagagaagcuacaacaacaccaaccaggaggaccugcugauccuguggggcauccaccacagcaacgacgccgccgagcagaccaagcuguaccagaaccccaccaccuacaucagcgugggcaccagcacccugaaccagagacuggugcccaagaucgccaccagaagcaaggugaacggccagagcggcagaauggacuucuucuggaccauccugaagcccaacgacgccaucaacuucgagagcaacggcaacuucaucgcccccgaguacgccuacaagaucgugaagaagggcgacagcgccaucaugaagagcgagguggaguacggcaacugcaacaccaagugccagacccccaucggcgccaucaacagcagcaugcccuuccacaacauccacccccugaccaucggcgagugccccaaguacgugaagagcaacaagcuggugcuggccaccggccugagaaacagcccccugagagagagaagaagaaagagaggccuguucggcgccaucgccggcuucaucgagggcggcuggcagggcaugguggacggcugguacggcuaccaccacagcaacgagcagggcagcggcuacgccgccgacaaggagagcacccagaaggccaucgacggcgugaccaacaaggugaacagcaucaucgacaagaugaacacccaguucgaggccgugggcagagaguucaacaaccuggagagaagaaucgagaaccugaacaagaagauggaggacggcuuccuggacguguggaccuacaacgccgagcugcuggugcugauggagaacgagagaacccuggacuuccacgacagcaacgugaagaaccuguacgacaaggugagacugcagcugagaaacaacgccaaggagcugggcaacggcugcuucgaguucuaccacaagugcgacaacgagugcauggagagcgugagaaacggcaccuacgacuacccccaguacagcgaggaggccagacugaagagagaggagaucagcggcgugaagcuggagagcaucggcaccuaccagauccugagcaucuacagcaccguggccagcagccuggcccuggccaucaugguggccggccugagccuguggaugugcagcaacggcagccugcagugcagaaucugcaucuga

SEQ ID NO: 169988 - RNA, 1707 nt, Artificial Sequence
  derived and/or modified CDS sequence (opt4) from hemagglutinin__InfluenzaA__AGI02565
auggagaagaucgugcugcugcuggccaucgugagccuggugaagagcgaccagaucugcaucggcuaccacgccaacaacagcaccgagcagguggacaccaucauggagaagaacgugaccgugacccacgcccaggacauccuggagaagacccacaacggcaagcugugcgaccuggacggcgugaagccccugauccugagagacugcagcguggccggcuggcugcugggcaaccccaugugcgacgaguucaucaacgugcccgaguggagcuacaucguggagaaggccauccccgccaacgaccugugcuaccccggcgacuucaacgacuacgaggagcugaagcaccugcugagcagaaucaaccacuucgagaagauccagaucauccccaagagcagcuggagcaaccacgaggccagccugggcgugagcagcgccugccccuaccugggcaagcccagcuucuucagaaacgugguguggcugaucaagaagaacagcaccuaccccaccaucaagagaagcuacaacaacaccaaccaggaggaccugcuggugcuguggggcauccaccaccccaacgacgccgccgagcagaccaagcuguaccagaaccccaccaccuacaucagcgugggcaccagcacccugaaccagagacuggugcccaagaucgccaccagaagcaaggugaacggccagagcggcagaauggaguucuucuggaccauccugaagcccaacgacgccaucaacuucgagagcaacggcaacuucaucgcccccgaguacgccuacaagaucgugaagaagggcgacagcgccaucaugaagagcgagcuggaguacggcaacugcaacaccaagugccagacccccaugggcgccaucaacagcagcaugcccuuccacaacauccacccccugaccaucggcgagugccccaaguacgugaagagcaacagacuggugcuggccaccggccugagaaacagcccccagggcgagagaagaagaaagaagagaggccuguucggcgccaucgccggcuucaucgagggcggcuggcagggcaugguggacggcugguacggcuaccaccacagcaacgagcagggcagcggcuacgccgccgacaaggagagcacccagaaggccaucgacggcgugaccaacaaggugaacagcaucaucgacaagaugaacacccaguucgaggccgugggcagagaguucaacaaccuggagagaagaaucgagaaccugaacaagaagauggaggacggcuuccuggacguguggaccuacaacgccgagcugcuggugcugauggagaacgagagaacccuggacuuccacgacagcaacgugaagaaccuguacgacaaggugagacugcagcugagagacaacgccaaggagcugggcaacggcugcuucgaguucuaccacaagugcgacaacgagugcauggagagcgugagaaacggcaccuacgacuacccccaguacagcgaggaggccagacugaagagagaggagaucagcggcgugaagcuggagagcaucggcaccuaccagauccugagcaucuacagcaccguggccagcagccuggcccuggccaucaugguggccggccugagccuguggaugugcagcaacggcagccugcagugcagaaucugcaucuga

SEQ ID NO: 169989 - RNA, 1704 nt, Artificial Sequence
  derived and/or modified CDS sequence (opt4) from hemagglutinin__InfluenzaA__AGI02566
auggagaagaucgugcugcugcuggccaucgugagccuggugaagagcgaccagaucugcaucggcuaccacgccaacaacagcaccgagcagguggacaccaucauggagaagaacgugaccgugacccacgcccaggacauccuggagaagacccacaacggcaagcugugcgaccuggacggcgugaagccccugauccugagagacugcagcguggccggcuggcugcugggcaaccccaugugcgacgaguucaucaacgugcccgaguggagcuacaucguggagaaggccaaccccgccaacgaccugugcuaccccggcaacuucaacgacuacgaggagcugaagcaccugcugagcagaaucaaccacuucgagaagauccagaucauccccaagagcagcuggagcgaccacgaggccagcagcggcgugagcagcgccugccccuaccagggcacccccagcuucuucagaaacgugguguggcugaucaagaagaacaacaccuaccccaccaucaagagaagcuacaacaacaccaaccaggagaaccugcugauccuguggggcauccaccacagcaacgacgccgccgagcagaucaagcuguaccagaaccccaccaccuacaucagcgugggcaccagcacccugaaccagagacuggugcccaagaucgccaccagaagcaaggugaacggccagagcggcagaauggacuucuucuggaccauccugaagcccaacgacgccaucaacuucgagagcaacggcaacuucaucgcccccgaguacgccuacaagaucgugaaggagggcgacagcgccaucaugaagagcgagguggaguacggcaacugcaacaccaagugccagacccccaucggcgccaucaacagcagcaugcccuuccacaacauccacccccugaccaucggcgagugccccaaguacgugaagagcaacaagcuggugcuggccaccggccugagaaacagcccccugagagagagaagaagaaagagaggccuguucggcgccaucgccggcuucaucgagggcggcuggcagggcaugguggacggcugguacggcuaccaccacagcaacgagcagggcagcggcuacgccgccgacaaggagagcacccagaaggccaucgacggcgugaccaacaaggugaacagcaucaucgacaagaugaacacccaguucgaggccgugggcagagaguucaacaaccuggagagaagaaucgagaaccugaacaagaagauggaggacggcuuccuggacguguggaccuacaacgccgagcugcuggugcugauggagaacgagagaacccuggacuuccacgacagcaacgugaagaaccuguacgacaaggugagacugcagcugagagacaacgccaaggagcugggcaacggcugcuucgaguucuaccacaagugcgacaacgagugcauggagagcgugagaaacggcaccuacgacuacccccaguacagcgaggaggccagacugaagagagaggagaucagcggcgugaagcuggagagcaucggcaccuaccagauccugagcaucuacagcaccguggccagcagccuggcccuggccaucaugguggccggccugagccuguggaugugcagcaacggcagccugcagugcagaaucugcaucuga

SEQ ID NO: 169990 - RNA, 1707 nt, Artificial Sequence
  derived and/or modified CDS sequence (opt4) from hemagglutinin__InfluenzaA__AGI02567
auggagaagaucgugcugcugcuggccaucgugagccuggugaagagcgaccagaucugcaucggcuaccacgccaacaacagcaccgagcagguggacaccaucauggagaagaacgugaccgugacccacgcccaggacauccuggagaagacccacaacggcaagcugugcgaccuggacggcgugaagccccugauccugagagacugcagcguggccggcuggcugcugggcaaccccaugugcgacgaguuccugaacgugcccgaguggagcuacaucguggagaaggccaaccccgccaacgaccugugcuaccccggcaacuucaacgacuacgaggagcugaagcaccugcugagcagaaucaaccacuucgagaagauccagaucauccccaagagcagcuggagcgaccacgaggccagcagcggcgugagcagcgccugccccuaccagggcagaagcagcuucuucagaaacgugguguggcugaucaagaagaacaacgccuaccccaccaucaagagaagcuacaacaacaccaaccaggaggaccugcuggugcuguggggcauccaccaccccaacgacgccgccgagcagaccagacuguaccagaaccccaccaccuacaucagcgugggcaccagcacccugaaccagagacuggugcccaagaucgccaccagaagcaaggugaacggccagagcggcagaauggaguucuucuggaccauccugaagcccaacgacgccaucaacuucgagagcaacggcaacuucaucgcccccgaguacgccuacaagaucgugaagaagggcgacagcaccaucaugaagagcgagcuggaguacggcaacugcaacaccaagugccagacccccaucggcgccaucaacagcagcaugcccuuccacaacauccacccccugaccaucggcgagugccccaaguacgugaagagcaacagacuggugcuggccaccggccugagaaacagcccccagggcgagagaagaagaaagaagagaggccuguucggcgccaucgccggcuucaucgagggcggcuggcagggcaugguggacggcugguacggcuaccaccacagcaacgagcagggcagcggcuacgccgccgacaaggagagcacccagaaggccaucgacggcgugaccaacaaggugaacagcaucaucgacaagaugaacacccaguucgaggccgugggcagagaguucaacaaccuggagagaagaaucgagaaccugaacaagaagauggaggacggcuuccuggacguguggaccuacaacgccgagcugcuggugcugauggagaacgagagaacccuggacuuccacgacagcaacgugaagaaccuguacgacaaggugagacugcagcugagagacaacgccaaggagcugggcaacggcugcuucgaguucuaccacagaugcgacaacgagugcauggagagcgugagaaacggcaccuacgacuacccccaguacagcgaggaggccagacugaagagagaggagaucagcggcgugaagcuggagagcaucggcaccuaccagauccugagcaucuacagcaccguggccagcagccuggcccuggccaucaugguggccggccugagccuguggaugugcagcaacggcagccugcagugcagaaucugcaucuga

SEQ ID NO: 169991 - RNA, 1704 nt, Artificial Sequence
  derived and/or modified CDS sequence (opt4) from hemagglutinin__InfluenzaA__AGI02568
auggagaagaucgugcugcugcuggccaucgugagccuggugaagagcgaccagaucugcaucggcuaccacgccaacaacagcaccgagcagguggacaccaucauggagaagaacgugaccgugacccacgcccaggacauccuggagaagacccacaacggcaagcugugcgaccuggacggcgugaagccccugauccugagagacugcagcguggccggcuggcugcugggcaaccccaugugcgacgaguucaucaacgugcccgaguggagcuacaucguggagaaggccaaccccgccaacgaccugugcuaccccggcaacuucaacgacuacgaggagcugaagcaccugcugagcagaaucaaccacuucgagaagauccagaucauccccaagagcagcuggagcgaccacgaggccagcagcggcgugagcagcgccugccccuaccagggcacccccagcuucuucagaaacgugguguggcugaucaagaagaacaacaccuaccccaccaucaagagaagcuacaacaacaccaaccaggagaaccugcugauccuguggggcauccaccacagcaacgacgccaccgagcagaucaagcuguaccagaaccccaccaccuacaucagcgugggcaccagcacccugaaccagagacuggugcccaagaucggcaccagaagcaaggugaacggccagagcggcagaauggacuucuucuggaccauccugaagcccaacgacgccaucaacuucgagagcaacggcaacuucaucgcccccgaguacgccuacaagaucgugaaggagggcgacagcgccaucaugaagagcgagguggaguacggcaacugcaacaccaagugccagacccccaucggcgccaucaacagcagcaugcccuuccacaacauccacccccugaccaucggcgagugccccaaguacgugaagagcaacaagcuggugcuggccaccggccugagaaacagcccccugagagagagaagaagaaagagaggccuguucggcgccaucgccggcuucaucgagggcggcuggcagggcaugguggacggcugguacggcuaccaccacagcaacgagcagggcagcggcuacgccgccgacaaggagagcacccagaaggccaucgacggcgugaccaacaaggugaacagcaucaucgacaagaugaacacccaguucgaggccgugggcagagaguucaacaaccuggagagaagaaucgagaaccugaacaagaagauggaggacggcuuccuggacguguggaccuacaacgccgagcugcuggugcugauggagaacgagagaacccuggacuuccacgacagcaacgugaagaaccuguacgacaaggugagacugcagcugagagacaacgccaaggagcugggcaacggcugcuucgaguucuaccacaagugcgacaacgagugcauggagagcgugagaaacggcaccuacgacuacccccaguacagcgaggaggccagacugaagagagaggagaucagcggcgugaagcuggagagcaugggcaucuaccagauccugagcaucuacagcaccguggccagcagccuggcccuggccaucaugguggccggccugagccuguggaugugcagcaacggcagccugcagugcagaaucugcaucuga

SEQ ID NO: 169992 - RNA, 1683 nt, Artificial Sequence
  derived and/or modified CDS sequence (opt4) from hemagglutinin__InfluenzaA__AGI60301
augaacacccagauccugguguucgcccugaucgccaucauccccaccaacgccgacaagaucugccugggccaccacgccgugagcaacggcaccaaggugaacacccugaccgagagaggcguggagguggugaacgccaccgagaccguggagagaaccaacauccccagaaucugcagcaagggcaagagaaccguggaccugggccagugcggccugcugggcaccaucaccggccccccccagugcgaccaguuccuggaguucagcgccgaccugaucaucgagagaagagagggcagcgacgugugcuaccccggcaaguucgugaacgaggaggcccugagacagauccugagagagagcggcggcaucgacaaggaggccaugggcuucaccuacagcggcaucagaaccaacggcgccaccagcgccugcagaagaagcggcagcagcuucuacgccgagaugaaguggcugcugagcaacaccgacaacgccgccuucccccagaugaccaagagcuacaagaacaccagaaagagccccgcccugaucguguggggcauccaccacagcgugagcaccgccgagcagaccaagcuguacggcagcggcaacaagcuggugaccgugggcagcagcaacuaccagcagagcuucgugcccagccccggcgccagaccccaggugaacggcaucagcggcagaaucgacuuccacuggcugaugcugaaccccaacgacaccgugaccuucagcuucaacggcgccuucaucgcccccgacagagccagcuuccugagaggcaagagcaugggcauccagagcggcgugcagguggacgccaacugcgagggcgacugcuaccacagcggcggcaccaucaucagcaaccugcccuuccagaacaucgacagcagagccgugggcaagugccccagauacgugaagcagagaagccugcugcuggccaccggcaugaagaacgugcccgagauccccaagggcagaggccuguucggcgccaucgccggcuucaucgagaacggcugggagggccugaucgacggcugguacggcuucagacaccagaacgcccagggcgagggcaccgccgccgacuacaagagcacccagagcgccaucgaccagaucaccggcaagcugaacagacugaucgagaagaccaaccagcaguucgagcugaucgacaacgaguucaacgagguggagaagcagaucggcaacgugaucaacuggaccagagacagcaucaccgagguguggagcuacaacgccgagcugcugguggccauggagaaccagcacaccaucgaccuggccgacagcgagauggacaagcuguacgagagagugaagagacagcugagagagaacgccgaggaggacggcaccggcugcuucgagaucuuccacaagugcgacgacgacugcauggccagcaucagaaacaacaccuacgaccacagcaaguacagagaggaggccaugcagaacagaauccagaucgaccccgugaagcugagcagcggcuacaaggacgugauccugugguucagcuucggcgccagcugcuucauccugcuggccaucgugaugggccugguguucaucugcgugaagaacggcaacaugagaugcaccaucugcaucuga

SEQ ID NO: 169993 - RNA, 1683 nt, Artificial Sequence
  derived and/or modified CDS sequence (opt4) from hemagglutinin__InfluenzaA__AGJ72861
augaacacccagauccugguguucgcccugaucgccaucauccccaccaacgccgacaagaucugccugggccaccacgccgugagcaacggcaccaaggugaacacccugaccgagagaggcggcgagguggugaacgccaccgagaccguggagagaaccaacauccccagaaucugcagcaagggcaagaagaccguggaccugggccagggcggccccagaggcaccaucaccggccccccccagugcgaccaguuccuggaguucagcgccgaccugaucauggagagaagagagggcagcgacgugugcuaccccggcaaguucgugaacgaggaggcccugagacagauccugagagagagcggcggcaucgacaaggaggccaugggcuucaccuacagcggcaucagaaccaacggcgccaccagcgccugcagaagaagcggcagcagcuucuacgccgagaugaaguggcugcugagcaacaccgacaacgccgccuucccccagaugaccaagagcuacaagaacaccagaaagagccccgcccugaucguguggggcauccaccacagcgugagcaccgccgagcagaccaagcuguacggcagcggcaacaagcuggugaccgugggcagcagcaacuaccagcagagcuucgugcccagccccggcgccagaccccaggugaacggccagagcggcagaaucgacuuccacuggcugaugcugaaccccaacgacaccgugaccuucagcuucaacggcgccuucaucgcccccgacagagccagcuuccugagaggcaagagcaugggcauccagagcggcgugcagguggacgccaacugcgagggcgacugcuaccacagcggcggcaccaucaucagcaaccugcccuuccagaacaucgacagcagagccgugggcaagugccccagauacgugaagcagagaagccugcugcuggccaccggcaugaagaacgugcccgagauccccaagggcagaggccuguucggcgccaucgccggcuucaucgagaacggcugggagggccugaucgacggcugguacggcuucagacaccagaacgcccagggcgagggcaccgccgccgacuacaagagcacccagagcgccaucgaccagaucaccggcaagcugaacagacugaucgagaagaccaaccagcaguucgagcugaucgacaacgaguucaacgagguggagaagcagaucggcaacgugaucaacuggaccagagacagcaucaccgagguguggagcuacaacgccgagcugcugguggccauggagaaccagcacaccaucgaccuggccgacagcgagauggacaagcuguacgagagagugaagagacagcugagagagaacgccgaggaggacggcaccggcugcuucgagaucuuccacaagugcgacgacgacugcauggccagcaucagaaacaacaccuacgaccacagcaaguacagagaggaggccaugcagaacagaauccagaucgaccccgugaagcugagcagcggcuacaaggacgugauccugugguucagcuucggcgccagcugcuucauccugcuggccaucgugaugggccugguguucaucugcgugaagaacggcaacaugagaugcaccaucugcaucuga

SEQ ID NO: 169994 - RNA, 1701 nt, Artificial Sequence
  derived and/or modified CDS sequence (opt4) from hemagglutinin__InfluenzaA__AGJ73327
augaaggccauccugguggugcugcuguacaccuucgccaccgccaacgccgacacccugugcaucggcuaccacgccaacaacagcaccgacaccguggacaccgugcuggagaagaacgugaccgugacccacagcgugaaccugcuggaggacaagcacaacggcaagcugugcaagcugagaggcguggccccccugcaccugggcaagugcaacaucgccggcuggauccugggcaaccccgagugcgagagccugagcaccgccagcagcuggagcuacaucguggagaccagcagcagcgacaacggcaccugcuaccccggcgacuucaucaacuacgaggagcugagagagcagcugagcagcgugagcagcuucgagagauucgagaucuuccccaagaccagcagcuggcccaaccacgacagcaacaagggcgugaccgccgccugcccccacgccggcgccaagagcuucuacaagaaccugaucuggcuggugaagaagggcaacagcuaccccaagcugagcaagagcuacaucaacgacaagggcaaggaggugcuggugcuguggggcauccaccaccccagcaccaccgccgaccaccagagccuguaccagaacgccgacgccuacguguucgugggcaccagcagauacagcaagaaguucaagcccgagaucgccaucagacccaaggugagagaccaggagggcagaaugaacuacuacuggacccugaucgagcccggcgacaagaucaccuucgaggccaccggcaaccugguggugcccagauacgccuucgccauggagagaaacgccggcagcggcaucaucauccccgacacccccgugcacgacugcaacaccaccugccagacccccaagggcgccaucaacaccagccugcccuuccagaacauccaccccaucaccaucggcaagugccccaaguacgugaagagcaccaagcugagacuggccaccggccugagaaacgugcccagcauccagagcagaggccuguucggcgccaucgccggcuucaucgagggcggcuggaccggcaugguggacggcugguacggcuaccaccaccagaacgagcagggcagcggcuacgccgccgaccugaagagcacccagaacgccaucgacaagaucaccaacaaggugaacagcgugaucgagaagaugaacacccaguucaccgccgugggcaaggaguucaaccaccuggagaagagaaucgagaaccugaacaagaagcuggacgacggcuuccuggacaucuggaccuacaacgccgagcugcuggugcugcuggagaacgagagaacccuggacuaccacgacagcaacgugaagaaccuguacgagaaggugagaaaccagcugaagaacaacgccaaggagaucggcaacggcugcuucgaguucuaccacaagugcgacaacaccugcauggagagcgugaagaacggcaccuacgacuaccccaaguacagcgaggaggccaagcugaacagagagaagaucgacggcgugaagcuggagagcaccagaaucuaccagauccuggccaucuacagcaccguggccagcagccuggugcugguggugagccugggcgagaucagcuucuggaugugcagcaacggcagccugcagugcagaaucugcaucuga

SEQ ID NO: 169995 - RNA, 1701 nt, Artificial Sequence
  derived and/or modified CDS sequence (opt4) from hemagglutinin__InfluenzaA__AGJ73329
augaaggccauccugguggugcugcuguacaccuucgccaccgccaacgccgacacccugugcaucggcuaccacgccaacaacagcaccgacaccguggacaccgugcuggagaagaacgugaccgugacccacagcgugaaccugcuggaggacaagcacaacggcaagcugugcaagcugagaggcguggccccccugcaccugggcaagugcaacaucgccggcuggauccugggcaaccccgagugcgagagccugagcaccgccagcagcuggagcuacaucguggagaccagcagcagcgacaacggcaccugcuaccccggcgacuucaucgacuacgaggagcugagagagcagcugagcagcgugagcagcuucgagagauucgagaucuuccccaagaccagcagcuggcccaaccacgacagcaacaagggcgugaccgccgccugcccccacgccggcgccaagggcuucuacaagaaccugaucuggcuggugaagaagggcaacagcuaccccaagcugagcaagagcuacaucaacgacaagggcaaggaggugcuggugcuguggggcauccaccaccccagcaccaccgccgaccagcagagccuguaccagaacgccgacaccuacguguucgugggcaccagcagauacagcaagaaguucaagcccgagaucgccaucagacccaaggugagagaccaggagggcagaaugaacuacuacuggacccugguggagcccggcgacaagaucaccuucgaggccaccggcaaccugguggugcccagauacgccuucgccauggagagaaacgccggcagcggcaucaucaucagcgacgcccccgugcacgacugcaacaccaccugccagacccccaagggcgccaucaacaccagccugcccuuccagaacauccaccccaucaccaucggcaagugccccaaguacgugaagagcaccaagcugagacuggccaccggccugagaaacgugcccagcauccagagcagaggccuguucggcgccaucgccggcuucaucgagggcggcuggaccggcaugguggacggcugguacggcuaccaccaccagaacgagcagggcagcggcuacgccgccgaccugaagagcacccagaacgccaucgacaagaucaccaacaaggugaacagcgugaucgagaagaugaacacccaguucaccgccgugggcaaggaguucaaccaccuggagaagagaaucgagaaccugaacaagaagguggacgacggcuuccuggacaucuggaccuacaacgccgagcugcuggugcugcuggagaacgagagaacccuggacuaccacgacagcaacgugaagaaccuguacgagaaggugagaaaccagcugaagaacaacgccaaggagaucggcaacggcugcuucgaguucuaccacaagugcgacaacaccugcauggagagcgugaagaacggcaccuacgacuaccccaaguacagcgaggaggccaagcugaacagagaggagaucgacggcgugaagcuggagagcaccagaaucuaccagauccuggccaucuacagcaccguggccagcagccuggugcugguggugagccugggcgccaucagcuucuggaugugcagcaacggcagccugcagugcagaaucugcaucuga

SEQ ID NO: 169996 - RNA, 1701 nt, Artificial Sequence
  derived and/or modified CDS sequence (opt4) from hemagglutinin__InfluenzaA__AGJ73331
augaaggccauccugguggugcugcuguacaccuucgccaccgccaacgccgacacccugugcaucggcuaccacgccaacaacagcaccgacaccguggacaccgugcuggagaagaacgugaccgugacccacagcgugaaccugcuggaggacaagcacaacggcaagcugugcaagcugagaggcguggccccccugcaccugggcaagugcaacaucgccggcuggauccugggcaaccccgagugcgagagccugagcaccgccagcagcuggagcuacaucguggagaccagcagcagcgacaacggcaccugcuaccccggcgacuucaucgacuacgaggagcugagagagcagcugagcagcgugagcagcuucgagagauucgagaucuuccccaagaccagcagcuggcccaaccacgacagcaacaagggcgugaccaccgccugcccccacgccggcgccaagagcuucuacaagaaccugaucuggcuggugaagaagggcaacagcuaccccaagcugagcaagagcuacaucaacgacaagggcaaggaggugcuggugcuguggggcauccaccacccccccaccagcgccgaccagcagagccuguaccagaacgccgacgccuacguguucgugggcaccagcagauacagcaagaaguucaagcccgagaucgccaucagacccaaggugagaggccaggagggcagaaugaacuacuacuggacccugguggagcccggcgacaagaucaccuucgaggccaccggcaaccugguggugcccagauacgccuucgccauggagagaaacgccggcagcggcaucaucaucagcgacacccccgugcacgacugcaacaccaccugccagacccccaagggcgccaucaacaccagccugcccuuccagaacauccaccccaucaccaucggcaagugccccaaguacgugaagagcaccaagcugagacuggccaccggccugagaaacgugcccagcauccagagcagaggccuguucggcgccaucgccggcuucaucgagggcggcuggaccggcaugguggacggcugguacggcuaccaccaccagaacgagcagggcagcggcuacgccgccgaccugaagagcacccagaacgccaucgacgagaucaccaacaaggugaacagcgugaucgagaagaugaacacccaguucaccgccgugggcaaggaguucaaccaccuggagaagagaaucgagaaccugaacaagaagguggacgacggcuuccuggacaucuggaccuacaacgccgagcugcuggugcugcuggagaacgagagaacccuggacuaccacgacagcaaggugaagaaccuguacgagaaggugagaagccagcugaagaacaacgccaaggagaucggcaacggcugcuucgaguucuaccacaagugcgacaacaccugcauggagagcgugaagaacggcaccuacgacuaccccaaguacagcgaggaggccaagcugaacagagaggagaucgacggcgugaagcuggagagcaccagaaucuaccagauccuggccaucuacagcaccguggccagcagccuggugcugguggugagccugggcgccaucagcuucuggaugugcagcaacggcagccugcagugcagaaucugcaucuga

SEQ ID NO: 169997 - RNA, 1701 nt, Artificial Sequence
  derived and/or modified CDS sequence (opt4) from hemagglutinin__InfluenzaA__AGJ73333
augaaggccauccugguggugcugcuguacaccuucgccaccgccaacgccgacacccugugcaucggcuaccacgccaacaacagcaccgacaccguggacaccgugcuggagaagaacgugaccgugacccacagcgugaaccugcuggaggacaagcacaacggcaagcugugcaagcugagaggcguggccccccugcaccugggcaagugcaacaucgccggcuggauccugggcaaccccgagugcgagagccugagcaccgccagcagcuggagcuacaucguggagaccagcagcagcgacaacggcaccugcuaccccggcgacuucaucgacuacgaggagcugagagagcagcugagcagcgugagcagcuucgagagauucgagaucuuccccaagaccagcagcuggcccaaccacgacagcaacaagggcgugaccgccgccugcccccacgccggcgccaagggcuucuacaagaaccugaucuggcuggugaagaagggcaacagcuaccccaagcugagcaagagcuacaucaacgacaagggcaaggaggugcuggugcuguggggcauccaccaccccagcaccagcgccgaccagcagagccuguaccagaacgccgacaccuacguguucgugggcaccagcagauacagcaagaaguucaagcccgagaucgccaucagacccaaggugagagaccaggagggcagaaugaacuacuacuggacccugguggagcccggcgacaagaucaccuucgaggccaccggcaaccugguggugcccagauacgccuucgccauggagagaaacgccggcagcggcaucaucaucagcgacacccccgugcacgacugcaacaccaccugccagacccccaagggcgccaucaacaccagccugcccuuccagaacauccaccccaucaccaucggcaagugccccaaguacgugaagagcaccaagcugagacuggccaccggccugagaaacgugcccagcauccagagcagaggccuguucggcgccaucgccggcuucaucgagggcggcuggaccggcaugguggacggcugguacggcuaccaccaccagaacgagcagggcagcggcuacgccgccgaccugaagagcacccagaacgccaucgacaagaucaccaacaaggugaacagcgugaucgagaagaugaacacccaguucaccgccgugggcaaggaguucaaccaccuggagaagagaaucgagaaccugaacaagaagguggacgacggcuuccuggacaucuggaccuacaacgccgagcugcuggugcugcuggagaacgagagaacccuggacuaccacgacagcaacgugaagaaccuguacgagaaggugagaaaccagcugaagaacaacgccaaggagaucggcaacggcugcuucgaguucuaccacaagugcgacaacaccugcauggagagcgugaagaacggcaccuacgacuaccccaaguacagcgaggaggccaagcugaacagagaggagaucgacggcgugaagcuggagagcaccagaaucuaccagauccuggccaucuacagcaccguggccagcagccuggugcugguggugagccugggcgccaucagcuucuggaugugcagcaacggcagccugcagugcagaaucugcaucuga

SEQ ID NO: 169998 - RNA, 1701 nt, Artificial Sequence
  derived and/or modified CDS sequence (opt4) from hemagglutinin__InfluenzaA__AGJ73335
augaaggccauccugguggugcugcuguacaccuucgccaccgccaacgccgacacccugugcaucggcuaccacgccaacaacagcaccgacaccguggacaccgugcuggagaagaacgugaccgugacccacagcgugaaccugcuggaggacaagcacaacggcaagcugugcaagcugagaggcguggccccccugcaccugggcaagugcaacaucgccggcuggauccugggcaaccccgagugcgagagccugagcaccgccagcagcuggagcuacaucguggagaccagcagcagcgacaacggcaccugcuaccccggcgacuucaucgacuacgaggagcugagagagcagcugagcagcgugagcagcuucgagagauucgagaucuuccccaagaccagcagcuggcccaaccacgacagcaacaagggcgugaccgccgccugcccccacgccggcgccaagagcuucuacaagaaccugaucuggcuggugaagaagggcaacagcuaccccaagcugagcaagagcuacaucaacgacaagggcaaggaggugcuggugcuguggggcauccaccaccccagcaccaccgccgaccagcagagccuguaccagaacgccgacaccuacguguucgugggcaccagcagauacagcaagaaguucaagcccgagaucgccaucagacccaaggugagagaccaggagggcagaaugaacuacuacuggacccugguggagcccagagacaagaucaccuucgaggccaccggcaaccugguggugcccagauacgccuucgccauggagagaaacgccggcagcggcaucaucaucagcgacacccccgugcacgacugcaacaccaccugccagacccccaagggcgccaucaacaccagccugcccuuccagaacauccaccccaucaccaucggcaagugccccaaguacgugaagagcaccaagcugagacuggccaccggccugagaaacgugcccagcauccagagcagaggccuguucggcgccaucgccggcuucaucgagggcggcuggaccggcaugguggacggcugguacggcuaccaccaccagaacgagcagggcagcggcuacgccgccgaccugaagagcacccagaacgccaucgacaagaucaccaacaaggugaacagcgugaucgagaagaugaacacccaguucaccgccgugggcaaggaguucaaccaccuggagaagagaaucgagaaccugaacaagaagguggacgacggcuuccuggacaucuggaccuacaacgccgagcugcuggugcugcuggagaacgagagaacccuggacuaccacgacagcaacgugaagaaccuguacgagaaggugagaaaccagcugaagaacaacgccaaggagaucggcaacggcugcuucgaguucuaccacaagugcgacaacaccugcauggagagcgugaagaacggcaccuacgacuaccccaaguacagcgaggaggccaagcugaacagagaggagaucgacggcgugaagcuggagagcaccagaaucuaccagauccuggccaucuacagcaccguggccagcagccuggugcugguggugagccugggcgccaucagcuucuggaugugcagcaacggcagccugcagugcagaaucugcaucuga

SEQ ID NO: 169999 - RNA, 1701 nt, Artificial Sequence; identical to SEQ ID NO: 166514
  derived and/or modified CDS sequence (opt4) from hemagglutinin__InfluenzaA__AGJ73337

SEQ ID NO: 170000 - RNA, 1701 nt, Artificial Sequence; identical to SEQ ID NO: 166514
  derived and/or modified CDS sequence (opt4) from hemagglutinin__InfluenzaA__AGJ73339

SEQ ID NO: 170001 - RNA, 1701 nt, Artificial Sequence; identical to SEQ ID NO: 166514
  derived and/or modified CDS sequence (opt4) from hemagglutinin__InfluenzaA__AGJ73341

SEQ ID NO: 170002 - RNA, 1701 nt, Artificial Sequence
  derived and/or modified CDS sequence (opt4) from hemagglutinin__InfluenzaA__AGJ73343
augaaggccauccugguggugcugcuguacaccuucgccaccgccaacgccgacacccugugcaucggcuaccacgccaacaacagcaccgacaccguggacaccgugcuggagaagaacgugaccgugacccacagcgugaaccugcuggaggacaagcagaacggcaagcugugcaagcugagaggcguggccccccugcaccugggcaagugcaacaucgccggcuggauccugggcaaccccgagugcgagagccugagcaccgccagcagcuggagcuacaucguggagaccagcagcagcgacaacggcaccugcuaccccggcgacuucaucaacuacgaggagcugagagagcagcugagcagcgugagcagcuucgagagauucgagaucuuccccaagaccagcagcuggcccaaccacgacagcaacaagggcgugaccgccgccugcccccacgccggcgccaagagcuucuacaagaaccugaucuggcuggugaagaagggcaacagcuaccccaagcugagcaagagcuacaucaacgacaagggcaaggaggugcuggugcuguggggcauccaccaccccagcaccagcgccgaccagcagagccuguaccagaacgccgacgccuacguguucgugggcaccagcaaguacagcaagaaguucaagcccgagaucgccgugagacccaaggugagagaccaggagggcagaaugaacuacuacuggacccugguggagcccggcgacaagaucaccuucgaggccaccggcaaccugcuggugcccagauacgccuucgccauggagagaaacgccggcagcggcaucaucaucagcgacacccccgugcacgacugcaacaccaccugccagacccccaagggcgccaucaacaccagccugcccuuccagaacauccaccccaucaccaucggcaagugccccaaguacgugaagagcaccaagcugagacuggccaccggccugagaaacgugcccagcauccagagcagaggccuguucggcgccaucgccggcuucaucgagggcggcuggaccggcaugguggacggcugguacggcuaccaccaccagaacgagcagggcagcggcuacgccgccgaccugaagagcacccagaacgccaucgacaagaucaccaacaaggugaacagcgugaucgagaagaugaacacccaguucaccgccgugggcaaggaguucaaccaccuggagaagagaaucgagaaccugaacaagaagguggacgacggcuuccuggacaucuggaccuacaacgccgagcugcuggugcugcuggagaacgagagaacccuggacuaccacgacagcaacgugaagaaccuguacgagaaggugagaagccagcugaagaacaacgccaaggagaucggcaacggcugcuucgaguucuaccacaagugcgacaacaccugcauggagagcgugaagaacggcaccuacgacuaccccaaguacagcgaggaggccaagcugaacagagaggagaucgacggcgugaagcuggagagcaccagaaucuaccagauccuggccaucuacagcaccguggccagcagccuggugcugguggugagccugggcgccaucagcuucuggaugugcagcaacggcagccugcagugcagaaucugcaucuga

SEQ ID NO: 170003 - RNA, 1701 nt, Artificial Sequence
  derived and/or modified CDS sequence (opt4) from hemagglutinin__InfluenzaA__AGJ73345
augaaggccauccugguggugcugcuguacaccuucgccaccgccaacgccgacacccugugcaucggcuaccacgccaacaacagcaccgacaccguggacaccgugcuggagaagaacgugaccgugacccacagcgugaaccugcuggaggacaagcacaacggcaagcugugcaagcugagaggcguggccccccugcaccugggcaagugcaacaucgccggcuggauccugggcaaccccgagugcgagagccugagcaccgccagcagcuggagcuacaucguggagaccagcagcagcgacaacggcaccugcuaccccggcgacuucaucaacuacgaggagcugagagagcagcugagcagcgugagcagcuucgagagauucgagaucuuccccaagaccagcagcuggcccaaccacgacagcaacaagggcgugaccgccgccugcccccacgccggcgccaagagcuucuacaagaaccugaucuggcuggugaagaagggcaacagcuaccccaagcugagcaagagcuacaucaacgacaagggcaaggaggugcuggugcuguggggcauccaccaccccagcaccagcgccgaccagcagagccuguaccagaacgaggacgccuacguguucgugggcaccagcaaguacagcaagaaguucaagcccgagaucgccgugagacccaaggugagagaccaggagggcagaaugaacuacuacuggacccugguggagcccggcaacaagaucaccuucgaggccaccggcaaccugcuggugcccagauacgccuucgccauggagagaaacgccggcagcggcaucaucaucagcgacacccccgugcacgacugcaacaccaccugccagacccccaagggcgccaucaacaccagccugcccuuccagaacauccaccccaucaccaucggcaagugccccaaguacgugaagagcaccaagcugagacuggccaccggccugagaaacgugcccagcauccagagcagaggccuguucggcgccaucgccggcuucaucgagggcggcuggaccggcaugguggacggcugguacggcuaccaccaccagaacgagcagggcagcggcuacgccgccgaccugaagagcacccagaacgccaucgacaagaucaccaacaaggugaacagcgugaucgagaagaugaacacccaguucaccgccgugggcaaggaguucaaccaccuggagaagagaaucgagaaccugaacaagaagguggacgacggcuuccuggacaucuggaccuacaacgccgagcugcuggugcugcuggagaacgagagaacccuggacuaccacgacagcaacgugaagaaccuguacgagaaggugagaagccagcugaagaacaacgccaaggagaucggcaacggcugcuucgaguucuaccacaagugcgacaacaccugcauggagagcgugaagaacggcaccuacgacuaccccaaguacagcgaggaggccaagcugaacagagaggagaucgacggcgugaagcuggagagcaccagaaucuaccagauccuggccaucuacagcaccguggccagcagccuggugcugguggugagccugggcgccaucagcuucuggaugugcagcaacggcagccugcagugcagaaucugcaucuga

SEQ ID NO: 170004 - RNA, 1701 nt, Artificial Sequence; identical to SEQ ID NO: 167110
  derived and/or modified CDS sequence (opt4) from hemagglutinin__InfluenzaA__AGJ73347

SEQ ID NO: 170005 - RNA, 1701 nt, Artificial Sequence; identical to SEQ ID NO: 167110
  derived and/or modified CDS sequence (opt4) from hemagglutinin__InfluenzaA__AGJ73349

SEQ ID NO: 170006 - RNA, 1701 nt, Artificial Sequence
  derived and/or modified CDS sequence (opt4) from hemagglutinin__InfluenzaA__AGJ73351
augaaggccauccugguggugcugcuguacaccuucgccaccgccaacgccgacacccugugcaucggcuaccacgccaacaacagcaccgacaccguggacaccgugcuggagaagaacgugaccgugacccacagcgugaaccugcuggaggacaagcacaacggcaagcugugcaagcugagaggcguggccccccugcaccugggcaagugcaacaucgccggcuggauccugggcaaccccgagugcgagagccugagcaccgccagcagcuggagcuacaucguggagaccagcagcagcgacaacggcaccugcuaccccggcgacuucaucgacuacgaggagcugagagagcagcugagcagcgugagcagcuucgagagauucgagaucuuccccaagaccagcagcuggcccaaccacgacagcaacaagggcgugaccgccgccugcccccacgccggcgccaagggcuucuacaagaaccugaucuggcuggugaagaagggcaacagcuaccccaagcugagcaagagcuacaucaacgacaagggcaaggaggugcuggugcuguggggcauccaccaccccagcaccaccgccgaccagcagagccuguaccagaacgccgacaccuacguguucgugggcaccagcagauacagcaagaaguucaagcccgagaucgccaucagacccaagaugagagaccaggagggcagaaugaacuacuacuggacccugguggagcccggcgacaagaucaccuucgaggccaccggcaaccugguggugcccagauacgccuucgccauggagagaaacgccggcagcggcaucaucaucagcgacacccccgugcacgacugcaacaccaccugccagacccccaagggcgccaucaacaccagccugcccuuccagaacauccaccccaucaccaucggcaagugccccaaguacgugaagagcaccaagcugagacuggccaccggccugagaaacgugcccagcauccagagcagaggccuguucggcgccaucgccggcuucaucgagggcggcuggaccggcaugguggacggcugguacggcuaccaccaccagaacgagcagggcagcggcuacgccgccgaccugaagagcacccagaacgccaucgacaagaucaccaacaaggugaacagcgugaucgagaagaugaacacccaguucaccgccgugggcaaggaguucaaccaccuggagaagagaaucgagaaccugaacaagaagguggacgacggcuuccuggacaucuggaccuacaacgccgagcugcuggugcugcuggagaacgagagaacccuggacuaccacgacagcaacgugaagaaccuguacgagaaggugagaaaccagcugaagaacaacgccaaggagaucggcaacggcugcuucgaguucuaccacaagugcgacaacaccugcauggagagcgugaagaacggcaccuacgacuaccccaaguacagcgaggaggccaagcugaacagagaggagaucgacggcgugaagcuggagagcaccagaaucuaccagauccuggccaucuacagcaccguggccagcagccuggugcugguggugagccugggcgccaucagcuucuggaugugcagcaacggcagccugcagugcagaaucugcaucuga

SEQ ID NO: 170007 - RNA, 1701 nt, Artificial Sequence
  derived and/or modified CDS sequence (opt4) from hemagglutinin__InfluenzaA__AGJ73353
augaaggccauccugguggugcugcuguacaccuucgccaccgccaacgccgacacccugugcaucggcuaccacgccaacaacagcaccgacaccguggacaccgugcuggagaagaacgugaccgugacccacagcgugaaccugcuggaggacaagcacaacggcaagcugugcaagcugagaggcguggccccccugcaccugggcaagugcaacaucgccggcuggauccugggcaaccccgagugcgagagccugagcaccgccagcagcuggagcuacaucguggagaccagcagcagcgacaacggcaccugcuaccccggcgacuucaucaacuacgaggagcugagagagcagcugagcagcgugagcagcuucgagagauucgagaucuuccccaagaccagcagcuggcccaaccacgacagcaacaagggcgugaccgccgccugcccccacgccggcgccaagagcuucuacaagaaccugaucuggcuggugaagaagggcaacagcuaccccaagcugagcaagagcuacaucaacgacaagggcaaggaggugcuggugcuguggggcauccaccaccccagcaccagcgccgaccagcagagccuguaccagaacgccgacgccuacguguucgugggcaccagcaaguacagcaagaaguucaagcccgagaucgccgugagacccaaggugagagaccaggagggcagaaugaacuacuacuggacccugguggagcccggcgacaagaucaccuucgaggccaccggcaaccugcuggugcccagauacgccuucgccauggagagaaacgccggcagcggcaucaucaucagcgacacccccgugcacgacugcaacaccaccugccagacccccaagggcgccaucaacaccagccugcccuuccagagcauccaccccaucaccaucggcaagugccccaaguacgugaagagcaccaagcugagacuggccaccggccugagaaacgugcccagcauccagagcagaggccuguucggcgccaucgccggcuucaucgagggcggcuggaccggcaugguggacggcugguacggcuaccaccaccagaacgagcagggcagcggcuacgccgccgaccugaagagcacccagaacgccaucgacaagaucaccaacaaggugaacagcgugaucgagaagaugaacacccaguucaccgccgugggcaaggaguucaaccaccuggagaagagaaucgagaaccugaacaagaagguggacgacggcuuccuggacaucuggaccuacaacgccgagcugcuggugcugcuggagaacgagagaacccuggacuaccacgacagcaacgugaagaaccuguacgagaaggugagaagccagcugaagaacaacgccaaggagaucggcaacggcugcuucgaguucuaccacaagugcgacaacaccugcauggagagcgugaagaacggcaccuacgacuaccccaaguacagcgaggaggccaagcugaacagagaggagaucgacggcgugaagcuggagagcaccagaaucuaccagauccuggccaucuacagcaccguggccagcagccuggugcugguggugagccugggcgccaucagcuucuggaugugcagcaacggcagccugcagugcagaaucugcaucuga

SEQ ID NO: 170008 - RNA, 1701 nt, Artificial Sequence
  derived and/or modified CDS sequence (opt4) from hemagglutinin__InfluenzaA__AGJ73355
augaaggccauccugguggugcugcuguacaccuucgccaccgccaacgccgacacccugugcaucggcuaccacgccaacaacagcaccgacaccguggacaccgugcuggagaagaacgugaccgugacccacagcgugaaccugcuggaggacaagcacaacggcaagcugugcaagcugagaggcguggccccccugcaccugggcaagugcaacaucgccggcuggauccugggcaaccccgagugcgagagccugagcaccgccagcagcuggagcuacaucguggagaccagcagcagcgacaacggcaccugcuaccccggcgacuucaucgacuacgaggagcugagagagcagcugagcagcgugagcagcuucgagagauucgagaucuuccccaagaccagcagcuggcccaaccacgacagcaacaagggcgugaccgccgccugcccccacgccggcgccaagggcuucuacaagaaccugaucuggcuggugaagaagggcaacagcuaccccaagcugagcaagagcuacaucaacgacaagggcaaggaggugcuggugcuguggggcauccaccaccccagcaccaccgccgaccagcagagccuguaccagaacgccgacaccuacguguucgugggcaccagcagauacagcaagaaguucaagcccgagaucgccaucagacccaaggugagagaccaggagggcagaaugaacuacuacuggacccugguggagcccggcgacaagaucaccuucgaggccaccggcaaccugguggugcccagauacgccuucgccauggagagaaacgccggcagcggcaucaucaucagcgacacccccgugcacgacugcaacaccaccugccagacccccaagggcgccaucaacaccagccugcccuuccagaacauccaccccaucaccaucggcaagugccccaaguacgugaagagcaccaagcugagacuggccaccggccugagaaacgugcccagcauccagagcagaggccuguucggcgccaucgccggcuucaucgagggcggcuggaccggcaugguggacggcugguacggcuaccaccaccagaacgagcagggcagcggcuacgccgccgaccugaagagcacccagaacgccaucgacaagaucaccaacaaggugaacagcgugaucgagaagaugaacacccaguucaccgccgugggcaaggaguucaaccaccuggagaagagaaucgagaaccugaacaagaagguggacgacggcuuccuggacaucuggaccuacaacgccgagcugcuggugcugcuggagaacgagagaacccuggacuaccacgacagcaacgugaagaaccuguacgagaaggugagaaaccagcugaagaacaacgccaaggagaucggcaacggcugcuucgaguucuaccacaagugcgacaacaccugcauggagagcgugaagaacggcaccuacgacuaccccaaguacagcgaggaggccaagcugaacagagaggagaucgacggcgugaagcuggagagcaccagaaucuaccagauccuggccaucuacagcaccguggccagcagccuggugcugguggugagccugggcgccaccagcuucuggaugugcagcaacggcagccugcagugcagaaucugcaucuga

SEQ ID NO: 170009 - RNA, 1701 nt, Artificial Sequence; identical to SEQ ID NO: 166927
  derived and/or modified CDS sequence (opt4) from hemagglutinin__InfluenzaA__AGJ73357

SEQ ID NO: 170010 - RNA, 1701 nt, Artificial Sequence
  derived and/or modified CDS sequence (opt4) from hemagglutinin__InfluenzaA__AGJ73361
augaaggccauccugguggugcugcuguacaccuucgccaccgccaacgccgacacccugugcaucggcuaccacgccaacaacagcaccgacaccguggacaccgugcuggagaagaacgugaccgugacccacagcgugaaccugcuggaggacaagcacaacggcaagcugugcaagcugagaggcguggccccccugcaccugggcaagugcaacaucgccggcuggauccugggcaaccccgagugcgagagccugagcaccagcagcagcuggagcuacaucguggagaccagcagcagcgacaacggcaccugcuaccccggcgacuucaucgacuacgaggagcugagagagcagcugagcagcgugagcagcuucgagagauucgagaucuuccccaagaccagcagcuggcccaaccacgacagcaacaagggcgugaccgccgccugcccccacgccggcgccaagggcuucuacaagaaccugaucuggcuggugaagaagggcaacagcuaccccaagcugagcaagagcuacaucaacgacaagggcaaggaggugcuggugcuguggggcauccaccaccccagcaccaccgccgaccagcagagccuguaccagaacgccgacaccuacguguucgugggcaccagcagauacagcaagaaguucaagcccgagaucgccaucagacccaaggugagagaccaggagggcagaaugaacuacuacuggacccugguggagcccggcgacaagaucaccuucgaggccaccggcaaccugguggugcccagauacgccuucgccauggagagaaacgccggcagcggcaucuucaucagcgacacccccgugcacgacugcaacaccaccugccagacccccaagggcgccaucaacaccagccugcccuuccagaacauccaccccaucaccaucggcaagugccccaaguacgugaagagcaccaagcugagacuggccaccggccugagaaacgugcccagcauccagagcagaggccuguucggcgccaucgccggcuucaucgagggcggcuggaccggcaugguggacggcugguacggcuaccaccaccagaacgagcagggcagcggcuacgccgccgaccugaagagcacccagaacgccaucgacaagaucaccaacaaggugaacagcgugaucgagaagaugaacacccaguucaccgccgugggcaaggaguucaaccaccuggagaagagaaucgagaaccugaacaagaagguggacgacggcuuccuggacaucuggaccuacaacgccgagcugcuggugcugcuggagaacgagagaacccuggacuaccacgacagcaacgugaagaaccuguacgagaaggugagaaaccagcugaagaacaacgccaaggagaucggcaacggcugcuucgaguucuaccacaagugcgacaacaccugcauggagagcgugaagaacggcaccuacgacuaccccaaguacagcgaggaggccaagcugaacagagaggagaucgacggcgugaagcuggagagcaccagaaucuaccagauccuggccaucuacagcaccguggccagcagccuggugcugguggugagccugggcgccaucagcuucuggaugugcagcaacggcagccugcagugcagaaucugcaucuga

SEQ ID NO: 170011 - RNA, 1701 nt, Artificial Sequence; identical to SEQ ID NO: 167110
  derived and/or modified CDS sequence (opt4) from hemagglutinin__InfluenzaA__AGJ73363

SEQ ID NO: 170012 - RNA, 1701 nt, Artificial Sequence; identical to SEQ ID NO: 166927
  derived and/or modified CDS sequence (opt4) from hemagglutinin__InfluenzaA__AGJ73365

SEQ ID NO: 170013 - RNA, 1701 nt, Artificial Sequence
  derived and/or modified CDS sequence (opt4) from hemagglutinin__InfluenzaA__AGJ73367
augaaggccauccugguggugcugcuguacaccuucgccaccgccaacgccgacacccugugcaucggcuaccacgccaacaacagcaccgacaccguggacaccgugcuggagaagaacgugaccgugacccacagcgugaaccugcuggaggacaagcacaacggcaagcugugcaagcugagaggcguggccccccugcaccugggcaagugcaacaucgccggcuggauccugggcaaccccgagugcgagagccugagcaccgccagcagcuggcccuacaucguggagaccagcagcagcgacaacggcaccugcuaccccggcgacuucaucaacuacgaggagcugagagagcagcugagcagcgugagcagcuucgagagauucgagaucuuccccaagaccagcagcuggcccaaccacgacagcaacaagggcguggccgccgccugcccccacgccggcgccaagagcuucuacaagaaccugaucuggcuggugaagaagggcaacagcuaccccaagcugagcaagagcuacaucaacgacaagggcaaggaggugcuggugcuguggggcauccaccaccccagcaccagcgccgaccagcagagccuguaccagaacgccgacgccuacguguucgugggcaccagcaaguacagcaagaaguucaagcccgagaucgccgugagacccaaggugagagaccaggagggcagaaugaacuacuacuggacccugguggagcccggcgacaagaucaccuucgaggccaccggcaaccugcuggugcccagauacgccuucgccauggagagaaacgccggcagcggcaucaucaucagcgacacccccgugcaggacugcaacaccaccugccagacccccaagggcgccaucaacaccagccugcccuuccagaacauccaccccaucaccaucggcaagugccccaaguacgugaagagcaccaagcugagacuggccaccggccugagaaacgugcccagcauccagagcagaggccuguucggcgccaucgccggcuucaucgagggcggcuggaccggcaugguggacggcugguacggcuaccaccaccagaacgagcagggcagcggcuacgccgccgaccugaagagcacccagaacgccaucgacaagaucaccaacaaggugaacagcgugaucgagaagaugaacacccaguucaccgccgugggcaaggaguucaaccaccuggagaagagaaucgagaaccugaacaagaagguggacgacggcuuccuggacaucuggaccuacaacgccgagcugcuggugcugcuggagaacgagagaacccuggacuaccacgacagcaacgugaagaaccuguacgagaaggugagaaaccagcugaagaacaacgccaaggagaucggcaacggcugcuucgaguucuaccacaagugcgacaacaccugcauggagagcgugaagaacggcaccuacgacuaccccaaguacagcgaggaggccaagcugaacagagaggagaucgacggcgugaagcuggagagcaccagaaucuaccagauccuggccaucuacagcaccguggccagcagccuggugcugguggugagccugggcgccaucagcuucuggaugugcagcaacggcagccugcagugcagaaucugcaucuga

SEQ ID NO: 170014 - RNA, 1701 nt, Artificial Sequence
  derived and/or modified CDS sequence (opt4) from hemagglutinin__InfluenzaA__AGJ73369
augaaggccauccugguggugcugcuguacaccuucgccaccgccaacgccgacacccugugcaucggcuaccacgccaacaacagcaccgacaccguggacaccgugcuggagaagaacgugaccgugacccacagcgugaaccugcuggaggacaagcacaacggcaagcugugcaagcugagaggcguggccccccugcaccugggcaagugcaacaucgccggcuggauccugggcaaccccgagugcgagagccugagcaccgccagcagcuggagcuacaucguggagaccagcagcagcgacaacggcaccugcuaccccggcgacuucaucgacuacgaggagcugagagagcagcugagcagcgugagcagcuucgagagauucgagaucuuccccaagaccagcagcuggcccaaccacgacagcaacaagggcgugaccgccgccugcccccacgccggcgccaagggcuucuacaagaaccugaucuggcuggugaagaagggcaacagcuaccccaagcugagcaagagcuacaucaacgacaagggcaaggaggugcuggugcuguggggcauccaccaccccagcaccaccgccgaccagcagagccuguaccagaacgccgacaccuacguguucgugggcaccagcagauacagcaagaaguucaagcccgagaucgccaucagacccaaggugagagaccaggagggcagaaugaacuacuacuggacccugguggagcccggcgacaagaucaccuucgaggccaccggcaaccugguggugcccagauacgccuucgccauggagagaaacgccggcagcggcaucaucaucagcgacacccccgugcacgacugcaacaccaccugccagacccccaagggcgccaucaacaccagccugcccuuccagaacauccaccccaucaccaucggcaagugccccaaguacgugaagagcaccaagcugagacuggccaccggccugagaaacgugcccagcauccagagcagaggccuguucggcgccaucgccggcuucaucgagggcggcuggaccggcaugguggacggcugguacggcuaccaccaccagaacgagcagggcagcggcuacgccgccgaccugaagagcacccagaacgccaucgacaagaucaccaacaaggugaacagcgugaucgagaagaugaacacccaguucaccgccgugggcaaggaguucaaccaccuggagaagagaaucgagaaccugaacaagaagguggacgacggcuuccuggacaucuggaccuacaacgccgagcugcuggugcugcuggagaacgagagaacccuggacuaccacgacagcaacgugaagaaccuguacgagaaggugagaaaccagcugaagaacaacgccaaggagaucggcaacggcugcuucgaguucuaccacaagugcgacaacaccugcauggagagcgugaagaacggcaccuacgacuaccccaaguacagcgccgaggccaagcugaacagagaggagaucgacggcgugaagcuggagagcaccagaaucuaccagauccuggccaucuacagcaccguggccagcagccuggugcugguggugagccugggcgccaucagcuucuggaugugcagcaacggcagccugcagugcagaaucugcaucuga

SEQ ID NO: 170015 - RNA, 1701 nt, Artificial Sequence; identical to SEQ ID NO: 166514
  derived and/or modified CDS sequence (opt4) from hemagglutinin__InfluenzaA__AGJ73371

SEQ ID NO: 170016 - RNA, 1701 nt, Artificial Sequence
  derived and/or modified CDS sequence (opt4) from hemagglutinin__InfluenzaA__AGJ73373
augaaggccauccugguggugcugcuguacaccuucgccaccgccaacgccgacacccugugcaucggcuaccacgccaacaacagcaccgacaccguggacaccgugcuggagaagaacgugaccgugacccacagcgugaaccugcuggaggacaagcacaacggcaagcugugcaagcugagaggcguggccccccugcaccugggcaagugcaacaucgccggcuggauccugggcaaccccgagugcgagagccugagcaccgccagcagcuggagcuacaucguggagaccagcagcagcgacaacggcaccugcuaccccggcgacuucaucgacuacgaggagcugagagagcagcugagcagcgugagcagcuucgagagauucgagaucuuccccaagaccagcagcuggcccaaccacgacagcaacaagggcgugaccgccgccugcccccacgccggcgccaagggcuucuacaagaaccugaucuggcuggugaagaagggcaacagcuaccccaagcugagcaagagcuacaucaacgacaagggcaaggaggugcuggugcuguggggcauccaccaccccagcaccaccgccgaccagcagagccuguaccagaacgccgacaccuacguguucgugggcaccagcagauacagcaagaaguucaagcccgagaucgccaucagacccaaggugagagaccaggagggcagaaugaacuacuacuggacccugguggagcccggcgacaagaucaccuucgaggccaccggcaaccugguggugcccagauacgccuucgccauggagagaaacgccggcagcggcaucaucaucagcgacacccccgugcacgacugcaacaccaccugccagacccccaagggcgccaucaacaccagccaccccuuccagaacauccaccccaucaccaucggcaagugccccaaguacgugaagagcaccaagcugagacuggccaccggccugagaaacgugcccagcauccagagcagaggccuguucggcgccaucgccggcuucaucgagggcggcuggaccggcaugguggacggcugguacggcuaccaccaccagaacgagcagggcagcggcuacgccgccgaccugaagagcacccagaacgccaucgacaagaucaccaacaaggugaacagcgugaucgagaagaugaacacccaguucaccgccgugggcaaggaguucaaccaccuggagaagagaaucgagaaccugaacaagaagguggacgacggcuuccuggacaucuggaccuacaacgccgagcugcuggugcugcuggagaacgagagaacccuggacuaccacgacagcaacgugaagaaccuguacgagaaggugagaaaccagcugaagaacaacgccaaggagaucggcaacggcugcuucgaguucuaccacaagugcgacaacaccugcauggagagcgugaagaacggcaccuacgacuaccccaaguacagcgaggaggccaagcugaacagagaggagaucgacggcgugaagcuggagagcaccagaaucuaccagauccuggccaucuacagcaccguggccagcagccuggugcugguggugagccugggcgccaucagcuucuggaugugcagcaacggcagccugcagugcagaaucugcaucuga

SEQ ID NO: 170017 - RNA, 1701 nt, Artificial Sequence
  derived and/or modified CDS sequence (opt4) from hemagglutinin__InfluenzaA__AGJ73375
augaaggccauccugguggugcugcuguacaccuucgccaccgccaacgccgacacccugugcaucggcuaccacgccaacaacagcaccgacaccguggacaccgugcuggagaagaacgugaccgugacccacagcgugaaccugcuggaggacaagcacaacggcaagcugugcaagcugagaggcguggccccccugcaccugggcaagugcaacaucgccggcuggauccugggcaaccccgagugcgagagccugagcaccgccagcagcuggagcuacaucguggagaccagcagcagcgacaacggcaccugcuaccccggcgacuucaucaacuacgaggagcugagagagcagcugagcagcgugagcagcuucgagagauucgagaucuuccccgagaccagcagcuggcccaaccacgacagcaacaagggcgugaccgccgccugcccccacgccggcgccaagagcuucuacaagaaccugaucuggcuggugaagaagggcaacagcuaccccaagcugagcaagagcuacaucaacgacaagggcaaggaggugcuggugcuguggggcauccaccaccccagcaccaccgccgaccagcagagccuguaccagaacgccgacgccuacguguucgugggcaccagcagauacagcaagaaguucaagcccgagaucgccaucagacccaaggugagagaccaggagggcagaaugaacuacuacuggacccugaucgagcccggcgacaagaucaccuucgaggccaccggcaaccugguggugcccagauacgccuucgccauggagagaaacgccggcagcggcaucaucaucagcgacacccccgugcacgacugcaacaccaccugccagacccccgagggcgccaucaacaccagccugcccuuccagaacauccaccccaucaccaucggcaagugccccaaguacgugaagagcaccaagcugagacuggccaccggccugagaaacgugcccagcauccagagcagaggccuguucggcgccaucgccggcuucaucgagggcggcuggaccggcaugguggacggcugguacggcuaccaccaccagaacgagcagggcagcggcuacgccgccgaccugaagagcacccagaacgccaucgacaagaucaccaacaaggugaacagcgugaucgagaagaugaacacccaguucaccgccgugggcaaggaguucaaccaccuggagaagagaaucgagaaccugaacaagaagguggacgacggcuuccuggacaucuggaccuacaacgccgagcugcuggugcugcuggagaacgagagaacccuggacuaccacgacagcaacgugaagaaccuguacgagaaggugagaaaccagcugaagaacaacgccaaggagaucggcaacggcugcuucgaguucuaccacaagugcgacaacaccugcauggagagcgugaagaacggcaccuacgacuaccccaaguacagcgaggaggccaagcugaacagagaggagaucgacggcgugaagcuggagagcaccagaaucuaccagauccuggccaucuacagcaccguggccagcagccuggugcugguggugagccugggcgccaucagcuucuggaugugcagcaacggcagccugcagugcagaaucugcaucuga

SEQ ID NO: 170018 - RNA, 1701 nt, Artificial Sequence
  derived and/or modified CDS sequence (opt4) from hemagglutinin__InfluenzaA__AGJ73377
augaaggccauccugguggugcugcuguacaccuucgccaccgccaacgccgacacccugugcaucggcuaccacgccaacaacagcaccgacaccguggacaccgugcuggagaagaacgugaccgugacccacagcgugaaccugcuggaggacaagcacaacggcaagcugugcaagcugagaggcguggccccccugcaccugggcaagugcaacaucgccggcuggauccugggcaaccccgagugcgagagccugagcaccgccagcagcuggagcuacaucguggagaccagcagcagcgacaacggcaccugcuaccccggcgacuucaucaacuacgaggagcugagagagcagcugagcagcgugagcagcuucgagagauucgagaucuuccccaagaccagcagcuggcccaaccacgacagcaacaagggcgugaccgccagcugccccagagccggcgccaagagcuucuacaagaaccugaucuggcuggugaagaagggcaacagcuaccccaagcugagcaagagcuacaucaacgacaagggcaaggaggugcuggugcuguggggcauccaccaccccagcaccaccgccgaccagcagagccuguaccagaacgccgacgccuacguguucgugggcaccagcagauacagcaagaaguucaagcccgagaucgccaucagacccaaggugagagaccaggagggcagaaugaacuacuacuggacccugguggagcccggcgacaagaucaccuucgaggccaccggcaaccugcuggugcccagauacgccuucgccauggagagaaacgccggcagcggcaucaucaucagcgacacccccgugcacgacugcaacaccaccugccagacccccaagggcgccaucaacaccagccugcccuuccagaacauccaccccaucaccaucggcaagugccccaaguacgugaagagcaccaagcugagacuggccaccggccugagaaacgugcccagcauccagagcagaggccuguucggcgccaucgccggcuucaucgagggcggcuggaccggcaugguggacggcugguacggcuaccaccaccagaacgagcagggcagcggcuacgccgccgaccugaagagcacccagaacgccaucgacaagaucaccaacaaggugaacagcgugaucgagaagaugaacacccaguucaccgccgugggcaaggaguucaaccaccuggagaagagaaucgagaaccugaacaagaagguggacgacggcuuccuggacaucuggaccuacaacgccgagcugcuggugcugcuggagaacgagagaacccuggacuaccacgacagcaacgugaagaaccuguacgagaaggugagaaaccagcugaagaacaacgccaaggagaucggcaacggcugcuucgaguucaaccacaagugcgacaacaccugcauggagagcgugaagaacggcaccuacgacuaccccaaguacagcgaggaggccaagcugaacaaggaggagaucgacggcgugaagcuggagagcaccagaaucuaccagauccuggccaucuacagcaccguggccagcagccuggugcugguggugagccugggcgccaucagcuucuggaugugcagcaacggcagccugcagugcagaaucugcaucuga

SEQ ID NO: 170019 - RNA, 1701 nt, Artificial Sequence
  derived and/or modified CDS sequence (opt4) from hemagglutinin__InfluenzaA__AGJ73380
augaaggccauccugguggugcugcuguacaccuucgccaccgccaacgccgacacccugugcaucggcuaccacgccaacaacagcaccgacaccguggacaccgugcuggagaagaacgugaccgugacccacagcgugaaccugcuggaggacaagcacaacggcaagcugugcaagcugagaggcguggccccccugcaccugggcaagugcaacaucgccggcuggauccugggcaaccccgagugcgagagccugagcaccgccagcagcuggagcuacaucguggagaccagcagcagcgacaacggcaccugcuaccccggcgacuucaucaacuacgaggagcugagagagcagcugagcagcgugagcagcuucgagagauucgagaucuuccccaagaccagcagcuggcccaaccacgacagcaacaagggcgugaccgccgccugcccccacgccggcgccaagagcuucuacaagaaccugaucuggcuggugaagaagggcaacagcuaccccaagcugagcaagagcuacaucaacgacaagggcaaggaggugcuggugcuguggggcauccaccaccccagcaccaccgccgaccagcagagccuguaccagaacgccgacgccuacguguucgugggcaccagcagauacagcaagaaguucaagcccgagaucgccaucagacccaaggugagaggccaggagggcagaaugaacuacuacuggacccugaucgagcccggcgacaagaucaccuucgaggccaccggcaaccugguggugcccagauacgccuucgccauggagagaaacgccggcagcggcaucaucaucagcgacacccccgugcacgacugcaacagcaccugccagacccccaagggcgccaucaacaccagccugcccuuccagaacauccaccccaucaccaucggcaagugccccaaguacgugaagagcaccaagcugagacuggccaccggccugagaaacgugcccagcauccagagcagaggccuguucggcgccaucgccggcuucaucgagggcggcuggaccggcaugguggacggcugguacggcuaccaccaccagaacgagcagggcagcggcuacgccgccgaccugaagagcacccagaacgccaucgacaagaucaccaacaaggugaacagcgugaucgagaagaugaacacccaguucaccgccgugggcaaggaguucaaccaccuggagaagagaaucgagaaccugaacaagaagguggacgacggcuuccuggacaucuggaccuacaacgccgagcuguucgugcugcuggagaacgagagaacccuggacuaccacgacagcaacgugaaggaccuguacgagaaggugagaaaccagcugaagaacaacgccaaggagaucggcaacggcugcuucgaguucuaccacaagugcgacaacaccugcauggagagcgugaagaacggcaccuacgacuaccccaaguacagcgaggaggccaagcugaacagagagaagaucgacggcgugaagcuggagagcaccagaaucuaccagauccuggccaucuacagcaccguggccagcagccuggugcugguggugagccugggcgccaucagcuucuggaugugcagcaacggcagccugcagugcagaaucugcaucuga

SEQ ID NO: 170020 - RNA, 1701 nt, Artificial Sequence
  derived and/or modified CDS sequence (opt4) from hemagglutinin__InfluenzaA__AGK62991
augaagaccaucaucgcccugagcuacauccugugccugguguucgcccagaagcugcccggcaacgacaacagcaccgccacccugugccugggccaccacgccgugcccaacggcaccaucgugaagaccaucaccaacgaccagaucgaggugaccaacgccaccgagcuggugcagagcagcagcaccggcgagaucugcgacagcccccaccagauccuggacggcgagaacugcacccugaucgacgcccugcugggcgacccccagugcgacggcuuccagaacaagaagugggaccuguucguggagagaagcaaggccuacagcaacugcuaccccuacgacgugcccgacuacgccagccugagaagccugguggccagcagcggcacccuggaguucaacaacgagagcuucaacuggaccggcgugacccagaacggcaccagcagcgccugcaucagaagaagcaacagcagcuucuucagcagacugaacuggcugacccaccugaacuucaaguaccccgcccugaacgugaccaugcccaacaacgagcaguucgacaagcuguacaucuggggcgugcaccaccccggcaccgacaaggaccagaucuuccuguacgcccaggccagcggcagaaucaccgugagcaccaagagaagccagcaggccgugauccccaacaucggcagcagacccagaaucagaaacauccccagcagaaucagcaucuacuggaccaucgugaagcccggcgacauccugcugaucaacagcaccggcaaccugaucgcccccagaggcuacuucaagaucagaagcggcaagagcagcaucaugagaagcgacgcccccaucggcaagugcaacagcgagugcaucacccccaacggcagcauccccaacgacaagcccuuccagaacgugaacagaaucaccuacggcgccugccccagauacgugaagcagagcacccugaagcuggccaccggcaugagaaacgugcccgagaagcagaccagaggcaucuucggcgccaucgccggcuucaucgagaacggcugggagggcaugguggacggcugguacggcuucagacaccagaacagcgagggcagaggccaggccgccgaccugaagagcacccaggccgccaucgaccagaucaacggcaagcugaacagacugaucggcaagaccaacgagaaguuccaccagaucgagaaggaguucagcgagguggagggcagaauccaggaccuggagaaguacguggaggacaccaagaucgaccuguggagcuacaacgccgagcugcugguggcccuggagaaccagcacaccaucgaccugaccgacagcgagaugaacaagcuguucgagaagaccaagaagcagcugagagagaacgccgaggacaugggcaacggcugcuucaagaucuaccacaagugcgacaacgccugcaucggcagcaucagaaacggcaccuacaaccacgacguguacagagacgaggcccugaacaacagauuccagaucaagggcguggagcugaagagcggcuacaaggacuggauccuguggaucagcuucgccaucagcugcuuccugcugugcguggcccugcugggcuucaucaugugggccugccagaagggcaacaucagaugcaacaucugcaucuga

SEQ ID NO: 170021 - RNA, 1701 nt, Artificial Sequence
  derived and/or modified CDS sequence (opt4) from hemagglutinin__InfluenzaA__AGK62993
augaagaccaucaucgcccugagcuacauccugugccugguguucgcccagaagcugcccggcaacgacaacagcaccgccacccugugccugggccaccacgccgugcccaacggcaccaucgugaagaccaucaccaacgaccagaucgaggugaccaacgccaccgagcuggugcagagcagcagcaccggcgagaucugcaacagcccccaccagauccuggacggcgagaacugcacccugaucgacgcccugcugggcgacccccagugcgacggcuuccagaacaagaagugggaccuguucguggagagaagcaaggcccacagcaacugcuaccccuacgacgugcccgacuacgccagccugagaagccugguggccagcagcggcacccuggaguucaacaacgagagcuucaacuggaccggcgugacccagaacggcaccagcagcgccugcaucagaagaagcaacaacagcuucuucagcagacugaacuggcugacccaccugaacuucaaguaccccgcccugaacgugaccaugcccaacaacgagcaguucgacaagcuguacaucuggggcgugcaccaccccggcaccgacaaggaccagaucuuccuguacgcccaggccagcggcagaaucaccgugagcaccaagagaagccagcaggccgugauccccaacaucggcagcagacccagagugagaaacauccccagcagagugagcaucuacuggaccaucgugaagcccggcgacauccugcugaucaacagcaccggcaaccugaucgcccccagaggcuacuucaagaucagaagcggcaagagcagcaucaugagaagcgacgcccccaucagcaagugcaacagcgccugcaucaccaccaacggcagcauccccaacgacaagcccuuccagaacgugaacagaaucaccuacggcgccugccccagauacgugaagcagaacacccugaagcuggccaccggcaugagaaacgugcccgagaagcagaccagaggcaucuucggcgccaucgccggcuucaucgagaacggcugggagggcaugguggacggcugguacggcuucagacaccagaacagcgagggcagaggccaggccgccgaccugaagagcacccaggccgccaucgaccagaucaacggcaagcugaacagacugaucggcaagaccaacgagaaguuccaccagaucgagaaggaguucagcgagguggagggcagaauccaggaccuggagaaguacguggaggacaccaagaucgaccuguggagcuacaacgccgagcugcugguggcccuggagaaccagcacaccaucgaccugaccgacagcgagaugaacaagcuguucgagaagaccaagaagcagcugagagagaacgccgaggacaugggcaacggcugcuucaagaucuaccacaagugcgacaacgccugcaucggcagcaucagaaacggcaccuacgaccacgacguguacagagacgaggcccugaacaacagauuccagaucaagggcguggagcugaagagcggcuacaaggacuggauccuguggaucagcuucgccaucagcugcuuccugcugugcguggcccugcugggcuucaucauguggagcugccagaagggcaacaucagaugcaacaucugcaucuga

SEQ ID NO: 170022 - RNA, 1701 nt, Artificial Sequence
  derived and/or modified CDS sequence (opt4) from hemagglutinin__InfluenzaA__AGK62995
augaagaccaucaucgcccugagcuacauccugugccugguguucgcccagaagcugcccggcaacgacaacagcaccgccacccugugccugggccaccacgccggccccaacggcaccaucgugaagaccaucaccaacgaccagaucgaggugaccaacgccaccgagcuggugcagagcagcagcaccggcgagaucugcgacagcccccaccagauccuggacggcgagaacugcacccugaucgacgcccugcugggcgacccccagugcgacggcuuccagaacaagaagugggaccuguucguggagagaagcaaggccuacagcaacugcuaccccuacgacgugcccgacuacgccagccugagaagccugguggccagcagcggcacccuggaguucaacaacgagagcuucaacuggaccggcgugacccagaacggcaccagcagcgccugcaucagaagaagcaacaacagcuucuucagcagacugaacuggcugacccaccugaacuucaaguaccccgcccugaacgugaccaugcccaacaacgagcaguucgacaagcuguacaucuggggcgugcaccaccccggcaccgacaaggaccagaucuuccuguacgcccagagcagcggcagaaucaccgugagcaccaagagaagccagcaggccgugauccccaacaucggcagcagacccagaaucagaaacauccccagcagaaucagcaucuacuggaccaucgugaagcccggcgacauccugcugaucaacagcaccggcaaccugaucgcccccagaggcuacuucaagaucagaagcggcaagagcagcaucaugagaagcgacgcccccaucggcaagugcaacagcgagugcaucacccccaacggcagcauccccaacgacaagcccuuccagaacgugaacagaaucaccuacggcgccugccccagauacgugaagcagagcacccugaagcuggccaccggcaugagaaacgugcccgagaagcagaccagaggcaucuucggcgccaucgccggcuucaucgagaacggcugggagggcaugguggacggcugguacggcuucagacaccagaacagcgagggcagaggccaggccgccgaccugaagagcacccaggccgccaucgaccagaucaacggcaagcugaacagacugaucggcaagaccaacgagaaguuccaccagaucgagaaggaguucagcgagguggagggcagaauccaggaccuggagaaguacguggaggacaccaagaucgaccuguggagcuacaacgccgagcugcugguggcccuggagaaccagcacaccaucgaccugaccgacagcgagaugaacaagcuguucgagaagaccaagaagcagcugagagagaacgccgaggacaugggcaacggcugcuucaagaucuaccacaagugcgacaacgccugcaucggcagcaucagaaacggcaccuacaaccacgacguguacagagacgaggcccugaacaacagauuccagaucaagggcguggagcugaagagcggcuacaaggacuggauccuguggaucagcuucgccaucagcugcuuccugcugugcguggcccugcugggcuucaucaugugggccugccagaagggcaacaucagaugcaacaucugcaucuga

SEQ ID NO: 170023 - RNA, 1701 nt, Artificial Sequence
  derived and/or modified CDS sequence (opt4) from hemagglutinin__InfluenzaA__AGK62997
augaagaccaucaucgcccugagcuacauccugugccugguguucgcccagaagcugcccggcaacgacaacagcaccgccacccugugccugggccaccacgccgugcccaacggcaccaucgugaagaccaucaccaacgaccagaucgaggugaccaacgccaccgagcuggugcagagcagcagcaccggcgagaucugcaacagcccccaccagauccuggacggcgagaacugcacccugaucgacgcccugcugggcgacccccagugcgacggcuuccagaacaagaagugggaccuguucguggagagaagcaaggcccacagcaacugcuaccccuacgacgugcccgacuacgccagccugagaagccugguggccagcagcggcacccuggaguucaacaacgagagcuucaacuggaccggcgugacccagaacggcaccagcagcgccugcaucagaagaagcaacaacagcuucuucagcagacugaacuggcugacccaccugaacuucaaguaccccgcccugaacgugaccaugcccaacaacgacaaguucgacaagcuguacaucuggggcgugcaccaccccggcaccgacaaggaccagaucuuccuguacgcccaggccagcggcagaaucaccgugagcaccaagagaagccagcaggccgugauccccaacaucggcagcagacccagagugagaaacauccccagcagagugagcaucuacuggaccaucgugaagcccggcgacauccugcugaucaacagcaccggcaaccugaucgcccccagaggcuacuucaagaucagaagcggcaagagcagcaucaugagaagcgacgcccccaucggcaagugcaacagcgccugcaucacccccaacggcagcauccccaacgacaagcccuuccagaacgugaacagaaucaccugcggcgccugcgccagauacgugaagcagaacacccugaagcuggccaccggcaugagaaacgugcccgagaagcagaccagaggcaucuucggcgccaucgccguguucaucgagaacggcugggagggcaugguggacggcugguacggcuucagacaccagaacagcgagggcagagagcaggccgccgccuuccagagcacccaggccgccaucgaccagaucaucggcaagcugaacagacugaucggcgagaccaacgagaaguuccaccagaucgagaaggaguucagcgagguggagagaagaauccaggcccuggagaaguacguggaggacaccaagaucgaccuguggagcuacaacgccgagcugcugguggcccuggagaaccagcacaccaucgaccugaccgacagcgagaugaacaagcuguucgagaagaccaagaagcagcugagagagaacgccgaggacaugggcaacggcugcuucaagaucuaccacaagugcgacaacgccugcaucggcagcaucagaaacggcaccuacgaccacgacguguacagagacgaggcccugaacaacagauuccagaucaagggcguggagcugaagagcggcuacaaggacuggauccuguggaucagcuucgccaucagcugcuuccugcugugcguggcccugcugggcuucaucauguggagcugccagaagggcaacaucagaugcaacaucugcaucuga

SEQ ID NO: 170024 - RNA, 1701 nt, Artificial Sequence
  derived and/or modified CDS sequence (opt4) from hemagglutinin__InfluenzaA__AGK62999
augaagaccaucaucgcccugagcuacauccugugccugguguucgcccagaagcugcccggcaacgacaacagcaccgccacccugugccugggccaccacgccgugcccaacggcaccaucgugaagaccaucaccaacgaccagaucgaggugaccaacgccaccgagcuggugcagagcagcagcaccggcgagaucugcaacagcccccaccagauccuggacggcgagaacugcacccugaucgacgcccugcugggcgacccccagugcgacggcuuccagaacaagaagugggaccuguucguggagagaagcaaggccuacagcaacugcuaccccuacgacgugcccgacuacgccagccugagaagccugguggccagcagcggcacccuggaguucaacaacgagagcuucaacuggaccggcgugacccagaacggcaccagcagcgccugcaucagaagaagcaacaacagcuucuucagcagacugaacuggcugacccaccugaacuucaaguaccccgcccugaacgugaccaugcccaacaacgagcaguucgacaagcuguacaucuggggcgugcaccaccccggcaccgacaaggaccagaucuuccuguacgcccaggccagcggcagaaucaccgugagcaccaagagaagccagcaggccgugauccccaacaucggcagcagacccagagugagaaacauccccagcagagugagcaucuacuggaccaucgugaagcccggcgacauccugcugaucaacagcaccggcaaccugaucgcccccagaggcuacuucaagaucagaagcggcaagagcagcaucaugagaagcgacgcccccaucggcaagugcaacagcgccugcaucacccccaacggcagcauccccaacgacaagcccuuccagaacgugaacagaaucaccuacggcgccugccccagauacgugaagcagaacacccugaagcuggccaccggcaugagaaacgugcccgagaagcagaccagaggcaucuucggcgccaucgccggcuucaucgagaacggcugggagggcaugguggacggcugguacggcuucagacaccagaacagcgagggcagaggccaggccgccgaccugaagagcacccaggccgccaucgaccagaucaacggcaagcugaacagacugaucggcaagaccaacgagaaguuccaccagaucgagaaggaguucagcgagguggagggcagaauccaggaccuggagaaguacguggaggacaccaagaucgaccuguggagcuacaacgccgagcugcugguggcccuggagaaccagcacaccaucgaccugaccgacagcgagaugaacaagcuguucgagaagaccaagaagcagcugagagagaacgccgaggacaugggcaacggcugcuucaagaucuaccacaagugcgacaacgccugcaucggcagcaucagaaacggcaccuacgaccacgacguguacagagacgaggcccugaacaacagauuccagaucaagggcguggagcugaagagcggcuacaaggacuggauccuguggaucagcuucgccaucagcugcuuccugcugugcguggcccugcugggcuucaucaugugggccugccagaagggcaacaucagaugcaacaucugcaucuga

SEQ ID NO: 170025 - RNA, 1701 nt, Artificial Sequence
  derived and/or modified CDS sequence (opt4) from hemagglutinin__InfluenzaA__AGK63001
augaagaccaucaucgcccugagcuacauccugugccugguguucgcccagaagcugcccggcaacgacaacagcaccgccacccugugccuggugcaccacgccgugcccaacggcaccaucgugaagaccaucaccaacgaccagaucgaggugaccaacgccaccgagcuggugcagagcagcagcaccggcgagaucugcgacagcccccaccagauccuggacggcgagaacugcacccugaucgacgcccugcugggcgacccccagugcgacggcuuccagaacaaggagugggaccuguucguggagagaagcaaggccuacagcaacugcuaccccuacgacgugcccgacuacgccagccugagaagccugguggccagcagcggcacccuggaguucaacaacgagagcuucaacuggaccggcgugacccagaacggcaccagcagcgccugcaucagaagaagcaacagcagcuucuucagcagacugaacggccugacccaccugaacuucaaguaccccgcccugaacgugaccaugcccaacaacgagcaguucgacaagcuguacaucuggggcgugcaccaccccggcaccgacaaggaccagaucuuccuguacgcccagagcagcggcagaaucaccgugagcaccaagagaagccagcaggccgugauccccaacaucggcagcagacccagaaucagaaacauccccagcagaaucagcaucuacuggaccaucgugaagcccggcgacauccugcugaucaacagcaccggcaaccugaucgcccccagaggcuacuucaagaucagaagcggcaagagcagcaucaugagaagcgacgcccccaucggcaagugcaacagcgagugcaucacccccaacggcagcauccccaacgacaagcccuuccagaacgugaacagaaucaccuacggcgccugccccagauacgugaagcagagcacccugaagcuggccaccggcaugagaaacgugcccgagaagcagaccagaggcaucuucggcgccaucgccggcuucaucgagaacggcugggagggcaugguggacggcugguacggcuucagacaccagaacagcgagggcagagagcaggccgccgacuuccagagcacccaggccgccaucgaccagaucaucggcaagcugaacagacugaucggcaagaccaacgagaaguuccaccagaucgagaaggaguucagcgagguggagagaagaauccaggaccuggagaaguacguggaggacaccaagaucgaccuguggagcuacaacgccgagcugcugguggcccuggagaaccagcacaccaucgaccugaccgacagcgagaugaacaagcuguucgagaagaccaagaagcagcugagagagaacgccgaggacaugggcaacggcugcuucaagaucuaccacaagugcgacaacgccugcaucggcagcaucagaaacggcaccuacaaccacgacguguacagagacgaggcccugaacaacagauuccagaucaagggcguggagcugaagagcggcuacaaggacuggauccuguggaucagcuucgccaucagcugcuuccugcugugcguggcccugcugggcuucaucauguggagcugccagaagggcaacaucagaugcaacaucugcaucuga

SEQ ID NO: 170026 - RNA, 1701 nt, Artificial Sequence
  derived and/or modified CDS sequence (opt4) from hemagglutinin__InfluenzaA__AGK63003
augaagaccaucaucgcccugagcuacauccugugccugguguucgcccagaagcugcccggcaacgacaacagcaccgccacccugugccugggccaccacgccggccccaacggcaccaucgugaagaccaucaccaacgaccagaucgaggugaccaacgccaccgagcuggugcagagcagcagcaccggcgagaucugcgacagcccccaccagauccuggacggcgagaacugcacccugaucgacgcccugcugggcgacccccagugcgacggcuuccagaacaagaagugggaccuguucaucgagagaagcaaggccuacagcaacugcuaccccuacgacgugcccgacuacgccagccugagaagccugguggccagcagcggcacccuggaguucaacaacgagagcuucaacuggaccggcgugacccagaacggcaccagcagcgccugcaucagaagaagcaacagcagcuucuucagcagacugaacuggcugacccaccugaacuucaaguaccccgcccugaacgugaccaugcccaacaacgagcaguucgacaagcuguacaucuggggcgugcaccaccccggcaccgacaaggaccagaucuuccuguacgcccagagcagcggcagaaucaccgugagcaccaagagaagccagcaggccgugauccccaacaucggcagcagacccagaaucagaaacauccccagcagaaucagcaucuacuggaccaucgugaagcccggcgacauccugcugaucaacagcaccggcaaccugaucgcccccagaggcuacuucaagaucagaagcggcaagagcagcaucaugagaagcgacgcccccaucggcaagugcaacagcgccugcaucacccccaacggcagcauccccaacgacaagcccuuccagaacgugaacagaaucaccuacggcgccugccccagauacgugaagcagagcacccugaagcuggccaccggcaugagaaacgugcccgagaagcagaccagaggcaucuucggcgccaucgccggcuucaucgagaacggcugggagggcaugguggacggcugguacggcuucagacaccagaacagcgagggcagaggccaggccgccgaccugaagagcacccaggccgccaucgaccagaucaacggcaagcugaacagacugaucggcaagaccaacgagaaguuccaccagaucgagaaggaguucagcgagguggagggcagaauccaggaccuggagaaguacguggaggacaccaagaucgaccuguggagcuacaacgccgagcugcugguggcccuggagaaccagcacaccaucgaccugaccgacagcgagaugaacaagcuguucgagaagaccaagaagcagcugagagagaacgccgaggacaugggcaacggcugcuucaagaucuaccacaagugcgacaacgccugcaucggcagcaucagaaacggcaccuacaaccacgacguguacagagacgaggcccugaacaacagauuccagaucaagggcguggagcugaagagcggcuacaaggacuggauccuguggaucagcuucgccaucagcugcuuccugcugugcguggcccugcugggcuucaucaugugggccugccagaagggcaacaucagaugcaacaucugcaucuga

SEQ ID NO: 170027 - RNA, 1701 nt, Artificial Sequence
  derived and/or modified CDS sequence (opt4) from hemagglutinin__InfluenzaA__AGK63005
augaagaccaucaucgcccugagcuacauccugugccugguguucgcccagaagcugcccggcaacgacaacagcaccgccacccugugccuggugcaccacgccgugcccaacggcaccaucgugaagaccaucaccaacgaccagaucgaggugaccaacgccaccgagcuggugcagagcagcagcaccggcgagaucugcgacagcccccaccagauccuggacggcgagaacugcacccugaucgacgcccugcugggcgacccccagugcgacggcuuccagaacaagaagugggaccuguucguggagagaagcaaggccuacagcaacugcuaccccuacgacgugcccgacuacgccagccugagaagccugguggccagcagcggcacccuggaguucaacaacgagagcuucaacuggaccggcgugacccagaacggcaccagcagcgccugcaucagaagaagcaacagcagcuucuucagcagacugaacggccugacccaccugaacuucaaguaccccgcccuggacgugaccaugcccaacaacgacaaguucgacaagcuguacaucuggggcgugcaccaccccggcaccgacaaggaccagaucuuccuguacgcccagagcagcggcagaaucaccgugagcaccaagagaagccagcaggccgugauccccaacaucggcagcagacccagaaucagaaacauccccagcagaaucagcaucuacuggaccaucgugaagcccggcgacauccugcugaucaacagcaccggcaaccugaucgcccccagaggcuacuucaagaucagaagcggcaagagcagcaucaugagaagcgacgcccccaucggcaagugcaacagcgagugcaucacccccaacggcagcauccccaacgacaagcccuuccagaacgugaacagaaucaccuacggcgccugccccagauacgugaagcagagcacccugaagcuggccaccggcaugagaaacgugcccgagaagcagaccagaggcaucuucggcgccaucgccguguucaucgagaacggcugggagggcaugguggacggcugguacggcuucagacaccagaacagcgagggcagagagcaggccgccgacuuccagagcacccaggccgccaucgaccagaucaacggcaagcugaacagacugaucggcaagaccaacgagaaguuccaccagaucgagaaggaguucagcgagguggagggcagaauccaggaccuggagaaguacguggaggacaccaagaucgaccuguggagcuacaacgccgagcugcugguggcccuggagaaccagcacaccaucgaccugaccgacagcgagaugaacaagcuguucgagaagaccaagaagcagcugagagagaacgccgaggacaugggcaacggcugcuucaagaucuaccacaagugcgacaacgccugcaucggcagcaucagaaacggcaccuacaaccacgacguguacagagacgaggcccugaacaacagauuccagaucaagggcguggagcugaagagcggcuacaaggacuggauccuguggaucagcuucgccaucagcugcuuccugcugugcguggcccugcugggcuucaucaugugggccugccagaagggcaacaucagaugcaacaucugcaucuga

SEQ ID NO: 170028 - RNA, 1701 nt, Artificial Sequence
  derived and/or modified CDS sequence (opt4) from hemagglutinin__InfluenzaA__AGK63007
augaagaccaucaucgcccugagcuacauccugugccugguguucgcccagaagcugcccggcaacgacaacagcaccgccacccugugccugggccaccacgccgugcccaacggcaccaucgugaagaccaucaccaacgaccagaucgaggugaccaacgccaccgagcuggugcagagcagcagcaccggcgagaucugcgacagcccccaccagauccuggacggcgagaacugcacccugaucgacgcccugcugggcgacccccagugcgacggcuuccagaacaagaagugggaccuguucguggagagaagcaaggcccacagcaacugcuaccccuacgacgugcccgacuacgccagccugagaagccugguggccagcagcggcacccuggaguucaacaacgagagcuucaacuggaccggcgugacccagaacggcaccagcagcgccugcaucagaagaagcaacaacagcuucuucagcagacugaacuggcugacccaccugaacuucaaguaccccgcccugaacgugaccaugcccaacaacgagcaguucgacaagcuguacaucuggggcgugcaccaccccggcaccgacaaggaccagaucuuccuguacgcccaggccagcggcagaaucaccgugagcaccaagagaagccagcaggccgugauccccaacaucggcagcagacccagagugagaaacauccccagcagagugagcaucuacuggaccaucgugaagcccggcgacauccugcugaucaacagcaccggcaaccugaucgcccccagaggcuacuucaagaucagaagcggcaagagcagcaucaugagaagcgacgcccccaucggcaagugcaacagcgagugcaucacccccaacggcagcauccccaacgacaagcccuuccagaacgugaacagaaucaccuacggcgccugccccagauacgugaagcagaacacccugaagcuggccaccggcaugagaaacgugcccgagaagcagaccagaggcaucuucggcgccaucgccggcuucaucgagaacggcugggagggcaugguggacggcugguacggcuucagacaccagaacagcgagggcagaggccaggccgccgaccugaagagcacccaggccgccaucgaccagaucaacggcaagcugaacagacugaucggcaagaccaacgagaaguuccaccagaucgagaaggaguucagcgagguggagggcagaauccaggaccuggagaaguacguggaggacaccaagaucgaccuguggagcuacaacgccgagcugcugguggcccuggagaaccagcacaccaucgaccugaccgacagcgagaugaacaagcuguucgagaagaccaagaagcagcugagagagaacgccgaggacaugggcaacggcugcuucaagaucuaccacaagugcgacaacgccugcaucggcagcaucagaaacggcaccuacgaccacgacguguacagagacgaggcccugaacaacagauuccagaucaagggcguggagcugaagagcggcuacaaggacuggauccuguggaucagcuucgccaucagcugcuuccugcugugcguggcccugcugggcuucaucaugugggccugccagaagggcaacaucagaugcaacaucugcaucuga

SEQ ID NO: 170029 - RNA, 1701 nt, Artificial Sequence
  derived and/or modified CDS sequence (opt4) from hemagglutinin__InfluenzaA__AGK63009
augaagaccaucaucgcccugagcuacauccugugccugguguucgcccagaagcugcccggcaacgacaacagcaccgccacccugugccugggccaccacgccgugcccaacggcaccaucgugaagaccaucaccaacgaccagaucgaggugaccaacgccaccgagcuggugcagagcagcagcaccggcgagaucugcaacagcccccaccagauccuggacggcgagaacugcacccugaucgacgcccugcugggcgacccccagugcgacggccugcagaacaagaagugggaccuguucguggagagaagcaaggcccacagcaacugcuaccccuacgacgugcccgacuacgccagccugagaagccugguggccagcagcggcacccuggaguucaacaacgagagcuucaacuggaccggcgugacccagaacggcaccagcagcgccugcaucagaagaagcaacaacagcuucuucagcagacugaacuggcugacccaccugaacuucaaguaccccgcccugaacgugaccaugcccaacaacgagcaguucgacaagcuguacaucuggggcgugcaccaccccggcaccgacaaggaccagaucuuccuguacgcccaggccagcggcagaaucaccgugagcaccaagagaagccagcaggccgugauccccaacaucggcagcagacccagagugagaaacauccccagcagagugagcaucuacuggaccaucgugaagcccggcgacauccugcugaucaacagcaccggcaaccugaucgcccccagaggcuacuucaagaucagaagcggcaagagcagcaucaugagaagcgacgcccccaucggcaagugcaacagcgccugcaucacccccaacggcagcauccccaacgacaagcccuuccagaacgugaacagaaucaccuacggcgccugccccagauacgugaagcagaacacccugaagcuggccaccggcaugagaaacgugcccgagaagcagaccagaggcaucuucggcgccaucgccggcuucaucgagaacggcugggagggcaugguggacggcugguacggcuucagacaccagaacagcgagggcagaggccaggccgccgaccugaagagcacccaggccgccaucgaccagaucaacggcaagcugaacagacugaucggcaagaccaacgagaaguuccaccagaucgagaaggaguucagcgagguggagggcagaauccaggaccuggagaaguacguggaggacaccaagaucgaccuguggagcuacaacgccgagcugcugguggcccuggagaaccagcacaccaucgaccugaccgacagcgagaugaacaagcuguucgagaagaccaagaagcagcugagagagaacgccgaggacaugggcaacggcugcuucaagaucuaccacaagugcgacaacgccugcaucggcagcaucagaaacggcaccuacgaccacgacguguacagagacgaggcccugaacaacagauuccagaucaagggcguggagcugaagagcggcuacaaggacuggauccuguggaucagcuucgccaucagcugcuuccugcugugcguggcccugcugggcuucaucaugugggccugccagaagggcaacaucagaugcaacaucugcaucuga

SEQ ID NO: 170030 - RNA, 1701 nt, Artificial Sequence
  derived and/or modified CDS sequence (opt4) from hemagglutinin__InfluenzaA__AGK63011
augaagaccaucaucgcccugagcuacauccugugccugguguucgcccagaagcugcccggcaacgacaacagcaccgccacccugugccugggccaccacgccgugcccaacggcaccaucgugaagaccaucaccaacgaccagaucgaggugaccaacgccaccgagcuggugcagagcagcagcaccggcgagaucugcgacagcccccaccagauccuggacggcgagaacugcacccugaucgacgcccugcugggcgacccccagugcgacggcuuccagaacaagaagugggaccuguucguggagagaagcaaggccuacagcaacugcuaccccuacgacgugcccgacuacgccagccugagaagccugguggccagcagcggcacccuggaguucaacaacgagagcuucaacuggaccggcgugacccagaacggcaccagcagcgccugcaucagaagaagcaacaacagcuucuucagcagacugaacuggcugacccaccugaacuucaaguaccccgcccugaacgugaccaugcccaacaacgagcaguucgacaagcuguacaucuggggcgugcaccaccccggcaccgacaaggaccagaucuuccuguacgcccaggccagcggcagaaucaccgugagcaccaagagaagccagcaggccgugauccccaacaucggcagcagacccagagugagaaacauccccagcagaaucagcaucuacuggaccaucgugaagcccggcgacauccugcugaucaacagcaccggcaaccugaucgcccccagaggcuacuucaagaucagaagcggcaagagcagcaucaugagaagcgacgcccccaucggcaagugcaacagcgagugcaucacccccaacggcagcauccccaacgacaagcccuuccagaacgugaacagaaucaccuacggcgccugccccagauacgugaagcagagcacccugaagcuggccaccggcaugagaaacgugcccgagaagcagaccagaggcaucuucggcgccaucgccggcuucaucgagaacggcugggagggcaugguggacggcugguacggcuucagacaccagaacagcgagggcagaggccaggccgccgaccugaagagcacccaggccgccaucgaccagaucaacggcaagcugaacagacugaucggcaagaccaacgagaaguuccaccagaucgagaaggaguucagcgagguggagggcagaauccaggaccuggagaaguacguggaggacaccaagaucgaccuguggagcuacaacgccgagcugcugguggcccuggagaaccagcacaccaucgaccugaccgacagcgagaugaacaagcuguucgagaagaccaagaagcagcugagagagaacgccgaggacaugggcaacggcugcuucaagaucuaccacaagugcgacaacgccugcaucggcagcaucagaaacggcaccuacgaccacgacguguacagagacgaggcccugaacaacagauuccagaucaagggcguggagcugaagagcggcuacaaggacuggauccuguggaucagcuucgccaucagcugcuuccugcugugcguggcccugcugggcuucaucaugugggccugccagaagggcaacaucagaugcaacaucugcaucuga

SEQ ID NO: 170031 - RNA, 1701 nt, Artificial Sequence
  derived and/or modified CDS sequence (opt4) from hemagglutinin__InfluenzaA__AGK63013
augaagaccaucaucgcccugagcuacauccugugccugguguucgcccagaagcugcccggcaacgacaacagcaccgccacccugugccugggccaccacgccgugcccaacggcaccaucgugaagaccaucaccaacgaccagaucgaggugaccaacgccaccgagcuggugcagagcagcagcaccggcgagaucugcaacagcccccaccagauccuggacggcgagaacugcacccugaucgacgcccugcugggcgacccccagugcgacggcuuccagaacaagaagugggaccuguucguggagagaagcaaggcccacagcaacugcuaccccuacgacgugcccgacuacgccagccugagaagccugguggccagcagcggcacccuggaguucaacaacgagagcuucaacuggaccggcgugacccagaacggcaccagcagcgccugcaucagaagaagcaacaacagcuucuucagcagacugaacuggcugacccaccugaacuucaaguaccccgcccuggacgugaccaugcccaacaacgagcaguucgacaagcuguacaucuggggcgugcaccaccccggcaccgacaaggaccagaucuuccuguacgcccaggccagcggcagaaucaccgugagcaccaagagaagccagcaggccgugauccccaacaucggcagcagacccagagugagaaacauccccagcagagugagcaucuacuggaccaucgugaagcccggcgacauccugcugaucaacagcaccggcaaccugaucgcccccagaggcuacuucaagaucagaagcggcaagagcagcaucaugagaagcgacgcccccaucggcaagugcaacagcgccugcaucacccccaacggcagcauccccaacgacaagcccuuccagaacgugaacagaaucaccuacggcgccugcgccagauacgugaagcagaacacccugaagcuggccaccggcaugagaaacgugcccgagaagcagaccagaggcaucuucggcgccaucgccguguucaucgagaacggcugggagggcaugguggacggcugguacggcuucagacaccagaacagcgagggcagaggccaggccgccgcccugcagagcacccaggccgccaucgaccagaucaccggcaagcugaacagacugaucggcgagaccaacgagaaguuccaccagaucgagaaggaguucagcgagguggagggcagaauccaggcccuggagaaguacguggaggacaccaagaucgaccuguggagcuacaacgccgagcugcugguggcccuggagaaccagcacaccaucgaccugaccgacagcgagaugaacaagcuguucgagaagaccaagaagcagcugagagagaacgccgaggacaugggcaacggcugcuucaagaucuaccacaagugcgacaacgccugcaucggcagcaucagaaacggcaccuacgaccacgacguguacagagacgaggcccugaacaacagauuccagaucaagggcguggagcugaagagcggcuacaaggacuggauccuguggaucagcuucgccaucagcugcuuccugcugugcguggcccugcugggcuucaucauguggagcugccagaagggcaacaucagaugcaacaucugcaucuga

SEQ ID NO: 170032 - RNA, 1701 nt, Artificial Sequence
  derived and/or modified CDS sequence (opt4) from hemagglutinin__InfluenzaA__AGK63015
augaagaccaucaucgcccugagcuacauccugugccugguguucgcccagaagcugcccggcaacgacaacagcaccgccacccugugccugggccaccacgccgugcccaacggcaccaucgugaagaccaucaccaacgaccagaucgaggugaccaacgccaccgagcuggugcagagcagcagcaccggcgagaucugcgacagcccccaccagauccuggacggcgagaacugcacccugaucgacgcccugcugggcgacccccagugcgacggcuuccagaacaagaagugggaccuguucguggagagaagcaaggccuacagcaacugcuaccccuacgacgugcccgacuacgccagccugagaagccugguggccagcagcggcacccuggaguucaacaacgagagcuucaacuggaccggcgugacccagaacggcaccagcagcgccugcaucagaaagagcaacagcagcuucuucagcagacugaacuggcugacccaccugaacuucaaguaccccgcccugaacgugaccaugcccaacaacgagcaguucgacaagcuguacaucuggggcgugcaccaccccggcaccgacaaggaccagaucuuccuguacgcccagagcagcggcagaaucaccgugagcaccaagagaagccagcaggccgugauccccaacaucggcagcagacccagaaucagaaacauccccagcagaaucagcaucuacuggaccaucgugaagcccggcgacauccugcugaucaacagcaccggcaaccugaucgcccccagaggcuacuucaagaucagaagcggcaagagcagcaucaugagaagcgacgcccccaucggcaagugcaacagcgagugcaucacccccaacggcagcauccccaacgacaagcccuuccagaacgugaacagaaucaccuacggcgccugccccagauacgugaagcagagcacccugaagcuggccaccggcaugagaaacgugcccgagaagcagaccagaggcaucuucggcgccaucgccggcuucaucgagaacggcugggagggcaugguggacggcugguacggcuucagacaccagaacagcgagggcagaggccaggccgccgaccugaagagcacccaggccgccaucgaccagaucaacggcaagcugaacagacugaucggcaagaccaacgagaaguuccaccagaucgagaaggaguucagcgagguggagggcagaauccaggaccuggagaaguacguggaggacaccaagaucgaccuguggagcuacaacgccgagcugcugguggcccuggagaaccagcacaccaucgaccugaccgacagcgagaugaacaagcuguucgagaagaccaagaagcagcugagagagaacgccgaggacaugggcaacggcugcuucaagaucuaccacaagugcgacaacgccugcaucggcagcaucagaaacggcaccuacaaccacgacguguacagagacgaggcccugaacaacagauuccagaucaagggcguggagcugaagagcggcuacaaggacuggauccuguggaucagcuucgccaucagcugcuuccugcugugcguggcccugcugggcuucaucaugugggccugccagaagggcaacaucagaugcaacaucugcaucuga

SEQ ID NO: 170033 - RNA, 1701 nt, Artificial Sequence; identical to SEQ ID NO: 167042
  derived and/or modified CDS sequence (opt4) from hemagglutinin__InfluenzaA__AGK63017

SEQ ID NO: 170034 - RNA, 1701 nt, Artificial Sequence
  derived and/or modified CDS sequence (opt4) from hemagglutinin__InfluenzaA__AGK63019
augaagaccaucaucgcccugagcuacauccugugccugguguucgcccagaagcugcccggcaacgacaacagcaccgccacccugugccugggccaccacgccgugcccaacggcaccaucgugaagaccaucaccaacgaccagaucgaggugaccaacgccaccgagcuggugcagagcagcagcaccggcgagaucugcgacagcccccaccagauccuggacggcgagaacugcacccugaucgacgcccugcugggcgacccccagugcgacggcuuccagaacaagaagugggaccuguucguggagagaagcaaggccuacagcaacugcuaccccuacgacgugcccgacuacgccagccugagaagccugguggccagcagcggcacccuggaguucaacaacgagagcuucaacuggaccggcgugacccagaacggcaccagcagcgccugcaucagaagaagcaacagcagcuucuucagcagacugaacuggcugacccaccugaacuucaaguaccccgcccugaacgugaccaugcccaacaacgagcaguucgacaagcuguacaucuggggcgugcaccaccccggcaccgacaaggaccagaucuuccuguacgcccagagcagcggcagaaucaccgugagcaccaagagaagccagcaggccgugauccccaacaucggcagcagacccagaaucagaaacauccccagcagaaucagcaucuacuggaccaucgugaagcccggcgacauccugcugaucaacagcaccggcaaccugaucgcccccagaggcuacuucaagaucagaagcggcaagagcagcaucaugagaagcgacgcccccaucggcaagugcaacagcgagugcaucacccccaacggcagcauccccaacgacaagcccuuccagaacgugaacagaaucaccuacggcgccugccccagauacgugaagcagagcacccugaagcuggccaccggcaugagaaacgugcccgagaagcagaccagaggcaucuucggcgccaucgccggcuucaucgagaacggcugggagggcaugguggacggcugguacggcuucagacaccagaacagcgagggcagaggccaggccgccgaccugaagagcacccaggccgccaucgaccagaucaacggcaagcugaacagacugaucggcaagaccaacgagaaguuccaccagaucgagaaggaguucagcgagguggagggcagaauccaggaccuggagaaguacguggaggacaccaagaucgaccuguggagcuacaacgccgagcugcugguggcccuggagaaccagcacaccaucgaccugaccgacagcgagaugaacaagcuguucgagaagaccaagaagcagcugagagagaacgccgaggacaugggcaacggcugcuucaagaucuaccacaagugcgacaacgccugcaucggcagcaucagaaacggcaccuacgaccacgacguguacagagacgaggcccugaacaacagauuccagaucaagggcguggagcugaagagcggcuacaaggacuggauccuguggaucagcuucgccaucagcugcuuccugcugugcguggcccugcugggcuucaucaugugggccugccagaagggcaacaucagaugcaacaucugcaucuga

SEQ ID NO: 170035 - RNA, 1701 nt, Artificial Sequence; identical to SEQ ID NO: 169909
  derived and/or modified CDS sequence (opt4) from hemagglutinin__InfluenzaA__AGK63021

SEQ ID NO: 170036 - RNA, 1701 nt, Artificial Sequence
  derived and/or modified CDS sequence (opt4) from hemagglutinin__InfluenzaA__AGK63025
augaagaccaucaucgcccugagcuacauccugugccugguguucgcccagaagcugcccggcaacgacaacagcaccgccacccugugccugggccaccacgccgugcccaacggcaccaucgugaagaccaucaccaacgaccagaucgaggugaccaacgccaccgagcuggugcagagcagcagcaccggcgagaucugcgacagcccccaccagauccuggacggcgagaacugcacccugaucgacgcccugcugggcgacccccagugcgacggcuuccagaacaagaagugggaccuguucaucgagagaagcaaggccuacagcaacugcuaccccuacgacgugcccgacuacgccagccugagaagccugguggccagcagcggcacccuggaguucaacaacgagagcuucaacuggaccggcgugacccagaacggcaccagcagcgccugcaucagaaagagcaacagcagcuucuucagcagacugaacuggcugacccaccugaacuucaaguaccccgcccugaacgugaccaugcccaacaacgagcaguucgacaagcuguacaucuggggcgugcaccaccccggcaccgacaaggaccagaucuuccuguacgcccagagcagcggcagaaucaccgugagcaccaagagaagccagcaggccgugauccccaacaucggcagcagacccagaaucagaaacauccccagcagaaucagcaucuacuggaccaucgugaagcccggcgacauccugcugaucaacagcaccggcaaccugaucgcccccagaggcuacuucaagaucagaagcggcaagagcagcaucaugagaagcgacgcccccaucggcaagugcaacagcgagugcaucacccccaacggcagcauccccaacgacaagcccuuccagaacgugaacagaaucaccuacggcgccugccccagauacgugaagcagagcacccugaagcuggccaccggcaugagaaacgugcccgagaagcagaccagaggcaucuucggcgccaucgccggcuucaucgagaacggcugggagggcaugguggacggcugguacggcuucagacaccagaacagcgagggcagaggccaggccgccgaccugaagagcacccaggccgccaucgaccagaucaacggcaagcugaacagacugaucggcaagaccaacgagaaguuccaccagaucgagaaggaguucagcgagguggagggcagaauccaggaccuggagaaguacguggaggacaccaagaucgaccuguggagcuacaacgccgagcugcugguggcccuggagaaccagcacaccaucgaccugaccgacagcgagaugaacaagcuguucgagaagaccaagaagcagcugagagagaacgccgaggacaugggcaacggcugcuucaagaucuaccacaagugcgacaacgccugcaucggcagcaucagaaacggcaccuacaaccacgacguguacagagacgaggcccugaacaacagauuccagaucaagggcguggagcugaagagcggcuacaaggacuggauccuguggaucagcuucgccaucagcugcuuccugcugugcguggcccugcugggcuucaucaugugggccugccagaagggcaacaucagaugcaacaucugcaucuga

SEQ ID NO: 170037 - RNA, 1701 nt, Artificial Sequence; identical to SEQ ID NO: 169134
  derived and/or modified CDS sequence (opt4) from hemagglutinin__InfluenzaA__AGK63027

SEQ ID NO: 170038 - RNA, 1701 nt, Artificial Sequence
  derived and/or modified CDS sequence (opt4) from hemagglutinin__InfluenzaA__AGK63029
augaagaccaucaucgcccugagcuacauccugugccugguguucgcccagaagcugcccggcaacgacaacagcaccgccacccugugccugggccaccacgccgugcccaacggcaccaucgugaagaccaucaccaacgaccagaucgaggugaccaacgccaccgagcuggugcagagcagcagcaccggcgagaucugcaacagcccccaccagauccuggacggcgagaacugcacccugaucgacgcccugcugggcgacccccagugcgacggcuuccagaacaagaagugggaccuguucguggagagaagcaaggcccacagcaacugcuaccccuacgacgugcccgacuacgccagccugagaagccugguggccagcagcggcacccuggaguucaacaacgagagcuucaacuggaccggcgugacccagaacggcaccagcagcgccugcaucagaagaagcaacaacagcuucuucagcagacugaacuggcugacccaccugaacuucaaguaccccgcccugaacgugaccaugcccaacaacgagcaguucgacaagcuguacaucuggggcgugcaccaccccggcaccgacaaggaccagaucuuccuguacgcccaggccagcggcagaaucaccgugagcaccaagagaagccagcaggccgugauccccaacaucggcagcagacccagagugagaaacauccccagcagagugagcaucuacuggaccaucgugaagcccggcgacauccugcugaucaacagcaccggcaaccugaucgcccccagaggcuacuucaagaucagaagcggcaagagcagcaucaugagaagcgacgcccccaucggcaagugcaacagcgccugcaucaccaccaacggcagcauccccaacgacaagcccuuccagaacgugaacagaaucaccuacggcgccugccccagauacgugaagcagaacacccugaagcuggccaccggcaugagaaacgugcccgagaagcagaccagaggcaucuucggcgccaucgccggcuucaucgagaacggcugggagggcaugguggacggcugguacggcuucagacaccagaacagcgagggcagaggccaggccgccgaccugaagagcacccaggccgccaucgaccagaucaacggcaagcugaacagacugaucggcaagaccaacgagaaguuccaccagaucgagaaggaguucagcgagguggagggcagaauccaggaccuggagaaguacguggaggacaccaagaucgaccuguggagcuacaacgccgagcugcugguggcccuggagaaccagcacaccaucgaccugaccgacagcgagaugaacaagcuguucgagaagaccaagaagcagcugagagagaacgccgaggacaugggcaacggcugcuucaagaucuaccacaagugcgacaacgccugcaucggcagcaucagaaacggcaccuacgaccacgacguguacagagacgaggcccugaacaacagauuccagaucaagggcguggagcugaagagcggcuacaaggacuggauccuguggaucagcuucgccaucagcugcuuccugcugugcguggcccugcugggcuucaucaugugggccugccagaagggcaacaucagaugcaacaucugcaucuga

SEQ ID NO: 170039 - RNA, 1701 nt, Artificial Sequence
  derived and/or modified CDS sequence (opt4) from hemagglutinin__InfluenzaA__AGK63031
augaagaccaucaucgcccugagcuacauccugugccugguguucgcccagaagcugcccggcaacgacaacagcaccgccacccugugccugggccaccacgccgugcccaacggcaccaucgugaagaccaucaccaacgaccagaucgaggugaccaacgccaccgagcuggugcagagcagcagcaccggcgagaucugcgacagcccccaccagauccuggacggcgagaacugcacccugaucgacgcccugcugggcgacccccagugcgacggcuuccagaagaagaagugggaccuguucguggagagaagcaaggcccacagcaacugcuaccccuacgacgugcccgacuacgccagccugagaagccugguggccagcagcggcacccuggaguucaacaacgagagcuucaacuggaccggcgugacccagaacggcaccagcagcgccugcaucagaagaagcaacaacagcuucuucagcagacugaacuggcugacccaccugaacuucaaguaccccgcccugaacgugaucaugcccaacaacgagcaguucgacaagcuguacaucuggggcgugcaccaccccggcaccgacaaggaccagaucuuccuguacgcccaggccagcggcagaaucaccgugagcaccaagagaagccagcaggccgugauccccaacaucggcagcagacccagagugagaaacauccccagcagagugagcaucuacuggaccaucgugaagcccggcgacauccugcugaucaacagcaccggcaaccugaucgcccccagaggcuacuucaagaucagaagcggcaagagcagcaucaugagaagcgacgcccccaucggcaagugcaacagcgccugcaucacccccaacggcagcauccccaacgacaagcccuuccagaacgugaacagaaucaccuacggcgccugccccagauacgugaagcagaacacccugaagcuggccaccggcaugagaaacgugcccgagaagcagaccagaggcaucuucggcgccaucgccggcuucaucgagaacggcugggagggcaugguggacggcugguacggcuucagacaccagaacagcgagggcagaggccaggccgccgaccugaagagcacccaggccgccaucgaccagaucaacggcaagcugaacagacugaucggcaagaccaacgagaagcugcaccagaucgagaaggaguucagcgagguggagggcagaauccuggaccuggagaaguacguggaggacaccaagaucgaccuguggagcuacaacgccgagcugcugguggcccuggagaaccagcacaccaucgaccugaccgacagcgagaugaacaagcuguucgagaagaccaagaagcagcugagagagaacgccgaggacaugggcaacggcugcuucaagaucuaccacaagugcgacaacgccugcaucggcagcaucagaaacggcaccuacgaccacgacguguacagagacgaggcccugaacaacagauuccagaucaagggcguggagcugaagagcggcuacaaggacuggauccuguggaucagcuucgccaucagcugcuuccugcugugcguggcccugcugggcuucaucaugugggccugccagaagggcaacaucagaugcaacaucugcaucuga

SEQ ID NO: 170040 - RNA, 1701 nt, Artificial Sequence
  derived and/or modified CDS sequence (opt4) from hemagglutinin__InfluenzaA__AGK63033
augaagaccaucaucgcccugagcuacauccugugccugguguucgcccagaagcugcccggcaacgacaacagcaccgccacccugugccugggccaccacgccgugcccaacggcaccaucgugaagaccaucaccaacgaccagaucgaggugaccaacgccaccgagcuggugcagagcagcagcaccggcgagaucugcgacagcccccaccagauccuggacggcgagaacugcacccugaucgacgcccugcugggcgacccccagugcgacggcuuccagaacaagaagugggaccugaucguggagagaagcaaggccuacagcaacugcuaccccuacgacgugcccgacuacgccagccugagaagccugguggccagcagcggcacccuggaguucaacaacgagagcuucaacuggaccggcgugacccagaacggcaccagcagcgccugcaucagaaagagcaacagcagcuucuucagcagacugaacuggcugacccaccugaacuucaaguaccccgcccugaacgugaccaugcccaacaacgagcaguucgacaagcuguacaucuggggcgugcaccaccccggcaccgacaaggaccagaucuuccuguacgcccaggccagcggcagaaucaccgugagcaccaagagaagccagcaggccgugauccccaacaucggcagcagacccagaaucagaaacauccccagcagaaucagcaucuacuggaccaucgugaagcccggcgacauccugcugaucaacagcaccggcaaccugaucgcccccagaggcuacuucaagaucagaagcggcaagagcagcaucaugagaagcgacgcccccaucggcaagugcaacagcgagugcaucacccccaacggcagcauccccaacgacaagcccuuccagaacgugaacagaaucaccuacggcgccugccccagauacgugaagcagagcacccugaagcuggccaccggcaugagaaacgugcccgagaagcagaccagaggcaucuucggcgccaucgccggcuucaucgagaacggcugggagggcaugguggacggcugguacggcuucagacaccagaacagcgagggcagaggccaggccgccgaccugaagagcacccaggccgccaucgaccagaucaacggcaagcugaacagacugaucggcaagaccaacgagaaguuccaccagaucgagaaggaguucagcgagguggagggcagaauccaggaccuggagaaguacguggaggacaccaagaucgaccuguggagcuacaacgccgagcugcugguggcccuggagaaccagcacaccaucgaccugaccgacagcgagaugaacaagcuguucgagaagaccaagaagcagcugagagagaacgccgaggacaugggcaacggcugcuucaagaucuaccacaagugcgacaacgccugcaucggcagcaucagaaacggcaccuacgaccacgacguguacagagacgaggcccugaacaacagauuccagaucaagggcguggagcugaagagcggcuacaaggacuggauccuguggaucagcuucgccaucagcugcuuccugcugugcguggcccugcugggcuucaucaugugggccugccagaagggcaacaucagaugcaacaucugcaucuga

SEQ ID NO: 170041 - RNA, 1701 nt, Artificial Sequence
  derived and/or modified CDS sequence (opt4) from hemagglutinin__InfluenzaA__AGK63035
augaagaccaucaucgcccugagcuacauccugugccugguguucgcccagaagcugcccggcaacgacaacagcaccgccacccugugccugggccaccacgccgugcccaacggcaccaucgugaagaccaucaccaacgaccagaucgaggugaccaacgccaccgagcuggugcagagcagcagcaccggcgagaucugcgacagcccccaccagauccuggacggcgagaacugcacccugaucgacgcccugcugggcgacccccagugcgacggcuuccagaacaagaagugggaccuguucguggagagaagcaaggccuacagcaacugcuaccccuacgacgugcccgacuacgccagccugagaagccugguggccagcagcggcacccuggaguucaacaacgagagcuucaacuggaccggcgugacccagaacggcaccagcagcgccugcaucagaagaagcaacaacagcuucuucagcagacugaacuggcugacccaccugaacuucaaguaccccgcccugaacgugaccaugcccaacaacgagcaguucgacaagcuguacaucuggggcgugcaccaccccggcaccgacaaggaccagaucuuccuguacgcccaggccagcggcagaaucaccgugagcaccaagagaagccagcaggccgugauccccaacaucggcagcagacccagaaucagaaacauccccagcagaaucagcaucuacuggaccaucgugaagcccggcgacauccugcugaucaacagcaccggcaaccugaucgcccccagaggcuacuucaagaucagaagcggcaagagcagcaucaugagaagcgacgcccccaucggcaagugcaacagcgagugcaucacccccaacggcagcauccccaacgacaagcccuuccagaacgugaacagaaucaccuacggcgccugccccagauacgugaagcagagcacccugaagcuggccaccggcaugagaaacgugcccgagaagcagaccagaggcaucuucggcgccaucgccggcuucaucgagaacggcugggagggcaugguggacggcugguacggcuucagacaccagaacagcgagggcagaggccaggccgccgaccugaagagcacccaggccgccaucgaccagaucaacggcaagcugaacagacugaucggcaagaccaacgagaaguuccaccagaucgagaaggaguucagcgagguggagggcagaauccaggaccuggagaaguacguggaggacaccaagaucgaccuguggagcuacaacgccgagcugcugguggcccuggagaaccagcacaccaucgaccugaccgacagcgagaugaacaagcuguucgagaagaccaagaagcagcugagagagaacgccgaggacaugggcaacggcugcuucaagaucuaccacaagugcgacaacgccugcaucggcagcaucagaaacggcaccuacgaccacgacguguacagagacgaggcccugaacaacagauuccagaucaagggcguggagcugaagagcggcuacaaggacuggauccuguggaucagcuucgccaucagcugcuuccugcugugcguggcccugcugggcuucaucaugugggccugccagaagggcaacaucagaugcaacaucugcaucuga

SEQ ID NO: 170042 - RNA, 1701 nt, Artificial Sequence
  derived and/or modified CDS sequence (opt4) from hemagglutinin__InfluenzaA__AGK63037
augaagaccaucaucgcccugagcuacauccugugccugguguucgcccaggagcugcccggcaacgacaacagcaccgccacccugugccugggccaccacgccgugcccaacggcaccaucgugaagaccaucaccaacgaccagaucgaggugaccaacgccaccgagcuggugcagagcagcagcaccggcgagaucugcaacagcccccaccagauccuggacggcgagaacugcacccugaucgacgcccugcugggcgacccccagugcgacggcuuccagaacaagaagugggaccuguucguggagagaagcaaggcccacagcaacugcaaccccuacgacgugcccgacuacgccagccugagaagccugguggccagcagcggcacccuggaguucaacaacgagagcuucaacuggaccggcgugacccagaacggcaccagcagcgccugcaucagaagaagcaacaacagcuucuucagcagacugaacuggcugacccaccugaacuucaaguaccccgcccugaacgugaccaugcccaacaacgagcaguucgacaagcuguacaucuggggcgugcaccaccccggcaccgacaaggaccagaucuuccuguacgcccaggccagcggcagaaucaccgugagcaccaagagaagccagcaggccgugauccccaacaucggcagcagacccagagugagaaacauccccagcagagugagcaucuacuggaccaucgugaagcccggcgacauccugcugaucaacagcaccggcaaccugaucgcccccagaggcuacuucaagaucagaagcggcaagagcagcaucaugagaagcgacgcccccaucggcaagugcaacagcgccugcaucacccccaacggcagcauccccaacgacaagcccuuccagaacgugaacagaaucaccuacggcgccugccccagauacgugaagcagaacacccugaagcuggccaccggcaugagaaacgugcccgagaagcagaccagaggcaucuucggcgccaucgccggcuucaucgagaacggcugggagggcaugguggacggcugguacggcuucagacaccagaacagcgagggcagaggccaggccgccgaccugaagagcacccaggccgccaucgaccagaucaacggcaagcugaacagacugaucggcaagaccaacgagaaguuccaccagaucgagaaggaguucagcgagguggagggcagaauccaggaccuggagaaguacguggaggacaccaagaucgaccuguggagcuacaacgcccagcugcugguggcccuggagaaccagcacaccaucgaccugaccgacagcgagaugaacaagcuguucgagaagaccaagaagcagcugagagagaacgccgaggacaugggcaacggcugcuucaagaucuaccacaagugcgacaacgccugcaucggcagcaucagaaacggcaccuacgaccacgacguguacagagacgaggcccugaacaacagauuccagaucaagggcguggagcugaagagcggcuacaaggacuggauccuguggaucagcuucgccaucagcugcuuccugcugugcguggcccugcugggcuucaucaugugggccugccagaagggcaacaucagaugcaacaucugcaucuga

SEQ ID NO: 170043 - RNA, 1701 nt, Artificial Sequence
  derived and/or modified CDS sequence (opt4) from hemagglutinin__InfluenzaA__AGK63039
augaagaccaucaucgcccugagcuacauccugugccugguguucgcccagaagcugcccggcaacgacaacagcaccgccacccugugccugggccaccacgccgugcccaacggcaccaucgugaagaccaucaccaacgaccagaucgaggugaccaacgccaccgagcuggugcagagcagcagcaccggcgagaucugcaacagcccccaccagauccuggacggcgagaacugcacccugaucgacgcccugcugggcgacccccagugcgacggcuuccagaagaagaagugggaccuguucguggagagaagcaaggcccacagcaacugcuaccccuacgacgugcccgacuacgccagccugagaagccugguggccagcagcggcacccuggaguucaacaacgagagcuucaacuggaccggcgugacccagaacggcaccagcagcgccugcaucagaagaagcaacaacagcuucuucagcagacugaacuggcugacccaccugaacuucaaguaccccgcccugaacgugacccugcccaacaacgagcaguucgacaagcuguacaucuggggcgugcaccaccccggcaccgacaaggaccagaucuuccuguacgcccaggccagcggcagaaucaccgugagcaccaagagaagccagcaggccgugauccccaacaucggcagcagacccagagugagaaacauccccagcagagugagcaucuacuggaccaucgugaagcccggcgacauccugcugaucaacagcaccggcaaccugaucgcccccagaggcuacuucaagaucagaagcggcaagagcagcaucaugagaagcgacgcccccaucagcaagugcaacagcgccugcaucacccccaacggcagcauccccaacgacaagcccuuccagaacgugaacagaaucaccuacggcgccugccccagauacgugaagcagaacacccugaagcuggccaccggcaugagaaacgugcccgagaagcagaccagaggcaucuucggcgccaucgccggcuucaucgagaacggcugggagggcaugguggacggcugguacggcuucagacaccagaacagcgagggcagaggccaggccgccgaccugaagagcacccaggccgccaucgaccagaucaacggcaagcugaacagacugaucggcaagaccaacgagaaguuccaccagaucgagaaggaguucagcgagguggagggcagaauccaggaccuggagaaguacguggaggacaccaagaucgaccuguggagcuacaacgccgagcugcugguggcccuggagaaccagcacaccaucgaccugaccgacagcgagaugaacaagcuguucgagaagaccaagaagcagcugagagagaacgccgaggacaugggcaacggcugcuucaagaucuaccacaagugcgacaacgccugcaucggcagcaucagaaacggcaccuacgaccacgacguguacagagacgaggcccugaacaacagauuccagaucaagggcguggagcugaagagcggcuacaaggacuggauccuguggaucagcuucgccaucagcugcuuccugcugugcguggcccugcugggcuucaucauguggagcugccagaagggcaacaucagaugcaacaucugcaucuga

SEQ ID NO: 170044 - RNA, 1701 nt, Artificial Sequence
  derived and/or modified CDS sequence (opt4) from hemagglutinin__InfluenzaA__AGK63041
augaagaccaucaucgcccugagcuacauccugugccugguguucgcccagaagcugcccggcaacgacaacagcaccgccacccugugccugggccaccacgccgugcccaacggcaccaucgugaagaccaucaccaacgaccagaucgaggugaccaacgccaccgagcuggugcagagcagcagcaccggcgagaucugcgacagcccccaccagauccuggacggcgagaacugcacccugaucgacgcccugcugggcgacccccagugcgacggccugcagaacaagaagugggaccugaucguggagagaagcaaggcccacagcuacugcuaccccuacgacgugcccgacuacgccagccugagaagccugguggccagcagcggcacccuggaguucaacaacgagagcuucaacuggaccgaggugacccagaacggcaccagcagcgccugcaucagaagaagcaacaacagcuucuucagcagacugaacuggcugacccaccugaacuucaaguaccccgcccugaacgugaccaugcccaacaacgagcaguucgacaagcuguacaucuggggcgugcaccaccccggcaccgacaaggaccagaucuuccuguacgcccaggccagcggcagaaucaccgugagcaccaagagaagccagcaggccgugauccccaacaucggcagcagacccagagugagaaacauccccagcagagugagcaucuacuggaccaucgugaagcccggcgacauccugcugaucaacagcaccggcaaccugaucgcccccagaggcuacuucaagaucagaagcggcaagagcagcaucaugagaagcgacgcccccaucggcaagugcaacagcgccugcaucacccccaacggcagcauccccaacgacaagcccuuccagaacgugaacagaaucaccuacggcgccugccccagauacgugaagcagaacacccugaagcuggccaccggcaugagaaacgugcccgagaagcagaccagaggcaucuucggcgccaucgccggcuucaucgagaacggcugggagggcaugguggacggcugguacggcuucagacaccagaacagcgagggcagaggccaggccgccgaccugaagagcacccaggccgccaucgaccagaucaacggcaagcugaacagacugaucggcaagaccaacgagaaguuccaccagaucgagaaggaguucagcgagguggagggcagaauccaggaccuggagaaguacguggaggacaccaagaucgaccuguggagcuacaacgccgagcugcugguggcccuggagaaccagcacaccaucgaccugaccgacagcgagaugaacaagcuguucgagaagaccaagaagcagcugagagagaacgccgaggacaugggcaacggcugcuucaagaucuaccacaagugcgacaacgccugcaucggcagcaucagaaacggcaccuacgaccacgacguguacagagacgaggcccugaacaacagauuccagaucaagggcguggagcugaagagcggcuacaaggacuggauccuguggaucagcuucgccaucagcugcuuccugcugugcguggcccugcugggcuucaucaugugggccugccagaagggcaacaucagaugcaacaucugcaucuga

SEQ ID NO: 170045 - RNA, 1701 nt, Artificial Sequence
  derived and/or modified CDS sequence (opt4) from hemagglutinin__InfluenzaA__AGK63043
augaagaccaucaucgcccugagcuacauccugugccugguguucgcccagaagcugcccggcaacgacaacagcaccgccacccugugccugggccaccacgccgugcccaacggcaccaucgugaagaccaucaccaacgaccagaucgaggugaccaacgccaccgagcuggugcagagcagcagcaccggcgagaucugcgacagcccccaccagauccuggacggcgagaacugcacccugaucgacgcccugcugggcgacccccagugcgacggcuuccagaacaagaagugggaccuguucguggagagaagcaaggccuacagcaacugcuaccccuacgacgugcccgacuacgccagccugagaagccugguggccagcagcggcacccuggaguucaacaacgagagcuucaacuggaccggcgugacccagaacggcaccagcagcgccugcaucagaagaagcaacaacagcuucuucagcagacugaacuggcugacccaccugaacuucaaguaccccgcccugaacgugaccaugcccaacaacgagcaguucgacaagcuguacaucuggggcgugcaccaccccggcaccgacaaggaccagaucuuccuguacgcccaggccagcggcagaaucaccgugagcaccaagagaagccagcaggccgugauccccaacaucggcagcagacccagagugagaaacauccccagcagagugagcaucuacuggaccaucgugaagcccggcgacauccugcugaucaacagcaccggcaaccugaucgcccccagaggcuacuucaagaucagaagcggcaagagcagcaucaugagaagcgacgcccccaucggcaagugcaacagcgccugcaucacccccaacggcagcauccccaacgacaagcccuuccagaacgugaacagaaucaccuacggcgccugccccagauacgugaagcagagcacccugaagcuggccaccggcaugagaaacgugcccgagaagcagaccagaggcaucuucggcgccaucgccggcuucaucgagaacggcugggagggcaugguggacggcugguacggcuucagacaccagaacagcgagggcagaggccaggccgccgaccugaagagcacccaggccgccaucgaccagaucaacggcaagcugaacagacugaucggcaagaccaacgagaaguuccaccagaucgagaaggaguucagcgagguggagggcagaauccaggaccuggagaaguacguggaggacaccaagaucgaccuguggagcuacaacgccgagcugcugguggcccuggagaaccagcacaccaucgaccugaccgacagcgagaugaacaagcuguucgagaagaccaagaagcagcugagagagaacgccgaggacaugggcaacggcugcuucaagaucuaccacaagugcgacaacgccugcaucggcagcaucagaaacggcaccuacgaccacgacguguacagagacgaggcccugaacaacagauuccagaucaagggcguggagcugaagagcggcuacaaggacuggauccuguggaucagcuucgccaucagcugcuuccugcugugcguggcccugcugggcuucaucaugugggccugccagaagggcaacaucagaugcaacaucugcaucuga

SEQ ID NO: 170046 - RNA, 1701 nt, Artificial Sequence
  derived and/or modified CDS sequence (opt4) from hemagglutinin__InfluenzaA__AGK63045
augaagaccaucaucgcccugagcuacauccugugccugguguucgcccagaagcugcccggcaacgacaacagcaccgccacccugugccugggccaccacgccgugcccaacggcaccaucgugaagaccaucaccaacgaccagaucgaggugaccaacgccaccgagcuggugcagagcagcagcaccggcgagaucugcaacagcccccaccagauccuggacggcgagaacugcacccugaucgacgcccugcugggcgacccccagugcgacggcuuccagaagaagaagugggaccuguucguggagagaagcaaggccuacagcaacugcuaccccuacgacgugcccgacuacgccagccugagaagccugguggccagcagcggcacccuggaguucaacaacgagagcuucaacuggaccggcgugacccagaacggcaccagcagcgccugcaucagaaagagcaacagcagcuucuucagcagacugaacuggcugacccaccugaacuucaaguaccccgcccugaacgugaccaugcccaacaacgagcaguucgacaagcuguacaucuggggcgugcaccaccccggcaccgacaaggaccagaucuuccuguacgcccaggccagcggcagaaucaccgugagcaccaagagaagccagcaggccgugauccccaacaucggcagcagacccagaaucagaaacauccccagcagaaucagcaucuacuggaccaucgugaagcccggcgacauccugcugaucaacagcaccggcaaccugaucgcccccagaggcuacuucaagaucagaagcggcaagagcagcaucaugagaagcgacgcccccaucggcaagugcaacagcgagugcaucacccccaacggcagcauccccaacgacaagcccuuccagaacgugaacagaaucaccuacggcgccugccccagauacgugaagcagagcacccugaagcuggccaccggcaugagaaacgugcccgagaagcagaccagaggcaucuucggcgccaucgccggcuucaucgagaacggcugggagggcaugguggacggcugguacggcuucagacaccagaacagcgagggcagaggccaggccgccgaccugaagagcacccaggccgccaucgaccagaucaacggcaagcugaacagacugaucggcaagaccaacgagaaguuccaccagaucgagaaggaguucagcgagguggagggcagaauccaggaccuggagaaguacguggaggacaccaagaucgaccuguggagcuacaacgcccagcugcugguggcccuggagaaccagcacaccaucgaccugaccgacagcgagaugaacaagcuguucgagaagaccaagaagcagcugagagagaacgccgaggacaugggcaacggcugcuucaagaucuaccacaagugcgacaacgccugcaucggcagcaucagaaacggcaccuacgaccacgacguguacagagacgaggcccugaacaacagauuccagaucaagggcguggagcugaagagcggcuacaaggacuggauccuguggaucagcuucgccaucagcugcuuccugcugugcguggcccugcugggcuucaucaugugggccugccagaagggcaacaucagaugcaacaucugcaucuga

SEQ ID NO: 170047 - RNA, 1701 nt, Artificial Sequence
  derived and/or modified CDS sequence (opt4) from hemagglutinin__InfluenzaA__AGK63047
augaaggccauccugguggugcugcuguacaccuucgccaccgccaacgccgacacccugugcaucggcuaccacgccaacaacagcaccgacaccguggacaccgugcuggagaagaacgugaccgugacccacagcgugaaccugcuggaggacaagcacaacggcaagcugugcaagcugagaggcguggccccccugcaccugggcaagugcaacaucgccggcuggauccugggcaaccccgagugcgagagccugagcaccgccagcagcuggagcuacaucguggagaccagcagcagcgacaacggcaccugcuaccccggcgacuucaucaacuacgaggagcugagagagcagcugagcagcgugagcagcuucgagagauucgagaucuuccccaagaccagcagcuggcccaaccacgacagcaacaagggcgugaccgccgccugcccccacgccggcgccaagagcuucuacaagaaccugaucuggcuggugaagaagggcaacagcuaccccaagcugagcaagagcuacaucaacgacaagggcaaggaggugcuggugcuguggggcauccaccaccccagcaccaccgccgaccagcagagccuguaccagaacgccgacgccuacguguucgugggcaccagcagauacagcaagaaguucaagcccgagaucgccaucagacccaaggugagagacagagagggcagaaugaacuacuacuggacccugaucgagcccggcgacaagaucaccuucgaggccaccggcaaccugguggugcccagauacgccuucgccauggagagaaacgccggcagcggcaucaucaucagcgacacccccgugcacgacugcaacaccgccugccagacccccgagggcgccaucaacaccagccugcccuuccagaacauccaccccaucaccaucggcaagugccccaaguacgugaagagcaccaagcugagacuggccaccggccugagaaacgugcccagcauccagagcagaggccuguucggcgccaucgccggcuucaucgagggcggcuggaccggcaugguggacggcugguacggcuaccaccaccagaacgagcagggcagcggcuacgccgccgaccugaagagcacccagaacgccaucgacaagaucaccaacaaggugaacagcgugaucgagaagaugaacacccaguucaccgccgugggcaaggaguucaaccaccuggagaagagaaucgagaaccugaacaagaagguggacgacggcuuccuggacaucuggaccuacaacgccgagcugcuggugcugcuggagaacgagagaacccuggacuaccacgacagcaacgugaagaaccuguacgagaaggugagaaaccagcugaagaacaacgccaaggagaucggcaacggcugcuucgaguucuaccacaagugcgacaacaccugcauggagagcgugaagaacggcaccuacgacuaccccaaguacagcgaggaggccaagcugaacagagagaagaucgacggcgugaagcuggagagcaccagaaucuaccagauccuggccaucuacagcaccguggccagcagccuggugcugguggugagccugggcgccaucagcuucuggaugugcagcaacggcagccugcagugcagaaucugcaucuga

SEQ ID NO: 170048 - RNA, 1683 nt, Artificial Sequence
  derived and/or modified CDS sequence (opt4) from hemagglutinin__InfluenzaA__AGK82158
augaacacccagauccugguguucgcccugaucgccaucauccccaccaacgccgacaagaucugccugggccaccacgccgugagcaacggcaccaaggugaacacccugaccgagagaggcguggagguggugaacgccaccgagaccguggagagaaccaacauccccagaaucugcagcaagggcaagagaaccguggaccugggccagugcggccugcugggcaccaucaccggccccccccagugcgaccaguuccuggaguucagcgccgaccugaucaucgagagaagagagggcagcgacgugugcuaccccggcaaguucgugaacgaggaggcccugagacagauccugagagagagcggcggcaucgacaaggaggccaugggcuucaccuacagcggcaucagaaccaacggcgccaccagcgccugcagaagaagcggcagcagcuucuacgccgagaugaaguggcugcugagcaacaccgacaacgccgccuucccccagaugaccaagagcuacaagaacaccagaaagagccccgcccugaucguguggggcauccaccacagcgugagcaccgccgagcagaccaagcuguacggcagcggcaacaagcuggugaccgugggcagcagcaacuaccagcagagcuucgugcccagccccggcgccagaccccaggugaacggccugagcggcagaaucgacuuccacuggcugaugcugaaccccaacgacaccgugaccuucagcuucaacggcgccuucaucgcccccgacagagccagcuuccugagaggcaagagcaugggcauccagagcggcgugcagguggacgccaacugcgagggcgacugcuaccacagcggcggcaccaucaucagcaaccugcccuuccagaacaucgacagcagagccgugggcaagugccccagauacgugaagcagagaagccugcugcuggccaccggcaugaagaacgugcccgagauccccaagggcagaggccuguucggcgccaucgccggcuucaucgagaacggcugggagggccugaucgacggcugguacggcuucagacaccagaacgcccagggcgagggcaccgccgccgacuacaagagcacccagagcgccaucgaccagaucaccggcaagcugaacagacugaucgagaagaccaaccagcaguucgagcugaucgacaacgaguucaacgagguggagaagcagaucggcaacgugaucaacuggaccagagacagcaucaccgagguguggagcuacaacgccgagcugcugguggccauggagaaccagcacaccaucgaccuggccgacagcgagauggacaagcuguacgagagagugaagagacagcugagagagaacgccgaggaggacggcaccggcugcuucgagaucuuccacaagugcgacgacgacugcauggccagcaucagaaacaacaccuacgaccacagcaaguacagagaggaggccaugcagaacagaauccagaucgaccccgugaagcugagcagcggcuacaaggacgugauccugugguucagcuucggcgccagcugcuucauccugcuggccaucgugaugggccugguguucaucugcgugaagaacggcaacaugagaugcaccaucugcaucuga

SEQ ID NO: 170049 - RNA, 1683 nt, Artificial Sequence
  derived and/or modified CDS sequence (opt4) from hemagglutinin__InfluenzaA__AGK84857
augaacacccagauccugguguucgcccugaucgccaucauccccaccaacgccgacaagaucugccugggccaccacgccgugagcaacggcaccaaggugaacacccugaccgagagaggcguggagguggugaacgccaccgagaccguggagagaaccaacauccccagaaucugcagcaagggcaagagaaccguggaccugggccagugcggccugcugggcaccaucaccggccccccccagugcgaccaguuccuggaguucagcgccgaccugaucaucgagagaagagagggcagcgacgugugcuaccccggcaaguucgugaacgaggaggcccugagacagauccugagagagagcggcggcaucgacaaggaggccaugggcuucaccuacagcggcaucagaaccaacggcgccaccagcgccugcagaagaagcggcagcagcuucuacgccgagaugaaguggcugcugagcaacaccgacaacgccgccuucccccagaucaccaagagcuacaagaacaccagaaagagccccgcccugaucguguggggcauccaccacagcgugagcaccgccgagcagaccaagcuguacggcagcggcaacaagcuggugaccgugggcagcagcaacuaccagcagagcuucgugcccagccccggcgccagaccccaggugaacggccugagcggcagaaucgacuuccacuggcugaugcugaaccccaacgacaccgugaccuucagcuucaacggcgccuucaucgcccccgacagagccagcuuccugagaggcaagagcaugggcauccagagcggcgugcagguggacgccaacugcgagggcgacugcuaccacagcggcggcaccaucaucagcaaccugcccuuccagaacaucgacagcagagccgugggcaagugccccagauacgugaagcagagaagccugcugcuggccaccggcaugaagaacgugcccgagauccccaagggcagaggccuguucggcgccaucgccggcuucaucgagaacggcugggagggccugaucgacggcugguacggcuucagacaccagaacgcccagggcgagggcaccgccgccgacuacaagagcacccagagcgccaucgaccagaucaccggcaagcugaacagacugaucgagaagaccaaccagcaguucgagcugaucgacaacgaguucaacgagguggagaagcagaucggcaacgugaucaacuggaccagagacagcaucaccgagguguggagcuacaacgccgagcugcugguggccauggagaaccagcacaccaucgaccuggccgacagcgagauggacaagcuguacgagagagugaagagacagcugagagagaacgccgaggaggacggcaccggcugcuucgagaucuuccacaagugcgacgacgacugcauggccagcaucagaaacaacaccuacgaccacagcaaguacagagaggaggccaugcagaacagaauccagaucgaccccgugaagcugagcagcggcuacaaggacgugauccugugguucagcuucggcgccagcugcuucauccugcuggccaucgugaugggccugguguucaucugcgugaagaacggcaacaugagaugcaccaucugcaucuga

SEQ ID NO: 170050 - RNA, 1683 nt, Artificial Sequence
  derived and/or modified CDS sequence (opt4) from hemagglutinin__InfluenzaA__AGK84860
augaacacccagauccugguguucgcccugaucgccaucauccccaccaacgccgacaagaucugccugggccaccacgccgugagcaacggcaccaaggugaacacccugaccgagagaggcguggagguggugaacgccaccgagaccguggagagaaccaacauccccagaaucugcagcaagggcaagaugaccguggaccugggccagugcggccugcugggcaccaucaccggccccccccagugcgaccaguuccuggaguucagcgccgaccugaucaucgagagaagagagggcagcgacgugugcuaccccggcaaguucgugaacgaggaggcccugagacagauccugagagagagcggcggcaucgacaaggaggccaugggcuucaccuacagcggcaucagaaccaacggcgccaccagcgccugcagaagaagcggcagcagcuucuacgccgagaugaaguggcugcugagcaacaccgacaacgccgccuucccccagaugaccaagagcuacaagaacaccagaaagagccccgcccugaucguguggggcauccaccacagcgugagcaccgccgagcagaccaagcuguacggcagcggcaacaagcuggugaccgugggcagcagcaacuaccagcagagcuucgugcccagccccggcgccagaccccaggugaacggccugagcggcagaaucgacuuccacuggcugaugcugaaccccaacgacaccgugaccuucagcuucaacggcgccuucaucgcccccgacagagccagcuuccugagaggcaagagcaugggcauccagagcggcgugcagguggacgccaacugcgagggcgacugcuaccacagcggcggcaccaucaucagcaaccugcccuuccagaacaucgacagcagagccgugggcaagugccccagauacgugaagcagagaagccugcugcuggccaccggcaugaagaacgugcccgagauccccaagggcagaggccuguucggcgccaucgccggcuucaucgagaacggcugggagggccugaucgacggcugguacggcuucagacaccagaacgcccagggcgagggcaccgccgccgacuacaagagcacccagagcgccaucgaccagaucaccggcaagcugaacagacugaucgagaagaccaaccagcaguucgagcugaucgacaacgaguucaacgagguggagaagcagaucggcaacgugaucaacuggaccagagacagcaucaccgagguguggagcuacaacgccgagcugcugguggccauggagaaccagcacaccaucgaccuggccgacagcgagauggacaagcuguacgagagagugaagagacagcugagagagaacgccgaggaggacggcaccggcugcuucgagaucuuccacaagugcgacgacgacugcauggccagcaucagaaacaacaccuacgaccacagcaaguacagagaggaggccaugcagaacagaauccagaucgaccccgugaagcugagcagcggcuacaaggacgugauccugugguucagcuucggcgccagcugcuucauccugcuggccaucgugaugggccugguguucaucugcgugaagaacggcaacaugagaugcaccaucugcaucuga

SEQ ID NO: 170051 - RNA, 1683 nt, Artificial Sequence
  derived and/or modified CDS sequence (opt4) from hemagglutinin__InfluenzaA__AGK84863
augaacacccagauccugguguucgcccugaucgccaucauccccaccaacgccgacaagaucugccugggccaccacgccgugagcaacggcaccaaggugaacacccugaccgagagaggcguggagguggugaacgccaccgagaccguggagagaaccaacauccccagaaucugcagcaagggcaagaagaccguggaccugggccagugcggccugcugggcaccaucaccggccccccccagugcgaccaguuccuggaguucagcgccgaccugaucaucgagagaagagagggcagcgacgugugcuaccccggcaaguucgugaacgaggaggcccugagacagauccugagagagagcggcggcaucgacaaggaggccaugggcuucaccuacagcggcaucagaaccaacggcgccaccagcgccugcagaagaagcggcagcagcuucuacgccgagaugaaguggcugcugagcaacaccgacaacgccgccuucccccagaugaccaagagcuacaagaacaccagaaagagccccgcccugaucguguggggcauccaccacagcgugagcaccgccgagcagaccaagcuguacggcagcggcaacaagcuggugaccgugggcagcagcaacuaccagcagagcuucgugcccagccccggcgccagaccccaggugaacggccugagcggcagaaucgacuuccacuggcugaugcugaaccccaacgacaccgugaccuucagcuucaacggcgccuucaucgcccccgacagagccagcuuccugagaggcaagagcaugggcauccagagcggcgugcagguggacgccaacugcgagggcgacugcuaccacagcggcggcaccaucaucagcaaccugcccuuccagaacaucgacagcagagccgugggcaagugccccagauacgugaagcagagaagccugcugcuggccaccggcaugaagaacgugcccgagauccccaagggcagaggccuguucggcgccaucgccggcuucaucgagaacggcugggagggccugaucgacggcugguacggcuucagacaccagaacgcccagggcgagggcaccgccgccgacuacaagagcacccagagcgccaucgaccagaucaccggcaagcugaacagacugaucgagaagaccaaccagcaguucgagcugaucgacaacgaguucaacgagguggagaagcagaucggcaacgugaucaacuggaccagagacagcaucaccgagguguggagcuacaacgccgagcugcugguggccauggagaaccagcacaccaucgaccuggccgacagcgagauggacaagcuguacgagagagugaagagacagcugagagagaacgccgaggaggacggcaccggcugcuucgagaucuuccacaagugcgacgacgacugcauggccagcaucagaaacaacaccuacgaccacagcaaguacagagaggaggccaugcagaacagaauccagaucgaccccgugaagcugagcagcggcuacaaggacgugauccugugguucagcuucggcgccagcugcuucauccugcuggccaucgugaugggccugguguucaucugcgugaagaacggcaacaugagaugcaccaucugcaucuga

SEQ ID NO: 170052 - RNA, 1701 nt, Artificial Sequence
  derived and/or modified CDS sequence (opt4) from hemagglutinin__InfluenzaA__AGL07713
augaaggccauccugguggugcugcuguacaccuucgccaccgccaacgccgacacccugugcaucggcuaccacgccaacaacagcaccgacaccguggacaccgugcuggagaagaacgugaccgugaccagaagcgugaaccugcuggaggacaagcacaacggcaagcugugcaagcugagaggcguggccccccugcaccugggcaagugcaacaucgccggcuggauccugggcaaccccgagugcgagagccugagcaccgccagcagcuggagcuacaucguggagaccagcagcagcgacaacggcaccugcuaccccggcgacuucaucgacuacgaggagcugagagagcagcugagcagcgugagcagcuucgagagauucgagaucuuccccaagaccggcagcuggcccaaccacgacagcaacaagggcgugaccgccgccugcccccacgccggcgccaagggcuucuacaagaaccugaucuggcugguggagaagggcaacagcuaccccaagcugagcaagagcuacaucaacgacaagggcaaggaggugcuggugcuguggggcauccaccaccccagcaccaccgccgaccagcagagacuguaccagaacgccgacaccuacguguucgugggcaccagcagauacagcaagaaguucaagcccgagaucgccaucagacccaaggugagagaccaggagggcagaaugaacuacuacuggacccugguggagcccggcgacaagaucaccuucgaggccaccggcaaccugguggugcccagauacgccuucgccauggagagaaacgccggcagcggcaucaucaucagcgacacccccgugcacgacugcaacaccaccugccagacccccaagggcgccaucaacaccagccugcccuuccagaacauccaccccaucaccaucggcaagugccccaaguacgugaagagcaccaagcugagacuggccaccggccugagaaacgugcccagcauccagagcagaggccuguucggcgccaucgccggcuucaucgagggcggcuggaccggcaugguggacggcugguacggcuaccaccaccagaacgagcagggcagcggcuacgccgccgaccugaagagcacccagaacgccaucgacaagaucaccaacaaggugaacagcgugaucgagaagaugaacacccaguucaccgccgugggcaaggaguucaaccaccuggagaagagaaucgagaaccugaacaagaagguggacgacggcuuccuggacaucuggaccuacaacgccgagcugcuggugcugcuggagaacgagagaacccuggacuaccacgacagcaacgugaagaaccuguacgagaaggugagaaaccagcugaagaacaacgccaaggagaucggcaacggcugcuucgaguucuaccacaagugcgacaacaccugcauggagagcgugaagaacggcaccuacgacuaccccaaguacagcgaggaggccaagcugaacagagaggagaucgacggcgugaagcuggagagcaccagaaucuaccagauccuggccaucuacagcaccguggccagcagccuggugcugguggugagccugggcgccaucagcuucuggaugugcagcaacggcagccugcagugcagaaucugcaucuga

SEQ ID NO: 170053 - RNA, 1701 nt, Artificial Sequence
  derived and/or modified CDS sequence (opt4) from hemagglutinin__InfluenzaA__AGL09731
augaagaccaucaucgcccugagcuacauccugugccugguguucgcccagaagauccccggcaacgacaacagcaccgccacccugugccugggccaccacgccgugcccaacggcaccaucgugaagaccaucaccaacgacagaaucgaggugaccaacgccaccgagcuggugcagaacagcagcaucggcgagaucugcgacagcccccaccagauccuggacggcgagaacugcacccugaucgacgcccugcugggcgacccccagugcgacggcuuccagaacaagaagugggaccuguucguggagagaagcaaggccuacagcaacugcuaccccuacgacgugcccgacuacgccagccugagaagccugguggccagcagcggcacccuggaguucaacaacgagagcuucaacuggaccggcgugacccagaacggcaccagcagcgccugcaucagaagaagcaacagcagcuucuucagcagacugaacuggcugacccaccugaacuucaaguaccccgcccugaacgugaccaugcccaacaacgagcaguucgacaagcuguacaucuggggcgugcaccaccccggcaccgacaaggaccagaucuuccuguacgcccagagcagcggcagaaucaccgugagcaccaagagaagccagcaggccgugauccccaacaucggcagcagacccagaaucagaaacauccccagcagaaucagcaucuacuggaccaucgugaagcccggcgacauccugcugaucaacagcaccggcaaccugaucgcccccagaggcuacuucaagaucagaagcggcaagagcagcaucaugagaagcgacgcccccaucggcaagugcaagagcgagugcaucacccccaacggcagcauccccaacgacaagcccuuccagaacgugaacagaaucaccuacggcgccugccccagauacgugaagcagagcacccugaagcuggccaccggcaugagaaacgugcccgagaagcagaccagaggcaucuucggcgccaucgccggcuucaucgagaacggcugggagggcaugguggacggcugguacggcuucagacaccagaacagcgagggcagaggccaggccgccgaccugaagagcacccaggccgccaucgaccagaucaacggcaagcugaacagacugaucggcaagaccaacgagaaguuccaccagaucgagaaggaguucagcgagguggagggcagaauccaggaccuggagaaguacguggaggacaccaagaucgaccuguggagcuacaacgccgagcugcugguggcccuggagaaccagcacaccaucgaccugaccgacagcgagaugaacaagcuguucgagaagaccaagaagcagcugagagagaacgccgaggacaugggcaacggcugcuucaagaucuaccacaagugcgacaacgccugcaucggcagcaucagaaacggcaccuacgaccacgacguguacagagacgaggcccugaacaacagauuccagaucaagggcguggagcugaagagcggcuacaaggacuggauccuguggaucagcuucgccaucagcugcuuccugcugugcguggcccugcugggcuucaucaugugggccugccagaagggcaacaucagaugcaacaucugcaucuga

SEQ ID NO: 170054 - RNA, 1701 nt, Artificial Sequence
  derived and/or modified CDS sequence (opt4) from hemagglutinin__InfluenzaA__AGL09732
augaagaccaucaucgcccugagcuacauccugugccugguguucgcccagaagcugcccggcaacgacaacagcaccgccacccugugccugggccaccacgccgugcccaacggcaccaucgugaagaccaucaccaacgacagaaucgaggugaccaacgccaccgagcuggugcagaacagcagcaucggcgagaucugcgacagcccccaccagauccuggacggcgagaacugcacccugaucgacgcccugcugggcgacccccagugcgacggcuuccagaacaagaagugggaccuguucguggagagaagcaaggccuacagcaacugcuaccccuacgacgugcccgacuacgccagccugagaagccugguggccagcagcggcacccuggaguucaacaacgagagcuucaacugggccggcgugacccagaacggcaccagcagcgccugcaucagaggcagcaacagcagcuucuucagcagacugaacuggcugacccaccugaacuucaaguaccccgcccugaacgugaccaugcccaacaacgagcaguucgacaagcuguacaucuggggcgugcaccaccccggcaccgacaaggaccagaucuuccuguacgcccagagcagcggcagaaucaccgugagcaccaagagaagccagcaggccgugauccccaacaucggcagcagacccagaaucagaaacauccccagcagaaucagcaucuacuggaccaucgugaagcccggcgacauccugcugaucaacagcaccggcaaccugaucgcccccagaggcuacuucaagaucagaagcggcaagagcagcaucaugagaagcgacgcccccaucggcaagugcaagagcgagugcaucacccccaacggcagcauccccaacgacaagcccuuccagaacgugaacagaaucaccuacggcgccugccccagauacgugaagcagagcacccugaagcuggccaccggcaugagaaacgugcccgagaagcagaccagaggcaucuucggcgccaucgccggcuucaucgagaacggcugggagggcaugguggacggcugguacggcuucagacaccagaacagcgagggcagaggccaggccgccgaccugaagagcacccaggccgccaucgaccagaucaacggcaagcugaacagacugaucggcaagaccaacgagaaguuccaccagaucgagaaggaguucagcgagguggagggcagaauccaggaccuggagaaguacguggaggacaccaagaucgaccuguggagcuacaacgccgagcugcugguggcccuggagaaccagcacaccaucgaccugaccgacagcgagaugaacaagcuguucgagaagaccaagaagcagcugagagagaacgccgaggacaugggcaacggcugcuucaagaucuaccacaagugcgacaacgccugcaucggcagcaucagaaacggcaccuacgaccacgacguguacagagacgaggcccugaacaacagauuccagaucaagggcguggagcugaagagcggcuacaaggacuggauccuguggaucagcuucgccaucagcugcuuccugcugugcguggcccugcugggcuucaucaugugggccugccagaagggcaacaucagaugcaacaucugcaucuga

SEQ ID NO: 170055 - RNA, 1701 nt, Artificial Sequence
  derived and/or modified CDS sequence (opt4) from hemagglutinin__InfluenzaA__AGL09734
augaagaccaucaucgcccugagcuacauccugugccugguguucgcccagaaguuccccggcaacgacaacagcaccgccacccugugccugggccaccacgccgugcccaacggcaccaucgugaagaccaucaccaacgacagaaucgaggugaccaacgccaccgagcuggugcagaacagcagcaucggcgagaucugcgacagcccccaccagauccuggacggcgagaacugcacccugaucgacgcccugcugggcgacccccagugcgacggcuuccagaacaagaagugggaccuguucaucgagagaagcaaggccuacagcaacugcuaccccuacgacgugcccgacuacgccagccugagaagccugguggccagcagcggcacccuggaguucaacaacgagagcuucaacuggaccggcgugacccagaacggcaccagcagcgccugcaucagaagaagcaacagcagcuucuucagcagacugaacuggcugacccaccugaacuucaaguaccccgcccugaacgugaccaugcccaacaacgagcaguucgacaagcuguacaucuggggcgugcaccaccccggcaccgacaaggaccagaucuuccuguacgcccagagcagcggcagaaucaccgugagcaccaagagaagccagcaggccgugauccccaacaucggcagcagacccagaaucagaaacauccccagcagaaucagcaucuacuggaccaucgugaagcccggcgacauccugcugaucaacagcaccggcaaccugaucgcccccagaggcuacuucaagaucagaagcggcaagagcagcaucaugagaagcgacgcccccaucggcaagugcaagagcgagugcaucacccccaacggcagcauccccaacgacaagcccuuccagaacgugaacagaaucaccuacggcgccugccccagauacgugaagcagagcacccugaagcuggccaccggcaugagaaacgugcccgagaagcagaccagaggcaucuucggcgccaucgccggcuucaucgagaacggcugggagggcaugguggacggcugguacggcuucagacaccagaacagcgagggcagaggccaggccgccgaccugaagagcacccaggccgccaucgaccagaucaacggcaagcugaacagacugaucggcaagaccaacgagaaguuccaccagaucgagaaggaguucagcgagguggagggcagaauccaggaccuggagaaguacguggaggacaccaagaucgaccuguggagcuacaacgccgagcugcugguggcccuggagaaccagcacaccaucgaccugaccgacagcgagaugaacaagcuguucgagaagaccaagaagcagcugagagagaacgccgaggacaugggcaacggcugcuucaagaucuaccacaagugcgacaacgccugcaucggcagcaucagaaacggcaccuacgaccacgacguguacagagacgaggcccugaacaacagauuccagaucaagggcguggagcugaagagcggcuacaaggacuggauccuguggaucagcuucgccaucagcugcuuccugcugugcguggcccugcugggcuucaucaugugggccugccagaagggcaacaucagaugcaacaucugcaucuga

SEQ ID NO: 170056 - RNA, 1701 nt, Artificial Sequence
  derived and/or modified CDS sequence (opt4) from hemagglutinin__InfluenzaA__AGL09735
augaagaccaucaucgcccugagcuacauccugugccugguguucgcccagaagcugcccggcaacgacaacagcaccgccacccugugccugggccaccacgccgugcccaacggcaccaucgugaagaccaucaccaacgacagaaucgaggugaccaacgccaccgagcuggugcagaacagcagcaucggcgagaucugcgacagcccccaccagauccuggacggcgagaacugcacccugaucgacgcccugcugggcgacccccagugcgacggcuuccagaacaagaagugggaccuguucguggagagaagcaaggccuacagcaacugcuaccccuacgacgugcccgacuacgccagccugagaagccugguggccagcagcggcacccuggaguucaacaacgagagcuucaacugggccggcgugacccagaacggcaccagcagcgccugcaucagaggcagcaacagcagcuucuucagcagacugaacuggcugacccaccugaacuucaaguaccccgcccugaacgugaccaugcccaacaacgagcaguucgacaagcuguacaucuggggcgugcaccaccccggcaccgacaaggaccagaucuuccuguacgcccagagcagcggcagaaucaccgugagcaccaagagaagccagcaggccgugauccccaacaucggcagcagacccagaaucagaaacauccccagcagaaucagcaucuacuggaccaucgugaagcccggcgacauccugcugaucaacagcaccggcaaccugaucgcccccagaggcuacuucaagaucagaagcggcaagagcagcaucaugagaagcgacgcccccaucggcaagugcaagagcgagugcaucacccccaacggcagcauccccaacgacaagcccuuccagaacgugaacagaaucaccuacggcgccugccccagauacgugaagcagagcacccugaagcuggccaccggcaugagaaacgugcccgagaagcagaccagaggcaucuucggcgccaucgccggcuucaucgagaacggcugggagggcaugguggacggcugguacggcuucagacaccagaacagcgagggcagaggccaggccgccgaccugaagagcacccaggccgccaucgaccagaucaacggcaagcugaacagacugaucggcaagaccaacgagaaguuccaccagaucgagaaggaguucagcgagguggagggcagaauccaggaccuggagaaguacguggaggacaccaagaucgaccuguggagcuacaacgccgagcugcugguggcccuggagaaccagcacaccaucgaccugaccgacagcgagaugaacaagcuguucgagaagaccaagaagcagcugagagagaacgccgaggacaugggcaacggcugcuucaagaucuaccacaagugcgacaacgccugcaucggcagcaucagaaacggcaccuacgaccacgacguguacagagacgaggcccugaacaacagauuccagaucaagggcguggagcugaagagcggcuacaaggacuggauccuguggaucagcuucgccaucagcugcuuccugcugugcguggcccugcugggcuucaucaugugggccugccagaagggcaacaucagaugcaacaucagcaucuga

SEQ ID NO: 170057 - RNA, 1701 nt, Artificial Sequence
  derived and/or modified CDS sequence (opt4) from hemagglutinin__InfluenzaA__AGL09736
augaagaccaucaucgcccugagcuacauccugugccugguguucgcccagaagcugcccggcaacgacaacagcaccgccacccugugccugggccaccacgccgugcccaacggcaccaucgugaagaccaucaccaacgaccagaucgaggugaccaacgccaccgagcuggugcagaacagcagcaucggcgagaucugcgacagcccccaccagauccuggacggcgagaacugcacccugaucgacgcccugcugggcgacccccagugcgacggcuuccagaacaagaagugggaccuguucguggagagaagcaaggccuacagcaacugcuaccccuacgacgugcccgacuacgccagccugagaagccugguggccagcagcggcacccuggaguucaacaacgagagcuucaacugggccggcgugacccagaacggcaccagcagcgccugcaucagaggcagcaacagcagcuucuucagcagacugaacuggcugacccaccugaacuucaaguaccccgcccugaacgugaccaugcccaacaacgagcaguucgacaagcuguacaucuggggcgugcaccaccccggcaccgacaaggaccagaucuuccuguacgcccagagcagcggcagaaucaccgugagcaccaagagaagccagcaggccgugauccccaacaucggcagcagacccagaaucagaaacauccccagcagaaucagcaucuacuggaccaucgugaagcccggcgacauccugcugaucaacagcaccggcaaccugaucgcccccagaggcuacuucaagaucagaagcggcaagagcagcaucaugagaagcgacgcccccaucggcaagugcaagagcgagugcaucacccccaacggcagcauccccaacgacaagcccuuccagaacgugaacagaaucaccuacggcgccugccccagauacgugaagcagagcacccugaagcuggccaccggcaugagaaacgugcccgagaagcagaccagaggcaucuucggcgccaucgccggcuucaucgagaacggcugggagggcaugguggacggcugguacggcuucagacaccagaacagcgagggcagaggccaggccgccgaccugaagagcacccaggccgccaucgaccagaucaacggcaagcugaacagacugaucggcaagaccaacgagaaguuccaccagaucgagaaggaguucagcgagguggagggcagaauccaggaccuggagaaguacguggaggacaccaagaucgaccuguggagcuacaacgccgagcugcugguggcccuggagaaccagcacaccaucgaccugaccgacagcgagaugaacaagcuguucgagaagaccaagaagcagcugagagagaacgccgaggacaugggcaacggcugcuucaagaucuaccacaagugcgacaacgccugcaucggcagcaucagaaacggcaccuacgaccacgacguguacagagacgaggcccugaacaacagauuccagaucaagggcguggagcugaagagcggcuacaaggacuggauccuguggaucagcuucgccaucagcugcuuccugcugugcguggcccugcugggcuucaucaugugggccugccagaagggcaacaucagaugcaacaucugcaucuga

SEQ ID NO: 170058 - RNA, 1701 nt, Artificial Sequence; identical to SEQ ID NO: 169943
  derived and/or modified CDS sequence (opt4) from hemagglutinin__InfluenzaA__AGL09737

SEQ ID NO: 170059 - RNA, 1701 nt, Artificial Sequence
  derived and/or modified CDS sequence (opt4) from hemagglutinin__InfluenzaA__AGL09739
augaagaccaucaucgcccugagcuacauccugugccugguguucgcccagaagcugcccggcaacgacaacagcaccgccacccugugccugggccaccacgccgugcccaacggcaccaucgugaagaccaucaccaacgacagaaucgaggugaccaacgccaccgagcuggugcagaacagcagcaucggcgagaucugcgacagcccccaccagauccuggacggcgagaacugcacccugaucgacgcccugcugggcgacccccagugcgacggcuuccagaacaagaagugggaccuguucguggagagaagcaaggccuacagcagcugcuaccccuacgacgugcccgacuacgccagccugagaagccugguggccagcagcggcacccuggaguucaacaacgagagcuucaacuggaccggcgugacccagaacggcaccagcagcgccugcaucagaagaagcaacagcagcuucuucagcagacugaacuggcugacccaccugaacuucaaguaccccgcccugaacgugaccaugcccaacaacgagcaguucgacaagcuguacaucuggggcgugcaccaccccggcaccgacaaggaccagaucuuccuguacgcccagagcagcggcagaaucaccgugagcaccaagagaagccagcaggccgugauccccaacaucggcagcagacccagaaucagaaacauccccagcagaaucagcaucuacuggaccaucgugaagcccggcgacauccugcugaucaacagcaccggcaaccugaucgcccccagaggcuacuucaagaucagaagcggcaagagcagcaucaugagaagcgacgcccccaucggcaagugcaagagcgagugcaucacccccaacggcagcauccccaacgacaagcccuuccagaacgugaacagaaucaccuacggcgccugccccagauacgugaagcagagcacccugaagcuggccaccggcaugagaaacgugcccgagaagcagaccagaggcaucuucggcgccaucgccggcuucaucgagaacggcugggagggcaugguggacggcugguacggcuucagacaccagaacagcgagggcagaggccaggccgccgaccugaagagcacccaggccgccaucgaccagaucaacggcaagcugaacagacugaucggcaagaccaacgagaaguuccaccagaucgagaaggaguucagcgagguggagggcagaauccaggaccuggagaaguacguggaggacaccaagaucgaccuguggagcuacaacgccgagcugcugguggcccuggagaaccagcacaccaucgaccugaccgacagcgagaugaacaagcuguucgagaagaccaagaagcagcugagagagaacgccgaggacaugggcaacggcugcuucaagaucuaccacaagugcgacaacgccugcaucggcagcaucagaaacggcaccuacgaccacaacguguacagagacgaggcccugaacaacagauuccagaucaagggcguggagcugaagagcggcuacaaggacuggauccuguggaucagcuucgccaucagcugcuuccugcugugcguggcccugcugggcuucaucaugugggccugccagaagggcaacaucagaugcaacaucugcaucuga

SEQ ID NO: 170060 - RNA, 1701 nt, Artificial Sequence; identical to SEQ ID NO: 169895
  derived and/or modified CDS sequence (opt4) from hemagglutinin__InfluenzaA__AGL09740

SEQ ID NO: 170061 - RNA, 1701 nt, Artificial Sequence; identical to SEQ ID NO: 169134
  derived and/or modified CDS sequence (opt4) from hemagglutinin__InfluenzaA__AGL09741

SEQ ID NO: 170062 - RNA, 1701 nt, Artificial Sequence
  derived and/or modified CDS sequence (opt4) from hemagglutinin__InfluenzaA__AGL09742
augaagaccaucaucgcccugagcuacauccugugccugguguucgcccaggagcugcccggcaacgacgacagcaccgccacccugugccugggccaccacgccgugcccaacggcaccaucgugaagaccaucaccaacgaccagaucgaggugaccaacgccaccgagcuggugcagagcagcagcaccggcgagaucugcaacagcccccaccagauccuggacggcgagaacugcacccugaucgacgcccugcugggcgacccccagugcgacggcuuccagaacaagaagugggaccuguucguggagagaagcaaggcccacagcaacugcuaccccuacgacgugcccgacuacgccagccugagaagccugguggccagcagcggcacccuggaguucaacaacgagagcuucaacuggaccggcgugacccagaacggcaccagcagcgccugcaucagaagaagcaacaacagcuucuucagcagacugaacuggcugacccaccugaacuucaaguaccccgcccugaacgugaccaugcccaacaacgagcaguucgacaagcuguacaucuggggcgugcaccaccccggcaccgacaaggaccagaucuuccuguacgcccaggccagcggcagaaucaccgugagcaccaagagaagccagcaggccgugauccccaacaucggcagcagacccagagugagaaacauccccagcagagugagcaucuacuggaccaucgugaagcccggcgacauccugcugaucaacagcaccggcaaccugaucgcccccagaggcuacuucaagaucagaagcggcaagagcagcaucaugagaagcgacgcccccaucggcaagugcaacagcgccugcaucacccccaacggcagcauccccaacgacaagcccuuccagaacgugaacagaaucaccuacggcgccugccccagauacgugaagcagaacacccugaagcuggccaccggcaugagaaacgugcccgagacccagaccagaggcaucuucggcgccaucgccggcuucaucgagaacggcugggagggcaugguggacggcugguacggcuucagacaccagaacagcgagggcagaggccaggccgccgaccugaagagcacccaggccgccaucgaccagaucaacggcaagcugaacagacugaucggcaagaccaacgagaaguuccaccagaucgagaaggaguucagcgagguggagggcagaauccaggaccuggagaaguacguggaggacaccaagaucgaccuguggagcuacaacgccgagcugcugguggcccuggagaaccagcacaccaucgaccugaccgacagcgagaugaacaagcuguucgagaagaccaagaagcagcugagagagaacgccgaggacaugggcaacggcugcuucaagaucuaccacaagugcgacaacgccugcaucggcagcaucagaaacggcaccuacgaccacgacguguacagagacgaggcccugaacaacagauuccagaucaagggcguggagcugagaagcggcuacaaggacuggauccuguggaucagcuucgccaucagcugcuuccugcugugcguggcccugcugggcuucaucaugugggccugccagaagggcaacaucagaugcagcaucugcaucuga

SEQ ID NO: 170063 - RNA, 1701 nt, Artificial Sequence; identical to SEQ ID NO: 169918
  derived and/or modified CDS sequence (opt4) from hemagglutinin__InfluenzaA__AGL09744

SEQ ID NO: 170064 - RNA, 1701 nt, Artificial Sequence
  derived and/or modified CDS sequence (opt4) from hemagglutinin__InfluenzaA__AGL09745
augaagaccaucaucgcccugagcuacauccugugccugguguucgcccagaagcugcccggcaacgacaacagcaccgccacccugugccugggccaccacgccgugcccaacggcaccaucgugaagaccaucaccaacgacagaaucgaggugaccaacgccaccgagcuggugcagaacagcagcaucggcgagaucugcgacagcccccaccagauccuggacggcgagaacugcacccugaucgacgcccugcugggcgacccccagugcgacggcuuccagaacaagaagugggaccuguucguggagagaagcaaggccuacagcaacugcuaccccuacgacgugcccgacuacgccagccugagaagccugguggccagcagcggcacccuggaguucaacaacgagagcuucaacuggaccggcgugacccagaacggcaccagcagcgccugcaucagaagaagcaacagcagcuucuucagcagacugaacuggcugacccaccugaacuucaaguaccccgcccugaacgugaccaugcccaacaacgagcaguucgacaagcuguacaucuggggcgugcaccaccccggcaccgacaaggaccagaucuuccuguacgcccagagcagcggcagaaucaccgugagcaccaagagaagccagcaggccgugauccccaacaucggcagcagacccagaaucagaaacauccccagcagaaucagcaucuacuggaccaucgugaagcccggcgacauccugcugaucaacagcaccggcaaccugaucgcccccagaggcuacuucaagaucagaagcggcaagagcagcaucaugagaagcgacgcccccaucggcaagugcaagagcgagugcaucacccccaacggcagcauccccaacgacaagcccuuccagaacgugaacagaaucaccuacggcgccugccccagauacgugaagcagagcacccugaagcuggccaccggcaugagaaacgugcccgagaagcagaccagaggcaucuucggcgccaucgccggcuucaucgagaacggcugggagggcaugguggacggcugguacggcuucagacaccagaacagcgagggcagaggccaggccgccgaccugaagagcacccaggccgccaucgaccagaucaacggcaagcugaacagacugaucggcaagaccaacgagaaguuccaccagaucgagaaggaguucagcgagguggagggcagaauccaggaccuggagaaguacguggaggacaccaagaucgaccuguggagcuacaacgccgagcugcugguggcccuggagaaccagcacaccaucgaccugaccgacagcgagaugaacaagcuguucgagaagaccaagaagcagcugagagagaacgccgaggacgugggcaacggcugcuucaagaucuaccacaagugcgacaacaccugcaucggcagcaucagaaacggcaccuacgaccacaacguguacagagacgaggcccugaacaacagauuccagaucaagggcguggagcugaagagcggcuacaaggacuggauccuguggaucagcuucgccaucagcugcuuccugcugugcguggcccugcugggcuucaucaugugggccugccagaagggcaacaucagaugcaacaucugcaucuga

SEQ ID NO: 170065 - RNA, 1701 nt, Artificial Sequence; identical to SEQ ID NO: 170057
  derived and/or modified CDS sequence (opt4) from hemagglutinin__InfluenzaA__AGL09746

SEQ ID NO: 170066 - RNA, 1701 nt, Artificial Sequence; identical to SEQ ID NO: 169895
  derived and/or modified CDS sequence (opt4) from hemagglutinin__InfluenzaA__AGL09747

SEQ ID NO: 170067 - RNA, 1701 nt, Artificial Sequence; identical to SEQ ID NO: 169918
  derived and/or modified CDS sequence (opt4) from hemagglutinin__InfluenzaA__AGL09748

SEQ ID NO: 170068 - RNA, 1701 nt, Artificial Sequence; identical to SEQ ID NO: 169916
  derived and/or modified CDS sequence (opt4) from hemagglutinin__InfluenzaA__AGL09749

SEQ ID NO: 170069 - RNA, 1701 nt, Artificial Sequence; identical to SEQ ID NO: 170054
  derived and/or modified CDS sequence (opt4) from hemagglutinin__InfluenzaA__AGL09750

SEQ ID NO: 170070 - RNA, 1701 nt, Artificial Sequence; identical to SEQ ID NO: 169895
  derived and/or modified CDS sequence (opt4) from hemagglutinin__InfluenzaA__AGL09751

SEQ ID NO: 170071 - RNA, 1701 nt, Artificial Sequence; identical to SEQ ID NO: 170054
  derived and/or modified CDS sequence (opt4) from hemagglutinin__InfluenzaA__AGL09753

SEQ ID NO: 170072 - RNA, 1701 nt, Artificial Sequence
  derived and/or modified CDS sequence (opt4) from hemagglutinin__InfluenzaA__AGL09754
augaagaccaucaucgcccugagcuacauccugugccugguguucgcccagaagcugcccggcaacgacaacagcaccgccacccugugccugggccaccacgccgugcccaacggcaccaucgugaagaccaucaccaacgacagaaucgaggugaccaacgccaccgagcuggugcagaacagcagcaucggcgagaucugcgacagcccccaccagauccuggacggcgagaacugcacccugaucgacgcccugcugggcgacccccagugcgacggcuuccagaacaagaagugggaccuguucguggagagaagcaaggccuacagcaacugcuaccccuacgacgugcccgacuacgccagccugagaagccugguggccagcagcggcacccuggaguucaacaacgagagcuucaacuggaccggcgugacccagaacggcaccagcagcgccugcaucagaagaagcaacagcagcuucuucagcagacugaacuggcugacccaccugaacuucaaguaccccgcccugaacgugaccaugcccaacaacgagcaguucgacaagcuguacaucuggggcgugcaccaccccggcaccgacaaggaccagaucuuccuguacgcccagagcagcggcagaaucaccgugagcaccaagagaagccagcaggccgugauccccaacaucggcagcagacccagaaucagaaacauccccagcagaaucagcaucuacuggaccaucgugaagcccggcgacauccugcugaucaacagcaccggcaaccugaucgcccccagaggcuacuucaagaucagaagcggcaagagcagcaucaugagaagcgacgcccccaucggcaagugcaagagcgagugcaucacccccaacggcagcauccccaacgacaagcccuuccagaacgugaacagaaucaccuacggcgccugccccagauacgugaagcagagcacccugaagcuggccaccggcaugagaaacgugcccgagaagcagaccagaggcaucuucggcgccaucgccggcuucaucgagaacggcugggagggcaugguggacggcugguacggcuucagacaccagaacagcgagggcagaggccaggccgccgaccugaagagcacccaggccgccaucgaccagaucaacggcaagcugaacagacugaucggcaagaccaacgagaaguuccaccagaucgagaaggaguucagcgagguggagggcagaauccaggaccuggagaaguacguggaggacaccaagaucgaccuguggagcuacaacgccgagcugcugguggcccuggagaaccagcacaccaucgaccugaccgacagcgagaugaacaagcuguucgagaagaccaagaagcagcugagagagaacgccgaggacaugggcaacggcugcuucaagaucuaccacaagugcgacaacgccugcaucggcagcaucagaaacggcaccuacgaccacaacguguacagagacgaggcccugaacaacagauuccagaucaagggcguggagcugaagagcggcuacaaggacuggauccuguggaucagcuucgccaucagcugccugcugcugugcguggcccugcugggcuucaucaugugggccugccagaagggcaacaucagaugcaacaucugcaucuga

SEQ ID NO: 170073 - RNA, 1701 nt, Artificial Sequence; identical to SEQ ID NO: 170057
  derived and/or modified CDS sequence (opt4) from hemagglutinin__InfluenzaA__AGL09756

SEQ ID NO: 170074 - RNA, 1701 nt, Artificial Sequence
  derived and/or modified CDS sequence (opt4) from hemagglutinin__InfluenzaA__AGL09758
augaaggccauccugguggugcugcuguacaccuucgccaccgccaacgccgacacccugugcaucggcuaccacgccaacaacagcaccgacaccguggacaccgugcuggagaagaacgugaccgugacccacagcgugaaccugcuggaggacaagcacaacggcaagaucugcaagcugagaggcguggccccccugcaccugggcaagugcaacaucgccggcuggauccugggcaaccccgagugcgagagccugagcaccgccagcagcuggagcuacaucguggagaccagcagcagcgacaacggcaccugcuaccccggcgacuucaucgacuacgaggagcugagagagcagcugagcagcgugagcagcuucgagagauucgagaucuuccccaagaccagcagcuggcccaaccacgacagcaacaagggcgugaccgccgccugcccccacgccggcgccaagggcuucuacaagaaccugaucuggcuggugaagaagggcaacagcuaccccaagcugagcaacagcuacaucaacgacaagggcaaggaggugcuggugcuguggggcauccaccaccccagcaccaccgccgaccagcagagccuguaccagaacgccgacaccuacguguucgugggcaccagcagauacagcaagaaguucaagcccgagaucgccaucagacccaaggugagagaccaggagggcagaaugaacuacuacuggacccugguggagcccggcgacaagaucaccuucgaggccaccggcaaccugguggugcccagauacgccuucgccauggagagaaacgccggcagcggcaucaucaucagcgacaccaccgugcacgacugcaacaccaccugccagacccccaagggcgccaucaacaccagccugcccuuccagaacauccaccccaucaccaucggcaagugccccaaguacgugaagagcaccaagcugagacuggccaccggccugagaaacgugcccagcauccagagcagaggccuguucggcgccaucgccggcuucaucgagggcggcuggaccggcaugguggacggcugguacggcuaccaccaccagaacgagcagggcagcggcuacgccgccgaccugaagagcacccagaacgccaucgacaagaucaccaacaaggugaacagcgugaucgagaagaugaacacccaguucaccgccgugggcaaggaguucaaccaccuggagaagagaaucgagaaccugaacaagaagguggacgacggcuuccuggacaucuggaccuacaacgccgagcugcuggugcugcuggagaacgagagaacccuggacuaccacgacagcaacgugaagaaccuguacgagaaggugagaaaccagcugaagaacaacgccaaggagaucggcaacggcugcuucgaguucuaccacaagugcgacaacaugugcauggagagcgugaagaacggcaccuacgacuaccccaaguacagcgaggaggccaagcugaacagagagaagaucgacggcgugaagcuggagagcaccagaaucuaccagauccuggccaucuacagcaccguggccagcagccuggugcugguggugagccugggcgccaucagcuucuggaugugcagcaacggcagccugcagugcagaaucugcaucuga

SEQ ID NO: 170075 - RNA, 1701 nt, Artificial Sequence
  derived and/or modified CDS sequence (opt4) from hemagglutinin__InfluenzaA__AGL09760
augaagaccaucaucgccgugagcuacauccugugccugguguucgcccaggagcugcccggcaacgacgacagcaccgccacccugugccugggccaccacgccgugcccaacggcaccaucgugaagaccaucaccaacgaccagaucgaggugaccaacgccaccgagcuggugcagagcagcagcaccggcgagaucugcaacagcccccaccagauccuggacggcgagaacugcacccugaucgacgcccugcugggcgacccccagugcgacggcuuccagaacaagaagugggaccuguucguggagagaagcaaggcccacagcaacugcuaccccuacgacgugcccgacuacgccagccugagaagccugguggccagcagcggcacccuggaguucaacaacgagagcuucaacuggaccggcgugacccagaacggcaccagcagcgccugcaucagaagaagcaacaacagcuucuucagcagacugaacuggcugacccaccugaacuucaaguaccccgcccugaacgugaccaugcccaacaacgagcaguucgacaagcuguacaucuggggcgugcaccaccccggcaccgacaaggaccagaucuuccuguacgcccaggccagcggcagaaucaccgugagcaccaagagaagccagcaggccgugauccccaacaucggcagcagacccagagugagaaacauccccagcagagugagcaucuacuggaccaucgugaagcccggcgacauccugcugaucaacagcaccggcaaccugaucgcccccagaggcuacuucaagaucagaagcggcaagagcagcaucaugagaagcgacgcccccaucggcaagugcaacagcgccugcaucacccccaacggcagcauccccaacgacaagcccuuccagaacgugaacagaaucaccuacggcgccugccccagauacgugaagcagaacacccugaagcuggccaccggcaugagaaacgugcccgagaagcagaccagaggcaucuucggcgccaucgccggcuucaucgagaacggcugggagggcaugguggacggcugguacggcuucagacaccagaacagcgagggcagaggccaggccgccgaccugaagagcacccaggccgccaucgaccagaucaacggcaagcugaacagacugaucggcaagaccaacgagaaguuccaccagaucgagaaggaguucagcgagguggagggcagaauccaggaccuggagaaguacguggaggacaccaagaucgaccuguggagcuacaacgccgagcugcugguggcccuggagaaccagcacaccaucgaccugaccgacagcgagaugaacaagcuguucgagaagaccaagaagcagcugagagagaacgccgaggacaugggcaacggcugcuucaagaucuaccacaagugcgacaacgccugcaucggcagcaucagaaacggcaccuacgaccacgacguguacagagacgaggcccugaacaacagauuccagaucaagggcguggagcugaagagcggcuacaaggacuggauccuguggaucagcuucgccaucagcugcuuccugcugugcguggcccugcugggcuucaucaugugggccugccagaagggcaacaucagaugcaacaucugcaucuga

SEQ ID NO: 170076 - RNA, 1701 nt, Artificial Sequence; identical to SEQ ID NO: 169928
  derived and/or modified CDS sequence (opt4) from hemagglutinin__InfluenzaA__AGL09761

SEQ ID NO: 170077 - RNA, 1701 nt, Artificial Sequence
  derived and/or modified CDS sequence (opt4) from hemagglutinin__InfluenzaA__AGL09762
augaagaccaucaucgcccugagcuacauccugugccugguguucgcccagaagcugcccggcaacgacaacagcaccgccacccugugccugggccaccacgccgugcccaacggcaccaucgugaagaccaucaccaacgaccagaucgaggugaccaacgccaccgagcuggugcagaacagcagcaucggcgagaucugcgacagcccccaccagauccuggacggcgagaacugcacccugaucgacgcccugcugggcgacccccagugcgacggcuuccagaacaagaagugggaccuguucguggagagaagcaaggccuacagcaacugcuaccccuacgacgugcccgacuacgccagccugagaagccugguggccagcagcggcacccuggaguucaacaacgagagcuucaacuggaccggcgugacccagaacggcaccagcagcgccugcaucagaggcagcaacagcagcuucuucagcagacugaacuggcugacccaccugaacuucaaguaccccgcccugaacgugaccaugcccaacaacgagcaguucgacaagcuguacaucuggggcgugcaccaccccggcaccgacaaggaccagaucuuccuguacgcccagagcagcggcagaaucaccgugagcaccaagagaagccagcaggccgugauccccaacaucggcagcagacccagaaucagaaacauccccagcagaaucagcaucuacuggaccaucgugaagcccggcgacauccugcugaucaacagcaccggcaaccugaucgcccccagaggcuacuucaagaucagaagcggcaagagcagcaucaugagaagcgacgcccccaucggcaagugcaagagcgagugcaucacccccaacggcagcauccccaacgacaagcccuuccagaacgugaacagaaucaccuacggcgccugccccagauacgugaagcagagcacccugaagcuggccaccggcaugagaaacgugcccgagaagcagaccagaggcaucuucggcgccaucgccggcuucaucgagaacggcugggagggcaugguggacggcugguacggcuucagacaccagaacagcgagggcagaggccaggccgccgaccugaagagcacccaggccgccaucgaccagaucaacggcaagcugaacagacugaucggcaagaccaacgagaaguuccaccagaucgagaaggaguucagcgagguggagggcagaauccaggaccuggagaaguacguggaggacaccaagaucgaccuguggagcuacaacgccgagcugcugguggcccuggagaaccagcacaccaucgaccugaccgacagcgagaugaacaagcuguucgagaagaccaagaagcagcugagagagaacgccgaggacaugggcaacggcugcuucaagaucuaccacaagugcgacaacgccugcaucggcagcaucagaaacggcaccuacgaccacgacguguacagagacgaggcccugaacaacagauuccagaucaagggcguggagcugaagagcggcuacaaggacuggauccuguggaucagcuucgccaucagcugcuuccugcugugcguggcccugcugggcuucaucaugugggccugccagaagggcaacaucagaugcaacaucugcaucuga

SEQ ID NO: 170078 - RNA, 1701 nt, Artificial Sequence; identical to SEQ ID NO: 170054
  derived and/or modified CDS sequence (opt4) from hemagglutinin__InfluenzaA__AGL09763

SEQ ID NO: 170079 - RNA, 1701 nt, Artificial Sequence
  derived and/or modified CDS sequence (opt4) from hemagglutinin__InfluenzaA__AGL09764
augaagaccaucaucgcccugagcuacauccugugccugguguucgcccagaagauccccggcaacgacaacagcaccgccacccugugccugggccaccacgccgugcccaacggcaccaucgugaagaccaucaccaacgaccagaucgaggugaccaacgccaccgagcuggugcagaacagcagcaucggcgagaucugcgacagcccccaccagauccuggacggcgagaacugcacccugaucgacgcccugcugggcgacccccagugcgacggcuuccagaacaagaagugggaccuguucguggagagaagcaaggccuacagcaacugcuaccccuacgacgugcccgacuacgccagccugagaagccugguggccagcagcggcacccuggaguucaacaacgagagcuucaacuggaccggcgugacccagaacggcaccagcagcgccugcaucagaagaagcaacagcagcuucuucagcagacugaacuggcugacccaccugaacuucaaguaccccgcccugaacgugaccaugcccaacaacgagcaguucgacaagcuguacaucuggggcgugcaccaccccggcaccgacaaggaccagaucuuccuguacgcccagagcagcggcagaaucaccgugagcaccaagagaagccagcaggccgugauccccaacaucggcagcagacccagaaucagaaacauccccagcagaaucagcaucuacuggaccaucgugaagcccggcgacauccugcugaucaacagcaccggcaaccugaucgcccccagaggcuacuucaagaucagaagcggcaagagcagcaucaugagaagcgacgcccccaucggcaagugcaagagcgagugcaucacccccaacggcagcauccccaacgacaagcccuuccagaacgugaacagaaucaccuacggcgccugccccagauacgugaagcagagcacccugaagcuggccaccggcaugagaaacgugcccgagaagcagaccagaggcaucuucggcgccaucgccggcuucaucgagaacggcugggagggcaugguggacggcugguacggcuucagacaccagaacagcgagggcagaggccaggccgccgaccugaagagcacccaggccgccaucgaccagaucaacggcaagcugaacagacugaucggcaagaccaacgagaaguuccaccagaucgagaaggaguucagcgagguggagggcagaauccaggaccuggagaaguacguggaggacaccaagaucgaccuguggagcuacaacgccgagcugcugguggcccuggagaaccagcacaccaucgaccugaccgacagcgagaugaacaagcuguucgagaagaccaagaagcagcugagagagaacgccgaggacaugggcaacggcugcuucaagaucuaccacaagugcgacaacgccugcaucggcagcaucagaaacggcaccuacgaccacgacguguacagagacgaggcccugaacaacagauuccagaucaagggcguggagcugaagagcggcuacaaggacuggauccuguggaucagcuucgccaucagcugcuuccugcugugcguggcccugcugggcuucaucaugugggccugccagaagggcaacaucagaugcaacaucugcaucuga

SEQ ID NO: 170080 - RNA, 1701 nt, Artificial Sequence; identical to SEQ ID NO: 169918
  derived and/or modified CDS sequence (opt4) from hemagglutinin__InfluenzaA__AGL09765

SEQ ID NO: 170081 - RNA, 1701 nt, Artificial Sequence
  derived and/or modified CDS sequence (opt4) from hemagglutinin__InfluenzaA__AGL09766
augaagaccaucaucgcccugagcuacauccugugccugguguucgcccagaagcugcccggcaacgacaacagcaccgccacccugugccugggccaccacgccgugcccaacggcaccaucgugaagaccaucaccaacgaccagaucgaggugaccaacgccaccgagcuggugcagaacagcagcaucggcgagaucugcgacagcccccaccagauccuggacggcgagaacugcacccugaucgacgcccugcugggcgacccccagugcgacggcuuccagaacaagaagugggaccuguucguggagagaagcaaggccuacagcaacugcuaccccuacgacgugcccgacuacgccagccugagaagccugguggccagcagcggcacccuggaguucaacaacgagagcuucaacugggccggcgugacccagaacggcaccagcagcgccugcaucagaggcagcaacagcagcuucuucagcagacugaacuggcugacccaccugaacuucaaguaccccgcccugaacgugaccaugcccaacaacgagcaguucgacaagcuguacaucuggggcgugcaccaccccggcaccgacaaggaccagaucuuccuguacgcccagagcagcggcagaaucaccgugagcaccaagagaagccagcaggccgugauccccaacaucggcagcagacccagaaucagaaacauccccagcagaaucagcaucuacuggaccaucgugaagcccggcgacauccugcugaucaacagcaccggcaaccugaucgcccccagaggcuacuucaagauccugagcggcaagagcagcaucaugagaagcgacgcccccaucggcaagugcaagagcgagugcaucacccccaacggcagcauccccaacgacaagcccuuccagaacgugaacagaaucaccuacggcgccugccccagauacgugaagcagagcacccugaagcuggccaccggcaugagaaacgugcccgagaagcagaccagaggcaucuucggcgccaucgccggcuucaucgagaacggcugggagggcaugguggacggcugguacggcuucagacaccagaacagcgagggcagaggccaggccgccgaccugaagagcacccaggccgccaucgaccagaucaacggcaagcugaacagacugaucggcaagaccaacgagaaguuccaccagaucgagaaggaguucagcgagguggagggcagaauccaggaccuggagaaguacguggaggacaccaagaucgaccuguggagcuacaacgccgagcugcugguggcccuggagaaccagcacaccaucgaccugaccgacagcgagaugaacaagcuguucgagaagaccaagaagcagcugagagagaacgccgaggacaugggcaacggcugcuucaagaucuaccacaagugcgacaacgccugcaucggcagcaucagaaacggcaccuacgaccacgacguguacagagacgaggcccugaacaacagauuccagaucaagggcguggagcugaagagcggcuacaaggacuggauccuguggaucagcuucgccaucagcugcuuccugcugugcguggcccugcugggcuucaucaugugggccugccagaagggcaacaucagaugcaacaucugcaucuga

SEQ ID NO: 170082 - RNA, 1701 nt, Artificial Sequence
  derived and/or modified CDS sequence (opt4) from hemagglutinin__InfluenzaA__AGL09767
augaagaccaucaucgcccugagcuacauccugugccugguguucgcccagaagcugcccggcaacgacaacagcaccgccacccugugccugggccaccacgccgugcccaacggcaccaucgugaagaccaucaccaacgacagaaucgaggugaccaacgccaccgagcuggugcagaacagcagcaucggcgagaucugcgacagcccccaccagauccuggacggcgagaacugcacccugaucgacgcccugcugggcgacccccagugcgacggcuuccagaacaagaagugggaccuguucguggagagaagcaaggccuacagcaacugcuaccccuacgacgugcccgacuacgccagccugagaagccugguggccagcagcggcacccuggaguucaacaacgagagcuucaacugggccggcgugacccagaacggcaccagcagcgccugcaucagaggcagcaacagcagcuucuucagcagacugaacuggcugacccaccugaacuucaaguaccccgcccugaacgugaccaugcccaacaacgagcaguucgacaagcuguacaucuggggcgugcaccaccccggcaccgacaaggaccagaucuuccuguacgcccagagcagcggcagaaucaccgugagcaccaagagaagccagcaggccgugauccccaacaucggcagcagacccagaaucagaaacauccccagcagaaucagcaucuacuggaccaucgugaagcccggcgacauccugcugaucaacagcaccggcaaccugaucgcccccagaggcuacuucaagaucagaagcggcaagagcagcaucaugagaagcgacgcccccaucggcaagugcaagagcgagugcaucacccccaacggcagcauccccaacgacaagcccuuccagaacgugaacagaaucaccuacggcgccugccccagauacgugaagcagagcacccugaagcuggccaccggcaugagaaacgugcccgagaagcagaccagaggcaucuucggcgccaucgccggcuucaucgagaacggcugggagggcaugguggacggcugguacggcuucagacaccagaacagcgagggcagaggccaggccgccgaccugaagagcacccaggccgccaucgaccagaucaacggcaagcugaacagacugaucggcaagaccaacgagaaguuccaccagaucgagaaggaguucagcgagguggagggcagaauccaggaccuggagaaguacguggaggacaccaagaucgaccuguggagcuacaacgccgagcugcugguggcccuggagaaccagcacaccaucgaccugaccgacagcgagaugaacaagcuguucgagaagaccaagaagcagcugagagagaacgccgaggacaugggcaacggcugcuucaagaucuaccacaagugcgacaacgccugcaucggcagcaucagaaacggcaccuacgaccacaacguguacagagacgaggcccugaacaacagauuccagaucaagggcguggagcugaagagcggcuacaaggacuggauccuguggaucagcuucgccaucagcugcuuccugcugugcguggcccugcugggcuucaucaugugggccugccagaagggcaacaucagaugcaacaucugcaucuga

SEQ ID NO: 170083 - RNA, 1701 nt, Artificial Sequence
  derived and/or modified CDS sequence (opt4) from hemagglutinin__InfluenzaA__AGL09769
augaagaccaucaucgcccugagcuacauccugugccugguguucgcccagaagauccccggcaacgacaacagcaccgccacccugugccugggccaccacgccgugcccaacggcaccaucgugaagaccaucaccaacgacagaaucgaggugaccaacgccaccgagcuggugcagaacagcagcaucggcgagaucugcgacagcccccaccagauccuggacggcgagaacugcacccugaucgacgcccugcugggcgacccccagugcgacggcuuccagaacaagaagugggaccuguucguggagagaagcaaggccuacagcaacugcuaccccuacgacgugcccgacuacgccagccugagaagccugguggccagcagcggcacccuggaguucaacaacgagagcuucaacuggaccggcgugacccagaacggcaccagcagcgccugcaucagaggcagcaacagcagcuucuucagcagacugaacuggcugacccaccugaacuucaaguaccccgcccugaacgugaccaugcccaacaacgagcaguucgacaagcuguacaucuggggcgugcaccaccccggcaccgacaaggaccagaucuuccuguacgcccagagcagcggcagaaucaccgugagcaccaagagaagccagcaggccgugauccccaacaucggcagcagacccagaaucagaaacauccccagcagaaucagcaucuacuggaccaucgugaagcccggcgacauccugcugaucaacagcaccggcaaccugaucgcccccagaggcuacuucaagaucagaagcggcaagagcagcaucaugagaagcgacgcccccaucggcaagugcaagagcgagugcaucacccccaacggcagcauccccaacgacaagcccuuccagaacgugaacagaaucaccuacggcgccugccccagauacgugaagcagagcacccugaagcuggccaccggcaugagaaacgugcccgagaagcagaccagaggcaucuucggcgccaucgccggcuucaucgagaacggcugggagggcaugguggacggcugguacggcuucagacaccagaacagcgagggcagaggccaggccgccgaccugaagagcacccaggccgccaucgaccagaucaacggcaagcugaacagacugaucggcaagaccaacgagaaguuccaccagaucgagaaggaguucagcgagguggagggcagaauccaggaccuggagaaguacguggaggacaccaagaucgaccuguggagcuacaacgccgagcugcugguggcccuggagaaccagcacaccaucgaccugaccgacagcgagaugaacaagcuguucgagaagaccaagaagcagcugagagagaacgccgaggacaugggcaacggcugcuucaagaucuaccacaagugcgacaacgccugcaucggcagcaucagaaacggcaccuacgaccacgacguguacagagacgaggcccugaacaacagauuccagaucaagggcguggagcugaagagcggcuacaaggacuggauccuguggaucagcuucgccaucagcugcuuccugcugugcguggcccugcugggcuucaucaugugggccugccagaagggcaacaucagaugcaacaucugcaucuga

SEQ ID NO: 170084 - RNA, 1701 nt, Artificial Sequence; identical to SEQ ID NO: 169918
  derived and/or modified CDS sequence (opt4) from hemagglutinin__InfluenzaA__AGL09770

SEQ ID NO: 170085 - RNA, 1701 nt, Artificial Sequence
  derived and/or modified CDS sequence (opt4) from hemagglutinin__InfluenzaA__AGL09771
augaagaccaucaucgcccugagcuacauccugugccugguguucgcccagaagcugcccggcaacgacaacagcaccgccacccugugccugggccaccacgccgugcccaacggcaccaucgugaagaccaucaccaacgacagaaucgaggugaccaacgccaccgagcuggugcagaacagcagcaucggcgagaucugcgacagcccccaccagauccuggacggcgagaacugcacccugaucgacgcccugcugggcgacccccagugcgacggcuuccagaacaagaagugggaccuguucguggagagaagcaaggccuacagcaacugcuaccccuacgacgugcccgacuacgccagccugagaagccugguggccagcagcggcacccuggaguucaacaacgagagcuucaacugggccggcgugacccagaacggcaccagcagcgccugcaucagaggcagcaacagcagcuucuucagcagacugaacuggcugacccaccugaacuucaaguaccccgcccugaacgugaccaugcccaacaacgagcaguucgacaagcuguacaucuggggcgugcaccaccccggcaccgacaaggaccagaucuuccuguacgcccagagcagcggcagaaucaccgugagcaccaagagaagccagcaggccgugauccccaacaucggcagcagacccagaaucagaaacauccccagcagaaucagcaucuacuggaccaucgugaagcccggcgacauccugcugaucaacagcaccggcaaccugaucgcccccagaggcuacuucaagaucagaagcggcaagagcagcaucaugagaagcgacgcccccaucggcaagugcaagagcgagugcaucacccccaacggcagcauccccaacgacaagcccuuccagaacgugaacagaaucaccuacggcgccugccccagauacgugaagcagagcacccugaagcuggccaccggcaugagaaacgugcccgagaagcagaccagaggcaucuucggcgccaucgccggcuucaucgagaacggcugggagggcaugguggacggcugguacggcuucagacaccagaacagcgagggcagaggccaggccgccgaccugaagagcacccaggccgccaucgaccagaucaacggcaagcugaacagacugaucggcaagaccaacgagaaguuccaccagaucgagaaggaguucagcgagguggagggcagaauccaggaccuggagaaguacguggaggacaccaagaucgaccuguggagcuacaacgccgagcugcugguggcccuggagaaccagcacaccaucgaccugaccgacagcgagaugaacaagcuguucgagaagaccaagaagcagcugagagagaacgccgaggacaugggcaacggcugcuucaagaucuaccacaagugcgacaacgccugcaucggcagcaucagaaacggcaccuacgaccacgacaucuacagagacgaggcccugaacaacagauuccagaucaagggcguggagcugaagagcggcuacaaggacuggauccuguggaucagcuucgccaucagcugcuuccugcugugcguggcccugcugggcuucaucaugugggccugccagaagggcaacaucagaugcaacaucugcaucuga

SEQ ID NO: 170086 - RNA, 1701 nt, Artificial Sequence
  derived and/or modified CDS sequence (opt4) from hemagglutinin__InfluenzaA__AGL09772
augaagaccaucaucgcccugagcuacauccugugccugguguucgcccagaagcugcccggcaacgacaacagcaccgccacccugugccugggccaccacgccgugcccaacggcaccaucgugaagaccaucaccaacgaccagaucgaggugaccaacgccaccgagcuggugcagagcagcagcaccggcgagaucugcaacagcccccaccagauccuggacggcgagaacugcacccugaucgacgcccugcugggcgacccccagugcgacggcuuccagaacaagaagugggaccuguucguggagagaagcaaggcccacagcaacugcuaccccuacgacgugcccgacuacgccagccugagaagccugguggccagcagcggcacccuggaguucaacaacgagagcuucaacuggaccggcgugacccagaacggcaccagcagcgccugcaucagaagaagcaacaacagcuucuucagcagacugaacuggcugacccaccugaacuucaaguaccccgcccugaacgugaccaugcccaacaacgagcaguucgacaagcuguacaucuggggcgugcaccaccccggcaccgacaaggaccagaucuuccuguacgcccaggccgccggcagaaucaccgugagcaccaagagaagccagcaggccgugauccccaacaucggcagcagacccagagugagaaacauccccagcagagugagcaucuacuggaccaucgugaagcccggcgacauccugcugaucaacagcaccggcaaccugaucgcccccagaggcuacuucaagaucagaagcggcaagagcagcaucaugagaagcgacgcccccaucggcaagugcaacagcgccugcaucacccccaacggcagcauccccaacgacaagcccuuccagaacgugaacagaaucaccuacggcgccugccccagauacgugaagcagaacacccugaagcuggccaccggcaugagaaacgugcccgagaagcagaccagaggcaucuucggcgccaucgccggcuucaucgagaacggcugggagggcaugguggacggcugguacggcuucagacaccagaacagcgagggcagaggccaggccgccgaccugaagagcacccaggccgccaucgaccagaucaacggcaagcugaacagacugaucggcaagaccaacgagaaguuccaccagaucgagaaggaguucagcgagguggagggcagaauccaggaccuggagaaguacguggaggacaccaagaucgaccuguggagcuacaacgccgagcugcugguggcccuggagaaccagcacaccaucgaccugaccgacagcgagaugaacaagcuguucgagaagaccaagaagcagcugagagagaacgccgaggacaugggcaacggcugcuucaagaucuaccacaagugcgacaacgccugcaucggcagcaucagaaacggcaccuacgaccacuacguguacagagacgaggcccugaacaacagauuccagaucaagggcguggagcugaagagcggcuacaaggacuggauccuguggaucagcuucgccaccagcugcuuccugcugugcguggcccugcugggcuucaucaugugggccugccagaagggcaacaucagaugcaacaucugcaucuga

SEQ ID NO: 170087 - RNA, 1701 nt, Artificial Sequence
  derived and/or modified CDS sequence (opt4) from hemagglutinin__InfluenzaA__AGL09773
augaagaccaucaucgcccugagcuacauccugugccugguguucgcccagaagcugcccggcaacgacaacagcaccgccacccugugccugggccaccacgccgugcccaacggcaccaucgugaagaccaucaccaacgaccagaucgaggugaccaacgccaccgagcuggugcagagcagcagcaccggcgagaucugcaacagcccccaccagauccuggacggcgagaacugcacccugaucgacgcccugcugggcgacccccagugcgacggcuuccagaacaagaagugggaccuguucguggagagaagcaaggcccacagcaacugcuaccccuacgacgugcccgacuacgccagccugagaagccugguggccagcagcggcacccuggaguucaacaacgagagcuucaacuggaccgaggugacccagaacggcaccagcagcgccugcaucagaagaagcaacaacagcuucuucagcagacugaacuggcugacccaccugaacuucaaguaccccgcccugaacgugaccaugcccaacaacgagcaguucgacaagcuguacaucuggggcgugcaccaccccggcaccgacaaggaccagaucuuccuguacgcccaggccgccggcagaaucaccgugagcaccaagagaagccagcaggccgugauccccaacaucggcagcagacccagagugagaaacauccccagcagagugagcaucuacuggaccaucgugaagcccggcgacauccugcugaucaacagcaccggcaaccugaucgcccccagaggcuacuucaagaucagaagcggcaagagcagcaucaugagaagcgacgcccccaucggcaagugcaacagcgccugcaucacccccaacggcagcauccccaacgacaagcccuuccagaacgugaacagaaucaccuacggcgccugccccagauacgugaagcagaacacccugaagcuggccaccggcaugagaaacgugcccgagaagcagaccagaggcaucuucggcgccaucgccggcuucaucgagaacggcugggagggcaugguggacggcugguacggcuucagacaccagaacagcgagggcagaggccaggccgccgaccugaagagcacccaggccgccaucgaccagaucaacggcaagcugaacagacugaucggcaagaccaacgagaaguuccaccagaucgagaaggaguucagcgagguggagggcagaauccaggaccuggagaaguacguggaggacaccaagaucgaccuguggagcuacaacgccgagcugcugguggcccuggagaaccagcacaccaucgaccugaccgacagcgagaugaacaagcuguucgagaagaccaagaagcagcugagagagaacgccgaggacaugggcaacggcugcuucaagaucuaccacaagugcgacaacgccugcaucggcagcaucagaaacggcaccuacgaccacuacguguacagagacgaggcccugaacaacagauuccagaucaagggcguggagcugaagagcggcuacaaggacuggauccuguggaucagcuucgccaccagcugcuuccugcugugcguggcccugcugggcuucaucaugugggccugccagaagggcaacaucagaugcaacaucugcaucuga

SEQ ID NO: 170088 - RNA, 1701 nt, Artificial Sequence; identical to SEQ ID NO: 170086
  derived and/or modified CDS sequence (opt4) from hemagglutinin__InfluenzaA__AGL09774

SEQ ID NO: 170089 - RNA, 1701 nt, Artificial Sequence; identical to SEQ ID NO: 169928
  derived and/or modified CDS sequence (opt4) from hemagglutinin__InfluenzaA__AGL09775

SEQ ID NO: 170090 - RNA, 1701 nt, Artificial Sequence; identical to SEQ ID NO: 170086
  derived and/or modified CDS sequence (opt4) from hemagglutinin__InfluenzaA__AGL09776

SEQ ID NO: 170091 - RNA, 1701 nt, Artificial Sequence; identical to SEQ ID NO: 170086
  derived and/or modified CDS sequence (opt4) from hemagglutinin__InfluenzaA__AGL09777

SEQ ID NO: 170092 - RNA, 1701 nt, Artificial Sequence
  derived and/or modified CDS sequence (opt4) from hemagglutinin__InfluenzaA__AGL09778
augaagaccaucaucgcccugagcuacauccugugccugaucuucgcccagaagcugcccggcaacgacaacagcaccgccacccugugccugggccaccacgccgugcccaacggcaccaucgugaagaccaucaccaacgacagaaucgaggugaccaacgccaccgagcuggugcagaacagcagcaucggcgagaucugcgacagcccccaccagauccuggacggcgagaacugcacccugaucgacgcccugcugggcgacccccagugcgacggcuuccagaacaagaagugggaccuguucguggagagaagcaaggccuacagcaacugcuaccccuacgacgugcccgacuacgccagccugagaagccugguggccagcagcggcacccuggaguucaacaacgagagcuucaacugggccggcgugacccagaacggcaccagcagcgccugcaucagaggcagcaacagcagcuucuucagcagacugaacuggcugacccaccugaacuucaaguaccccgcccugaacgugaccaugcccaacaacgagcaguucgacaagcuguacaucuggggcgugcaccaccccggcaccgacaaggaccagaucuuccuguacgcccagagcagcggcagaaucaccgugagcaccaagagaagccagcaggccgugauccccaacaucggcagcagacccagaaucagaaacauccccagcagaaucagcaucuacuggaccaucgugaagcccggcgacauccugcugaucaacagcaccggcaaccugaucgcccccagaggcuacuucaagaucagaagcggcaagagcagcaucaugagaagcgacgcccccaucggcaagugcaagagcgagugcaucacccccaacggcagcauccccaacgacaagcccuuccagaacgugaacagaaucaccuacggcgccugccccagauacgugaagcagagcacccugaagcuggccaccggcaugagaaacgugcccgagaagcagaccagaggcaucuucggcgccaucgccggcuucaucgagaacggcugggagggcaugauggacggcugguacggcuucagacaccagaacagcgagggcagaggccaggccgccgaccugaagagcacccaggccgccaucgaccagaucaacggcaagcugaacagacugaucggcaagaccaacgagaaguuccaccagaucgagaaggaguucagcgagguggagggcagaauccaggaccuggagaaguacguggaggacaccaagaucgaccuguggagcuacaacgccgagcugcugguggcccuggagaaccagcacaccaucgaccugaccgacagcgagaugaacaagcuguucgagaagaccaagaagcagcugagagagaacgccgaggacaugggcaacggcugcuucaagaucuaccacaagugcgacaacgccugcaucggcagcaucagaaacggcaccuacgaccacgacguguacagagacgaggcccugaacaacagauuccagaucaagggcguggagcugaagagcggcuacaaggacuggauccuguggaucagcuucgccaucagcugcuuccugcugugcguggcccugcugggcuucaucaugugggccugccagaagggcaacaucagaugcaacaucugcaucuga

SEQ ID NO: 170093 - RNA, 1701 nt, Artificial Sequence
  derived and/or modified CDS sequence (opt4) from hemagglutinin__InfluenzaA__AGL09779
augaagaccaucaucgcccugagcuacauccugugccugguguucgcccagaagcugcccggcaacaacaacagcaccgccacccugugccugggccaccacgccgugcccaacggcaccaucgugaagaccaucaccaacgacagaaucgaggugaccaacgccaccgagcuggugcagaacagcagcaucggcgagaucugcgacagcccccaccagauccuggacggcgagaacugcacccugaucgacgcccugcugggcgacccccagugcgacggcuuccagaacaagaagugggaccuguucguggagagaagcaaggccuacagcaacugcuaccccuacgacgugcccgacuacgccagccugagaagccugguggccagcagcggcacccuggaguucaacaacgagagcuucaacugggccggcgugacccagaacggcaccagcagcgccugcaucagaggcagcaacagcagcuucuucagcagacugaacuggcugacccaccugaacuucaaguaccccgcccugaacgugaccaugcccaacaacgagcaguucgacaagcuguacaucuggggcgugcaccaccccggcaccgacaaggaccagaucuuccuguacgcccagagcagcggcagaaucaccgugagcaccaagagaagccagcaggccgugauccccaacaucggcagcagacccagaaucagaaacauccccagcagaaucagcaucuacuggaccaucgugaagcccggcgacauccugcugaucaacagcaccggcaaccugaucgcccccagaggcuacuucaagaucagaagcggcaagagcagcaucaugagaagcgacgcccccaucggcaagugcaagagcgagugcaucacccccaacggcagcauccccaacgacaagcccuuccagaacgugaacagaaucaccuacggcgccugccccagauacgugaagcagagcacccugaagcuggccaccggcaugagaaacgugcccgagaagcagaccagaggcaucuucggcgccaucgccggcuucaucgagaacggcugggagggcaugguggacggcugguacggcuucagacaccagaacagcgagggcagaggccaggccgccgaccugaagagcacccaggccgccaucgaccagaucaacggcaagcugaacagacugaucggcaagaccaacgagaaguuccaccagaucgagaaggaguucagcgagguggagggcagaauccaggaccuggagaaguacguggaggacaccaagaucgaccuguggagcuacaacgccgagcugcugguggcccuggagaaccagcacaccaucgaccugaccgacagcgagaugaacaagcuguucgagaagaccaagaagcagcugagagagaacgccgaggacaugggcaacggcugcuucaagaucuaccacaagugcgacaacgccugcaucggcagcaucagaaacggcaccuacgaccacgacguguacagagacgaggcccugaacaacagauuccagaucaagggcguggagcugaagagcggcuacaaggacuggauccuguggaucagcuucgccaucagcugcuuccugcugugcguggcccugcugggcuucaucaugugggccugccagaagggcaacaucagaugcaacaucugcaucuga

SEQ ID NO: 170094 - RNA, 1701 nt, Artificial Sequence
  derived and/or modified CDS sequence (opt4) from hemagglutinin__InfluenzaA__AGL09780
augaagaccaucaucgcccugagcuacauccugugccugguguucgcccagaagcugcccggcaacgacaacagcaccgccacccugugccugggccaccacgccgugcccaacggcaccaucgugaagaccaucaccaacgacagaaucgaggugaccaacgccaccgagcuggugcagaacagcagcaucggcgagaucugcgacagcccccaccagauccuggacggcgagaacugcacccugaucgacgcccugcugggcgacccccagugcgacggcuuccagaacaagaagugggaccuguucguggagagaagcaaggccuacagcaacugcuaccccuacgacgugcccgacuacgccagccugagaagccugguggccagcagcggcacccuggaguucgacaacgagagcuucaacugggccggcgugacccagaacggcaccagcagcgccugcaucagaggcagcaacagcagcuucuucagcagacugaacuggcugacccaccugaacuucaaguaccccgcccugaacgugaccaugcccaacaacgagcaguucgacaagcuguacaucuggggcgugcaccaccccggcaccgacaaggaccagaucagccuguacgcccagagcagcggcagaaucaccgugagcaccaagagaagccagcaggccgugauccccaacaucggcagcagacccagaaucagaaacauccccagcagaaucagcaucuacuggaccaucgugaagcccggcgacauccugcugaucaacagcaccggcaaccugaucgcccccagaggcuacuucaagaucagaagcggcaagagcagcaucaugagaagcgacgcccccaucggcaagugcaagagcgagugcaucacccccaacggcagcauccccaacgacaagcccuuccagaacgugaacagaaucaccuacggcgccugccccagauacgugaagcagagcacccugaagcuggccaccggcaugagaaacgugcccgagaagcagaccagaggcaucuucggcgccaucgccggcuucaucgagaacggcugggagggcaugguggacggcugguacggcuucagacaccagaacagcgagggcagaggccaggccgccgaccugaagagcacccaggccgccaucgaccagaucaacggcaagcugaacagacugaucggcaagaccaacgagaaguuccaccagaucgagaaggaguucagcgagguggagggcagaauccaggaccuggagaaguacguggaggacaccaagaucgaccuguggagcuacaacgccgagcugcugguggcccuggagaaccagcacaccaucgaccugaccgacagcgagaugaacaagcuguucgagaagaccaagaagcagcugagagagaacgccgaggacaugggcaacggcugcuucaagaucuaccacaagugcgacaacgccugcaucggcagcaucagaaacggcaccuacgaccacgacguguacagagacgaggcccugaacaacagauuccagaucaagggcguggagcugaagagcggcuacaaggacuggauccuguggaucagcuucgccaucagcugcuuccugcugugcguggcccugcugggcuucaucaugugggccugccagaagggcaacaucagaugcaacaucugcaucuga

SEQ ID NO: 170095 - RNA, 1701 nt, Artificial Sequence; identical to SEQ ID NO: 170053
  derived and/or modified CDS sequence (opt4) from hemagglutinin__InfluenzaA__AGL09781

SEQ ID NO: 170096 - RNA, 1701 nt, Artificial Sequence; identical to SEQ ID NO: 169918
  derived and/or modified CDS sequence (opt4) from hemagglutinin__InfluenzaA__AGL09782

SEQ ID NO: 170097 - RNA, 1701 nt, Artificial Sequence
  derived and/or modified CDS sequence (opt4) from hemagglutinin__InfluenzaA__AGL09783
augaagaccaucaucgcccugagcuacauccugugccugguguucgcccagaagcugcccggcaacgacaacagcaccgccacccugugccugggccaccacgccgugcccaacggcaccguggugaagaccaucaccaacgacagaaucgaggugaccaacgccaccgagcuggugcagaacagcagcaucggcgagaucugcgacagcccccaccagauccuggacggcgagaacugcacccugaucgacgcccugcugggcgacccccagugcgacggcuuccagaacaagaagugggaccuguucguggagagaagcaaggccuacagcaacugcuaccccuacgacgugcccgacuacgccagccugagaagccugguggccagcagcggcacccuggaguucaacaacgagagcuucaacuggaccggcgugacccagaacggcaccagcagcgccugcaucagaagaagcaacaacagcuucuucagcagacugaacuggcugacccaccugaacuucaaguaccccgcccugaacgugaccaugcccaacaacgagcaguucgacaagcuguacaucuggggcgugcaccaccccggcaccgacaaggaccagaucuuccuguacgcccagagcagcggcagaaucaccgugagcaccaagagaagccagcaggccgugauccccaacaucggcagcagacccagaaucagaaacauccccagcagaaucagcaucuacuggaccaucgugaagcccggcgacauccugcugaucaacagcaccggcaaccugaucgcccccagaggcuacuucaagaucagaagcggcaagagcagcaucaugagaagcgacgcccccaucggcaagugcaagagcgagugcaucacccccaacggcagcauccccaacgacaagcccuuccagaacgugaacagaaucaccuacggcgccugccccagauacgugaagcagagcacccugaagcuggccaccggcaugagaaacgugcccgagaagcagaccagaggcaucuucggcgccaucgccggcuucaucgagaacggcugggagggcaugguggacggcugguacggcuucagacaccagaacagcgagggcagaggccaggccgccgaccugaagagcacccaggccgccaucgaccagaucaacggcaagcugaacagacugaucggcaagaccaacgagaaguuccaccagaucgagaaggaguucagcgagguggagggcagaacccagaaccuggagaaguacguggaggacaccaagaucgaccuguggagcuacaacgccgagcugcugguggcccuggagaaccagcacaccaucgaccugaccgacagcgagaugaacaagcuguucgagaagaccaagaagcagcugagagagaacgccgaggacaugggcaacggcugcuucaagaucuaccacaagugcgacaacgccugcaucggcagcaucagaaacggcaccuacgaccacgacguguacagagacgaggcccugaacaacagauuccagaucaagggcguggagcugaagagcggcuacaaggacuggauccuguggaucagcuucgccaucagcugcuuccugcugugcguggugcugcugggcuucaucaugugggccugccagaagggcaacaucagaugcaacaucugcaucuga

SEQ ID NO: 170098 - RNA, 1701 nt, Artificial Sequence; identical to SEQ ID NO: 169928
  derived and/or modified CDS sequence (opt4) from hemagglutinin__InfluenzaA__AGL09785

SEQ ID NO: 170099 - RNA, 1701 nt, Artificial Sequence
  derived and/or modified CDS sequence (opt4) from hemagglutinin__InfluenzaA__AGL09786
augaagaccaucaucgcccugagcuacauccugugccugguguucgcccagaagcugcccggcaacgacaacagcaccgccacccugugccugggccaccacgccgugcccaacggcaccaucgugaagaccaucaccaacgacagaaucgaggugaccaacgccaccgagcuggugcagaacagcagcaucggcgagaucugcgacagcccccaccagauccuggacggcgagaacugcacccugaucgacgcccugcugggcgacccccagugcgacggcuuccagaacaagaagugggaccuguucguggagagaagcaaggccuacagcaacugcuaccccuacgacgugcccgacuacgccagccugagaagccugguggccagcagcggcacccuggaguucgacaacgagagcuucaacugggccggcgugacccagaacggcaccagcagcgccugcaucagaggcagcaagagcagcuucuucagcagacugaacuggcugacccaccugaacuucaaguaccccgcccugaacgugaccaugcccaacaacgagcaguucgacaagcuguacaucuggggcgugcaccaccccggcaccgacaaggaccagaucagccuguacgcccagagcagcggcagaaucaccgugagcaccaagagaagccagcaggccgugauccccaacaucggcagcagacccagaaucagaaacauccccagcagaaucagcaucuacuggaccaucgugaagcccggcgacauccugcugaucaacagcaccggcaaccugaucgcccccagaggcuacuucaagaucagaagcggcaagagcagcaucaugagaagcgacgcccccaucggcaagugcaagagcgagugcaucacccccaacggcagcauccccaacgacaagcccuuccagaacgugaacagaaucaccuacggcgccugccccagauacgugaagcagagcacccugaagcuggccaccggcaugagaaacgugcccgagaagcagaccagaggcaucuucggcgccaucgccggcuucaucgagaacggcugggagggcaugguggacggcugguacggcuucagacaccagaacagcgagggcagaggccaggccgccgaccugaagagcacccaggccgccaucgaccagaucaacggcaagcugaacagacugaucggcaagaccaacgagaaguuccaccagaucgagaaggaguucagcgagguggagggcagaauccaggaccuggagaaguacguggaggacaccaagaucgaccuguggagcuacaacgccgagcugcugguggcccuggagaaccagcacaccaucgaccugaccgacagcgagaugaacaagcuguucgagaagaccaagaagcagcugagagagaacgccgaggacaugggcaacggcugcuucaagaucuaccacaagugcgacaacgccugcaucggcagcaucagaaacggcaccuacgaccacgacguguacagagacgaggcccugaacaacagauuccagaucaagggcguggagcugaagagcggcuacaaggacuggauccuguggaucagcuucgccaucagcugcuuccugcugugcguggcccugcugggcuucaucaugugggccugccagaagggcaacaucagaugcaacaucugcaucuga

SEQ ID NO: 170100 - RNA, 1701 nt, Artificial Sequence
  derived and/or modified CDS sequence (opt4) from hemagglutinin__InfluenzaA__AGL09787
augaaggccauccugguggugcugcuguacaccuucgccaccgccaacgccgacacccugugcaucggcuaccacgccaacaacagcaccgacaccguggacaccgugcuggagaagaacgugaccgugacccacagcgugaaccugcuggaggacaagcacaacggcaagcugugcaagcugagaggcguggccccccugcaccugggcaagugcaacaucgccggcuggauccugggcaaccccgagugcgagagccugagcaccgccagcagcuggagcuacaucguggagaccagcagcagcgacaacggcaccugcuaccccggcgacuucaucaacuacgaggagcugagagagcagcugagcagcgugagcagcuucgagagauucgagaucuuccccaagaccagcagcuggcccaaccacgacagcaacaagggcgugaccgccgccugcccccacgccggcgccaagagcuucuacaagaaccugaucuggcuggugaagaagggcaacagcuaccccaagcugagccagagcuacaucaacgacaagggcaaggaggugcuggugcuguggggcauccaccaccccagcaccaccgccgaccagcagagccuguaccagaacgccgacgccuacguguucgugggcaccagcagauacagcaagaaguucaagcccgagaucgccaucagacccaaggugagagaccaggagggcagaaugaacuacuacuggacccugguggagcccggcgacaagaucaccuucgaggccaccggcaaccugguggugcccagauacgccuucaccauggagagaaacgccggcagcggcaucaucaucagcgacacccccgugcacgacugcaacaccaccugccagacccccgagggcgccaucaacaccagccugcccuuccagaacauccaccccaucaccaucggcaagugccccaaguacgugaagagcaccaagcugagacuggccaccggccugagaaacgugcccagcauccagagcagaggccuguucggcgccaucgccggcuucaucgagggcggcuggaccggcaugguggacggcugguacggcuaccaccaccagaacgagcagggcagcggcuacgccgccgaccugaagagcacccagaacgccaucgacaagaucaccaacaaggugaacagcgugaucgagaagaugaacacccaguucaccgccgugggcaaggaguucaaccaccuggagaagagaaucgagaaccugaacaagaagguggacgacggcuuccuggacaucuggaccuacaacgccgagcugcuggugcugcuggagaacgagagaacccuggacuaccacgacagcaacgugaagaaccuguacgagaaggugagaaaccagcugaagaacaacgccaaggagaucggcaacggcugcuucgaguucuaccacaagugcgacaacaccugcauggagagcgugaagaacggcaccuacgacuaccccaaguacagcgaggaggccaagcugaacagagagaagaucgacggcgugaagcuggagagcaccagaaucuaccagauccuggccaucuacagcaccguggccagcagccuggugcugguggugagccugggcgccaucagcuucuggaugugcagcaacggcagccugcagugcagaaucugcaucuga

SEQ ID NO: 170101 - RNA, 1701 nt, Artificial Sequence; identical to SEQ ID NO: 170100
  derived and/or modified CDS sequence (opt4) from hemagglutinin__InfluenzaA__AGL09788

SEQ ID NO: 170102 - RNA, 1701 nt, Artificial Sequence; identical to SEQ ID NO: 170100
  derived and/or modified CDS sequence (opt4) from hemagglutinin__InfluenzaA__AGL09789

SEQ ID NO: 170103 - RNA, 1701 nt, Artificial Sequence; identical to SEQ ID NO: 170054
  derived and/or modified CDS sequence (opt4) from hemagglutinin__InfluenzaA__AGL09790

SEQ ID NO: 170104 - RNA, 1701 nt, Artificial Sequence
  derived and/or modified CDS sequence (opt4) from hemagglutinin__InfluenzaA__AGL09791
augaagaccaucaucgcccugagcuacauccugugccugguguucgcccagaagcugcccggcaacgacaacagcaccgccacccugugccugggccaccacgccgugcccaacggcaccaucgugaagaccaucaccaacgacagaaucgaggugaccaacgccaccgagcuggugcagaacagcagcaucggcgagaucugcgacagcccccaccagauccuggacggcgagaacugcacccugaucgacgcccugcugggcgacccccagugcgacggcuuccagaacaagaagugggaccuguucguggagagaagcaaggccuacagcaacugcuaccccuacgacgugcccgacuacgccagccugagaagccugguggccagcagcggcacccuggaguucaacaacgagagcuucaacuggaccggcgugacccagaacggcaccagcagcgccugcaucagaagaagcaacagcagcuucuucagcagacugaacuggcugacccaccugaacuucaaguaccccgcccugaacaugaccaugcccaacaacgagcaguucgacaagcuguacaucuggggcgugcaccaccccggcaccgacaaggaccagaucagccuguacgcccagagcagcggcagaaucaccgugagcaccaagagaagccagcaggccgugauccccaacaucggcagcagacccagaaucagaaacauccccagcagaaucagcaucuacuggaccaucgugaagcccggcgacauccugcugaucaacagcaccggcaaccugaucgcccccagaggcuacuucaagaucagaagcggcaagagcagcaucaugagaagcgacgcccccaucggcaagugcaagagcgagugcaucacccccaacggcagcauccccaacgacaagcccuuccagaacgugaacagaaucaccuacggcgccugccccagauacgugaagcagagcacccugaagcuggccaccggcaugagaaacgugcccgagaagcagaccagaggcaucuucggcgccaucgccggcuucaucgagaacggcugggagggcaugguggacggcugguacggcuucagacaccagaacagcgagggcagaggccaggccgccgaccugaagagcacccaggccgccaucgaccagaucaacggcaagcugaacagacugaucggcaagaccaacgagaaguuccaccagaucgagaaggaguucagcgagguggagggcagaauccaggaccuggagaaguacguggaggacaccaagaucgaccuguggagcuacaacgccgagcugcugguggcccuggagaaccagcacaccaucgaccugaccgacagcgagaugaacaagcuguucgagaagaccaagaagcagcugagagagaacgccgaggacaugggcaacggcugcuucaagaucuaccacaagugcgacaacgccugcaucggcagcaucagaaacggcaccuacgaccacaacguguacagagacgaggcccugaacaacagauuccagaucaagggcguggagcugaagagcggcuacaaggacuggauccuguggaucagcuucgccaucagcugcuuccugcugugcguggcccugcugggcuucaucaugugggccugccagaagggcaacaucagaugcaacaucugcaucuga

SEQ ID NO: 170105 - RNA, 1701 nt, Artificial Sequence; identical to SEQ ID NO: 170054
  derived and/or modified CDS sequence (opt4) from hemagglutinin__InfluenzaA__AGL09792

SEQ ID NO: 170106 - RNA, 1701 nt, Artificial Sequence
  derived and/or modified CDS sequence (opt4) from hemagglutinin__InfluenzaA__AGL09794
augaagaccaucaucgcccugagcuacauccugugccugguguucgcccagaagcugcccggcaacgacaacagcaccgccacccugugccugggccaccacgccgugcccaacggcaccaucgugaagaccaucaccaacgacagaaucgaggugaccaacgccaccgagcuggugcagaacagcagcaucggcgagaucugcgacagcccccaccagauccuggacggcgagaacugcacccugaucgacgcccugcugggcgacccccagugcgacggcuuccagaacaagaagugggaccuguucguggagagaagcaaggccuacagcaacugcuaccccuacgacgugcccgacuacgccagccugagaagccugguggccagcagcggcacccuggaguucaacaacgagagcuucaacugggccggcgugacccagaacggcaccagcagcgccugcaucagaggcagcaacagcagcuucuucagcagacugaacuggcugacccaccugaacuucaaguaccccgcccugaacgugaccaugcccaacaacgagcaguucgacaagcuguacaucuggggcgugcaccaccccggcaccgacaaggaccagaucuuccuguacgcccagagcagcggcagaaucaccgugagcaccaagagaagccagcaggccgugauccccaacaucggcagcagacccagaaucagaaacauccccagcagaaucagcaucuacuggaccaucgugaagcccggcgacauccugcugaucaacagcaccggcaaccugaucgcccccagaggcuacuucaagaucagaagcggcaagagcagcaucaugagaagcgacacccccaucggcaagugcaagagcgagugcaucacccccaacggcagcauccccaacgacaagcccuuccagaacgugaacagaaucaccuacggcgccugccccagauacgugaagcagagcacccugaagcuggccaccggcaugagaaacgugcccgagaagcagaccagaggcaucuucggcgccaucgccggcuucaucgagaacggcugggagggcaugguggacggcugguacggcuucagacaccagaacagcgagggcagaggccaggccgccgaccugaagagcacccaggccgccaucgaccagaucaacggcaagcugaacagacugaucggcaagaccaacgagaaguuccaccagaucgagaaggaguucagcgagguggagggcagaauccaggaccuggagaaguacguggaggacaccaagaucgaccuguggagcuacaacgccgagcugcugguggcccuggagaaccagcacaccaucgaccugaccgacagcgagaugaacaagcuguucgagaagaccaagaagcagcugagagagaacgccgaggacaugggcaacggcugcuucaagaucuaccacaagugcgacaacgccugcaucggcagcaucagaaacggcaccuacgaccacgacguguacagagacgaggcccugaacaacagauuccagaucaagggcguggagcugaagagcggcuacaaggacuggauccuguggaucagcuucgccaucagcugcuuccugcugugcguggcccugcugggcuucaucaugugggccugccagaagggcaacaucagaugcaacaucugcaucuga

SEQ ID NO: 170107 - RNA, 1701 nt, Artificial Sequence; identical to SEQ ID NO: 170054
  derived and/or modified CDS sequence (opt4) from hemagglutinin__InfluenzaA__AGL09795

SEQ ID NO: 170108 - RNA, 1701 nt, Artificial Sequence
  derived and/or modified CDS sequence (opt4) from hemagglutinin__InfluenzaA__AGL09797
augaagaccaucaucgcccugagcuacauccugugccugguguucagccagaagcugcccggcaacgacaacagcaccgccacccugugccugggccaccacgccgugcccaacggcaccaucgugaagaccaucaccaacgacagaaucgaggugaccaacgccaccgagcuggugcagaacagcagcaucggcgagaucugcgacagcccccaccagauccuggacggcgagaacugcacccugaucgacgcccugcugggcgacccccagugcgacggcuuccagaacaagaagugggaccuguucguggagagaagcaaggccuacagcaacugcuaccccuacgacgugcccgacuacgccagccugagaagccugguggccagcagcggcacccuggaguucaacaacgagagcuucaacugggccggcgugacccagaacggcaccagcagcgccugcaucagaggcagcaacagcagcuucuucagcagacugaacuggcugacccaccugaacuucaaguaccccgcccugaacgugaccaugcccaacaacgagcaguucgacaagcuguacaucuggggcgugcaccaccccggcaccgacaaggaccagaucuuccuguacgcccagagcagcggcagaaucaccgugagcaccaagagaagccagcaggccgugauccccaacaucggcagcagacccagaaucagaaacauccccagcagaaucagcaucuacuggaccaucgugaagcccggcgacauccugcugaucaacagcaccggcaaccugaucgcccccagaggcuacuucaagaucagaagcggcaagagcagcaucaugagaagcgacgcccccaucggcaagugcaagagcgagugcaucacccccaacggcagcauccccaacgacaagcccuuccagaacgugaacagaaucaccuacggcgccugccccagauacgugaagcagagcacccugaagcuggccaccggcaugagaaacgugcccgagaagcagaccagaggcaucuucggcgccaucgccggcuucaucgagaacggcugggagggcaugguggacggcugguacggcuucagacaccagaacagcgagggcagaggccaggccgccgaccugaagagcacccaggccgccaucgaccagaucaacggcaagcugaacagacugaucggcaagaccaacgagaaguuccaccagaucgagaaggaguucagcgagguggagggcagaauccaggaccuggagaaguacguggaggacaccaagaucgaccuguggagcuacaacgccgagcugcugguggcccuggagaaccagcacaccaucgaccugaccgacagcgagaugaacaagcuguucgagaagaccaagaagcagcugagagagaacgccgaggacaugggcaacggcugcuucaagaucuaccacaagugcgacaacgccugcaucggcagcaucagaaacggcaccuacgaccacgacguguacagagacgaggcccugaacaacagauuccagaucaagggcguggagcugaagagcggcuacaaggacuggauccuguggaucagcuucgccaucagcugcuuccugcugugcguggcccugcugggcuucaucaugugggccugccagaagggcaacaucagaugcaacaucugcaucuga

SEQ ID NO: 170109 - RNA, 1701 nt, Artificial Sequence
  derived and/or modified CDS sequence (opt4) from hemagglutinin__InfluenzaA__AGL09798
augaagaccaucaucgcccugagcuacauccugugccugguguucgcccagaagcugcccggcaacgacaacagcaccgccacccugugccugggccaccacgccgugcccaacggcaccaucgugaagaccaucaccaacgacagaaucgaggugaccaacgccaccgagcuggugcagaacagcagcaucggcgagaucugcgacagcccccaccagauccuggacggcgagaacugcacccugaucgacgcccugcugggcgacccccagugcgacggcuuccagaacaagaagugggaccuguucguggagagaagcaaggccuacagcaacugcuaccccuacgacgugcccgacuacgccagccugagaagccugguggccagcagcggcacccuggaguucaacaacgagagcuucaacugggccggcgugacccagaacggcaccagcagcgccugcaucagaggcagcaacagcagcuucuucagcagacugaacuggcugacccaccugaacuucaaguaccccgcccugaacgugaccaugcccaacaacgagcaguucgacaagcuguacaucuggggcgugcaccaccccggcaccgacaaggaccagaucuuccuguacgcccagagcagcggcagaaucaccgugagcaccaagagaagccagcaggccgugauccccaacaucggcagcagacccagaaucagaaacauccccagcagaaucagcaucuacuggaccaucgugaagcccggcgacauccugcugaucaacagcaccggcaaccugaucgcccccagaggcuacuucaagaucagaagcggcaagagcagcaucaugagaagcgacgcccccaucggcaagugcaagagcgagugcaucacccccaacggcagcauccccaacgacaagcccuuccagaacgugaacagaaucaccuacggcgccugccccagauacgugaagcagagcacccugaagcuggccaccggcaugagaaacgugcccgagaagcagaccagaggcaucuucggcgccaucgccggcuucaucgagaacggcugggagggcaugguggacggcugguacggcuucagacaccagaacuucgagggcagaggccaggccgccgaccugaagagcacccaggccgccaucgaccagaucaacggcaagcugaacagacugaucggcaagaccaacgagaaguuccaccagaucgagaaggaguucagcgagguggagggcagaauccaggaccuggagaaguacguggaggacaccaagaucgaccuguggagcuacaacgccgagcugcugguggcccuggagaaccagcacaccaucgaccugaccgacagcgagaugaacaagcuguucgagaagaccaagaagcagcugagagagaacgccgaggacaugggcaacggcugcuucaagaucuaccacaagugcgacaacgccugcaucggcagcaucagaaacggcaccuacgaccacuacguguacagagacgaggcccugaacaacagauuccagaucaagggcguggagcugaagagcggcuacaaggacuggauccuguggaucagcuucgccaucagcugcuuccugcugugcguggcccugcugggcuucaucaugugggccugccagaagggcaacaucagaugcaacaucugcaucuga

SEQ ID NO: 170110 - RNA, 1701 nt, Artificial Sequence; identical to SEQ ID NO: 170108
  derived and/or modified CDS sequence (opt4) from hemagglutinin__InfluenzaA__AGL09799

SEQ ID NO: 170111 - RNA, 1701 nt, Artificial Sequence; identical to SEQ ID NO: 170054
  derived and/or modified CDS sequence (opt4) from hemagglutinin__InfluenzaA__AGL09800

SEQ ID NO: 170112 - RNA, 1701 nt, Artificial Sequence; identical to SEQ ID NO: 169918
  derived and/or modified CDS sequence (opt4) from hemagglutinin__InfluenzaA__AGL09801

SEQ ID NO: 170113 - RNA, 1701 nt, Artificial Sequence; identical to SEQ ID NO: 169918
  derived and/or modified CDS sequence (opt4) from hemagglutinin__InfluenzaA__AGL09802

SEQ ID NO: 170114 - RNA, 1701 nt, Artificial Sequence
  derived and/or modified CDS sequence (opt4) from hemagglutinin__InfluenzaA__AGL09803
augaagaccaucaucgcccugagcuacauccugugccugguguucgcccagaagcugcccggcaacgacaacagcaccgccacccugugccugggccaccacgccgugcccaacggcaccaucgugaagaccaucaccaacgacagaaucgaggugaccaacgccaccgagcuggugcagaacagcagcaucggcgagaucugcgacagcccccaccagauccuggacggcgagaacugcacccugaucgacgcccugcugggcgacccccagugcgacggcuuccagaacaagaagugggaccuguucguggagagaagcaaggccuacagcaacugcuaccccuacgacgugcccgacuacgccagccugagaagccugguggccagcagcggcacccuggaguucaacaacgagagcuucaacuggaccggcgugacccagaacggcaccagcagcgccugcaucagaagaagcaacagcagcuucuucagcagacugaacuggcugacccaccugaacuucaaguaccccgcccugaacgugaccaugcccaacaacgagcaguucgacaagcuguacaucuggggcgugcaccaccccggcaccgacaaggaccagaucuuccuguacgcccagagcagcggcagaaucaccgugagcaccaagagaagccagcaggccgugauccccaacaucggcagcagacccagaaucagaaacauccccagcagaaucagcaucuacuggaccaucgugaagcccggcgacauccugcugaucaacagcaccggcaaccugaucgcccccagaggcuacuucaagaucagaagcggcaagagcagcaucaugagaagcgacgcccccaucggcaagugcaagagcgagugcaucacccccaacggcagcauccccaacgacaagcccuuccagaacgugaacagaaucaccuacggcgccugccccagauacgugaagcagagaacccugaagcuggccaccggcaugagaaacgugcccgagaagcagaccagaggcaucuucggcgccaucgccggcuucaucgagaacggcugggagggcaugguggacggcugguacggcuucagacaccagaacagcgagggcagaggccaggccgccgaccugaagagcacccaggccgccaucgaccagaucaacggcaagcugaacagacugaucggcaagaccaacgagaaguuccaccagaucgagaaggaguucagcgagguggagggcagaauccaggaccuggagaaguacguggaggacaccaagaucgaccuguggagcuacaacgccgagcugcugguggcccuggagaaccagcacaccaucgaccugaccgacagcgagaugaacaagcuguucgagaagaccaagaagcagcugagagagaacgccgaggacaugggcaacggcugcuucaagaucuaccacaagugcgacaacgccugcaucggcagcaucagaaacggcaccuacgaccacgacguguacagagacgaggcccugaacaacagauuccagaucaagggcguggagcugaagagcggcuacaaggacuggauccuguggaucagcuucgccaucagcugcuuccugcugugcguggcccugcugggcuucaucaugugggccugccagaagggcaacaucagaugcaacaucugcaucuga

SEQ ID NO: 170115 - RNA, 1701 nt, Artificial Sequence; identical to SEQ ID NO: 169951
  derived and/or modified CDS sequence (opt4) from hemagglutinin__InfluenzaA__AGL09804

SEQ ID NO: 170116 - RNA, 1701 nt, Artificial Sequence; identical to SEQ ID NO: 170057
  derived and/or modified CDS sequence (opt4) from hemagglutinin__InfluenzaA__AGL09805

SEQ ID NO: 170117 - RNA, 1701 nt, Artificial Sequence; identical to SEQ ID NO: 170086
  derived and/or modified CDS sequence (opt4) from hemagglutinin__InfluenzaA__AGL09806

SEQ ID NO: 170118 - RNA, 1701 nt, Artificial Sequence; identical to SEQ ID NO: 170057
  derived and/or modified CDS sequence (opt4) from hemagglutinin__InfluenzaA__AGL09807

SEQ ID NO: 170119 - RNA, 1701 nt, Artificial Sequence
  derived and/or modified CDS sequence (opt4) from hemagglutinin__InfluenzaA__AGL09808
augaagaccaucaucgcccugagcuacauccugugccugguguucgcccagaagcugcccggcaacgacaacagcaccgccacccugugccugggccaccacgccgugcccaacggcaccaucgugaagaccaucaccaacgaccagaucgaggugaccaacgccaccgagcuggugcagaacagcagcaucggcgagaucugcgacagcccccaccagauccuggacggcgagaacugcacccugaucgacgcccugcugggcgacccccagugcgacggcuuccagaacaagaagugggaccuguucguggagagaagcaaggccuacagcaacugcuaccccuacgacgugcccgacuacgccagccugagaagccugguggccagcagcggcacccuggaguucaacaacgagagcuucaacugggccggcgugacccagaacggcaccagcagcgccugcaucagaggcagcaacagcagcuucuucagcagacugaacuggcugacccaccugaacuucaaguaccccgcccugaacgugaccaugcccaacaacgagcaguucgacaagcuguacaucuggggcgugcaccaccccggcaccgacaaggaccagaucuuccuguacgcccagagcagcggcagaaucaccgugagcaccaagagaagccagcaggccgugauccccaacgugggcagcagacccagaaucagaaacauccccagcagaaucagcaucuacuggaccaucgugaagcccggcgacauccugcugaucaacagcaccggcaaccugaucgcccccagaggcuacuucaagaucagaagcggcaagagcagcaucaugagaagcgacgcccccaucggcaagugcaagagcgagugcaucacccccaacggcagcauccccaacgacaagcccuuccagaacgugaacagaaucaccuacggcgccugccccagauacgugaagcagagcacccugaagcuggccaccggcaugagaaacgugcccgagaagcagaccagaggcaucuucggcgccaucgccggcuucaucgagaacggcugggagggcaugguggacggcugguacggcuucagacaccagaacagcgagggcagaggccaggccgccgaccugaagagcacccaggccgccaucgaccagaucaacggcaagcugaacagacugaucggcaagaccaacgagaaguuccaccagaucgagaaggaguucagcgagguggagggcagaauccaggaccuggagaaguacguggaggacaccaagaucgaccuguggagcuacaacgccgagcugcugguggcccuggagaaccagcacaccaucgaccugaccgacagcgagaugaacaagcuguucgagaagaccaagaagcagcugagagagaacgccgaggacaugggcaacggcugcuucaagaucuaccacaagugcgacaacgccugcaucggcagcaucagaaacggcaccuacgaccacgacguguacagagacgaggcccugaacaacagauuccagaucaagggcguggagcugaagagcggcuacaaggacuggauccuguggaucagcuucgccaucagcugcuuccugcugugcguggcccugcugggcuucaucaugugggccugccagaagggcaacaucagaugcaacaucugcaucuga

SEQ ID NO: 170120 - RNA, 1701 nt, Artificial Sequence
  derived and/or modified CDS sequence (opt4) from hemagglutinin__InfluenzaA__AGL09809
augaaggccauccugguggugaugcuguacaccuucgccaccgccaacgccgacacccugugcaucggcuaccacgccaacaacagcaccgacaccguggacaccgugcuggagaagaacgugaccgugacccacagcgugaaccugcuggaggacaagcacaacggcaagcugugcaagcugagaggcguggccccccugcaccugggcaagugcaacaucgccggcuggauccugggcaaccccgagugcgagagccugagcaccgccagcagcuggagcuacaucguggagaccagcggcagcgacaacggcaccugcuaccccggcgacuucaucgacuacgaggagcugagagagcagcugagcagcgugagcagcuucgagagauucgagaucuuccccaagaccagcagcuggcccaaccacgacagcaacaagggcgugaccgccgccugcccccacgccggcgccaagggcuucuacaagaaccugaucuggcuggugaagaagggcaacagcuaccccaagcugagcaucagcuacaucaacgacaagggcaaggaggugcuggugcuguggggcauccaccaccccagcaccaccgccgaccagcagagccuguaccagaacgccgacaccuacguguucgugggcaccagcagauacagcaagaaguucaagcccgagaucgccaucagacccaaggugagagaccaggagggcagaaugaacuacuacuggacccugguggagcccggcgacaagaucaccuucgaggccaccggcaaccugguggugcccagauacgccuucgccauggagagaaacgccggcagcggcaucaucaucagcgacacccccgugcacgacugcaacaccaccugccagacccccaagggcgccaucaacaccagccugcccuuccagaacauccaccccaucaccaucggcaagugccccaaguacgugaagagcaccaagcugagacuggccaccggccugagaaacgugcccagcauccagagcagaggccuguucggcgccaucgccggcuucaucgagggcggcuggaccggcaugguggacggcugguacggcuaccaccaccagaacgagcagggcagcggcuacgccgccgaccugaagagcacccagaacgccaucgacaagaucaccaacaaggugaacagcgugaucgagaagaugaacacccaguucaccgccgugggcaaggaguucaaccaccuggagaagagaaucgagaaccugaacaagaagguggacgacggcuuccuggacaucuggaccuacaacgccgagcugcuggugcugcuggagaacgagagaacccuggacuaccacgacagcaacgugaagaaccuguacgagaaggugagaaaccagcugaagaacaacgccaaggagaucggcaacggcugcuucgaguucuaccacaagugcgacaacaccugcauggagagcgugaagaacggcaccuacgacuaccccaaguacagcgaggaggccaagcugaacagagaggagaucgacggcgugaagcuggagagcaccagaaucuaccagauccuggccaucuacagcaccgccgccagcagccuggugcugguggugagccugggcgccaucagcuucuggaugugcagcaacggcagccugcagugcagaaucugcaucuga

SEQ ID NO: 170121 - RNA, 1701 nt, Artificial Sequence
  derived and/or modified CDS sequence (opt4) from hemagglutinin__InfluenzaA__AGL09810
augaagaccaucaucgcccugagcuacauccugugccugguguucgcccagaagcugcccggcaacgacaacagcaccgccacccugugccugggccaccacgccgugcccaacggcaccaucgugaagaccaucaccaacgacagaaucgaggugaccaacgccaccgagcuggugcagaacagcagcaucggcgagaucugcgacagcccccaccagauccuggacggcgagaacugcacccugaucgacgcccugcugggcgacccccagugcgacggcuuccagaacaagaagugggaccuguucguggagagaagcaaggccuacagcaacugcuaccccuacgacgugcccgacuacgccagccugagaagccugguggccagcagcggcacccuggaguucagcaacgagagcuucaacuggaccggcgugacccagaacggcaccagcagcgccugcaucagaagaagcaacagcagcuucuucagcagacugaacuggcugacccaccugaacuucaaguaccccgcccugaacgugaccaugcccaacaacgagcaguucgacaagcuguacaucuggggcgugcaccaccccggcaccgacaaggaccagaucuuccuguacgcccagagcagcggcagaaucaccgugagcaccaagagaagccagcaggccgugauccccaacaucggcagcagacccagaaucagaaacauccccagcagaaucagcaucuacuggaccaucgugaagcccggcgacauccugcugaucaacagcaccggcaaccugaucgcccccagaggcuacuucaagaucagaagcggcaagagcagcaucaugagaagcgacgcccccaucggcaagugcaagagcgagugcaucacccccaacggcagcauccccaacgacaagcccuuccagaacgugaacagaaucaccuacggcaccugccccagauacgugaagcagagcacccugaagcuggccaccggcaugagaaacgugcccgagaagcagaccagaggcaucuucggcgccaucgccggcuucaucgagaacggcugggagggcaugguggacggcugguacggcuucagacaccagaacagcgagggcagaggccaggccgccgaccugaagagcacccaggccgccaucgaccagaucaacggcaagcugaacagacugaucggcaagaccaacgagaaguuccaccagaucgagaaggaguucagcgagguggagggcagaauccaggaccuggagaaguacguggaggacaccaagaucgaccuguggagcuacaacgccgagcugcugguggcccuggagaaccagcacaccaucgaccugaccgacagcgagaugaacaagcuguucgagaagaccaagaagcagcugagagagaacgccgaggacaugggcaacggcugcuucaagaucuaccacaagugcgacaacgccugcaugggcagcaucagaaacggcaccuacgaccacgacguguacagagacgaggcccugaacaacagauuccagaucaagggcguggagcugaagagcggcuacaaggacuggauccuguggaucagcuucgccaucagcugcuuccugcugugcguggcccugcugggcuucaucaugugggccugccagaagggcaacaucagaugcaacaucugcaucuga

SEQ ID NO: 170122 - RNA, 1701 nt, Artificial Sequence; identical to SEQ ID NO: 169918
  derived and/or modified CDS sequence (opt4) from hemagglutinin__InfluenzaA__AGL09811

SEQ ID NO: 170123 - RNA, 1701 nt, Artificial Sequence
  derived and/or modified CDS sequence (opt4) from hemagglutinin__InfluenzaA__AGL09812
augaagaccaucaucgcccugagcuacauccugugccugguguucgcccagaagcugcccggcaacgacaacagcaccgccacccugugccugggccaccacgccgugcccaacggcaccaucgugaagaccaucaccaacgacagaaucgaggugaccaacgccaccgagcuggugcagaacagcagcaucggcgagaucugcgacagcccccaccagauccuggacggcgagaacugcacccugaucgacgcccugcugggcgacccccagugcgacggcuuccaggacaagaagugggaccuguucguggagagaagcaaggccuacagcaacugcuaccccuacgacgugcccgacuacgccagccugagaagccugguggccagcagcggcacccuggaguucaacaacgagagcuucaacugggccggcgugacccagaacggcaccagcagcgccugcaucagaggcagcaacagcagcuucuucagcagacugaacuggcugacccaccugaacuucaaguaccccgcccugaacgugaccaugcccaacaacgagcaguucgacaagcuguacaucuggggcgugcaccaccccggcaccgacaaggaccagaucuuccuguacgcccagagcagcggcagaaucaccgugagcaccaagagaagccagcaggccgugauccccaacaucggcagcagacccagaaucagaaacauccccagcagaaucagcaucuacuggaccaucgugaagcccggcgacauccugcugaucaacagcaccggcaaccugaucgcccccagaggcuacuucaagaucagaagcggcaagagcagcaucaugagaagcgacgcccccaucggcaagugcaagagcgagugcaucacccccaacggcagcauccccaacgacaagcccuuccagaacgugaacagaaucaccuacggcgccugccccagauacgugaagcagagcacccugaagcuggccaccggcaugagaaacgugcccgagaagcagaccagaggcaucuucggcgccaucgccggcuucaucgagaacggcugggagggcaugguggacggcugguacggcuucagacaccagaacagcgagggcagaggccaggccgccgaccugaagagcacccaggccgccaucgaccagaucaacggcaagcugaacagacugaucggcaagaccaacgagaaguuccaccagaucgagaaggaguucagcgagguggagggcagaauccaggaccuggagaaguacguggaggacaccaagaucgaccuguggagcuacaacgccgagcugcugguggcccuggagaaccagcacaccaucgaccugaccgacagcgagaugaacaagcuguucgagaagaccaagaagcagcugagagagaacgccgaggacaugggcaacggcugcuucaagaucuaccacaagugcgacaacgccugcaucggcagcaucagaaacggcaccuacgaccacgacguguacagagacgaggcccugaacaacagauuccagaucaagggcguggagcugaagagcggcuacaaggacuggauccuguggaucagcuucgccaucagcugcuuccugcugugcguggcccugcugggcuucaucaugugggccugccagaagggcaacaucagaugcaacaucugcaucuga

SEQ ID NO: 170124 - RNA, 1701 nt, Artificial Sequence; identical to SEQ ID NO: 169895
  derived and/or modified CDS sequence (opt4) from hemagglutinin__InfluenzaA__AGL09813

SEQ ID NO: 170125 - RNA, 1701 nt, Artificial Sequence; identical to SEQ ID NO: 169943
  derived and/or modified CDS sequence (opt4) from hemagglutinin__InfluenzaA__AGL09814

SEQ ID NO: 170126 - RNA, 1701 nt, Artificial Sequence
  derived and/or modified CDS sequence (opt4) from hemagglutinin__InfluenzaA__AGL09815
augaagaccaucaucgcccugagcuacauccugugccugguguucgcccagaagcugcccggcaacgacaacagcaccgccacccugugccugggccaccacgccgugcccaacggcaccaucgugaagaccaucaccaacgacagaaucgaggugaccaacgccaccgagcuggugcagaacagcagcaucggcgagaucugcgacagcccccaccagauccuggacggcgagaacugcacccugaucgacgcccugcugggcgacccccagugcgacggcuuccagaacaagaagugggaccuguucguggagagaagcaaggccuacagcaacugcuaccccuacgacgugcccgacuacgccagccugagaagccugguggccagcagcggcacccuggaguucaacaacgagagcuucaacuggaccggcgugacccagaacggcaccagcagcgccugcaucagaagaagcaacagcagcuucuucagcagacugaacuggcugacccaccugaacuucaaguaccccgcccugaacgugaccaugcccaacaacgagcaguucgacaagcuguacaucuggggcgugcaccaccccggcaccgacaaggaccagaucuuccuguacgcccagagcagcggcagaaucaccgugagcaccaagagaagccagcaggccgugauccccaacaucggcagcagacccagaaucagaagcauccccagcagaaucagcaucuacuggaccaucgugaagcccggcgacauccugcugaucaacagcaccggcaaccugaucgcccccagaggcuacuucaagaucagaagcggcaagagcagcaucaugagaagcgacgcccccaucggcaagugcaagagcgagugcaucacccccaacggcagcauccccaacgacaagcccuuccagaacgugaacagaaucaccuacggcgccugccccagauacgugaagcagagcacccugaagcuggccaccggcaugagaaacgugcccgagaagcagaccagaggcaucuucggcgccaucgccggcuucaucgagaacggcugggagggcaugguggacggcugguacggcuucagacaccagaacagcgagggcagaggccaggccgccgaccugaagagcacccaggccgccaucgaccagaucaacggcaagcugaacagacugaucggcaagaccaacgagaaguuccaccagaucgagaaggaguucagcgagguggagggcagaauccaggaccuggagaaguacguggaggacaccaagaucgaccuguggagcuacaacgccgagcugcugguggcccuggagaaccagcacaccaucgaccugaccgacagcgagaugaacaagcuguucgagaagaccaagaagcagcugagagagaacgccgaggacaugggcaacggcugcuucaagaucuaccacaagugcgacaacgccugcaucggcagcaucagaaacggcaccuacgaccacgacguguacagagacgaggcccugaacaacagauuccagaucaagggcguggagcugaagagcggcuacaaggacuggauccuguggaucagcuucgccaucagcugcuuccugcugugcguggcccugcugggcuucaucaugugggccugccagaagggcaacaucagaugcaacaucugcaucuga

SEQ ID NO: 170127 - RNA, 1701 nt, Artificial Sequence; identical to SEQ ID NO: 169943
  derived and/or modified CDS sequence (opt4) from hemagglutinin__InfluenzaA__AGL09816

SEQ ID NO: 170128 - RNA, 1701 nt, Artificial Sequence
  derived and/or modified CDS sequence (opt4) from hemagglutinin__InfluenzaA__AGL09817
augaagaccaucaucgcccugagcuacauccugugccugguguucgcccaggagcugcccggcaacgacgacagcaccgccacccugugccugggccaccacgccgugcccaacggcaccaucgugaagaccaucaccaacgaccagaucgaggugaccaacgccaccgagcuggugcagagcagcagcaccggcgagaucugcaacagcccccaccagauccuggacggcgagaacugcacccugaucgacgcccugcugggcgacccccagugcgacggcuuccagaacaagaagugggaccuguucguggagagaagcaaggcccacagcaacugcuaccccuacgacgugcccgacuacgccagccugagaagccugguggccagcagcggcacccuggaguucaacagcgagagcuucaacuggaccggcgugacccagaacggcaccagcagcgccugcaucagaagaagcaacaacagcuucuucagcagacugaacuggcugacccaccugaacuucaaguaccccgcccugaacgugaccaugcccaacaacgagcaguucgacaagcuguacaucuggggcgugcaccaccccggcaccgacaaggaccagaucuuccuguacgcccaggccagcggcagaaucaccgugagcaccaagagaagccagcaggccgugauccccaacaucggcagcagacccagagugagaaacauccccagcagagugagcaucuacuggaccaucgugaagcccggcgacauccugcugaucaacagcaccggcaaccugaucgcccccagaggcuacuucaagaucagaagcggcaagagcagcaucaugagaagcgacgcccccaucggcaagugcaacagcgccugcaucacccccaacggcagcauccccaacgacaagcccuuccagaacgugaacagaaucaccuacggcgccugccccagauacgugaagcagaacacccugaagcuggccaccggcaugagaaacgugcccgagaagcagaccagaggcaucuucggcgccaucgccggcuucaucgagaacggcugggagggcaugguggacggcugguacggcuucagacaccagaacagcgagggcagaggccaggccgccgaccugaagagcacccaggccgccaucgaccagaucaacggcaagcugaacagacugaucggcaagaccaacgagaaguuccaccagaucgagaaggaguucagcgagguggagggcagaauccaggaccuggagaaguacguggaggacaccaagaucgaccuguggagcuacaacgccgagcugcugguggcccuggagaaccagcacaccaucgaccugaccgacagcgagaugaacaagcuguucgagaagaccaagaagcagcugagagagaacgccgaggacaugggcaacggcugcuucaagaucuaccacaagugcgacaacgccugcaucggcagcaucagaaacggcaccuacgaccacgacguguacagagacgaggcccugaacaacagauuccagaucaagggcguggagcugaagagcggcuacaaggacuggauccuguggaucagcuucgccaucagcugcuuccugcugugcguggcccugcugggcuucaucaugugggccugccagaagggcaacaucagaugcaacaucugcaucuga

SEQ ID NO: 170129 - RNA, 1701 nt, Artificial Sequence; identical to SEQ ID NO: 169943
  derived and/or modified CDS sequence (opt4) from hemagglutinin__InfluenzaA__AGL09818

SEQ ID NO: 170130 - RNA, 1701 nt, Artificial Sequence; identical to SEQ ID NO: 170054
  derived and/or modified CDS sequence (opt4) from hemagglutinin__InfluenzaA__AGL09819

SEQ ID NO: 170131 - RNA, 1701 nt, Artificial Sequence
  derived and/or modified CDS sequence (opt4) from hemagglutinin__InfluenzaA__AGL09820
augaagaccaucaucgcccugagcuacauccugugccugguguucgcccagaagcugcccggcaacgacaacagcaccgccacccugugccugggccaccacgccgugcccaacggcaccaucgugaagaccaucaccaacgaccagaucgaggugaccaacgccaccgagcuggugcagaacagcagcaucggcgagaucugcgacagcccccaccagauccuggacggcgagaacugcacccugaucgacgcccugcugggcgacccccagugcgacggcuuccagaacaagaagugggaccuguucguggagagaagcaaggccuacagcaacugcuaccccuacgacgugcccgacuacgccagccugagaagccugguggccagcagcggcacccuggaguucaacaacgagagcuucaacuggaccggcgugacccagaacggcaccagcagcgccugcaucagaggcagcaacagcagcuucuucagcagacugaacuggcugacccaccugaacuucaaguaccccgcccugaacgugaccaugcccaacaacgagcaguucgacaagcuguacaucuggggcgugcaccaccccggcaccgacaaggaccagaucuuccuguacgcccagagcagcggcagaaucaccgugagcaccaagagaagccagcaggccgugauccccaacaucggcagcagacccagaaucagaaacauccccagcagaaucagcaucuacuggaccaucgugaagcccggcgacauccugcugaucaacagcaccggcaaccugaucgcccccagaggcuacuucaagaucagaagcggcaagagcagcaucaugagaagcgacgcccccaucggcaagugcaagagcgagugcaucacccccaacggcagcauccccaacgacaagcccuuccagaacgugaacagaaucaccuacggcgccugccccagauacgugaagcagagcacccugaagcuggccaccggcaugagaaacgugcccgagaagcagaccagaggcaucuucggcgccaucgccggcuucaucgagaacggcugggagggcaugguggacggcugguacggcuucagacaccagaacagcgagggcagaggccaggccgccgaccugaagagcacccaggccgccaucgaccagaucaacggcaagcugaacagacugaucggcaagaccaacgagaaguuccaccagaucgagaaggaguucagcgagaucgagggcagaauccaggaccuggagaaguacguggaggacaccaagaucgaccuguggagcuacaacgccgagcugcugguggcccuggagaaccagcacaccaucgaccugaccgacagcgagaugaacaagcuguucgagaagaccaagaagcagcugagagagaacgccgaggacaugggcaacggcugcuucaagaucuaccacaagugcgacaacgccugcaucggcagcaucagaaacggcaccuacgaccacgacguguacagagacgaggcccugaacaacagauuccagaucaagggcguggagcugaagagcggcuacaaggacuggauccuguggaucagcuucgccaucagcugcuuccugcugugcguggcccugcugggcuucaucaugugggccugccagaagggcaacaucagaugcaacaucugcaucuga

SEQ ID NO: 170132 - RNA, 1701 nt, Artificial Sequence
  derived and/or modified CDS sequence (opt4) from hemagglutinin__InfluenzaA__AGL09821
augaagaccaucaucgcccugagcuacauccugugccugguguucgcccagaagcugcccggcaacgacaacagcaccgccacccugugccugggccaccacgccgugcccaacggcaccaucgugaagaccaucaccaacgacagaaucgaggugaccaacgccaccgagcuggugcagaacagcagcaucggcgagaucugcgacagcccccaccagauccuggacggcgagaacugcacccugaucgacgcccugcugggcgacccccagugcgacggcuuccagaacaagaagugggaccuguucguggagagaagcaaggccuacagcaacugcuaccccuacgacgugcccgacuacgccagccugagaagccugguggccagcagcggcacccuggaguucaacaacgagagcuucaacuggaccggcgugacccagaacggcaccagcagcgccugcaucagaagaagcaacagcagcuucuucagcagacugaacuggcugacccaccugaacuucaaguaccccgcccugaacgugaccaugcccaacaacgagcaguucgacaagcuguacaucuggggcgugcaccaccccggcaccgacaaggaccagaucuuccuguacgcccagagcagcggcagaaucaccgugagcaccaagagaagccagcaggccgugauccccaacaucggcagcagacccagaaucagaaacauccccagcagaaucagcaucuacuggaccaucgugaagcccggcgacauccugcugaucaacagcaccggcaaccugaucgcccccagaggcuacuucaagaucagaagcggcaagagcagcaucaugagaagcgacgcccccaucggcaagugcaagagcgagugcaucacccccaacggcagcauccccaacgacaagcccuuccagaacgugaacagaaucaccuacggcgccugccccagauacgugaagcagagcacccugaagcuggccaccggcaugagaaacgugcccgagaagcagaccagaggcaucuucggcgccaucgccggcuucaucgagaacggcugggagggcaugguggacggcugguacggcuucagacaccagaacagcgagggcagaggccaggccgccgaccugaagagcacccaggccgccaucgaccagaucaacggcaagcugaacagacugaucggcaagaccaacgagaaguuccaccagaucgagaaggaguucagcgagguggagggcagaauccaggaccuggagaaguacguggaggacaccaagaucgaccuguggagcuacaacgccgagcugcugguggcccuggagaaccagcacaccaucgaccugaccgacagcgagaugaacaagcuguucgagaagaccaagaagcagcugagagagaacgccgaggacaugggcaacggcugcuucaagaucuaccacaagugcgacaacgccugcaucggcagcaucagaaacggcaccuacgaccacaacguguacagagacgaggcccugaacaacagauuccagaucaagggcaucgagcugaagagcggcuacaaggacuggauccuguggaucagcuucgccaucagcugcuuccugcugugcguggcccugcugggcuucaucaugugggccugccagaagggcaacaucagaugcaacaucugcaucuga

SEQ ID NO: 170133 - RNA, 1701 nt, Artificial Sequence; identical to SEQ ID NO: 170057
  derived and/or modified CDS sequence (opt4) from hemagglutinin__InfluenzaA__AGL09822

SEQ ID NO: 170134 - RNA, 1701 nt, Artificial Sequence; identical to SEQ ID NO: 170100
  derived and/or modified CDS sequence (opt4) from hemagglutinin__InfluenzaA__AGL09823

SEQ ID NO: 170135 - RNA, 1701 nt, Artificial Sequence
  derived and/or modified CDS sequence (opt4) from hemagglutinin__InfluenzaA__AGL09824
augaaggccauccugguggugcugcuguacaccuucgccaccgccaacgccgacacccugugcaucggcuaccacgccaacaacagcaccgacaccguggacaccgugcuggagaagaacgugaccgugacccacagcgugaaccugcuggaggacaagcacaacggcaagcugugcaagcugagaggcguggccccccugcaccugggcaagugcaacaucgccggcuggauccugggcaaccccgagugcgagagccugagcaccgccagcagcuggagcuacaucguggagaccagcagcagcgacaacggcaccugcuaccccggcgacuucaucaacuacgaggagcugagagagcagcugagcagcgugagcagcuucgagagauucgagaucuuccccaagaccagcagcuggcccaaccacgacagcaacaagggcgugaccgccgccugcccccacgccggcaccaagagcuucuacaagaaccugaucuggcuggugaagaagggcaacagcuaccccaagcugagcaagagcuacaucaacgacaagggcaaggaggugcuggugcuguggggcauccaccaccccagcaccaccgccgaccagcagagccuguaccagaacgccgacgccuacguguucgugggcaccagcagauacagcaagaaguucaagcccgagaucgccaucagacccaaggugagagaccaggagggcagaaugaacuacuacuggacccugaucgagcccggcgacaagaucaccuucgaggccaccggcaaccugguggugcccagauacgccuucgccauggagagaaacgccggcagcggcaucaucaucagcgacacccccgugcacgacugcaacaccaccugccagacccccgagggcgccaucaacaccagccugcccuuccagaacauccaccccaucaccaucggcaagugccccaaguacgugaagagcaccaagcugagacuggccaccggccugagaaacgugcccagcauccagagcagaggccuguucggcgccaucgccggcuucaucgagggcggcuggaccggcaugguggacggcugguacggcuaccaccaccagaacgagcagggcagcggcuacgccgccgaccugaagagcacccagaacgccaucgacaagaucaccaacaaggugaacagcgugaucgagaagaugaacacccaguucaccgccgugggcaaggaguucaaccaccuggagaagagaaucgagaaccugaacaagaagguggacgacggcuuccuggacaucuggaccuacaacgccgagcugcuggugcugcuggagaacgagagaacccuggacuaccacgacagcaacgugaagaaccuguacgagaaggugagaaaccagcugaagaacaacgccaaggagaucggcaacggcugcuucgaguucuaccacaagugcgacaacaccugcauggagagcgugaagaacggcaccuacgacuaccccaaguacagcgaggaggccaagcugaacagagagaagaucgacggcgugaagcuggagagcaccagaaucuaccagauccuggccaucuacagcaccguggccagcagccuggugcugguggugagccugggcgccaucagcuucuggaugugcagcaacggcagccugcagugcagaaucugcaucuga

SEQ ID NO: 170136 - RNA, 1701 nt, Artificial Sequence; identical to SEQ ID NO: 170054
  derived and/or modified CDS sequence (opt4) from hemagglutinin__InfluenzaA__AGL09825

SEQ ID NO: 170137 - RNA, 1701 nt, Artificial Sequence; identical to SEQ ID NO: 170135
  derived and/or modified CDS sequence (opt4) from hemagglutinin__InfluenzaA__AGL09826

SEQ ID NO: 170138 - RNA, 1701 nt, Artificial Sequence; identical to SEQ ID NO: 169928
  derived and/or modified CDS sequence (opt4) from hemagglutinin__InfluenzaA__AGL09827

SEQ ID NO: 170139 - RNA, 1701 nt, Artificial Sequence
  derived and/or modified CDS sequence (opt4) from hemagglutinin__InfluenzaA__AGL09828
augaagaccaucaucgcccugagcuacauccugugccugguguucgcccagaagcugcccggcaacgacaacagcaccgccacccugugccugggccaccacgccgugcccaacggcaccaucgugaagaccaucaccaacgaccagaucgaggugaccaacgccaccgagcuggugcagaacagcagcaucggcgagaucugcgacagcccccaccagauccuggacggcgagaacugcacccugaucgacgcccugcugggcgacccccagugcgacggcuuccagaacaagaagugggaccuguucguggagagaagcaaggccuacagcaacugcuaccccuacgacgugcccgacuacgccagccugagaagccugguggccagcagcggcacccuggaguucaacaacgagagcuucaacugggccggcgugacccagaacggcaccagcagcgccugcaucagaggcagcaacagcagcuucuucagcagacugaacuggcugacccaccugaacuucaaguaccccgcccugaacgugaccaugcccaacaacgagcaguucgacaagcuguacaucuggggcgugcaccaccccggcaccgacaaggaccagaucuuccuguacgcccagagcagcggcagaaucaccgugagcaccaagagaagccagcaggccgugauccccaacaucggcagcagacccagaaucagaaacauccccagcagaaucagcaucuacuggaccaucgugaagcccggcgacauccugcugaucaacagcaccggcaaccugaucgcccccagaggcuacuucaagaucagaagcggcaagagcagcaucaugagaagcgacgcccccaucggcaagugcaagagcgagugcaucacccccaacggcagcauccccaacgacaagcccuuccagaacgugaacagaaucaccuacggcgccugccccagauacgugaagcagagcacccugaagcuggccaccggcaugagaaacgugcccgagaagcagaccagaggcaucuucggcgccaucgccggcuucaucgagaacggcugggagggcaugguggacggcugguacggcuacagacaccagaacagcgagggcagaggccaggccgccgaccugaagagcacccaggccgccaucgaccagaucaacggcaagcugaacagacugaucggcaagaccaacgagaaguuccaccagaucgagaaggaguucagcgagguggagggcagaauccaggaccuggagaaguacguggaggacaccaagaucgaccuguggagcuacaacgccgagcugcugguggcccuggagaaccagcacaccaucgaccugaccgacagcgagaugaacaagcuguucgagaagaccaagaagcagcugagagagaacgccgaggacaugggcaacggcugcuucaagaucuaccacaagugcgacaacgccugcaucggcagcaucagaaacggcaccuacgaccacgacguguacagagacgaggcccugaacaacagauuccagaucaagggcguggagcugaagagcggcuacaaggacuggauccuguggaucagcuucgccaucagcugcuuccugcugugcguggcccugcugggcuucaucaugugggccugccagaagggcaacaucagaugcaacaucugcaucuga

SEQ ID NO: 170140 - RNA, 1701 nt, Artificial Sequence
  derived and/or modified CDS sequence (opt4) from hemagglutinin__InfluenzaA__AGL09829
augaagaccaucaucgcccugagcuacauccugugccugguguucgcccagaagcugcccggcaacgacaacagcaccgccacccugugccugggccaccacgccgugcccaacggcaccaucgugaagaccaucaccaacgacagaaucgaggugaccaacgccaccgagcuggugcagaacagcagcaucggcgagaucugcgacagcccccaccagauccuggacggcgagaacugcacccugaucgacgcccugcugggcgacccccagugcgacggcuuccagaacaagaagugggaccuguucguggagagaagcaaggccuacagcaacugcuaccccuacgacgugcccgacuacgccagccugagaagccugguggccagcagcggcacccuggaguucaacaacgagagcuucaacugggccggcgugacccagaacggcaccagcagcgccugcaucagaggcagcaacagcagcuucuucagcagacugaacuggcugacccaccugaacuucaaguaccccgcccugaacgugaccaugcccaacaacgagcaguucgacaagcuguacaucuggggcgugcaccaccccggcaccgacaaggaccagaucuuccuguacgcccagagcagcggcagaaucaccgugagcaccaagagaagccagcaggccgugauccccaacaucggcagcagacccagaaucagaaacauccccagcagaaucagcaucuacuggaccaucgugaagcccggcgacauccugcugaucaacagcaccggcaaccugaucgcccccagaggcuacuucaagaucagaagcggcaagagcagcaucaugagaagcgacgcccccaucggcaagugcaagagcgagugcaucacccccaacggcagcauccccaacgacaagcccuuccagaacgugaacagaaucaccuacggcgccugccccagauacgugaagcagagcacccugaagcuggccaccggcaugagaaacgugcccgagaagcagaccagaggcaucuucggcgccaucgccggcuucaucgagaacggcugggagggcaugguggacggcugguacggcuucagacaccagaacagcgagggcagaggccaggccgccgaccuggagagcacccaggccgccaucgaccagaucaacggcaagcugaacagacugaucggcaagaccaacgagaaguuccaccagaucgagaaggaguucagcgagguggagggcagaauccaggaccuggagaaguacguggaggacaccaagaucgaccuguggagcuacaacgccgagcugcugguggcccuggagaaccagcacaccaucgaccugaccgacagcgagaugaacaagcuguucgagaagaccaagaagcagcugagagagaacgccgaggacaugggcaacggcugcuucaagaucuaccacaagugcgacaacgccugcaucggcagcaucagaaacggcaccuacgaccacgacguguacagagacgaggcccugaacaacagauuccagaucaagggcguggagcugaagagcggcuacaaggacuggauccuguggaucagcuucgccaucagcugcuuccugcugugcguggcccugcugggcuucaucaugugggccugccagaagggcaacaucagaugcaacaucugcaucuga

SEQ ID NO: 170141 - RNA, 1701 nt, Artificial Sequence; identical to SEQ ID NO: 169943
  derived and/or modified CDS sequence (opt4) from hemagglutinin__InfluenzaA__AGL09830

SEQ ID NO: 170142 - RNA, 1701 nt, Artificial Sequence; identical to SEQ ID NO: 170053
  derived and/or modified CDS sequence (opt4) from hemagglutinin__InfluenzaA__AGL09831

SEQ ID NO: 170143 - RNA, 1701 nt, Artificial Sequence
  derived and/or modified CDS sequence (opt4) from hemagglutinin__InfluenzaA__AGL09832
augaagaccaucaucgcccugagcuacauccugugccugguguucgcccagaagcugcccggcaacgacaacagcaccgccacccugugccugggccaccacgccgugcccaacggcaccaucgugaagaccaucaccaacgacagaaucgaggugaccaacgccaccgagcuggugcagaacagcagcaucggcgagaucugcgacagcccccaccagauccuggacggcgagaacugcacccugaucgacgcccugcugggcgacccccagugcgacggcuuccagaacaagaagugggaccuguucguggagagaagcaaggccuacagcaacugcuaccccuacgacgugcccgacuacgccagccugagaagccugguggccagcagcggcacccuggaguucaacaacgagagcuucaacuggaccggcgugacccagaacggcaccagcagcgccugcaucagaagaagcaacagcagcuucuucagcagacugaacuggcugacccacagcaacuucaaguaccccgcccugaacgugaccaugcccaacaacgagcaguucgacaagcuguacaucuggggcgugcaccaccccggcaccgacaaggaccagaucuuccuguacgcccagagcagcggcagaaucaccgugagcaccaagagaagccagcaggccgugauccccaacaucggcagcagacccagaaucagaaacauccccagcagaaucagcaucuacuggaccaucgugaagcccggcgacauccugcugaucaacagcaccggcaaccugaucgcccccagaggcuacuucaagaucagaagcggcaagagcagcaucaugagaagcgacgcccccaucggcaagugcaagagcgagugcaucacccccaacggcagcauccccaacgacaagcccuuccagaacgugaacagaaucaccuacggcgccugccccagauacgugaagcagagcacccugaagcuggccaccggcaugagaaacgugcccgagaagcagaccagaggcaucuucggcgccaucgccggcuucaucgagaacggcugggagggcaugguggacggcugguacggcuucagacaccagaacagcgagggcagaggccaggccgccgaccugaagagcacccaggccgccaucgaccagaucaacggcaagcugaacagacugaucggcaagaccaacgagaaguuccaccagaucgagaaggaguucagcgagguggagggcagaauccaggaccuggagaaguacguggaggacaccaagaucgaccuguggagcuacaacgccgagcugcugguggcccuggagaaccagcacaccaucgaccugaccgacagcgagaugaacaagcuguucgagaagaccaagaagcagcugagagagaacgccgaggacaugggcaacggcugcuucaagaucuaccacaagugcgacaacgccugcaucggcaccaucagaaacggcaccuacgaccacaacguguacagagacgaggcccugaacaacagauuccagaucaagggcguggagcugaagagcggcuacaaggacuggauccuguggaucagcuucgccaucagcugcuuccugcugugcguggcccugcugggcuucaucaugugggccugccagaagggcaacaucagaugcaacaucugcaucuga

SEQ ID NO: 170144 - RNA, 1701 nt, Artificial Sequence; identical to SEQ ID NO: 170054
  derived and/or modified CDS sequence (opt4) from hemagglutinin__InfluenzaA__AGL09833

SEQ ID NO: 170145 - RNA, 1701 nt, Artificial Sequence
  derived and/or modified CDS sequence (opt4) from hemagglutinin__InfluenzaA__AGL09881
augaagaccaucaucgcccugagcuacauccugugccugguguucgcccagaagcugcccggcaacgacaacagcaccgccacccugugccugggccaccacgccgugcccaacggcaccaucgugaagaccaucaccaacgacagaaucgaggugaccaacgccaccgagcuggugcagaacagcagcaucggcgagaucugcgacagcccccaccagauccuggacggcgagaacugcacccugaucgacgcccugcugggcgacccccagugcgacggcuuccagaacaagaagugggaccuguucguggagagaagcaaggccuacagcaacugcuaccccuacgacgugcccgacuacgccagccugagaagccugguggccagcagcggcacccuggaguucaacaacgagagcuucaacugggccggcgugacccagaacggcgccagcagcgccugcaucagaggcagcaacagcagcuucuucagcagacugaacuggcugacccaccugaacuucaaguaccccgcccugaacgugaccaugcccaacaacgagcaguucgacaagcuguacaucuggggcgugcaccaccccggcaccgacaaggaccagaucuuccuguacgcccagagcagcggcagaaucaccgugagcaccaagagaagccagcaggccgugauccccaacaucggcagcagacccagaaucagaaacauccccagcagaaucagcaucuacuggaccaucgugaagcccggcgacauccugcugaucaacagcaccggcaaccugaucgcccccagaggcuacuucaagaucagaagcggcaagagcagcaucaugagaagcgacgcccccaucggcaagugcaagagcgagugcaucacccccaacggcagcauccccaacgacaagcccuuccagaacgugaacagaaucaccuacggcgccugccccagauacgugaagcagagcacccugaagcuggccaccggcaugagaaacgugcccgagaagcagaccagaggcaucuucggcgccaucgccggcuucaucgagaacggcugggagggcaugguggacggcugguacggcuucagacaccagaacagcgagggcagaggccaggccgccgaccugaagagcacccaggccgccaucgaccagaucaacggcaagcugaacagacugaucggcaagaccaacgagaaguuccaccagaucgagaaggaguucagcgagguggagggcagaauccaggaccuggagaaguacguggaggacaccaagaucgaccuguggagcuacaacgccgagcugcugguggcccuggagaaccagcacaccaucgaccugaccgacagcgagaugaacaagcuguucgagaagaccaagaagcagcugagagagaacgccgaggacaugggcaacggcugcuucaagaucuaccacaagugcgacaacgccugcaucggcagcaucagaaacggcaccuacgaccacgacguguacagagacgaggcccugaacaacagauuccagaucaagggcguggagcugaagagcggcuacaaggacuggauccuguggaucagcuucgccaucagcugcuuccugcugugcguggcccugcugggcuucaucaugugggccugccagaagggcaacaucagaugcaacaucugcaucuga

SEQ ID NO: 170146 - RNA, 1701 nt, Artificial Sequence; identical to SEQ ID NO: 169918
  derived and/or modified CDS sequence (opt4) from hemagglutinin__InfluenzaA__AGL09882

SEQ ID NO: 170147 - RNA, 1701 nt, Artificial Sequence; identical to SEQ ID NO: 169895
  derived and/or modified CDS sequence (opt4) from hemagglutinin__InfluenzaA__AGL09883

SEQ ID NO: 170148 - RNA, 1701 nt, Artificial Sequence; identical to SEQ ID NO: 169895
  derived and/or modified CDS sequence (opt4) from hemagglutinin__InfluenzaA__AGL09884

SEQ ID NO: 170149 - RNA, 1683 nt, Artificial Sequence; identical to SEQ ID NO: 170048
  derived and/or modified CDS sequence (opt4) from hemagglutinin__InfluenzaA__AGL44438

SEQ ID NO: 170150 - RNA, 1701 nt, Artificial Sequence
  derived and/or modified CDS sequence (opt4) from hemagglutinin__InfluenzaA__AGN69267
augaaggccauccugguggugcugcuguacaccuucaccaccggcaacgccgacacccugugcaucggcuaccacgccaacaacagcaccgacaccguggacaccgugcuggagaagaacgugaccgugacccacagcgugaaccugcuggaggacagacacaacggcaagcugugcaagcugagaggcguggccccccugcaccugggcaagugcaacaucgccggcuggcugcugggcaaccccgagugcgagcugcuguucaccgccagcagcuggagcuacaucguggagaccagcaacagcgacaacggcaccugcuaccccggcgacuucaucaacuacgaggagcugagagagcagcugagcagcgugagcagcuucgagagauucgagaucuuccccaaggccagcagcuggcccaaccacgagaccaacagaggcgugaccgccgccugccccuacgccggcgccaacagcuucuacagaaaccugaucuggcuggugaagaagggcaacagcuaccccaagcugagcaagagcuacaucaacaacaaggagaaggaggugcuggugcuguggggcauccaccacccccccaccagcaccgaccagcagagccuguaccagaacgccgacgccuacguguucgugggcagcagcaaguacagcaagaaguucaagcccgagaucgccaccagacccaaggugagaggccaggccggcagaaugaacuacuacuggacccugguggagcccggcgacaccaucaccuucgaggccaccggcaaccugguggugcccagauacgccuucgccaugaagagaggcagcggcagcggcaucaucaucagcgacacccccgugcacgacugcaacaccaccugccagacccccaagggcgccaucaacaccagccugcccuuccagaacauccaccccgugaccaucggcgagugccccaaguacgugaagagcaccaagcugagaauggccaccggccugagaaacauccccagcauccagagcagaggccuguucggcgccaucgccggcuucaucgagggcggcuggaccggcaugaucgacggcugguacggcuaccaccaccagaacgagcagggcagcggcuacgccgccgacagaaagagcacccagaacgccaucgacggcaucaccaacaaggugaacagcgugaucgagaagaugaacacccaguucaccgccgugggcaaggaguucaaccaccuggagaagagaaucgagaaccugaacaagaagguggacgacggccugcuggacguguggaccuacaacgccgagcugcuggugcugcuggagaacgagagaacccuggacuaccacgacagcaacgugaagaaccuguacgagaaggugagaagccagcugaagaacaacgccaaggagaucggcaacggcugcuucgaguucuaccacaagugcgacgacaccugcauggagagcgugaagaacggcaccuacgacuaccccaaguacagcgaggaggccaagcugaacagagaggagaucgacggcgugaagcuggagagcaccagaaucuaccagauccuggccaucuacagcaccguggccagcagccuggugcugcuggugagccugggcgccaucagcuucuggaugugcagcaacggcagccugcagugcagaaucugcaucuga

SEQ ID NO: 170151 - RNA, 1701 nt, Artificial Sequence
  derived and/or modified CDS sequence (opt4) from hemagglutinin__InfluenzaA__AGN69278
augaaggccauccugguggugcugcuguacaccuucaccaccgccaacgccgacacccugugcaucggcuaccacgccaacaacagcaccgacaccguggacaccgugcuggagaagaacgugaccgugacccacagcgugaaccugcuggaggacagacacaacggcaagcugugcaagcugagaggcguggccccccugcaccugggcaagugcaacaucgccggcuggcugcugggcaaccccgagugcgagcugcuguucaccgccagcagcuggagcuacaucguggagaccagcaacagcgacaacggcaccugcuaccccggcgacuucaucaacuacgaggagcugagagagcagcugagcagcgugagcagcuucgagagauucgagaucuuccccaaggccagcagcuggcccaaccacgagcccaacagaggcgugaccgccgccugccccuacgccggcgccaacagcuucuacagaaaccugaucuggcuggugaagaagggcaacagcuaccccaagcugagcaagagcuacaucaacaacaaggagaaggaggugcuggugcuguggggcauccaccacccccccaccagcaccgaccagcagagccuguaccagaacgccgacgccuacguguucgugggcagcagcaaguacaacaagaaguucaagcccgagaucgccaccagacccaaggugagaggccaggccggcagaaugaacuacuacuggacccugguggagcccggcgacaccaucaccuucgaggccaccggcaaccugguggugcccagauacgccuucgccaugaagagaggcagcggcagcggcaucaucaucagcgacacccccgugcacgacugcaacaccaccugccagacccccaagggcgccaucaacaccagccugcccuuccagaacauccaccccgugaccaucggcgagugccccaaguacgugaagagcaccaagcugagaauggccaccggccugagaaacauccccagcauccagagcagaggccuguucggcgccaucgccggcuucaucgagggcggcuggaccggcaugaucgacggcugguacggcuaccaccaccagaacgagcagggcagcggcuacgccgccgacagaaagagcacccagaacgccaucgacggcaucaccaacaaggugaacagcgugaucgagaagaugaacacccaguucaccgccgugggcaaggaguucaaccaccuggagaagagaaucgagaaccugaacaagaagguggacgacggccugcuggacguguggaccuacaacgccgagcugcuggugcugcuggagaacgagagaacccuggacuaccacgacagcaacgugaagaaccuguacgagaaggugagaagccagcugaagaacaacgccaaggagaucggcaacggcugcuucgaguucuaccacaagugcgacgacaccugcauggagagcgugaagaacggcaccuacgacuaccccaaguacagcgaggaggccaagcugaacagagaggagaucgacggcgugaagcuggagagcaccagaaucuaccagauccuggccaucuacagcaccguggccagcagccuggugcugcuggugagccugggcgccaucagcuucuggaugugcagcaacggcagccugcagugcagaaucugcaucuga

SEQ ID NO: 170152 - RNA, 1701 nt, Artificial Sequence
  derived and/or modified CDS sequence (opt4) from hemagglutinin__InfluenzaA__AGN69302
auggaggccaagcuguucgugcuguucugcgccuucaccgcccugaaggccgacaccaucugcgugggcuaccacgccaacaacagcaccgacaccguggacaccauccuggagaagaacgugaccgugacccacagcgugaaccugcuggagaacagccacaacggcaagcugugcagccugaacggcaagaucccccugcagcugggcaacugcaacguggccggcuggauccugggcaaccccaagugcgaccugcugcugaccgccaacagcuggagcuacaucaucgagaccagcaacagcaaggacggcgccugcuaccccggcgaguucgccgacuacgaggagcugaaggagcagcugagcaccgugagcagcuucgagagauucgagaucuuccccaaggccaccagcuggcccaaccacgacaccaccagaggcaccaccguggccugcagccacagcggcgccaacagcuucuacagaaaccugcuguggaucgugaagaagggcaacagcuaccccaagcugagcaagagcuacaccaacaacaagggcaaggaggugcuggugaucuggggcgugcaccacccccccaccgacagcgaccagcagacccuguaccagaacaaccacaccuacgugagcgugggcagcagcaaguacuacaagagauucacccccgagaucguggccagacccaaggugagagagcaggccggcagaaugaacuacuacuggacccugcuggaccagggcgacaccaucaccuucgaggccaccggcaaccugaucgcccccuggcacgccuucgcccugaagaagggcagcagcagcggcaucaugaugagcgacgcccaggugcacaacugcaccaccaagugccagaccccccacggcgcccugaagggcaaccugcccuuccagaacgugcaccccgugaccaucggcgagugccccaaguacgugaagagcacccagcugagaauggccaccggccugagaaacauccccagcauccagagcagaggccuguucggcgccaucgccggcuucaucgagggcggcuggaccggcaugguggacggcugguacggcuaccaccaccagaacgagcagggcagcggcuacgccgccgaccagaagagcacccagaucgccaucgacggcaucagcaacaaggugaacagcgugaucgagaagaugaacauccaguucaccagcgugggcaaggaguucaacagccuggagaagagaauggagaaccugaacaagaagguggacgacggcuuccuggacguguggaccuacaacgccgagcugcugauccugcuggagaacgagagaacccuggacuuccacgaccugaacgugaagaaccuguacgagaaggugaagagccagcugagaaacaacgccaaggagaucggcaacggcugcuucgaguucuaccacaagugcgacaacgagugcauggagagcgugaagaacggcaccuacaacuaccccaaguacagcgaggagagcaagcugaacagagaggagaucgacggcgugaagcuggagagcaugggcauccaccagauccuggccaucuacagcaccguggccagcagccuggugcugcuggugagccugggcgccaucagcuucuggaugugcagcaacggcagccugcagugcagagugugcaucuga

SEQ ID NO: 170153 - RNA, 1701 nt, Artificial Sequence; identical to SEQ ID NO: 170152
  derived and/or modified CDS sequence (opt4) from hemagglutinin__InfluenzaA__AGN69314

SEQ ID NO: 170154 - RNA, 1701 nt, Artificial Sequence; identical to SEQ ID NO: 170152
  derived and/or modified CDS sequence (opt4) from hemagglutinin__InfluenzaA__AGN69326

SEQ ID NO: 170155 - RNA, 1701 nt, Artificial Sequence
  derived and/or modified CDS sequence (opt4) from hemagglutinin__InfluenzaA__AGN69338
auggaggccaagcuguucgugcuguucugcgccuucaccgcccugaaggccgacaccaucugcgugggcuaccacgccaacaacagcaccgacaccguggacaccauccuggagaagaacgugaccgugacccacagcgugaaccugcuggagaacagccacaacggcaagcugugcagccugaacggcaagaucccccugcagcugggcaacugcaacguggccggcuggauccugggcaaccccaagugcgaccugcugcugaccgccaacagcuggagcuacaucaucgagaccagcaacagcaagaacggcgccugcuaccccggcgaguucgccgacuacgaggagcugaaggagcagcugagcaccgugagcagcuucgagagauucgagaucuuccccaaggccaccagcuggcccaaccacgacaccaccagaggcaccaccguggccugcagccacagcggcgccaacagcuucuacagaaaccugcuguggaucgugaagaagggcaacagcuaccccaagcugagcaagagcuacaccaacaacaagggcaaggaggugcuggugaucuggggcgugcaccacccccccaccgacagcgaccagcagacccuguaccagaacaaccacaccuacgugagcgugggcagcagcaaguacuacaagagauucacccccgagaucguggccagacccaaggugagagagcaggccggcagaaugaacuacuacuggacccugcugcaccagggcgacaccaucaccuucgaggccaccggcaaccugaucgcccccuggcacgccuucgcccugaacgagggcagcagcagcggcaucaugagaagcgacgcccaggugcacaacugcaccaccaagugccagaccccccacggcgcccugaagggcaaccugcccuuccagaacgugcaccccgugaccaucggcgagugccccaaguacgugaagagcacccagcugagaauggccaccggccugagaaacauccccagcauccagagcagaggccuguucggcgccaucgccggcuucaucgagggcggcuggaccggcaugguggacggcugguacggcuaccaccacagaaacgagcagggcagcggcuacgccgccgaccagaagagcacccagaucgccaucgacggcaucagcaacaaggugaacagcgugaucgagaagaugaacauccaguucaccagcgugggcaaggagugcaacagccuggagaagagaauggagaaccugaacaagaagguggacgacggcuuccuggacguguggaccuacaacgccgagcugcugauccugcuggagaacgagagaacccuggacuuccacgaccugaacgugaagaaccuguacgagaaggugaagagccagcugagaaacaacgccaaggagaucggcaacggcugcuucgaguucuaccacaagugcgacaacgagugcauggagagcgugaagaacggcaccuacaacuaccccaaguacagcgaggagagcaagcugaacagagaggagaucgacggcgugaagcuggagagcaugggcauccaccagauccuggccaucuacagcaccguggccagcagccuggugcugcuggugagccugggcgccaucagcuucuggaugugcagcaacggcagccugcagugcagagugugcaucuga

SEQ ID NO: 170156 - RNA, 1701 nt, Artificial Sequence
  derived and/or modified CDS sequence (opt4) from hemagglutinin__InfluenzaA__AGO00265
augaaggccagacugcuggugcugcugugcgccaucgccgccaccgacgccgacaccaucugcaucggcuaccacgccaacaacagcaccgacaccguggacaccauccuggagaagaacgugaccgugacccacagcgugaaccugcuggaggacagccacaacggcaagcugugcagacugaagggcaucgccccccugcagcugggcaagugcaacaucgccggcuggauccugggcaaccccgagugcgagagccugcugagcgagagaagcuggagcuacaucguggagacccccaacagcgagaacggcaccugcuaccccggcgacuucaucgacuacgaggagcugagagagcagcugagcagcgugaccagcuucgagagauucgagaucuuccccaaggagaccagcuggcccaagcacaacaccaccaagggcgugaccgccgccugcagccacgccggcaagugcagcuucuacagaaaccugcuguggcugaccgagaaggacggcagcuaccccaaccugaacaacagcuacgugaacaagaagggcaaggaggugcuggugcuguggggcgugcaccaccccagcaacaucaaggaccagcagacccuguaccagaaggagaacgccuacgugagcguggugagcagcaacuacaacagaagauucacccccgagaucgccgagagacccaaggugagaggccaggccggcagaaugaacuacuacuggacccugcuggagcccggcgacaccaucaucuucgaggccaacggcaaccugaucgcccccugguacgccuucgcccugagcagaggcuucggcagcggcaucaucaccagcaacgccagcaugcacgagugcaacaccaagugccagaccccccagggcgccaucaacagcagccugcccuuccagaacauccaccccgugaccaucggcgagugccccaaguacgugagaagcaccaagcugagaauggugaccggccugagaaacauccccagcauccagagcagaggccuguucggcgccaucgccggcuucaucgagggcggcuggaccggcaugaucgacggcugguacggcuaccaccaccagaacgagcagggcagcggcuacgccgccgaccagaagagcacccagaacgccaucaacggcaucaccaacaaggugaacagcgugaucgagaagaugaacacccaguucaccgccgugggcaaggaguucaacaaccuggagaagagaauggagaaccugaacaagaagguggacgacggcuuccuggacaucuggaccuacaacgccgagcugcuggugcugcuggagaacgagagaacccuggacuuccacgacagcaacgugaagaaccuguacgagaaggugaagagccagcugagaaacaacgccaaggagaucggcaacggcugcuucgaguucuaccacaagugcaacaacgagugcauggagagcgugaagaacggcaccuacgacuaccccaaguacagcgaggagagcaagcugaacagagagaagaucgacggcgugaagcuggagagcaugggcguguaccagauccuggccaucuacagcaccguggccagcagccuggugcugcuggugagccugggcgccaucagcuucuggaugugcagcaacggcagccugcagugcagaaucugcaucuga

SEQ ID NO: 170157 - RNA, 1701 nt, Artificial Sequence
  derived and/or modified CDS sequence (opt4) from hemagglutinin__InfluenzaA__AGO00277
augaaggccaagcugcugauccugcugugcgcccugagcgccaccgacgccgacaccaucugcaucggcuaccacgccaacaacagcaccgacaccguggacaccgugcuggagaagaacgugaccgugacccacagcgugaaccugcuggaggacagccacaacggcaagcugugcagacugaagggcaucgccccccugcagcugggcaagugcaacaucgccggcuggauccugggcaaccccgagugcgagagccugcugagcaagagaagcuggagcuacaucgccgagacccccaacagcgagaacggcaccugcuaccccggcgacuucgccgacuacgaggagcugagagagcagcugagcagcgugagcagcuucgagagauucgagaucuuccccaaggagagaagcuggcccaaccacaacaucaacaucggcgugaccgccgccugcagccacgccggcaagagcagcuucuacaagaaccugcuguggcugaccgagaaggacggcagcuaccccaaccugaacaagagcuacgugaacaagaaggagaaggaggugcuggugcuguggggcgugcaccaccccagcaacaucgagaaccagaagacccuguacagaaaggagaacgccuacgugagcguggugagcagcaacuacaacagaagauucacccccgagaucgccgagagacccaaggugagaggccaggccggcagaaugaacuacuacuggacccugcuggagcccggcgacaccaucaucuucgaggccaacggcaaccugaucgcccccugguacgccuucgcccugagcagaggccugggcagcggcaucaucaccagcaacgccagcauggacgagugcgacaccaagugccagaccccccagggcgccaucaacagcagccugcccuuccagaacauccaccccuucaccaucggcgagugccccaaguacgugagaagcaccaagcugagaauggugaccggccugagaaacauccccagcauccagagcagaggccuguucggcgccaucgccggcuucaucgagggcggcugggccggcaugaucgacggcugguacggcuaccaccaccagaacgagcagggcagcggcuacgccgccgaccagaagagcacccagaacgccaucaacggcaucaccaacaaggugaacagcgugaucgagaagaugaacacccaguucaccgccgugggcaaggaguucaacaagcuggagaagagaauggagaaccugaacaagaagguggacgacggcuuccuggacaucuggaccuacaacgccgagcugcuggugcugcuggagaacgagagaacccuggacuuccacgacagcaacgugaagaaccuguacgagaaggugaagaaccagcugagaaacaacgccaaggagaucggcaacggcugcuucgaguucuaccacaagugcaacaacgagugcauggagagcgugaagaacggcaccuacgacuaccccaaguacagcgaggagagcaagcugaacagagagaagaucgacggcgugaagcuggagagcaugggcguguaccagauccuggccaucuacagcaccguggccagcagccuggugcugcuggugagccugggcgccaucagcuucuggaugugcagcaacggcagccugcagugcagaaucugcaucuga

SEQ ID NO: 170158 - RNA, 1701 nt, Artificial Sequence; identical to SEQ ID NO: 161694
  derived and/or modified CDS sequence (opt4) from hemagglutinin__InfluenzaA__AGO00289

SEQ ID NO: 170159 - RNA, 1698 nt, Artificial Sequence
  derived and/or modified CDS sequence (opt4) from hemagglutinin__InfluenzaA__AGO00301
augaaggccaagcugcugauccugcugugcgcccugagcgccaccgacgccgacaccaucugcaucggcuaccacgccaacaacagcaccgacaccguggacaccgugcuggagaagaacgugaccgugacccacagcgugaaccugcuggaggacagccacaacggcaagcugugcagacugaagggcaaggccccccugcagcugggcaacugcaacaucgccggcugggugcugggcaaccccgagugcgagagccugcugagcaacagaagcuggagcuacaucgccgagacccccaacagcgagaacggcaccugcuaccccggcgacuucgccgacuacgaggagcugagagagcagcugagcagcgugagcagcuucgagagauucgagaucuuccccaaggagagaagcuggcccaaccacaccaccagaggcgugaccgccgccugcccccacgccagaaagagcagcuucuacaagaaccugguguggcugaccgaggccaacggcagcuaccccaaccugagcagaagcuacgugaacaaccaggagaaggaggugcuggugcuguggggcgugcaccaccccagcaacaucgaggagcagagagcccuguacagaaaggacaacgccuacgugagcguggugagcagcaacuacaacagaagauucacccccgagaucgccaagagacccaaggugagagaccagagcggcagaaugaacuacuacuggacccugcuggagcccggcgacaccaucaucuucgaggccaccggcaaccugaucgcccccugguacgccuucgcccugagcagaggccccggcagcggcaucaucaccagcaacgccccccuggacgagugcgacaccaagugccagaccccccagggcgccaucaacagcagccugcccuuccagaacauccaccccgugaccaucggcgagugccccaaguacgugagaagcaccaagcugagaauggugaccggccugagaaacauccccagcgugcagagcagaggccuguucggcgccaucgccggcuucaucgagggcggcuggaccggcaugauggacggcugguacggcuaccaccaccagaacgagcagggcagcggcuacgccgccgaccagaagagcacccagaacgccaucaacggcaucaccaacaaggugaacagcgugaucgagaagaugaacacccaguucaccgccgugggcaaggaguucaacaagcuggagaagagaauggagaaccugaacaagaagguggacgacggcuucauggacaucuggaccuacaacgccgagcugcuggugcugcuggagaacgagagaacccuggacuuccacgacagcaacgugaagaaccuguacgagaaggugaagaaccagcugagaaacaacgccaaggagcugggcaacggcugcuucgaguucuaccacaagugcgacaacgagugcauggagagcgugaagaacggcaccuacgacuaccccaaguacagcgaggagagcaagcugaacagagagaagaucgacggcgugaagcuggagagcaugggcguguacagaauccuggccaucuacagcaccguggccagcagccuggugcugcuggugagccugggcgccaucagcuucuggaugugcagcaacggcagccugcagugcagaaucugcaucuga

SEQ ID NO: 170160 - RNA, 1701 nt, Artificial Sequence
  derived and/or modified CDS sequence (opt4) from hemagglutinin__InfluenzaA__AGO00313
augaagaccaucaucgcccugagcuacaucuucugccaggugcuggcccagaaccugcccggcaacgacaacagcaccgccacccugugccugggccaccacgccgugcccaacggcacccuggugaagaccaucaccaacgaccagaucgaggugaccaacgccaccgagcuggugcagagcagcagcaccggcagaaucugcgacagcccccacagaauccuggacggcaagaacugcacccugaucgacgcccugcugggcgacccccacugcgacggcuuccagaacgagaagugggaccuguucguggagagaagcaaggccuucagcaacugcuaccccuacgacgugcccgacuacgccagccugagaagccugguggccagcagcggcacccuggaguucaucaacgagggcuucaacuggaccggcgugacccagaacggcggcagcuacgccugcaagagaggccccgacaacagcuucuucagcagacugaacuggcuguacaagagcgagagcaccuaccccgugcugaacgugaccaugcccaacaacgacaacuucgacaagcuguacaucuggggcgugcaccaccccagcaccgacaaggagcagaccaaccuguacgugcaggccagcggcagagugaccgugagcaccaagagaagccagcagaccaucauccccaacgugggcagcagacccugggugagaggccugagcagcggcaucagcaucuacuggaccaucgugaagcccggcgacauccugcugaucaacagcaacggcaaccugaucgcccccagaggcuacuucaagaucagaaccggcaagagcagcaucaugagaagcgacgcccccaucggcaccugcagcagcgagugcaucacccccaacggcagcauccccaacgacaagcccuuccagaacgugaacaagaucaccuacggcgccugccccaaguacgugaagcagaacacccugaagcuggccaccggcaugagaaacgugcccgagaagcagaccagaggcaucuucggcgccaucgccggcuucaucgagaacggcugggagggcaugaucgacggcugguacggcuucagacaccagaacagcgagggcaccggccaggccgccgaccugaagagcacccaggccgccaucgaccagaucaacggcaagcugaacagagugaucgagaagaccaacgagaaguuccaccagaucgagaaggaguucagcgagguggagggcagaauccaggaccuggagaaguacguggaggacaccaagaucgaccuguggagcuacaacgccgagcugcugguggcccuggagaaccagcacaccaucgaccugaccgacagcgagaugaacaagcuguucgagaagaccagaagacagcugagagagaacgccgaggacaugggcaacggcugcuucaagaucuaccacaagugcgacaacgccugcaucggcagcaucagaaacggcaccuacgaccacgacguguacagagacgaggcccugaacaacagauuccagaucaagggcguggagcugaagagcggcuacaaggacuggauccuguggaucagcuucgccaucagcugcuuccugcugugcguggugcugcugggcuucaucaugugggccugccagaagggcaacaucagaugcaacaucugcaucuga

SEQ ID NO: 170161 - RNA, 1704 nt, Artificial Sequence; identical to SEQ ID NO: 169157
  derived and/or modified CDS sequence (opt4) from hemagglutinin__InfluenzaA__AGO00325

SEQ ID NO: 170162 - RNA, 1698 nt, Artificial Sequence
  derived and/or modified CDS sequence (opt4) from hemagglutinin__InfluenzaA__AGO00337
augaaggccaaccugcuggugcugcugagcgcccuggccgccgccgacgccgacaccaucugcaucggcuaccacgccaacaacagcaccgacaccguggacaccgugcuggagaagaacgugaccgugacccacagcgugaaccugcuggaggacagccacaacggcaagcugugcagacugaagggcaucgccccccugcagcugggcaagugcaacaucgccggcuggcugcugggcaaccccgagugcgacccccugcugcccgugagaagcuggagcuacaucguggagacccccaacagcgagaacggcaucugcuaccccggcgacuucaucgacuacgaggagcugagagagcagcugagcagcgugagcagcuucgagagauucgagaucuuccccaaggagagcagcuggcccaaccacaacaccaacggcgugaccgccgccugcagccacgagggcaagagcagcuucuacagaaaccugcuguggcugaccgagaaggagggcagcuaccccaagcugaagaacagcuacgugaacaagaagggcaaggaggugcuggugcuguggggcauccaccacccccccaacagcaaggagcagcagaaccuguaccagaacgagaacgccuacgugagcguggugaccagcaacuacaacagaagauucacccccgagaucgccgagagacccaaggugagagaccaggccggcagaaugaacuacuacuggacccugcugaagcccggcgacaccaucaucuucgaggccaacggcaaccugaucgcccccauguacgccuucgcccugagcagaggcuucggcagcggcaucaucaccagcaacgccagcaugcacgagugcaacaccaagugccagaccccccugggcgccaucaacagcagccugcccuaccagaacgugcaccccgugaccaucggcgagugccccaaguacgugagaagcgccaagcugagaauggugaccggccugagaaacacccccagcauccagagcagaggccuguucggcgccaucgccggcuucaucgagggcggcuggaccggcaugaucgacggcugguacggcuaccaccaccagaacgagcagggcagcggcuacgccgccgaccagaagagcacccagaacgccaucaacggcaucaccaacaaggugaacaccgugaucgagaagaugaacauccaguucaccgccgugggcaaggaguucaacaagcuggagaagagaauggagaaccugaacaagaagguggacgacggcuuccuggacaucuggaccuacaacgccgagcugcuggugcugcuggagaacgagagaacccuggacuuccacgacagcaacgugaagaaccuguacgagaaggugaagagccagcugaagaacaacgccaaggagaucggcaacggcugcuucgaguucuaccacaagugcgacaacgagugcauggagagcgugagaaacggcaccuacgacuaccccaaguacagcgaggagagcaagcugaacagagagaagguggacggcgugaagcuggagagcaugggcaucuaccagauccuggccaucuacagcaccguggccagcagccuggugcugcuggugagccugggcgccaucagcuucuggaugugcagcaacggcagccugcagugcagaaucugcaucuga

SEQ ID NO: 170163 - RNA, 1698 nt, Artificial Sequence; identical to SEQ ID NO: 163338
  derived and/or modified CDS sequence (opt4) from hemagglutinin__InfluenzaA__AGO00349

SEQ ID NO: 170164 - RNA, 1698 nt, Artificial Sequence
  derived and/or modified CDS sequence (opt4) from hemagglutinin__InfluenzaA__AGO00373
augaaggccaaccugcuggugcugcugugcgcccuggccgccgccgacgccgacaccaucugcaucggcuaccacgccaacaacagcaccgacaccguggacaccgugcuggagaagaacgugaccgugacccacagcgugaaccugcuggaggacagccacaacggcaagcugugcagacugaagggcaucgccccccugcagcugggcaagugcaacaucgccggcuggcugcugggcaaccccgagugcgacccccugcugcccgugagaagcuggagcuacaucguggagacccccaacagcgagaacggcaucugcuaccccggcgacuucaucgacuacgaggagcugagagagcagcugagcagcgugagcagcuucgagagauucgagaucuuccccaaggagagcagcuggcccgaccacaacaccaacggcgugaccgccgccugcagccacgagggcaagagcagcuucuacagaaaccugcuguggcugaccgagaaggagagcagcuaccccaagcugaagaacagcuacgugaacaagaagggcaaggaggugcuggugcuguggggcauccaccacccccccaacagcaaggagcagcagaaccuguaccagaacgagaacgccuacgugagcguggugaccagcaacuacaacagaagauucacccccgagaucgccgagagacccaaggugagagaccaggccggcagaaugaacuacuacuggacccugcugaagcccggcgacaccaucaucuucgaggccaacggcaaccugaucgcccccauguacgccuucgcccugagcagaggcuucggcagcggcaucaucaccagcaacgccagcaugcacgagugcaacaccaagugccagaccccccugggcgccaucaacagcagccugcccuaccagaacauccaccccgugaccaucggcgagugccccaaguacgugagaagcgccaagcugagaauggugaccggccugagaaacauccccagcauccagagcagaggccuguucggcgccaucgccggcuucaucgagggcggcuggaccggcaugaucgacggcugguacggcuaccaccaccagaacgagcagggcagcggcuacgccgccgaccagaagagcacccagaacgccaucaacggcaucaccaacaaggugaacaccgugaucgagaagaugaacauccaguucaccgccgugggcaaggaguucaacaagcuggagaagagaauggagaaccugaacaagaagguggacgacggcuuccuggacaucuggaccuacaacgccgagcugcuggugcugcuggagaacgagagaacccuggacuuccacgacagcaacaugaagaaccuguacgagaaggugaagagccagcugaagaacaacgccaaggagaucggcaacggcugcuucgaguucuaccacaagugcgacaacgagugcauggagagcgugagaaacggcaccuacgacuaccccaaguacagcgaggagagcaagcugaacagagagaagguggacggcgugaagcuggagagcaugggcaucuaccagauccuggccaucuacagcaccguggccagcagccuggugcugcuggugagccugggcgccaucagcuucuggaugugcagcaacggcagccugcagugcagaaucugcaucuga

SEQ ID NO: 170165 - RNA, 1698 nt, Artificial Sequence
  derived and/or modified CDS sequence (opt4) from hemagglutinin__InfluenzaA__AGO00385
augaaggccaaccugcuggugcugcugugcgcccuggccgccgccgacgccgacaccaucugcaucggcuaccacgccaacaacagcaccgacaccguggacaccgugcuggagaagaacgugaccgugacccacagcgugaaccugcuggaggacagccacaacggcaagcugugcagacugaagggcaucgccccccugcagcugggcaagugcaacaucgccggcuggcugcugggcaaccccgagugcgacccccugcugcccgugggcagcuggagcuacaucguggagacccccaacagcgagaacggcaucugcuaccccggcgacuucaucgacuacgaggagcugagagagcagcugagcagcgugagcagcuucgagagauucgagaucuuccccaaggagagcagcuggcccgaccacaacaccaacggcgugaccgccgccugcagccacgagggcaagagcagcuucuacagaaaccugcuguggcugaccgagaaggagagcagcuaccccaagcugaagaacagcuacgugaacaagaagggcaaggaggugcuggugcuguggggcauccaccacccccccaacagcaaggagcagcagaaccuguaccagaacgagaacgccuacgugagcguggugaccagcaacuacaacagaagauucacccccgagaucgccgagagacccaaggugagagaccaggccggcagaaugaacuacuacuggacccugcugaagcccggcgacaccaucaucuucgaggccaacggcaaccugaucgcccccauguacgccuucgcccugagcagaggcuucggcagcggcaucaucaccagcaacgccagcaugcacgagugcaacaccaagugccagaccccccugggcgccaucaacagcagccugcccuaccagaacauccaccccgugaccaucggcgagugccccaaguacgugagaagcgccaagcugagaauggugaccggccugagaaacauccccagcauccagagcagaggccuguucggcgccaucgccggcuucaucgagggcggcuggaccggcaugaucgacggcugguacggcuaccaccaccagaacgagcagggcagcggcuacgccgccgaccagaagagcacccagaacgccaucaacggcaucaccaacaaggugaacaccgugaucgagaagaugaacauccaguucaccgccgugggcaaggaguucaacaagcuggagaagagaauggagaaccugaacaagaagguggacgacggcuuccuggacaucuggaccuacaacgccgagcugcuggugcugcuggagaacgagagaacccuggacuuccacgacagcaacgugaagaaccuguacgagaaggugaagagccagcugaagaacaacgccaaggagaucggcaacggcugcuucgaguucuaccacaagugcgacaacgagugcauggagagcgugagaaacggcaccuacgacuaccccaaguacagcgaggagagcaagcugaacagagagaagguggacggcgugaagcuggagagcaugggcaucuaccagauccuggccaucuacagcaccguggccagcagccuggugcugcuggugagccugggcgccaucagcuucuggaugugcagcaacggcagccugcagugcagaaucugcaucuga

SEQ ID NO: 170166 - RNA, 1698 nt, Artificial Sequence
  derived and/or modified CDS sequence (opt4) from hemagglutinin__InfluenzaA__AGO00397
augaaggccaaccugcuggugcugcugugcgcccuggccgccgccgacgccgacaccaucugcaucggcuaccacgccaacaacagcaccgacaccguggacaccgugcuggagaagaacgugaccgugacccacagcgugaaccugcuggaggacagccacaacggcaagcugugcagacugaagggcaucgccccccugcagcugggcaagugcaacaucgccggcuggcugcugggcaaccccgagugcgacccccugcugcccgugggcagcuggagcuacaucguggagacccccaacagcgagaacggcaucugcuaccccggcgacuucaucgacuacgaggagcugagagagcagcugagcagcgugagcagcuucgagagauucgagaucuuccccaaggagagcagcuggcccgaccacaacaccaacggcgugaccgccgccugcagccacgagggcaagagcagcuucuacagaaaccugcuguggcugaccgagaaggagagcagcuaccccaagcugaagaacagcuacgugaacaagaagggcaaggaggugcuggugcuguggggcauccaccacccccccaacagcaaggagcagcagaaccuguaccagaacgagaacgccuacgugagcguggugaccagcaacuacaacagaagauucacccccgagaucgccgagagacccaaggugaaggaccaggccggcagaaugaacuacuacuggacccugcugaagcccggcgacaccaucaucuucgaggccaacggcaaccugaucgcccccauguacgccuucgcccugagcagaggcuucggcagcggcaucaucaccagcaacgccagcaugcacgagugcaacaccaagugccagaccccccugggcgccaucaacagcagccugcccuaccagaacauccaccccgugaccaucggcgagugccccaaguacgugagaagcgccaagcugagaauggugaccggccugagaaacauccccagcauccagagcagaggccuguucggcgccaucgccggcuucaucgagggcggcuggaccggcaugaucgacggcugguacggcuaccaccaccagaacgagcagggcagcggcuacgccgccgaccagaagagcacccagaacgccaucaacggcaucaccaacaaggugaacaccgugaucgagaagaugaacauccaguucaccgccgugggcaaggaguucaacaagcuggagaagagaauggagaaccugaacaagaagguggacgacggcuuccuggacaucuggaccuacaacgccgagcugcuggugcugcuggagaacgagagaacccuggacuuccacgacagcaacgugaagaaccuguacgagaaggugaagagccagcugaagaacaacgccaaggagaucggcaacggcugcuucgaguucuaccacaagugcgacaacgagugcauggagagcgugagaaacggcaccuacgacuaccccaaguacagcgaggagagcaagcugaacagagagaagguggacggcgugaagcuggagagcaugggcaucuaccagauccuggccaucuacagcaccguggccagcagccuggugcugcuggugagccugggcgccaucagcuucuggaugugcagcaacggcagccugcagugcagaaucugcaucuga

SEQ ID NO: 170167 - RNA, 1698 nt, Artificial Sequence
  derived and/or modified CDS sequence (opt4) from hemagglutinin__InfluenzaA__AGO00409
augaaggccaaccugcuggugcugcugugcgcccuggccgccgccgacgccgacaccaucugcaucggcuaccacgccaacaacagcaccgacaccguggacaccgugcuggagaagaacgugaccgugacccacagcgugaaccugcuggaggacagccacaacggcaagcugugcagacugaagggcaucgccccccugcagcugggcaagugcaacaucgccggcuggcugcugggcaaccccgagugcgacccccugcugcccgugggcagcuggagcuacaucguggagacccccaacagcgagaacggcaucugcuaccccggcgacuucaucgacuacgaggagcugagagagcagcugagcagcgugagcagcuucgagagauucgagaucuuccccaaggagagcagcuggcccgaccacaacaccaacggcgugaccgccgccugcagccacgagggcaagaacagcuucuacagaaaccugcuguggcugaccgagaagaagagcagcuaccccgagcugaagaacagcuacgugaacaagaagggcaaggaggugcuggugcuguggggcauccaccacccccccaacagcaaggagcagcagaaccuguaccagaacgagaacgccuacgugagcguggugaccagcaacuacaacagaagauucacccccgagaucgccgagagacccaaggugaaggaccaggccggcagaaugaacuacuacuggacccugcugaagcccggcgacaccaucaucuucgaggccaacggcaaccugaucgcccccauguacgccuucgcccugagcagaggcuucggcagcggcaucaucaccagcaacgccagcaugcacgagugcaacaccaagugccagaccccccugggcgccaucaacagcagccugcccuaccagaacauccaccccgugaccaucggcgagugccccaaguacgugagaagcgccaagcugagaauggugaccggccugagaaacauccccagcauccagagcagaggccuguucggcgccaucgccggcuucaucgagggcggcuggaccggcaugaucgacggcugguacggcuaccaccaccagaacgagcagggcagcggcuacgccgccgaccagaagagcacccagaacgccaucaacggcaucaccaacaaggugaacaccgugaucgagaagaugaacauccaguucaccgccgugggcaaggaguucaacaagcuggagaagagaauggagaaccugaacaagaagguggacgacggcuuccuggacaucuggaccuacaacgccgagcugcuggugcugcuggagaacgagagaacccuggacuuccacgacagcaacgugaagaaccuguacgagaaggugaagagccagcugaagaacaacgccaaggagaucggcaacggcugcuucgaguucuaccacaagugcgacaacgagugcauggagagcgugagaaacggcaccuacgacuaccccaaguacagcgaggagagcaagcugaacagagagaagguggacggcgugaagcuggagagcaugggcaucuaccagauccuggccaucuacagcaccguggccagcagccuggugcugcuggugagccugggcgccaucagcuucuggaugugcagcaacggcagccugcagugcagaaucugcaucuga

SEQ ID NO: 170168 - RNA, 1698 nt, Artificial Sequence
  derived and/or modified CDS sequence (opt4) from hemagglutinin__InfluenzaA__AGO00421
augaaggccaaccugcuggugcugcugugcgcccuggccgccgccgacgccgacaccaucugcaucggcuaccacgccaacaacagcaccgacaccguggacaccgugcuggagaagaacgugaccgugacccacagcgugaaccugcuggaggacagccacaacggcaagcugugcaagcugaagggcaucgccccccugcagcugggcaagugcaacaucgccggcuggcugcugggcaaccccggcugcgacccccugcugcccgugggcagcuggagcuacaucguggagacccccaacagcgagaacggcaucugcuaccccggcgacuucaucgacuacgaggagcugagagagcagcugagcagcgugagcagcuucgagagauucaagaucuuccccaaggagagcagcuggcccgaccacaacaccaccggcgugaccgccgccugcagccacgagggcaagaacagcuucuacagaaaccugcuguggcugaccaagaaggagagcagcuaccccgagcugaagaacagcuacgugaacaagaagagaaaggaggugcuggugcuguggggcauccaccacccccccaacagcaaggagcagcagaaccuguaccagaacgagaacgccuacgugagcguggugaccagcaacuacaacagaagauucacccccgagaucgccgagagacccaaggugaagggccaggccggcagaaugaacuacuacuggacccugcugaagcccggcgacaccaucaucuucgaggccaacggcaaccugaucgcccccauguacgccuucgcccugagcagaggcuucggcagcggcaucaucaccagcaacgccagcaugcacgagugcaacaccaagugccagaccccccugggcgccaucaacagcagccugcccuaccagaacauccaccccgugaccaucggcgagugccccaaguacgugagaagcgccaagcugagaauggugaccggccugagaaacauccccagcauccagagcagaggccuguucggcgccaucgccggcuucaucgagggcggcuggaccggcaugaucgacggcugguacggcuaccaccaccagaacgagcagggcagcggcuacgccgccgaccagaagagcacccagaacgccaucaacggcaucaccaacaaggugaacaccgugaucgagaagaugaacauccaguucaccgccgugggcaaggaguucaacaagcuggagaagagaauggagaaccugaacaagaagguggacgacggcuuccuggacaucuggaccuacaacgccgagcugcuggugcugcuggagaacgagagaacccuggacuuccacgacagcaacgugaagaaccuguacgagaaggugaagagccagcugaagaacaacgccaaggagaucggcaacggcugcuucgaguucuaccacaagugcgacaacgagugcauggagagcgugagaaacggcaccuacgacuaccccaaguacagcgaggagagcaagcugaacagagagaagguggacggcgugaagcuggagagcaugggcaucuaccagauccuggccaucuacagcaccguggccagcagccuggugcugcuggugagccugggcgccaucagcuucuggaugugcagcaacggcagccugcagugcagaaucugcaucuga

SEQ ID NO: 170169 - RNA, 1698 nt, Artificial Sequence
  derived and/or modified CDS sequence (opt4) from hemagglutinin__InfluenzaA__AGO00433
augaaggccaaccugcuggugcugcugugcgcccuggccgccgccgacgccgacaccaucugcaucggcuaccacgccaacaacagcaccgacaccguggacaccgugcuggagaagaacgugaccgugacccacagcgugaaccugcuggaggacagccacaacggcaagcugugcagacugaagggcaucgccccccugcagcugggcaagugcaacaucgccggcuggcugcugggcaaccccgagugcgacccccugcugcccgugagaagcuggagcuacaucguggagacccccaacagcgagaacggcaucugcuaccccggcgacuucaucgacuacgaggagcugagagagcagcugagcagcgugagcagcuucgagagauucgagaucuuccccaaggagagcagcuggcccaaccacaacaccaacggcgugaccgccgccugcagccacgagggcaagagcagcuucuacagaaaccugcuguggcugaccgagaaggagggcagcuaccccaagcuggagaacagcuacgugaacaagaagggcaaggaggugcuggugcuguggggcauccaccacccccccaacagcaaggagcagcagaaccuguaccagaacgagaacgccuacgugagcguggugaccagcaacuacaacagaagauucacccccgagaucgccgagagacccaaggugagagaccaggccggcagaaugaacuacuacuggacccugcugaagcccggcgacaccaucaucuucgaggccaacggcaaccugaucgcccccauguacgccuucgcccugagcagaggcuucggcagcggcaucaucaccagcaacgccagcaugcacgagugcaacaccaagugccagaccccccugggcgccaucaacagcagccugcccuaccagaacauccaccccgugaccaucggcgagugccccaaguacgugagaagcgccaagcugagaauggugaccggccugagaaacauccccagcauccagagcagaggccuguucggcgccaucgccggcuucaucgagggcggcuggaccggcaugaucgacggcugguacggcuaccaccaccagaacgagcagggcagcggcuacgccgccgaccagaagagcacccagaacgccaucaacggcaucaccaacaaggugaacaccgugaucgagaagaugaacauccaguucaccgccgugggcaaggaguucaacaagcuggagaagagaauggagaaccugaacaagaagguggacgacggcuuccuggacaucuggaccuacaacgccgagcugcuggugcugcuggagaacgagagaacccuggacuuccacgacagcaacgugaagaaccuguacgagaaggugaagagccagcugaagaacaacgccaaggagaucggcaacggcugcuucgaguucuaccacaagugcgacaacgagugcauggagagcgugagaaacggcaccuacgacuaccccaaguacagcgaggagagcaagcugaacagagagaagguggacggcgugaagcuggagagcaugggcaucuaccagauccuggccaucuacagcaccguggccagcagccuggugcugcuggugagccugggcgccaucagcuucuggaugugcagcaacggcagccugcagugcagaaucugcaucuga

SEQ ID NO: 170170 - RNA, 1698 nt, Artificial Sequence
  derived and/or modified CDS sequence (opt4) from hemagglutinin__InfluenzaA__AGO00445
augaaggccaaccugcuggugcugcugugcgcccuggccgccgccgacgccgacaccaucugcaucggcuaccacgccaacaacagcaccgacaccguggacaccgugcuggagaagaacgugaccgugacccacagcgugaaccugcuggaggacagccacaacggcaagcugugcagacugaagggcaucgccccccugcagcugggcaagugcaacaucgccggcuggcugcugggcaaccccgagugcgacccccugcugcccgugagaagcuggagcuacaucguggagacccccaacagcgagaacggcaucugcuaccccggcgacuucaucgacuacgaggagcugagagagcagcugagcagcgugagcagcuucgagagauucgagaucuuccccaaggagagcagcuggcccaaccacaacaccaacggcgugaccgccgccugcagccacgagggcaagagcagcuucuacagaaaccugcuguggcugaccgagaaggagggcagcuaccccacccugaagaacagcuacgugaacaagaagggcaaggaggugcuggugcuguggggcauccaccacccccccaacagcaaggagcagcagaaccuguaccagaacgagaacgccuacgugagcguggugaccagcaacuacaacagaagauucacccccgagaucgccgagagacccaaggugagagaccaggccggcagaaugaacuacuacuggacccugcugaagcccggcgacaccaucaucuucgaggccaacggcaaccugaucgcccccauguacgccuucgcccugagcagaggcuucggcagcggcaucaucaccagcaacgccagcaugcacgagugcaacaccaagugccagaccccccugggcgccaucaacagcagccugcccuaccagaacauccaccccgugaccaucggcgagugccccaaguacgugagaagcgccaagcugagaauggugaccggccugagaaacauccccagcauccagagcagaggccuguucggcgccaucgccggcuucaucgagggcggcuggaccggcaugaucgacggcugguacggcuaccaccaccagaacgagcagggcagcggcuacgccgccgaccagaagagcacccagaacgccaucaacggcaucaccaacaaggugaacaccgugaucgagaagaugaacauccaguucaccgccgugggcaaggaguucaacaagcuggagaagagaauggagaaccugaacaagaagguggacgacggcuuccuggacaucuggaccuacaacgccgagcugcuggugcugcuggagaacgagagaacccuggacuuccacgacagcaacgugaagaaccuguacgagaaggugaagagccagcugaagaacaacgccaaggagaucggcaacggcugcuucgaguucuaccacaagugcgacaacgagugcauggagagcgugagaaacggcaccuacgacuaccccaaguacagcgaggagagcaagcugaacagagagaagguggacggcgugaagcuggagagcaugggcaucuaccagauccuggccaucuacagcaccguggccagcagccuggugcugcuggugagccugggcgccaucagcuucuggaugugcagcaacggcagccugcagugcagaaucugcaucuga

SEQ ID NO: 170171 - RNA, 1701 nt, Artificial Sequence
  derived and/or modified CDS sequence (opt4) from hemagglutinin__InfluenzaA__AGO02696
augaaggccauccugguggugaugcuguacaccuucgccaccgccaacgccgacacccugugcaucggcuaccacgccaacaacagcaccgacaccguggacaccgugcuggagaagaacgugaccgugacccacagcgugaaccugcuggaggacaagcacaacggcaagcugugcaagcugagaggcguggccccccugcaccugggcaagugcaacaucgccggcuggauccugggcaaccccgagugcgagagccugagcaccgccagcagcuggagcuacaucguggagaccagcagcagcgacaacggcaccugcuaccccggcgacuucaucgacuacgaggagcugagagagcagcugagcagcgugagcagcuucgagagauucgagaucuuccccaagaccagcagcuggcccaaccacgacagcaacaagggcgugaccgccgccugcccccacgccggcgccaagggcuucuacaagaaccugaucuggcuggugaagaagggcaacagcuaccccaagcugagcaucagcuacaucaacgacaagggcaaggaggugcuggugcuguggggcauccaccaccccagcaccaccgccgaccagcagagccuguaccagaacgccgacaccuacguguucgugggcaccagcagauacagcaagaaguucaagcccgagaucgccaucagacccaaggugagagaccaggagggcagaaugaacuacuacuggacccugguggagcccggcgacaagaucaccuucgaggccaccggcaaccugguggugcccagauacgccuucgccauggagagaaacgccggcagcggcaucaucaucagcgacacccccgugcacgacugcaacaccaccugccagacccccaagggcgccaucaacaccagccugcccuuccagaacauccaccccaucaccaucggcaagugccccaaguacgugaagagcaccaagcugagacuggccaccggccugagaaacgugcccagcauccagagcagaggccuguucggcgccaucgccggcuucaucgagggcggcuggaccggcaugguggacggcugguacggcuaccaccaccagaacgagcagggcagcggcuacgccgccgaccugaagagcacccagaacgccaucgacaagaucaccaacaaggugaacagcgugaucgagaagaugaacacccaguucaccgccgugggcaaggaguucaaccaccuggagaagagaaucgagaaccugaacaagaagguggacgacggcuuccuggacaucuggaccuacaacgccgagcugcuggugcugcuggagaacgagagaacccuggacuaccacgacagcaacgugaagaaccuguacgagaaggugagaaaccagcugaagaacaacgccaaggagaucggcaacggcugcuucgaguucuaccacaagugcgacaacaccugcauggagagcgugaagaacggcaccuacgacuaccccaaguacagcgaggaggccaagcugaacagagaggagaucgacggcgugaagcuggagagcaccagaaucuaccagauccuggccaucuacagcaccgccgccagcagccuggugcugguggugagccugggcgccaucagcuucuggaugugcagcaacggcagccugcagugcagaaucugcaucuga

SEQ ID NO: 170172 - RNA, 1701 nt, Artificial Sequence; identical to SEQ ID NO: 170100
  derived and/or modified CDS sequence (opt4) from hemagglutinin__InfluenzaA__AGO02697

SEQ ID NO: 170173 - RNA, 1701 nt, Artificial Sequence; identical to SEQ ID NO: 169918
  derived and/or modified CDS sequence (opt4) from hemagglutinin__InfluenzaA__AGO02698

SEQ ID NO: 170174 - RNA, 1701 nt, Artificial Sequence; identical to SEQ ID NO: 169918
  derived and/or modified CDS sequence (opt4) from hemagglutinin__InfluenzaA__AGO02699

SEQ ID NO: 170175 - RNA, 1701 nt, Artificial Sequence
  derived and/or modified CDS sequence (opt4) from hemagglutinin__InfluenzaA__AGO02700
augaaggccauccugguggugcugcuguacaccuucgccaccgccaacgccgacacccugugcaucggcuaccacgccaacaacagcaccgacaccguggacaccgugcuggagaagaacgugaccgugacccacagcgugaaccugcuggaggacaagcacaacggcaagcugugcaagcugagaggcguggccccccugcaccugggcaagugcaacaucgccggcuggauccugggcaaccccgagugcgagagccugagcaccgccagcagcuggagcuacaucguggagaccagcagcagcgacaacggcaccugcuaccccggcgacuucaucaacuacgaggagcugagagagcagcugagcagcgugagcagcuucgagagauucgagaucuuccccaagaccagcagcuggcccaaccacgacagcaacaagggcgugaccgccgccugcccccaggccggcgccaagagcuucuacaagaaccugaucuggcuggugaagaagggcaacagcuaccccaagcugagcaagagcuacaucaacgacaagggcaaggaggugcuggugcuguggggcauccaccaccccagcaccagcgccgaccagcagagccuguaccagaacgccgacgccuacguguucgugggcaccagcaaguacagcaagaaguucaagcccgagaucgccgugagacccaaggugagagaccaggagggcagaaugaacuacuacuggacccugguggagcccggcgacaagaucaccuucgaggccaccggcaaccugcuggugcccagauacgccuucgccauggagagaaacgccggcagcggcaucaucaucagcgacacccccgugcacgacugcaacaccaccugccagacccccaagggcgccaucaacaccagccugcccuuccagaacauccaccccaucaccaucggcaagugccccaaguacgugaagagcaccaagcugagacuggccaccggccugagaaacgugcccagcauccagagcagaggccuguucggcgccaucgccggcuucaucgagggcggcuggaccggcaugguggacggcugguacggcuaccaccaccagaacgcccagggcagcggcuacgccgccgaccugaagagcacccagaacgccaucgacaagaucaccaacaaggugaacagcgugaucgagaagaugaacacccaguucaccgccgugggcaaggaguucaaccaccuggagaagagaaucgagaaccugaacaagaagguggacgacggcuuccuggacaucuggaccuacaacgccgagcugcuggugcugcuggagaacgagagaacccuggacuaccacgacagcaacgugaagaaccuguacgagaaggugagaagccagcugaagaacaacgccaaggagaucggcaacggcugcuucgaguucuaccacaagugcgacaacaccugcauggagagcgugaagaacggcaccuacgacuaccccagauacagcgaggaggccaagcugaacagagaggagaucgacggcaucaagcuggagagcaccagaaucuaccagauccuggccaucuacagcaccguggccagcagccuggugcugaucgugagccugggcgccaucagcuucuggaugugcagcaacggcagccugcagugcagaaucugcaucuga

SEQ ID NO: 170176 - RNA, 1701 nt, Artificial Sequence
  derived and/or modified CDS sequence (opt4) from hemagglutinin__InfluenzaA__AGO02701
augaaggccauccugguggugcugcuguacaccuucgccaccgccaacgccgacacccugugcaucggcuaccacgccaacaacagcaccgacaccguggacaccgugcuggagaagaacgugaccgugacccacagcgugaaccugcuggaggacaagcacaacggcaagcugugcaagcugagaggcguggccccccugcaccugggcaagugcaacaucgccggcuggauccugggcaaccccgagugcgagagccugagcaccgccagcagcuggagcuacaucguggagaccagcagcagcgacaacggcaccugcuaccccggcgacuucaucaacuacgaggagcugagagagcagcugagcagcgugagccacuucgagagauucgagaucuuccccaagaccagcagcuggcccaaccacgacagcaacaagggcgugaccgccgccugcccccacgccggcgccaagagcuucuacaagaaccugaucuggcuggugaagaagggcaacagcuaccccaagcugagcaagagcuacaucaacgacaagggcaaggaggugcuggugcuguggggcauccaccaccccagcaccagcgccgaccagcagagccuguaccagaacgccgacgccuacguguucgugggcaccagcaaguacagcaagaaguucaagcccgagaucgccgugagacccaaggugagagaccaggagggcagaaugaacuacuacuggacccugguggagcccggcgacaagaucaccuucgaggccaccggcaaccugcuggugcccagauacgccuucgccauggagagaaacgccggcagcggcaucaucaucagcgacacccccgugcacgacugcaacaccaccugccagacccccaagggcgccaucaacaccagccugcccuuccagaacauccaccccaucaccaucggcaagugccccaaguacgugaagagcaccaagcugagacuggccaccggccugagaaacgugcccagcauccagagcagaggccuguucggcgccaucgccggcuucaucgagggcggcuggaccggcaugguggacggcugguacggcuaccaccaccagaacggccagggcagcggcuacgccgccgaccugaagagcacccagaacgccaucgacaagaucaccaacaaggugaacagcgugaucgagaagaugaacacccaguucaccgccgugggcaaggaguucaaccaccuggagaagagaaucgagaaccugaacaagaagguggacgacggcuuccuggacaucuggaccuacaacgccgagcugcuggugcugcuggagaacgagagaacccuggacuaccacgacagcaacgugaagaaccuguacgagaaggugagaagccagcugaagaacaacgccaaggagaucggcaacggcugcuucgaguucuaccacaagugcgacaacaccugcauggagagcgugaagaacggcaccuacgacuaccccaaguacagcgaggaggccaagcugaacagagaggagaucgacggcgugaagcuggagagcaccagaaucuaccagauccuggccaucuacagcaccguggccagcagccuggugcugguggugagccugggcgccaucagcuucuggaugugcagcaacggcagccugcagugcagaaucugcaucuga

SEQ ID NO: 170177 - RNA, 1683 nt, Artificial Sequence; identical to SEQ ID NO: 170048
  derived and/or modified CDS sequence (opt4) from hemagglutinin__InfluenzaA__AGO51374

SEQ ID NO: 170178 - RNA, 1701 nt, Artificial Sequence
  derived and/or modified CDS sequence (opt4) from hemagglutinin__InfluenzaA__AGO86686
augaagaccaucaucgcccugagcuacauccugugccuggccuucgcccagaagcugcccggcaacgacaacagcaccgccacccugugccugggccaccacgccgugcccaacggcacccuggugaagaccaucaccaacgaccagaucgaggugaccaacgccaccgagcuggugcagagcagcagcaccggcagaaucugcgacagcccccaccagauccuggacggcgagaacugcacccugaucgacgcccugcugggcgacccccacugcgacggcuuccagaacaaggagugggaccuguucguggagagaagcaaggccuacagcaacugcuaccccuacgacgugcccgacuacgccagccugagaagccugguggccagcagcggcacccuggaguucaacaacgagagcuucaacuggaccggcguggcccagaacggcaccagcagcgccugcaagagaagaagcaucaagagcuucuucagcagacugaacuggcugcaccagcuggagaacagauaccccgcccugaacgugaccaugcccaacaacgacaaguucgacaagcuguacaucuggggcgugcaccaccccagcaccgacagcgaccagaucagcguguacgcccaggccagcggcagagugaccgugagcaccaagagaagccagcagaccgugauccccaacaucggcagcagacccugggugagaggcaucagcagcagaaucagcaucuacuggaccaucgugaagcccggcgacauccugcugaucaacagcaccggcaaccugaucgcccccagaggcuacuucaagaucagaagcggcaagagcagcaucaugagaagcgacgcccccaucggcaagugcaacagcgagugcaucacccccaacggcagcauccccaacgacaagcccuuccagaacgugaacagaaucaccuacggcgccugccccagauacgugaagcagaacacccugaagcuggccaccggcaugagaaacgugcccgagaagcagaccagaggcaucuucggcgccaucgccggcuucaucgagaacggcugggagggcaugauggacggcugguacggcuucagacaccagaacagcgagggcaccggccaggccgccgaccugaagagcacccaggccgccaucaaccagaucaacggcaagcugaacaagcugaucgagaagaccaacgagaaguuccaccagaucgagaaggaguucagcgagguggagggcagaauccaggaccuggagaaguacguggaggacaccaagaucgaccuguggagcuacaacgccgagcugcugguggcccuggagaaccagcacaccaucgaccugaccgacagcgagaugaacaagcuguucgagagaaccagaaagcagcugagagagaacgccgaggacaugggcaacggcugcuucaagaccuaccacaagugcgacaacgccugcaucggcagcaucagaaacggcaccuacgaccacgacguguacagagacgaggcccugaacaacagauuccagaucaagggcguggagcugaagagcggcuacaaggacuggauccuguggaucagcuucgccaucagcugcuuccugcugugcguggugcugcugggcuucaucaugugggccugccagaagggcaacaucagaugcaacaucugcaucuga

SEQ ID NO: 170179 - RNA, 1701 nt, Artificial Sequence; identical to SEQ ID NO: 170100
  derived and/or modified CDS sequence (opt4) from hemagglutinin__InfluenzaA__AGQ16240

SEQ ID NO: 170180 - RNA, 1701 nt, Artificial Sequence; identical to SEQ ID NO: 170100
  derived and/or modified CDS sequence (opt4) from hemagglutinin__InfluenzaA__AGQ16241

SEQ ID NO: 170181 - RNA, 1701 nt, Artificial Sequence
  derived and/or modified CDS sequence (opt4) from hemagglutinin__InfluenzaA__AGQ16242
augaaggccauccugguggugcugcuguacaccuucgccaccgccaacgccgacacccugugcaucggcuaccacgccaacaacagcaccgacaccguggacaccgugcuggagaagaacgugaccgugacccacagcgugaaccugcuggaggacaagcacaacggcaagcugugcaagcugagaggcguggccccccugcaccugggcaagugcaacaucgccggcuggauccugggcaaccccgagugcgagagccugagcaccgccagcagcuggagcuacaucguggagaccagcagcagcgacaacggcaccugcuaccccggcgacuucaucaacuacgaggagcugagagagcagcugagcagcgugagcagcuucgagagauucgagaucuuccccaagaccagcagcuggcccaaccacgacagcaacaagggcgugaccgccgccugcccccacgccggcgccaagagcuucuacaagaaccugaucuggcuggugaagaagggcaacagcuaccccaagcugagcaccagcuacaucaacgacaagggcaaggagauccuggugcuguggggcauccaccaccccagcaccaccgccgaccagcagagccuguaccagaacgccgacgccuacguguucgugggcaccagcagauacagcaagaaguucaagcccgagaucgccaucagacccaaggugagagaccaggagggcagaaugaacuacuacuggacccugguggagcccggcgacaagaucaccuucgaggccaccggcaaccugguggugcccagauacgccuucgccauggagagaaacgccggcagcggcaucaucaucagcgacacccccgugcacgacugcaacaccaccugccagacccccgagggcgccaucaacaccagccugcccuuccagaacauccaccccaucaccaucggcaagugccccaaguacgugaagagcaccaagcugagacuggccaccggccugagaaacgugcccagcauccagagcagaggccuguucggcgccaucgccggcuucaucgagggcggcuggaccggcaugguggacggcugguacggcuaccaccaccagaacgagcagggcagcggcuacgccgccgaccugaagagcacccagaacgccaucgacaagaucaccaacaaggugaacagcgugaucgagaagaugaacacccaguucaccgccgugggcaaggaguucaaccaccuggagaagagaaucgagaaccugaacaagaagguggacgacggcuuccuggacaucuggaccuacaacgccgagcugcuggugcugcuggagaacgagagaacccuggacuaccacgacagcaacgugaagaaccuguacgagaaggugagaaaccagcugaagaacaacgccaaggagaucggcaacggcugcuucgaguucuaccacaagugcgacaacaccugcauggagagcgugaagaacggcaccuacgacuaccccaaguacagcgaggaggccaagcugaacagagagaagaucgacggcgugaagcuggagagcaccagaaucuaccagauccuggccaucuacagcaccguggccagcagccuggugcugguggugagccugggcgccaucagcuucuggaugugcagcaacggcagccugcagugcagaaucugcaucuga

SEQ ID NO: 170182 - RNA, 1701 nt, Artificial Sequence; identical to SEQ ID NO: 170120
  derived and/or modified CDS sequence (opt4) from hemagglutinin__InfluenzaA__AGQ16243

SEQ ID NO: 170183 - RNA, 1701 nt, Artificial Sequence
  derived and/or modified CDS sequence (opt4) from hemagglutinin__InfluenzaA__AGQ16245
augaaggccauccugguggugcugcuguacaccuucgccaccgccaacgccgacacccugugcaucggcuaccacgccaacaacagcaccgacaccguggacaccgugcuggagaagaacgugaccgugacccacagcgugaaccugcuggaggacaagcacaacggcaagcugugcaagcugagaggcguggccccccugcaccugggcaagugcaacaucgccggcuggauccugggcaaccccgagugcgagagccugagcaccgccagcagcuggagcuacaucguggagaccagcagcagcgacaacggcaccugcuaccccggcgacuucaucaacuacgaggagcugagagagcagcugagcagcgugagcagcuucgagagauucgagaucuuccccaagaccagcagcuggcccaaccacgacagcaacaagggcgugaccgccgccugcccccacgccggcgccaagagcuucuacaagaaccugaucuggcuggugaagaagggcaacagcuaccccaagcugagcaagagcuacaucaacgacaagggcaaggaggugcuggugcuguggggcauccaccaccccagcaccaccgccgaccagcagagccuguaccagaacgccgacgccuacguguucgugggcaccagcagauacagcaagaaguucaagcccgagaucgccaucagacccaaggugagagaccaggagggcagaaugaacuacuacuggacccugaucgagcccggcgacaagaucaccuucgaggccaccggcaaccugguggugcccagauacgccuucgccauggagagaaacgccggcagcggcaucaucaucagcgacacccccgugcacgacugcaacaccaccugccagacccccgagggcgccaucaacaccagccugcccuuccagaacauccaccccaucaccaucggcaagugccccaaguacgugaagagcaccaagcugagacuggccaccggccugagaaacgugcccagcauccagagcagaggccuguucggcgccaucgccggcuucaucgagggcggcuggaccggcaugguggacggcugguacggcuaccaccaccagaacgagcagggcagcggcuacgccgccgaccugaagagcacccagaacgccaucgacaagaucaccaacaaggugaacagcgugaucgagaagaugaacacccaguucaccgccgugggcaaggaguucaaccaccuggagaagagaaucgagaaccugaacaagaagguggacgacggcuuccuggacaucuggaccuacaacgccgagcugcuggugcugcuggagaacgagagaacccuggacuaccacgacagcaacgugaagaaccuguacgagaaggugagaaaccagcugaagaacaacgccaaggagaucggcaacggcugcuucgaguucuaccacaagugcgacaacaccugcauggagagcgugaagaacggcaccuacgacuaccccaaguacagcgaggaggccaagcugaacagagagaagaucgacggcgugaagcuggagagcaccagaaucuaccagauccuggccaucuacagcaccguggccagcagccuggugcugguggugagccugggcgccaucagcuucuggaugugcagcaacggcagccugcagugcagaaucugcaucuga

SEQ ID NO: 170184 - RNA, 1701 nt, Artificial Sequence; identical to SEQ ID NO: 170120
  derived and/or modified CDS sequence (opt4) from hemagglutinin__InfluenzaA__AGQ16247

SEQ ID NO: 170185 - RNA, 1701 nt, Artificial Sequence
  derived and/or modified CDS sequence (opt4) from hemagglutinin__InfluenzaA__AGQ16248
augcaggccauccugguggugcugcuguacaccuucgccaccgccaccgccgacacccugugcaucggcuaccacgccaacaacagcaccgacaccguggacaccgugcuggagaagaacgugaccgugacccacagcgugaaccugcuggaggacaagcacaacggcaagcugugcaagcugagaggcguggccccccugcaccugggcaagugcaacaucgccggcuggauccugggcaaccccgagugcgagagccugagcaccgccagcagcuggagcuacaucguggagaccagcagcagcgacaacggcaccugcuaccccggcgacuucaucaacuacgaggagcugagagagcagcugagcagcgugagcagcuucgagagauucgagaucuuccccaagaccagcagcuggcccaaccacgacagcaacaagggcgugaccgccgccugcccccacgccggcgccaagagcuucuacaagaaccugaucuggcuggugaagaagggcaacagcuaccccaagcugagccagagcuacaucaacgacaagggcaaggaggugcuggugcuguggggcauccaccaccccagcaccaccgccgaccagcagagccuguaccagaacgccgacgccuacguguucgugggcaccagcagauacagcaagaaguucaagcccgagaucgccaucagacccaaggugagagaccaggagggcagaaugaacuacuacuggacccugguggagcccggcgacaagaucaccuucgaggccaccggcaaccugguggugcccagauacgccuucaccauggagagaaacgccggcagcggcaucaucaucagcgacacccccauccacgacugcaacaccaccugccagacccccgagggcgccaucaacaccagccugcccuuccagaacauccaccccaucaccaucggcaagugccccaaguacgugaagagcaccaagcugagacuggccaccggccugagaaacgugcccagcauccagagcagaggccuguucggcgccaucgccggcuucaucgagggcggcuggaccggcaugguggacggcugguacggcuaccaccaccagaacgagcagggcagcggcuacgccgccgaccugaagagcacccagaacgccaucgacaagaucaccaacaaggugaacagcgugaucgagaagaugaacacccaguucaccgccgugggcaaggaguucaaccaccuggagaagagaaucgagaaccugaacaagaagguggacgacggcuuccuggacaucuggaccuacaacgccgagcugcuggugcugcuggagaacgagagaacccuggacuaccacgacagcaacgugaagaaccuguacgagaaggugagaaaccagcugaagaacaacgccaaggagaucggcaacggcugcuucgaguucuaccacaagugcgacaacaccugcauggagagcgugaagaacggcaccuacgacuaccccaaguacagcgaggaggccaagcugaacagagagaagaucgacggcgugaagcuggagagcaccagaaucuaccagauccuggccaucuacagcaccguggccagcagccuggugcugguggugagccugggcgccaucagcuucuggaugugcagcaacggcagccugcagugcagaaucugcaucuga

SEQ ID NO: 170186 - RNA, 1701 nt, Artificial Sequence; identical to SEQ ID NO: 169918
  derived and/or modified CDS sequence (opt4) from hemagglutinin__InfluenzaA__AGQ16329

SEQ ID NO: 170187 - RNA, 1701 nt, Artificial Sequence; identical to SEQ ID NO: 169943
  derived and/or modified CDS sequence (opt4) from hemagglutinin__InfluenzaA__AGQ16331

SEQ ID NO: 170188 - RNA, 1701 nt, Artificial Sequence; identical to SEQ ID NO: 169918
  derived and/or modified CDS sequence (opt4) from hemagglutinin__InfluenzaA__AGQ16332

SEQ ID NO: 170189 - RNA, 1701 nt, Artificial Sequence; identical to SEQ ID NO: 169918
  derived and/or modified CDS sequence (opt4) from hemagglutinin__InfluenzaA__AGQ16333

SEQ ID NO: 170190 - RNA, 1701 nt, Artificial Sequence
  derived and/or modified CDS sequence (opt4) from hemagglutinin__InfluenzaA__AGQ16335
augaagaccaucaucgcccugagcuacauccugugccugguguucgcccagaagcugcccggcaacgacaacagcaccgccacccugugccugggccaccacgccgugcccaacggcaccaucgugaagaccaucaccaacgacagaaucgaggugaccaacgccaccgagcuggugcagaacagcagcaucggcgagaucugcgacagcccccaccaggugcuggacggcgagaacugcacccugaucgacgcccugcugggcgacccccagugcgacggcuuccagaacaagaagugggaccuguucguggagagaagcaaggccuacagcaacugcuaccccuacgacgugcccgacuacgccagccugagaagccugguggccagcagcggcacccuggaguucaacaacgagagcuucaacuggaccggcgugacccagaacggcaccagcagcgccugcaucagaagaagcaacagcagcuucuucagcagacugaacuggcugacccaccugaacuucaaguaccccgcccugaacgugaccaugcccaacaacgagcaguucgacaagcuguacaucuggggcgugcaccaccccggcaccgacaaggaccagaucuuccuguacgcccagagcagcggcagaaucaccgugagcaccaagagaagccagcaggccgugauccccaacaucggcagcagacccagaaucagaaacauccccagcagaaucagcaucuacuggaccaucgugaagcccggcgacauccugcugaucaacagcaccggcaaccugaucgcccccagaggcuacuucaagaucagaagcggcaagagcagcaucaugagaagcgacgcccccaucggcaagugcaagagcgagugcaucacccccaacggcagcauccccaacgacaagcccuuccagaacgugaacagaaucaccuacggcgccugccccagauacgugaagcagaacacccugaagcuggccaccggcaugagaaacgugcccgagaagcagaccagaggcaucuucggcgccaucgccggcuucaucgagaacggcugggagggcaugguggacggcugguacggcuucagacaccagaacagcgagggcagaggccaggccgccgaccugaagagcacccaggccgccaucgaccagaucaacggcaagcugaacagacugaucggcaagaccaacgagaaguuccaccagaucgagaaggaguucagcgagguggagggcagaauccaggaccuggagaaguacguggaggacaccaagaucgaccuguggagcuacaacgccgagcugcugguggcccuggagaaccagcacaccaucgaccugaccgacagcgagaugaacaagcuguucgagaagaccaagaagcagcugagagagaacgccgaggacaugggcaacggcugcuucaagaucuaccacaagugcgacaacgccugcaucggcagcaucagaaacggcaccuacgaccacgacguguacagagacgaggcccugaacaacagauuccagaucaagggcguggagcugaagagcggcuacaaggacuggauccuguggaucagcuucgccaucagcugcuuccugcugugcguggcccugcugggcuucaucaugugggccugccagaagggcaacaucagaugcaacaucugcaucuga

SEQ ID NO: 170191 - RNA, 1701 nt, Artificial Sequence
  derived and/or modified CDS sequence (opt4) from hemagglutinin__InfluenzaA__AGQ16336
augaagaccaucaucgcccugagcuacauccugugccugguguucgcccagaagcugcccggcaacgacaacagcaccgccacccugugccugggccaccacgccgugcccaacggcaccaucgugaagaccaucaccaacgacagaaucgaggugaccaacgccaccgagcuggugcagaacagcagcaucggcgagaucugcgacagcccccaccagauccuggacggcgagaacugcacccugaucgacgcccugcugggcgacccccagugcgacggcuuccagaacaagaagugggaccuguucguggagagaagcaaggccuacagcaacugcuaccccuacgacgugcccgacuacgccagccugagaagccugguggccagcagcggcacccuggaguucaacaacgagagcuucaacuggaccggcgugacccagaacggcaccagcagcgccugcaucagaagaagcaacagaagcuucuucagcagacugaacuggcugacccaccugaacuucaaguaccccgcccugaacgugaccaugcccaacaacgagcaguucgacaagcuguacaucuggggcgugcaccaccccggcaccgacaaggaccagaucuuccuguacgcccagagcagcggcagaaucaccgugagcaccaagagaagccagcaggccgugauccccaacaucggcagcagacccagaaucagaaacauccccagcagaaucagcaucuacuggaccaucgugaagcccggcgacauccugcugaucaacagcaccggcaaccugaucgcccccagaggcuacuucaagaucagaagcggcaagagcagcaucaugagaagcgacgcccccaucggcaagugcaagagcgagugcaucacccccaacggcagcauccccaacgacaagcccuuccagaacgugaacagaaucaccuacggcgccugccccagauacgugaagcagagcacccugaagcuggccaccggcaugagaaacgugcccgagaagcagaccagaggcaucuucggcgccaucgccggcuucaucgagaacggcugggagggcaugguggacggcugguacggcuucagacaccagaacagcgagggcagaggccaggccgccgaccugaagagcacccaggccgccaucgaccagaucaacggcaagcugaacagacugaucggcaagaccaacgagaaguuccaccagaucgagaaggaguucagcgagguggagggcagaauccaggaccuggagaaguacguggaggacaccaagaucgaccuguggagcuacaacgccgagcugcugguggcccuggagaaccagcacaccaucgaccugaccgacagcgagaugaacaagcuguucgagaagaccaagaagcagcugagagagaacgccgaggacaugggcaacggcugcuucaagaucuaccacaagugcgacaacgccugcaucggcagcaucagaaacggcaccuacgaccacgacguguacagagacgaggcccugaacaacagauuccagaucaagggcguggagcugaagagcggcuacaaggacuggauccuguggaucagcuucgccaucagcugcuuccugcugugcguggcccugcugggcuucaucaugugggccugccagaagggcaacaucagaugcaacaucugcaucuga

SEQ ID NO: 170192 - RNA, 1701 nt, Artificial Sequence; identical to SEQ ID NO: 170190
  derived and/or modified CDS sequence (opt4) from hemagglutinin__InfluenzaA__AGQ16337

SEQ ID NO: 170193 - RNA, 1701 nt, Artificial Sequence; identical to SEQ ID NO: 169928
  derived and/or modified CDS sequence (opt4) from hemagglutinin__InfluenzaA__AGQ16338

SEQ ID NO: 170194 - RNA, 1701 nt, Artificial Sequence
  derived and/or modified CDS sequence (opt4) from hemagglutinin__InfluenzaA__AGQ16339
augaagaccaucaucgcccugagcuacauccugugccugguguucgcccagaagcugcccggcaacgacaacagcaccgccacccugugccugggccaccacgccgugcccaacggcaccaucgugaagaccaucaccaacgacagaaucgaggugaccaacgccaccgagcuggugcagaacagcagcaucggcgagaucugcgacagcccccaccagauccuggacggcgagaacugcacccugaucgacgcccugcugggcgacccccagugcgacggcuuccagaacaagaagugggaccuguucguggagagaagcaaggccuacagcaacugcuaccccuacgacgugcccgacuacgccagccugagaagccugguggccagcagcggcacccuggaguucaacaacgagagcuucaacugggccggcgugacccagaacggcaccagcagcgccugcaucagaggcagcaacagcagcuucuucagcagacugaacuggcugacccaccugaacuucaaguaccccgcccugaacgugaccaugcccaacaacgagcaguucgacaagcuguacaucuggggcgugcaccaccccggcaccgacaaggaccagaucuuccuguacgcccagagcagcggcagaaucaccgugagcaccaagagaagccagcaggccgugauccccaacaucggcagcagacccagaaucagaaacauccccagcagaaucagcaucuacuggaccaucgugaagcccggcgacauccugcugaucaacagcaccggcaaccugaucgcccccagaggcuacuucaagaucagaagcggcaagagcagcaucaugagaagcgacgcccccaucggcaagugcaagagcgagugcaucacccccaacggcagcauccccaacgacaagcccuuccagaacgugaacagaaucaccuacggcgccugccccagauacgugaagcagagcacccugaagcuggccaccggcaugagaaacgugcccgagaagcagaccagaggcaucuucggcgccaucgccggcuucaucgagaacggcugggagggcaugauggacggcugguacggcuucagacaccagaacagcgagggcagaggccaggccgccgaccugaagagcacccaggccgccaucgaccagaucaacggcaagcugaacagacugaucggcaagaccaacgagaaguuccaccagaucgagaaggaguucagcgagguggagggcagaauccaggaccuggagaaguacguggaggacaccaagaucgaccuguggagcuacaacgccgagcugcugguggcccuggagaaccagcacaccaucgaccugaccgacagcgagaugaacaagcuguucgagaagaccaagaagcagcugagagagaacgccgaggacaugggcaacggcugcuucaagaucuaccacaagugcgacaacgccugcaucggcagcaucagaaacggcaccuacgaccacgacguguacagagacgaggcccugaacaacagauuccagaucaagggcguggagcugaagagcggcuacaagaacuggauccuguggaucagcuucgccaucagcugcuuccugcugugcguggcccugcugggcuucaucaugugggccugccagaagggcaacaucagaugcaacaucugcaucuga

SEQ ID NO: 170195 - RNA, 1701 nt, Artificial Sequence; identical to SEQ ID NO: 170054
  derived and/or modified CDS sequence (opt4) from hemagglutinin__InfluenzaA__AGQ16340

SEQ ID NO: 170196 - RNA, 1701 nt, Artificial Sequence; identical to SEQ ID NO: 169918
  derived and/or modified CDS sequence (opt4) from hemagglutinin__InfluenzaA__AGQ16341

SEQ ID NO: 170197 - RNA, 1701 nt, Artificial Sequence; identical to SEQ ID NO: 169928
  derived and/or modified CDS sequence (opt4) from hemagglutinin__InfluenzaA__AGQ16342

SEQ ID NO: 170198 - RNA, 1701 nt, Artificial Sequence
  derived and/or modified CDS sequence (opt4) from hemagglutinin__InfluenzaA__AGQ16343
augaagaccaucaucgcccugagcuacauccugugccugguguucgcccagaagcugcccggcaacgacaacagcaccgccacccugugccugggccaccacgccgugcccaacggcaccaucgugaagaccaucaccaacgacagaaucgaggugaccaacgccaccgagcuggugcagaacagcagcaucggcgagaucugcgacagcccccaccagauccuggacggcgagaacugcacccugaucgacgcccugcugggcgacccccagugcgacggcuuccagaacaagaagugggaccuguucguggagagaagcaaggccuacagcaacugcuaccccuacgacgugcccgacuacgccagccugagaagccugguggccagcagcggcacccuggaguucaacaacgagagcuucaacugggccggcgugacccagaacggcaccagcagcgccugcaucagaggcagcaacagcagcuucuucagcagacugaacuggcugacccaccugaacuucaaguaccccgcccugaacgugaccaugcccaacaacgagcaguucgacaagcuguacaucuggggcgugcaccaccccggcaccgacaaggaccagaucuuccuguacgcccagagcagcggcagaaucaccgugagcaccaagagaagccagcaggccgugauccccaacaucggcagcagacccagaaucagagacauccccagcagaaucagcaucuacuggaccaucgugaagcccggcgacauccugcugaucaacagcaccggcaaccugaucgcccccagaggcuacuucaagaucagaagcggcaagagcagcaucaugagaagcgacgcccccaucggcaagugcaagagcgagugcaucacccccaacggcagcauccccaacgacaagcccuuccagaacgugaacagaaucaccuacggcgccugccccagauacgugaagcagagcacccugaagcuggccaccggcaugagaaacgugcccgagaagcagaccagaggcaucuucggcgccaucgccggcuucaucgagaacggcugggagggcaugguggacggcugguacggcuucagacaccagaacagcgagggcagaggccaggccgccgaccugaagagcacccaggccgccaucgaccagaucaacggcaagcugaacagacugaucggcaagaccaacgagaaguuccaccagaucgagaaggaguucagcgagguggagggcagaauccaggaccuggagaaguacguggaggacaccaagaucgaccuguggagcuacaacgccgagcugcugguggcccuggagaaccagcacaccaucgaccugaccgacagcgagaugaacaagcuguucgagaagaccaagaagcagcugagagagaacgccgaggacaugggcaacggcugcuucaagaucuaccacaagugcgacaacgccugcaucggcagcaucagaaacggcaccuacgaccacgacguguacagagacgaggcccugaacaacagauuccagaucaagggcguggagcugaagagcggcuacaaggacuggauccuguggaucagcuucgccaucagcugcuuccugcugugcguggcccugcugggcuucaucaugugggccugccagaagggcaacaucagaugcaacaucugcaucuga

SEQ ID NO: 170199 - RNA, 1701 nt, Artificial Sequence; identical to SEQ ID NO: 169928
  derived and/or modified CDS sequence (opt4) from hemagglutinin__InfluenzaA__AGQ16344

SEQ ID NO: 170200 - RNA, 1701 nt, Artificial Sequence; identical to SEQ ID NO: 169918
  derived and/or modified CDS sequence (opt4) from hemagglutinin__InfluenzaA__AGQ16345

SEQ ID NO: 170201 - RNA, 1701 nt, Artificial Sequence
  derived and/or modified CDS sequence (opt4) from hemagglutinin__InfluenzaA__AGQ16346
augaagaccaucaucgcccugagcuacauccugugccugguguucgcccagaagcugcccggcaacgacaacagcaccgccacccugugccugggccaccacgccgugcccaacggcaccaucgugaagaccaucaccaacgacagaaucgaggugaccaacgccaccgagcuggugcagaacagcagcaucggcgagaucugcgacagcccccaccagauccuggacggcgagaacugcacccugaucgacgcccugcugggcgacccccagugcgacggcuuccagaacaagaagugggaccuguucguggagagaagcaaggccuacagcaacugcuaccccuacgacgugcccgacuacgccagccugagaagccugguggccagcagcggcacccuggaguucaacaacgagagcuucaacuggaccggcgugacccagaacggcaccagcagcgccugcaucagaagaagcaacagcagcuucuucagcagacugaacuggcugacccaccugaacuucaaguaccccgcccugaacgugaccaugcccaacaacgagcaguucgacaagcuguacaucuggggcgugcaccaccccggcaccgacaaggaccagaucuuccuguacgcccagagcagcggcagaaucaccgugagcaccaagagaagccagcaggccgugauccccaacaucggcagcagacccagaaucagaaacauccccagcagaaucagcaucuacuggaccaucgugaagcccggcgacauccugcugaucaacagcaccggcaaccugaucgcccccagaggcuacuucaagaucagaagcggcaagagcagcaucaugagaagcgacgcccccaucggcaagugcagaagcgagugcaucacccccaacggcagcauccccaacgacaagcccuuccagaacgugaacagaaucaccuacggcgccugccccagauacgugaagcagagcacccugaagcuggccaccggcaugagaaacgugcccgagaagcagaccagaggcaucuucggcgccaucgccggcuucaucgagaacggcugggagggcaugguggacggcugguacggcuucagacaccagaacagcgagggcagaggccaggccgccgaccugaagagcacccaggccgccaucgaccagaucaacggcaagcugaacagacugaucggcaagaccaacgagaaguuccaccagaucgagaaggaguucagcgagguggagggcagaauccaggaccuggagaaguacguggaggacaccaagaucgaccuguggagcuacaacgccgagcugcugguggcccuggagaaccagcacaccaucgaccugaccgacagcgagaugaacaagcuguucgagaagaccaagaagcagcugagagagaacgccgaggacaugggcaacggcugcuucaagaucuaccacaagugcgacaacgccugcaucggcagcaucagaaacggcaccuacgaccacaacguguacagagacgaggcccugaacaacagauuccagaucaagggcguggagcugaagagcggcuacaaggacuggauccuguggaucagcuucgccaucagcugcuuccugcugugcguggcccugcugggcuucaucaugugggccugccagaagggcaacaucagaugcaacaucugcaucuga

SEQ ID NO: 170202 - RNA, 1701 nt, Artificial Sequence; identical to SEQ ID NO: 169918
  derived and/or modified CDS sequence (opt4) from hemagglutinin__InfluenzaA__AGQ16347

SEQ ID NO: 170203 - RNA, 1701 nt, Artificial Sequence; identical to SEQ ID NO: 170054
  derived and/or modified CDS sequence (opt4) from hemagglutinin__InfluenzaA__AGQ16348

SEQ ID NO: 170204 - RNA, 1701 nt, Artificial Sequence; identical to SEQ ID NO: 169918
  derived and/or modified CDS sequence (opt4) from hemagglutinin__InfluenzaA__AGQ16349

SEQ ID NO: 170205 - RNA, 1701 nt, Artificial Sequence
  derived and/or modified CDS sequence (opt4) from hemagglutinin__InfluenzaA__AGQ16350
augaagaccaucaucgcccugagcuacauccugugccugguguucgcccagaagcugcccggcaacgacaacagcaccgccacccugugccugggccaccacgccgugcccaacggcaccaucgugaagaccaucaccaacgacagaaucgaggugaccaacgccaccgagcuggugcagaacagcagcaucggcgagaucugcgacagcccccaccagauccuggacggcgagaacugcacccugaucgacgcccugcugggcgacccccagugcgacggcuuccagaacaagaagugggaccuguucguggagagaagcaaggccuacagcaacugcuaccccuacgacgugcccgacuacgccagccugagaagccugguggccagcagcggcacccuggaguucaacaacgagagcuucaacuggaccggcgugacccagaacggcaccagcagcgccugcaucagaagaagcaacagcagcuucuucagcagacugaacuggcugacccaccugaacuucaaguaccccgcccugaacgugaccaugcccaacaacgagcaguucgacaagcuguacaucuggggcgugcaccaccccggcaccgacaaggaccagaucuuccuguacgcccagagcagcggcagaaucaccgugagcaccaagagaagccagcaggccgugauccccaacaucggcagcagacccagaaucagaaacauccccagcagaaucagcaucuacuggaccaucgugaagcccggcgacauccugcugaucaacagcaccggcaaccugaucgcccccagaggcuacuucaagaucagaagcggcaagagcagcaucaugagaagcgacgcccccaucggcaagugcaagagcgagugcaucacccccaacggcagcauccccaacgacaagcccuuccagaacgugaacagaaucaccuacggcgccugccccagauacgugaagcagagcacccugaagcuggccaccggcaugagaaacgugcccgagaagcagaccagaggcaucuucggcgccaucgccggcuucaucgagaacggcugggagggcaugguggacggcugguacggcuucagacaccagaacagcgagggcagaggccaggccgccgaccugaagagcacccaggccgccaucgaccagaucaacggcaagcugaacagacugaucggcaagaccaacgagaaguuccaccagaucgagaaggaguucagcgagguggagggcagaauccaggaccuggagaaguacguggaggacaccaagaucgaccuguggagcuacaacgccgagcugcugguggcccuggagaaccagcacaccaucgaccugaccgacagcgagaugaacaagcuguucgagaagaccaagaagcagcugagagagaacgccgaggacaugggcaacggcugcuucaagaucuaccacaagugcgacaacgccugcaucggcagcaucagaaacggcaccuacgaccacaacguguacagagacgaggcccugaacaacagauuccagaucaagggcguggagcugaagagcggcuacaaggacuggauccuguggaucagcuucgccaucagcugcuuccugcugugcguggcccugcugggcuucaucauguggaccugccagaagggcaacaucagaugcaacaucugcaucuga

SEQ ID NO: 170206 - RNA, 1701 nt, Artificial Sequence
  derived and/or modified CDS sequence (opt4) from hemagglutinin__InfluenzaA__AGQ47719
augaaggccauccugcuggugcugcugugcaccuucaccgccaccaacgccgacacccugugcaucggcuaccacgccaacaacagcaccgacaccguggacaccgugcuggagaagaacgugaccgugacccacagcgugaaccugcuggaggacagacacaacggcaagcugugcaagcugggcggcaucgccccccugcaccugggcaagugcaacaucgccggcuggcugcugggcaaccccgagugcgagcugcuguucaccgugagcagcuggagcuacaucguggagaccagcaacagcgacaacggcaccugcuaccccggcgacuucaucaacuacgaggagcugagagagcagcugagcagcgugagcagcuucgagagauucgagaucuuccccaagaccagcagcuggcccgaccacgagaccaacagaggcgugaccgccgccugccccuacgccggcgccaacagcuucuacagaaaccugaucuggcuggugaagaagggcaacagcuaccccaagcugagcaagagcuacgugaacaacaagggcaaggaggugcuggugcuguggggcauccaccacccccccaccagcaccgaccagcagagccuguaccagaacgccgacgccuacguguucgugggcagcagcaaguacaacagaaaguucaagcccgagaucgccgccagacccaaggugagaggccaggccggcagaaugaacuacuacuggacccugaucgagcccggcgacaccaucaccuucgaggccaccggcaaccugguggugcccagauacgccuucgccaugaacagaggcagcggcagcggcaucaucaucagcgacgcccccauccacgacugcaacaccaagugccagacccccaagggcgccaucaacaccagccugcccuuccagaacauccaccccgugaccaucggcgagugccccaaguacgugaagagcaccaagcugagaauggccaccggccugagaaacauccccagcauccagagcagaggccuguucggcgccaucgccggcuucaucgagggcggcuggaccggcaugaucgacggcugguacggcuaccaccaccagaacggccagggcagcggcuacgccgccgaccagaagagcacccagaacgccaucgacggcaucaccaacaaggugaacagcgugaucgagaagaugaacacccaguucaccgccgugggcaaggaguucaaccaccuggagaagagaaucgagaaccugaacaagaagguggacgacggcuuccuggacguguggaccuacaacgccgagcugcuggugcugcuggagaacgagagaacccuggacuuccacgacagcaacgugaagaaccuguacgagaaggugagaagccagcugagaaacaacgccaaggagaucggcaacggcugcuucgaguucuaccacaagugcgacgacaccugcauggagagcgugaagaacggcaccuacgacuaccccaaguacagcgaggagagcaagcugaacagagaggagaucgacggcgugaagcuggagagcaccagaaucuaccagauccuggccaucuacagcaccgccgccagcagccuggugcugcuggugagccugggcgccaucagcuucuggaugugcagcaacggcagccugcagugcagaaucugcaucuga

SEQ ID NO: 170207 - RNA, 1698 nt, Artificial Sequence; identical to SEQ ID NO: 162175
  derived and/or modified CDS sequence (opt4) from hemagglutinin__InfluenzaA__AGQ47728

SEQ ID NO: 170208 - RNA, 1701 nt, Artificial Sequence
  derived and/or modified CDS sequence (opt4) from hemagglutinin__InfluenzaA__AGQ47740
augaaggccagacugcuggugcugcugugcgcccuggccgccaccgacgccgacaccaucugcaucggcuaccacgccaacaacagcaccgacaccguggacacccugcuggagaagaacgugaccgugacccacagcgugaaccugcuggaggacagccacaacggcaagcugugcaagcugaagggcaucgccccccugcagcugggcaagugcaacaucgccggcuggcugcugggcaaccccgagugcgacagccugcugcccgccagaagcuggagcuacaucguggagacccccaacagcgagaacggcgccugcuaccccggcgacuucaucgacuacgaggagcugagagagcagcugagcagcgugagcagccuggagagauucgagaucuuccccaaggagagcagcuggcccaaccacaacaccaucaagggcgugaccgccagcugcagccacagaggccagagcagcuucuacagaaaccugcuguggcugaccaagaagggcgacagcuaccccaagcugaacaacagcuacgugaacaacaagggcaaggaggugcuggugcuguggggcgugcaccaccccagcagcagcaacgagcagcagagccuguacagaaacgagaacgccuacgugagcguggugagcagcaacuacaacagaagauucacccccgagaucgccgccagacccaaggugagagaccagaccggcagaaugaacuacuacuggacccugcuggagcccggcgacaccaucauguucgaggccaccggcaaccugaucgcccccugguacgccuucgcccugagcagaggcuucggcagcggcaucaucaccagcaacgccagcaugcacgagugcaacaccaagugccagaccccccagggcgccaucaacagcagccugcccuuccagaacauccaccccgugaccaucggcgagugccccaaguacgugagaagcaccaagcugagaauggugaccggccugagaaacauccccagcauccagagcagaggccuguucggcgccaucgccggcuucaucgagggcggcuggaccggcaugaucgacggcugguacggcuaccaccaccagaacgagcagggcagcggcuacgccgccgaccagaagagcacccagaacgccaucaacggcaucaccaacaaggugaacagcgugaucgagaagaugaacacccaguucaccgccgugggcaaggaguucaacaaccuggagaagagaauggagaaccugaacaagaagguggacgacggcuuccuggacaucuggaccuacaacgccgagcugcuggugcugcuggagaacgagagaacccuggacuuccacgaccugaacgugaagaaccuguacgagaaggugaagagccagcugaagaacaacgccaaggagaucggcaacggcugcuucgaguucuaccacaagugcgacaacgagugcauggagagcgugagaaacggcaccuacgacuaccccaaguacagcgaggagagcaagcugaacagagagaagaucgacggcgugaagcuggagagcaugggcguguaccagauccuggccaucuacagcaccguggccagcagccuggugcugcuggugagccugggcgccaucagcuucuggaugugcagcaacggcagccugcagugcagaaucugcaucuga

SEQ ID NO: 170209 - RNA, 1701 nt, Artificial Sequence
  derived and/or modified CDS sequence (opt4) from hemagglutinin__InfluenzaA__AGQ47752
augaaggccaagcugcugauccugcugugcgcccugagcgccaccgacgccgacaccaucugcaucggcuaccacgccaacaacagcaccgacaccguggacaccgugcuggagaagaacgugaccgugacccacagcgugaaccugcuggaggacagccacaacggcaagcugugcagacugaagggcaaggccccccugcagcugggcaagugcaacaucgccggcugggugcugggcaaccccgagugcgagagccugcugagcaacagaagcuggagcuacaucgccgagacccccaacagcgagaacggcaucugcuaccccggcgacuucgccgacuacgaggagcugagagagcagcugagcagcgugagcagcuucgagagauucgagaucuuccccaaggagagaagcuggcccaagcacaacaccaucagaggcgugaccgccgccugcagccacgccggcaagagcagcuucuacaagaaccugguguggcugaccgaggccaacggcagcuaccccgcccugagcaccagcuacgugaacaaccaggagaaggaggugcuggugcuguggggcgugcaccaccccagcaacaucgaggagcagagaacccuguacagaaaggacaacgccuacgugagcguggugagcagcaacuacaacagaagauucacccccgagaucgccaagagacccaaggugagagaccagcccggcagaaugaacuacuacuggacccugcuggagcccggcgacaccaucaucuucgaggccaccggcaaccugaucgcccccugguacgccuucgcccugagcagaggccccggcagcggcaucaucaccagcaacgcccccauggacgagugcgacaccaagugccagaccccccagggcgccaucaacagcagccugcccuuccagaacauccaccccgugaccaucggcgagugccccaaguacgugagaagcaccaagcugagaauggugaccggccugagaaacauccccagcauccagagcagaggccuguucggcgccaucgccggcuucaucgagggcggcuggaccggcaugauggacggcugguacggcuaccaccaccagaacgagcagggcagcggcuacgccgccgaccagaagagcacccagaacgccaucaacggcaucaccaacaaggugaacagcgugaucgagaagaugaacacccaguucaccgccgugggcaaggaguucaacaagcuggagaagagaauggagaaccugaacaagaagguggacgacggcuuccuggacaucuggaccuacaacgccgagcugcuggugcugcuggagaacgagagaacccuggacuuccacgacagcaacgugaagaaccuguacgagaaggugaagaaccagcugagaaacaacgccaaggagcugggcaacggcugcuucgaguucuaccacaagugcgacaacgagugcauggagagcgugaagaacggcaccuacgacuaccccaaguacagcgaggagagcaagcugaacagagagaagaucgacggcgugaagcuggagagcaugggcguguacagaauccuggccaucuacagcaccguggccagcagccuggugcugcuggugagccugggcgccaucagcuucuggaugugcagcaacggcagccugcagugcagaaucugcaucuga

SEQ ID NO: 170210 - RNA, 1701 nt, Artificial Sequence
  derived and/or modified CDS sequence (opt4) from hemagglutinin__InfluenzaA__AGQ47764
augaaggccaagcugcugauccugcugugcgcccugaccgccaccgacgccgacaccaucugcaucggcuaccacgccaacaacagcaccgacaccguggacaccgugcuggagaagaacgugaccgugacccacagcgugaaccugcuggaggacagccacaacggcaagcugugcagacugaagggcaucgccccccugcagcugggcaagugcaacaucgccggcuggauccugggcaaccccgagugcgagagccugcugagcaagagaagcuggagcuacaucgccgagacccccaacagcgagaacggcgccugcuaccccggcgacuucgccgacuacgaggagcugagagagcagcugagcagcgugagcagcuucgagagauucgagaucuuccccaaggagagaagcuggcccaagcacaacaucaccagaggcgugaccgccgccugcagccacgccggcaagagcagcuucuacaagaaccugcuguggcugaccgagaccgacggcagcuaccccaagcugagcaagagcuacgugaacaacaaggagaaggaggugcuggugcuguggggcgugcaccaccccagcaacaucgaggaccagaagacccuguacagaaaggagaacgccuacgugagcguggugagcagcaacuacaacagaagauucacccccgagaucgccgagagacccaaggugagaggccaggccggcagaaucaacuacuacuggacccugcuggagcccggcgacaccaucaucuucgaggccaacggcaaccugaucgcccccugguacgccuucgcccugagcagagacuucggcagcggcaucaucaccagcaacgccagcauggacgagugcgacaccaagugccagaccccccagggcgccaucaacagcagccugcccuuccagaacauccaccccgugaccaucggcgagugccccaaguacgugaagagcaccaagcugagaauggugaccggccugagaaacauccccagcauccagagcagaggccuguucggcgccaucgccggcuucaucgagggcggcuggaccggcaugaucgacggcugguacggcuaccaccaccagaacgagcagggcagcggcuacgccgccgaccagaagagcacccagaacgccaucaacggcaucaccaacaaggugaacagcgugaucgagaagaugaacacccaguucaccgccgugggcaaggaguucaacaagcuggagaagagaauggagaaccugaacaagaagguggacgacggcuuccuggacaucuggaccuacaacgccgagcugcuggugcugcuggagaacgagagaacccuggacuuccacgacagcaacgugaagaaccuguacgagaaggugaagaaccagcugagaaacaacgccaaggagaucggcaacggcugcuucgaguucuaccacaagugcaacaacgagugcauggagagcgugaagaacggcaccuacgacuaccccaaguacagcgaggagagcaagcugaacagagagaagaucgacggcgugaagcuggagagcaugggcguguaccagauccuggccaucuacagcaccguggccagcagccuggugcugcuggugagccugggcgccaucagcuucuggaugugcagcaacggcagccugcagugcagaaucugcaucuga

SEQ ID NO: 170211 - RNA, 1701 nt, Artificial Sequence
  derived and/or modified CDS sequence (opt4) from hemagglutinin__InfluenzaA__AGQ47776
augaaggccaagcugcugauccugcugugcgcccugagcgccaccgacgccgacaccaucugcaucggcuaccacgccaacaacagcaccgacaccguggacaccgugcuggagaagaacgugaccgugacccacagcgugaaccugcuggaggacagccacaacggcaagcugugcagacugaagggcaucgccccccugcagcugggcaagugcaacaucgccggcuggauccugggcaaccccgagugcgagagccugcugagcaagagaagcuggagcuacaucgccgagacccccaacagcgagaacggcaccugcuaccccggcgacuucgccgacuacgaggagcugagagagcagcugagcagcgugagcagcuucgagagauucgagaucuuccccaaggagagaagcuggcccaagcacaacaucaacaucggcgugaccgccgccugcagccacgccggcaagagcagcuucuacaagaaccugcuguggcugaccgagaaggacggcagcuaccccaaccugaacaagagcuacgugaacaagaaggagaaggaggugcuggugcuguggggcgugcaccaccccagcaacaucgaggaccagaagacccuguacagaaaggagaacgccuacgugagcguggugagcagcaacuacaacagaagauucacccccgagaucgccgagagacccaaggugagaggccaggccggcagaaugaacuacuacuggacccugcuggagcccggcgacaccaucaucuucgaggccaacggcaaccugaucgcccccugguacgccuucgcccugagcagaggccugggcagcggcaucaucaccagcaacgccagcauggacgagugcgacaccaagugccagaccccccagggcgccaucaacagcagccugcccuuccagaacauccaccccuucaccaucggcgagugccccaaguacgugagaagcaccaagcugagaauggugaccggccugagaaacauccccagcauccagagcagaggccuguucggcgccaucgccggcuucaucgagggcggcuggaccggcaugaucgacggcugguacggcuaccaccaccagaacgagcagggcagcggcuacgccgccgaccagaagagcacccagaacgccaucaacggcaucaccaacaaggugaacagcgugaucgagaagaugaacacccaguucaccgccgugggcaaggaguucaacaagcuggagaagagaauggagaaccugaacaagaagguggacgacggcuuccuggacaucuggaccuacaacgccgagcugcuggugcugcuggagaacgagagaacccuggacuuccacgacagcaacgugaagaaccuguacgagaaggugaagaaccagcugagaaacaacgccaaggagaucggcaacggcugcuucgaguucuaccacaagugcaacaacgagugcauggagagcgugaagaacggcaccuacgacuaccccaaguacagcgaggagagcaagcugaacagagagaagaucgacggcgugaagcuggagagcaugggcguguaccagauccuggccaucuacagcaccguggccagcagccuggugcugcuggugagccugggcgccaucagcuucuggaugugcagcaacggcagccugcagugcagaaucugcaucuga

SEQ ID NO: 170212 - RNA, 1701 nt, Artificial Sequence
  derived and/or modified CDS sequence (opt4) from hemagglutinin__InfluenzaA__AGQ47788
augaaggccaagcugcuggugcugcugugcgcccugagcgccaccgacgccgacaccaucugcaucggcuaccacgccaacaacagcaccgacaccguggacaccgugcuggagaagaacgugaccgugacccacagcgugaaccugcuggaggacagccacaacggcaagcugugcagacugaagggcaucgccccccugcagcugggcaagugcaacaucgccggcuggauccugggcaaccccgagugcgagagccuguucagcaagaagagcuggagcuacaucgccgagacccccaacagcgagaacggcaccugcuaccccggcuacuucgccgacuacgaggagcugagagagcagcugagcagcgugagcagcuucgagagauucgagaucuuccccaaggagagaagcuggcccaagcacaacgugaccagaggcgugaccgccgccugcagccacaagggcaagagcagcuucuacagaaaccugcuguggcugaccgagaaggacggcagcuaccccaaccugagcaagagcuacgugaacaacaaggagaaggaggugcuggugcuguggggcgugcaccaccccagcaacaucgaggaccagaagacccuguacagaaaggagaacgccuacgugagcguggugagcagcaacuacaacagaagauucacccccgagaucgccgagagacccaaggugagaggccaggccggcagaaucaacuacuacuggacccugcuggagcccggcgacaccaucaucuucgaggccaacggcaaccugaucgcccccuggcacgccuucgcccugagcagaggcuucggcagcggcaucaucaccagcaacgccagcauggacgagugcgacaccaagugccagaccccccagggcgccaucaacagcagccugcccuuccagaacauccaccccgugaccaucggcgagugccccaaguacgugagaagcaccaagcugagaauggugaccggccugagaaacauccccagcauccagagcagaggccuguucggcgccaucgccggcuucaucgagggcggcuggaccggcaugaucgacggcugguacggcuaccaccaccagaacgagcagggcagcggcuacgccgccgaccagaagagcacccagaacgccaucaacggcaucaccaacaaggugaacagcgugaucgagaagaugaacacccaguucaccgccgugggcaaggaguucaacaagcuggagaagagaauggagaaccugaacaagaagguggacgacggcuuccuggacaucuggaccuacaacgccgagcugcuggugcugcuggagaacgagagaacccuggacuuccacgacagcaacgugaagaaccuguacgagaaggugaagagccagcugaagaacaacgccaaggagaucggcaacggcugcuucgaguucuaccacaagugcaacaacgagugcauggagagcgugaagaacggcaccuacgacuaccccaaguacagcgaggagagcaagcugaacagagagaagaucgacggcgugaagcuggagagcaugggcguguaccagauccuggccaucuacagcaccguggccagcagccuggugcugcuggugagccugggcgccaucagcuucuggaugugcagcaacggcagccugcagugcagaaucugcaucuga

SEQ ID NO: 170213 - RNA, 1701 nt, Artificial Sequence
  derived and/or modified CDS sequence (opt4) from hemagglutinin__InfluenzaA__AGQ47800
augaaggccagacugcuggugcugcugugcgcccuggccgccaccgacgccgacaccaucugcaucggcuaccacgccaacaacagcaccgacaccguggacaccauccuggagaagaacgugaccgugacccacagcgugaaccugcuggaggacagccacaacggcaagcugugcagacugaagggcaucgccccccugcagcugggcaagugcaacaucgccggcuggauccugggcaaccccgagugcgagagccugcugagcgagagaagcuggagcuacaucguggagauccccaacagcgagaacggcaccugcuaccccggcgacuucaccgacuacgaggagcugagagagcagcugagcagcgugagcagcuucgagagauucgagaucuuccccaaggagagcagcuggcccaagcacaacaccgccagaggcgugaccgccgccugcagccacgccggcaagagcagcuucuacagaaaccugcuguggcugaccgagaaggacggcagcuaccccaaccugaagaacagcuacgugaacaagaagggcaaggaggugcuggugcuguggggcgugcaccaccccagcagcaucaaggagcagcagacccuguaccagaaggagaacgccuacgugagcguggugagcagcaacuacaacagaagauucacccccgagaucgccgagagacccaaggugagagaccaggccggcagaaugaacuacuacuggacccugcuggagcccggcgacaccaucaucuucgaggccaacggcaaccugaucgcccccugguacgccuucgcccugagcagaggcuucggcagcggcaucaucaccagcaacgccagcaugcacgagugcgacaccaagugccagaccccccagggcgccaucaacagcagccugcccuuccagaacauccaccccgugaccaucggcgagugccccaaguacgugagaagcaccaagcugagaauggugaccggccugagaaacauccccagcauccagagcagaggccuguucggcgccaucgccggcuucaucgagggcggcuggaccggcaugaucgacggcugguacggcuaccaccaccagaacgagcagggcagcggcuacgccgccgaccagaagagcacccagaacgccaucaacggcaucaccaacaaggugaacagcgugaucgagaagaugaacacccaguucaccgccgugggcaaggaguucaacaaccuggagaagagaauggagaaccugaacaagaagguggacgacggcuuccuggacaucuggaccuacaacgccgagcugcugauccugcuggagaacgagagaacccuggacuuccacgacagcaacgugaagaaccuguacgagaaggugaagagccagcugagaaacaacgccaaggagaucggcaacggcugcuucgaguucuaccacaagugcaacaacgagugcauggagagcgugaagaacggcaccuacgacuaccccaaguacagcgaggagagcaagcugaacagagagaagaucgacggcgugaagcuggagagcaugggcguguaccagauccuggccaucuacagcaccguggccagcagccuggugcugcuggugagccugggcgccaucagcuucuggaugugcagcaacggcagccugcagugcagaaucugcaucuga

SEQ ID NO: 170214 - RNA, 1701 nt, Artificial Sequence
  derived and/or modified CDS sequence (opt4) from hemagglutinin__InfluenzaA__AGQ47811
augaaggccaagcugcuggugcugcugugcgcccugagcgccaccgacgccgacaccaucugcaucggcuaccacgccaacaacagcaccgacaccguggacaccgugcuggagaagaacgugaccgugacccacagcgugaaccugcuggaggacagccacaacggcaagcugugcagacugaagggcaucgccccccugcagcugggcaagugcaacaucgccggcuggauccugggcaaccccgagugcgagagccuguucagcaagaagagcuggagcuacaucgccgagacccccaacagcgagaacggcaccugcuaccccggcuucuucgccgacuacgaggagcugagagagcagcugagcagcgugagcagcuucgagagauucgagaucuuccccaaggagagaagcuggcccaagcacaacgugaccagaggcgugaccgccgccugcagccacaagggcaagagcagcuucuacagaaaccugcuguggcugaccgagaagaacggcagcuaccccaaccugagcaagagcuacgugaacaacaaggagaaggaggugcuggugcuguggggcgugcaccaccccagcaacaucgaggaccagaagaccaucuacagaaaggagaacgccuacgugagcguggugagcagcaacuacaacagaagauucacccccgagaucgccgagagacccaaggugagaggccaggccggcagaaucaacuacuacuggacccugcuggagcccggcgacaccaucaucuucgaggccaacggcaaccugaucgcccccuggcacgccuucgcccugagcagaggcuucggcagcggcaucaucaccagcaacgccagcauggacgagugcgacaccaagugccagaccccccagggcgccaucaacagcagccugcccuuccagaacauccaccccgugaccaucggcgagugccccaaguacgugagaagcaccaagcugagaauggugaccggccugagaaacauccccagcauccagagcagaggccuguucggcgccaucgccggcuucaucgagggcggcuggaccggcaugaucgacggcugguacggcuaccaccaccagaacgagcagggcagcggcuacgccgccgaccagaagagcacccagaacgccaucgacggcaucaccaacaaggugaacagcgugaucgagaagaugaacacccaguucaccgccgugggcaaggaguucaacaagcuggagaagagaauggagaaccugaacaagaagguggacgacggcuuccuggacaucuggaccuacaacgccgagcugcuggugcugcuggagaacgagagaacccuggacuuccacgacagcaacgugaagaaccuguacgagaaggugaagagccagcugaagaacaacgccaaggagaucggcaacggcugcuucgaguucuaccacaagugcaacaacgagugcauggagagcgugaagaacggcaccuacgacuaccccaaguacagcgaggagagcaagcugaacagagagaagaucgacggcgugaagcuggagagcaugggcguguaccagauccuggccaucuacagcaccguggccagcagccuggugcugcuggugagccugggcgccaucagcuucuggaugugcagcaacggcagccugcagugcagaaucugcaucuga

SEQ ID NO: 170215 - RNA, 1701 nt, Artificial Sequence
  derived and/or modified CDS sequence (opt4) from hemagglutinin__InfluenzaA__AGQ47823
augaaggccaagcugcuggugcugcugugcgccuucaccgccaccuacgccgacaccaucugcaucggcuaccacgccaacaacagcaccgacaccguggacaccgugcuggagaagaacgugaccgugacccacagcgugaaccugcuggaggacagccacaacggcaagcugugcagacugaagggcaucgccccccugcagcugggcaacugcagcguggccggcuggauccugggcaaccccaagugcgagagccuguucagcaaggagagcuggagcuacaucgccgagacccccaaccccgagaacggcaccugcuaccccggcuacuucgccgacuacgaggagcugagagagcagcugagcagcgugagcagcuucgagagauucgagaucuuccccaaggagagcagcuggcccaaccacaccgugaccaagggcgugaccaccagcugcagccacaacggcaagagcagcuucuacagaaaccugcuguggcugaccgagaagaacggccuguaccccaaccugagcaagagcuacgugaacaacaaggagaaggaggugcuggugcuguggggcgugcaccaccccagcaacaucagagaccagagagccaucuaccacaccgagaacgccuacgugagcguggugagcagccacuacagcagaagauucacccccgagaucgccaagagacccaaggugagaggccaggagggcagaaucaacuacuacuggacccugcuggagcccggcgacaccaucaucuucgaggccaacggcaaccugaucgcccccugguacgccuucgcccugagcagaggcuucggcagcggcaucaucaccagcaacgccagcauggacgagugcgacgccaagugccagaccccccagggcgccaucaacagcagccugcccuuccagaacgugcaccccgugaccaucggcgagugccccaaguacgugagaagcaccaagcugagaauggugaccggccugagaaacauccccagcauccagagcagaggccuguucggcgccaucgccggcuucaucgagggcggcuggaccggcaugaucgacggcugguacggcuaccaccaccagaacgagcagggcagcggcuacgccgccgaccagaagagcacccagaacgccaucaacggcaucaccaacaaggugaacagcgugaucgagaagaugaacacccaguucaccgccgugggcaaggaguucaacaagcuggagagaagaauggagaaccugaacaagaagguggacgacggcuuccuggacaucuggaccuacaacgccgagcugcuggugcugcuggagaacggcagaacccuggacuuccacgacagcaacgugaagaaccuguacgagaaggugaagagccagcugaagaacaacgccaaggagaucggcaacggcugcuucgaguucuaccacaagugcaacaacgagugcauggagagcgugaagaacggcaccuacgacuaccccaaguacagcgaggagagcaagcugaacagaggcaagaucgacggcgugaagcuggagagcaugggcguguaccagauccuggccaucuacagcaccguggccagcagccuggugcugcuggugagccugggcgccaucagcuucuggaugugcagcaacggcagccugcagugcagaaucugcaucuga

SEQ ID NO: 170216 - RNA, 1701 nt, Artificial Sequence
  derived and/or modified CDS sequence (opt4) from hemagglutinin__InfluenzaA__AGQ47835
augaagaccaucaucgcccugagcuacaucuucugccuggugcugggccaggacuuccccggcaacgacaacagcaccgccacccugugccugggccaccacgccgugcccaacggcaccaucgugaagaccaucaccaacgaccagaucgaggugaccaacgccaccgagcuggugcagagcagcagcaccggcaagaucugcaacaacccccacagaauccuggacggcaucaacugcacccugaucgacgcccugcugggcgacccccacugcgacggcuuccagaacgagaccugggaccuguucguggagagaagcaaggccuucagcaacugcuaccccuacuacgugcccgacuacgccagccugagaagccugguggccagcagcggcacccuggaguucaucaacgagggcuucaacuggaccggcgugacccagaacggcggcagcaacgccugcaagagaggccccaacagcggcuucuucagcagacugaacuggcuguacaagagcggcaccaccuaccccgugcugaacgugaccaugcccaacaacgacaacuucgacaagcuguacaucuggggcgugcaccaccccagcaccgaccaggagcagaccaaccuguacgugcaggccagcggcagagugaccgugagcaccaagagaagccagcagaccaucacccccaacaucggcagcagacccugggugagaggccugagcagcagaaucagcaucuacuggaccaucgugaagcccggcgacauccuggugaucaacagcaacggcaaccugaucgcccccagaggcuacuucaagaugagaaccggcaagagcagcaucaugagaagcgacgcccccaucggcaccugcaucagcgagugcaucacccccaacggcagcauccccaacgacaagcccuuccagaacgugaacaagaucaccuacggcgccugccccaaguacgugaagcagaacacccugaagcuggccaccggcaugagaaacgugcccgagaagcagaccagaggcaucuucggcgccaucgccggcuucaucgagaacggcugggagggcaugguggacggcugguacggcuucagacaccagaacagcgagggcaccggccaggccgccgaccugaagagcacccaggccgccaucgaccagaucaacggcaagcugaacagagugaucgagaagaccaacgagaaguuccaccagaucgagaaggaguucagcgagguggagggcagaauccaggaccuggagaaguacguggaggacaccaagaucgaccuguggagcuacaacgccgagcugcugguggcccuggagaaccagcacaccaucgaccugaccgacagcgagaugaacaagcuguucgagaagaccagaagacagcugagagagaacgccgaggacaugggcaacggcugcuucaagaucuaccacaagugcgacaacgccugcaucggcagcaucagaaacggcaccuacgaccacgacguguacagagacgaggcccugaacaacagauuccagaucaagggcguggagcugaagagcggcuacaaggacuggauccuguggaucagcuucgccaucagcugcuuccugcugugcguggugcugcugggcuucaucaugugggccugccagaagggcaacaucagaugcaacaucugcaucuga

SEQ ID NO: 170217 - RNA, 1701 nt, Artificial Sequence
  derived and/or modified CDS sequence (opt4) from hemagglutinin__InfluenzaA__AGQ47847
augaaggccagacugcugauccugcugugcgcccuggccgccaccgacgccgacaccaucugcaucggcuaccacgccaacaacagcaccgacaccguggacaccgugcuggagaagaacgugaccgugacccacagcgugaaccugcuggaggacagccacaacggcaagcugugcagacugaagggcaucgccccccugcagcugggcaagugcaacaucgccggcuggcugcugggcaaccccgagugcgacagccugcugcccgccagcagcuggagcuacaucguggagacccccaacagcaagaacggcaucugcuaccccggcgacuucaucgacuacgaggagcugagagagcagcugagcagcgugagcagcuucgagagauucgagaucuuccccaaggagagcagcuggcccaagcacaacaccaccaagggcgugaccgccgccugcagccacgccggcaagagcagcuucuacagaaaccugcuguggcugaccaagaaggaggacagcuaccccaagcugagcaacagcuacgugaacaagaagggcaaggaggugcuggugcuguggggcgugcaccaccccagcaacagcaaggagcagcagacccuguaccagaacgagaacgccuacgugagcguggugagcagcaacuacaacagaagauucacccccgagaucgccgagagacccaaggugagagaccaggccggcagaaugaacuacuacuggacccugcuggagcccggcgacaccaucaucuucgaggccaacggcaaccugaucgcccccugguacgccuucgcccugagcagaggcuucggcagcggcaucaucaccagcaacgccagcaugcacgagugcaacaccaagugccagaccccccagggcgccaucaacagcagccugcccuuccagaacauccaccccgugaccaucggcgagugccccaaguacgugaagagcgccaagcugagaauggugaccggccugagaaacauccccagcauccagagcagaggccuguucggcgccaucgccggcuucaucgagggcggcuggaccggcaugaucgacggcugguacggcuaccaccaccagaacgagcagggcagcggcuacgccgccgaccagaagagcacccagaacgccaucaacggcaucaccaacaaggugaacagcgugaucgagaagaugaacacccaguucaccgccgugggcaaggaguucaacaaccuggagaagagaauggagaaccugaacaagaagguggacgacggcuuccuggacaucuggaccuacaacgccgagcugcuggugcugcuggagaacgagagaacccuggacuuccacgacagcaacgugaagaaccuguacgagaaggugaagauccagcugaagaacaacgccaaggagaucggcaacggcugcuucgaguucuaccacaagugcgacaacgagugcauggagagcgugagaaacggcaccuacgacuaccccaaguacagcaaggagagcaagcugaacagagagaagaucgacggcgugaagcuggagcccaugggcguguaccagauccuggccaucuacagcaccguggccagcagccuggugcugcuggugagccugggcgccaucagcuucuggaugugcagcaacggcagccugcagugcagaaucugcaucuga

SEQ ID NO: 170218 - RNA, 1701 nt, Artificial Sequence
  derived and/or modified CDS sequence (opt4) from hemagglutinin__InfluenzaA__AGQ47870
augaaggccauccugcuggugcugcugugcaccuucgccgccaccaacgccgacacccugugcaucggcuaccacgccaacaacagcaccgacaccguggacaccgugcuggagaagaacgugaccgugacccacagcgugaaccugcuggaggacagacacaacggcaagcugugcaagcugggcggcaucgccccccugcaccugggcaagugcaacaucgccggcuggcugcugggcaaccccgagugcgagcugcugcugaccgugagcagcuggagcuacaucguggagaccagcaacagcgacaacggcaccugcuaccccggcgacuucaucaacuacgaggagcugagagagcagcugagcagcgugagcagcuucgagagauucgagaucuuccccaagaccagcagcuggcccaaccacgagaccaacagaggcgugaccgccgccugccccuacgccggcgccaacagcuucuacagaaaccugaucuggcuggugaagaagggcaacagcuaccccaagcugagcaagagcuacgugaacaacaagggcaaggaggugcuggugcuguggggcauccaccacccccccaccagcaccgaccagcagagccuguaccagaacgccgacgccuacguguucgugggcagcagcaaguacaacagaaaguucaagcccgagaucgccgccagacccaaggugagaggccaggccggcagaaugaacuacuacuggacccugaucgagcccggcgacaccaucaccuucgaggccaccggcaaccugguggugcccagauacgccuucgccaugaacagaggcagcggcagcggcaucaucaucagcgacgcccccgugcacgacugcaacaccaagugccagacccccaagggcgccaucaacaccagccugcccuuccagaacauccaccccgugaccaucggcgagugccccaaguacgugaagagcaccaagcugagaauggccaccggccugagaaacauccccagcauccagagcagaggccuguucggcgccaucgccggcuucaucgagggcggcuggaccggcaugaucgacggcugguacggcuaccaccaccagaacgagcagggcagcggcuacgccgccgaccagagaagcacccagaacgccaucgacggcaucaccaacaaggugaacagcgugaucgagaagaugaacacccaguucaccgccgugggcaaggaguucaaccaccuggagaagagaaucgagaaccugaacaagaagguggacgacggcuuccuggacaucuggaccuacaacgccgagcugcuggugcugcuggagaacgagagaacccuggacuuccacgacagcaacgugaagaaccuguacgagaaggugagaagccagcugagaaacaacgccaaggagaucggcaacggcugcuucgaguucuaccacaagugcgacgacaccugcauggagagcgugaagaacggcaccuacgacuaccccaaguacagcgaggagagcaagcugaacagagaggagaucgacggcgugaagcuggagagcaccagaaucuaccagauccuggccaucuacagcaccguggccagcagccuggugcugcuggugagccugggcgccaucagcuucuggaugugcagcaacggcagccugcagugcagaaucugcaucuga

SEQ ID NO: 170219 - RNA, 1701 nt, Artificial Sequence
  derived and/or modified CDS sequence (opt4) from hemagglutinin__InfluenzaA__AGQ47882
augaaggccauccugcuggugcugcugugcaccuucgccgccaccaacgccgacacccugugcaucggcuaccacgccaacaacagcaccgacaccguggacaccgugcuggagaagaacgugaccgugacccacagcgugaaccugcuggaggacagacacaacggcaagcugugcaagcugggcggcaucgccccccugcaccugggcaagugcaacaucgccggcuggcugcugggcaaccccgagugcgagcugcugcugaccgugagcagcuggagcuacaucguggagaccagcaacagcgacaacggcaccugcuaccccggcgacuucaucaacuacgaggagcugagagagcagcugagcagcgugagcagcuucgagagauucgagaucuuccccaagaccagcagcuggcccaaccacgagaccaacagaggcgugaccgccgccugccccuacgccggcgccaacagcuucuacagaaaccugaucuggcuggugaagaaggagaacagcuaccccaagcugagcaagagcuacgugaacaacaagggcaaggaggugcuggugcuguggggcauccaccacccccccaccagcaccgaccagcagagccuguaccagaacgccgacgccuacguguucgugggcagcagcaaguacaacagaaaguucaagcccgagaucgccgccagacccaaggugagaggccaggccggcagaaugaacuacuacuggacccugaucgagcccggcgacaccaucaccuucgaggccaccggcaaccugguggugcccagauacgccuucgccaugaacagaggcagcggcagcggcaucaucaucagcgacgcccccgugcacgacugcaacaccaagugccagacccccaagggcgccaucaacaccagccugcccuuccagaacauccaccccgugaccaucggcgagugccccaaguacgugaagagcaccaagcugagaauggccaccggccugagaaacauccccagcauccagagcagaggccuguucggcgccaucgccggcuucaucgagggcggcuggaccggcaugaucgacggcugguacggcuaccaccaccagaacgagcagggcagcggcuacgccgccgaccagagaagcacccagaacgccaucgacggcaucaccaacaaggugaacagcgugaucgagaagaugaacacccaguucaccgccgugggcaaggaguucaaccaccuggagaagagaaucgagaaccugaacaagaagguggacgacggcuuccuggacaucuggaccuacaacgccgagcugcuggugcugcuggagaacgagagaacccuggacuuccacgacagcaacgugaagaaccuguacgagaaggugagaagccagcugagaaacaacgccaaggagaucggcaacggcugcuucgaguucuaccacaagugcgacgacaccugcauggagagcgugaagaacggcaccuacgacuaccccaaguacagcgaggagagcaagcugaacagagaggagaucgacggcgugaagcuggagagcaccagaaucuaccagauccuggccaucuacagcaccguggccagcagccuggugcugcuggugagccugggcgccaucagcuucuggaugugcagcaacggcagccugcagugcagaaucugcaucuga

SEQ ID NO: 170220 - RNA, 1701 nt, Artificial Sequence; identical to SEQ ID NO: 169155
  derived and/or modified CDS sequence (opt4) from hemagglutinin__InfluenzaA__AGQ47894

SEQ ID NO: 170221 - RNA, 1701 nt, Artificial Sequence
  derived and/or modified CDS sequence (opt4) from hemagglutinin__InfluenzaA__AGQ47906
augaagaccaucaucgcccugagcuacaucuucugccuggcccugggccaggaccugcccggcaacgacaacagcaccgccacccugugccugggccaccacgccgugcccaacggcacccuggugaagaccaucaccgacgaccagaucgaggugaccaacgccaccgagcuggugcagagcagcagcaccggcaagaucugcaacaacccccacagaauccuggacggcaucgacugcacccugaucgacgcccugcugggcgacccccacugcgacguguuccagaacgagaccugggaccuguucguggagagaagcaaggccuucagcaacugcuaccccuacgacgugcccgacuacgccagccugagaagccugguggccagcagcggcacccuggaguucaucaccgagggcuucaccuggaccggcgugacccagaacggcggcagcaacgccugcaagagaggccccggcagcggcuucuucagcagacugaacuggcugaccaagagcggcagcaccuaccccgugcugaacgugaccaugcccaacaacgacaacuucgacaagcuguacaucuggggcauccaccaccccagcaccaaccaggagcagaccagccuguacgugcaggccagcggcagagugaccgugagcaccagaagaagccagcagaccaucauccccaacaucggcagcagacccugggugagaggccugagcagcagaaucagcaucuacuggaccaucgugaagcccggcgacgugcuggugaucaacagcaacggcaaccugaucgcccccagaggcuacuucaagaugagaaccggcaagagcagcaucaugagaagcgacgcccccaucgacaccugcaucagcgagugcaucacccccaacggcagcauccccaacgacaagcccuuccagaacgugaacaagaucaccuacggcgccugccccaaguacgugaagcagaacacccugaagcuggccaccggcaugagaaacgugcccgagaagcagaccagaggccuguucggcgccaucgccggcuucaucgagaacggcugggagggcaugaucgacggcugguacggcuucagacaccagaacagcgagggcaccggccaggccgccgaccugaagagcacccaggccgccaucgaccagaucaacggcaagcugaacagagugaucgagaagaccaacgagaaguuccaccagaucgagaaggaguucagcgagguggagggcagaauccaggaccuggagaaguacguggaggacaccaagaucgaccuguggagcuacaacgccgagcugcugguggcccuggagaaccagcacaccaucgaccugaccgacagcgagaugaacaagcuguucgagaagaccagaagacagcugagagagaacgccgaggacaugggcaacggcugcuucaagaucuaccacaagugcgacaacgccugcaucgagagcaucagaaacggcaccuacgaccacgacguguacagagacgaggcccugaacaacagauuccagaucaagggcguggagcugaagagcggcuacaaggacuggauccuguggaucagcuucgccaucagcugcuuccugcugugcguggugcugcugggcuucaucaugugggccugccagagaggcaacaucagaugcaacaucugcaucuga

SEQ ID NO: 170222 - RNA, 1701 nt, Artificial Sequence
  derived and/or modified CDS sequence (opt4) from hemagglutinin__InfluenzaA__AGQ47918
augaagaccaucaucgcccugagcuacaucuucugccuggcccugggccaggaccugcccggcaacgacaacaacaccgccacccugugccugggccaccacgccgugcccaacggcacccuggugaagaccaucaccgacgaccagaucgaggugaccaacgccaccgagcuggugcagagcagcagcaccggcaagaucugcaacaacccccacagaauccuggacggcaucgacugcacccugaucgacgcccugcugggcgacccccacugcgacguguuccagaacgagaccugggaccuguucguggagagaagcaaggccuucagcaacugcuaccccuacgacgugcccgacuacgccagccugagaagccugguggccagcagcggcacccuggaguucaucaccgagggcuucaccuggaccggcgugacccagaacggcggcagcaacgccugcaagagaggccccggcagcggcuucuucagcagacugaacuggcugaccaagagcggcagcaccuaccccgugcugaacgugaccaugcccaacaacgacaacuucgacaagcuguacaucuggggcgugcaccaccccagcaccaaccaggagcagaccagccuguacgugcaggccagcggcagagugaccgugagcaccagaagaagccagcagaccaucauccccaacaucggcagcagacccugggugagaggccugagcagcagaaucagcaucuacuggaccaucgugaagcccggcgacgugcuggugaucaacagcaacggcaaccugaucgcccccagaggcuacuucaagaugagaaccggcaagagcagcaucaugagaagcgacgcccccaucgacaccugcaucagcgagugcaucacccccaacggcagcauccccaacgacaagcccuuccagaacgugaacaagaucaccuacggcgccugccccaaguacgugaagcagaacacccugaagcuggccaccggcaugagaaacgugcccgagaagcagaccagaggccuguucggcgccaucgccggcuucaucgagaacggcugggagggcaugaucgacggcugguacggcuucagacaccagaacagcgagggcaccggccaggccgccgaccugaagagcacccaggccgccaucgaccagaucaacggcaagcugaacagagugaucgagaagaccaacgagaaguuccaccagaucgagaaggaguucagcgagguggagggcagaauccaggaccuggagaaguacguggaggacaccaagaucgaccuguggagcuacaacgccgagcugcugguggcccuggagaaccagcacaccaucgaccugaccgacagcgagaugaacaagcuguucgagaagaccagaagacagcugagagagaacgccgaggacaugggcaacggcugcuucaagaucuaccacaagugcgacaacgccugcaucgagagcaucagaaacggcaccuacgaccacgacguguacagagacgaggcccugaacaacagauuccagaucaagggcguggagcugaagagcggcuacaaggacuggauccuguggaucagcuucgccaucagcugcuuccugcugugcguggugcugcugggcuucaucaugugggccugccagagaggcaacaucagaugcaacaucugcaucuga

SEQ ID NO: 170223 - RNA, 1701 nt, Artificial Sequence
  derived and/or modified CDS sequence (opt4) from hemagglutinin__InfluenzaA__AGQ47930
augaaggccaaccugcuggugcugcugugcgcccuggccgccgccgacgccgacaccaucugcaucggcuaccacgccaacaacagcaccgacaccguggacaccgcccuggagaagaacgugaccgugacccacagcgugaaccugcuggaggacagccacaacggcaagcugugcagacugaagggcaucgccccccugcagcugggcaagugcaacaucgccggcuggcugcugggcaaccccgagugcgacccccugcugcccgugagaagcuggagcuacaucguggagacccccaacagcgagaacggcaucugcuaccccggcgacuucaucgacuacgaggagcugagagagcagcugagcagcgugagcagcuucgagagauucgagaucuuccccaaggagagcagcuggcccaaccacaacaccaacaagggcgugaccgccgccugcagccacgccggcaagagcagcuucuacagaaaccugcuguggcugaccgagaaggagggcagcuaccccaagcugaagaacagcuacgugaacaagaagggcaaggaggugcuggugcuguggggcauccaccaccccagcaacagcaaggaccagcagaaccuguaccagaacgagaacgccuacgugagcguggugaccagcaacuacaacagaagauucacccccgagaucgccgagagacccaaggugagagaccaggccggcagaaugaacuacuacuggacccugcugaagcccggcgacaccaucaucuucgaggccaacggcaaccugaucgcccccauguacgccuucgcccugagcagaggcuucggcagcggcaucaucaccagcaacgccagcaugcacgagugcaacaccaagugccagaccccccugggcgccaucaacagcagccugcccuuccagaacauccaccccgugaccaucggcgagugccccaaguacgugagaagcgccaagcugagaauggugaccggccugagaaacauccccagcauccagagcagaggccuguucggcgccaucgccggcuucaucgagggcggcuggaccggcaugaucgacggcugguacggcuaccaccaccagaacgagcagggcagcggcuacgccgccgaccagaagagcacccagaacgccaucaacggcaucaccaacaaggugaacagcgugaucgagaagaugaacauccaguucaccgccgugggcaaggaguucaacaagcuggagaagagaauggagaaccugaacaagaagguggacgacggcuuccuggacaucuggaccuacaacgccgagcugcuggugcugcuggagaacgagagaacccuggacuuccacgacagcaacgugaagaaccuguacgagaaggugaagagccagcugaagaacaacgccaaggagaucggcaacggcugcuucgaguucuaccacaagugcgacaacgagugcauggagagcgugagaaacggcaccuacgacuaccccaaguacagcgaggagagcaagcugaacagagagaagguggacggcgugaagcuggagagcaugggcaucuaccagauccuggccaucuacagcaccguggccagcagccuggugcugcuggugagccugggcgccaucagcuucuggaugugcagcaacggcagccugcagugcagaaucugcaucuga

SEQ ID NO: 170224 - RNA, 1698 nt, Artificial Sequence; identical to SEQ ID NO: 163338
  derived and/or modified CDS sequence (opt4) from hemagglutinin__InfluenzaA__AGQ47942

SEQ ID NO: 170225 - RNA, 1698 nt, Artificial Sequence
  derived and/or modified CDS sequence (opt4) from hemagglutinin__InfluenzaA__AGQ47954
augaaggccaaccugcuggugcugcugugcgcccuggccgccgccgacgccgacaccaucugcaucggcuaccacgccaacaacagcaccgacaccguggacaccgugcuggagaagaacgugaccgugacccacagcgugaaccugcuggaggacagccacaacggcaagcugugcagacugaagggcaucgccccccugcagcugggcaagugcaacaucgccggcuggcugcugggcaaccccgagugcgacccccugcugcccgugagaagcuggagcuacaucguggagacccccaacagcgagaacggcaucugcuaccccggcgacuucaucgacuacgaggagcugagagagcagcugagcagcgugagcagcuucgagagauucgagaucuuccccaaggagagcagcuggcccaaccacaacaccaacggcgugaccgccgccugcagccacgagggcaagagcagcuucuacagaaaccugcuguggcugaccgagaaggagggcagcuaccccaagcugaagaacagcuacgugaacaagaagggcaaggaggugcuggugcuguggggcauccaccacccccccaacagcaaggagcagcagaaccuguacagaaacgagaacgccuacgugagcguggugaccagcaacuacaacagaagauucacccccgagaucgccgagagacccaaggugagagaccaggccggcagaaugaacuacuacuggacccugcugaagcccggcgacaccaucaucuucgaggccaacggcaaccugaucgcccccauguacgccuucgcccugagcagaggcuucggcagcggcaucaucaccagcaacgccagcaugcacgagugcaacaccaagugccagaccccccugggcgccaucaacagcagccugcccuaccagaacauccaccccgugaccaucggcgagugccccaaguacgugagaagcgccaagcugagaauggugaccggccugagaaacauccccagcauccagagcagaggccuguucggcgccaucgccggcuucaucgagggcggcuggaccggcaugaucgacggcugguacggcuaccaccaccagaacgagcagggcagcggcuacgccgccgaccagaagagcacccagaacgccaucaacggcaucaccaacaaggugaacaccgugaucgagaagaugaacauccaguucaccgccgugggcaaggaguucaacaagcuggagaagagaauggagaaccugaacaagaagguggacgacggcuuccuggacaucuggaccuacaacgccgagcugcuggugcugcuggagaacgagagaacccuggacuuccacgacagcaacgugaagaaccuguacgagaaggugaagagccagcugaagaacaacgccaaggagaucggcaacggcugcuucgaguucuaccacaagugcgacaacgagugcauggagagcgugagaaacggcaccuacgacuaccccaaguacagcgaggagagcaagcugaacagagagaagguggacggcgugaagcuggagagcaugggcaucuaccagauccuggccaucuacagcaccguggccagcagccuggugcugcuggugagccugggcgccaucagcuucuggaugugcagcaacggcagccugcagugcagaaucugcaucuga

SEQ ID NO: 170226 - RNA, 1698 nt, Artificial Sequence
  derived and/or modified CDS sequence (opt4) from hemagglutinin__InfluenzaA__AGQ47966
augaaggccaaccugcuggugcugcugugcgcccuggccgccgccgacgccgacaccaucugcaucggcuaccacgccaacaacagcaccgacaccguggacaccgugcuggagaagaacgugaccgugacccacagcgugaaccugcuggaggacagccacaacggcaagcugugcagacugaagggcaucgccccccugcagcugggcaagugcaacaucgccggcuggcugcugggcaaccccgagugcgacccccugcugcccgugggcagcuggagcuacaucguggagacccccaacagcgagaacggcaucugcuaccccggcgacuucaucgacuacgaggagcugagagagcagcugagcagcgugagcagcuucgagagauucgagaucuuccccaaggagagcagcuggcccgaccacaacaccaacggcgugaccgccgccugcagccacgagggcaagaacagcuucuacagaaaccugcuguggcugaccgagaaggagagcagcuaccccaagcugaagaacagcuacgugaacaagaagggcaaggaggugcuggugcuguggggcauccaccacccccccaacagcaaggagcagcagaaccuguaccagaacgagaacgccuacgugagcguggugaccagcaacuacaacagaagauucacccccgagaucgccgagagacccaaggugaaggaccaggccggcagaaugaacuacuacuggacccugcugaagcccggcgacaccaucaucuucgaggccaacggcaaccugaucgcccccauguacgccuucgcccugagcagaggcuucggcagcggcaucaucaccagcaacgccagcaugcacgagugcaacaccaagugccagaccccccugggcgccaucaacagcagccugcccuaccagaacauccaccccgugaccaucggcgagugccccaaguacgugagaagcgccaagcugagaauggugaccggccugagaaacauccccagcauccagagcagaggccuguucggcgccaucgccggcuucaucgagggcggcuggaccggcaugaucgacggcugguacggcuaccaccaccagaacgagcagggcagcggcuacgccgccgaccagaagagcacccagaacgccaucaacggcaucaccaacaaggugaacaccgugaucgagaagaugaacauccaguucaccgccgugggcaaggaguucaacaagcuggagaagagaauggagaaccugaacaagaagguggacgacggcuuccuggacaucuggaccuacaacgccgagcugcuggugcugcuggagaacgagagaacccuggacuuccacgacagcaacgugaagaaccuguacgagaaggugaagagccagcugaagaacaacgccaaggagaucggcaacggcugcuucgaguucuaccacaagugcgacaacgagugcauggagagcgugagaaacggcaccuacgacuaccccaaguacagcgaggagagcaagcugaacagagagaagguggacggcgugaagcuggagagcaugggcaucuaccagauccuggccaucuacagcaccguggccagcagccuggugcugcuggugagccugggcgccaucagcuucuggaugugcagcaacggcagccugcagugcagaaucugcaucuga

SEQ ID NO: 170227 - RNA, 1698 nt, Artificial Sequence
  derived and/or modified CDS sequence (opt4) from hemagglutinin__InfluenzaA__AGQ47978
augaaggccaaccugcuggugcugcugugcgcccuggccgccgccgacgccgacaccaucugcaucggcuaccacgccaacaacagcaccgacaccguggacaccgugcuggagaagaacgugaccgugacccacagcgugaaccugcuggaggacagccacaacggcaagcugugcagacugaagggcaucgccccccugcagcugggcaagugcaacaucgccggcuggcugcugggcaaccccgagugcgacccccugcugcccgugggcagcuggagcuacaucguggagacccccaacagcgagaacggcaucugcuaccccggcgacuucaucgacuacgaggagcugagagagcagcugagcagcgugagcagcuucgagagauucgagaucuuccccaaggagagcagcuggcccgaccacaacaccaacggcgugaccgccgccugcagccacgagggcaagaacagcuucuacagaaaccugcuguggcugaccaagaaggagagcagcuaccccgagcugaagaacagcuacgugaacaagaagggcaaggaggugcuggugcuguggggcauccaccacccccccaacagcaaggagcagcagaaccuguaccagaacgagaacgccuacgugagcguggugaccagcaacuacaacagaagauucacccccgagaucgccgagagacccaaggugaaggaccaggccggcagaaugaacuacuacuggacccugcugaagcccggcgacaccaucaucuucgaggccaacggcaaccugaucgcccccauguacgccuucgcccugagcagaggcuucggcagcggcaucaucaccagcaacgccagcaugcacgagugcaacaccaagugccagaccccccugggcgccaucaacagcagccugcccuaccagaacauccaccccgugaccaucggcgagugccccaaguacgugagaagcgccaagcugagaauggugaccggccugagaaacauccccagcauccagagcagaggccuguucggcgccaucgccggcuucaucgagggcggcuggaccggcaugaucgacggcugguacggcuaccaccaccagaacgagcagggcagcggcuacgccgccgaccagaagagcacccagaacgccaucaacggcaucaccaacaaggugaacaccgugaucgagaagaugaacauccaguucaccgccgugggcaaggaguucaacaagcuggagaagagaauggagaaccugaacaagaagguggacgacggcuuccuggacaucuggaccuacaacgccgagcugcuggugcugcuggagaacgagagaacccuggacuuccacgacagcaacgugaagaaccuguacgagaaggugaagagccagcugaagaacaacgccaaggagaucggcaacggcugcuucgaguucuaccacaagugcgacaacgagugcauggagagcgugagaaacggcaccuacgacuaccccaaguacagcgaggagagcaagcugaacagagagaagguggacggcgugaagcuggagagcaugggcaucuaccagauccuggccaucuacagcaccguggccagcagccuggugcugcuggugagccugggcgccaucagcuucuggaugugcagcaacggcagccugcagugcagaaucugcaucuga

SEQ ID NO: 170228 - RNA, 1698 nt, Artificial Sequence
  derived and/or modified CDS sequence (opt4) from hemagglutinin__InfluenzaA__AGQ47990
augaaggccaaccugcuggugcugcugugcgcccuggccgccgccgacgccgacaccaucugcaucggcuaccacgccaacaacagcaccgacaccguggacaccgugcuggagaagaacgugaccgugacccacagcgugaaccugcuggaggacagccacaacggcaagcugugcagacugaagggcaucgccccccugcagcugggcaagugcaacaucgccggcuggcugcugggcaaccccgagugcgacccccugcugcccgugggcagcuggagcuacaucguggagacccccaacagcgagaacggcaucugcuaccccggcgacuucaucgacuacgaggagcugagagagcagcugagcagcgugagcagcuucgagagauucaagaucuuccccaaggagagcagcuggcccgaccacaacaccaacggcgugaccgccgccugcagccacgagggcaagaacagcuucuacagaaaccugcuguggcugaccaagaaggagagcagcuaccccgagcugaagaacagcuacgugaacaagaagggcaaggaggugcuggugcuguggggcauccaccacccccccaacagcaaggagcagcagaaccuguaccagaacgagaacgccuacgugagcguggugaccagcaacuacaacagaagauucacccccgagaucgccgagagacccaaggugaaggaccaggccggcagaaugaacuacuacuggacccugcugaagcccggcgacaccaucaucuucgaggccaacggcaaccugaucgcccccauguacgccuucgcccugagcagaggcuucggcagcggcaucaucaccagcaacgccagcaugcacgagugcaacaccaagugccagaccccccugggcgccaucaacagcagccugcccuaccagaacauccaccccgugaccaucggcgagugccccaaguacgugagaagcgccaagcugagaauggugaccggccugagaaacauccccagcauccagagcagaggccuguucggcgccaucgccggcuucaucgagggcggcuggaccggcaugaucgacggcugguacggcuaccaccaccagaacgagcagggcagcggcuacgccgccgaccagaagagcacccagaacgccaucaacggcaucaccaacaaggugaacaccgugaucgagaagaugaacauccaguucaccgccgugggcaaggaguucaacaagcuggagaagagaauggagaaccugaacaagaagguggacgacggcuuccuggacaucuggaccuacaacgccgagcugcuggugcugcuggagaacgagagaacccuggacuuccacgacagcaacgugaagaaccuguacgagaaggugaagagccagcugaagaacaacgccaaggagaucggcaacggcugcuucgaguucuaccacaagugcgacaacgagugcauggagagcgugagaaacggcaccuacgacuaccccaaguacagcgaggagagcaagcugaacagagagaagguggacggcgugaagcuggagagcaugggcaucuaccagauccuggccaucuacagcaccguggccagcagccuggugcugcuggugagccugggcgccaucagcuucuggaugugcagcaacggcagccugcagugcagaaucugcaucuga

SEQ ID NO: 170229 - RNA, 1698 nt, Artificial Sequence
  derived and/or modified CDS sequence (opt4) from hemagglutinin__InfluenzaA__AGQ48002
augaaggccaaccugcuggugcugcugugcgcccuggccgccgccgacgccgacaccaucugcaucggcuaccacgccaacaacagcaccgacaccguggacaccgugcuggagaagaacgugaccgugacccacagcgugaaccugcuggaggacagccacaacggcaagcugugcagacugaagggcaucgccccccugcagcugggcaagugcaacaucgccggcuggcugcugggcaaccccgagugcgacccccugcugcccgugggcagcuggagcuacaucguggagacccccaacagcgagaacggcaucugcuaccccggcgacuucaucgacuacgaggagcugagagagcagcugagcagcgugagcagcuucgagagauucaagaucuuccccaaggagagcagcuggcccgaccacaacaccaacggcgugaccgccgccugcagccacgagggcaagaacagcuucuacagaaaccugcuguggcugaccaagaaggagagcagcuaccccgagcugaagaacagcuacgugaacaagaagagaaaggaggugcuggugcuguggggcauccaccacccccccaacagcaaggagcagcagaaccuguaccagaacgagaacgccuacgugagcguggugaccagcaacuacaacagaagauucacccccgagaucgccgagagacccaaggugaaggaccaggccggcagaaugaacuacuacuggacccugcugaagcccggcgacaccaucaucuucgaggccaacggcaaccugaucgcccccauguacgccuucgcccugagcagaggcuucggcagcggcaucaucaccagcaacgccagcaugcacgagugcaacaccaagugccagaccccccugggcgccaucaacagcagccugcccuaccagaacauccaccccgugaccaucggcgagugccccaaguacgugagaagcgccaagcugagaauggugaccggccugagaaacauccccagcauccagagcagaggccuguucggcgccaucgccggcuucaucgagggcggcuggaccggcaugaucgacggcugguacggcuaccaccaccagaacgagcagggcagcggcuacgccgccgaccagaagagcacccagaacgccaucaacggcaucaccaacaaggugaacaccgugaucgagaagaugaacauccaguucaccgccgugggcaaggaguucaacaagcuggagaagagaauggagaaccugaacaagaagguggacgacggcuuccuggacaucuggaccuacaacgccgagcugcuggugcugcuggagaacgagagaacccuggacuuccacgacagcaacgugaagaaccuguacgagaaggugaagagccagcugaagaacaacgccaaggagaucggcaacggcugcuucgaguucuaccacaagugcgacaacgagugcauggagagcgugagaaacggcaccuacgacuaccccaaguacagcgaggagagcaagcugaacagagagaagguggacggcgugaagcuggagagcaugggcaucuaccagauccuggccaucuacagcaccguggccagcagccuggugcugcuggugagccugggcgccaucagcuucuggaugugcagcaacggcagccugcagugcagaaucugcaucuga

SEQ ID NO: 170230 - RNA, 1698 nt, Artificial Sequence
  derived and/or modified CDS sequence (opt4) from hemagglutinin__InfluenzaA__AGQ48014
augaaggccaaccugcuggugcugcugugcgcccuggccgccgccgacgccgacaccaucugcaucggcuaccacgccaacaacagcaccgacaccguggacaccgugcuggagaagaacgugaccgugacccacagcgugaaccugcuggaggacagccacaacggcaagcugugcagacugaagggcaucgccccccugcagcugggcaagugcaacaucgccggcuggcugcugggcaaccccggcugcgacccccugcugcccgugggcagcuggagcuacaucguggagacccccaacagcgagaacggcaucugcuaccccggcgacuucaucgacuacgaggagcugagagagcagcugagcagcgugagcagcuucgagagauucaagaucuuccccaaggagagcagcuggcccgaccacaacaccaacggcgugaccgccgccugcagccacgagggcaagaacagcuucuacagaaaccugcuguggcugaccaagaaggagagcagcuaccccgagcugaagaacagcuacgugaacaagaagagaaaggaggugcuggugcuguggggcauccaccacccccccaacagcaaggagcagcagaaccuguaccagaacgagaacgccuacgugagcguggugaccagcaacuacaacagaagauucacccccgagaucgccgagagacccaaggugaaggaccaggccggcagaaugaacuacuacuggacccugcugaagcccggcgacaccaucaucuucgaggccaacggcaaccugaucgcccccauguacgccuucgcccugagcagaggcuucggcagcggcaucaucaccagcaacgccagcaugcacgagugcaacaccaagugccagaccccccugggcgccaucaacagcagccugcccuaccagaacauccaccccgugaccaucggcgagugccccaaguacgugagaagcgccaagcugagaauggugaccggccugagaaacauccccagcauccagagcagaggccuguucggcgccaucgccggcuucaucgagggcggcuggaccggcaugaucgacggcugguacggcuaccaccaccagaacgagcagggcagcggcuacgccgccgaccagaagagcacccagaacgccaucaacggcaucaccaacaaggugaacaccgugaucgagaagaugaacauccaguucaccgccgugggcaaggaguucaacaagcuggagaagagaauggagaaccugaacaagaagguggacgacggcuuccuggacaucuggaccuacaacgccgagcugcuggugcugcuggagaacgagagaacccuggacuuccacgacagcaacgugaagaaccuguacgagaaggugaagagccagcugaagaacaacgccaaggagaucggcaacggcugcuucgaguucuaccacaagugcgacaacgagugcauggagagcgugagaaacggcaccuacgacuaccccaaguacagcgaggagagcaagcugaacagagagaagguggacggcgugaagcuggagagcaugggcaucuaccagauccuggccaucuacagcaccguggccagcagccuggugcugcuggugagccugggcgccaucagcuucuggaugugcagcaacggcagccugcagugcagaaucugcaucuga

SEQ ID NO: 170231 - RNA, 1698 nt, Artificial Sequence
  derived and/or modified CDS sequence (opt4) from hemagglutinin__InfluenzaA__AGQ48026
augaaggccaaccugcuggugcugcugugcgcccuggccgccgccgacgccgacaccaucugcaucggcuaccacgccaacaacagcaccgacaccguggacaccgugcuggagaagaacgugaccgugacccacagcgugaaccugcuggaggacagccacaacggcaagcugugcaagcugaagggcaucgccccccugcagcugggcaagugcaacaucgccggcuggcugcugggcaaccccggcugcgacccccugcugcccgugggcagcuggagcuacaucguggagacccccaacagcgagaacggcaucugcuaccccggcgacuucaucgacuacgaggagcugagagagcagcugagcagcgugagcagcuucgagagauucaagaucuuccccaaggagagcagcuggcccgaccacaacaccaacggcgugaccgccgccugcagccacgagggcaagaacagcuucuacagaaaccugcuguggcugaccaagaaggagagcagcuaccccgagcugaagaacagcuacgugaacaagaagagaaaggaggugcuggugcuguggggcauccaccacccccccaacagcaaggagcagcagaaccuguaccagaacgagaacgccuacgugagcguggugaccagcaacuacaacagaagauucacccccgagaucgccgagagacccaaggugaaggaccaggccggcagaaugaacuacuacuggacccugcugaagcccggcgacaccaucaucuucgaggccaacggcaaccugaucgcccccauguacgccuucgcccugagcagaggcuucggcagcggcaucaucaccagcaacgccagcaugcacgagugcaacaccaagugccagaccccccugggcgccaucaacagcagccugcccuaccagaacauccaccccgugaccaucggcgagugccccaaguacgugagaagcgccaagcugagaauggugaccggccugagaaacauccccagcauccagagcagaggccuguucggcgccaucgccggcuucaucgagggcggcuggaccggcaugaucgacggcugguacggcuaccaccaccagaacgagcagggcagcggcuacgccgccgaccagaagagcacccagaacgccaucaacggcaucaccaacaaggugaacaccgugaucgagaagaugaacauccaguucaccgccgugggcaaggaguucaacaagcuggagaagagaauggagaaccugaacaagaagguggacgacggcuuccuggacaucuggaccuacaacgccgagcugcuggugcugcuggagaacgagagaacccuggacuuccacgacagcaacgugaagaaccuguacgagaaggugaagagccagcugaagaacaacgccaaggagaucggcaacggcugcuucgaguucuaccacaagugcgacaacgagugcauggagagcgugagaaacggcaccuacgacuaccccaaguacagcgaggagagcaagcugaacagagagaagguggacggcgugaagcuggagagcaugggcaucuaccagauccuggccaucuacagcaccguggccagcagccuggugcugcuggugagccugggcgccaucagcuucuggaugugcagcaacggcagccugcagugcagaaucugcaucuga

SEQ ID NO: 170232 - RNA, 1698 nt, Artificial Sequence
  derived and/or modified CDS sequence (opt4) from hemagglutinin__InfluenzaA__AGQ48038
augaaggccaaccugcuggugcugcugugcgcccuggccgccgccgacgccgacaccaucugcaucggcuaccacgccaacaacagcaccgacaccguggacaccgugcuggagaagaacgugaccgugacccacagcgugaaccugcuggaggacagccacaacggcaagcugugcaagcugaagggcaucgccccccugcagcugggcaagugcaacaucgccggcuggcugcugggcaaccccggcugcgacccccugcugcccgugggcagcuggagcuacaucguggagacccccaacagcgagaacggcaucugcuaccccggcgacuucaucgacuacgaggagcugagagagcagcugagcagcgugagcagcuucgagagauucaagaucuuccccaaggagagcagcuggcccgaccacaacaccaacggcgugaccgccgccugcagccacgagggcaagaacagcuucuacagaaaccugcuguggcugaccaagaaggagagcagcuaccccgagcugaagaacagcuacgugaacaagaagagagaggaggugcuggugcuguggggcauccaccacccccccaacagcgaggagcagcagaaccuguaccagaacgagaacgccuacgugagcguggugaccagcaacuacaacagaagauucacccccgagaucgccgagagacccaaggugaagggccaggccggcagaaugaacuacuacuggacccugcugaagcccggcgacaccaucaucuucgaggccaacggcaaccugaucgcccccauguacgccuucgcccugagcagaggcuucggcagcggcaucaucaccagcaacgccagcaugcacgagugcaacaccaagugccagaccccccugggcgccaucaacagcagccugcccuaccagaacauccaccccgugaccaucggcgagugccccaaguacgugagaagcgccaagcugagaauggugaccggccugagaaacauccccagcauccagagcagaggccuguucggcgccaucgccggcuucaucgagggcggcuggaccggcaugaucgacggcugguacggcuaccaccaccagaacgagcagggcagcggcuacgccgccgaccagaagagcacccagaacgccaucaacggcaucaccaacaaggugaacaccgugaucgagaagaugaacauccaguucaccgccgugggcaaggaguucaacaagcuggagaagagaauggagaaccugaacaagaagguggacgacggcuuccuggacaucuggaccuacaacgccgagcugcuggugcugcuggagaacgagagaacccuggacuuccacgacagcaacgugaagaaccuguacgagaaggugaagagccagcugaagaacaacgccaaggagaucggcaacggcugcuucgaguucuaccacaagugcgacaacgagugcauggagagcgugagaaacggcaccuacgacuaccccaaguacagcgaggagagcaagcugaacagagagaagguggacggcgugaagcuggagagcaugggcaucuaccagauccuggccaucuacagcaccguggccagcagccuggugcugcuggugagccugggcgccaucagcuucuggaugugcagcaacggcagccugcagugcagaaucugcaucuga

SEQ ID NO: 170233 - RNA, 1698 nt, Artificial Sequence
  derived and/or modified CDS sequence (opt4) from hemagglutinin__InfluenzaA__AGQ48050
augaaggccaaccugcuggugcugcugugcgcccuggccgccgccgacgccgacaccaucugcaucggcuaccacgccaacaacagcaccgacaccguggacaccgugcuggagaagaacgugaccgugacccacagcgugaaccugcuggaggacagccacaacggcaagcugugcaagcugaagggcaucgccccccugcagcugggcaagugcaacaucgccggcuggcugcugggcaaccccggcugcgacccccugcugcccgugggcagcuggagcuacaucguggagacccccaacagcgagaacggcaucugcuaccccggcgacuucaucgacuacgaggagcugagagagcagcugagcagcgugagcagcuucgagagauucaagaucuuccccaaggagagcagcuggcccgaccacaacaccaacggcgugaccgccgccugcagccacgagggcaagaacagcuucuacagaaaccugcuguggcugaccaagaaggagagcagcuaccccgagcugaagaacagcuacgugaacaagaagagagaggaggugcuggugcuguggggcauccaccacccccccgacagcgaggagcagcagaaccuguaccagaacgagaacgccuacgugagcguggugaccagcaacuacaacagaagauucacccccgagaucgccgagagacccaaggugaagggccaggccggcagaaugaacuacuacuggacccugcugaagcccggcgacaccaucaucuucaaggccaacggcaaccugaucgcccccauguacgccuucgcccugagcagaggcuucggcagcggcaucaucaccagcaacgccagcaugcacgagugcaacaccaagugccagaccccccugggcgccaucaacagcagccugcccuaccagaacauccaccccgugaccaucggcgagugccccaaguacgugagaagcgccaagcugagaauggugaccggccugagaaacauccccagcauccagagcagaggccuguucggcgccaucgccggcuucaucgagggcggcuggaccggcaugaucgacggcugguacggcuaccaccaccagaacgagcagggcagcggcuacgccgccgaccagaagagcacccagaacgccaucaacggcaucaccaacaaggugaacaccgugaucgagaagaugaacauccaguucaccgccgugggcaaggaguucaacaagcuggagaagagaauggagaaccugaacaagaagguggacgacggcuuccuggacaucuggaccuacaacgccgagcugcuggugcugcuggagaacgagagaacccuggacuuccacgacagcaacgugaagaaccuguacgagaaggugaagagccagcugaagaacaacgccaaggagaucggcaacggcugcuucgaguucuaccacaagugcgacaacgagugcauggagagcgugagaaacggcaccuacgacuaccccaaguacagcgaggagagcaagcugaacagagagaagguggacggcgugaagcuggagagcaugggcaucuaccagauccuggccaucuacagcaccguggccagcagccuggugcugcuggugagccugggcgccaucagcuucuggaugugcagcaacggcagccugcagugcagaaucugcaucuga

SEQ ID NO: 170234 - RNA, 1689 nt, Artificial Sequence
  derived and/or modified CDS sequence (opt4) from hemagglutinin__InfluenzaA__AGQ80946
auggccaucaucuaccugauccugcuguucaccgccgugagaggcgaccagaucugcaucggcuaccacagcaacaacagcaccgagaagguggacaccauccuggagagaaacgugaccgugacccacgcccaggacauccuggagaagacccacaacggcaagcugugcaagcugaacggcauccccccccuggagcugggcgacugcagcaucgccggcuggcugcugggcaaccccgagugcgacagacugcugaccgugcccgaguggagcuacaucauggagaaggagaaccccagaaacggccugugcuaccccggcagcuucaacgacuacgaggagcugaagcaccugcugagcagcgugacccacuucgagaaggugaagauccugcccaaggacagauggacccagcacaccaccaccggcggcagcagagccugcgccgugagcggcaaccccagcuucuucagaaacaugguguggcugaccaagaagggccccaacuaccccguggccaagggcagcuacaacaacaccagcggcgaccagaugcugaucaucuggggcgugcaccaccccaacgacgaggccgagcagagaacccuguaccagaacgugggcaccuacgugagcgugggcaccagcacccugaacaagagaagcgugcccgagaucgccaccagacccaaggugaacggccagggcggcagaauggaguucagcuggaccauccuggacgugcuggacaccaucaacuucgagagcaccggcaaccugaucgcccccgaguacggcuucaagaucagcaagagaggcagcagcggcaucaugaagaccgagggcacccuggagaacugcgagaccaagugccagaccccccugggcgccaucaacaccacccugcccuuccacaacauccacccccugaccaucggcgagugccccaaguacgugaagagcgagagacuggugcuggccaccggccugagaaacgugccccagaucgagagcagaggccuguucggcgccaucgccggcuucaucgagggcggcuggcagggcaugguggacggcugguacggcuaccaccacagcaacgaccagggcagcggcuacgccgccgacaaggagagcacccagaaggccaucgacggcaucaccaacaaggugaacagcgugaucgagaagaugaacacccaguucgaggccgugggcaaggaguucagcaaccuggagaagagacuggagaaccugaacaagaagauggaggacggcuuccuggacguguggaccuacaacgccgagcugcuggugcugauggagaacgagagaacccuggacuuccacgacagcaacgugaagaaccuguacgacaaggugagaaugcagcugagagacaacgccaaggagcugggcaacggcugcuucgaguucuaccacaagugcgacgacgagugcaugaacagcgugaagaacggcaccuacgacuaccccaaguacgaggaggagagcaagcugaacagaaacgagaucaagggcgugaagcugagcaacaugggcguguaccagauccuggccaucuacgccaccguggccggcagccugagccuggccaucaugaucgccggcaucagccuguggaugugcagcaacggcagccugcagugcagaaucugcaucuga

SEQ ID NO: 170235 - RNA, 1689 nt, Artificial Sequence
  derived and/or modified CDS sequence (opt4) from hemagglutinin__InfluenzaA__AGQ80947
auggccaucaucuaccugauccugcuguucgccaccgugagaggcgaccagaucugcaucggcuaccacagcaacaacagcaccgagaagguggacaccauccuggagagaaacaucaccgugacccacgcccaggacauccuggagaagacccacaacggcaagcugugcaagcugaacggcauccccccccuggagcugggcaacugcagcaucgccggcuggcugcugggcaaccccgagugcgacagacugcugaccgugcccgaguggagcuacaucauggagaaggagaaccccagagacggccugugcuaccccggcagcuucaacgacuacgaggagcugaagcaccugcugagcagcgugacccacuucgagaaggugaagauccugcccaaggacagauggacccagcacaccaccaccggcggcagcagagccugcgccgugagcggcaaccccagcuucuucagaaacaugguguggcugaccaagaagggcagcaacuaccccaucgccaagggcagcuacaacaacaccagcggcgagcagaugcugaucaucuggggcgugcaccaccccaacgacgacgccgagcagagaacccuguaccagaacgugggcaccuacgugagcgugggcaccagcacccugaacaagagaagcauccccgagaucgccaccagacccaaggugaacggccagggcggcagaauggaguucagcuggaccauccuggacaugcuggacaccaucaacuucgagagcaccggcaaccugaucgcccccgaguacggcuucaagaucagcaagagaggcagcagcggcaucaugaagaccgagggcacccuggagaacugcgagaccaagugccagaccccccugggcgccaucaacaccacccugcccuuccacaacauccacccccugaccaucggcgagugccccaaguacgugaagagcgagagacuggugcuggccaccggccugagaaacgugccccagaucgagagcagaggccuguucggcgccaucgccggcuucaucgagggcggcuggcagggcaugguggacggcugguacggcuaccaccacagcaacgaccagggcagcggcuacgccgccgacaaggagagcacccagaaggccaucgacggcaucaccaacaaggugaacagcgugaucgagaagaugaacacccaguucgaggccgugggcaaggaguucaacaaccuggagaagagacuggagaaccugaacaagaagauggaggacggcuuccuggacguguggaccuacaacgccgagcugcuggugcugauggagaacgagagaacccuggacuuccacgacagcaacgugaagaaccuguacgacaaggugagaaugcagcugaaggacaacgccaaggagcugggcaacggcugcuucgaguucuaccacaagugcgacgacgagugcaugaacagcgugaagaacggcaccuacgacuaccccaaguacgaggaggagagcaagcugaacagaaacgagaucaagggcgugaagcugagcaacaugggcguguaccagauccuggccaucuacgccaccguggccggcagccugagccuggccaucaugaucgccggcgugagccuguggaugugcagcaacggcagccugcagugcagaaucugcaucuga

SEQ ID NO: 170236 - RNA, 1689 nt, Artificial Sequence
  derived and/or modified CDS sequence (opt4) from hemagglutinin__InfluenzaA__AGQ80948
auggccaucaucuaccugauccugcuguucgccgccgugagaggcgaccagaucugcaucggcuaccacagcaacaacagcaccgagaagguggacaccauccuggagagaaacgugaccgugacccacgcccaggacauccuggagaagacccacaacggcaagcugugcaagcugaacggcauccccccccuggagcugggcaacugcagcaucgccggcuggcugcugggcaaccccgagugcgacagacugcugaccgugcccgaguggagcuacaucauggagaaggagaaccccagaaacggccugugcuaccccggcagcuucaacgacuacgaggagcugaagcaccugcugagcagcgugacccacuucgagaaggugaagauccugcccaaggacagauggacccagcacaccaccaccggcggcagcagagccugcgccguguucggcaaccccagcuucuucagaaacaugguguggcugaccaagaagggcagcaacuaccccaucgccaagggcagcuacaacaacaccagcggcgagcagaugcugaucaucuggggcgugcaccaccccaacgacgacgccgagcagagaacccuguaccagaacgugggcaccuacgugagcgugggcaccagcacccugaacaagagaagcauccccgagaucgccaccagacccaaggugaacggccagggcggcagaauggaguucagcuggaccauccuggacaugcuggacaccaucaacuucgagagcaccggcaaccugaucgcccccgaguacggcuucaagaucagcaagagaggcagcagcggcaucaugaagaccgagggcacccuggagaacugcgagaccaagugccagaccccccugggcgccaucaacaccacccugcccuuccacaacauccacccccugaccaucggcgagugccccaaguacgugaagagcgagagacuggugcuggccaccggccugagaaacgugccccagaucgagagcagaggccuguucggcgccaucgccggcuucaucgagggcggcuggcagggcaugguggacggcugguacggcuaccaccacagcaacgaccagggcagcggcuacgccgccgacaaggagagcacccagaaggccaucgacggcaucaccaacaaggugaacagcgugaucgagaagaugaacacccaguucgaggccgugggcaaggaguucaacaaccuggagaagagacuggagaaccugaacaagaagauggaggacggcuuccuggacguguggaccuacaacgccgagcugcuggugcugauggagaacgagagaacccuggacuuccacgacagcaacgugaagaaccuguacgacaagaucagaaugcagcugaaggacaacgccaaggagcugggcaacggcugcuucgaguucuaccacaagugcgacgacgagugcaugaacagcgugaagaacggcaccuacgacuaccccaaguacgaggaggagagcaagcugaacagaaacgagaucaagggcgugaagcugagcaacaugggcguguaccagauccuggccaucuacgccaccguggccggcagccugagccuggccaucaugaucgccggcaucagccuguggaugugcagcaacggcagccugcagugcagaaucugcaucuga

SEQ ID NO: 170237 - RNA, 1689 nt, Artificial Sequence
  derived and/or modified CDS sequence (opt4) from hemagglutinin__InfluenzaA__AGQ80949
auggccaucaucuaccugauccugcuguucgccgccgugagaggcgaccagaucugcaucggcuaccacagcaacaacagcaccgagaagguggacaccauccuggagagaaacgugaccgugacccacgcccaggacauccuggagaagacccacaacggcaagcugugcaagcugaacggcauccccccccuggagcugggcgacugcagcaucgccggcuggcugcugggcaaccccgagugcgacagacugcugaccgugcccgaguggagcuacaucauggagaaggagaaccccagaaacggccugugcuaccccggcagcuucaacgacuacgaggagcugaagcaccugcugagcagcgugacccacuucgagaaggugaagauccugcccaaggacagauggacccagcacaccaccaccggcggcagcagagccugcgccgugagcggcaaccccagcuucuucagaaacaugguguggcugaccaagaagggcagcaacuaccccaucgccaagggcagcuacaacaacaccagcggcgagcagaugcugaucaucuggggcgugcaccaccccaacgacgacgccgagcagagaacccuguaccagaacgugggcaccuacgugagcgugggcaccagcacccugaacaagagaagcauccccgagaucgccaccagacccaaggugaacggccagggcggcagaauggaguucagcuggaccauccuggacaugcuggacaccaucaacuucgagagcaccggcaaccugaucgcccccgaguacggcuucaagaucagcaagagaggcagcagcggcaucaugaagaccgagggcacccuggagaacugcgagaccaagugccagaccccccugggcgccaucaacaccacccugcccuuccacaacauccacccccugaccaucggcgagugccccaaguacgugaagagcgagagacuggugcuggccaccggccugagaaacgugccccagaucgagagcagaggccuguucggcgccaucgccggcuucaucgagggcggcuggcagggcaugguggacggcugguacggcuaccaccacagcaacgaccagggcagcggcuacgccgccgacaaggagagcacccagaaggccaucgacggcaucaccaacaaggugaacagcgugaucgagaagaugaacacccaguucgaggccgugggcaaggaguucaacaaccuggagaagagacuggagaaccugaacaagaagauggaggacggcuuccuggacguguggaccuacaacgccgagcugcuggugcugauggagaacgagagaacccuggacuuccacgacagcaacgugaagaaccuguacgacaagaucagaaugcagcugaaggacaacgccaaggagcugggcaacggcugcuucgaguucuaccacaagugcgacgacgagugcaugaacagcgugaagaacggcaccuacgacuaccccaaguacgaggaggagagcaagcugaacagaaacgagaucaagggcgugaagcugagcaacaugggcguguaccagauccuggccaucuacgccaccguggccggcagccugagccuggccaucaugaucgccggcaucagccuguggaugugcagcaacggcagccugcagugcagaaucugcaucuga

SEQ ID NO: 170238 - RNA, 1701 nt, Artificial Sequence
  derived and/or modified CDS sequence (opt4) from hemagglutinin__InfluenzaA__AGQ80950
augaagaccaucaucgcccugagcuacaucuucugccuggccuucggccagaaccugcccggcaacgacagcagcaccgccacccugugccugggccaccacgccgugcugaacggcaccaucgugaagaccaucaccgacgaccagaucgaggugaccaacgccaccgagcuggugcagagcagcagcaccggcaagaucugcaacaacccccacaagauccuggacggcagagacugcacccugaucgacgcccugcugggcgacccccacugcgacguguuccaggacgagaccugggaccuguucguggagagaagcagcgccuucagcaacugcuaccccuacgacgugcccgacuacgccagccugagaagccugguggccagcagcggcacccuggaguucaucaccgagggcuucaccuggaccggcgugagccagaacggcggcagcggcgccugcaagagaggccccgccaacggcuucuucagcagacugaacuggcugaccaagagcggcaacgccuaccccgugcugaacgugaccaugcccaacagcgacaacuucgacaagcuguacaucuggggcgugcaccaccccagcaccaaccaggagcagaccaaccuguacgugcaggccagcggcagagugaccgugagcaccagaagaagccagcagaccaucauccccaacaucggcagcagacccugggugagaggccagagcggcagaaucagcaucuacuggaccaucgugaagcccggcgacgugcuggugaucaacagcaacggcaaccugaucgcccccagaggcuacuucaagaugagaaccggcaagagcagcaucaugagaagcgacgcccccaucgagaccugcaucagcgagugcaucacccccaacggcagcauccccaacgacaagcccuuccagaacgugaacaagaucaccuacggcgccugccccaaguacgugaagcagaacacccugaagcuggccaccggcaugagaaacgugcccgagaagcagaccagaggccuguucggcgccaucgccggcuucaucgagaacggcugggagggcaugaucgacggcugguacggcuucagacaccagaacagcgagggcaccggccaggccgccgaccugaagagcacccaggccgccaucgaccagaucaacggcaagcugaacagagugaucgagaagaccaacgagaaguuccaccagaucgagaaggaguucagcgagguggagggcagaauccaggaccuggagaaguacguggaggacaccaagaucgaccuguggagcuacaacgccgagcugcugguggcccuggagaaccagcacaccaucgaccugaccgacagcgagaugaacaagcuguucgagaagaccagaagacagcugagagagaacgccgaggacaugggcaacggcugcuucaagaucuaccacaagugcgacaacgccugcaucgagagcaucagaaacggcaccuacgaccacgacaucuacagagacgaggcccugaacaacagauuccagaucaagggcguggagcugaagagcggcuacaaggacuggauccuguggaucagcuucgccaucagcugcuuccugcugugcguggugcugcugggcuucaucaugugggccugccagagaggcaacaucagaugcaacaucugcaucuga

SEQ ID NO: 170239 - RNA, 1695 nt, Artificial Sequence
  derived and/or modified CDS sequence (opt4) from hemagglutinin__InfluenzaA__AGQ80951
augcugagcaucgugauccuguuccugcugguggccgagagcagcagccagaacuacaccggcaaccccgugaucugcaugggccaccacgccguggccaacggcaccauggugaagacccugaccgacgaccagguggagguggugaccgcccaggagcugguggagagccagaaccugcccgagcugugccccagcccccugagacugguggacggccagaccugcgacaucaucaacggcgcccugggcagccccggcugcgaccaccugaacggcgccgagugggacaucuucaucgagagacccaacgccauggacaccugcuaccccuucgacgugcccgacuaccagagccugagaagcauccuggccaacaacggcaaguucgaguucaucgccgaggaguuccaguggagcaccgugaagcagaacggcaagagcggcgccugcaagagagccaacgugaacgacuucuucaacagacugaacuggcuggugaagagcgacggcaacgccuacccccugcagaaccugaccaaggugaacaacggcgacuacgccagacuguacaucuggggcgugcaccaccccagcaccgacaccgagcagaccaaccuguacaagaacaaccccggcagagugaccgugagcaccaagaccagccagaccagcguggugcccaacaucggcagcagacccugggugagaggccagagcggcagaaucagcuucuacuggaccaucguggagcccggcgaccugaucguguucaacaccaucggcaaccugaucgcccccagaggccacuacaagcugaacagccagaagaagagcaccauccugaacaccgccacccccaucggcagcugcgugagcaagugccacaccgacaagggcagccugagcaccaccaagcccuuccagaacaucagcagaguggccaucggcgacugccccaaguacgugaagcagggcagccugaagcuggccaccggcaugagaaacauccccgagaaggccagcagaggccuguucggcgccaucgccggcuucaucgagaacggcuggcagggccugaucgacggcugguacggcuucagacaccagaacgccgagggcaccggcaccgccgccgaccugaagagcacccaggccgccaucgaccagaucaacggcaagcugaacagacugaucgagaagaccaacgagaaguaccaccagaucgagaaggaguucgagcagguggagggcagaauccaggaccuggagaaguacguggaggacaccaagaucgaccuguggagcuacaacgccgagcugcugguggcccuggagaaccagcacaccaucgacgugaccgacagcgagaugaacaagcuguucgagagagugagaagacagcugagagagaacgccgaggacaagggcaacggcugcuucgagaucuuccacaagugcgacaacaacugcaucgagagcaucagaaacggcaccuacgaccacgacguguacagaaacgaggccaucaacaacagauuccagauccagggcgugaagcugacccagggcuacaaggacaucauccuguggaucagcuucagcaucagcugcuuccugcugguggcccugcugcuggccuucauccugugggccugccagaacggcaacaucagaugccagaucugcaucuga

SEQ ID NO: 170240 - RNA, 1683 nt, Artificial Sequence
  derived and/or modified CDS sequence (opt4) from hemagglutinin__InfluenzaA__AGQ80953
augaacacccagauccugguguucgcccugguggccaucauccccaccaacgccgacaagaucugccugggccaccacgccgugagcaacggcaccaaggugaacacccugaccgagagaggcguggagguggugaacgccaccgagaccguggagagaaccagcauccccagaaucugcagcaagggcaagagagccguggaccugggccagugcggccugcugggcaccaucaccggccccccccagugcgaccaguuccuggaguucagcgccgaccugaucaucgagagaagagagggcagcgacgugugcuaccccggcaaguucgugaacgaggaggcccugagacagauccugagagagagcggcggcaucgacaaggagaccaugggcuucaccuacagcggcaucagaaccaacggcgccaccagcgccugcagaagaagcggcagcagcuucuacgccgagaugaaguggcugcugagcaacaccgacaacgccgccuucccccagaccaccaagagcuacaagaacaccagaaaggaccccgcccugaucaucuggggcauccaccacagcggcagcaccaccgagcagaccaagcuguacggcagcggcaacaagcugaucaccgugggcagcagcaacuaccagcagagcuucgugcccagccccggcgccagaccccaggugaacggccagagcggcagaaucgacuuccacuggcugaugcugaaccccaacgacaccgugaccuucagcuucaacggcgccuucaucgcccccgacagagccagcuuccugagaggcaagagcaugggcauccagagcggcgugcagguggacgccaacugcgagggcgacugcuaccacaacggcggcaccaucaucagcaaccugcccuuccagaacaucaacagcagagccgugggcaagugccccagauacgugaagcaggagagccugcugcuggccaccggcaugaagaacgugcccgagauccccaagggcagaggccuguucggcgccaucgccggcuucaucgagaacggcugggagggccugaucgacggcugguacggcuucagacaccagaacgcccagggcgagggcaccgccgccgacuacaagagcacccagagcgccaucgaccagaucaccggcaagcugaacagacugaucgagaagaccaaccagcaguucgagcugaucgacaacgaguucaccgagguggagagacagaucggcaacgugaucaacuggaccagagacagcaugaccgagguguggagcuacaacgccgagcugcugguggccauggagaaccagcacaccaucgaccuggccgacagcgagaugaacaagcuguacgagagagugagaagacagcugagagagaacgccgaggaggacggcaccggcugcuucgagaucuuccacaagugcgacgacgacugcauggccagcaucagaaacaacaccuacgaccacagcaaguacagagaggaggccaugcagaacagaauccagaucgaccccgugaagcugagcagcggcuacaaggacgugauccugugguucagcuucggcgccagcugcuucauccugcuggccaucgccaugggccugguguucaucugcgugaagaacggcaacaugagaugcaccaucugcaucuga

SEQ ID NO: 170241 - RNA, 1683 nt, Artificial Sequence; identical to SEQ ID NO: 170240
  derived and/or modified CDS sequence (opt4) from hemagglutinin__InfluenzaA__AGQ80954

SEQ ID NO: 170242 - RNA, 1683 nt, Artificial Sequence; identical to SEQ ID NO: 170240
  derived and/or modified CDS sequence (opt4) from hemagglutinin__InfluenzaA__AGQ80955

SEQ ID NO: 170243 - RNA, 1683 nt, Artificial Sequence; identical to SEQ ID NO: 170240
  derived and/or modified CDS sequence (opt4) from hemagglutinin__InfluenzaA__AGQ80956

SEQ ID NO: 170244 - RNA, 1683 nt, Artificial Sequence; identical to SEQ ID NO: 170240
  derived and/or modified CDS sequence (opt4) from hemagglutinin__InfluenzaA__AGQ80957

SEQ ID NO: 170245 - RNA, 1683 nt, Artificial Sequence; identical to SEQ ID NO: 170240
  derived and/or modified CDS sequence (opt4) from hemagglutinin__InfluenzaA__AGQ80958

SEQ ID NO: 170246 - RNA, 1683 nt, Artificial Sequence
  derived and/or modified CDS sequence (opt4) from hemagglutinin__InfluenzaA__AGQ80959
augaacacccagauccugguguucgcccugaucgccaucauccccaccaacgccgacaagaucugccugggccaccacgccgugagcaacggcaccaaggugaacacccugaccgagagaggcguggagguggugaacgccaccgagaccguggagagaaccaacauccccagaaucugcagcaagggcaagagaaccguggaccugggccagugcggccugcugggcaccaucaccggccccccccagugcgaccaguuccuggaguucagcgccgaccugaucaucgagagaagagagggcagcgacgugugcuaccccggcaaguucgugaacgaggaggcccugagacagauccugagagagagcggcggcaucgacaaggaggccaugggcuucaccuacagcggcaucagaaccaacggcgccaccagcgccugcagaagaagcggcagcagcuucuacgccgagaugaaguggcugcugagcaacaccgacaacgccgccuucccccagaugaccaagagcuacaagaacaccagaaaggaccccgcccugaucaucuggggcauccaccacagcggcagcaccgccgagcagaccaagcuguacggcagcggcaacaagcuggugaccgugggcagcagcaacuaccagcagagcuucgugcccagccccggcgccagaccccaggugaacggccagagcggcagaaucgacuuccacuggcugaugcugaaccccaacgacaccgugaccuucagcuucaacggcgccuucaucgcccccgacagagccagcuuccugagaggcaagagcaugggcauccagagcggcgugcagguggacgccaacugcgagggcgacugcuaccacggcggcggcaccaucaucagcaaccugcccuuccagaacaucgacagcagagccgugggcaagugccccagauacgugaagcagaagagccugcugcuggccaccggcaugaagaacgugcccgagagccccaagggcagaggccuguucggcgccaucgccggcuucaucgagaacggcugggagggccugaucgacggcugguacggcuucagacaccagaacgcccagggcgagggcaccgccgccgacuacaagagcacccagagcgccaucgaccagaucaccggcaagcugaacagacugaucgagaagaccaaccagcaguucgagcugaucgacaacgaguucaccgagguggagaagcagaucggcaacgugaucaacuggaccagagacagcaucaccgagguguggagcuacaacgccgagcugcugguggccauggagaaccagcacaccaucgaccuggccgacagcgagaugaacaagcuguacgagagagugaagagacagcugagagagaacgccgaggaggacggcaccggcugcuucgagaucuuccacaagugcgacgacgacugcauggccagcaucagaaacaacaccuacgaccacagcaaguacagagaggaggccaugcagaacagaauccagaucgaccccgugaagcugagcagcggcuacaaggacgugauccugugguucagcuucggcgccagcugcuucauccugcuggccaucgccaugggccugguguucaucugcgugaagaacggcaacaugagaugcaccaucugcaucuga

SEQ ID NO: 170247 - RNA, 1683 nt, Artificial Sequence
  derived and/or modified CDS sequence (opt4) from hemagglutinin__InfluenzaA__AGQ80961
augaacacccagauccugguguucgcccugguggccaucauccccaccaacgccgacaagaucugccugggccaccacgccgugagcaacggcaccaaggugaacacccugaccgagagaggcguggagguggugaacgccaccgagaccguggagagaaccaacgugcccaagaucugcagcaagggcaagagaaccguggaccugggccagugcggccugcugggcaccaucaccggccccccccagugcgaccaguuccuggaguucagcgccgaccugaucaucgagagaagagagggcagcgacgugugcuaccccggcaaguucgugaacgaggagacccugagacagauccugagagagagcggcggcaucgacaaggagaccaugggcuucaccuacagcggcaucagaaccaacggcgccaccagcgccugcagaagaagcggcagcagcuucuacgccgagaugaaguggcugcugagcaacaccgacaacgccgccuucccccagaugaccaagagcuacaagaacgccagaaaggaccccgcccugaucaucuggggcauccaccacagcggcagcaccaccgagcagaccaagcuguacggcagcggcaacaagcugaucaccgugggcagcagcaacuaccagcagagcuucgugcccagccccggcgccagaccccaggugaacggccagagcggcagaaucgacuuccacuggcugaugcugaaccccaacgacaccgugaccuucagcuucaacggcgccuucaucgcccccgacagagccugcuuccugagaggcaagagcaugggcauccagagcggcgugcagguggacgccagcugcgagggcgacugcuaccacagcggcggcaccaucaucagcaaccugcccuuccagaacaucaacagcagagccgugggcaagugccccagauacgugaagcaggagagccugaugcuggccaccggcaugaagaacgugcccgagauccccaagggcagaggccuguucggcgccaucgccggcuucaucgagaacggcugggagggccugaucgacggcugguacggcuucagacaccagaacgcccagggcgagggcaccgccgccgacuacaagagcacccagagcgccaucgaccagaucaccggcaagcugaacagacugaucgagaagaccaaccagcaguucgagcugaucgacaacgaguucaccgagguggagaagcagaucggcaacgugaucaacuggaccagagacagcaugaccgagguguggagcuacaacgccgagcugcugguggccauggagaaccagcacaccaucgaccuggccgacagcgagaugaacaagcuguacgagagagugaagagacagcugagagagaacgccgaggaggacggcaccggcugcuucgagaucuuccacaagugcgacgacgacugcauggccagcaucagaaacaacaccuacgaccacagcaaguacagagaggaggccaugcagaacagaaucaagaucgaccccgugaagcugagcagcggcuacaaggacgugauccugugguucagcuucggcgccagcugcuucauccugcuggccaucgccaugggccugguguucaucugcgugaagaacggcaacaugagaugcaccaucugcaucuga

SEQ ID NO: 170248 - RNA, 1683 nt, Artificial Sequence; identical to SEQ ID NO: 170247
  derived and/or modified CDS sequence (opt4) from hemagglutinin__InfluenzaA__AGQ80962

SEQ ID NO: 170249 - RNA, 1683 nt, Artificial Sequence
  derived and/or modified CDS sequence (opt4) from hemagglutinin__InfluenzaA__AGQ80964
augaacacccagauccugguguucgcccugaucgccaucauccccaccaacgccgacaagaucugccugggccaccacgccgugagcaacggcaccaaggugaacacccugaccgagagaggcguggagguggugaacgccaccgagaccguggagagaaccaacauccccagaaucugcagcaagggcaagagaaccguggaccugggccagugcggccugcugggcaccaucaccggccccccccagugcgaccaguuccuggaguucagcgccgaccugaucaucgagagaagagagggcagcgacgugugcuaccccggcaaguucgugaacgaggaggcccugagacagauccugagagagagcggcggcaucgacaaggaggccaugggcuucaccuacagcggcaucagaaccaacggcgccaccagcgccugcagaagaagcggcagcagcuucuacgccgagaugaaguggcugcugagcaacaccgacaacgccgccuucccccagaugaccaagagcuacaagaacaccagaaaggaccccgcccugaucaucuggggcauccaccacagcggcagcaccgccgagcagaccaagcuguacggcagcggcaacaagcuggugaccgugggcagcagcaacuaccagcagagcuucgugcccagccccggcgccagaccccaggugaacggccagagcggcagaaucgacuuccacuggcugaugcugaaccccaacgacaccgugaccuucagcuucaacggcgccuucaucgcccccgacagagccagcuuccugagaggcaagagcaugggcauccagagcggcgugcagguggacgccgacugcgagggcgacugcuaccacagcggcggcaccaucaucagcaaccugcccuuccagaacaucgacagcagagccgugggcaagugccccagauacgugaagcagagaagccugcugcuggccaccggcaugaagaacgugcccgagauccccaagggcagaggccuguucggcgccaucgccggcuucaucgagaacggcugggagggccugaucgacggcugguacggcuucagacaccagaacgcccagggcgagggcaccgccgccgacuacaagagcacccagagcgccaucgaccagaucaccggcaagcugaacagacugaucgagaagaccaaccagcaguucgagcugaucgacaacgaguucaccgagguggagaagcagaucggcaacgugaucaacuggaccagagacagcaucaccgagguguggagcuacaacgccgagcugcugguggccauggagaaccagcacaccaucgaccuggccgacagcgagaugaacaagcuguacgagagagugaagagacagcugagagagaacgccgaggaggacggcaccggcugcuucgagaucuuccacaagugcgacgacgacugcauggccagcaucagaaacaacaccuacgaccacagcaaguacagagaggaggccaugcagaacagaauccagaucgaccccgugaagcugagcagcggcuacaaggacgugauccugugguucagcuucggcgccagcugcuucauccugcuggccaucgccaugggccugguguucaucugcgugaagaacggcaacaugagaugcaccaucugcaucuga

SEQ ID NO: 170250 - RNA, 1683 nt, Artificial Sequence; identical to SEQ ID NO: 170240
  derived and/or modified CDS sequence (opt4) from hemagglutinin__InfluenzaA__AGQ80965

SEQ ID NO: 170251 - RNA, 1683 nt, Artificial Sequence; identical to SEQ ID NO: 170240
  derived and/or modified CDS sequence (opt4) from hemagglutinin__InfluenzaA__AGQ80966

SEQ ID NO: 170252 - RNA, 1683 nt, Artificial Sequence; identical to SEQ ID NO: 170240
  derived and/or modified CDS sequence (opt4) from hemagglutinin__InfluenzaA__AGQ80968

SEQ ID NO: 170253 - RNA, 1683 nt, Artificial Sequence
  derived and/or modified CDS sequence (opt4) from hemagglutinin__InfluenzaA__AGQ80970
augaacacccagauccugguguucgcccugguggccaucauccccaccaacgccgacaagaucugccugggccaccacgccgugagcaacggcaccaaggugaacacccugaccgagagaggcguggagguggugaacgccaccgagaccguggagagaaccagcauccccagaaucugcagcaagggcaagaaggccguggaccugggccagugcggccugcugggcaccaucaccggccccccccagugcgaccaguuccuggaguucagcgccgaccugaucaucgagagaagagagggcagcgacgugugcuaccccggcaaguucgugaacgaggaggcccugagacagauccugagagagagcggcggcaucgacaaggagaccaugggcuucaccuacagcggcaucagaaccaacggcgccaccagcgccugcagaagaagcggcagcagcuucuacgccgagaugaaguggcugcugagcaacaccgacaacgccgccuucccccagaccaccaagagcuacaagaacaccagaaaggaccccgcccugaucaucuggggcauccaccacagcggcagcaccaccgagcagaccaagcuguacggcagcggcaacaagcugaucaccgugggcagcagcaacuaccagcagagcuucgugcccagccccggcgccagaccccaggugaacggccagagcggcagaaucgacuuccacuggcugaugcugaaccccaacgacaccgugaccuucagcuucaacggcgccuucaucgcccccgacagagccagcuuccugagaggcaagagcaugggcauccagagcggcgugcagguggacgccaacugcgagggcgacugcuaccacaacggcggcaccaucaucagcaaccugcccuuccagaacaucaacagcagagccgugggcaagugccccagauacgugaagcaggagagccugcugcuggccaccggcaugaagaacgugcccgagauccccaagggcagaggccuguucggcgccaucgccggcuucaucgagaacggcugggagggccugaucgacggcugguacggcuucagacaccagaacgcccagggcgagggcaccgccgccgacuacaagagcacccagagcgccaucgaccagaucaccggcaagcugaacagacugaucgagaagaccaaccagcaguucgagcugaucgacaacgaguucaccgagguggagagacagaucggcaacgugaucaacuggaccagagacagcaugaccgagguguggagcuacaacgccgagcugcugguggccauggagaaccagcacaccaucgaccuggccgacagcgagaugaacaagcuguacgagagagugagaagacagcugagagagaacgccgaggaggacggcaccggcugcuucgagaucuuccacaagugcgacgacgacugcauggccagcaucagaaacaacaccuacgaccacagcaaguacagagaggaggccaugcagaacagaauccagaucgaccccgugaagcugagcagcggcuacaaggacgugauccugugguucagcuucggcgccagcugcuucauccugcuggccaucgccaugggccugguguucaucugcgugaagaacggcaacaugagaugcaccaucugcaucuga

SEQ ID NO: 170254 - RNA, 1683 nt, Artificial Sequence
  derived and/or modified CDS sequence (opt4) from hemagglutinin__InfluenzaA__AGQ80971
augaacacccagauccugguguucgcccugguggccaucauccccaccaacgccgacaagaucugccugggccaccacgccgugagcaacggcaccaaggugaacacccugaccgagagaggcguggagguggugaacgccaccgagaccguggagagaaccagcauccccagaaucugcagcaagggcaagaagaccguggaccugggccagugcggccugcugggcaccaucaccggccccccccagugcgaccaguuccuggaguucagcgccgaccugaucaucgagagaagagagggcagcgacgugugcuaccccggcaaguucgugaacgaggaggcccugagacagauccugagagagagcggcggcaucgacaaggagaccaugggcuucaccuacagcggcaucagaaccaacggcgccaccagcgccugcagaagaagcggcagcagcuucuacgccgagaugaaguggcugcugagcaacaccgacaacgccgccuucccccagaccaccaagagcuacaagaacaccagaaaggaccccgcccugaucaucuggggcauccaccacagcggcagcaccaccgagcagaccaagcuguacggcagcggcaacaagcugaucaccgugggcagcagcaacuaccagcagagcuucgugcccagccccggcgccagaccccaggugaacggccagagcggcagaaucgacuuccacuggcugaugcugaaccccaacgacaccgugaccuucagcuucaacggcgccuucaucgcccccgacagagccagcuuccugagaggcaagagcaugggcauccagagcggcgugcagguggacgccaacugcgagggcgacugcuaccacaacggcggcaccaucaucagcaaccugcccuuccagaacaucaacagcagagccgugggcaagugccccagauacgugaagcaggagagccugcugcuggccaccggcaugaagaacgugcccgagauccccaagggcagaggccuguucggcgccaucgccggcuucaucgagaacggcugggagggccugaucgacggcugguacggcuucagacaccagaacgcccagggcgagggcaccgccgccgacuacaagagcacccagagcgccaucgaccagaucaccggcaagcugaacagacugaucgagaagaccaaccagcaguucgagcugaucgacaacgaguucaccgagguggagagacagaucggcaacgugaucaacuggaccagagacagcaugaccgagguguggagcuacaacgccgagcugcugguggccauggagaaccagcacaccaucgaccuggccgacagcgagaugaacaagcuguacgagagagugagaagacagcugagagagaacgccgaggaggacggcaccggcugcuucgagaucuuccacaagugcgacgacgacugcauggccagcaucagaaacaacaccuacgaccacagcaaguacagagaggaggccaugcagaacagaauccagaucgaccccgugaagcugagcagcggcuacaaggacgugauccugugguucagcuucggcgccagcugcuucauccugcuggccaucgccaugggccugguguucaucugcgugaagaacggcaacaugagaugcaccaucugcaucuga

SEQ ID NO: 170255 - RNA, 1683 nt, Artificial Sequence
  derived and/or modified CDS sequence (opt4) from hemagglutinin__InfluenzaA__AGQ80974
augaacacccagauccugguguucgcccugguggccaucauccccaccaacgccgacaagaucugccugggccaccacgccgugagcaacggcaccaaggugaacacccugaccgagagaggcguggagguggugaacgccaccgagaccguggagagaaccagcauccccagaaucugcagcaagggcaagagagccguggaccugggccagugcggccugcugggcaccaucaccggccccccccagugcgaccaguuccuggaguucagcgccgaccugaucaucgagagaagagagggcagcgacgugugcuaccccggcaaguucgugaacgaggaggcccugagacagauccugagagagagcggcggcaucgacaaggagaccaugggcuucaccuacagcggcaucagaaccaacggcgccaccagcgccugcagaagaagcggcagcagcuucuacgccgagaugaaguggcugcugagcaacaccgacaacgccgccuucccccagaccaccaagagcuacaagaacaccagaaaggaccccgcccugaucaucuggggcauccaccacagcggcagcaccaccgagcagaccaagcuguacggcagcggcaacaagcugaucaccgugggcagcagcaacuaccagcagagcuucgugcccagccccggcgccagaccccaggugaacggccagagcggcagaaucgacuuccacuggcugaugcugaaccccaacgacaccgugaccuucagcuucaacggcgccuucaucgcccccgacagagccagcuuccugagaggcaagagcaugggcauccagagcggcgugcagguggacgccaacugcgagggcgacugcuaccacaacggcggcaccaucaucagcaaccugcccuuccagaacaucaacagcagagccgugggcaagugccccagauacgugaagcaggagagccugcugcuggccaccggcaugaagaacgugcccgagauccccaagggcagaggccuguucggcgccaucgccggcuucaucgagaacggcugggagggccugguggacggcugguacggcuucagacaccagaacgcccagggcgagggcaccgccgccgacuacaagagcacccagagcgccaucgaccagaucaccggcaagcugaacagacugaucgagaagaccaaccagcaguucgagcugaucgacaacgaguucaccgagguggagagacagaucggcaacgugaucaacuggaccagagacagcaugaccgagguguggagcuacaacgccgagcugcugguggccauggagaaccagcacaccaucgaccuggccgacagcgagaugaacaagcuguacgagagagugagaagacagcugagagagaacgccgaggaggacggcaccggcugcuucgagaucuuccacaagugcgacgacgacugcauggccagcaucagaaacaacaccuacgaccacagcaaguacagagaggaggccaugcagaacagaauccagaucgaccccgugaagcugagcagcggcuacaaggacgugauccugugguucagcuucggcgccagcugcuucauccugcuggccaucgccaugggccugguguucaucugcgugaagaacggcaacaugagaugcaccaucugcaucuga

SEQ ID NO: 170256 - RNA, 1683 nt, Artificial Sequence
  derived and/or modified CDS sequence (opt4) from hemagglutinin__InfluenzaA__AGQ80977
augaacacccagauccuggcccuggcccuggccgccaucauccccaccaacgccgacaagaucugccugggccaccacgccgugagcaacggcaccaaggugaacacccugaccgagagaggcguggagguggugaacgccaccgagaccguggagagaaccagcauccccagaaucugcagcaagggcaagagagccguggaccugggccagugcggccugcugggcaccaucaccggccccccccagugcgaccaguuccuggaguucagcgccgaccugaucaucgagagaagagagggcagcgacgugugcuaccccggcaaguucgugaacgaggaggcccugagacagauccugagagagagcggcggcaucgacaaggagaccaugggcuucaccuacagcggcaucagaaccaacggcgccaccagcgccugcagaagaagcggcagcagcuucuacgccgagaugaaguggcugcugagcaacaccgacaacgccgccuucccccagaccaccaagagcuacaagaacaccagaaaggaccccgcccugaucaucuggggcgugcaccacagcggcagcaccaccgagcagaccaagcuguacggcagcggcaacaagcugaucaccgugggcagcagcaacuaccagcagagcuucgugcccagccccggcgccagaccccaggugaacggccagagcggcagaaucgacuuccacuggcugaugcugaaccccaacgacaccgugaccuucagcuucaacggcgccuucaucgcccccgacagagccagcuuccugagaggcaagagcaugggcauccagagcggcgugcagguggacgccaacugcgagggcgacugcuaccacaacggcggcaccaucaucagcaaccugcccuuccagaacaucaacagcagagccgugggcaagugccccagauacgugaagcaggagagccugcugcuggccaccggcaugaagaacgugcccgagauccccaagggcagaggccuguucggcgccaucgccggcuucaucgagaacggcugggagggccugguggacggcugguacggcuucagacaccagaacgcccagggcgagggcaccgccgccgacuacaagagcacccagagcgccaucgaccagaucaccggcaagcugaacagacugaucgagaagaccaaccagcaguucgagcugaucgacaacgaguucaccgagguggagagacagaucggcaacgugaucaacuggaccagagacagcaugaccgagguguggagcuacaacgccgagcugcugguggccauggagaaccagcacaccaucgaccuggccgacagcgagaugaacaagcuguacgagagagugagaagacagcugagagagaacgccgaggaggacggcaccggcugcuucgagaucuuccacaagugcgacgacgacugcauggccagcaucagaaacaacaccuacgaccacagcaaguacagagaggaggccaugcagaacagaauccagaucgaccccgugaagcugagcagcggcuacaaggacgugauccugugguucagcuucggcgccagcugcuucauccugcuggccaucgccaugggccugguguucaucugcgugaagagcggcaacaugagaugcaccaucugcaucuga

SEQ ID NO: 170257 - RNA, 1683 nt, Artificial Sequence
  derived and/or modified CDS sequence (opt4) from hemagglutinin__InfluenzaA__AGQ80978
augaacacccagauccugguguucgcccugguggccaucauccccaccaacgccgacaagaucugccugggccaccacgccgugagcaacggcaccaaggugaacacccugaccgagagaggcguggagguggugaacgccaccgagaccguggagagaaccagcauccccagaaucugcagcaagggcaagagagccguggaccugggccagugcggccugcugggcaccaucaccggccccccccagugcgaccaguuccuggaguucagcgccgaccugaucaucgagagaagagagggcagcgacgugugcuaccccggcaaguucgugaacgaggaggcccugagacagauccugagagagagcggcggcaucgacaaggagaccaugggcuucaccuacagcggcaucagaaccaacggcgccaccagcgccugcagaagaagcggcagcagcuucuacgccgagaugaaguggcugcugagcaacaccgacaacgccgccuucccccagaccaccaagagcuacaagaacaccagaaaggaccccgcccugaucaucuggggcauccaccacagcggcagcaucaccgagcagaccaagcuguacggcagcggcaacaagcugaucaccgugggcagcagcaacuaccagcagagcuucgugcccagccccggcgccagaccccaggugaacggccagagcggcagaaucgacuuccacuggcugaugcugaaccccaacgacaccgugaccuucagcuucaacggcgccuucaucgcccccgacagagccagcuuccugagaggcaagagcaugggcauccagagcggcgugcagguggacgccaacugcgagggcgacugcuaccacaacggcggcaccaucaucagcaaccugcccuuccagaacaucaacagcagagccgugggcaagugccccagauacgugaagcaggagagccugcugcuggccaccggcaugaagaacgugcccgagauccccaagggcagaggccuguucggcgccaucgccggcuucaucgagaacggcugggagggccugguggacggcugguacggcuucagacaccagaacgcccagggcgagggcaccgccgccgacuacaagagcacccagagcgccaucgaccagaucaccggcaagcugaacagacugaucgagaagaccaaccagcaguucgagcugaucgacaacgaguucaccgagguggagagacagaucggcaacgugaucaacuggaccagagacagcaugaccgagguguggagcuacaacgccgagcugcugguggccauggagaaccagcacaccaucgaccuggccgacagcgagaugaacaagcuguacgagagagugagaagacagcugagagagaacgccgaggaggacggcaccggcugcuucgagaucuuccacaagugcgacgacgacugcauggccagcaucagaaacaacaccuacgaccacagcaaguacagagaggaggccaugcagaacagaauccagaucgaccccgugaagcugagcagcggcuacaaggacgugauccugugguucagcuucggcgccagcugcuucauccugcuggccaucgccaugggccugguguucaucugcgugaagaacggcaacaugagaugcaccaucugcaucuga

SEQ ID NO: 170258 - RNA, 1683 nt, Artificial Sequence
  derived and/or modified CDS sequence (opt4) from hemagglutinin__InfluenzaA__AGQ80979
augaacacccagauccugguguucgcccugguggccaucauccccaccaacgccgacaagaucugccugggccaccacgccgugagcaacggcaccaaggugaacacccugaccgagagaggcguggagguggugaacgccaccgagaccguggagagaaccagcauccccagaaucugcagcaagggcaagagagccguggaccugggccagugcggccugcugggcaccaucaccggccccccccagugcgaccaguuccuggaguucagcgccgaccugaucaucgagagaagagagggcagcgacgugugcuaccccggcaaguucgugaacgaggaggcccugagacagauccugagagagagcggcggcaucgacaaggagaccaugggcuucaccuacagcggcaucagaaccaacggcgccaccagcgccugcagaagaagcggcagcagcuucuacgccgagaugaaguggcugcugagcaacaccgacaacgccgccuucccccagaccaccaagagcuacaagaacaccagaaaggaccccgcccugaucaucuggggcauccaccacagcggcagcaccaccgagcagaccaagcuguacggcagcggcaacaagcugaucaccgugggcagcagcaacuaccagcagagcuucgugcccagccccggcgccagaccccaggugaacggccagagcggcagaaucgacuuccacuggcugaugcugaaccccaacgacaccgugaccuucagcuucaacggcgccuucaucgcccccgacagagccagcuuccugagaggcaagagcaucggcauccagagcggcgugcagguggacgccaacugcgagggcgacugcuaccacaacggcggcaccaucaucagcaaccugcccuuccagaacaucaacagcagagccgugggcaagugccccagauacgugaagcaggagagccugcugcuggccaccggcaugaagaacgugcccgagauccccaagggcagaggccuguucggcgccaucgccggcuucaucgagaacggcugggagggccugaucgacggcugguacggcuucagacaccagaacgcccagggcgagggcaccgccgccgacuacaagagcacccagagcgccaucgaccagaucaccggcaagcugaacagacugaucgagaagaccaaccagcaguucgagcugaucgacaacgaguucaccgagguggagagacagaucggcaacgugaucaacuggaccagagacagcaugaccgagguguggagcuacaacgccgagcugcugguggccauggagaaccagcacaccaucgaccuggccgacagcgagaugaacaagcuguacgagagagugagaagacagcugagagagaacgccgaggaggacggcaccggcugcuucgagaucuuccacaagugcgacgacgacugcauggccagcaucagaaacaacaccuacgaccacagcaaguacagagaggaggccaugcagaacagaauccagaucgaccccgugaagcugagcagcggcuacaaggacgugauccugugguucagcuucggcgccagcugcuucauccugcuggccaucgccaugggccugguguucaucugcgugaagaacggcaacaugagaugcaccaucugcaucuga

SEQ ID NO: 170259 - RNA, 1683 nt, Artificial Sequence; identical to SEQ ID NO: 170255
  derived and/or modified CDS sequence (opt4) from hemagglutinin__InfluenzaA__AGQ80980

SEQ ID NO: 170260 - RNA, 1683 nt, Artificial Sequence; identical to SEQ ID NO: 170240
  derived and/or modified CDS sequence (opt4) from hemagglutinin__InfluenzaA__AGQ80981

SEQ ID NO: 170261 - RNA, 1683 nt, Artificial Sequence; identical to SEQ ID NO: 170240
  derived and/or modified CDS sequence (opt4) from hemagglutinin__InfluenzaA__AGQ80982

SEQ ID NO: 170262 - RNA, 1683 nt, Artificial Sequence; identical to SEQ ID NO: 170240
  derived and/or modified CDS sequence (opt4) from hemagglutinin__InfluenzaA__AGQ80983

SEQ ID NO: 170263 - RNA, 1683 nt, Artificial Sequence; identical to SEQ ID NO: 170240
  derived and/or modified CDS sequence (opt4) from hemagglutinin__InfluenzaA__AGQ80984

SEQ ID NO: 170264 - RNA, 1683 nt, Artificial Sequence; identical to SEQ ID NO: 170240
  derived and/or modified CDS sequence (opt4) from hemagglutinin__InfluenzaA__AGQ80985

SEQ ID NO: 170265 - RNA, 1683 nt, Artificial Sequence; identical to SEQ ID NO: 170240
  derived and/or modified CDS sequence (opt4) from hemagglutinin__InfluenzaA__AGQ80986

SEQ ID NO: 170266 - RNA, 1683 nt, Artificial Sequence; identical to SEQ ID NO: 170240
  derived and/or modified CDS sequence (opt4) from hemagglutinin__InfluenzaA__AGQ80987

SEQ ID NO: 170267 - RNA, 1683 nt, Artificial Sequence; identical to SEQ ID NO: 170240
  derived and/or modified CDS sequence (opt4) from hemagglutinin__InfluenzaA__AGQ80988

SEQ ID NO: 170268 - RNA, 1683 nt, Artificial Sequence
  derived and/or modified CDS sequence (opt4) from hemagglutinin__InfluenzaA__AGQ80990
augaacacccagauccugguguucgcccugguggccaucauccccaccaacgccgacaagaucugccugggccaccacgccgugagcaacggcaccaaggugaacacccugaccgagagaggcguggagguggugaacgccaccgagaccguggagagaaccagcauccccaagaucugcagcaagggcaagagagccguggaccugggccagugcggccugcugggcaccaucaccggccccccccagugcgaccaguuccuggaguucagcgccgaccugaucaucgagagaagagagggcagcgacgugugcuaccccggcaaguucgugaacgaggaggcccugagacagauccugagagagagcggcggcaucgacaaggagaccaugggcuucaccuacagcggcaucagaaccaacggcgccaccagcgccugcagaagaagcggcagcagcuucuacgccgagaugaaguggcugcugagcaacaccgacaacgccgccuucccccagaccaccaagagcuacaagaacaccagaaaggaccccgcccugaucaucuggggcauccaccacagcggcagcaccaccgagcagaccaagcuguacggcagcggcaacaagcugaucaccgugggcagcagcaacuaccagcagagcuucgugcccagccccggcgccagaccccaggugaacggccagagcggcagaaucgacuuccacuggcugaugcugaaccccaacgacaccgugaccuucagcuucaacggcgccuucaucgcccccgacagagccagcuuccugagaggcaagagcaugggcauccagagcggcgugcagguggacgccaacugcgagggcgacugcuaccacaacggcggcaccaucaucagcaaccugcccuuccagaacaucaacagcagagccgugggcaagugccccagauacgugaagcaggagagccugcugcuggccaccggcaugaagaacgugcccgagauccccaagggcagaggccuguucggcgccaucgccggcuucaucgagaacggcugggagggccugaucgacggcugguacggcuucagacaccagaacgcccagggcgagggcaccgccgccgacuacaagagcacccagagcgccaucgaccagaucaccggcaagcugaacagacugaucgagaagaccaaccagcaguucgagcugaucgacaacgaguucaccgagguggagagacagaucggcaacgugaucaacuggaccagagacagcaugaccgagguguggagcuacaacgccgagcugcugguggccauggagaaccagcacaccaucgaccuggccgacagcgagaugaacaagcuguacgagagagugagaagacagcugagagagaacgccgaggaggacggcaccggcugcuucgagaucuuccacaagugcgacgacgacugcauggccagcaucagaaacaacaccuacgaccacagcaaguacagagaggaggccaugcagaacagaauccagaucgaccccgugaagcugagcagcggcuacaaggacgugauccugugguucagcuucggcgccagcugcuucauccugcuggccaucgccaugggccugguguucaucugcgugaagaacggcaacaugagaugcaccaucugcaucuga

SEQ ID NO: 170269 - RNA, 1683 nt, Artificial Sequence; identical to SEQ ID NO: 170254
  derived and/or modified CDS sequence (opt4) from hemagglutinin__InfluenzaA__AGQ80991

SEQ ID NO: 170270 - RNA, 1683 nt, Artificial Sequence
  derived and/or modified CDS sequence (opt4) from hemagglutinin__InfluenzaA__AGQ80992
augaacacccagauccugguguucgcccugguggccaucauccccaccaacgccgacaagaucugccugggccaccacgccgugagcaacggcaccaaggugaacacccugaccgagagaggcguggagguggugaacgccaccgagaccguggagagaaccaacgugcccagaaucugcagcaagggcaagagaaccguggaccugggccagugcggccugcugggcaccaucaccggccccccccagugcgaccaguuccuggaguucagcgccgaccugaucaucgagagaagagagggcagcgacgugugcuaccccggcaaguucaugaacgaggaggcccugagacagauccugagagagagcggcggcaucgacaaggagaccaugggcuucaccuacagcggcaucagaaccaacggcgccaccagcgccugcagaagaagcggcagcagcuucuacgccgagaugaaguggcugcugagcaacaccgacaacgccgccuucccccagaugaccaagagcuacaagaacaccagaaaggaccccgcccugaucaucuggggcauccaccacagcggcagcaccaccgagcagaccaagcuguacggcagcggcaacaagcugaucaccgugggcagcagcaacuaccagcagagcuucgugcccagccccggcgccagaccccaggugaacggccagagcggcagaaucgacuuccacuggcugaugcugaaccccaacgacaccgugaccuucagcuucaacggcgccuucaucgcccccgacagagccugcuuccugagaggcaagagcaugggcauccagagcggcgugcagguggacgccagcugcgagggcgacugcuaccacagcggcggcaccaucaucagcaaccugcccuuccagaacaucaacagcagagccgugggcaagugccccagauacgugaagcaggagagccugaugcuggccaccggcaugaagaacgugcccgagauccccaagggcagaggccuguucggcgccaucgccggcuucaucgagaacggcugggagggccugaucgacggcugguacggcuucagacaccagaacgcccagggcgagggcaccgccgccgacuacaagagcacccagagcgccaucgaccagaucaccggcaagcugaacagacugaucgagaagaccaaccagcaguucgagcugaucgacaacgaguucaccgagguggagaagcagaucggcaacgugaucaacuggaccagagacagcaugaccgagguguggagcuacaacgccgagcugcugguggccauggagaaccagcacaccaucgaccuggccgacagcgagaugaacaagcuguacgagagagugaagagacagcugagagagaacgccgaggaggacggcaccggcugcuucgagaucuuccacaagugcgacgacgacugcauggccagcaucagaaacaacaccuacgaccacagcaaguacagagaggaggccaugcagaacagaauccagaucgaccccgugaagcugagcagcggcuacaaggacgugauccugugguucagcuucggcgccagcugcuucauccugcuggccaucgccaugggccugguguucaucugcgugaagaacggcaacaugagaugcaccaucugcaucuga

SEQ ID NO: 170271 - RNA, 1683 nt, Artificial Sequence; identical to SEQ ID NO: 170240
  derived and/or modified CDS sequence (opt4) from hemagglutinin__InfluenzaA__AGQ80993

SEQ ID NO: 170272 - RNA, 1683 nt, Artificial Sequence; identical to SEQ ID NO: 170247
  derived and/or modified CDS sequence (opt4) from hemagglutinin__InfluenzaA__AGQ80994

SEQ ID NO: 170273 - RNA, 1683 nt, Artificial Sequence; identical to SEQ ID NO: 170249
  derived and/or modified CDS sequence (opt4) from hemagglutinin__InfluenzaA__AGQ80995

SEQ ID NO: 170274 - RNA, 1683 nt, Artificial Sequence; identical to SEQ ID NO: 170249
  derived and/or modified CDS sequence (opt4) from hemagglutinin__InfluenzaA__AGQ80996

SEQ ID NO: 170275 - RNA, 1683 nt, Artificial Sequence
  derived and/or modified CDS sequence (opt4) from hemagglutinin__InfluenzaA__AGQ80997
augaacacccagauccugguguucgcccugguggccaucauccccaccaacgccgacaagaucugccugggccaccacgccgugagcaacggcaccaaggugaacacccugaccgagagaggcguggagguggugaacgccaccgagaccguggagagaaccaacauccccagaaucugcagcaagggcaagagaaccguggaccugggccagugcggccugcugggcaccaucaccggccccccccagugcgaccaguuccuggaguucagcgccgaccugaucaucgagagaagagagggcagcgacgugugcuaccccggcaaguucgugaacgaggaggcccugagacagauccugagagagagcggcggcaucgacaaggagaccaugggcuucaccuacagcggcaucagaaccgacggcgccaccagcgccugcagaagaagcggcagcagcuucuacgccgagaugaaguggcugcugagcaacaccgacaacgccgccuucccccagaugaccaagagcuacaagaacaccagaaaggaccccgcccugaucaucuggggcauccaccacagcggcagcaccaccgagcagaccaagcuguacggcagcggcaacaagcugaucaccgugggcagcagcaacuaccagcagagcuucgugcccagccccggcgccagaccccaggugaacggccagagcggcagaaucgacuuccacuggcugaugcugaaccccaacgacaccgugaccuucagcuucaacggcgccuucaucgcccccgacagagccagcuuccugagaggcaagagcaugggcauccagagcggcgugcagguggacgccaacugcgagggcgacugcuaccacagcggcggcaccaucaucagcaaccugcccuuccagaacaucaacagcagagccgugggcaagugccccagauacgugaagcaggagagccugcugcuggccaccggcaugaagaacgugcccgagauccccaagggcagaggccuguucggcgccaucgccggcuucaucgagaacggcugggagggccugaucgacggcugguacggcuucagacaccagaacagccagggcgagggcaccgccgccgacuacaagagcacccagagcgccaucgaccagaucaccggcaagcugaacagacugaucgagaagaccaaccagcaguucgagcugaucgacaacgaguucaccgagguggagaagcagaucggcaacgugaucaacuggaccagagacagcaugaccgagguguggagcuacaacgccgagcugcugguggccauggagaaccagcacaccaucgaccuggccgacagcgagaugaacaagcuguacgagagagugaagagacagcugagagagaacgccgaggaggacggcaccggcugcuucgagaucuuccacaagugcgacgacgacugcauggccagcaucagaaacaacaccuacgaccacagcaaguacagagaggaggccaugcagaacagaauccagaucgaccccgugaagcugagcagcggcuacaaggacgugauccugugguucagcuucggcgccagcugcuucauccugcuggccaucgccaugggccugguguucaucugcgugaagaacggcaacaugagaugcaccaucugcaucuga

SEQ ID NO: 170276 - RNA, 1683 nt, Artificial Sequence
  derived and/or modified CDS sequence (opt4) from hemagglutinin__InfluenzaA__AGQ81000
augaacacccagauccugguguucgcccugguggccaucauccccaccaacgccgacaagaucugccugggccaccacgccgugagcaacggcaccaaggugaacacccugaccgagagaggcguggagguggugaacgccaccgagaccguggagagaaccaacauccccagaaucugcagcaagggcaagagaaccguggaccugggccagugcggccugcugggcaccaucaccggccccccccagugcgaccaguuccuggaguucagcgccgaccugaucaucgagagaagagagggcagcgacgugugcuaccccggcaaguucgugaacgaggaggcccugagacagauccugagagagagcggcggcaucggcaaggagaccaugggcuucaccuacagcggcaucagaaccaacggcgccaccagcgccugcagaagaagcggcagcagcuucuacgccgagaugaaguggcugcugagcaacaccgacaacgccgccuucccccagaugaccaagagcuacaagaacaccagaaaggaccccgcccugaucaucuggggcauccaccacagcggcagcaccaccgagcagaccaagcuguacggcagcggcaacaagcugaucaccgugggcagcagcaacuaccagaagagcuucgugcccagccccggcgccagaccccaggugaacggccagagcggcagaaucgacuuccacuggcugaugcugaaccccaacgacaccgugaccuucagcuucaacggcgccuucaucgcccccgacagagccagcuuccugagaggcaagagcaugggcauccagagcggcgugcagguggacgccaacugcgagggcgacugcuaccacaacggcggcaccaucaucagcaaccugcccuuccagaacaucaacagcagagccgugggcaagugccccagauacgugaagcaggagagccugcugcuggccaccggcaugaagaacgugcccgagauccccaagggcagaggccuguucggcgccaucgccggcuucaucgagaacggcugggagggccugaucgacggcugguacggcuucagacaccagaacgcccagggcgagggcaccgccgccgacuacaagagcacccagagcgccaucgaccagaucaccggcaagcugaacagacugaucgagaagaccaaccagcaguucgagcugaucgacaacgaguucaccgagguggagaagcagaucggcaacgugaucaacuggaccagagacagcaugaccgagguguggagcuacaacgccgagcugcugguggccauggagaaccagcacaccaucgaccuggccgacagcgagaugaacaagcuguacgagagagugaagagacagcugagagagaacgccgaggaggacggcaccggcugcuucgagaucuuccacaagugcgacgacgacugcauggccagcaucagaaacaacaccuacgaccacagcaaguacagagaggaggccaugcagaacagaauccagaucgaccccgugaagcugagcagcggcuacaaggacgugauccugugguucagcuucggcgccagcugcuucauccugcuggccaucgccaugggccugguguucaucugcgugaagaacggcaacaugagaugcaccaucugcaucuga

SEQ ID NO: 170277 - RNA, 1683 nt, Artificial Sequence
  derived and/or modified CDS sequence (opt4) from hemagglutinin__InfluenzaA__AGQ81001
augaacacccagauccugguguucgcccugguggccaucauccccaccaacgccgacaagaucugccugggccaccacgccgugagcaacggcaccaaggugaacacccugaccgagagaggcguggagguggugaacgccaccgagaccguggagagaaccaacauccccagaaucugcagcaagggcaagagaaccguggaccugggccagugcggccugcugggcaccaucaccggccccccccagugcgaccaguuccuggaguucagcgccgaccugaucaucgagagaagagagggcagcgacgugugcuaccccggcaaguucgugaacgaggaggcccugagacagauccugagagagagcggcggcaucgacaaggagaccaugggcuucaccuacagcggcaucagaaccaacggcgccaccagcgccugcagaagaagcggcagcagcuucuacgccgagaugaaguggcugcugagcaacaccgacaacgccgccuucccccagaugaccaagagcuacaagaacaccagaaaggaccccgcccugaucaucuggggcauccaccacagcggcagcaccaccgagcagaccaagcuguacggcagcggcaacaagcugaucaccgugggcaccagcaacuaccagcagagcuucgugcccagccccggcgccagaccccaggugaacggccagagcggcagaaucgacuuccacuggcugaugcugaaccccaacgacaccgugaccuucagcuucaacggcgccuucaucgcccccgacagagccagcuuccugagaggcaagagcaugggcauccagagcggcgugcagguggacgccaacugcgagggcgacugcuaccacaacggcggcaccaucaucagcaaccugcccuuccagaacaucaacagcagagccgugggcaagugccccagauacgugaagcaggagagccugcugcuggccaccggcaugaagaacgugcccgagauccccaagggcagaggccuguucggcgccaucgccggcuucaucgagaacggcugggagggccugaucgacggcugguacggcuucagacaccagaacgcccagggcgagggcaccgccgccgacuacaagagcacccagagcgccaucgaccagaucaccggcaagcugaacagacugaucgagaagaccaaccagcaguucgagcugaucgacaacgaguucaccgagaucgagaagcagaucggcaacgugaucaacuggaccagagacagcaugaccgagguguggagcuacaacgccgagcugcugguggccauggagaaccagcacaccaucgaccuggccgacagcgagaugaacaagcuguacgagagagugaagagacagcugagagagaacgccgaggaggacggcaccggcugcuucgagaucuuccacaagugcgacgacgacugcauggccagcaucagaaacaacaccuacgaccacagcaaguacagagaggaggccaugcagaacagaauccagaucgaccccgugaagcugagcagcggcuacaaggacgugauccugugguucagcuucggcgccagcugcuucauccugcuggccaucgccaugggccugguguucaucugcgugaagaacggcaacaugagaugcaccaucugcaucuga

SEQ ID NO: 170278 - RNA, 1683 nt, Artificial Sequence; identical to SEQ ID NO: 170255
  derived and/or modified CDS sequence (opt4) from hemagglutinin__InfluenzaA__AGQ81002

SEQ ID NO: 170279 - RNA, 1683 nt, Artificial Sequence; identical to SEQ ID NO: 170255
  derived and/or modified CDS sequence (opt4) from hemagglutinin__InfluenzaA__AGQ81003

SEQ ID NO: 170280 - RNA, 1683 nt, Artificial Sequence; identical to SEQ ID NO: 170255
  derived and/or modified CDS sequence (opt4) from hemagglutinin__InfluenzaA__AGQ81004

SEQ ID NO: 170281 - RNA, 1683 nt, Artificial Sequence; identical to SEQ ID NO: 170255
  derived and/or modified CDS sequence (opt4) from hemagglutinin__InfluenzaA__AGQ81005

SEQ ID NO: 170282 - RNA, 1683 nt, Artificial Sequence; identical to SEQ ID NO: 170255
  derived and/or modified CDS sequence (opt4) from hemagglutinin__InfluenzaA__AGQ81006

SEQ ID NO: 170283 - RNA, 1683 nt, Artificial Sequence; identical to SEQ ID NO: 170255
  derived and/or modified CDS sequence (opt4) from hemagglutinin__InfluenzaA__AGQ81007

SEQ ID NO: 170284 - RNA, 1683 nt, Artificial Sequence; identical to SEQ ID NO: 170255
  derived and/or modified CDS sequence (opt4) from hemagglutinin__InfluenzaA__AGQ81008

SEQ ID NO: 170285 - RNA, 1683 nt, Artificial Sequence
  derived and/or modified CDS sequence (opt4) from hemagglutinin__InfluenzaA__AGQ81009
augaacacccagauccugguguucgcccugguggccaucauccccaccaacgccgacaagaucugccugggccaccacgccgugagcaacggcaccaaggugaacacccugaccgagagaggcguggagguggugaacgccaccgagaccguggagagaaccagcauccccagaaucugcagcaagggcaagagagccguggaccugggccagugcggccugcugggcaccaucaccggccccccccagugcgaccaguuccuggaguucagcgccgaccugaucaucgagagacaggagggcagcgacgugugcuaccccggcaaguucgugaacgaggaggcccugagacagauccugagagagagcggcggcaucaacaaggagaccaugggcuucaccuacagcggcaucagaaccaacggcgccaccagcgccugcagaagaagcggcagcagcuucuacgccgagaugaaguggcugcugagcaacaccgacaacgccgccuucccccagaccaccaagagcuacaagaacaccagaaaggaccccgcccugaucaucuggggcauccaccacagcggcagcaccaccgagcagaccaagcuguacggcagcggcaacaagcugaucaccgugggcagcagcaacuaccagcagagcuucgugcccagccccggcgccagaccccaggugaacggccagagcggcagaaucgacuuccacuggcugaugcugaaccccaacgacaccgugaccuucagcuucaacggcgccuucaucgcccccgacagagccagcuuccugagaggcaagagcaugggcauccagagcggcgugcagguggacgccaacugcgagggcgacugcuaccacaacggcggcaccaucaucagcaaccugcccuuccagaacaucaacagcagagccgugggcaagugccccagauacgugaagcaggagagccugcugcuggccaccggcaugaagaacgugcccgagauccccaagggcagaggccuguucggcgccaucgccggcuucaucgagaacggcugggagggccugguggacggcugguacggcuucagacaccagaacgcccagggcgagggcaccgccgccgacuacaagagcacccagagcgccaucgaccagaucaccggcaagcugaacagacugaucgagaagaccaaccagcaguucgagcugaucgacaacgaguucaccgagguggagagacagaucggcaacgugaucaacuggaccagagacagcaugaccgagguguggagcuacaacgccgagcugcugguggccauggagaaccagcacaccaucgaccuggccgacagcgagaugaacaagcuguacgagagagugagaagacagcugagagagaacgccgaggaggacggcaccggcugcuucgagaucuuccacaagugcgacgacgacugcauggccagcaucagaaacaacaccuacgaccacagcaaguacagagaggaggccaugcagaacagaauccagaucgaccccgugaagcugagcagcggcuacaaggacgugauccugugguucagcuucggcgccagcugcuucauccugcuggccaucgccaugggccugguguucaucugcgugaagaacggcaacaugagaugcaccaucugcaucuga

SEQ ID NO: 170286 - RNA, 1683 nt, Artificial Sequence
  derived and/or modified CDS sequence (opt4) from hemagglutinin__InfluenzaA__AGQ81011
augaacacccagauccugguguucgcccugaucgccaucacccccaccaacagcgacaagaucugccugggccaccacgccgugagcaacggcaccaaggugaacacccugaccgagagaggcguggagguggugaacgccaccgagaccguggagagaaccagcauccccagaaucugcagcaagggcaagagaaccguggaccugggccagugcggccugcugggcaccaucaccggccccccccagugcgaccaguuccuggaguucagcgccgaccugaucaucgagagaagagagggcagcgacgugugcuaccccggcaaguucgugaacgaggaggcccugagacagauccugagagagagcggcggcaucgacaaggaggccaugggcuucaccuacagcggcaucagaaccaacggcgccaccagcgccugcagaagaagcgagagcagcuucuacgccgagaugaaguggcugcugagcaacaccgacaacgccgccuucccccccaugaccaagagcuacaagaacaccagaaaggcccccgcccugaucaucuggggcauccaccacagcggcagcaccgccgagcagaccaagcuguacggcagcggcaacaagcuggugaccgugagaagcagcaacuaccagcagagcuucgugcccagccccggcgccggccccaaggugaacggccagagcggcagaaucgacuuccacuggcugaugcugaaccccaacgacaccgugaccuucagcuucaacggcgccuucaucgcccccgacagagccagcuuccugagaggcaagagcaugggcauccagagcggcgugcagguggacgccaacugcgagggcgacugcuaccacagcggcggcaccaucaucagcaaccugcccuuccagaacaucgacagcagaguggugggcaagugccccagauacgugaagcagaagagccugcugcuggccaccggcaugaagaacgugcccgagauccccaagggcagaggccuguucggcgccaucgccggcuucaucgagaacggcugggagggccugaucgacggcugguacggcuucagacaccagaacgcccagggcgagggcaccgccgccgacuacaagagcacccagagcgccaucaaccagaugaccggcaagcugaacagacugaucgagaagaccaaccagcaguucgagcugaucgacaacgaguucaccgagguggagaagcagaucggcaacgugaucaacuggaccagagacagcaucaccgagguguggagcuacaacgccgagcugcugguggccauggagaaccagcacaccaucgaccuggccgacagcgagaugaacaagcuguacgagagagugaagagacagcugagagagaacgccgaggaggacggcaccggcugcuucgagaucuuccacaagugcgacgacgacugcauggccagcaucagaaacaacaccuacgaccacagcaaguacagagaggaggccaugcagaacagaauccagaucgaccccgugaagcugagcagcggcuacaaggacgugauccugugguucagcuucggcgccagcugccugauccugcuggccaucgccaugggccugguguucaucugcgugaagaacggcaacaugagaugcaccaucugcaucuga

SEQ ID NO: 170287 - RNA, 1683 nt, Artificial Sequence
  derived and/or modified CDS sequence (opt4) from hemagglutinin__InfluenzaA__AGQ81012
augaacacccagauccugguguucgcccugaucgccaucauccccaccaacagcgacaagaucugccugggccaccacgccgugagcaacggcaccaaggugaacacccugaccgagagaggcguggagguggugaacgccaccgagaccguggagagaaccagcauccccagaaucugcagcaagggcaagagaaccguggaccugggccagugcggccugcugggcaccaucaccggccccccccagugcgaccaguuccuggaguucagcgccgaccugaucaucgagagaagagagggcagcgacgugugcuaccccggcaaguucgugaacgaggaggcccugagacagauccugagagagagcggcggcaucaacaaggaggccaugggcuucaccuacagcggcaucagaaccaacggcgccaccagcgccugcagaagaagcggcagcagcuucuacgccgagaugaaguggcugcugagcaacaccgacaacgccgccuucccccccaugaccaagagcuacaagaacaccagaaaggcccccgcccugaucaucuggggcauccaccacagcggcagcaccgccgagcagaccaagcuguacggcagcggcaacaagcuggugaccgugagaagcagcaacuaccagcagagcuucgugcccagccccggcgccggcccccaggugaacggccagagcggcagaaucgacuuccacuggcugaugcugaaccccaacgacaccgugaccuucagcuucaacggcgccuucaucgcccccgacagagccagcuuccugagaggcaagagcaugggcauccagagcggcgugcagguggacgccaacugcgagggcgacugcuaccacagcggcggcaccaucaucagcaaccugcccuuccagaacaucgacagcagaguggugggcaagugccccagauacgugaagcagaagagccugcugcuggccaccggcaugaagaacgugcccgagauccccaagggcagaggccuguucggcgccaucgccggcuucaucgagaacggcugggagggccugaucgacggcugguacggcuucagacaccagaacgcccagggcgagggcaccgccgccgacuacaagagcacccagagcgccaucaaccagaugaccggcaagcugaacagacugaucgagaagaccaaccagcaguucgagcugaucgacaacgaguucaccgagguggagaagcagaucggcaacgugaucaacuggaccagagacagcaucaccgagguguggagcuacaacgccgagcugcugguggccauggagaaccagcacaccaucgaccuggccgacagcgagaugaacaagcuguacgagagagugaagagacagcugagagagaacgccgaggaggacggcaccggcugcuucgagaucuuccacaagugcgacgacgacugcauggccagcaucagaaacaacaccuacgaccacagcaaguacagagaggaggccaugcagaacagaauccagaucgaccccgugaagcugagcagcggcuacaaggacgugauccugugguucagcuucggcgccagcugcuucauccugcuggccaucgccaugggccugguguucaucugcgugaagaacggcaacaugagaugcaccaucugcaucuga

SEQ ID NO: 170288 - RNA, 1683 nt, Artificial Sequence
  derived and/or modified CDS sequence (opt4) from hemagglutinin__InfluenzaA__AGQ81017
augaacacccagauccugguguucgcccugaucgccaucacccccaccaacagcgacaagaucugccugggccaccacgccgugagcaacggcaccaaggugaacacccugaccgagagaggcguggagguggugaacgccaccgagaccguggagagaaccagcauccccagaaucugcagcaagggcaagagaaccguggaccugggccagugcggccugcugggcaccaucaccggccccccccagugcgaccaguuccuggaguucagcgccgaccugaucaucgagagaagagagggcagcgacgugugcuaccccggcaaguucgugaacgaggaggcccugagacagauccugagagagagcggcggcaucgacaaggaggccaugggcuucaccuacagcggcaucagaaccaacggcgccaccagcgccugcagaagaagcggcagcagcuucuacgccgagaugaaguggcugcugagcaacaccgacaacgccgccuucccccccaugaccaagagcuacaagaacaccagaaaggcccccgcccugaucaucuggggcauccaccacagcggcagcaccgccgagcagaccaagcuguacggcagcggcaacaagcuggugaccgugagaagcagcaacuaccagcagagcuucgugcccagccccggcgccggcccccaggugaacggccagagcggcagaaucgacuuccacuggcugaugcugaaccccaacgacaccgugaccuucagcuucaacggcgccuucaucgcccccgacagagccagcuuccugagaggcaagagcaugggcauccagagcggcgugcagguggacgccaacugcgagggcgacugcuaccacagcggcggcaccaucaucagcaaccugcccuuccagaacaucgacagcagaguggugggcaagugccccagauacgugaagcagaagagccugcugcuggccaccggcaugaagaacgugcccgagauccccaagggcagaggccuguucggcgccaucgccggcuucaucgagaacggcugggagggccugaucgacggcugguacggcuucagacaccagaacgcccagggcgagggcaccgccgccgacuacaagagcacccagagcgccaucaaccagaugaccggcaagcugaacagacugaucgagaagaccaaccagcaguucgagcugaucgacaacgaguucaccgagguggagaagcagaucggcaacgugaucaacuggaccagagacagcaucaccgagguguggagcuacaacgccgagcugcugguggccauggagaaccagcacaccaucgaccuggccgacagcgagaugaacaagcuguacgagagagugaagagacagcugagagagaacgccgaggaggacggcaccggcugcuucgagaucuuccacaagugcgacgacgacugcauggccagcaucagaaacaacaccuacgaccacagcaaguacagagaggaggccaugcagaacagaauccagaucgaccccgugaagcugagcagcggcuacaaggacgugauccugugguucagcuucggcgccagcugcuucauccugcuggccaucgccaugggccugguguucaucugcgugaagaacggcaacaugagaugcaccaucugcaucuga

SEQ ID NO: 170289 - RNA, 1683 nt, Artificial Sequence
  derived and/or modified CDS sequence (opt4) from hemagglutinin__InfluenzaA__AGQ81018
augaacacccagauccugguguucgcccugaucgccaucauccccaccaacagcgacaagaucugccugggccaccacgccgugagcaacggcaccaaggugaacacccugaccgagagaggcguggagguggugaacgccaccgagaccguggagagaaccagcauccccagaaucugcagcaagggcaagagaaccguggaccugggccagugcggccugcugggcaccaucaccggccccccccagugcgaccaguuccuggaguucagcgccgaccugaucaucgagagaagagagggcagcgacgugugcuaccccggcaaguucgugaacgaggaggcccugagacagauccugagagagagcggcggcaucgugaaggaggccaugggcuucaccuacagcggcaucagaaccaacggcgccaccagcgccugcagaagaagcggcagcagcuucuacgccgagaugaaguggcugcugagcaacaccgacaacgccgccuucccccccaugaccaagagcuacaagaacaccagaaaggcccccgccaucaucaucuggggcauccaccacagcggcagcaccgccgagcagaccaagcuguacggcagcggcaacaagcuggugaccgugagaagcagcaacuaccagcagagcuucgugcccagccccggcgccggcccccaggugaacggccagagcggcagaaucgacuuccacuggcugaugcugaaccccaacgacaccgugaccuucagcuucaacggcgccuucaucgcccccgacagagccagcuuccugagaggcaagagcaugggcauccagagcggcgugcagguggacgccaacugcgagggcgacugcuaccacagcagaggcaccaucaucagcaaccugcccuuccagaacaucgacagcagaguggugggcaagugccccagauacgugaagcagaagagccugcugcuggccaccggcaugaagaacgugcccgagauccccaagggcagaggccuguucggcgccaucgccggcuucaucgagaacggcugggagggccugaucgacggcugguacggcuucagacaccagaacgcccagggcgagggcaccgccgccgacuacaagagcacccagagcgccaucaaccagaugaccggcaagcugaacagacugaucgagaagaccaaccagcaguucgagcugaucgacaacgaguucaccgagguggagaagcagaucggcaacgugaucaacuggaccagagacagcaucaccgagguguggagcuacaacgccgagcugcugguggccauggagaaccagcacaccaucgaccuggccgacagcgagaugaacaagcuguacgagagagugaagagacagcugagagagaacgccgaggaggacggcaccggcugcuucgagaucuuccacaagugcgacgacgacugcauggccagcaucagaaacaacaccuacgaccacagcaaguacagagaggaggccaugcagaacagaauccagaucgaccccgugaagcugagcagcggcuacaaggacgugauccugugguucagcuucggcgccagcugcuucauccugcuggccaucgccaugggccugguguucaucugcgugaagaacggcaacaugagaugcaccaucugcaucuga

SEQ ID NO: 170290 - RNA, 1683 nt, Artificial Sequence; identical to SEQ ID NO: 170289
  derived and/or modified CDS sequence (opt4) from hemagglutinin__InfluenzaA__AGQ81019

SEQ ID NO: 170291 - RNA, 1683 nt, Artificial Sequence; identical to SEQ ID NO: 170288
  derived and/or modified CDS sequence (opt4) from hemagglutinin__InfluenzaA__AGQ81020

SEQ ID NO: 170292 - RNA, 1683 nt, Artificial Sequence; identical to SEQ ID NO: 170289
  derived and/or modified CDS sequence (opt4) from hemagglutinin__InfluenzaA__AGQ81021

SEQ ID NO: 170293 - RNA, 1683 nt, Artificial Sequence; identical to SEQ ID NO: 170288
  derived and/or modified CDS sequence (opt4) from hemagglutinin__InfluenzaA__AGQ81022

SEQ ID NO: 170294 - RNA, 1683 nt, Artificial Sequence; identical to SEQ ID NO: 170289
  derived and/or modified CDS sequence (opt4) from hemagglutinin__InfluenzaA__AGQ81023

SEQ ID NO: 170295 - RNA, 1683 nt, Artificial Sequence
  derived and/or modified CDS sequence (opt4) from hemagglutinin__InfluenzaA__AGQ81025
augaacacccagauccugguguucgcccugaucgccaucauccccaccaacgccgacaagaucugccugggccaccacgccgugagcaacggcaccaaggugaacacccugaccgagagaggcguggagguggugaacgccaccgagaccguggagagaaccagcauccccagaaucugcagcaagggcaagagaaccguggaccugggccagugcggccugcugggcaccaucaccggccccccccagugcgaccaguuccuggaguucagcgccgaccugaucaucgagagaagagagggcagcgacgugugcuaccccggcaaguucgugaacgaggaggcccugagacagauccugagagagagcggcggcaucgacaaggaggccaugggcuucaccuacagcggcaucagaaccaacggcgugaccagcgccugcagaagaagcggcagcagcuucuacgccgagaugaaguggcugcugagcaacaccgacaacgccgccuucccccccaugaccaagagcuacaagaacaccagaaaggcccccgcccugaucaucuggggcauccaccacagcggcagcaccgccgagcagaccaagcuguacggcagcggcaacaagcuggugaccgugagaagcagcaacuaccagcagagcuucgugcccagccccggcgccggcccccaggugaacggccagagcggcagaaucgacuuccacuggcugaugcugaaccccaacgacaccgugaccuucagcuucaacggcgccuucaucgcccccgacagagccagcuuccugagaggcaagagcaugggcauccagagcggcgugcagguggacgccaacugcgagggcgacugcuaccacagcggcggcaccaucaucagcaaccugcccuuccagaacaucgacagcagaguggugggcaagugccccagauacgugaagcagaagagccugcugcuggccaccggcaugaagaacgugcccgagauccccaagggcagaggccuguucggcgccaucgccggcuucaucgagaacggcugggagggccugaucgacggcugguacggcuucagacaccagaacgcccagggcgagggcaccgccgccgacuacaagagcacccagagcgccaucaaccagaugaccggcaagcugaacagacugaucgagaagaccaaccagcaguucggccugaucgacaacgaguucaccgagguggagaagcagaucggcaacgugaucaacuggaccagagacagcaucaccgagguguggagcuacaacgccgagcugcugguggccauggagaaccagcacaccaucgaccuggccgacagcgagaugaacaagcuguacgagagagugaagagacagcugagagagaacgccgaggaggacggcaccggcugcuucgagaucuuccacaagugcgacgacgacugcauggccagcaucagaaacaacaccuacgaccacagcaaguacagagaggaggccaugcagaacagaauccagaucgaccccgugaagcugagcagcggcuacaaggacgugauccugugguucagcuucggcgccagcugcuucauccugcuggccaucgccaugggccugguggugaucugcgugaagaacggcaacaugagaugcaccaucugcaucuga

SEQ ID NO: 170296 - RNA, 1683 nt, Artificial Sequence
  derived and/or modified CDS sequence (opt4) from hemagglutinin__InfluenzaA__AGQ81026
augaacacccagauccugguguucgcccugaucgccaucauccccaccaacgccgacaagaucugccugggccaccacgccgugagcaacggcaccaaggugaacacccugaccgagagaggcguggagguggugaacgccaccgagaccguggagagaaccagcauccccagaaucugcagcaagggcaagagaaccguggaccugggccagugcggccugcugggcaccaucaccggccccccccagugcgaccaguuccuggaguucagcgccgaccugaucaucgagagaagagagggcagcgacgugugcuaccccggcaaguucgugaacgaggaggcccugagacagauccugagagagagcggcggcaucgacaaggaggccaugggcuucaccuacagcggcaucagaaccaacggcgccaccagcgccugcagaagaagcggcagcagcuucuacgccgagaugaaguggcugcugagcaacaccgacaacgccgccuucccccccaccaccaagagcuacaagaacaccagaaaggcccccgcccugaucaucuggggcauccaccacagcggcagcaccgccgagcagaccaagcuguacggcagcggcaacaagcuggugaccgugagaagcagcaacuaccagcagagcuucgugcccagccccggcgccggcccccaggugaacggccagagcggcagaaucgacuuccacuggcugaugcugaaccccaacgacaccgugaccuucagcuucaacggcgccuucaucgcccccgacagagccagcuuccugagaggcaagagcaugggcauccagagcggcgugcagguggacgccaacugcgagggcgacugcuaccacagcggcggcaccaucaucagcaaccugcccuuccagaacaucgacagcagaguggugggcaagugccccagauacgugaagcagaagagccugcugcuggccaccggcaugaagaacgugcccgagauccccaagggcagaggccuguucggcgccaucgccggcuucaucgagaacggcugggagggccugaucgacggcugguacggcuucagacaccagaacgcccagggcgagggcaccgccgccgacuacaagagcacccagagcgccaucaaccagaugaccggcaagcugaacagacugaucgagaagaccaaccagcaguucgagcugaucgacaacgaguucaccgagguggagaagcagaucggcaacgugaucaacuggaccagagacagcaucaccgagguguggagcuacaacgccgagcugcugguggccauggagaaccagcacaccaucgaccuggccgacagcgagaugaacaagcuguacgagagagugaagagacagcugagagagaacgccgaggaggacggcaccggcugcuucgagaucuuccacaagugcgacgacgacugcauggccagcaucagaaacaacaccuacgaccacagcaaguacagagaggaggccaugcagaacagaauccagaucgaccccgugaagcugagcagcggcuacaaggacgugauccugugguucagcuucggcgccagcugcuucauccugcuggccaucgccaugggccugguguucaucugcgugaagaacggcaacaugagaugcaccaucugcaucuga

SEQ ID NO: 170297 - RNA, 1683 nt, Artificial Sequence
  derived and/or modified CDS sequence (opt4) from hemagglutinin__InfluenzaA__AGQ81027
augaacacccagauccugguguucgcccugaucgccaucauccccaccaacgccgacaagaucugccugggccaccacgccgugagcaacggcaccaaggugaacacccugaccgagagaggcguggagguggugaacgccaccgagaccguggagagaaccagcauccccagaaucugcagcaagggcaagagaaccguggaccugggccagugcggccugcugggcaccaucaccggccccccccagugcgaccaguuccuggaguucagcgccgaccugaucaucgagagaagagagggcagcgacgugugcuaccccggcaaguucgugaacgaggaggcccugagacagauccugagagagagcggcggcaucgacaaggaggccaugggcuucaccuacagcggcaucagaaccaacggcgugaccagcgccugcagaagaagcggcagcagcuucuacgccgagaugaaguggcugcugagcaacaccgacaacgccgccuucccccccaugaccaagagcuacaagaacaccagaaaggcccccgcccugaucaucuggggcauccaccacagcggcagcaccgccgagcagaccaagcuguacggcagcggcaacaagcuggugaccgugagaagcagcaacuaccagcagagcuucgugcccagccccggcgccggcccccaggugaacggccagagcggcagaaucgacuuccacuggcugaugcugaaccccaacgacaccgugaccuucagcuucaacggcgccuucaucgcccccgacagagccagcuuccugagaggcaagagcaugggcauccagagcggcgugcagguggacgccaacugcgagggcgacugcuaccacagcggcggcaccaucaucagcaaccugcccuuccagaacaucgacagcagaguggugggcaagugccccagauacgugaagcagaagagccugcugcuggccaccggcaugaagaacgugcccgagauccccaagggcagaggccuguucggcgccaucgccggcuucaucgagaacggcugggagggccugaucgacggcugguacggcuucagacaccagaacgcccagggcgagggcaccgccgccgacuacaagagcacccagagcgccaucaaccagaugaccggcaagcugaacagacugaucgagaagaccaaccagcaguucgagcugaucgacaacgaguucaccgagguggagaagcagaucggcaacgugaucaacuggaccagagacagcaucaccgagguguggagcuacaacgccgagcugcugguggccauggagaaccagcacaccaucgaccuggccgacagcgagaugaacaagcuguacgagagagugaagagacagcugagagagaacgccgaggaggacggcaccggcugcuucgagaucuuccacaagugcgacgacgacugcauggccagcaucagaaacaacaccuacgaccacagcaaguacagagaggaggccaugcagaacagaauccagaucgaccccgugaagcugagcagcggcuacaaggacgugauccugugguucagcuucggcgccagcugcuucauccugcuggccaucgccaugggccugguguucaucugcgugaagaacggcaacaugagaugcaccaucugcaucuga

SEQ ID NO: 170298 - RNA, 1683 nt, Artificial Sequence
  derived and/or modified CDS sequence (opt4) from hemagglutinin__InfluenzaA__AGQ81028
augaacacccagauccugguguucgcccugaucgccaucauccccaccaacgccgacaagaucugccugggccaccacgccgugagcaacggcaccaaggugaacacccugaccgagagaggcguggagguggugaacgccaccgagaccguggagagaaccagcauccccagaaucugcagcaagggcaagagaaccguggaccugggccagugcggccugcugggcaccaucaccggccccccccagugcgaccaguuccuggaguucagcgccgaccugaucaucgagagaagagagggcagcgacgugugcuaccccggcaaguucgugaacgaggaggcccugagacagauccugagagagagcggcggcaucgacaaggaggccaugggcuucaccuacagcggcaucagaaccaacggcgccaccagcgccugcagaagaagcggcagcagcuucuacgccgagaugaaguggcugcugagcaacaccgacaacgccgccuucccccccaccaccaagagcuacaagaacaccagaaaggcccccgcccugaucaucuggggcauccaccacagcggcagcaccgccgagcagaccaagcuguacggcagcggcaacaagcuggugaccgugagaagcagcaacuaccagcagagcuucgugcccagccccggcgccggcccccaggugaacggccagagcggcagaaucgacuuccacuggcugaugcugaaccccaacgacaccgugaccuucagcuucaacggcgccuucaucgcccccgacagagccagcuuccugagaggcaagagcaugggcauccagagcggcgugcagguggacgccaacugcgagggcgacugcuaccacagcggcggcaccaucaucagcaaccugcccuuccagaacaucgacagcagaguggugggcaagugccccagauacgugaagcagaagagccugcugcuggccaccggcaugaagaacgugcccgagauccccaagggcagaggccuguucggcgccaucgccggcuucaucgagaacggcugggagggccugaucgacggcugguacggcuucagacaccagaacgcccagggcgagggcaccgccgccgacuacaagagcacccagagcgccaucaaccagaugaccggcaagcugaacagacugaucgagaagaccaaccagcaguucgagcugaucgacaacgaguucaccgagguggagaagcagaucggcaacgugaucaacuggaccagagacagcaucaccgagauguggagcuacaacgccgagcugcugguggccauggagaaccagcacaccaucgaccuggccgacagcgagaugaacaagcuguacgagagagugaagagacagcugagagagaacgccgaggaggacggcaccggcugcuucgagaucuuccacaagugcgacgacgacugcauggccagcaucagaaacaacaccuacgaccacagcaaguacagagaggaggccaugcagaacagaauccagaucgaccccgugaagcugagcagcggcuacaaggacgugauccugugguucagcuucggcgccagcugcuucauccugcuggccaucgccaugggccugguguucaucugcgugaagaacggcaacaugagaugcaccaucugcaucuga

SEQ ID NO: 170299 - RNA, 1683 nt, Artificial Sequence
  derived and/or modified CDS sequence (opt4) from hemagglutinin__InfluenzaA__AGQ81029
augaacacccagauccugguguucgcccugaucgccaucauccccaccaacgccgacaagaucugccugggccaccacgccgugagcaacggcaccaaggugaacacccugaccgagagaggcguggagguggugaacgccaccgagaccguggagagaaccagcauccccagaaucugcagcaagggcaagagaaccguggaccugggccagugcggccugcugggcaccaucaccggccccccccagugcgaccaguuccuggaguucagcgccgaccugaucaucgagagaagagagggcagcgacgugugcuaccccggcaaguucgugaacgaggaggcccugagacagauccugagagagagcggcggcaucgacaaggaggccaugggcuucaccuacagcggcaucagaaccaacggcgugaccagcgccugcagaagaagcggcagcagcuucuacgccgagaugaaguggcugcugagcaacaccgacaacgccgccuucccccccaugaccaagagcuacaagaacaccagaaaggcccccgcccugaucaucuggggcauccaccacagcggcagcaccgccgagcagaccaagcuguacggcagcggcaacaagcuggugaccgugagaagcagcaacuaccagcagagcuucaugcccagccccggcgccggcccccaggugaacggccagagcggcagaaucgacuuccacuggcugaugcugaaccccaacgacaccgugaccuucagcuucaacggcgccuucaucgcccccgacagagccagcuuccugagaggcaagagcaugggcauccagagcggcgugcagguggacgccaacugcgagggcgacugcuaccacagcggcggcaccaucaucagcaaccugcccuuccagaacaucgacagcagaguggugggcaagugccccagauacgugaagcagaagagccugcugcuggccaccggcaugaagaacgugcccgagauccccaagggcagaggccuguucggcgccaucgccggcuucaucgagaacggcugggagggccugaucgacggcugguacggcuucagacaccagaacgcccagggcgagggcaccgccgccgacuacaagagcacccagagcgccaucaaccagaugaccggcaagcugaacagacugaucgagaagaccaaccagcaguucgagcugaucgacaacgaguucaccgagguggagaagcagaucggcaacgugaucaacuggaccagagacagcaucaccgagguguggagcuacaacgccgagcugcugguggccauggagaaccagcacaccaucgaccuggccgacagcgagaugaacaagcuguacgagagagugaagagacagcugagagagaacgccgaggaggacggcaccggcugcuucgagaucuuccacaagugcgacgacgacugcauggccagcaucagaaacaacaccuacgaccacagcaaguacagagaggaggccaugcagaacagaauccagaucgaccccgugaagcugagcagcggcuacaaggacgugauccugugguucagcuucggcgccagcugcuucauccugcuggccaucgccaugggccugguguucaucugcgugaagaacggcaacaugagaugcaccaucugcaucuga

SEQ ID NO: 170300 - RNA, 1683 nt, Artificial Sequence
  derived and/or modified CDS sequence (opt4) from hemagglutinin__InfluenzaA__AGQ81031
augaacacccagauccugguguucgcccugaucgccaucauccccaccaacgccgacaagaucugccugggccaccacgccgugagcaacggcaccaaggugaacacccugaccgagagaggcguggagguggugaacgccaccgagaccguggagagaaccagcauccccagaaucugcagcaagggcaagagaaccguggaccugggccagugcggccugcugggcaccaucaccggccccccccagugcgaccaguuccuggaguucagcgccgaccugaucaucgagagaagagagggcagcgacgugugcuaccccggcaaguucgugaacgaggaggcccugagacagauccugagagagagcggcggcaucaacaaggaggccaugggcuucaccuacagcggcaucagaaccaacggcgccaccagcgccugcagaagaagcggcagcagcuucuacgccgagaugaaguggcugcugagcaacaccgacaacgccgccuucccccccaugaccaagagcuacaagaacaccagaaaggcccccgcccugaucaucuggggcauccaccacagcggcagcaccgccgagcagaccaagcuguacggcagcggcaacaagauggugaccgugagaagcagcaacuaccagcagagcuucgugcccagccccggcgccggcccccaggugaacggccagagcggcagaaucgacuuccacuggcugaugcugaaccccaacgacaccgugaccuucagcuucaacggcgccuucaucgcccccgacagagccagcuuccugagaggcaagagcaugggcauccagagcggcgugcagguggacgccaacugcgagggcgacugcuaccacagcggcggcaccaucaucagcaaccugcccuuccagaacaucgacagcagaguggugggcaagugccccagauacgugaagcagaagagccugcugcuggccaccggcaugaagaacgugcccgagauccccaagggcagaggccuguucggcgccaucgccggcuucaucgagaacggcugggagggccugaucgacggcugguacggcuucagacaccagaacgcccagggcgagggcaccgccgccgacuacaagagcacccagagcgccaucaaccagaugaccggcaagcugaacagacugaucgagaagaccaaccagcaguucgagcugaucgacaacgaguucaccgagguggagagacagaucggcaacgugaucaacuggaccagagacagcaucaccgagguguggagcuacaacgccgagcugcugguggccauggagaaccagcacaccaucgaccuggccgacagcgagaugaacaagcuguacgagagagugaagagacagcugagagagaacgccgaggaggacggcaccggcugcuucgagaucuuccacaagugcgacgacgacugcauggccagcaucagaaacaacaccuacgaccacagcaaguacagagaggaggccaugcagaacagaauccagaucgaccccgugaagcugagcagcggcuacaaggacgugauccugugguucagcuucggcgccagcugcuucauccugcuggccaucgccaugggccugguguucaucugcgugaagaacggcaacaugagaugcaccaucugcaucuga

SEQ ID NO: 170301 - RNA, 1683 nt, Artificial Sequence; identical to SEQ ID NO: 170296
  derived and/or modified CDS sequence (opt4) from hemagglutinin__InfluenzaA__AGQ81032

SEQ ID NO: 170302 - RNA, 1683 nt, Artificial Sequence; identical to SEQ ID NO: 170297
  derived and/or modified CDS sequence (opt4) from hemagglutinin__InfluenzaA__AGQ81033

SEQ ID NO: 170303 - RNA, 1683 nt, Artificial Sequence; identical to SEQ ID NO: 170296
  derived and/or modified CDS sequence (opt4) from hemagglutinin__InfluenzaA__AGQ81034

SEQ ID NO: 170304 - RNA, 1683 nt, Artificial Sequence; identical to SEQ ID NO: 170297
  derived and/or modified CDS sequence (opt4) from hemagglutinin__InfluenzaA__AGQ81035

SEQ ID NO: 170305 - RNA, 1683 nt, Artificial Sequence; identical to SEQ ID NO: 170297
  derived and/or modified CDS sequence (opt4) from hemagglutinin__InfluenzaA__AGQ81036

SEQ ID NO: 170306 - RNA, 1683 nt, Artificial Sequence; identical to SEQ ID NO: 170297
  derived and/or modified CDS sequence (opt4) from hemagglutinin__InfluenzaA__AGQ81037

SEQ ID NO: 170307 - RNA, 1683 nt, Artificial Sequence; identical to SEQ ID NO: 170289
  derived and/or modified CDS sequence (opt4) from hemagglutinin__InfluenzaA__AGQ81038

SEQ ID NO: 170308 - RNA, 1683 nt, Artificial Sequence; identical to SEQ ID NO: 170289
  derived and/or modified CDS sequence (opt4) from hemagglutinin__InfluenzaA__AGQ81039

SEQ ID NO: 170309 - RNA, 1683 nt, Artificial Sequence
  derived and/or modified CDS sequence (opt4) from hemagglutinin__InfluenzaA__AGQ81040
augaacacccagauccugguguucgcccugaucgccaucauccccaccaacgccgacaagaucugccugggccaccacgccgugagcaacggcaccaaggugaacacccugaccgagagaggcguggagguggugaacgccaccgagaccguggagagaaccaacauccccagaaucugcagcaagggcaagagaaccguggaccugggccagugcggccugcugggcaccaucaccggccccccccagugcgaccaguuccuggaguucagcgccgaccugaucaucgagagaagagagggcagcgacgugugcuaccccggcaaguucgugaacgaggaggcccugagacagauccugagagagagcggcggcaucgacaaggaggccaugggcuucaccuacagcggcaucagaaccaacggcgccaccagcgccugcagaagaagcggcagcagcuucuacgccgagaugaaguggcugcugagcaacaccgacaacgccgccuucccccagaugaccaagagcuacaagaacaccagaaaggaccccgcccugaucaucuggggcauccaccacagcggcagcaccgccgagcagaccaagcuguacggcagcggcaacaagcuggugaccgugggcagcagcaacuaccagcagagcuucgugcccagccccggcgccagaccccaggugaacggccagagcggcagaaucgacuuccacuggcugaugcugaaccccaacgacaccgugaccuucagcuucaacggcgccuucaucgcccccgacagagccagcuuccugagaggcaagagcaugggcauccagagcggcgugcagaucgacgccaacugcgagggcgacugcuaccacagcggcggcaccaucaucagcaaccugcccuuccagaacaucgacagcagagccgugggcaagugccccagauacgugaagcagaagagccugcugcuggccaccggcaugaagaacgugcccgagauccccaagggcagaggccuguucggcgccaucgccggcuucaucgagaacggcugggagggccugaucgacggcugguacggcuucagacaccagaacgcccagggcgagggcaccgccgccgacuacaagagcacccagagcgccaucgaccagaucaccggcaagcugaacagacugaucgagaagaccaaccagcaguucgagcugaucgacaacgaguucaccgagguggagaagcagaucggcaacgugaucaacuggaccagagacagcaucaccgagguguggagcuacaacgccgagcugcugguggccauggagaaccagcacaccaucgaccuggccgacagcgagaugaacaagcuguacgagagagugaagagacagcugagagagaacgccgaggaggacggcaccggcugcuucgagaucuuccacaagugcgacgacgacugcauggccagcaucagaaacaacaccuacgaccacagcaaguacagagaggaggccaugcagaacagaauccagaucgaccccgugaagcugagcagcggcuacaaggacgugauccugugguucagcuucggcgccagcugcuucauccugcuggccaucgccaugggccugguguucaucugcgugaagaacggcaacaugagaugcaccaucugcaucuga

SEQ ID NO: 170310 - RNA, 1683 nt, Artificial Sequence
  derived and/or modified CDS sequence (opt4) from hemagglutinin__InfluenzaA__AGQ81041
augaacacccagauccugguguucgcccugaucgccaucauccccaccaacgccgacaagaucugccugggccaccacgccgugagcaacggcaccaaggugaacacccugaccgagagaggcguggagguggugaacgccaccgagaccguggagagaaccaacauccccagaaucugcagcaagggcaagagaaccguggaccugggccagugcggccugcugggcaccaucaccggccccccccagugcgaccaguuccuggaguucagcgccgaccugaucaucgagagaagagagggcagcgacgugugcuaccccggcaaguucgugaacgaggaggcccugagacagauccugagagagagcggcggcaucgacaaggaggccaugggcuucaccuacagcggcaucagaaccaacggcgccaccagcgccugcagaagaagcggcagcagcuucuacgccgagaugaaguggcugcugagcaacaccgacaacgccgccuucccccagaccaccaagagcuacaagaacaccagaaaggaccccgcccugaucaucuggggcauccaccacagcggcagcaccgccgagcagaccaagcuguacggcagcggcaacaagcuggugaccgugggcagcagcaacuaccagcagagcuucgugcccagccccggcgccagaccccaggugaacggccagagcggcagaaucgacuuccacuggcugaugcugaaccccaacgacaccgugaccuucagcuucaacggcgccuucaucgcccccgacagagccagcuuccugagaggcaagagcaugggcauccagagcggcgugcagguggacgccaacugcgagggcgacugcuaccacagcggcggcaccaucaucagcaaccugcccuuccagaacaucgacagcagagccgugggcaagugccccagauacgugaagcagaagagccugcugcuggccaccggcaugaagaacgugcccgagauccccaagggcagaggccuguucggcgccaucgccggcuucaucgagaacggcugggagggccugaucgacggcugguacggcuucagacaccagaacgcccagggcgagggcaccgccgccgacuacaagagcacccagagcgccaucgaccagaucaccggcaagcugaacagacugaucgagaagaccaaccagcaguucgagcugaucgacaacgaguucaccgagguggagaagcagaucggcaacgugaucaacuggaccagagacagcaucaccgagguguggagcuacaacgccgagcugcugguggccauggagaaccagcacaccaucgaccuggccgacagcgagaugaacaagcuguacgagagagugaagagacagcugagagagaacgccgaggaggacggcaccggcugcuucgagaucuuccacaagugcgacgacgacugcauggccagcaucagaaacaacaccuacgaccacagcaaguacagagaggaggccaugcagaacagaauccagaucgaccccgugaagcugagcagcggcuacaaggacgugauccugugguucagcuucggcgccagcugcuucauccugcuggccaucgccaugggccugguguucaucugcgugaagaacggcaacaugagaugcaccaucugcaucuga

SEQ ID NO: 170311 - RNA, 1683 nt, Artificial Sequence
  derived and/or modified CDS sequence (opt4) from hemagglutinin__InfluenzaA__AGQ81042
augaacacccagauccugguguucgcccugaucgccaucauccccaccaacgccgacaagaucugccugggccaccacgccgugagcaacggcaccaaggugaacacccugaccgagagaggcguggagguggugaacgccaccgagaccguggagagaaccaacauccccagaaucugcagcaagggcaagagaaccguggaccugggccagugcggccugcugggcaccaucaccggccccccccagugcgaccaguuccuggaguucagcgccgaccugaucaucgagagaagagagggcagcgacgugugcuaccccggcaaguucgugaacgaggaggcccugagacagauccugagagagagcggcggcaucgacaaggaggccaugggcuucaccuacagcggcaucagaaccaacggcgccaccagcgccugcagaagaagcggcagcagcuucuacgccgagaugaaguggcugcugagcaacaccgacaacgccgccuucccccagaugaccaagagcuacaagaacaccagaaaggaccccgcccugaucaucuggggcauccaccacagcggcagcaccgccgagcagaccaagcuguacggcagcggcaacaagcuggugaccgugggcagcagcaacuaccagcagagcuucgugcccagccccggcgccagaccccaggugaacggccagagcggcagaaucgacuuccacuggcugaugcugaaccccaacgacaccgugaccuucagcuucaacggcgccuucaucgcccccgacagagccagcuuccugagaggcaagagcaugggcauccagagcggcgugcagguggacgccaacugcgagggcgacugcuaccacagcggcggcaccaucaucagcaaccugcccuuccagaacaucgacagcagagccgugggcaagugccccagauacgugaagcagaagagccugcugcuggccaccggcaugaagaacgugcccgagauccccaagggcagaggccuguucggcgccaucgccggcuucaucgagaacggcugggagggccugaucgacggcugguacggcuucagacaccagaacgcccagggcgagggcaccgccgccgacuacaagagcacccagagcgccaucgaccagaucaccggcaagcugaacagacugaucgagaagaccaaccagcaguucgagcugaucgacaacgaguucaccgagguggagaagcagaucggcaacgugaucaacuggaccagagacagcaucaccgagguguggagcuacaacgccgagcugcugguggccauggagaaccagcacaccaucgaccuggccgacagcgagaugaacaagcuguacgagagagugaagagacagcugagagagaacgccgaggaggacggcaccggcugcuucgagaucuuccacaagugcgacgacgacugcauggccagcaucagaaacaacaccuacgaccacagcaaguacagagaggaggccaugcagaacagaauccagaucgaccccgugaagcugagcagcggcuacaaggacgugauccugugguucagcuucggcgccagcugcuucauccugcuggccaucgccaugggccugguguucaucugcgugaagaacggcaacaugagaugcaccaucugcaucuga

SEQ ID NO: 170312 - RNA, 1683 nt, Artificial Sequence
  derived and/or modified CDS sequence (opt4) from hemagglutinin__InfluenzaA__AGQ81043
augaacacccagauccugguguucgcccugaucgccaucauccccaccaacgccgacaagaucugccugggccaccacgccgugagcaacggcaccaaggugaacacccugaccgagagaggcguggagguggugaacgccaccgagaccguggagagaaccaacauccccagaaucugcagcaagggcaagagaaccguggaccugggccagugcggccugcugggcaccaucaccggccccccccagugcgaccaguuccuggaguucagcgccgaccugaucaucgagagaagagagggcagcgacgugugcuaccccggcaaguucgugaacgaggaggcccugagacagauccugagagagagcggcggcaucgacaaggaggagaugggcuucaccuacagcggcaucagaaccaacggcgccaccagcgccugcagaagaagcggcagcagcuucuacgccgagaugaaguggcugcugagcaacaccgacaacgccgccuucccccagaugaccaagagcuacaagaacaccagaaagagccccgcccugaucguguggggcauccaccacagcgugagcaccgccgagcagaccaagcuguacggcagcggcaacaagcuggugaccgugggcagcagcaacuaccagcagagcuucgugcccagccccggcgccagaccccaggugaacggccugagcggcagaaucgacuuccacuggcugaugcugaaccccaacgacaccgugaccuucagcuucaacggcgccuucaucgcccccgacagagccagcuuccugagaggcaagagcaugggcauccagagcggcgugcagguggacgccaacugcgagggcgacugcuaccacagcggcggcaccaucaucagcaaccugcccuuccagaacaucgacagcagagccgugggcaagugccccagauacgugaagcagagaagccugcugcuggccaccggcaugaagaacgugcccgagauccccaagggcagaggccuguucggcgccaucgccggcuucaucgagaacggcugggagggccugaucgacggcugguacggcuucagacaccagaacgcccagggcgagggcaccgccgccgacuacaagagcacccagagcgccaucgaccagaucaccggcaagcugaacagacugaucgagaagaccaaccagcaguucgagcugaucgacaacgaguucaacgagguggagaagcagaucggcaacgugaucaacuggaccagagacagcaucaccgagguguggagcuacaacgccgagcugcugguggccauggagaaccagcacaccaucgaccuggccgacagcgagauggacaagcuguacgagagagugaagagacagcugagagagaacgccgaggaggacggcaccggcugcuucgagaucuuccacaagugcgacgacgacugcauggccagcaucagaaacaacaccuacgaccacagcaaguacagagaggaggccaugcagaacagaauccagaucgaccccgugaagcugagcagcggcuacaaggacgugauccugugguucagcuucggcgccagcugcuucauccugcuggccaucgugaugggccugguguucaucugcgugaagaacggcaacaugagaugcaccaucugcaucuga

SEQ ID NO: 170313 - RNA, 1683 nt, Artificial Sequence; identical to SEQ ID NO: 170048
  derived and/or modified CDS sequence (opt4) from hemagglutinin__InfluenzaA__AGQ81044

SEQ ID NO: 170314 - RNA, 1683 nt, Artificial Sequence; identical to SEQ ID NO: 170048
  derived and/or modified CDS sequence (opt4) from hemagglutinin__InfluenzaA__AGQ81045

SEQ ID NO: 170315 - RNA, 1683 nt, Artificial Sequence; identical to SEQ ID NO: 170048
  derived and/or modified CDS sequence (opt4) from hemagglutinin__InfluenzaA__AGQ81046

SEQ ID NO: 170316 - RNA, 1683 nt, Artificial Sequence; identical to SEQ ID NO: 170297
  derived and/or modified CDS sequence (opt4) from hemagglutinin__InfluenzaA__AGQ81047

SEQ ID NO: 170317 - RNA, 1683 nt, Artificial Sequence; identical to SEQ ID NO: 170296
  derived and/or modified CDS sequence (opt4) from hemagglutinin__InfluenzaA__AGQ81049

SEQ ID NO: 170318 - RNA, 1683 nt, Artificial Sequence; identical to SEQ ID NO: 170297
  derived and/or modified CDS sequence (opt4) from hemagglutinin__InfluenzaA__AGQ81050

SEQ ID NO: 170319 - RNA, 1683 nt, Artificial Sequence
  derived and/or modified CDS sequence (opt4) from hemagglutinin__InfluenzaA__AGQ81051
augaacacccagauccugguguucgcccugaucgccaucauccccaccaacgccgacaagaucugccugggccaccacgccgugagcaacggcaccaaggugaacacccugaccgagagaggcguggagguggugaacgccaccgagaccguggagagaaccagcauccccagaaucugcagcaagggcaagagaaccguggaccugggccagugcggccugcugggcaccaucaccggccccccccagugcgaccaguuccuggaguucagcgccgaccugaucaucgagagaagagagggcagcgacgugugcuaccccggcaaguucgugaacgaggaggcccugagacagauccugagagagagcggcggcaucaacaaggaggccaugggcuucaccuacagcggcaucagaaccaacggcgccaccagcgccugcagaagaagcggcagcagcuucuacgccgagaugaaguggcugcugagcaacaccgacaacgccgccuucccccccaugaccaagagcuacaagaacaccagaaaggcccccgcccugaucaucuggggcauccaccacagcggcagcaccgccgagcagaccaagcuguacggcagcggcaacaagcuggugaccgugagaagcagcaacuaccagcagagcuucgugcccagccccggcgccggcccccaggugaacggccagagcggcagaaucgacuuccacuggcugaugcugaaccccaacgacaccgugaccuucagcuucaacggcgccuucaucgcccccgacagagccagcuuccugagaggcaagagcaugggcauccagagcggcgugcagguggacgccaacugcgagggcgacugcuaccacagcggcggcaccaucaucagcaaccugcccuuccagaacaucgacagcagaguggugggcaagugccccagauacgugaagcagaagagccugcugcuggccaccggcaugaagaacgugcccgagauccccaagggcagaggccuguucggcgccaucgccggcuucaucgagaacggcugggagggccugaucgacggcugguacggcuucagacaccagaacgcccagggcgagggcaccgccgccgacuacaagagcacccagagcgccaucaaccagaugaccggcaagcugaacagacugaucgagaagaccaaccagcaguucgagcugaucgacaacgaguucaccgagguggagaagcagaucggcaacgugaucaacuggaccagagacagcaucaccgagguguggagcuacaacgccgagcugcugguggccauggagaaccagcacaccaucgaccuggccgacagcgagaugaacaagcuguacgagagagugaagagacagcugagagagaacgccgaggaggacggcaccggcugcuucgagaucuuccacaagugcgacgacgacugcauggccagcaucagaaacaacaccuacgaccacagcaaguacagagaggaggccaugcagaacagaauccagaucgaccccgugaagcugagcagcggcuacaaggacgugauccugugguucagcuucggcgccagcugcuucauccugcuggccaucgccaugggccugguguucaucugcgugaagaacggcaacaugagaugcaccaucugcaucuga

SEQ ID NO: 170320 - RNA, 1683 nt, Artificial Sequence; identical to SEQ ID NO: 170297
  derived and/or modified CDS sequence (opt4) from hemagglutinin__InfluenzaA__AGQ81052

SEQ ID NO: 170321 - RNA, 1683 nt, Artificial Sequence
  derived and/or modified CDS sequence (opt4) from hemagglutinin__InfluenzaA__AGQ81053
augaacacccagauccugguguucgcccugaucgccaucauccccaccaacgccgacaagaucugccugggccaccacgccgugagcaacggcaccaaggugaacacccugaccgagagaggcguggagguggugaacgccaccgagaccguggagagaaccagcauccccagaaucugcagcaagggcaagagaaccguggaccugggccagugcggccugcugggcaccaucaccggccccccccagugcgaccaguuccuggaguucagcgccgaccugaucaucgagagaagagagggcagcgacgugugcuaccccggcaaguucgugaacgaggaggcccugagacagauccugagagagagcggcggcaucaacaaggaggccaugggcuucaccuacagcggcaucagaaccaacggcgccaccagcgccugcagaagaagcggcagcagcuucuacgccgagaugaaguggcugcugagcaacaccgacaacgccgccuucccccccaugaccaagagcuacaagaacaccagaaaggcccccgcccugaucaucuggggcauccaccacagcggcagcaccgccgagcagaccaagcuguacggcagcggcaacaagauggugaccgugagaagcagcaacuaccagcagagcuucgugcccagccccggcgccggcccccaggugaacggccagagcggcagaaucgacuuccacuggcugaugcugaaccccaacgacaccgugaccuucagcuucaacggcgccuucaucgcccccgacagagccagcuuccugagaggcaagagcaugggcauccagagcggcgugcagguggacgccaacugcgagggcgacugcuaccacagcggcggcaccaucaucagcaaccugcccuuccagaacaucgacagcagaguggugggcaagugccccagauacgugaagcagaagagccugcugcuggccaccggcaugaagaacgugcccgagauccccaagggcagaggccuguucggcgccaucgccggcuucaucgagaacggcugggagggccugaucgacggcugguacggcuucagacaccagaacgcccagggcgagggcaccgccgccgacuacaagagcacccagagcgccaucaaccagaugaccggcaagcugaacagacugaucgagaagaccaaccagcaguucgagcugaucgacaacgaguucaccgagguggagaagcagaucggcaacgugaucaacuggaccagagacagcaucaccgagguguggagcuacaacgccgagcugcugguggccauggagaaccagcacaccaucgaccuggccgacagcgagaugaacaagcuguacgagagagugaagagacagcugagagagaacgccgaggaggacggcaccggcugcuucgagaucuuccacaagugcgacgacgacugcauggccagcaucagaaacaacaccuacgaccacagcaaguacagaaaggaggccaugcagaacagaauccagaucgaccccgugaagcugagcagcggcuacaaggacgugauccugugguucagcuucggcgccagcugcuucauccugcuggccaucgccaugggccugguguucaucugcgugaagaacggcaacaugagaugcaccaucugcaucuga

SEQ ID NO: 170322 - RNA, 1683 nt, Artificial Sequence; identical to SEQ ID NO: 170297
  derived and/or modified CDS sequence (opt4) from hemagglutinin__InfluenzaA__AGQ81055

SEQ ID NO: 170323 - RNA, 1683 nt, Artificial Sequence; identical to SEQ ID NO: 170297
  derived and/or modified CDS sequence (opt4) from hemagglutinin__InfluenzaA__AGQ81056

SEQ ID NO: 170324 - RNA, 1683 nt, Artificial Sequence; identical to SEQ ID NO: 170297
  derived and/or modified CDS sequence (opt4) from hemagglutinin__InfluenzaA__AGQ81057

SEQ ID NO: 170325 - RNA, 1683 nt, Artificial Sequence; identical to SEQ ID NO: 170297
  derived and/or modified CDS sequence (opt4) from hemagglutinin__InfluenzaA__AGQ81058

SEQ ID NO: 170326 - RNA, 1683 nt, Artificial Sequence; identical to SEQ ID NO: 170048
  derived and/or modified CDS sequence (opt4) from hemagglutinin__InfluenzaA__AGQ81059

SEQ ID NO: 170327 - RNA, 1683 nt, Artificial Sequence; identical to SEQ ID NO: 170048
  derived and/or modified CDS sequence (opt4) from hemagglutinin__InfluenzaA__AGQ81060

SEQ ID NO: 170328 - RNA, 1683 nt, Artificial Sequence; identical to SEQ ID NO: 170048
  derived and/or modified CDS sequence (opt4) from hemagglutinin__InfluenzaA__AGQ81061

SEQ ID NO: 170329 - RNA, 1683 nt, Artificial Sequence
  derived and/or modified CDS sequence (opt4) from hemagglutinin__InfluenzaA__AGQ81081
auggagguggugagccugaucaccauccugcuggugaucaccggcagcaacgccgacaagaucugcaucggcuaccagagcaccaacagcaccgagaccguggacacccugaccgagaacaacgugcccgugacccacgccaaggagcugcugcacaccgagcacaacggcaugcugugcgccaccaaccugggcagaccccugauccuggacaccugcaccaucgagggccugaucuacggcaaccccagcugcgacauccugcugggcggcagagaguggagcuacaucguggagagacccagcgccgugaacggccugugcuaccccggcaacguggagaaccuggaggagcugagaagccuguucagcagcgccagcagcuaccagagaauccagaucuuccccgacaccaucuggaacgugagcuacagcggcaccagcaaggccugcagcgacagcuucuacagaagcaugagauggcugacccagaagaacaacgccuaccccgugcaggacgcccaguacaccaacaacagaggcagaaacauccuguucauguggggcaucaaccacccccccaccgacaccgcccagaccaaccuguacaccagaaccgacaccaccaccagcguggccaccgaggacaucaacagaaccuucaagccccugaucggccccagaccccuggugaacggccugcagggcagaaucgacuacuacugggccgugcugagacccggccagacccugagaaucagaagcaacggcaaccugaucgcccccugguacggccacauccugagcggcgagagccacggcagaauccugaagaccgaccugaacagcggcaacugcguggugcagugccagaccgagagaggcggccugaacaccacccugcccuuccacaacgugagcaaguacgccuucggcaacugccccaaguacgugggcgugaagagccugaagcuggccgugggccugagaaacgugcccgccagaagcagcagaggccuguucggcgccaucgccggcuucaucgagggcggcuggagcggccugguggccggcugguacggcuuccagcacagcaacgaccagggcaccggcauggccgccgacagagacagcacccagaaggccaucgacaagaucaccagcaaggugaacaacaucguggacaagaugaacaagcaguacgagaucaucgaccacgaguucagcgagaucgagaccagacugaacaugaucaacaacaagaucgacgaccagauccaggacaucugggccuacaacgccgagcugcuggugcugcuggagaaccagaagacccuggacgagcacgacgccaacgugaacaaccuguacaacaaggugaagagagcccugggcagcaacgccguggaggacggcaagggcugcuucgagcuguaccacaagugcgacaaccagugcauggagaccaucagaaacggcaccuacaacagaagaaaguacaaggaggagagcagacuggagagacagaagaucgagggcgugaagcuggagagcgagggcaccuacaagauccugaccaucuacagcaccguggccagcagccuggugaucgccaugggcuucgccgccuuccuguucugggccaugagcaacggcagcugcagaugcaacaucugcaucuga

SEQ ID NO: 170330 - RNA, 1683 nt, Artificial Sequence
  derived and/or modified CDS sequence (opt4) from hemagglutinin__InfluenzaA__AGQ81086
auggagguggugagccugaucaccauccugcuggugaucaccggcagcaacgccgacaagaucugcaucggcuaccagagcaccaacagcaccgagaccguggacacccugaccgagaacaacgugcccgugacccacgccaaggagcugcugcacaccgagcacaacggcaugcugugcgccaccaaccugggcagaccccugauccuggacaccugcaccaucgagggccugaucuacggcaaccccagcugcgaccugcugcugggcggcagagaguggagcuacaucguggagagacccagcgccgugaacggccugugcuaccccggcaacguggagaaccuggaggagcugagaagccuguucagcagcgccagcagcuaccagagaauccagaucuuccccgacaccaucuggaacgugagcuacagcggcaccagcaaggccugcagcgacagcuucuacagaagcaugagauggcugacccagaagaacaacgccuaccccgugcaggacgcccaguacaccaacaacagaggcagaaacauccuguucauguggggcaucaaccacccccccaccgacaccgcccagaccaaccuguacaccagaaccgacaccaccaccagcguggccaccgaggacaucaacagaaccuucaagccccugaucggccccagaccccuggugaacggccugcagggcagaaucgacuacuacugggccgugcugagacccggccagacccugagaaucagaagcaacggcaaccugaucgcccccugguacggccacauccugagcggcgagagccacggcagaauccugaagaccgaccugaacagcggcaacugcguggugcagugccagaccgagagaggcggccugaacaccacccugcccuuccacaacgugagcaaguacgccuucggcaacugccccaaguacgugggcgugaagagccugaagcuggccgugggccugagaaacgugcccgccagaagcagcagaggccuguucggcgccaucgccggcuucaucgagggcggcuggagcggccugguggccggcugguacggcuuccagcacagcaacgaccagggcaccggcauggccgccgacagagacagcacccagaaggccaucgacaagaucaccagcaaggugaacaacaucguggacaagaugaacaagcaguacgagaucaucgaccacgaguucagcgagaucgagaccagacugaacaugaucaacaacaagaucgacgaccagauccaggacaucugggccuacaacgccgagcugcuggugcugcuggagaaccagaagacccuggacgagcacgacgccaacgugaacaaccuguacaacaaggugaagagagcccugggcagcaacgccguggaggacggcaagggcugcuucgagcuguaccacaagugcgacaaccagugcauggagaccaucagaaacggcaccuacaacagaagaaaguacaaggaggagagcagacuggagagacagaagaucgagggcgugaagcuggagagcgagggcaccuacaagauccugaccaucuacagcaccguggccagcagccuggugaucgccaugggcuucgccgccuuccuguucugggccaugagcaacggcagcugcagaugcaacaucugcaucuga

SEQ ID NO: 170331 - RNA, 1683 nt, Artificial Sequence
  derived and/or modified CDS sequence (opt4) from hemagglutinin__InfluenzaA__AGQ81087
auggagaccgugagccugaucaccaugcugcugguggccaccgugaucaacgccgacaagaucugcaucggcuaccagagcaccaacagcaccgagaccguggacacccugaccgagaacaacgugcccgugacccacgccaaggagcugcugcacaccgagcacaacggcaugcugugcgccaccaaccugggccacccccugauccuggacaccugcaccaucgagggccugaucuacggcaaccccagcugcgaccugcugcugggcggcagagaguggagcuacaucguggagagacccagcgccgugaacggccugugcuaccccggcaacguggagaaccuggaggagcugagaagccuguucagcagcgccagcagcuaccagagaauccagaucuuccccgacaccaucuggaacgugagcuacagcggcaccagcaaggccugcagcgacagcuucuacagaagcaugagauggcugacccagaagaacaacgccuaccccauccaggacgcccaguacaccaacaacagagagaagaacauccuguucauguggggcaucaaccacccccccaccgacaccgcccagaccaaccuguacaccagaaccgacaccaccaccagcguggccaccgaggagaucaacagaaccuucaagccccugaucggccccagaccccuggugaacggccugcagggcagaaucgacuacuacuggagcgugcugaagcccggccagacccugagaaucagaagcaacggcaaccugaucgcccccugguacggccacauccugagcggcgagagccacggcagagugcugaagaccgaccugaagagaggcagcugcaccgugcagugccagaccgagaagggcggccugaacaccacccugcccuuccagaacgugagcaaguacgccuucggcaacugcagcaaguacgugggcgugaagagccugaagcuggccgugggccugagaaacgugcccagcagaagcagcagaggccuguucggcgccaucgccggcuucaucgagggcggcuggagcggccugguggccggcugguacggcuuccagcacagcaacgaccagggcgugggcauggccgccgacagagacagcacccagaaggccaucgacaagaugaccagcaaggugaacaacaucguggacaagaugaacaagcaguacgagaucaucaaccacgaguucagcgagaucgagaccagacugaacaugaucaacaacaagaucgacgaccagauccaggacaucugggccuacaacgccgagcugcuggugcugcuggagaaccagaagacccuggacgagcacgacgccaacgugaacaaccuguacaacaaggugaagagagcccugggcagcaacgccguggaggacggcaagggcugcuucgagcuguaccacaagugcgacgaccagugcauggagaccaucagaaacggcaccuacaacagaagaagauaccaggaggagagcaagcuggagagacagaagaucgagggcgugaagcuggagagcgagggcaccuacaagauccugaccaucuacagcaccguggccagcagccuggugaucgccaugggcuucgccgccuuccuguucugggccaugagcaacggcagcugcagaugcaacaucugcaucuga

SEQ ID NO: 170332 - RNA, 1683 nt, Artificial Sequence
  derived and/or modified CDS sequence (opt4) from hemagglutinin__InfluenzaA__AGQ81092
auggagguggugagccugaucaccauccugcuggugaucaccggcagcaacgccgacaagaucugcaucggcuaccagagcaccaacagcaccgagaccguggacacccugaccgagaacaacgugcccgugacccacgccaaggagcugcugcacaccgagcacaacggcaugcugugcgccaccaaccugggcagaccccugauccuggacaccugcaccaucgagggccugaucuacggcaaccccagcugcgaccugcugcugggcggcagagaguggagcuacaucguggagagacccagcgccgugaacggccugugcuaccccggcaacguggagaaccuggaggagcugagaagccuguucagcagcgccagcagcuaccagagaauccagaucuuccccgacaccaucuggaacgugagcuacaccggcaccagcaaggccugcagcgacagcuucuacagaagcaugagauggcugacccagaagaacaacgccuaccccgugcaggacgcccaguacaccaacaacagaggcagaaacauccuguucauguggggcaucaaccacccccccaccgacaccacccagaccaaccuguacaccagaaccgacaccaccaccagcguggccaccgaggacaucaacagaaccuucaagccccugaucggccccagaccccuggugaacggccugcagggcagaaucgacuacuacugggccgugcugagacccggccagacccugagaaucagaagcaacggcaaccugaucgcccccugguacggccacauccugagcggcgagagccacggcagaauccugaagaccgaccugaagagcggcaacugcguggugcagugccagaccgagagaggcggccugaacaccacccugcccuuccacaacgugagcaaguacgccuucggcaacugccccaaguacgugggcgugaagagccugaagcuggccgugggccugagaaacgugcccgccagaagcagcagaggccuguucggcgccaucgccggcuucaucgagggcggcuggagcggccugguggccggcugguacggcuuccagcacagcaacgaccagggcaccggcauggccgccgacagagacagcacccagaaggccaucgacaagaucaccagcaaggugaacaacaucguggacaagaugaacaagcaguacgagaucaucgaccacgaguucagcgagaucgagaccagacugaacaugaucaacaacaagaucgacgaccagauccaggacaucugggccuacaacgccgagcugcuggugcugcuggagaaccagaagacccuggacgagcacgacgccaacgugaacaaccuguacaacaaggugaagagagcccugggcagcaacgccguggaggacggcaagggcugcuucgagcuguaccacaagugcgacaaccagugcauggagaccaucagaaacggcaccuacaacagaagaaaguacaaggaggagagcagacuggagagacagaagaucgagggcgugaagcuggagagcgagggcaccuacaagauccugaccaucuacagcaccguggccagcagccuggugaucgccaugggcuucgccgccuuccuguucugggccaugagcaacggcagcugcagaugcaacaucugcaucuga

SEQ ID NO: 170333 - RNA, 1683 nt, Artificial Sequence
  derived and/or modified CDS sequence (opt4) from hemagglutinin__InfluenzaA__AGQ81095
auggagguggugagccugaucaccauccugcuggugaucaccgugagcaacgccgacaagaucugcaucggcuaccagagcaccaacagcaccgagaccgugaacacccugaccgaggacaacgugcccgugacccacgccaaggagcugcugcacaccgagcacaacggcaugcugugcgccaccaaccugggcagaccccugauccuggacaccugcaccaucgagggccugaucuacggcaaccccagcugcgaccugcugcugggcggcagagaguggagcuacaucguggagagacccagcgccgugaacggccugugcuaccccggcaacguggagaaccuggaggagcugagaagccuguucagcagcgccagcagcuaccagagaauccagaucuuccccgacaccaucuggaacgugagcuacagcggcaccagcaaggccugcagcgacagcuucuacagaagcaugagauggcugacccagaagaacaacgccuaccccgugcaggacgcccaguacaccaacaacagaggcagaaacauccuguucauguggggcaucaaccacccccccaccgacaccgcccagaccaaccuguacaccagaaccgacaccaccaccagcguggccaccgaggacaucaacagaaccuucaagccccugaucggccccagaccccuggugaacggccugcagggcagaaucgacuacuacugggccgugcugaagcccggccagacccugagaaucagaagcaacggcaaccugaucgcccccugguacggccacauccugagcggcgagagccacggcagaauccugaagaccgaccugaacagcggcaacugcguggugcagugccagagcgagagaggcggccugaacaccacccugcccuuccacaacgugagcaaguacgccuucggcaacugccccaaguacgugggcgugaagagccugaagcuggccgugggccugagaaacgugcccgccagaagcagcagaggccuguucggcgccaucgccggcuucaucgagggcggcuggagcggccugguggccggcugguacggcuuccagcacagcaacgaccagggcaccggcauggccgccgacagagacagcacccagaaggccaucgacaagaucaccagcaaggugaacaacaucguggacaagaugaacaagcaguacgagaucaucgaccacgaguucagcgagaucgagaccagacugaacaugaucaacaacaagaucgacgaccagauccaggacaucugggccuacaacgccgagcugcuggugcugcuggagaaccagaagacccuggacgagcacgacgccaacgugaacaaccuguacaacaaggugaagagagcccugggcagcaacgccguggaggacggcaagggcugcuucgagcuguaccacaagugcgacaaccagugcauggagaccaucagaaacggcaccuacgacagaagaaaguacaaggaggagagcagacuggagagacagaagaucgagggcgugaagcuggagagcgagggcaccuacaagauccugaccaucuacagcaccguggccagcagccuggugaucgccaugggcuucgccgccuuccuguucugggccaugagcaacggcagcugcagaagaaacaucugcaucuga

SEQ ID NO: 170334 - RNA, 1683 nt, Artificial Sequence
  derived and/or modified CDS sequence (opt4) from hemagglutinin__InfluenzaA__AGQ81099
auggagaccgugagccugaucaccauccugcugaucgugaccgugagcaacgccgacaagaucugcaucggcuaccagagcaccaacagcaccgagaccguggacacccugaccgagaacaacgugcccgugacccacgccaaggagcugcugcacaccgagcacaacggcaugcugugcgccaccaaccugggccacccccugauccuggacaccugcaccaucgagggccugaucuacggcaaccccagcugcgaccugcugcugggcggcagagaguggagcuacaucguggagagacccagcgccgugaacggccugugcuaccccggcaacguggagaaccuggaggagcugagaagccuguucagcagcgccaacagcuaccagagaauccagaucuuccccgacaccaucuggaacgugagcuacagcggcaccagcaaggccugcagcgacagcuucuacagaagcaugagauggcugacccagaagaacaacgccuaccccacccaggacgcccaguacaccaacaacagagagaagaacauccuguucauguggggcaucaaccacccccccaccgacaccgcccagaccaaccuguacaccagaaccgacaccaccaccagcguggccaccgaggagaucaacagaaccuucaagccccugaucggccccagaccccuggugaacggccugcagggcagaaucgacuacuacuggagcgugcugaagcccggccagacccugagaaucagaagcaacggcaaccugaucgcccccugguacggccacauccugagcggcgagagccacggcagaauccugaagaccgaccugaagagaggcagcugcaccgugcagugccagaccgagaagggcggccugaacaccacccugcccuuccagaacgugagcaaguacgccuucggcaacugcagcaaguacgugggcgugaagagccugaagcuggccgugggccugagaaacgugcccagcagaagcagcagaggccuguucggcgccaucgccggcuucaucgagggcggcuggagcggccugguggccggcugguacggcuuccagcacagcaacgaccagggcgugggcauggccgccgacagagacagcacccagaaggccaucgacaaggugaccagcaaggugaacaacaucguggacaagaugaacaagcaguacgagaucaucgaccacgaguucagcgagguggagaccagacugaacaugaucaacaacaagaucgacgaccagauccaggacaucugggccuacaacgccgagcugcuggugcugcuggagaaccagaagacccuggacgagcacgacgccaacgugaacaaccuguacaacaaggugaagagagcccugggcagcaacgccguggaggacggcaagggcugcuucgagcuguaccacaagugcgacgaccagugcauggagaccaucagaaacggcaccuacaacagaagaaaguaccaggaggagagcaagcuggagagacagaagaucgagggcgugaagcuggagagcgagggcaccuacaagauccugaccaucuacagcaccguggccagcagccuggugaucgccaugggcuucgccgccuuccuguucugggccaugagcaacggcagcugcagaagaaacaucugcaucuga

SEQ ID NO: 170335 - RNA, 1683 nt, Artificial Sequence
  derived and/or modified CDS sequence (opt4) from hemagglutinin__InfluenzaA__AGQ81100
auggagaccgugagccugaucaccaugcugcugguggccaccgugaucaacgccgacaagaucugcaucggcuaccagagcaccaacagcaccgagaccguggacacccugaccgagaacaacgugcccgugacccacgccaaggagcugcugcacaccgagcacaacggcaugcugugcgccaccaaccugggccacccccugauccuggacaccugcaccaucgagggccugaucuacggcaaccccagcugcgaccugcugcugggcggcagagaguggagcuacaucguggagagacccagcgccgugaacggccugugcuaccccggcaacguggagaaccuggaggagcugagaagccuguucagcagcgccagcagcuaccagagaauccagaucuuccccgacaccaucuggaacgugagcuacagcggcaccagcaaggccugcagcgacagcuucuacagaagcaugagauggcugacccagaagaacaacgccuaccccauccaggacgcccaguacaccaacaacagagagaagaacauccuguucauguggggcaucaaccacccccccaccgacaccgcccagaccaaccuguacaccagaaccgacaccaccaccagcguggccaccgaggagaucaacagaaccuucaagccccugaucggccccagaccccuggugaacggccugcagggcagaaucgacuacuacuggagcgugcugaagcccggccagacccugagaaucagaagcaacggcaaccugaucgcccccugguacggccacauccugagcggcgagagccacggcagaauccugaagaccgaccugaagagaggcagcugcaccgugcagugccagaccgagaagggcggccugaacaccacccugcccuuccagaacgugagcaaguacgccuucggcaacugcagcaaguacgugggcgugaagagccugaagcuggccgugggccugagaaacgugcccagcagaagcagcagaggccuguucggcgccaucgccggcuucaucgagggcggcuggagcggccugguggccggcugguacggcuuccagcacagcaacgaccagggcgugggcauggccgccgacagagacagcacccagaaggccaucgacaagaucaccagcaaggugaacaacaucguggacaagaugaacaagcaguacgagaucaucgaccacgaguucagcgagguggagaccagacugaacaugaucaacaacaagaucgacgaccagauccaggacaucugggccuacaacgccgagcugcuggugcugcuggagaaccagaagacccuggacgagcacgacgccaacgugaacaaccuguacaacaaggugaagagagcccugggcagcaacgccguggaggacggcaagggcugcuucgagcuguaccacaagugcgacgaccagugcauggagaccaucagaaacggcaccuacaacagaagaagauaccaggaggagagcaagcuggagagacagaagaucgagggcgugaagcuggagagcgagggcaccuacaagauccugaccaucuacagcaccguggccagcagccuggugaucgccaugggcuucgccgccuuccuguucugggccaugagcaacggcagcugcagaagaaacaucugcaucuga

SEQ ID NO: 170336 - RNA, 1683 nt, Artificial Sequence
  derived and/or modified CDS sequence (opt4) from hemagglutinin__InfluenzaA__AGQ81123
auggagguggugagccugaucaccauccugcuggugaucaccgugagcaacgccgacaagaucugcaucggcuaccagagcaccaacagcaccgagaccgugaacacccugaccgaggacaacgugcccgugacccacgccaaggagcugcugcacaccgagcacaacggcaugcugugcgccaccaaccugggcagaccccugauccuggacaccugcaccaucgagggccugaucuacggcaaccccagcugcgaccugcugcugggcggcagagaguggagcuacaucguggagagacccagcgccgugaacggccugugcuaccccggcaacguggagaaccuggaggagcugagaagccuguucagcagcgccagcagcuaccagagaauccagaucuuccccgacaccaucuggaacgugagcuacagcggcaccagcaaggccugcagcgacagcuucuacagaagcaugagauggcugacccagaagaacaacgccuaccccgugcaggacgcccaguacaccaacaacaagggcagaaacauccuguucauguggggcaucaaccacccccccaccgacaccgcccagaccaaccuguacaccagaaccgacaccaccaccagcguggccaccgaggacaucaacagaaccuucaagccccugaucggccccagaccccuggugaacggccugcagggcagaaucgacuacuacugggccgugcugaagcccggccagacccugagaaucagaagcaacggcaaccugaucgcccccugguacggccacauccugcugggcgagagccacggcagaauccugaagaccgaccugaacagcggcgacugcguggugcagugccagagcgagagaggcggccugaacaccacccugcccuuccacaacgugagcaaguacgccuucggcaacugccccaaguacgugggcgugaagagccugaagcuggccgugggccugagaaacgugcccgccagaagcaccagaggccuguucggcgccaucgccggcuucaucgagggcggcuggagcggccugguggccggcugguacggcuuccagcacagcaacgaccagggcaccggcauggccgccgacagagacagcacccagaaggccaucgacaagaucaccagcaaggugaacaacaucguggacaagaugaacaagcaguacgagaucaucgaccacgaguucagcgagaucgagaccagacugaacaugaucaacaacaagaucgacgaccagauccaggacaucugggccuacaacgccgagcugcuggugcugcuggagaaccagaagacccuggacgagcacgacgccaacgugaacaaccuguacaacaaggugaagagagcccugggcagcaacgccguggaggacggcaagggcugcuucgagcuguaccacaagugcgacaaccagugcauggagaccaucagaaacggcaccuacgacagaagaaaguacaaggaggagagcagacuggagagacagaagaucgagggcgugaagcuggagagcgagggcaccuacaagauccugaccaucuacagcaccguggccagcagccuggugaucgccaugggcuucgccgccuuccuguucugggccaugagcaacggcagcugcagaugcaacaucugcaucuga

SEQ ID NO: 170337 - RNA, 1683 nt, Artificial Sequence
  derived and/or modified CDS sequence (opt4) from hemagglutinin__InfluenzaA__AGQ81124
auggagguggccacccugaucaccauccugcuggugaucaccggcagcaacgccgacaagaucugcaucggcuaccagagcaccaacagcaccgagaccguggacacccugaccgagaacaacgugcccgugacccacgccaaggagcugcugcacaccgagcacaacggcaugcugugcgccaccaaccugggcagaccccugauccuggacaccugcaccaucgagggccugaucuacggcaaccccagcugcgaccugccccuggagggcagagaguggagcuacaucguggagagacccagcgccgugaacggcgugugcuaccccggcaacguggagaaccuggaggagcugagaagccuguucagcagcgccagcagcuaccagagaauccagaucuuccccgacagcaucuggaacgugagcuacagcggcaccagcaaggccugcagcgacagcuucuacagaaacaugagauggcugacccagaaggacaacaacuaccccgugcaggacgcccaguacaccaacaacagaggcaagaacauccuguucauguggggcaucaaccacccccccaccgacaccgcccagaccaaccuguacaccagaaccgacaccaccaccagcguggccaccgaggacaucaacagaaccuucaagccccugaucggccccagaccccuggugaacggccugcagggcagaaucgacuacuacugggccgugcugaagcccggccagacccugagagugagaagcaacggcaaccugaucgcccccugguacggccacauccugcugggcgagagccacggcagaauccugaagaccgaccugaagagcggcaacugcguggugcagugccagaccgagagaggcggccugaacaccacccugcccuuccacaacgugagcaaguacgccuucggcaacugccccaaguacaucggcgugaagagccugaagcuggccgugggccugagaaacgugcccgccagaagcagcagaggccuguucggcgccaucgccggcuucaucgagggcggcuggagcggccugguggccggcugguacggcuuccagcacagcaacgaccagggcaccggcauggccgccgacagagacagcacccagaaggccaucgacaagaucaccagcaaggugaacaacaucguggacaagaugaacaagcaguacgagaucaucgaccacgaguucagcgagaucgagaccagacugaacaugaucaacgacaagaucgacgaccagauccaggacaucugggccuacaacgccgagcugcuggugcugcuggagaaccagaagacccuggacgagcacgacgccaacgugaacaaccuguacaacaaggugaagagagcccugggcagcaacgccguggaggacggcaagggcugcuucgaccuguaccacaagugcgacaaccagugcauggagaccaucagaaacggcaccuacaacagaagaaaguaccagaaggagagcagacuggagagacagaagaucgagggcgugaagcuggagagcgagggcaccuacaagauccugaccaucuacagcaccguggccagcagccuggugaucgccaugggcuucgccgccuuccuguucugggccaugagcaacggcagcugcagaugcaacaucugcaucuga

SEQ ID NO: 170338 - RNA, 1683 nt, Artificial Sequence
  derived and/or modified CDS sequence (opt4) from hemagglutinin__InfluenzaA__AGQ81125
auggagguggccacccugaucaccauccugcuggugaucaccggcagcaacgccgacaagaucugcaucggcuaccagagcaccaacagcaccgagaccguggacacccugaccgagaacaacgugcccgugacccacgccaaggagcugcugcacaccgagcacaacggcaugcugugcgccaccaaccugggcagaccccugauccuggacaccugcaccaucgagggccugaucuacggcaaccccagcugcgaccugccccuggagggcagagaguggagcuacaucguggagagacccagcgccgugaacggcgugugcuaccccggcaacguggagaaccuggaggagcugagaagccuguucagcagcgccagcagcuaccagagaauccagaucuuccccgacagcaucuggaacgugagcuacagcggcaccagcaaggccugcagcgacagcuucuacagaagcaugagauggcugacccagaaggacaacaacuaccccgugcaggacgcccaguacaccaacaacagaggcaagaacauccuguucauguggggcaucaaccacccccccaccgacaccgcccagaccaaccuguacaccagaaccgacaccaccaccagcguggccaccgaggacaucaacagaaccuucaagccccugaucggccccagaccccuggugaacggccugcagggcagaaucgacuacuacugggccgugcugaagcccggccagacccugagagugagaagcaacggcaaccugaucgcccccugguacggccacauccugcugggcgugagccacggcagaauccugaagaccgaccugaagagcggcaacugcguggugcagugccagaccgagagaggcggccugaacaccacccugcccuuccacaacgugagcaaguacgccuucggcaacugccccaaguacaucggcgugaagagccugaagcuggccgugggccugagaaacgugcccgccagaagcagcagaggccuguucggcgccaucgccggcuucaucgagggcggcuggagcggccugguggccggcugguacggcuuccagcacagcaacgaccagggcaccggcauggccgccgacagagacagcacccagaaggccaucgacaagaucaccagcaaggugaacaacaucguggacaagaugaacaagcaguacgagaucaucgaccacgaguucagcgagaucgagaccagacugaacaugaucaacgacaagaucgacgaccagauccaggacaucugggccuacaacgccgagcugcuggugcugcuggagaaccagaagacccuggacgagcacgacgccaacgugaacaaccuguacaacaaggugaagagagcccugggcagcaacgccguggaggacggcaagggcugcuucgaccuguaccacaagugcgacaaccagugcauggagaccaucagaaacggcaccuacaacagaagaaaguaccaggaggagagcagacuggagagacagaagaucgagggcgugaagcuggagagcgagggcaccuacaagauccugaccaucuacagcaccguggccagcagccuggugaucgccaugggcuucgccgccuuccuguucugggccaugagcaacggcagcugcagaugcaacaucugcaucuga

SEQ ID NO: 170339 - RNA, 1683 nt, Artificial Sequence
  derived and/or modified CDS sequence (opt4) from hemagglutinin__InfluenzaA__AGQ81126
auggagaccaucagccugaugaccauccugcugaucaccaccgccagcaacgccgacaagaucugcaucggccaccagagcaccaacagcaccgagaccguggacacccugaccgagaccaacgugcccgugacccacgccaaggagcugcugcagaccgagcacaacggcaugcugugcgccaccaaccugggccacccccugauccuggacaccugcaccaucgagggccugaucuacggcaaccccagcugcgaccugcugcuggagggcagagaguggagcuacaucguggagagacccagcgccgugaacggcaccugcuaccccggcaacguggagaaccuggaggagcugagaacccuguucagcagcgccagcagcuaccagagaauccagaucuuccccgacaccaucuggaacgugaccuacaccggcaccagcagaagcugcagcggcagcuucuacagaagcaugagauggcugacccagaagagcggcuucuaccccgugcaggacgccaaguacaccaacaacagaggcaagaacauccuguucguguggggcauccaccacccccacaccuacaccgaccagaccacccuguacaucagaaacgacaccaccaccagcgugaccaccgaggagcugaacagaaucuucaagcccgugaucgugcccagacugcuggugaacggccagcagggcagaaucgacuacuacuggagcgugcugaagcccggccagacccugagagugagaagcaacggcaaccugaucgcccccugguacggccacgugcugagcggcggcagccacggcagaauccugaagaccgaccugaagggcggcaacugcguggugcagugccagaccgagaagggcggcuucaacagcacccugcccuuccacaacaucagcaaguacgccuucggcaccugccccaaguacgugaaggugaacagccugaagcuggccaucggccugagaaacgugcccgccagaagcaacagaggccuguucggcgccaucgccggcuucaucgagggcggcuggcccggccugguggccggcugguacggcuuccagcacagcaacgaccagggcgugggcauggccgccgacagagacagcacccagaaggccguggacaagaucaccagcaaggugaacaacaucguggacaagaugaacaagcaguacgagaucaucgaccacgaguucagcgagguggagaccagacugaacaugaucaacaacaagaucgacgaccagauccaggacaucugggccuacaacgccgagcugcuggugcugcuggagaaccagaagacccuggacgagcacgacgccaacgugaacaaccuguacaacaaggugaagagagcccugggcagcaacgccauggaggacggcaagggcugcuucgagcuguaccacaagugcgacgaccagugcauggagaccaucagaaacggcaccuacaacagaagaaaguacagagaggagagcagacuggagcagcagagaaucgagggcgugaagcuggagagcgagggcaccuacaagauccugaccaucuacagcaccguggccagcagccuggugcuggccaugggcuucgccgccuuccuguucugggccaugagcaacggcagcugcagaugcaacaucugcaucuga

SEQ ID NO: 170340 - RNA, 1683 nt, Artificial Sequence
  derived and/or modified CDS sequence (opt4) from hemagglutinin__InfluenzaA__AGQ81127
auggagguggccacccugaucaccauccugcugcugaucaccggcagcaacgccgacaagaucugcaucggcuaccagagcaccaacagcaccgagaccguggacacccugaccgagaacaacgugcccgugacccacgccaaggagcugcugcacaccgagcacaacggcaugcugugcgccaccaaccugggcagaccccugauccuggacaccugcaccaucgagggccugaucuacggcaaccccagcugcgaccugccccuggagggcagagaguggagcuacaucguggagagacccagcgccgugaacggcgugugcuaccccggcaacguggagaaccuggaggagcugagaagccuguucagcagcgccagcagcuaccagagaauccagaucuuccccgacagcaucuggaacgugagcuacagcggcaccagcaaggccugcagcgacagcuucuacagaagcaugagauggcugacccagaagaacaacaacuaccccgugcaggacgcccaguacaccaacaacagaggcaagaacauccuguucauguggggcaucaaccacccccccaccgacaccgcccagaccaaccuguacaccagaaccgacaccaccaccagcguggccaccgaggacaucaacagaaccuucaagccccugaucggccccagaccccuggugaacggccugcagggcagaaucgacuacuacugggccgugcugaagcccggccagacccugagagugagaagcaacggcaaccugaucgcccccugguacggccacauccugcugggcgagagccacggcagaauccugaagaccgaccugaagagcggcaacugcguggugcagugccagaccgagagaggcggccugaacaccacccugcccuuccacaacgugagcaaguacgccuucggcaacugccccaaguacaucggcgugaagagccugaagcuggccgugggccugagaaacgugcccgccagaagcagcagaggccuguucggcgccaucgccggcuucaucgagggcggcuggagcggccugguggccggcugguacggcuuccagcacagcaacgaccagggcaccggcauggccgccgacagagacagcacccagaaggccaucgacaagaucaccagcaaggugaacaacaucguggacaagaugaacaagcaguacgagaucaucgaccacgaguucagcgagaucgagaccagacugaacaugaucaacgacaagaucgacgaccagauccaggacaucugggccuacaacgccgagcugcuggugcugcuggagaaccagaagacccuggacgagcacgacgccaacgugaacaaccuguacaacaaggugaagagagcccugggcagcaacgccguggaggacggcaagggcugcuucgaccuguaccacaagugcgacaaccagugcauggagaccaucagaaacggcaccuacaacagaagaaaguaccaggaggagagcagacuggagagacagaagaucgagggcgugaagcuggagagcgagggcaccuacaagauccugaccaucuacagcaccguggccagcagccuggugaucgccaugggcuucgccgccuuccuguucugggccaugagcaacggcagcugcagaugcaacaucugcaucuga

SEQ ID NO: 170341 - RNA, 1683 nt, Artificial Sequence
  derived and/or modified CDS sequence (opt4) from hemagglutinin__InfluenzaA__AGQ81128
auggaggccgccaccaucaucaccauccugcuggugaucaccggcagcaacgccgacaagaucugcaucggcuaccagagcaccaacagcaccgagaccguggacacccugaccgagaacaacgugcccgugacccacgccaaggagcugcugcacaccgagcacaacggcaugcugugcgccaccaaccugggcagaccccugauccuggacaccugcaccaucgagggccugaucuacggcaaccccagcugcgaccugccccuggagggcagagaguggagcuacaucguggagagacccagcgccgugaacggcgugugcuaccccggcaacguggagaaccuggaggagcugagaagccuguucagcagcgccagcagcuaccagagaauccagaucuuccccgacagcaucuggaacgugagcuacagcggcaccagcaaggccugcagcgacagcuucuacagaagcaugagauggcugacccagaagaacaacaacuaccccgugcaggacgcccaguacaccaacaacagaggcaagaacauccuguucauguggggcaucaaccacccccccaccgacaccgcccagaccaaccuguacaccagaaccgacaccaccaccagcguggccaccgaggacaucaacagaaccuucaagccccugaucggccccagaccccuggugaacggccugcagggcagaaucgacuacuacugggccgugcugaagcccggccagacccugagagugagaagcaacggcaaccugaucgcccccugguacggccacauccugcugggcgagagccacggcagaauccugaagaccgaccugaagagcggcaacugcguggugcagugccagaccgagagaggcggccugaacaccacccugcccuuccacaacgugagcaaguacgccuucggcaacugccccaaguacaucggcgugaagagccugaagcuggccgugggccugagaaacgugcccgccagaagcagcagaggccuguucggcgccaucgccggcuucaucgagggcggcuggagcggccugguggccggcugguacggcuuccagcacagcaacgaccagggcaccggcauggccgccgacagagacagcacccagaaggccaucgacaagaucaccagcaaggugaacaacaucguggacaagaugaacaagcaguacgacaucaucgaccacgaguucagcgagaucgagaccagacugaacaugaucaacgacaagaucgacgaccagauccaggacaucugggccuacaacgccgagcugcuggugcugcuggagaaccagaagacccuggacgagcacgacgccaacgugaacaaccuguacaacaaggugaagagagcccugggcagcaacgccguggaggacggcaagggcugcuucgaccuguaccacaagugcgacaaccagugcauggagaccaucagaaacggcaccuacaacagaagaaaguaccaggaggagagcagacuggagagacagaagaucgagggcgugaagcuggagagcgagggcaccuacaagauccugaccaucuacagcaccguggccagcagccuggugguggccaugggcuucgccgccuuccuguucugggccaugagcaacggcagcugcagaugcaacaucugcaucuga

SEQ ID NO: 170342 - RNA, 1683 nt, Artificial Sequence
  derived and/or modified CDS sequence (opt4) from hemagglutinin__InfluenzaA__AGQ81130
auggagaccgugagccugaucaccauccugcugguggugaccaucggcaacgccgacaagaucugcaucggcuaccagagcaccaacagcaccgagaccguggacacccugaccgagaacaacgugcccgugacccacgccaaggagcugcugcacaccgagcacaacggcaugcugugcgccaccagccugggccacccccugauccuggacaccugcaccaucgagggccugaucuacggcaaccccagcugcgaccugcugcugggcggcagagaguggagcuacaucguggagagacccagcgccgugaacggccugugcuaccccggcaacguggagaaccuggaggagcugagaagccuguucagcagcgccagaagcuaccagagaauccagaucuuccccgacaccaucuggaacgugagcuacagcggcaccagcaaggccugcagcgacagcuucuacagaagcaugagauggcugacccagaagaacaacgccuaccccauccaggacgcccaguacaccaacaaccaggagaagaacauccuguucauguggggcaucaaccacccccccaccgacaccgugcagaccaaccuguacaccagaaccgacaccaccaccagcguggccaccgaggagaucaacagaaccuucaagccccugaucggccccagaccccuggugaacggccugcagggcagaaucgacuacuacuggagcgugcugaagcccggccagacccugagaaucagaagcaacggcaaccugaucgcccccugguacggccacauccugagcggcgagagccacggcagaauccugaagaccgaccugaagagaggcagcugcaccgugcagugccagaccgagaagggcggccugaacaccacccugcccuuccagaacgugagcaaguacgccuucggcaacugcagcaaguacaucggcaugaagagccugaagcuggccgugggccugagaaacgugcccagcagaagcagcagaggccuguucggcgccaucgccggcuucaucgagggcggcuggagcggccugguggccggcugguacggcuuccagcacagcaacgaccagggcgugggcauggccgccgacagagacagcacccagaaggccaucgacaagaucaccagcaaggugaacaacaucguggacaagaugaacaagcaguacgagaucaucgaccacgaguucagcgagguggagaccagacugaacaugaucaacaacaagaucgacgaccagauccaggacaucugggccuacaacgccgagcugcuggugcugcuggagaaccagaagacccuggacgagcacgacgccaacgugaacaaccuguacaacaaggugaagagagcccugggcuucaacgccguggaggacggcaagggcugcuucgagcuguaccacaagugcgacgaccagugcauggagaccaucagaaacggcaccuacaacagaagaaaguaccaggaggagagcaagcuggagagacagaagaucgagggcgugaagcuggagagcgagggcaccuacaagauccugaccaucuacagcaccguggccagcagccuggugaucgccaugggcuucgccgccuuccuguucugggccaugagcaacggcagcugcagaugcaacaucugcaucuga

SEQ ID NO: 170343 - RNA, 1683 nt, Artificial Sequence
  derived and/or modified CDS sequence (opt4) from hemagglutinin__InfluenzaA__AGQ81132
auggagaccaucagccugaugaccauccugcugaucaccaccgccagcaacgccgacaagaucugcaucggccaccagagcaccaacagcaccgagaccguggacacccugaccgagaccaacgugcccgugacccacgccaaggagcugcugcagaccgagcacaacggcaugcugugcgccaccaaccugggccacccccugauccuggacaccugcaccaucgagggccugaucuacggcaaccccagcugcgaccugcugcuggagggcagagaguggagcuacaucguggagagacccagcgccgugaacggcaccugcuaccccggcaacguggagaaccuggaggagcugagaacccuguucagcagcgccagcagcuaccagagaauccagaucuuccccgacaccaucuggaacgugaccuacaccggcaccagcagaagcugcagcggcagcuucuacagaagcaugagauggcugacccagaagagcggcuucuaccccgugcaggacgccaaguacaccaacaacagaggcaagaacauccuguucguguggggcauccaccacccccacaccuacaccgaccagaccacccuguacaucagaaacgacaccaccaccagcgugaccaccgaggagcugaacagaaucuucaagcccgugaucgugcccagacugcuggugaacggccagcagggcagaaucgacuacuacuggagcgugcugaagcccggccagacccugagagugagaagcaacggcaaccugaucgcccccugguacggccacgugcugagcggcggcagccacggcagaauccugaagaccgaccugaagggcggcaacugcguggugcagugccagaccgagaagggcggcuucaacagcacccugcccuuccacaacaucagcaaguacgccuucggcaccugccccaaguacgugaaggugaacagccugaagcuggccaucggccugagaaacgugcccgccagaagcaacagaggccuguucggcgccaucgccggcuucaucgagggcggcuggcccggccugguggccggcugguacggcuuccagcacagcaacgaccagggcgugggcauggccgccgacagagacagcacccagaaggccguggacaagaucaccagcaaggugaacaacaucguggacaagaugaacagacaguacgagaucaucgaccacgaguucagcgagguggagaccagacugaacaugaucaacaacaagaucgacgaccagauccaggacaucugggccuacaacgccgagcugcuggugcugcuggagaaccagaagacccuggacgagcacgacgccaacgugaacaaccuguacaacaaggugaagagagcccugggcagcaacgccauggaggacggcaagggcugcuucgagcuguaccacaagugcgacgaccagugcauggagaccaucagaaacggcaccuacaacagaagaaaguacagagaggagagcagacuggagcagcagagaaucgagggcgugaagcuggagagcgagggcaccuacaagauccugaccaucuacagcaccguggccagcagccuggugcuggccaugggcuucgccgccuuccuguucugggccaugagcaacggcagcugcagaugcaacaucugcaucuga

SEQ ID NO: 170344 - RNA, 1683 nt, Artificial Sequence
  derived and/or modified CDS sequence (opt4) from hemagglutinin__InfluenzaA__AGQ81133
auggagaccaucagccugaugaccauccugcugaucaccaccgccagcaacgccgacaagaucugcaucggccaccagagcaccaacagcaccgagaccguggacacccugaccgagaccaacgugcccgugacccacgccaaggagcugcugcagaccgagcacaacggcaugcugugcgccaccaaccugggccacccccugauccuggacaccugcaccaucgagggccugaucuacggcaaccccagcugcgaccugcugcuggagggcagagaguggagcuacaucguggagagacccagcgccgugaacggcaccugcuaccccggcaacguggagaaccuggaggagcugagaacccuguucagcagcgccagcagcuaccagagaauccagaucuuccccgacaccaucuggaacgugaccuacaccggcaccagcagaagcugcagcggcagcuucuacagaagcaugagauggcugacccagaagagcggcuucuaccccgugcaggacgccaaguacaccaacaacagaggcaagaacauccuguucguguggggcauccaccacccccacaccuacaccgaccagaccacccuguacaucagaaacgacaccaccaccagcgugaccaccgaggagcugaacagaaucuucaagcccgugaucgugcccagacugcuggugaacggccagcagggcagaaucgacuacuacuggagcgugcugaagcccggccagacccugagagugagaagcaacggcaaccugaucgcccccugguacggccacauccugagcggcggcagccacggcagaauccugaagaccgaccugaagagcggcaacugcguggugcagugccagaccgagaagggcggcuucaacagcacccugcccuuccacaacaucagcaaguacgccuucggcaccugccccaaguacgugaaggugaacagccugaagcuggccaucggccugagaaacgugcccgccagaagcaacagaggccuguucggcgccaucgccggcuucaucgagggcggcuggcccggccugguggccggcugguacggcuuccagcacagcaacgaccagggcgugggcauggccgccgacagagacagcacccagaaggccguggacaagaucaccagcaaggugaacaacaucguggacaagaugaacaagcaguacgagaucaucgaccacgaguucagcgagguggagaccagacugaacaugaucaacaacaagaucgacgaccagauccaggacaucugggccuacaacgccgagcugcuggugcugcuggagaaccagaagacccuggacgagcacgacgccaacgugaacaaccuguacaacaaggugaagagagcccugggcagcaacgccauggaggacggcaagggcugcuucgagcuguaccacaagugcgacgaccagugcauggagaccaucagaaacggcaccuacaacagaagaaaguacagagaggagagcagacuggagcagcagagaaucgagggcgugaagcuggagagcgagggcaccuacaagauccugaccaucuacagcaccguggccagcagccuggugcuggccaugggcuucgccgccuuccuguucugggccaugagcaacggcagcugcagaugcaacaucugcaucuga

SEQ ID NO: 170345 - RNA, 1683 nt, Artificial Sequence
  derived and/or modified CDS sequence (opt4) from hemagglutinin__InfluenzaA__AGQ81134
auggagaccaucagccugaugaccauccugcugaucaccaccgccagcaacgccgacaagaucugcaucggccaccagagcaccaacagcaccgagaccguggacacccugaccgagaccaacgugcccgugacccacgccaaggagcugcugcagaccgagcacaacggcaugcugugcgccaccaaccugggccacccccugauccuggacaccugcaccaucgagggccugaucuacggcaaccccagcugcgaccugcugcuggagggcagagaguggagcuacaucguggagagacccagcgccgccaacggcaccugcuaccccggcaacguggagaaccccgaggagcugagaacccuguucagcagcgccagcagcuaccagagaauccagaucuuccccgacaccaucuggaacgugaccuacaccggcaccagcagaagcugcagcggcagcuucuacagaagcaugagauggcugacccagaagagcggcuucuaccccgugcaggacgccaaguacaccaacaacagaggcaagaacauccuguucguguggggcauccaccacccccacaccuacaccgaccagaccacccuguacaucagaaacgacaccaccaccagcgugaccaccgaggagcugaacagaaucuucaagcccgugaucgugcccagacugcuggugaacggccagcagggcagaaucgacuacuacuggagcgugcugaagcccggccagacccugagagugagaagcaacggcaaccugaucgcccccugguacggccacgugcugagcggcggcagccacggcagaauccugaagaccgaccugaagagcggcaacugcguggugcagugccagaccgagaagggcggcuucaacagcacccugcccuuccacaacaucagcaaguacgccuucggcaccugccccaaguacgugaaggugaacagccugaagcuggccaucggccugagaaacgugcccgccagaagcaacagaggccuguucggcgccaucgccggcuucaucgagggcggcuggcccggccugguggccggcugguacggcuuccagcacagcaacgaccagggcgugggcauggccgccgacagagacagcacccagaaggccguggacaagaucaccagcaaggugaacaacaucguggacaagaugaacaagcaguacgagaucaucgaccacgaguucagcgagguggagaccagacugaacaugaucaacaacaagaucgacgaccagauccaggacaucugggccuacaacgccgagcugcuggugcugcuggagaaccagaagacccuggacgagcacgacgccaacgugaacaaccuguacaacaaggugaagagagcccugggcagcaacgccauggaggacggcaagggcugcuucgagcuguaccacaagugcgacgaccagugcauggagaccaucagaaacggcaccuacaacagaagaaaguacagagaggagagcagacuggagcagcagagaaucgagggcgugaagcuggagagcgagggcaccuacaagauccugaccaucuacagcaccguggccagcagccuggugcuggccaugggcuucgccgccuuccuguucugggccaugagcaacggcagcugcagaugcaacaucugcaucuga

SEQ ID NO: 170346 - RNA, 1683 nt, Artificial Sequence
  derived and/or modified CDS sequence (opt4) from hemagglutinin__InfluenzaA__AGQ81135
auggagguggccaccaucaucaccauccugcuggugaucaccggcagcaacgccgacaagaucugcaucggcuaccagagcaccaacagcaccgagaccguggacacccugaccgagaacaacgugcccgugacccacgccaaggagcugcugcacaccgagcacaacggcaugcugugcgccaccaaccugggcagaccccugauccuggacaccugcaccaucgagggccugaucuacggcaaccccagcugcgaccugccccuggagggcagagaguggagcuacaucguggagagacccagcgccgugaacggcgugugcuaccccggcaacguggagaaccuggaggagcugagaagccuguucagcagcgccagcagcuaccagagaauccagaucuuccccgacagcaucuggaacgugagcuacagcggcaccagcaaggccugcagcgacagcuucuacagaagcaugagauggcugacccagaagaacaacaacuaccccgugcaggacgcccaguacaccaacaacagaggcaagaacauccuguucauguggggcaucaaccacccccccaccgacaacgcccagaccaaccuguacaccagaaccgacaccaccaccagcguggccaccgaggacaucaacagaaccuucaagccccugaucggccccagaccccuggugaacggccugcagggcagaaucgacuacuacugggccgugcugaagcccggccagacccugagagugagaagcaacggcaaccugaucgcccccugguacggccacauccugcugggcgagagccacggcagaauccugaagaccgaccugaagagcggcaacugcguggugcagugccagaccgagagaggcggccugaacaccacccugcccuuccacaacgugagcaaguacagcuucggcaacugccccaaguacaucggcgugaagagccugaagcuggccgugggccugagaaacgugcccgccagaagcagcagaggccuguucggcgccaucgccggcuucaucgagggcggcuggagcggccugguggccggcugguacggcuuccagcacagcaacgaccagggcaccggcauggccgccgacagagacagcacccagaaggccaucgacaagaucaccagcaaggugaacaacaucguggacaagaugaacaagcaguacgagaucaucgaccacgaguucaacgagaucgagaccagacugaacaugaucaacaacaagaucgacgaccagauccaggacaucugggccuacaacgccgagcugcuggugcugcuggagaaccagaagacccuggacgagcacgacgccaacgugaacaaccuguacaacaaggugaagagagcccugggcagcaacgccguggaggacggcaagggcugcuucgaccuguaccacaagugcgacaaccagugcauggagaccaucagaaacggcaccuacaacagaagaaaguaccaggaggagagcagacuggagagacagaagaucgagggcgugaagcuggagagcgagggcaccuacaagauccugaccaucuacagcaccguggccagcagccuggugaucgccaugggcuucgccgccuuccuguucugggccaugagcaacggcagcugcagaugcaacaucugcaucuga

SEQ ID NO: 170347 - RNA, 1683 nt, Artificial Sequence
  derived and/or modified CDS sequence (opt4) from hemagglutinin__InfluenzaA__AGQ81136
auggagaccaucagccugaugaccauccugcugaucaccaccgccagcaacgccgacaagaucugcaucggccaccagagcaccaacagcaccgagaccguggacacccugaccgagaccaacgugcccgugacccacgccaaggagcugcugcagaccgagcacaacggcaugcugugcgccaccaaccugggccacccccugauccuggacaccugcaccaucgagggccugaucuacggcaaccccagcugcgaccugcugcuggagggcagagaguggagcuacaucguggagagacccagcgccgugaacggcaccugcuaccccggcaacguggagaaccuggaggagcugagaacccuguucagcagcgccagcagcuaccagagaauccagaucuuccccgacaccaucuggaacgugaccuacaccggcaccagcagaagcugcagcggcagcuucuacagaagcaugagauggcugacccagaagagcggcuucuaccccgugcaggacgccaaguacaccaacaacagaggcaagaacauccuguucguguggggcauccaccacccccacaccuacaccgaccagaccacccuguacaucagaaacgacaccaccaccagcgugaccaccgaggagcugaacagaaucuucaagcccgugaucgugcccagacugcuggugaacggccagcagggcagaaucgacuacuacuggagcgugcugaagcccggccagacccugagagugagaagcaacggcaaccugaucgcccccugguacggccacgugcugagcggcggcagccacggcagaauccugaagaccgaccugaagggcggcaacugcguggugcagugccagaccgagaagggcggcuucaacagcacccugcccuuccacaacaucagcaaguacgccuucggcaccugccccaaguacgugaaggugaacagccugaagcuggccaucggccugagaaacgugcccgccagaagcaacagaggccuguucggcgccaucgccggcuucaucgagggcggcuggcccggccugguggccggcugguacggcuuccagcacagcaacgaccagggcgugggcauggccgccgacagagacagcacccagaaggccguggacaagaucaccagcaaggugaacaacaucguggacaagaugaacagacaguacgagaucaucgaccacgaguucagcgagguggagaccagacugaacaugaucaacaacaagaucgacgaccagauccaggacaucuggaccuacaacgccgagcugcuggugcugcuggagaaccagaagacccuggacgagcacgacgccaacgugaacaaccuguacaacaaggugaagagagcccugggcagcaacgccauggaggacggcaagggcugcuucgagcuguaccacaagugcgacgaccagugcauggagaccaucagaaacggcaccuacaacagaagaaaguacagagaggagagcagacuggagcagcagagaaucgagggcgugaagcuggagagcgagggcaccuacaagauccugaccaucuacagcaccguggccagcagccuggugcuggccaugggcuucgccgccuuccuguucugggccaugagcaacggcagcugcagaugcaacaucugcaucuga

SEQ ID NO: 170348 - RNA, 1683 nt, Artificial Sequence; identical to SEQ ID NO: 170343
  derived and/or modified CDS sequence (opt4) from hemagglutinin__InfluenzaA__AGQ81137

SEQ ID NO: 170349 - RNA, 1683 nt, Artificial Sequence
  derived and/or modified CDS sequence (opt4) from hemagglutinin__InfluenzaA__AGQ81138
auggaggccgccaccaucaucaccauccugcuggccaucaccggcagcaacgccgacaagaucugcaucggcuaccagagcaccaacagcaccgagaccguggacacccugaccgagaacaacgugcccgugacccacgccaaggagcugcugcacaccgagcacaacggcaugcugugcgccaccaaccugggcagaccccugauccuggacaccugcaccaucgagggccugaucuacggcaaccccagcugcgaccugccccuggagggcagagaguggagcuacaucguggagagacccagcgccgugaacggcgugugcuaccccggccacguggagaaccuggaggagcugagaagccuguucagcagcgccagcagcuaccagagagugcagaucuuccccgacagcaucuggaacgugagcuacagcggcaccagcaaggccugcagcgacagcuucuacagaagcaugagauggcugacccagaagaacaacaacuaccccgugcaggacgcccaguacaccaacaacaagggcaagaacauccuguucauguggggcaucaaccacccccccaccgacaccgcccagaccaaccuguacaccagaaccgacaccaccaccagcguggccaccgaggacaucaacagaaccuucaagccccugaucggccccagaccccuggugaacggccugcagggcagaaucgacuacuacugggccgugcugaagcccggccagacccugagagugagaagcaacggcaaccugaucgcccccugguacggccacauccugcugggcgagagccacggcagaauccugaagaccgaccugaagagcggcaacugcguggugcagugccagaccgagagaggcggccugaacaccacccugcccuuccacaacgugagcaaguacgccuucggcaacugccccaaguacaucggcgugaagagccugaagcuggccgugggccugagaaacgugcacgccagaagcagcagaggccuguucggcgccaucgccggcuucaucgagggcggcuggagcggccugguggccggcugguacggcuuccagcacagcaacgaccagggcaccggcauggccgccgacagagacagcacccagaaggccaucgacaagaucaccagcaaggugaacaacaucguggacaagaugaacaagcaguacgagaucaucgaccacgaguucagcgagaucgagaccagacugaacaugaucaacgacaagaucgacgaccagauccaggacaucugggccuacaacgccgagcugcuggugcugcuggagaaccagaagacccuggacgagcacgacgccaacgugaacaaccuguacaacaaggugaagagagcccugggcagcaacgccguggaggacggcaagggcugcuucgaccuguaccacaagugcgacaaccagugcauggagaccaucagaaacggcaccuacaacagaagaaaguaccaggaggagagcagacuggagagacagaagaucgagggcgugaagcuggagagcgagggcaccuacaagauccugaccaucuacagcaccguggccagcagccuggugaucgccaugggcuucgccgccuuccuguucugggccaugagcaacggcagcugcagaugcaacaucugcaucuga

SEQ ID NO: 170350 - RNA, 1683 nt, Artificial Sequence
  derived and/or modified CDS sequence (opt4) from hemagglutinin__InfluenzaA__AGQ81139
auggagguggccaccaucaucaccauccugcuggugaucaccggcggcaacgccgacaagaucugcaucggcuaccagagcaccaacagcaccgagaccguggacacccugaccgagaacaacgugcccgugacccacgccaaggagcugcugcacaccgagcacaacggcaugcugugcgccaccaaccugggcagaccccugauccuggacaccugcaccaucgagggccugaucuacggcaaccccagcugcgaccugccccuggagggcagagaguggagcuacaucguggagagaagcagcgccgugaacggcgugugcuaccccggcaacguggagaaccuggaggagcugagaagccuguucagcagcgccagcagcuaccagagaauccagaucuuccccgacagcaucuggaacgugagcuacagcggcaccagcaaggccugcagcgacagcuucuacagaagcaugagauggcugacccagaagaacaacaacuaccccgugcaggacgcccaguacaccaacaacagaggcaagaacauccuguucauguggggcaucaaccacccccccaccgacaacgcccagaccaaccuguacaccagaaccgacaccaccaccagcguggccaccgaggacaucaacagaaccuucaagccccugaucggccccagaccccuggugaacggccugcagggcagaaucgacuacuacugggccgugcugaagcccggccagacccugagagugagaagcaacggcaaccugaucgcccccugguacggccacauccugcugggcgagagccacggcagaauccugaagaccgaccugaagagcggcaacugcguggugcagugccagaccgagagaggcggccugaacaccacccugcccuuccacaacgugagcaaguacagcuucggcaacugccccaaguacaucggcgugaagagccugaagcuggccgugggccugagaaacgugcccgccagaagcagcagaggccuguucggcgccaucgccggcuucaucgagggcggcuggagcggccugguggccggcugguacggcuuccagcacagcaacgaccagggcaccggcauggccgccgacagagacagcacccagaaggccaucgacaagaucaccagcaaggugaacaacaucguggacaagaugaacaagcaguacgagaucaucgaccacgaguucagcgagaucgagaccagacugaacaugaucaacaacaagaucgacgaccagauccaggacaucugggccuacaacgccgagcugcuggugcugcuggagaaccagaagacccuggacgagcacgacgccaacgugaacaaccuguacaacaaggugaagagagcccugggcagcaacgccguggaggacggcaagggcugcuucgaccuguaccacaagugcgacaaccagugcauggagaccaucagaaacggcaccuacaacagaagaaaguaccaggaggagagcagacuggagagacagaagaucgagggcgugaagcuggagagcgagggcaccuacaagauccugaccaucuacagcaccguggccagcagccuggugaucgccaugggcuucgccgccuuccuguucugggccaugagcaacggcagcugcagaugcaacaucugcaucuga

SEQ ID NO: 170351 - RNA, 1683 nt, Artificial Sequence
  derived and/or modified CDS sequence (opt4) from hemagglutinin__InfluenzaA__AGQ81141
auggaggccgccaccaucaucaccauccugcuggugaucaccggcagcaacgccgacaagaucugcaucggcuaccagagcaccaacagcaccgagaccguggacacccugaccgagaacaacgugcccgugacccacgccaaggagcugcugcacaccgagcacaacggcaugcugugcgccaccgaccugggcagaccccugauccuggacaccugcaccaucgagggccugaucuacggcaaccccagcugcgaccugccccuggagggcagagaguggagcuacaucguggagagacccagcgccgugaacggcgugugcuaccccggcaacguggagaaccuggaggagcugagaagccuguucagcagcgccagcagcuaccagagaauccagaucuuccccgacagcaucuggaacgugagcuacagcggcaccagcaaggccugcagcgacagcuucuacagaagcaugagauggcugacccagaagaacaacaacuaccccgugcaggacgcccaguacaccaacaacagaggcaagaacauccuguucauguggggcaucaaccacccccccaccgacaccgcccagaccaaccuguacaccagaaccgacaccaccaccagcguggccaccgaggacaucaacagaaccuucaagccccugaucggccccagaccccuggugaacggccugcagggcagaaucgacuacuacugggccgugcugaagcccggccagacccugagagugagaagcaacggcaaccugaucgcccccugguacggccacauccugcugggcgagagccacggcagaauccugaagaccgaccugaagagcggcaacugcguggugcagugccagaccgagagaggcggccugaacaccacccugcccuuccacaacgugagcaaguacgccuucggcaacugccccaaguacaucggcgugaagagccugaagcuggccgugggccugagaaacgugcccgccagaagcagaagaggccuguucggcgccaucgccggcuucaucgagggcggcuggaccggccugguggccggcugguacggcuuccagcacagcaacgaccagggcaccggcauggccgccgacagagacagcacccagaaggccaucgacaagaucaccagcaaggugaacaacaucguggacaagaugaacaagcaguacgacaucaucgaccacgaguucagcgagaucgagaccagacugaacaugaucaacgacaagaucgacgaccagauccaggacaucugggccuacaacgccgagcugcuggugcugcuggagaaccagaagacccuggacgagcacgacgccaacgugaacaaccuguacaacaaggugaagggcgcccugggcagcaacgccguggaggacggcaagggcugcuucgaccuguaccacaagugcgacaaccagugcauggagaccaucagaaacggcaccuacaacagaagaaaguaccaggaggagagcagacuggagagacagaagaucgagggcgugaagcuggagagcgagggcaccuacaagauccugaccaucuacagcaccguggccagcagccuggugaucgccaugggcuucgccgccuuccuguucugggccaugagcaacggcagcugcagaugcaacaucugcaucuga

SEQ ID NO: 170352 - RNA, 1683 nt, Artificial Sequence
  derived and/or modified CDS sequence (opt4) from hemagglutinin__InfluenzaA__AGQ81143
auggagguggccaccaucaucaccauccugcuggugaucaccggcagcaacgccgacaagaucugcaucggcuaccagagcaccaacagcaccgagaccguggacacccugaccgagaacaacgugcccgugacccacgccaaggagcugcugcacaccgagcacaacggcaugcugugcgccaccaaccugggcagaccccugauccuggacaccugcaccaucgagggccugaucuacggcaaccccagcugcgaccugccccuggagggcagagaguggagcuacaucguggagagacccagcgccgugaacggcgugugcuaccccggcaacguggagaaccuggaggagcugagaagccuguucagcagcgccagcagcuaccagagaauccagaucuuccccgacagcaucuggaacgugagcuacagcggcaccagcaaggccugcagcgacagcuucuacagaagcaugagauggcugacccagaagaacaacaacuaccccgugcaggacgcccaguacaccaacaacagaggcaagaacauccuguucauguggggcaucaaccacccccccaccgacaacgcccagaccaaccuguacaccagaaccgacaccaccaccagcguggccaccgaggacaucaacagaaccuucaagccccugaucggccccagaccccuggugaacggccugcagggcagaaucgacuacuacugggccgugcugaagcccggccagacccugagagugagaagcaacggcaaccugaucgcccccugguacggccacauccugcugggcgagagccacggcagaauccugaagaccgaccugaagagcggcaacugcguggugcagugccagaccgagagaggcggccugaacaccacccugcccuuccacaacgugagcaaguacagcuucggcaacugccccaaguacaucggcgugaagagccugaagcuggccgugggccugagaaacgugcccgccagaagcagcagaggccuguucggcgccaucgccggcuucaucgagggcggcuggagcggccugguggccggcugguacggcuuccagcacagcaacgaccagggcaccggcauggccgccgacagagacagcacccagaaggccaucgacaagaucaccagcaaggugaacaacaucguggacaagaugaacaagcaguacgagaucaucgaccacgaguucagcgagaucgagaccagacugaacaugaucaacaacaagaucgacgaccagauccaggacaucugggccuacaacgccgagcugcuggugcugcuggagaaccagaagacccuggacgagcacgacgccaacgugaacaaccuguacaacaaggugaagagagcccugggcagcaacgccguggaggacggcaagggcugcuucgaccuguaccacaagugcgacaaccagugcauggagaccaucagaaacggcaccuacaacagaagaaaguaccaggaggagagcagacuggagagacagaagaucgagggcgugaagcuggagagcgagggcaccuacaagauccugaccaucuacagcaccguggccagcagccuggugaucgccaugggcuucgccgccuuccuguucugggccaugagcaacggcagcugcagaugcaacaucugcaucuga

SEQ ID NO: 170353 - RNA, 1683 nt, Artificial Sequence
  derived and/or modified CDS sequence (opt4) from hemagglutinin__InfluenzaA__AGQ81144
auggaggccgccaccaucaucaccauccugcugguggugaccggcagcaacgccgacaagaucugcaucggcuaccagagcaccaacagcaccgagaccguggacacccugaccgagaacaacgugcccgugacccacgccaaggagcugcugcacaccgagcacaacggcaugcugugcgccaccaaccugggcagaccccugauccuggacaccugcaccaucgagggccugaucuacggcaaccccagcugcgaccugccccuggagggcagagaguggagcuacaucguggagagacccagcgccgugaacggcgugugcuaccccggcaacguggagaaccuggaggagcugagaagccuguucagcagcgccagcagcuaccagagaauccagaucuuccccgacagcaucuggaacgugagcuacggcggcaccagcaaggccugcagcgacagcuucuacagaagcaugagauggcugacccagaagaacaacaacuaccccgugcaggacgcccaguacaccaacaacagaggcaagaacauccuguucauguggggcaucaaccacccccccaccgacaccgcccagaccaaccuguacaccagaaccgacaccaccaccagcguggccaccgaggacaucaacagaaccuucaagccccugaucggccccagaccccuggugaacggccugcagggcagaaucgacuacuacugggccgugcugaagcccggccagacccugagagugagaagcaacggcaaccugaucgcccccugguacggccacauccugcugggcgagagccacggcagaauccugaagaccgaccugaagagcggcaacugcguggugcagugccagaccgagagaggcggccugaacaccacccugcccuuccacaacgugagcaaguacgccuucggcaacugccccaaguacaucggcgugaagagccugaagcuggccgugggccugagaaacaugcccgccagaagcagcagaggccuguucggcgccaucgccggcuucaucgagggcggcuggagcggccugguggccggcugguacggcuuccagcacagcaacgaccagggcaccggcauggccgccgacagagacagcacccagaaggccaucgacaagaucaccagcaaggugaacaacaucguggacaagaugaacaagcaguacgagaucaucgaccacgaguucagcgagaucgagaccagacugaacaugaucaacgacaagaucgacgaccagauccaggacaucugggccuacaacgccgagcugcuggugcugcuggagaaccagaagacccuggacgagcacgacgccaacgugaacaaccuguacaacaaggugaagagagcccugggcagcaacgccguggaggacggcaagggcugcuucgaccuguaccacaagugcgacaaccagugcauggagaccaucagaaacggcaccuacaacagaagaaaguaccaggaggagagcagacuggagagacagaagaucgagggcgugaagcuggagagcgagggcaccuacaagauccugaccaucuacagcaccguggccagcagccuggugaucgccaugggcuucgccgccuuccuguucugggccaugagcaacggcagcugcagaugcaacaucugcaucuga

SEQ ID NO: 170354 - RNA, 1683 nt, Artificial Sequence
  derived and/or modified CDS sequence (opt4) from hemagglutinin__InfluenzaA__AGQ81146
auggaggccgccaccaucaucaccauccugcuggugaucaccggcagcaacgccgacaagaucugcaucggcuaccagagcaccaacagcaccgagaccguggacacccugaccgagaacaacgugcccgugacccacgccaaggagcugcugcacaccgagcacaacggcaugcugugcgccaccaaccugggcagaccccugauccuggacaccugcaccaucgagggccugaucuacggcaaccccagcugcgaccugccccuggagggcaaggaguggagcuacaucguggagagacccagcgccgugaacggcaugugcuaccccggcaacguggagaaccuggaggagcugagaagccuguucagcagcgccagcagcuaccagagaauccagaucuuccccgacagcaucuggaacgugagcuacagcggcaccagcaaggccugcagcgacagcuucuacagaagcaugagauggcugacccagaagaacaacaacuaccccgugcaggacgcccaguacaccaacaacagaggcaagaacauccuguucauguggggcaucaaccacccccccaccgacaccgcccagaccaaccuguacaccagaaccgacaccaagaccagcguggccaccgaggagaucaacagaaccuucaagccccugaucggccccagaccccuggugaacggccugcagggcagaaucgacuacuacugggccgugcugaagcccggccagacccugagagugagaagcaacggcaaccugaucgcccccugguacggccacauccugcugggcgagagccacggcagaauccugaagaccgaccugaagagcggcaacugcguggugcagugccagaccgagagaggcggccugaacaccacccugcccuuccacaacgugagcaaguacgccuucggcaacugccccaaguacaucggcgugaagagccugaagcuggccgugggccugagaaacgugcccgccagaagcagcagaggccuguucggcgccaucgccggcuucaucgagggcggcuggagcggccugguggccggcugguacggcuuccagcacagcaacgaccagggcaccggcauggccgccgacagagacagcacccagaaggccaucgacaagaucaccagcaaggugaacaacaucguggacaagaugaacaagcaguacgagaucaucgaccacgaguucagcgagaucgagaccagacugaacaugaucaacgacaagaucgacgaccagauccaggacaucugggccuacaacgccgagcugcuggugcugcuggagaaccagaagacccuggacgagcacgacagcaacgugaacaaccuguacaacaaggugaagagagcccugggcagcaacgccguggaggacggcaagggcugcuucgaccuguaccacaagugcgacaaccagugcauggagaccaucagaaacggcaccuacaacagaagaaaguaccaggaggagagcagacuggagagacagaagaucgagggcgugaagcuggagagcgagggcaccuacaagauccugaccaucuacagcaccguggccagcagccuggugaucgccaugggcuucgccgccuuccuguucugggccaugagcaacggcagcugcagaugcaacaucugcaucuga

SEQ ID NO: 170355 - RNA, 1683 nt, Artificial Sequence
  derived and/or modified CDS sequence (opt4) from hemagglutinin__InfluenzaA__AGQ81147
auggaggccgccaccaucaucaccauccugcuggugaucaccggcagcaacgccgacaagaucugcaucggcuaccagagcaccaacagcaccgagaccguggacacccugaccgagaacaacgugcccgugacccacgccaaggagcugcugcacaccgagcacaacggcaugcugugcgccaccaaccugggcagaccccugauccuggacaccugcaccaucgagggccugaucuacggcaaccccagcugcgaccugccccuggagggcaaggaguggagcuacaucguggagagacccagcgccgugaacggcaugugcuaccccggcaacguggagaaccuggaggagcugagaagccuguucagcagcgccagcagcuaccagagaauccagaucuuccccgacagcaucuggaacgugagcuacagcggcaccagcaaggccugcagcgacagcuucuacagaagcaugagauggcugacccagaagaacaacaacuaccccgugcaggacgcccaguacaccaacaacagaggcaagaacauccuguucauguggggcaucaaccacccccccaccgacaccgugcagaccaaccuguacaccagaaccgacaccaagaccagcguggccaccgaggagaucaacagaaccuucaagccccugaucggccccagaccccuggugaacggccugcagggcagaaucgacuacuacugggccgugcugaagcccggccagacccugagagugagaagcaacggcaaccugaucgcccccugguacggccacauccugcugggcgagagccacggcagaauccugaagaccgaccugaagagcggcaacugcguggugcagugccagaccgagagaggcggccugaacaccacccugcccuuccacaacgugagcaaguacgccuucggcaacugccccaaguacaucggcgugaagagccugaagcuggccgugggccugagaaacgugcccgccagaagcagcagaggccuguucggcgccaucgccggcuucaucgagggcggcuggagcggccugguggccggcugguacggcuuccagcacagcaacgaccagggcaccggcauggccgccgacagagacagcacccagaaggccaucgacaagaucaccagcaaggugaacaacaucguggacaagaugaacaagcaguacgagaucaucgaccacgaguucagcgagaucgagaccagacugaacaugaucaacgacaagaucgacgaccagauccaggacaucugggccuacaacgccgagcugcuggugcugcuggagaaccagaagacccuggacgagcacgacgccaacgugaacaaccuguacaacaaggugaagagagcccugggcagcaacgccguggaggacggcaagggcugcuucgaccuguaccacaagugcgacaaccagugcauggagaccaucagaaacggcaccuacaacagaagaaaguaccaggaggagagcagacuggagagacagaagaucgagggcgugaagcuggagagcgagggcaccuacaagauccugaccaucuacagcaccguggccagcagccuggugaucgccaugggcuucgccgccuuccuguucugggccaugagcaacggcagcugcagaugcaacaucugcaucuga

SEQ ID NO: 170356 - RNA, 1683 nt, Artificial Sequence
  derived and/or modified CDS sequence (opt4) from hemagglutinin__InfluenzaA__AGQ81148
auggaggccgccaccaucaucaccauccugcuggugaucaccggcagcaacgccgacaagaucugcaucggcuaccagagcaccaacagcaccgagaccguggacacccugaccgagaacaacgugcccgugacccacgccaaggagcugcugcacaccgagcacaacggcaugcugugcgccaccaaccugggcagaccccugauccuggacaccugcaccaucgagggccugaucuacggcaaccccagcugcgaccugccccuggagggcaaggaguggagcuacaucguggagagacccagcgccgugaacggcaugugcuaccccggcaacguggagaaccuggaggagcugagaagccuguucagcagcgccagcagcuaccagagaauccagaucuuccccgacagcaucuggaacgugagcuacagcggcaccagcaaggccugcagcgacagcuucuacagaagcaugagauggcugacccagaagaacaacaacuaccccgugcaggacgcccaguacaccaacaacagaggcaagaacauccuguucauguggggcaucaaccacccccccaccgacaccgcccagaccaaccuguacaccagaaccgacaccaagaccagcguggccaccgaggagaucaacagaaccuucaagccccugaucggccccagaccccuggugaacggccugcagggcagaaucgacuacuacugggccgugcugaagcccggccagacccugagagugagaagcaacggcaaccugaucgcccccugguacggccacauccugcugggcgagagccacggcagaauccugaagaccgaccugaagagcggcaacugcguggugcagugccagaccgagagaggcggccugaacaccacccugcccuuccacaacgugagcaaguacgccuucggcaacugccccaaguacaucggcgugaagagccugaagcuggccgugggccugagaaacgugcccgccagaagcagcagaggccuguucggcgccaucgccggcuucaucgagggcggcuggagcggccugguggccggcugguacggcuuccagcacagcaacgaccagggcaccggcauggccgccgacagagacagcacccagaaggccaucgacaagaucaccagcaaggugaacaacaucguggacaagaugaacaagcaguacgagaucaucgaccacgaguucagcgagaucgagaccagacugaacaugaucaacgacaagaucgacgaccagauccaggacaucugggccuacaacgccgagcugcuggugcugcuggagaaccagaagacccuggacgagcacgacgccaacgugaacaaccuguacaacaaggugaagagagcccugggcagcaacgccguggaggacggcaagggcugcuucgaccuguaccacaagugcgacaaccagugcauggagaccaucagaaacggcaccuacaacagaagaaaguaccaggaggagagcagacuggagagacagaagaucgagggcgugaagcuggagagcgagggcaccuacaagauccugaccaucuacagcaccguggccagcagccuggugaucgccaugggcuucgccgccuuccuguucugggccaugagcaacggcagcugcagaugcaacaucugcaucuga

SEQ ID NO: 170357 - RNA, 1683 nt, Artificial Sequence
  derived and/or modified CDS sequence (opt4) from hemagglutinin__InfluenzaA__AGQ81149
auggaggccgccaccaucaucaccauccugcuggugaucaccggcagcaacgccgacaagaucugcaucggcuaccagagcaccaacagcaccgagaccguggacacccugaccgagaacaacgugcccgugacccacgccaaggagcugcugcacaccggccacaacggcaugcugugcgccaccaaccugggcagaccccugauccuggacaccugcaccaucgagggccugaucuacggcaaccccagcugcgaccugccccuggagggcagagaguggagcuacaucguggagagacccagcgccaucaacggcgugugcuaccccggcaacguggagaaccuggaggagcugagaagccuguucagcagcgccagcagcuaccagagaauccagaucuuccccgacagcaucuggaacgugagcuacagcggcaccagcaaggccugcagcgacagcuucuacagaagcaugagauggcugacccagaagaacaacaacuaccccgugcaggacgcccaguacaccaacaacagaggcaagaacauccuguucauguggggcaucaaccacccccccaccgacaccgcccagaccaaccuguacaccagaaccgacaccaccaccagcguggccaccgaggacaucaacagaaccuucaagccccugaucggccccagaccccuggugaacggccugcagggcagaaucgacuacuacugggccgugcugaagcccggccagacccugagagugagaagcaacggcaaccugaucgcccccugguacggccacauccugcugggcgagagccacggcagaauccugaagaccgaccugaagagcggcaacugcguggugcagugccagaccgagagaggcggccugaacaccacccugcccuuccacaacgugagcaaguacgccuucggcaacugccccaaguacaucggcgugaagagccugaagcuggccgugggccugagaaacgugcccgccagaagcagcagaggccuguucggcgccaucgccggcuucaucgagggcggcuggagcggccugguggccggcugguacggcuuccagcacagcaacgaccagggcaccggcauggccgccgacagagacagcacccagaaggccaucgacaagaucaccagcaaggugaacaacaucguggacaagaugaacaagcaguacgagaucaucgaccacgaguucagcgagaucgagaccagacugaacaugaucaacgacaagaucgacgaccagauccaggacaucugggccuacaacgccgagcugcuggugcugcuggagaaccagaagacccuggacgagcacgacgccaacgugaacaaccuguacaacaaggugaagagagcccugggcagcaacgccguggaggacggcaagggcugcuucgaccuguaccacaagugcgacaaccagugcauggagaccaucagaaacggcaccuacaacagaagaaaguaccaggaggagagcagacuggagagacagaagaucgagggcgugaagcuggagagcgagggcaccuacaagauccugaccaucuacagcaccguggccagcagccuggugaucgccaugggcuucgccgccuuccuguucugggccaugagcaacggcagcugcagaugcaacaucugcaucuga

SEQ ID NO: 170358 - RNA, 1683 nt, Artificial Sequence
  derived and/or modified CDS sequence (opt4) from hemagglutinin__InfluenzaA__AGQ81150
auggaggccgccaccaucaucaccauccugcuggugaucaccggcagcaacgccgacaagaucugcaucggcuaccagagcaccaacagcaccgagaccguggacacccugaccgagaacaacgugcccgugacccacgccaaggagcugcugcacaccgagcacaacggcaugcugugcgccaccgaccugggcagaccccugauccuggacaccugcaccaucgagggccugaucuacggcaaccccagcugcgaccugccccuggagggcagagaguggagcuacaucguggagagacccagcgccgugaacggcgugugcuaccccggcaacguggagaaccuggaggagcugagaagccuguucagcagcgccagcagcuaccagagaauccagaucuuccccgacagcaucuggaacgugagcuacagcggcaccagcaaggccugcagcgacagcuucuacagaagcaugagauggcugacccagaagaacaacaacuaccccgugcaggacgcccaguacaccaacgacagaggcaacaacauccuguucauguggggcaucaaccacccccccaccgacaccgugcagaccaaccuguacaccagaaccgacaccaccaccagcguggccaccgaggacaucaacagaaccuucaagccccugaucggccccagaccccuggugaacggccugcagggcagaaucgacuacuacugggccgugcugaagcccggccagacccugagagugagaagcaacggcaaccugaucgcccccugguacggccacauccugcugggcgagagccacggcagaauccugaagaccgaccugaagagcggcaacugcguggugcagugccagaccgagagaggcggccugaacaccacccugcccuuccacaacgugagcaaguacgccuucggcaacugccccaaguacaucggcgugaagagccugaagcuggccgugggccugagaaacgugcccgccagaagcagcagaggccuguucggcgccaucgccggcuucaucgagggcggcuggagcggccugguggccggcugguacggcuuccagcacagcaacgaccagggcaccggcauggccgccgacagagacagcacccagaaggccaucgacaagaucaccagcaaggugaacaacaucguggacaagaugaacaagcaguacgacaucaucgaccacgaguucagcgagaucgagaccagacugaacaugaucaacgacaagaucgacgaccagauccaggacaucugggccuacaacgccgagcugcuggugcugcuggagaaccagaagacccuggacgagcacgacgccaacgugaacaaccuguacaacaaggugaagagagcccugggcagcaacgccguggaggacggcaagggcugcuucgaccuguaccacaagugcgacaaccagugcauggagaccaucagaaacggcaccuacaacagaagaaaguaccaggaggagagcagacuggagagacagaagaucgagggcgugaagcuggagagcgagggcaccuacaagauccugaccaucuacagcaccguggccagcagccuggugaucgccaugggcuucgccgccuuccuguucugggccaugagcaacggcagcugcagaugcaacaucugcaucuga

SEQ ID NO: 170359 - RNA, 1683 nt, Artificial Sequence
  derived and/or modified CDS sequence (opt4) from hemagglutinin__InfluenzaA__AGQ81152
auggaggccgccaccaucaucaccauccugcuggugaucaccggcagcaacgccgacaagaucugcaucggcuaccagagcaccaacagcaccgagaccguggacacccugaccgagaacaacgugcccgugacccacgccaaggagcugcugcacaccgagcacaacggcaugcugugcgccaccaaccugggcagaccccugauccuggacaccugcaccaucgagggccugaucuacggcaaccccagcugcgaccugccccuggagggcagagacuggagcuacaucguggagagacccagcgccgugaacggcgugugcuaccccggcaacguggagaaccuggaggagcugagaagccuguucagcagcgccagcagcuaccagaagauccagaucuuccccgacagcaucuggaacgugagcuacagcggcaccagcaaggccugcagcgacagcuucuacagaagcaugagauggcugacccagaagaacaacaacuaccccgugcaggacgcccaguacaccaacaacagaggcaagaacauccuguucauguggggcaucaaccacccccccaccgacaccgugcagaccaaccuguacaccagaaccgacaccaccaccagcguggccaccgaggacaucaacagaaccuucaagccccugaucggccccagaccccuggugaacggccugcagggcagaaucgacuacuacugggccgugcugaagcccggccagacccugagagugagaagcaacggcaaccugaucgcccccugguacggccacauccugcugggcgagagccacggcagaauccugaagaccgaccugaagagcggcaacugcguggugcagugccagaccgagagaggcggccugaacaccacccugcccuuccacaacgugagcaaguacgccuucggcaacugccccaaguacaucggcgugaagagccugaagcuggccgugggccugagaaacgugcccgccagaagcagcagaggccuguucggcgccaucgccggcuucaucgagggcggcuggagcggccugguggccggcugguacggcuuccagcacagcaacgaccagggcaccggcauggccgccgacagagacagcacccagaaggccaucgacaagaucaccagcaaggugaacaacaucguggacaagaugaacaagcaguacgagaucaucgaccacgaguucagcgagaucgagaccagacugaacaugaucaacgacaagaucgacgaccagauccaggacaucugggccuacaacgccgagcugcuggugcugcuggagaaccagaagacccuggacgagcacgacgccaacgugaacaaccuguacaacaaggugaagagagcccugggcagcaacgccguggaggacggcaagggcugcuucgaccuguaccacaagugcgacaaccagugcauggagaccaucagaaacggcaccuacaacagaagaaaguaccaggaggagagcagacuggagagacagaagaucgagggcgugaagcuggagagcgagggcaccuacaagauccugaccaucuacagcaccguggccagcagccuggugaucgccaugggcuucgccgccuuccuguucugggccaugagcaacggcagcugcagaugcaacaucugcaucuga

SEQ ID NO: 170360 - RNA, 1683 nt, Artificial Sequence
  derived and/or modified CDS sequence (opt4) from hemagglutinin__InfluenzaA__AGQ81153
auggaggccgccaccaucaucaccauccugcuggugaucaccggcagcaacgccgacaagaucugcaucggcuaccagagcaccaacagcaccgagaccguggacacccugaccgagaacaacgugcccgugacccacgccaaggagcugcugcacaccgagcacaacggcaugcugugcgccaccaaccugggcagaccccugauccuggacaccugcaccaucgagggccugaucuacggcaaccccagcugcgaccugccccuggagggcagagacuggagcuacaucguggagagacccagcgccgugaacggcgugugcuaccccggcaacguggagaaccuggaggagcugagaagccuguucagcagcgccagcagcuaccagaagauccagaucuuccccgacagcaucuggaacgugagcuacggcggcaucagcaaggccugcagcaacagcuucuacagaagcaugagauggcugacccagaagaacaacaacuaccccgugcaggacgcccaguacaccaacaacagaggcaagaacauccuguucauguggggcaucaaccacccccccaccaacaccacccagaccgaccuguacaccagaaccgacaccaccaccagcguggccaccgaggacauccacagaaccuucaagccccugaucggccccagaccccuggugaacggccugcagggcagaaucgacuacuacugggccgugcugaagcccggccagacccugagagugagaagcaacggcaaccugaucgcccccugguacggccacauccugcugggcaagagccacggcagaauccugaagaccgaccugaagagcggcaacugcguggugcagugccagaccgagagaggcggccugaacaccacccugcccuuccacaacgugagcaaguacgccuucggcaacugccccaaguacaucggcgugaagagccugaagcuggccgugggccugagaaacgugcccgccagaagcagcagaggccuguucggcgccaucgccggcuucaucgagggcggcuggagcggccugguggccggcugguacggcuuccagcacagcaacgaccagggcaccggcauggccgccgacagagacagcacccagaaggccaucgacaagaucaccagcaaggugaacaacaucguggacaagaugaacaagcaguacgagaucaucgaccacgaguucagcgagaucgagaccagacugaacaugaucaacgacaagaucgacgaccagauccaggacaucugggccuacaacgccgagcugcuggugcugcuggagaaccagaagacccuggacgagcacgacgccaacgugaacaaccuguacaacaaggugaagagagcccugggcagcaacgccguggaggacggcaagggcugcuucgaccuguaccacaagugcgacaaccagugcauggagaccaucagaaacggcaccuacaacagaagaaaguaccaggaggagagcagacuggagagacagaagaucgagggcgugaagcuggagagcgagggcaccuacaagauccugaccaucuacagcaccguggccagcagccuggugaucgccaugggcuucgccgccuuccuguucugggccaugagcaacggcagcugcagaugcaacaucugcaucuga

SEQ ID NO: 170361 - RNA, 1683 nt, Artificial Sequence
  derived and/or modified CDS sequence (opt4) from hemagglutinin__InfluenzaA__AGQ81155
auggaggccgccaccaucaucaccauccugcuggugaucaccggcagcaacgccgacaagaucugcaucggcuaccagagcaccaacagcaccgagaccguggacacccugaccgagaacaacgugcccgugacccacgccaaggagcugcugcacaccgagcacaacggcaugcugugcgccaccaaccugggcagaccccugauccuggacaccugcaccaucgagggccugaucuacggcaaccccagcugcgaccugccccuggagggcagagacuggagcuacaucguggagagacccagcgccgugaacggcgugugcuaccccggcaacguggagaaccuggaggagcugagaagccuguucagcagcgccagcagcuaccagaagauccagaucuuccccgacagcaucuggaacgugagcuacaacggcaccagcaaggccugcagcgacagcuucuacagaagcaugagauggcugacccagaagaacaacaacuaccccgugcaggacgcccaguacaccaacaacagaggcaagaacauccuguucauguggggcaucaaccacccccccaccgacaccacccagaccaaccuguacaccagaaccgacaccaccaccagcguggccaccgaggacaucaacagaaccuucaagccccugaucggccccagaccccuggugaacggccugcagggcagaaucgacuacuacugggccgugcugaagcccggccagacccugagagugagaagcaacggcaaccugaucgcccccugguacggccacauccugcugggcgagagccacggcagaauccugaagaccgaccugaagagcggcaacugcguggugcagugccagaccgagagaggcggccugaacaccacccugcccuuccacaacgugagcaaguacgccuucggcgacugccccaaguacaucggcgugaagagccugaagcuggccgugggccugagaaacgugcccgccagaagcagcagaggccuguucggcgccaucgccggcuucaucgagggcggcuggagcggccugguggccggcugguacggcuuccagcacagcaacgaccagggcaccggcauggccgccgacagagacagcacccagaaggccaucgacaagaucaccagcaaggugaacaacaucguggacaagaugaacaagcaguacgagaucaucgaccacgaguucagcgagaucgagaccagacugaacaugaucaacgacaagaucgacgaccagauccaggacaucugggccuacaacgccgagcugcuggugcugcuggagaaccagaagacccuggacgagcacgacgccaacgugaacaaccuguacaacaaggugaagagagcccugggcagcaacgccguggaggacggcaagggcugcuucgaccuguaccacaagugcgacaaccagugcauggagaccaucagaaacggcaccuacaacagaagaaaguaccaggaggagagcagacuggagagacaggagaucgagggcgugaagcuggagagcgagggcaccuacaagauccugaccaucuacagcaccguggccagcagccuggugaucgccaugggcuucgccgccuuccuguucugggccaugagcaacggcagcugcagaugcaacaucugcaucuga

SEQ ID NO: 170362 - RNA, 1683 nt, Artificial Sequence
  derived and/or modified CDS sequence (opt4) from hemagglutinin__InfluenzaA__AGQ81156
auggaggccgccaccaucaucaccauccugcuggugaucaccggcagcaacgccgacaagaucugcaucggcuaccagagcaccaacagcaccgagaccguggacacccugaccgagaacaacgugcccgugacccacgccaaggagcugcugcacaccgagcacaacggcaugcugugcgccaccaaccugggcagaccccugauccuggacaccugcaccaucgagggccugaucuacggcaaccccagcugcgaccugccccuggagggcagagacuggagcuacaucguggagagacccagcgccgugaacggcgugugcuaccccggcaacguggagaaccuggaggagcugagaagccuguucagcagcgccagcagcuaccagaagauccagaucuuccccgacagcaucuggaacgugagcuacggcggcaucagcaaggccugcagcaacagcuucuacagaagcaugagauggcugacccagaagaacaacaacuaccccgugcaggacgcccaguacaccaacaacagaggcaagaacauccuguucauguggggcaucaaccacccccccaccaacaccacccagaccgaccuguacaccagaaccgacaccaccaccagcguggccaccgaggacauccacagaaccuucaagccccugaucggccccagaccccuggugaacggccugcagggcagaaucgacuacuacugggccgugcugaagcccggccagacccugagagugagaagcaacggcaaccugaucgcccccugguacggccacauccugcugggcgagagccacggcagaauccugaagaccgaccugaagagcggcaacugcguggugcagugccagaccgagagaggcggccugaacaccacccugcccuuccacaacgugagcaaguacgccuucggcaacugccccaaguacaucggcgugaagagccugaagcuggccgugggccugagaaacgugcccgccagaagcagcagaggccuguucggcgccaucgccggcuucaucgagggcggcuggagcggccugguggccggcugguacggcuuccagcacagcaacgaccagggcaccggcauggccgccgacagagacagcacccagaaggccaucgacaagaucaccagcaaggugaacaacaucguggacaagaugaacaagcaguacgagaucaucgaccacgaguucagcgagaucgagaccagacugaacaugaucaacgacaagaucgacgaccagauccaggacaucugggccuacaacgccgagcugcuggugcugcuggagaaccagaagacccuggacgagcacgacgccaacgugaacaaccuguacaacaaggugaagagagcccugggcagcaacgccguggaggacggcaagggcugcuucgaccuguaccacaagugcgacaaccagugcauggagaccaucagaaacggcaccuacaacagaagaaaguaccaggaggagagcagacuggagagacagaagaucgagggcgugaagcuggagagcgagggcaccuacaagauccugaccaucuacagcaccguggccagcagccuggugaucgccaugggcuucgccgccuuccuguucugggccaugagcaacggcagcugcagaugcaacaucugcaucuga

SEQ ID NO: 170363 - RNA, 1683 nt, Artificial Sequence
  derived and/or modified CDS sequence (opt4) from hemagglutinin__InfluenzaA__AGQ81157
auggaggccgccaccaucaucaccauccugcuggugaucaccggcaacaacgccgacaagaucugcaucggcuaccagagcaccaacagcaccgagaccguggacacccugaccgagaacaacgugcccgugacccacgccaaggagcugcugcacaccgagcacaacggcaugcugugcgccaccaaccugggcagaccccugauccuggacaccugcaccaucgagggccugaucuacggcaaccccagcugcgaccugccccuggagggcagagacuggagcuacaucguggagagacccagcgccgugaacggcgugugcuaccccggcaacguggagaaccuggaggagcugagaagccuguucagcagcgccagcagcuaccagaagauccagaucuuccccgacagcaucuggaacgugagcuacaacggcaccagcaaggccugcagcgacagcuucuacagaagcaugagauggcugacccagaagaacaacaacuaccccgugcaggacgcccaguacaccaacaacagaggcaagaacauccuguucauguggggcaucaaccacccccccaccgacaccacccagaccaaccuguacaccagaaccgacaccaccaccagcguggccaccgaggacaucaacagaaccuucaagccccugaucggccccagaccccuggugaacggccugcagggcagaaucgacuacuacugggccgugcugaagcccggccagacccugagagugagaagcaacggcaaccugaucgcccccugguacggccacauccugcugggcgagagccacggcagaauccugaagaccgaccugaagagcggcaacugcguggugcagugccagaccgagagaggcggccugaacaccacccugcccuuccacaacgugagcaaguacgccuucggcgacugccccaaguacaucggcgugaagagccugaagcuggccgugggccugagaaacgugcccgccagaagcagcagaggccuguucggcgccaucgccggcuucaucgagggcggcuggagcggccugguggccggcugguacggcuuccagcacagcaacgaccagggcaccggcauggccgccgacagagacagcacccagaaggccaucgacaagaucaccagcaaggugaacaacaucguggacaagaugaacaagcaguacgagaucaucgaccacgaguucagcgagaucgagaccagacugaacaugaucaacgacaagaucgacgaccagauccaggacaucugggccuacaacgccgagcugcuggugcugcuggagaaccagaagacccuggacgagcacgacgccaacgugaacaaccuguacaacaaggugaagagagcccugggcagcaacgccguggaggacggcaagggcugcuucgaccuguaccacaagugcgacaaccagugcauggagaccaucagaaacggcaccuacaacagaagaaaguaccaggaggagagcagacuggagagacagaagaucgagggcgugaagcuggagagcgagggcaccuacaagauccugaccaucuacagcaccguggccagcagccuggugaucgccaugggcuucgccgccuuccuguucugggccaugagcaacggcagcugcagaugcaacaucugcaucuga

SEQ ID NO: 170364 - RNA, 1683 nt, Artificial Sequence
  derived and/or modified CDS sequence (opt4) from hemagglutinin__InfluenzaA__AGQ81158
auggagguggugaccaucaucaccauccugcuggugaucaccagaagcaacgccgacaagaucugcaucggcuaccagagcaccaacagcaccgagaccguggacacccugaccgagaacaacgugcccgugacccacgccaaggagcugcugcacaccgagcacaacggcaugcugugcgccaccaaccugggcagaccccugauccuggacaccugcaccaucgagggccugaucuacggcaaccccagcugcgaccugccccuggagggcagagaguggagcuacaucguggagagacccagcgccgugaacggcgugugcuaccccggcaacguggagaaccuggaggagcugagaagccuguucagcagcgccagcagcuaccagagaauccagaucuuccccgacagcaucuggaacgugagcuacagcggcaccagcaaggccugcagcgacagcuucuacagaagcaugagauggcugacccagaagaacaacaacuaccccgugcaggacgcccaguacaccaacaacagaggcaagaacauccuguucauguggggcaucaaccacccccccaccgacaccgcccagaccaaccuguacaccagaaccgacaccaccaccagcguggccaccgaggacaucaacagaaccuucaagccccugaucggccccagaccccuggugaacggccugcagggcagaaucgacuacuacugggccgugcugaagcccggccagacccugagagugagaagcaacggcaaccugaucgcccccugguacggccacauccugcugggcgagagccacggcagaauccugaagaccgaccugaagagcggcagcugcguggugcagugccagaccgagagaggcggccugaacaccacccugcccuuccacaacgugagcaaguacgccuucggcaacugccccaaguacaucggcgugaagagccugaagcuggccgugggccugagaaacgugcccgccagaagcagcagaggccuguucggcgccaucgccggcuucaucgagggcggcuggagcggccugguggccggcugguacggcuuccagcacagcaacgaccagggcaccggcauggccgccgacagagacagcacccagaaggccaucgacaagaucaccagcaaggugaacaacaucguggacaagaugaacaagcaguacgagaucaucaaccacgaguucagcgagaucgagaccagacugaacaugaucaacgacaagaucgacgaccagauccaggacaucugggccuacaacgccgagcugcuggugcugcuggagaaccagaagacccuggacgagcacgacgccaacgugaacaaccuguacaacaaggugaagagagcccugggcagcaacgccguggaggacggcaagggcugcuucgaccuguaccacaagugcgacaaccagugcauggagaccaucagaaacggcaccuacaacagaagaauguaccaggaggagagcagacuggagagacagaagaucgagggcgugaagcuggagagcgagggcaccuacaagauccugaccaucuacagcaccguggccagcagccuggugaucgccaugggcuucgccgccuuccuguucugggccaugagcaacggcagcugcagaugcaacaucugcaucuga

SEQ ID NO: 170365 - RNA, 1683 nt, Artificial Sequence
  derived and/or modified CDS sequence (opt4) from hemagglutinin__InfluenzaA__AGQ81159
auggaggccgccaccaucaucaccauccugcuggugaucaccggcagcaacgccgacaagaucugcaucggcuaccagagcaccaacagcaccgagaccguggacacccugaccgagaacaacgugcccgugacccacgccaaggagcugcugcacaccgagcacaacggcaugcugugcgccaccaaccugggcagaccccugauccuggacaccugcaccaucgagggccugaucuacggcaaccccagcugcgaccugccccuggagggcagagacuggagcuacaucguggagagacccagcgccgugaacggcgugugcuaccccggcaacguggagaaccuggaggagcugagaagccuguucagcagcgccagcagcuaccagaagauccagaucuuccccgacagcaucuggaacgugagcuacgacggcaucagcaaggccugcagcaacagcuucuacagaagcaugagauggcugaccaagaagaacaacagcuaccccgugcaggacgcccaguacaccaacaacaucggcaagaacauccuguucauguggggcaucaaccacccccccaccaacaccacccagaccgaccuguacaccagaaccgacaccaccaccagcguggccaccgaggacauccacagaaccuucaagccccugaucggccccagaccccccgugaacggccugcugggcagaaucgacuacuacugggccgugcugaagcccggccagacccugagagugagaagcaacggcaaccugaucgcccccugguacggccacauccugcugggcgagagccacggcagaauccugaagaccgaccugaagagcggcaacugcguggugcagugccagaccgagagaggcggccugaacaccacccugcccuuccacaacgugagcaaguacgccuucggcaacugccccaaguacaucggcgugaagagccugaagcuggccgugggccugagaaacgugcccgccagaagcagcagaggccuguucggcgccaucgccggcuucaucgagggcggcuggagcggccugguggccggcugguacggcuuccagcacagcaacgaccagggcaccggcauggccgccgacagagacagcacccagaaggccaucgacaagaucaccagcaaggugaacaacaucguggacaagaugaacaagcaguacgagaucaucgaccacgaguucagcgagaucgagaccagacugaacaugaucaacgacaagaucgacgaccagauccaggacaucugggccuacaacgccgagcugcuggugcugcuggagaaccagaagacccuggacgagcacgacgccaacgugaacaaccuguacaacaaggugaagagagcccugggcagcaacgccguggaggacggcaagggcugcuucgaccuguaccacaagugcgacaaccagugcauggagaccaucagaaacggcaccuacaacagaagaaaguaccaggaggagagcagacuggagagacagaagaucgagggcgugaagcuggagagcgagggcaccuacaagauccugaccaucuacagcaccguggccagcagccuggugaucgccaugggcuucgccgccuuccuguucugggccaugagcaacggcagcugcagaugcaacaucugcaucuga

SEQ ID NO: 170366 - RNA, 1683 nt, Artificial Sequence
  derived and/or modified CDS sequence (opt4) from hemagglutinin__InfluenzaA__AGQ81161
auggagaccgugagccugaucaccauccugcugguggccaccgugagcaacgccgacaagaucugcaucggcuaccagagcaccaacagcaccgagaccguggacacccugaccgagaacaacgugcccgugacccacgccaaggagcugcugcacaccgagcacaacggcaugcugugcgccaccagccugggccagccccugauccuggacaccugcaccaucgagggccugaucuacggcaaccccagcugcgacccccugcuggagggcagagaguggagcuacaucguggagagacccagcgccgugaacggccugugcuaccccggcaacguggagaaccuggaggagcugagaagccuguucagcagcgccagaagcuaccagagaauccagaucuuccccgacaccaucuggaacgugagcuacgacggcaccagcaaggccugcagcggcagcuucuacagaaacaugagauggcugacccagaagaacagcgacuaccccauccaggacgcccaguacaccaacaaccagggcaagaacauccuguucauguggggcaucaaccacccccccaccgacaccacccagagagaccuguacaccagaaccgacaccaccaccagcguggccaccgaggagaucaacagaaucuucaagccccugaucggccccagaccccuggugaacggccugaugggcagaaucgacuacuacuggagcgugcugaagcccggccagacccugagaaucaagagcgacggcaaccugaucgcccccugguacggccacauccugagcggcgagagccacggcagaauccugaagaccgaccugaagaagggcagcugcaccgugcagugccagaccgagaagggcggccugaacaccacccugcccuuccagaacgugagcaaguacgccuucggcaacugcagcaaguacaucggcaucaagagccugaagcuggccgugggccugagaaacgugcccagcagaagcagcagaggccuguucggcgccaucgccggcuucaucgagggcggcuggagcggccugguggccggcugguacggcuuccagcacagcaacgaccagggcgugggcauggccgccgacagagacagcacccagaaggccaucgacaagaucaccagcaaggugaacaacaucguggacaagaugaacaagcaguacgagaucaucgaccacgaguucagcgagguggagaccagacugaacaugaucaacaacaagaucgacgaccagauccaggacaucugggccuacaacgccgagcugcuggugcugcuggagaaccagaagacccuggacgagcacgacgccaacgugaacaaccuguacaacaaggugaagagagcccugggcagcaacgccguggaggacggcaagggcugcuucgagcuguaccacaagugcgacgaccagugcauggagaccaucagaaacggcaccuacaacagaagaaaguaccaggaggagagcaagcuggagagacagaagaucgagggcgugaagcuggagagcgagggcaccuacaagauccugaccaucuacagcaccguggccagcagccuggugaucgccaugggcuucgccgccuuccuguucugggccaugagcaacggcagcugcagaugcaacaucugcaucuga

SEQ ID NO: 170367 - RNA, 1683 nt, Artificial Sequence
  derived and/or modified CDS sequence (opt4) from hemagglutinin__InfluenzaA__AGQ81162
auggagaccgugagccugaucaccauccugcugguggccaccgugagcaacgccgacaagaucugcaucggcuaccagagcaccaacagcaccgagaccguggacacccugaccgagaacaacgugcccgugacccacgccaaggagcugcugcacaccgagcacaacggcaugcugugcgccaccagccugggccagccccugauccuggacaccugcaccaucgagggccugaucuacggcaaccccagcugcgaccugcugcuggagggcagagaguggagcuacaucguggagagacccagcgccgugaacggccugugcuaccccggcaacguggagaaccuggaggagcugagaagccuguucagcagcgccagaagcuaccagagaauccagaucuuccccgacaccaucuggaacgugagcuacgacggcaccagcaaggccugcagcggcagcuucuacagaagcaugagauggcugacccagaagaacagcgacuaccccauccaggacgcccaguacaccaacaaccagggcaagaacauccuguucauguggggcaucaaccacccccccaccgacaccacccagagagaccuguacaccagaaccgacaccaccaccagcguggccaccgaggagaucaacagaaucuucaagccccugaucggccccagaccccuggugaacggccugaugggcagaaucgacuacuacuggagcgugcugaagcccggccagacccugagaaucaagagcgacggcaaccugaucgcccccugguacggccacauccugagcggcgagagccacggcagaauccugaagaccgaccugaagaagggcagcugcaccgugcagugccagaccgagaagggcggccugaacaccacccugcccuuccagaacgugagcaaguacgccuucggcaacugcagcaaguacaucggcaucaagagccugaagcuggccgugggccugagaaacgugcccagcagaagcagcagaggccuguucggcgccaucgccggcuucaucgagggcggcuggagcggccugguggccggcugguacggcuuccagcacagcaacgaccagggcgugggcauggccgccgacagagacagcacccagaaggccaucgacaagaucaccagcaaggugaacaacaucguggacaagaugaacaagcaguacgagaucaucgaccacgaguucagcgagguggagaccagacugaacaugaucaacaacaagaucgacgaccagauccaggacaucugggccuacaacgccgagcugcuggugcugcuggagaaccagaagacccuggacgagcacgacgccaacgugaacaaccuguacaacaaggugaagagagcccugggcagcaacgccguggaggacggcaagggcugcuucgagcuguaccacaagugcgacgaccagugcauggagaccaucagaaacggcaccuacaacagaaagaaguaccaggaggagagcaagcuggagagacagaagaucgagggcgugaagcuggagagcgagggcaccuacaagauccugaccaucuacagcaccguggccagcagccuggugaucgccaugggcuucgccgccuuccuguucugggccaugagcaacggcagcugcagaugcaacaucugcaucuga

SEQ ID NO: 170368 - RNA, 1683 nt, Artificial Sequence
  derived and/or modified CDS sequence (opt4) from hemagglutinin__InfluenzaA__AGQ81164
auggagaccgugagccugaucaccauccugcugguggccaccgugagcaacgccgacaagaucugcaucggcuaccagagcaccaacagcaccgagaccguggacacccugaccgagaacaacgugcccgugacccacgccaaggagcugcugcacaccgagcacaacggcaugcugugcgccaccagccugggccagccccugauccuggacaccugcaccaucgagggccugaucuacggcaaccccagcugcgaccugcugcuggagggcagagaguggagcuacaucguggagagacccagcgccgugaacggccugugcuaccccggcaacguggagaaccuggaggagcugagaagccuguucagcagcgccagaagcuaccagagaauccagaucuuccccgacaccaucuggaacgugagcuacgacggcaccagcaaggccugcagcggcagcuucuacagaagcaugagauggcugacccagaagaacagcgacuaccccauccaggacgcccaguacaccaacaaccagggcaagaacauccuguucauguggggcaucaaccacccccccaccgacaccacccagagagaccuguacaccagaaccgacaccaccaccagcguggccaccgaggagaucaacagaaucuucaagccccugaucggccccagaccccuggugaacggccugaugggcagaaucgacuacuacuggagcgugcugaagcccggccagacccugagaaucaagagcgacggcaaccugaucgcccccugguacggccacauccugagcggcgagagccacggcagaauccugaagaccgaccugaagaagggcagcugcaccgugcagugccagaccgagaagggcggccugaacaccacccugcccuuccagaacgugagcaaguacgccuucggcaacugcagcaaguacaucggcaucaagagccugaagcuggccgugggccugagaaacgugcccagcagaagcagcagaggccuguucggcgccaucgccggcuucaucgagggcggcuggagcggccugguggccggcugguacggcuuccagcacagcaacgaccagggcgugggcauggccgccgacagagacagcacccagaaggccaucgacaagaucaccagcaaggugaacaacaucguggacaagaugaacaagcaguacgagaucaucgaccacgaguucagcgagguggagaccagacugaacaugaucaacaacaagaucgacgaccagauccaggacaucugggccuacaacgccgagcugcuggugcugcuggagaaccagaagacccuggacgagcacgacgccaacgugaacaaccuguacaacaaggugaagagagcccugggcagcaacgccguggaggacggcaagggcugcuucgagcuguaccacaagugcgacgaccagugcauggagaccaucagaaacggcaccuacaacagaagaaaguaccaggaggagagcaagcuggagagacagaagaucgagggcgugaagcuggagagcgagggcaccuacaagauccugaccaucuacagcaccguggccagcagccuggugaucgccaugggcuucgccgccuuccuguucugggccaugagcaacggcagcugcagaugcaacaucugcaucuga

SEQ ID NO: 170369 - RNA, 1683 nt, Artificial Sequence
  derived and/or modified CDS sequence (opt4) from hemagglutinin__InfluenzaA__AGQ81167
auggagaccgugagccugaucaccauccugcugguggccaccgugagcaacgccgacaagaucugcaucggcuaccagagcaccaacagcaccgagaccguggacacccugaccgagaacaacgugcccgugacccacgccaaggagcugcugcacaccgagcacaacggcaugcugugcgccaccagccugggccagccccugauccuggacaccugcaccaucgagggccugaucuacggcaaccccagcugcgaccugcugcuggagggcagagaguggagcuacaucguggagagacccagcgccgugaacggccugugcuaccccggcaacguggagaaccuggaggagcugagaagccuguucagcagcgccagaagcuaccagagaauccagaucuuccccgacaccaucuggaacgugagcuacaacggcaccagcaaggccugcagcggcagcuucuacagaagcaugagauggcugacccagaagaacagcaacuaccccauccaggacgcccaguacaccaacaaccagggcaagaacauccuguucauguggggcaucaaccacccccccaccgacaccacccagagagaccuguacaccagaaccgacaccaccaccagcguggccaccgaggagaucaacagaaucuucaagccccugaucggccccagaccccuggugaacggccugaugggcagaaucgacuacuacuggagcgugcugaagcccggccagacccugagaaucaagagcgacggcaaccugaucgcccccugguacggccacauccugagcggcgagagccacggcagaauccugaagaccgaccugaagaagggcagcugcaccgugcagugccagaccgagaagggcggccugaacaccacccugcccuuccagaacgugagcaaguacgccuucggcaacugcagcaaguacaucggcaucaagagccugaagcuggccgugggccugagaaacgugcccagcagaagcagcagaggccuguucggcgccaucgccggcuucaucgagggcggcuggagcggccugguggccggcugguacggcuuccagcacagcaacgaccagggcgugggcauggccgccgacagagacagcacccagaaggccaucgacaagaucaccagcaaggugaacaacaucguggacaagaugaacaagcaguacgagaucaucgaccacgaguucagcgagguggagaccagacugaacaugaucaacaacaagaucgacgaccagauccaggacaucugggccuacaacgccgagcugcuggugcugcuggagaaccagaagacccuggacgagcacgacgccaacgugaacaaccuguacaacaaggugaagagagcccugggcagcaacgccguggaggacggcaagggcugcuucgagcuguaccacaagugcgacgaccagugcauggagaccaucagaaacggcaccuacaacagaagaaaguaccaggaggagagcaagcuggagagacagaagaucgagggcgugaagcuggagagcgagggcaccuacaagauccugaccaucuacagcaccguggccagcagccuggugaucgccaugggcuucgccgccuuccuguucugggccaugagcaacggcagcugcagaugcaacaucugcaucuga

SEQ ID NO: 170370 - RNA, 1683 nt, Artificial Sequence
  derived and/or modified CDS sequence (opt4) from hemagglutinin__InfluenzaA__AGQ81168
auggagaccgugagccugaucaccauccugcugguggugaccgugagcaacgccgacaagaucugcaucggcuaccagagcaccaacagcaccgagaccguggacacccugaccgagaacaacgugcccgugacccacgccagagagcugcugcacaccgagcacaacggcaugcugugcgccaccagccugggccacccccugauccuggacaccugcaccaucgagggccugaucuacggcaaccccagcugcgaccugcugcugggcggcagagaguggagcuacaucguggagagacccagcgccgugaacggccugugcuaccccggcaacguggagaaccuggaggagcugagaagccuguucagcagcgccagaagcuaccagagaauccagaucuuccccgacaccaucuggaacgugagcuacagcggcaccagcaaggccugcagcgacagcuucuacagaagcaugagauggcugacccagaagggcaacgccuaccccauccaggacgcccaguacaccaacaaccagggcaagaacauccuguucauguggggcaucaaccacccccccaccgacaccgcccagaccaaccuguacaccagaaccgacaccaccaccagcguggccaccgaggagaucaacagaaccuucaagccccugaucggccccagaccccuggugaacggccugaugggcagaaucaacuacuacuggagcgugcugaagcccggccagacccugagaaucaagagcaacggcaaccugaucgcccccugguacggccacauccugagcggcgagagccacggcagaauccugaagaccgaccugaagagaggcagcugcaccgugcagugccagaccgagaagggcggccugaacaccacccugcccuuccagaacgugagcaaguacgccuucggcaacugcagcaaguacaucggcaugaagagccugaagcuggccgugggccugagaaacgugcccagcagaagcagcagaggccuguucggcgccaucgccggcuucaucgagggcggcuggagcggccugguggccggcugguacggcuuccagcacagcaacgaccagggcgugggcauggccgccgacagagacagcacccagaaggccaucgacaagaucaccagcaaggugaacaacaucguggacaagaugaacaagcaguacgagaucaucgaccacgaguucagcgagguggagaccagacugaacaugaucaacaacaagaucgacgaccagauccaggacaucugggccuacaacgccgagcugcuggugcugcuggagaaccagaagacccuggacgagcacgacgccaacgugaacaaccuguacaacaaggugaagagagcccugggcagcaacgccguggaggacggcaagggcugcuucgagcuguaccacaagugcgacgaccagugcauggagaccaucagaaacggcaccuacaacagaagaaaguaccaggaggagagcaagcuggagagacagaagaucgagggcgugaagcuggagagcgagggcaccuacaagauccugaccaucuacagcaccguggccagcagccuggugaucgccaugggcuucgccgccuuccuguucugggccaugagcaacggcagcugcagaugcaacaucugcaucuga

SEQ ID NO: 170371 - RNA, 1683 nt, Artificial Sequence
  derived and/or modified CDS sequence (opt4) from hemagglutinin__InfluenzaA__AGQ81169
auggagaccgugagccugaucaccauccugcugguggugaccgugagcaacgccgacaagaucugcaucggcuaccagagcaccaacagcaccgagaccguggacacccugaccgagaacaacgugcccgugacccacgccagagagcugcugcacaccgagcacaacggcaugcugugcgccaccagccugggccacccccugauccuggacaccugcaccaucgagggccugaucuacggcaaccccagcugcgaccugcugcugggcggcagagaguggagcuacaucguggagagacccagcgccgugaacggccugugcuaccccggcaacguggagaaccuggaggagcugagaagccuguucagcagcgccagaagcuaccagagaauccagaucuuccccgacaccaucuggaacgugagcuacagcggcaccagcaaggccugcagcgacagcuucuacagaagcaugagauggcugacccagaaggacaacgccuaccccauccaggacgcccaguacaccaacaaccaggagaagaacauccuguucauguggggcaucaaccacccccccaccgacaccgugcagaccaaccuguacaccagaaccgacaccaccaccagcguggccaccgaggagaucaacagaaccuucaagccccugaucggccccagaccccuggugaacggccugaugggcagaaucaacuacuacuggagcgugcugaagcccggccagacccugagaaucaagagcaacggcaaccugaucgcccccugguacggccacauccugagcggcgagagccacggcagaauccugaagaccgaccugaagagaggcagcugcaccgugcagugccagaccgagaagggcggccugaacaccacccugcccuuccagaacgugagcaaguacgccuucggcaacugcagcaaguacaucggcaugaagagccugaagcuggccgugggccugagaaacgugcccagcagaagcagcagaggccuguucggcgccaucgccggcuucaucgagggcggcuggagcggccugguggccggcugguacggcuuccagcacagcaacgaccagggcgugggcauggccgccgacagagacagcacccagaaggccaucgacaagaucaccagcaaggugaacaacaucguggacaagaugaacaagcaguacgagaucaucgaccacgaguucagcgagguggagaccagacugaacaugaucaacaacaagaucgacgaccagauccaggacaucugggccuacaacgccgagcugcuggugcugcuggagaaccagaagacccuggacgagcacgacgccaacgugaacaaccuguacaacaaggugaagagagcccugggcagcaacgccguggaggacggcaagggcugcuucgagcuguaccacaagugcgacgaccagugcauggagaccaucagaaacggcaccuacaacagaagaaaguaccaggaggagagcaagcuggagagacagaagaucgagggcgugaagcuggagagcgagggcaccuacaagauccugaccaucuacagcaccguggccagcagccuggugaucgccaugggcuucgccgccuuccuguucugggccaugagcaacggcagcugcagaugcaacaucugcaucuga

SEQ ID NO: 170372 - RNA, 1683 nt, Artificial Sequence
  derived and/or modified CDS sequence (opt4) from hemagglutinin__InfluenzaA__AGQ81170
auggagaccgugagccugaucaccauccugcugguggugaccgugagcaacgccgacaagaucugcaucggcuaccagagcaccaacagcaccgagaccguggacacccugaccgagaacaacgugcccgugacccacgccagagagcugcugcacaccgagcacaacggcaugcugugcgccaccagccugggccacccccugauccuggacaccugcaccaucgagggccugaucuacggcaaccccagcugcgaccugcugcugggcggcagagaguggagcuacaucguggagagacccagcgccgugaacggccugugcuaccccggcaacguggagaaccuggaggagcugagaagccuguucagcagcgccagaagcuaccagagaauccagaucuuccccgacaccaucuggaacgugagcuacagcggcaccagcaaggccugcagcgacagcuucuacagaagcaugagauggcugacccagaaggacaacgccuaccccauccaggacgcccaguacaccaacaaccagggcaagaacauccuguucauguggggcaucaaccacccccccaccgacaccgcccagaccaaccuguacaccagaaccgacaccaccaccagcguggccaccgaggagaucaacagaaccuucaagccccugaucggccccagaccccuggugaacggccugaugggcagaaucaacuacuacuggagcgugcugaagcccggccagacccugagaaucaagagcaacggcaaccugaucgcccccugguacggccacauccugagcggcgagagccacggcagaauccugaagaccgaccugaagagaggcagcugcaccgugcagugccagaccgagaagggcggccugaacaccacccugcccuuccagaacgugagcaaguacgccuucggcaacugcagcaaguacaucggcaugaagagccugaagcuggccgugggccugagaaacgugcccagcagaagcagcagaggccuguucggcgccaucgccggcuucaucgagggcggcuggagcggccugguggccggcugguacggcuuccagcacagcaacgaccagggcgugggcauggccgccgacagagacagcacccagaaggccaucgacaagaucaccagcaaggugaacaacaucguggacaagaugaacaagcaguacgagaucaucgaccacgaguucagcgagguggagaccagacugaacaugaucaacaacaagaucgacgaccagauccaggacaucugggccuacaacgccgagcugcuggugcugcuggagaaccagaagacccuggacgagcacgacgccaacgugaacaaccuguacaacaaggugaagagagcccugggcagcaacgccguggaggacggcaagggcugcuucgagcuguaccacaagugcgacgaccagugcauggagaccaucagaaacggcaccuacaacagaagaaaguaccaggaggagagcaagcuggagagacagaagaucgagggcgugaagcuggagagcgagggcaccuacaagauccugaccaucuacagcaccguggccagcagccuggugaucgccaugggcuucgccgccuuccuguucugggccaugagcaacggcagcugcagaugcaacaucugcaucuga

SEQ ID NO: 170373 - RNA, 1683 nt, Artificial Sequence; identical to SEQ ID NO: 170372
  derived and/or modified CDS sequence (opt4) from hemagglutinin__InfluenzaA__AGQ81171

SEQ ID NO: 170374 - RNA, 1683 nt, Artificial Sequence; identical to SEQ ID NO: 170372
  derived and/or modified CDS sequence (opt4) from hemagglutinin__InfluenzaA__AGQ81172

SEQ ID NO: 170375 - RNA, 1683 nt, Artificial Sequence
  derived and/or modified CDS sequence (opt4) from hemagglutinin__InfluenzaA__AGQ81173
auggagaccgccagccugaucaccauccugcugguggugaccgugagcaacgccgacaagaucugcaucggcuaccagagcaccaacagcaccgagaccguggacacccugaccgagaacaacgugcccgugacccacgccaaggagcugcugcacaccgagcacaacggcaugcugugcgccaccagccugggcaacccccugauccuggacaccugcaccaucgagggccugaucuacggcaaccccagcugcgaccugcugcugggcggcagagaguggagcuacaucguggagagacccagcgccgugaacggccugugcuaccccggcaacguggagaaccuggaggagcugagaagccuguucagcagcgccagaagcuaccagagaauccagaucuuccccgacaccaucuggaacgugagcuacagcggcaccagcaaggccugcagcgacagcuucuacagaagcaugagauggcugacccagaaggacaacgccuaccccauccaggacgcccaguacaccaacaaccagggcaagaacauccuguucauguggggcaucaaccacccccccaccgacaccgcccagaccaaccuguacaccagaaccgacaccaccaccagcguggccaccgaggagaucaacagaaccuucaagccccugaucggccccagaccccuggugaacggccugaugggcagaaucaacuacuacuggagcgugcugaagcccggccagacccugagaaucaagagcaacggcaaccugaucgcccccugguacggccacauccugagcggcgagagccacggcagaauccugaagaccgaccugaagagaggcagcugcaccgugcagugccagaccgagaagggcggccugaacaccacccugcccuuccagaacgugagcaaguacgccuucggcaacugcagcaaguacaucggcaugaagagccugaagcuggccgugggccugagaaacgugcccagcagaagcagcagaggccuguucggcgccaucgccggcuucaucgagggcggcuggagcggccugguggccggcugguacggcuuccagcacagcaacgaccagggcgugggcauggccgccgacagagacagcacccagaaggccaucgacaagaucaccagcaaggugaacaacaucguggacaagaugaacaagcaguacgagaucaucgaccacgaguucagcgagguggagaccagacugaacaugaucaacaacaagaucgacgaccagauccaggacaucugggccuacaacgccgagcugcuggugcugcuggagaaccagaagacccuggacgagcacgacgccaacgugaacaaccuguacaacaaggugaagagagcccugggcagcaacgccguggaggacggcaagggcugcuucgagcuguaccacaagugcgacgaccagugcauggagaccaucagaaacggcaccuacaacagaagaaaguaccaggaggagagcaagcuggagagacagaagaucgagggcgugaagcuggagagcgagggcaccuacaagauccugaccaucuacagcaccguggccagcagccuggugaucgccaugggcuucgccgccuuccuguucugggccaugagcaacggcagcugcagaugcaacaucugcaucuga

SEQ ID NO: 170376 - RNA, 1683 nt, Artificial Sequence; identical to SEQ ID NO: 170372
  derived and/or modified CDS sequence (opt4) from hemagglutinin__InfluenzaA__AGQ81175

SEQ ID NO: 170377 - RNA, 1683 nt, Artificial Sequence
  derived and/or modified CDS sequence (opt4) from hemagglutinin__InfluenzaA__AGQ81177
auggagaccgugagccugaucaccauccugcugguggccaccgugagcaacgccgacaagaucugcaucggcuaccagagcaccaacagcaccgagaccguggacacccugaccgagaacaacgugcccgugacccacgccaaggagcugcugcacaccgagcacaacggcaugcugugcgccaccagccugggccagccccugauccuggacaccugcaccaucgagggccugaucuacggcaaccccagcugcgaccugcugcuggagggcagagaguggagcuacaucguggagagacccagcgccgugaacggccugugcuaccccggcaacguggagaaccuggaggagcugagaagccuguucagcagcgccagaagcuaccagagaauccagaucuuccccgacaccaucuggaacgugagcuacaacggcaccagcaaggccugcagcggcagcuucuacagaagcaugagauggcugaccagaaagaacggcgacuaccccauccaggacgcccaguacaccaacaaccagggcaagaacauccuguucauguggggcaucaaccacccccccaccgacaccacccagagagaccuguacaccagaaccgacaccaccaccagcguggccaccgaggagaucaacagaaucuucaagccccugaucggccccagaccccuggugaacggccugaugggcagaaucgacuacuacuggagcgugcugaagcccggccagacccugagaaucaagagcgacggcaaccugaucgcccccugguacggccacauccugagcggcgagagccacggcagaauccugaagaccgaccugaagagaggcagcugcaccgugcagugccagaccgagaagggcggccugaacaccacccugcccuuccagaacgugagcaaguacgccuucggcaacugcagcaaguacaucggcaucaagagccugaagcuggccgugggccugagaaacgugcccagcagaagcagcagaggccuguucggcgccaucgccggcuucaucgagggcggcuggagcggccugguggccggcugguacggcuuccagcacagcaacgaccagggcgugggcauggccgccgacagagacagcacccagaaggccaucgacaagaucaccagcaaggugaacaacaucguggacaagaugaacaagcaguacgagaucaucgaccacgaguucagcgagguggagaccagacugaacaugaucaacaacaagaucgacgaccagauccaggacaucugggccuacaacgccgagcugcuggugcugcuggagaaccagaagacccuggacgagcacgacgccaacgugaacaaccuguacaacaaggugaagagagcccugggcagcaacgccguggaggacggcaagggcugcuucgagcuguaccacaagugcgacgaccagugcauggagaccaucagaaacggcaccuacaacagaagaaaguaccaggaggagagcaagcuggagagacagaagaucgagggcgugaagcuggagagcgagggcaccuacaagauccugaccaucuacagcaccguggccagcagccuggugaucgccaugggcuucgccgccuuccuguucugggccaugagcaacggcagcugcagaugcaacaucugcaucuga

SEQ ID NO: 170378 - RNA, 1683 nt, Artificial Sequence; identical to SEQ ID NO: 170377
  derived and/or modified CDS sequence (opt4) from hemagglutinin__InfluenzaA__AGQ81178

SEQ ID NO: 170379 - RNA, 1683 nt, Artificial Sequence; identical to SEQ ID NO: 170369
  derived and/or modified CDS sequence (opt4) from hemagglutinin__InfluenzaA__AGQ81181

SEQ ID NO: 170380 - RNA, 1683 nt, Artificial Sequence; identical to SEQ ID NO: 170369
  derived and/or modified CDS sequence (opt4) from hemagglutinin__InfluenzaA__AGQ81183

SEQ ID NO: 170381 - RNA, 1683 nt, Artificial Sequence; identical to SEQ ID NO: 170368
  derived and/or modified CDS sequence (opt4) from hemagglutinin__InfluenzaA__AGQ81184

SEQ ID NO: 170382 - RNA, 1683 nt, Artificial Sequence
  derived and/or modified CDS sequence (opt4) from hemagglutinin__InfluenzaA__AGQ81185
auggagaccgccagccugaucaccauccugcugguggccaccgugagcaacgccgacaagaucugcaucggcuaccagagcaccaacagcaccgagaccguggacacccugaccgagaacaacgugcccgugacccacgccaaggagcugcugcacaccgagcacaacggcaugcugugcgccaccagccugggccagccccugauccuggacaccugcaccaucgagggccugaucuacggcaaccccagcugcgaccugcugcuggagggcagagaguggagcuacaucguggagagacccagcgccgugaacggccugugcuaccccggcaacguggagaaccuggaggagcugagaagccuguucagcagcgccagaagcuaccagagaauccagaucuuccccgacaccaccuggaacgugagcuacaacggcaccagcaaggccugcagcggcagcuucuacagaagcaugagauggcugacccagaagaacagcaacuaccccauccaggacgcccaguacaccaacaaccagggcaagaacauccuguucauguggggcaucaaccacccccccaccgacaccacccagagagaccuguacaccagaaccgacaccaccaccagcguggccaccgaggagaucaacagaaucuucaagccccugaucggccccagaccccuggugaacggccugaugggcagaaucgacuacuacuggagcgugcugaagcccggccagacccugagaaucaagagcgacggcaaccugaucgcccccugguacggccacauccugagcggcgagagccacggcagaauccugaagaccgaccugaagagaggcagcugcaccgugcagugccagaccgagaagggcggccugaacaccacccugcccuuccagaacgugagcaaguacgccuucggcaacugcagcaaguacaucggcaucaagagccugaagcuggccgugggccugagaaacgugcccagcagaagcagcagaggccuguucggcgccaucgccggcuucaucgagggcggcuggagcggccugguggccggcugguacggcuuccagcacagcaacgaccagggcgugggcauggccgccgacagagacagcacccagaaggccaucgacaagaucaccagcaaggugaacaacaucguggacaagaugaacaagcaguacgagaucaucgaccacgaguucagcgagguggagaccagacugaacaugaucaacaacaagaucgacgaccagauccaggacaucugggccuacaacgccgagcugcuggugcugcuggagaaccagaagacccuggacgagcacgacgccaacgugaacaaccuguacaacaaggugaagagagcccugggcagcaacgccguggaggacggcaagggcugcuucgagcuguaccacaagugcgacaaccagugcauggagaccaucagaaacggcaccuacaacagaagaaaguaccaggaggagagcaagcuggagagacagaagaucgagggcgugaagcuggagagcgagggcaccuacaagauccugaccaucuacagcaccguggccagcagccuggugaucgccaugggcuucgccgccuuccuguucugggccaugagcaacggcagcugcagaugcaacaucugcaucuga

SEQ ID NO: 170383 - RNA, 1683 nt, Artificial Sequence
  derived and/or modified CDS sequence (opt4) from hemagglutinin__InfluenzaA__AGQ81186
auggagaccgugagccugaucaccauccugcugguggccaccgugagcaacgccgacaagaucugcaucggcuaccagagcaccaacagcaccgagaccguggacacccugaccgagaacaacgugcccgugacccacgccaaggagcugcugcacaccgagcacaacggcaugcugugcgccaccagccugggccagccccugauccuggacaccugcaccaucgagggccugaucuacggcaaccccagcugcgaccugcugcuggagggcagagaguggagcuacaucguggagagacccagcgccgugaacggccugugcuaccccggcaacguggagaaccuggaggagcugagaagccuguucagcagcgccagaagcuaccagagaauccagaucuuccccgacaccaucuggaacgugagcuacgacggcaccagcaaggccugcagcggcagcuucuacagaagcaugagauggcugacccagaagaacagcgacuaccccauccaggacgcccaguacaccaacaaccagggcaagaacauccuguucauguggggcaucaaccacccccccaccgacaccacccagagagaccuguacaccagaaccgacaccaccaccagcguggccaccgaggagaucaacagaaucuucaagccccugaucggccccagaccccuggugaacggccugaugggcagaaucgacuacuacuggagcgugcugaagcccggccagacccugagaaucaagagcgacggcaaccugaucgcccccugguacggccacauccugagcggcgagagccacggcagaauccugaagaccgaccugaagaagggcagcugcaccgugcagugccagaccgagaagggcggccugaacaccacccugcccuuccagaacgugagcaaguacgccuucggcaacugcagcaaguacaucggcaucaagagccugaagcuggccaucggccugagaaacgugcccagcagaagcagcagaggccuguucggcgccaucgccggcuucaucgagggcggcuggagcggccugguggccggcugguacggcuuccagcacagcaacgaccagggcgugggcauggccgccgacagagacagcacccagaaggccaucgacaagaucaccagcaaggugaacaacaucguggacaagaugaacaagcaguacgagaucaucgaccacgaguucagcgagguggagaccagacugaacaugaucaacaacaagaucgacgaccagauccaggacaucugggccuacaacgccgagcugcuggugcugcuggagaaccagaagacccuggacgagcacgacgccaacgugaacaaccuguacaacaaggugaagagagcccugggcagcaacgccguggaggacggcaagggcugcuucgagcuguaccacaagugcgacgaccagugcauggagaccaucagaaacggcaccuacaacagaaagaaguaccaggaggagagcaagcuggagagacagaagaucgagggcgugaagcuggagagcgagggcaccuacaagauccugaccaucuacagcaccguggccagcagccuggugaucgccaugggcuucgccgccuuccuguucugggccaugagcaacggcagcugcagaugcaacaucugcaucuga

SEQ ID NO: 170384 - RNA, 1683 nt, Artificial Sequence; identical to SEQ ID NO: 170372
  derived and/or modified CDS sequence (opt4) from hemagglutinin__InfluenzaA__AGQ81190

SEQ ID NO: 170385 - RNA, 1683 nt, Artificial Sequence; identical to SEQ ID NO: 170372
  derived and/or modified CDS sequence (opt4) from hemagglutinin__InfluenzaA__AGQ81191

SEQ ID NO: 170386 - RNA, 1683 nt, Artificial Sequence; identical to SEQ ID NO: 170377
  derived and/or modified CDS sequence (opt4) from hemagglutinin__InfluenzaA__AGQ81192

SEQ ID NO: 170387 - RNA, 1683 nt, Artificial Sequence
  derived and/or modified CDS sequence (opt4) from hemagglutinin__InfluenzaA__AGQ81193
auggagaccgugagccugaucaccauccugcugguggccaccgugagcaacgccgacaagaucugcaucggcuaccagagcaccaacagcaccgagaccguggacacccugaccgagaacaacgugcccgugacccacgccaaggagcugcugcacaccgagcacaacggcaugcugugcgccaccagccugggccagccccugauccuggacaccugcaccaucgagggccugaucuacggcaaccccagcugcgaccugcugcuggagggcagagaguggagcuacaucguggagagacccagcgccgugaacggccugugcuaccccggcaacguggagaaccuggaggagcugagaagccuguucagcagcgccagaagcuaccagagaauccagaucuuccccgacaccaucuggaacgugagcuacaccggcaccagcaaggccugcagcggcagcuucuacagaagcaugagauggcugacccagaagaacggcgacuaccccauccaggacgcccaguacaccaacaaccagggcaagaacauccuguucauguggggcaucaaccacccccccaccgacaccacccagagagaccuguacaccagaaccgacaccaccaccagcguggccaccgaggagaucaacagaaucuucaagccccugaucggccccagaccccuggugaacggccugaugggcagaaucgacuacuacuggagcgugcugaagcccggccagacccugagaaucaagagcgacggcaaccugaucgcccccugguacggccacgugcugagcggcgagagccacggcagaauccugaagaccgaccugaagagaggcagcugcaccgugcagugccagaccgagaagggcggccugaacaccacccugcccuuccagaacgugagcaaguacgccuucggcaacugcagcaaguacaucggcaucaagagccugaagcuggccgugggccugagaaacgugcccagcagaagcagcagaggccuguucggcgccaucgccggcuucaucgagggcggcuggagcggccugguggccggcugguacggcuuccagcacagcaacgaccagggcgugggcauggccgccgacagagacagcacccagaaggccaucgacaagaucaccagcaaggugaacaacaucguggacaagaugaacaagcaguacgagaucaucgaccacgaguucagcgagguggagaccagacugaacaugaucaacaacaagaucgacgaccagauccaggacaucugggccuacaacgccgagcugcuggugcugcuggagaaccagaagacccuggacgagcacgacgccaacgugaacaaccuguacaacaaggugaagagagcccugggcagcaacgccguggaggacggcaagggcugcuucgagcuguaccacaagugcgacgaccagugcauggagaccaucagaaacggcaccuacaacagaagaaaguaccaggaggagagcaagcuggagagacagaagaucgagggcgugaagcuggagagcgagggcaccuacaagauccugaccaucuacagcaccguggccagcagccuggugaucgccaugggcuucgccgccuuccuguucugggccaugagcaacggcagcugcagaugcaacaucugcaucuga

SEQ ID NO: 170388 - RNA, 1683 nt, Artificial Sequence; identical to SEQ ID NO: 170372
  derived and/or modified CDS sequence (opt4) from hemagglutinin__InfluenzaA__AGQ81194

SEQ ID NO: 170389 - RNA, 1686 nt, Artificial Sequence
  derived and/or modified CDS sequence (opt4) from hemagglutinin__InfluenzaA__AGQ81195
auguacaagaucguggugaucaucacccugcugggcaccgugaagggccuggacaagaucugccugggccaccacgccguggccaacggcaccaucgugaagacccugaccaacgagcaggaggaggugaccaacgccaccgagaccguggagggcaagagccugaacagacugugcaugaagggcagaaaccacaaggaccugggcaacugccaccccaucggcaugcugaucggcacccccgccugcgaccugcaccugaccggcaccugggacacccugaucgagagagagaacgccaucgccuacugcuaccccggcgccaccaucaacgaggaggcccugagacagaagaucauggagagcggcggcaucagcaagaucagcaccggcuucaccuacggcagcagcaucaacagcgccggcaccaccagagccugcaugagaaacggcggcaacagcuucuacgccgagcugaaguggcuggugagcaagagcaagggccagaacuucccccagaccaccaacaccuacagaaacaccgacaccagcgagcaccugaucauguggggcauccaccaccccagcagcacccaggagaagaacgaccuguacggcacccagagccugagcaucagcgugggcagcagcaccuaccagaacaacuucgugcccguggugggcgccagaccccaggugaacggccagagcggcagaaucgacuuccacuggacccuggugcagcccggcgacaacaucaccuucagccacaacggcggccugaucgcccccagcagagugagcaagcugaucggcagaggccugggcauccagagcgacgccagcaucgacaacaacugcgagagcaagugcuucuggagaggcggcagcaucaacaccagacugcccuuccagaaccugagccccagaaccgugggccagugccccaaguacgugaacaagagaagccugaugcuggccaccggcaugagaaacgugcccgagaucaugcagggcagaggccuguucggcgccaucgccggcuucaucgagaacggcugggagggcaugguggacggcugguacggcuucagacaccagaacgcccagggcaccggccaggccgccgacuacaagagcacccaggccgccaucgaccagaucaccggcaagcugaacagacugaucgagaagaccaacaccgaguucgagagcaucgagagcgaguucagcgagaucgagcaccagaucggcaacgugaucaacuggaccaaggacagcaucaccgacaucuggaccuaccaggccgagcugcugguggccauggagaaccagcacaccaucgacauggccgacagcgagaugcugaaccuguacgagagagugagaaagcagcugagacagaacgccgaggaggacggcaagggcugcuucgagaucuaccacgccugcgacgacagcugcauggagagcaucagaaacaacaccuacgaccacagccaguacagagaggaggcccugcugaacagacugaacaucaaccccgugacccugagcagcggcuacaaggacaucauccugugguucagcuucggcgccagcugcuucgugcugcuggccguggugaugggccugguguucuucugccugaagaacggcaacaugagaugcaccaucugcaucuga

SEQ ID NO: 170390 - RNA, 1686 nt, Artificial Sequence
  derived and/or modified CDS sequence (opt4) from hemagglutinin__InfluenzaA__AGQ81196
auguacaagaucguggugaucaucgcccugcugggcgccgugaagggccuggacaagaucugccugggccaccacgccguggccaacggcaccaucgugaagacccugaccaacgagcaggaggaggugaccaacgccaccgagaccguggagagcgccagccugaacagacugugcaugaagggcagaagccacaaggaccugggcaacugccaccccaucggcaugcugaucggcacccccgccugcgaccugcaccugaccggcaccugggacacccugaucgagagagagaacgccaucgccuacugcuaccccggcgccaccgugaacgaggaggcccugagacagaagaucauggagagcggcggcaucagcaagaucagcaccggcuucaccuacggcagcagcaucaacagcgccggcaccaccaaggccugcaugagaaacagaggcaacagcuucuacgccgagcugaaguggcuggugagcaagagcaagggccagaacuucccccagaccaccaacaccuacagaaacaccgacaccgccgagcaccugaucauguggggcauccaccaccccagcagcacccaggagaagaacgaccuguacggcacccagagccugagcaucagcgugggcagcagcaccuaccagaacaacuucgugcccguggugggcgccagaccccaggugaacggccagagcggcagaaucgacuuccacuggacccuggugcagcccggcgacaacaucaccuucagccacaacggcggccugaucgcccccagcagagugagcaagcuggugggcagaggccugggcauccagagcgacgcccccaucgacaacaacugcgagagcaagugcuucuggagaggcggcagcaucaacaccagacugcccuuccagaaccugagccccagaaccgugggccagugccccaaguacgugaacaagagaagccugaugcuggccaccggcaugagaaacgugcccgagaucaugcagggcagaggccuguucggcgccaucgccggcuucaucgagaacggcugggagggcaugguggacggcugguacggcuucagacaccagaacgcccagggcaccggccaggccgccgacuacaagagcacccagaccgccaucgaccagaucaccggcaagcugaacagacugaucgagaagaccaacaccgaguucgagagcaucgagagcgaguucagcgagaucgagcaccagaucggcaacgugaucaacuggaccaaggacagcaucaccgacaucuggaccuaccaggccgagcugcugguggccauggagaaccagcacaccaucgacauggccgacagcgagaugcugaaccuguacgagagagugagaaagcagcugagacagaacgccgaggaggacggcaagggcugcuucgagaucuaccacgccugcgacgacagcugcauggagagcaucagaaacaacaccuacgaccacagccaguacagagaggaggcccugcugaacagacugaacaucaaccccgugaagcugagcagcggcuacaaggacaucauccugugguucagcuucggcgccagcugcuucgugcugcuggccguggugaugggccugguguucuucugccugaagaacggcaacaugagaugcaccaucugcaucuga

SEQ ID NO: 170391 - RNA, 1686 nt, Artificial Sequence
  derived and/or modified CDS sequence (opt4) from hemagglutinin__InfluenzaA__AGQ81198
auguacaagaucguggugaucaucgcccugcugggcgccgugaagggccuggacaagaucugccugggccaccacgccguggccaacggcaccaucgugaagacccugaccaacgagcaggaggaggugaccaacgccaccgagaccguggagagcaccagccugaacagacugugcaugaagggcagaaaccacaaggaccugggcaacugccaccccaucggcaugcugaucggcacccccgccugcgaccugcaccugaccggcaccugggacacccugaucgagagagagaacgccaucgccuacugcuaccccggcgccaccaucaacgaggaggcccugagacagaagaucauggagagcggcggcaucagcaagaucagcaccggcuucaccuacggcagcagcaucaacagcgccggcaacaccaaggccugcaugagaaacggcggcaacagcuucuacgccgagcugagauggcuggugagcaagaacaagggccagaacuucccccagaccaccaacaccuacagaaacaccgacaccgccgagcaccugaucaucuggggcauccaccaccccagcagcaccaaggagaagaacgaccuguacggcacccagagccugagcaucagcgugggcagcagcaccuaccagaacaacuucgugcccguggugggcgccagaccccaggugaacggccagagcggcagaaucgacuuccacuggacccuggugcagcccggcgacaacaucaccuucagccacaacggcggccugaucgcccccagcagagugagcaagcugaucggcagaggccugggcauccagagcgacgcccccaucgacaacaacugcgagagcaagugcuucuggagaggcggcagcaucaacaccagacugcccuuccagaaccugagccccagaaccgugggccagugccccaaguacgugaacaagaagagccugaugcuggccaccggcaugagaaacgugcccgagaucaugcagggcagaggccuguucggcgccaucgccggcuucaucgagaacggcugggagggcaugguggacggcugguacggcuucagacaccagaacgcccagggcaccggccaggccgccgacuacaagagcacccaggccgccaucgaccagaucaccggcaagcugaacagacugaucgagaagaccaacaccgaguucgagagcaucgagagcgaguucagcgagaucgagcaccagaucggcaacgugaucaacuggaccaaggacagcaucaccgacaucuggaccuaccaggccgagcugcugguggccauggagaaccagcacaccaucgacauggccgacagcgagaugcugaaccuguacgagagagugagaaagcagcugagacagaacgccgaggaggacggcaagggcugcuucgagaucuaccacgccugcgacgacagcugcauggagagcaucagaaacaacaccuacgaccacagccaguacagagaggaggcccugcugaacagacugaacaucaaccccgugacccugagcagcggcuacaaggacaucauccugugguucagcuucggcgccagcugcuucgugcugcuggccguggugaugggccugguguucuucugccugaagaacggcaacaugagaugcaccaucugcaucuga

SEQ ID NO: 170392 - RNA, 1686 nt, Artificial Sequence
  derived and/or modified CDS sequence (opt4) from hemagglutinin__InfluenzaA__AGQ81199
auguacaagaucguggugaucaucgcccugcugggcgccgugaagggccuggacaagaucugccugggccaccacgccguggccaacggcaccaucgugaagacccugaccaacgagcaggaggaggugaccaacgccaccgagaccguggagagcgccagccugaacagacugugcaugaagggcagaagccacaaggaccugggcaacugccaccccaucggcaugcugaucggcacccccgccugcgaccugcaccugaccggcaccugggacacccugaucgagagagagaacgccaucgccuacugcuaccccggcgccaccgugaacgaggaggcccugagacagaagaucauggagagcggcggcaucagcaagaucagcaccggcuucaccuacggcagcagcaucaacagcgccggcaccaccaaggccugcaugagaaacggcggcaacagcuucuacgccgagcugaaguggcuggugagcaagagcaagggccagaacuucccccagaccaccaacaccuacagaaacaccgacaccgccgagcaccugaucauguggggcauccaccaccccagcagcacccaggagaagaacgaccuguacggcacccagagccugagcaucagcgugggcagcagcaccuaccagaacaacuucgugcccguggugggcgccagaccccaggugaacggccagagcggcagaaucgacuuccacuggacccuggugcagcccggcgacaacaucaccuucagccacaacggcggccugaucgcccccagcagagugagcaagcuggugggcagaggccugggcauccagagcgacgcccccaucgacaacaacugcgagagcaagugcuucuggagaggcggcagcaucaacaccagacugcccuuccagaaccugagccccagaaccgugggccagugccccaaguacgugaacaagagaagccugaugcuggccaccggcaugagaaacgugcccgagaucaugcagggcagaggccuguucggcgccaucgccggcuucaucgagaacggcugggagggcaugguggacggcugguacggcuucagacaccagaacgcccagggcaccggccaggccgccgacuacaagagcacccagaccgccaucgaccagaucaccggcaagcugaacagacugaucgagaagaccaacaccgaguucgagagcaucgagagcgaguucagcgagaucgagcaccagaucggcaacgugaucaacuggaccaaggacagcaucaccgacaucuggaccuaccaggccgagcugcugguggccauggagaaccagcacaccaucgacauggccgacagcgagaugcugaaccuguacgagagagugagaaagcagcugagacagaacgccgaggaggacggcaagggcugcuucgagaucuaccacgccugcgacgacagcugcauggagagcaucagaaacaacaccuacgaccacagccaguacagagaggaggcccugcugaacagacugaacaucaaccccgugaagcugagcagcggcuacaaggacaucauccugugguucagcuucggcgccagcugcuucgugcugcuggccguggugaugggccugguguucuucugccugaagaacggcaacaugagaugcaccaucugcaucuga

SEQ ID NO: 170393 - RNA, 1698 nt, Artificial Sequence
  derived and/or modified CDS sequence (opt4) from hemagglutinin__InfluenzaA__AGQ81200
augaagaagacccugcuguucgccgccaucuuccuguacgugaaggccgacgagaucugcaucggcuaccugagcaacaacagcaccgacaagguggacaccaucaucgagaacaacgugaccgugaccagcagcguggagcugguggagaccgagcacaccggcagcuucugcagcaucaacggcaagcagcccaucggccugggcgacugcagcuucgccggcuggauccugggcaaccccaugugcgacgaccugaucggcaagaccagcuggagcuacaucguggagaagcccaaccccgccaacggcaucugcuaccccggcacccuggagaacgaggaggagcugagacugaaguucagcggcgugcuggaguucagcaaguucgaggccuucaccagcaccggcuggggcgccgugaacagcggcgccggcgugaccgccgccugcaaguucggcagcagcaacagcuucuucagaaacaugguguggcugauccaccagagcggcaccuaccccgugaucaagagaaccuucaacaacaccaagggcagagacgugcuggugguguggggcauccaccaccccgccacccugaaggagcaccaggaccuguacaagaaggacagcagcuacguggccgugggcagcgagaccuacaacagaagauucauccccgagaucagcaccagacccaaggugaacggccaggccggcagaaugaccuucuacuggaccaucgugaagcccggcgagagcaucaccuucgagagcaacggcgccuuccuggcccccagauacgccuucgagaucgugagcgugggcaacggcaagcuguucagaagcgagcugaacaucgagagcugcagcaccaagugccagaccgagaucggcggcaucaacaccaacaagagcuuccacagcgugcacagaaacaccaucggcgacugccccaaguacgugaacgugaagagccugaagcuggccaccggccugagaaacgugcccgccaucgccagcagaggccuguucggcgccaucgccggcuucaucgagggcggcuggcccggccugaucaacggcugguacggcuuccagcacagaaacgaggagggcaccggcaucgccgccgacaaggagagcacccagaaggccaucgaccagaucaccagcaaggugaacaacaucguggacaagaugaacaccaacuucgagagcgugcagcacgaguucagcgagaucgaggagagaaucaaccagcugagcaagcacguggacgacagcgugguggacaucuggagcuacaacgcccagcugcuggugcugcuggagaacgagaagacccuggaccugcacgacagcaacgugagaaaccugcacgagaaggugagaagaaugcugaaggacaacgccaaggacgagggcaacggcugcuucaccuucuaccacaagugcgacaacgagugcaucgagagagugagaaacggcaccuacgaccacaaggaguucgaggaggagagcaagaucaacagacaggagaucgagggcgugaagcuggacagcagcggcaacguguacaagauccugagcaucuacagcugcaucgccagcagccuggugcuggccgcccugaucaugggcuucauccugugggccugcagcaacggcagcugcagaugcaccaucugcaucuga

SEQ ID NO: 170394 - RNA, 1698 nt, Artificial Sequence
  derived and/or modified CDS sequence (opt4) from hemagglutinin__InfluenzaA__AGQ81202
augaagaagacccugcuguucgccgccaucuuccuguacgugaaggccgacgagaucugcaucggcuaccugagcaacaacagcaccgacaagguggacaccaucaucgagaacaacgugaccgugaccagcagcguggagcugguggagaccgagcacaccggcagcuucugcagcaucaacggcaagcagcccaucagccugggcgacugcagcuucgccggcuggauccugggcaaccccaugugcgacgaccugaucggcaagaccagcuggagcuacaucguggagaagcccaaccccgccaacggcaucugcuaccccggcacccuggagaacgaggaggagcugagacugaaguucagcggcgugcuggaguucagcaaguucgaggccuucaccagcaacggcuggggcgccgugaacagcggcgccggcgugaccgccgccugcaaguucggcagcagcaacagcuucuucagaaacaccguguggcugauccaccagagcggcaccuaccccgugaucaagagaaccuucaacaacaccaagggcagagacgugcuggugguguggggcgugcaccaccccgccacccugaaggagcaccaggaccuguacaagaaggacagcagcuacguggccgugggcagcgagaccuacaacagaagauucauccccgagaucagcaccagacccaaggugaacggccaggccggcagaaugaccuucuacuggaccaucgugaagcccggcgagagcaucaccuucgagagcaacggcgccuuccuggcccccagauacgccuucgagaucgugagcgugggcaacggcaagcuguucagaagcgagcugaacaucgagagcugcagcaccaagugccagaccgagaucggcggcaucaacaccaacaagagcuuccacagcgugcacagaaacaccaucggcgacugccccaaguacgugaacgugaagagccugaagcuggccaccggccugagaaacgugcccgccaucgccagcagaggccuguucggcgccaucgccggcuucaucgagggcggcuggcccggccugaucaacggcugguacggcuuccagcacagaaacgaggagggcaccggcaucgccgccgacaaggagagcacccagaaggccaucgaccagaucaccagcaaggugaacaacaucguggacagaaugaacaccaacuucgagagcgugcagcacgagagcagcgagaucgaggagagaaucaaccagcugagcaagcacguggacgacagcaugguggacaucuggagcuacaacgcccagcugcuggugcugcuggagaacgagaagacccuggaccugcacgacagcaacgugagaaaccugcacgagaaggugagaagaaugcugaaggacaacgccaaggacgagggcaacggcugcuucaccuucuaccacaagugcgacaacaagugcaucgagagagugagaaacggcaccuacgaccacaaggaguucgaggaggagagcaagaucaacagacaggagaucgagggcgugaagcuggacagcagcggcaacguguacaagauccugagcaucuacagcugcaucgccagcagccuggugcuggccgcccugaucaugggcuucauccugugggccugcagcaacggcagcugcagaugcaccaucugcaucuga

SEQ ID NO: 170395 - RNA, 1698 nt, Artificial Sequence
  derived and/or modified CDS sequence (opt4) from hemagglutinin__InfluenzaA__AGQ81203
augaagaagacccugcuguucgccgccaucuuccuguacgugaaggccgacgagaucugcaucggcuaccugagcaacaacagcaccgacaagguggacaccaucaucgagaacaacgugaccgugaccagcagcguggagcugguggagaccgagcacaccggcagcuucugcagcaucaacggcaagcagcccaucagccugggcgacugcagcuucgccggcuggauccugggcaaccccaugugcgacgaccugaucggcaagaccagcuggagcuacaucguggagaagcccaaccccgccaacggcaucugcuaccccggcacccuggagaacgaggaggagcugagacugaaguucagcggcgugcuggaguucaacaaguucgaggccuucaccagcaacggcuggggcgccgugaacagcggcgccggcgugaccgccgccugcaaguucggcagcagcaacagcuucuucagaaacaugguguggcugauccaccagagcggcaccuaccccgugaucaagagaaccuucaacaacaccaagggcagagacgugcuggugguguggggcauccaccaccccgccacccugaaggagcaccaggaccuguacaagaaggacagcagcuacguggccgugggcagcgagaccuacaacagaagauucauccccgagaucagcaccagacccaaggugaacggccaggccggcagaaugaccuucuacuggaccaucgugaagcccggcgagagcaucaccuucgagagcaacggcgccuuccuggcccccagauacgccuucgagaucgugagcgugggcaacggcaagcuguucagaagcgagcugaacaucgagagcugcagcaccaagugccagaccgagaucggcggcaucaacaccaacaagagcuuccacagcgugcacagaaacaccaucggcgacugccccaaguacgugaacgugaagagccugaagcuggccaccggccugagaaacgugcccgccaucgccagcagaggccuguucggcgccaucgccggcuucaucgagggcggcuggcccggccugaucaacggcugguacggcuuccagcacagaaacgaggagggcaccggcaucgccgccgacaaggagagcacccagaaggccaucgaccagaucaccagcaaggugaacaacaucguggacagaaugaacaccaacuucgagagcgugcagcacgaguucagcgagaucgaggagagaaucaaccagcugagcaagcacguggacgacagcgugguggacaucuggagcuacaacgcccagcugcuggugcugcuggagaacgagaagacccuggaccugcacgacagcaacgugagaaaccugcacgagaaggugagaagaaugcugaaggacaacgccaaggacgagggcaacggcugcuucaccuucuaccacaagugcgacaacgagugcaucgagagagugagaaacggcaccuacgaccacaaggaguucgaggaggagagcaagaucaacagacaggagaucgagggcgugaagcuggacagcagcggcaacguguacaagauccugagcaucuacagcugcaucgccagcagccuggugcuggccgcccugaucaugggcuucauccugugggccugcagcaacggcagcugcagaugcaccaucugcaucuga

SEQ ID NO: 170396 - RNA, 1698 nt, Artificial Sequence
  derived and/or modified CDS sequence (opt4) from hemagglutinin__InfluenzaA__AGQ81204
augaagaagacccugcuguucgccgccaucuuccuguacgugaaggccgacgagaucugcaucggcuaccugagcaacaacagcaccgacaagguggacaccaucaucgagaacaacgugaccgugaccagcagcguggagcugguggagaccgagcacaccggcagcuucugcagcaucaacggcaagcagcccaucagccugggcgacugcagcuucgccggcuggauccugggcaaccccaugugcgacgaccugaucggcaagaccagcuggagcuacaucguggagaagcccaaccccgccaacggcaucugcuaccccggcacccuggagaacgaggaggagcugagacugaaguucagcggcgugcuggaguucaacaaguucgaggccuucaccagcaacggcuggggcgccgugaacagcggcgccggcgugaccgccgccugcaaguucggcagcagcaacagcuucuucagaaacaugguguggcugauccaccagagcggcaccuaccccgugaucaagagaaccuucaacaacaccaagggcagagacgugcuggugguguggggcauccaccaccccgccacccugaaggagcaccaggaccuguacaagaaggacagcagcuacguggccgugggcagcgagaccuacaacagaagauucauccccgagaucagcaccagacccaaggugaacggccaggccggcagaaugaccuucuacuggaccaucgugaagcccggcgagagcaucaccuucgagagcaacggcgccuuccuggcccccagauacgccuucgagaucgugagcgugggcaacggcaagcuguucagaagcgagcugaacaucgagagcugcagcaccaagugccagaccgagaucggcggcaucaacaccaacaagagcuuccacagcgugcacagaaacaccaucggcgacugccccaaguacgugaacgugaagagccugaagcuggccaccggccugagaaacgugcccgccaucgccagcagaggccuguucggcgccaucgccggcuucaucgagggcggcuggcccggccugaucaacggcugguacggcuuccagcacagaaacgaggagggcaccggcaucgccgccgacaaggagagcacccagaaggccaucgaccagaucaccagcaaggugaacaacaucguggacagaaugaacaccaacuucggcagcgugcagcacgaguucagcgagaucgaggagagaaucaaccagcugagcaagcacguggacgacagcgugguggacaucuggagcuacaacgcccagcugcuggugcugcuggagaacgagaagacccuggaccugcacgacagcaacgugagaaaccugcacgagaaggugagaagaaugcugaaggacaacgccaaggacgagggcaacggcugcuucaccuucuaccacaagugcgacaacgagugcaucgagagagugagaaacggcaccuacgaccacaaggaguucgaggaggagagcaagaucaacagacaggagaucgagggcgugaagcuggacagcagcggcaacguguacaagauccugagcaucuacagcugcaucgccagcagccuggugcuggccgcccugaucaugggcuucauccugugggccugcagcaacggcagcugcagaugcaccaucugcaucuga

SEQ ID NO: 170397 - RNA, 1698 nt, Artificial Sequence
  derived and/or modified CDS sequence (opt4) from hemagglutinin__InfluenzaA__AGQ81205
augaagaagacccugcuguucgccgccaucuuccuguacgugaaggccgacgagaucugcaucggcuaccugagcaacaacagcaccgacaagguggacaccaucaucgagaacaacgugaccgugaccagcagcguggagcugguggagaccgagcacaccggcagcuucugcagcaucaacggcaagcagcccaucagccugggcgacugcagcuucgccggcuggauccugggcaaccccaugugcgacgaccugaucggcaagaccagcuggagcuacaucguggagaagcccaaccccgccaacggcaucugcuaccccggcacccuggagaacgaggaggagcugagacugaaguucagcggcgugcuggaguucaacaaguucgaggccuucaccagcaacggcuggggcgccgugaacagcggcgccggcgugaccgccaccugcaaguucggcagcagcaacagcuucuucagaaacaugguguggcugauccaccagagcggcaccuaccccgugaucaagagaaccuucaacaacaccaagggcagagacgugcuggugguguggggcauccaccaccccgccacccugaaggagcaccaggaccuguacaagaaggacagcagcuacguggccgugggcagcgagaccuacaacagaagauucauccccgagaucagcaccagacccaaggugaacggccaggccggcagaaugaccuucuacuggaccaucgugaagcccggcgagagcaucaccuucgagagcaacggcgccuuccuggcccccagauacgccuucgagaucgugagcgugggcaacggcaagcuguucagaagcgagcugaacaucgagagcugcagcaccaagugccagaccgagaucggcggcaucaacaccaacaagagcuuccacagcgugcacagaaacaccaucggcgacugccccaaguacgugaacgugaagagccugaagcuggccaccggccugagaaacgugcccgccaucgccagcagaggccuguucggcgccaucgccggcuucaucgagggcggcuggcccggccugaucaacggcugguacggcuuccagcacagaaacgaggagggcaccggcaucgccgccgacaaggagagcacccagaaggccaucgaccagaucaccagcaaggugaacaacaucguggacagaaugaacaccaacuucgagagcgugcaguacgaguucagcgagaucgaggagagaaucaaccagcugagcaagcacguggacgacagcgugguggacaucuggagcuacaacgcccagcugcuggugcugcuggagaacgagaagacccuggaccugcacgacagcaacgugagaaaccugcacgagaaggugagaagaaugcugaaggacaacgccaaggacgagggcaacggcugcuucaccuucuaccacaagugcgacaacgagugcaucgagagagugagaaacggcaccuacgaccacaaggaguucgaggaggagagcaagaucaacagacaggagaucgagggcgugaagcuggacagcagcggcaacguguacaagauccugagcaucuacagcugcaucgccagcagccuggugcuggccgcccugaucaugggcuucauccugugggccugcagcaacggcagcugcagaugcaccaucugcaucuga

SEQ ID NO: 170398 - RNA, 1698 nt, Artificial Sequence
  derived and/or modified CDS sequence (opt4) from hemagglutinin__InfluenzaA__AGQ81206
augaagaagacccugcuguucgccgccaucuuccuguacgccaaggccgacgagaucugcaucggcuaccugagcaacaacagcaccgacaagguggacaccaucaucgagaacaacgugaccgugaccagcagcguggagcugguggagaccgagcacaccggcagcuucugcagcaucaacggcaagcagcccaucagccugggcgacugcagcuucgccggcuggauccugggcaaccccaugugcgacgaccugaucggcaagaccagcuggagcuacaucguggagaagcccaaccccgccaacggcaucugcuaccccggcacccuggagaacgaggaggagcugagaagcaaguucagcggcgugcuggaguucagcaaguucgaggccuucaccagcaacggcuggggcgccgugaacagcggcgccggcgugaccgccgccugcaaguucggcagcagcaacagcuucuucagaaacaugguguggcugauccaccagagcggcaccuaccccgugaucaagagaaccuucaacaacaccaagggcagagacgugcuggugguguggggcauccaccaccccgccacccugaaggagcaccaggaccuguacaagaaggacagcagcuacguggccgugggcagcgagaccuacaacagaagauucauccccgagaucagcaccagacccaaggugaacggccaggccggcagaaugaccuucuacuggaccaucgugaagcccgaggagagcaucaccuucgagagcaacggcgccuuccuggcccccagauacgccuucgagaucgugagcgugggcaacggcaagcuguucagaagcgagcugaacaucgagagcugcagcaccaagugccagaccgagaucggcggcaucaacaccaacaagagcuuccacagcgugcacagaaacaccaucggcgacugccccaaguacgugaacgugaagagccugaagcuggccaccggccugagaaacgugcccgccaucgccagcagaggccuguucggcgccaucgccggcuucaucgagggcggcuggcccggccugaucaacggcugguacggcuuccagcacagaaacgaggagggcaccggcaucgccgccgacaaggagagcacccagaaggccaucgaccagaucaccagcaaggugaacaacaucguggacagaaugaacaccaacuucgagagcgugcagcacgaguucagcgagaucgaggagagaaucaaccagcugagcaagcacguggacgacagcgugguggacaucuggagcuacaacgcccagcugcuggugcugcuggagaacgagaagacccuggaccugcacgacagcaacgugagaaaccugcacgagaaggugagaagaaugcugaaggacaacgccaaggacgagggcaacggcugcuucaccuucuaccacaagugcgacaacgagugcaucgagagagugagaaacggcaccuacgaccacaaggaguucgaggaggagagcaagaucaacagacaggagaucgagggcgugaagcuggacagcagcggcaacguguacaagauccugagcaucuacagcugcaucgccagcagccugauccuggccgcccugaucaugggcuucauccugugggccugcagcaacggcagcugcagaugcaccaucugcaucuga

SEQ ID NO: 170399 - RNA, 1698 nt, Artificial Sequence
  derived and/or modified CDS sequence (opt4) from hemagglutinin__InfluenzaA__AGQ81209
augaagaagacccugcuguucgccgccaucuuccuguacgugaaggccgacgagaucugcaucggcuaccugagcaacaacagcaccgacaagguggacaccaucaucgagaacaacgugaccgugaccagcagcguggagcugguggagaccgagcacaccggcagcuucugcagcaucaacggcaagcagcccaucagccugggcgacugcagcuucgccggcuggauccugggcaaccccaugugcgacgaccugaucggcaagaccagcuggagcuacaucguggagaagcccaaccccgccaacggcaucugcuaccccggcacccuggagaacgaggaggagcugagacugaaguucagcggcauccuggaguucagcaaguucgaggccuucaccagcaacggcuggggcgccgugaacagcggcgccggcgugaccgccgccugcaaguucggcagcagcaacagcuucuucagaaacaugguguggcugauccaccagagcggcaccuaccccgugaucaagagaaccuucaacaacaccaagggcagagacgugcugaucguguggggcauccaccaccccgccacccugaaggagcaccaggaccuguacaagaaggacagcagcuacguggccgugggcagcgagaccuacaacagaagauucauccccgagaucagcaccagacccaaggugaacggccaggccggcagaaugaccuucuacuggaccaucgugaagcccggcgagagcaucaccuucgagagcaacggcgccuuccuggcccccagauacgccuucgagaucgugagcgugggcaacggcaagcuguucagaagcgagcugaacaucgagagcugcagcaccaagugccagaccgagaucggcggcaucaacaccaacaagagcuuccacagcgugcacagaaacaccaucggcgacugccccaaguacgugaacgugaagagccugaagcuggccaccggccugagaaacgugcccgccaucgccagcagaggccuguucggcgccaucgccggcuucaucgagggcggcuggcccggccugaucaacggcugguacggcuuccagcacagaaacgaggagggcaccggcaucgccgccgacaaggagagcacccagaaggccaucgaccagaucaccagcaaggugaacaacaucguggacagaaugaacaccaacuucgagagcgugcagcacgaguucagcgagaucgaggagagaaucaaccagcugagcaagcacguggacgacagcgugguggacaucuggagcuacaacgcccagcugcuggugcugcuggagaacgagaagacccuggaccugcacgacagcaacgugagaaaccugcacgagaaggugagaagaaugcugaaggacaacgccaaggacgagggcaacggcugcuucaccuucuaccacaagugcgacaacgagugcaucgagagagugagaaacggcaccuacgaccacaaggaguucgaggaggagagcaagaucaacagacaggagaucgagggcgugaagcuggacagcagcggcaacguguacagaauccugagcaucuacagcugcaucgccagcagccuggugcuggccgcccugaucaugggcuucauccugugggccugcagcaacggcagcugcagaugcaccaucugcaucuga

SEQ ID NO: 170400 - RNA, 1698 nt, Artificial Sequence
  derived and/or modified CDS sequence (opt4) from hemagglutinin__InfluenzaA__AGQ81211
augaagaagacccugcuguucgccgccaucuuccuguacgugaaggccgacgagaucugcaucggcuaccugagcaacaacagcaccgacaagguggacaccaucaucgagaacaacgugaccgugaccagcagcguggagcugguggagaccgagcacaccggcagcuucugcagcaucaacggcaagcagcccaucagccugggcgacugcagcuucgccggcuggauccugggcaaccccaugugcgacgaccugaucggcaagaccagcuggagcuacaucguggagaagcccaaccccgccaacggcaucugcuaccccggcacccuggagaacgaggaggagcugagacugaaguucagcggcgugcuggaguucagcaaguucgaggccuucaccagcaacggcuggggcgccgugaacagcggcgccggcgugaccgccgccugcaaguucggcagcagcaacagcuucuucagaaacaugguguggcugauccaccagagcggcaccuaccccgugaucaagagaaccuucaacaacaccaagggcagagacgugcugaucguguggggcauccaccaccccgccacccugaaggagcaccaggaccuguacaagaaggacagcagcuacguggccgugggcagcgagaccuacaacagaagauucauccccgagaucagcaccagacccaaggugaacggccaggccggcagaaugaccuucuacuggaccaucgugaagcccggcgagagcaucaccuucgagagcaacggcgccuuccuggcccccagauacgccuucgagaucgugagcgugggcaacggcaagcuguucagaagcgagcugaacaucgagagcugcagcaccaagugccagaccgagaucggcggcaucaacaccaacaagagcuuccacagcgugcacagaaacaccaucggcgacugccccaaguacgugaacgugaagagccugaagcuggccaccggccugagaaacgugcccgccaucgccagcagaggccuguucggcgccaucgccggcuucaucgagggcggcuggcccggccugaucaacggcugguacggcuuccagcacagaaacgaggagggcaccggcaucgccgccgacaaggagagcacccagaaggccaucgaccagaucaccagcaaggugaacaacaucguggacagaaugaacaccaacuucgagagcgugcagcacgaguucagcgagaucgaggagagaaucaaccagcugagcaagcacguggacgacagcgugguggacaucuggagcuacaacgcccagcugcuggugcugcuggagaacgagaagacccuggaccugcacgacuucaacgugagaaaccugcacgagaaggugagaagaaugcugaaggacaacgccaaggacgagggcaacggcugcuucaccuucuaccacaagugcgacaacgagugcaucgagagagugagaaacggcaccuacgaccacaaggaguucgaggaggagagcaagaucaacagacaggagaucgagggcgugaagcuggacagcagcggcaacguguacagaauccugagcaucuacagcugcaucgccagcagccuggugcuggccgcccugaucaugggcuucauccugugggccugcagcaacggcagcugcagaugcaccaucugcaucuga

SEQ ID NO: 170401 - RNA, 1698 nt, Artificial Sequence
  derived and/or modified CDS sequence (opt4) from hemagglutinin__InfluenzaA__AGQ81213
augaagaagacccugcuguucgccgccaucuuccuguacgugagagccgacgagaucugcaucggcuaccugagcaacaacagcaccgacaagguggacaccaucaucgagaacaacgugaccgugaccagcagcguggagcugguggagaccgagcacaccggcagcuucugcagcaucaacggcaagcagcccaucagccugggcgacugcagcuucgccggcuggauccugggcaaccccaugugcgacggccugaucggcaagaccagcuggagcuacaucguggagaagcccaaccccgccaacggcaucugcuaccccggcacccuggagaacgaggaggagcugagacugaaguucagcagagugcuggaguucagcaaguucgaggccuucaccagcaacggcuggggcgccgugaacagcggcgccggcgugaccgccgccugcaaguucggcagcagcaacagcuucuucagaaacaugguguggcugauccaccagagcggcaccuaccccgugaucaagagaaccuucaacaacaccaagggcagagacgugcuggugguguggggcauccaccaccccgccacccugaaggagcaccaggaccuguacaagaaggacagcagcuacguggccgugggcagcgagaccuacaacagaagauucauccccgagaucagcaccagacccaccgugaacggccaggccggcagaaugaccuucuacuggaccaucgugaagcccggcgagagcaucaccuucgagagcaacggcgccuuccuggcccccagauacgccuucgagaucgugagcgugggcaacggcaagcuguucagaagcgagcugaacaucgagagcugcagcaccaagugccagaccgagaucggcggcaucaacaccaacaagagcuuccacagcgugcacagaaacaccaucggcgacugccccaaguacgugaacgugaagagccugaagcuggccaccggccugagaaacgugcccgccaucgccagcagaggccuguucggcgccaucgccggcuucaucgagggcggcuggcccggccugaucaacggcugguacggcuuccagcacagaaacgaggagggcaccggcaucgccgccgacaaggagagcacccagaaggccaucgaccagaucaccagcaaggugaacaacaucguggacagaaugaacaccaacuucgagagcgugcagcacgaguucagcgagaucgaggagagaaucaaccagcugagcaagcacguggacgacagcgugguggacaucuggagcuacaacgcccagcugcuggugcugcuggagaacgagaagacccuggaccugcacgacagcaacgugagaaaccugcacgagaaggugagaagaaugcugaaggacaacgccaaggacgagggcaacggcugcuucaccuucuaccacaagugcgacaacgagugcaucgagagagugagaaacggcaccuacgaccacaaggaguucgaggaggagagcaagaucaacagacaggagaucgagggcgugaagcuggacagcagcggcaacguguacaagauccugagcaucuacagcugcaucgccagcagccuggugcuggccgcccugaucaugggcuucauccugugggccugcagcaacggcagcugcagaugcaccaucugcaucuga

SEQ ID NO: 170402 - RNA, 1698 nt, Artificial Sequence
  derived and/or modified CDS sequence (opt4) from hemagglutinin__InfluenzaA__AGQ81214
augaagaagacccugcuguucgccgccaucuuccuguacgugaaggccgacgagaucugcaucggcuaccugagcaacaacagcaccgacaagguggacaccaucaucgagaacaacgugaccgugaccagcagcguggagcugguggagaccgagcacaccggcagcuucugcagcaucaacggcaagcagcccaucagccugggcgacugcagcuucgccggcuggauccugggcaaccccaugugcgacgaccugaucggcaagaccagcuggagcuacaucguggagaagcccaaccccgccaacggcaucugcuaccccggcacccuggagaacgaggaggagcugagacugaaguucagcggcgugcuggaguucagcaaguucgaggccuucaccagcaacggcuggggcgccgugaacagcggcgccggcgugaccgccgccugcaaguucggcagcagcaacagcuucuucagaaacaugguguggcugauccaccagagcggcaccuaccccgugaucaagagaaccuucaacaacaccaagggcagagacgugcugaucguguggggcauccaccaccccgccacccugaaggagcaccaggaccuguacaagaaggacagcagcuacguggccgugggcagcgagaccuacaacagaagauucauccccgagaucagcaccagacccaaggugaacggccaggccggcagaaugaccuucuacuggaccaucgugaagcccggcgagagcaucaccuucgagagcaacggcgccuuccuggcccccagauacgccuucgagaucgugagcgugggcaacggcaagcuguucagaagcgagcugaacaucgagagcugcagcaccaagugccagaccgagaucggcggcaucaacaccaacaagagcuuccacagcgugcacagaaacaccaucggcgacugccccaaguacgugaacgugaagagccugaagcuggccaccggccugagaaacgugcccgccaucaccagcagaggccuguucggcgccaucgccggcuucaucgagggcggcuggcccggccugaucaacggcugguacggcuuccagcacagaaacgaggagggcaccggcaucgccgccgacaaggagagcacccagaaggccaucgaccagaucaccagcaaggugaacaacaucguggacagaaugaacaccaacuucgagagcgugcagcacgaguucagcgagaucgagggcagaaucaaccagcugagcaagcacguggacgacagcgugguggacaucuggagcuacaacgcccagcugcuggugcugcuggagaacgagaagacccuggaccugcacgacagcaacgugagaaaccugcacgagaaggugagaagaaugcugaaggacaacgccaaggacgagggcaacggcugcuucaccuucuaccacaagugcgacaacgagugcaucgagagagugagaaacggcaccuacgaccacaaggaguucgaggaggagagcaagaucaacagacaggagaucgagggcgugaagcuggacagcagcggcaacguguacaagauccugagcaucuacagcugcaucgccagcagccuggugcuggccgcccugaucaugggcuucauccugugggccugcagcaacggcagcugcagaugcaccaucugcaucuga

SEQ ID NO: 170403 - RNA, 1698 nt, Artificial Sequence
  derived and/or modified CDS sequence (opt4) from hemagglutinin__InfluenzaA__AGQ81215
augaagaagacccugcuguucgccgccaucuuccuguacgugaaggccgacgagaucugcaucggcuaccugagcaacaacagcaccgacaagguggacaccaucaucgagaacaacgugaccgugaccagcagcguggagcugguggagaccgagcacaccggcagcuucugcagcaucaacggcaagcagcccaucagccugggcgacugcagcuucgccggcuggauccugggcaaccccaugugcgacggccugaucggcaagaccagcuggagcuacaucguggagaagcccaaccccgccaacggcaucugcuaccccggcacccuggagaacgaggaggagcugagacugaaguucagcggcauccuggaguucagcaaguucgaggccuucaccagcaacggcuggggcgccgugaacagcggcgccggcgugaccgccgccugcaaguucggcagcagcaacagcuucuucagacacaugguguggcugauccaccagagcggcaccuaccccgugaucaagagaaccuucaacaacaccaagggcagagacgugcuggugguguggggcauccaccaccccgccacccugaaggagcagcaggaccuguacaagaaggacagcagcuacguggccgugggcagcgagaccuacaacagaagauucauccccgagaucagcaccagacccaaggugaacggccaggccggcagaaugaccuucuacuggaccaucgugaagcccggcgagagcaucaccuucgagagcaacggcgccuuccuggcccccagauacgccuucgagaucgugagcgugggcaacggcaagcuguucagaagcgagcugaacaucgagagcugcagcaccaagugccagaccgagaucggcggcaucaacaccaacaagagcuuccacagcgugcacagaaacaccaucggcgacugccccaaguacgugaacgugaagagccugaagcuggccaccggccugagaaacgugcccgccaucgccagcagaggccuguucggcgccaucgccggcuucaucgagggcggcuggcccggccugaucaacggcugguacggcuuccagcacagaaacgaggagggcaccggcaucgccgccgacaaggagagcacccagaaggccaucgaccagaucaccagcaaggugaacaacaucguggacagaaugaacaccaacuucgagagcgugcagcacgaguucagcgagaucgaggagagaaucaaccagcugagcaagcacguggacgacagcgugguggacaucuggagcuacaacgcccagcugcuggugcugcuggagaacgagaagacccuggaccugcacgacagcaacgugagaaaccugcacgagaaggugagaagaaugcugaaggacaacgccaaggacgagggcaacggcugcuucaccuucuaccacaagugcgacaacgagugcaucgagagagugagaaacggcaccuacgaccacaaggaguucgaggaggagagcaagaucaacagacaggagaucgagggcgugaagcuggacagcagcggcaacguguacaagauccugagcaucuacagcugcaucgccagcagccuggugcuggccgcccugaucaugggcuucauccugugggccugcagcaacggcagcugcagaugcaccaucugcaucuga

SEQ ID NO: 170404 - RNA, 1698 nt, Artificial Sequence
  derived and/or modified CDS sequence (opt4) from hemagglutinin__InfluenzaA__AGQ81216
augaagaagacccugcuguucgccgccaucuuccuguacgugaaggccgacgagaucugcaucggcuaccugagcaacaacagcaccgacaagguggacaccaucaucgagaacaacgugaccgugaccagcagcguggagcugguggagaccgagcacaccggcagcuucugcagcaucaacggcaagcagcccaucagccugggcgacugcagcuucgccggcuggauccugggcaaccccaugugcgacgaccugaucggcaagaccagcuggagcuacaucguggagaagcccaaccccgccaacggcaucugcuaccccggcacccuggagaacgaggaggagcugagacugaaguucagcggcgugcuggaguucagcaaguucgaggccuucaccagcaacggcuggggcgccgugaacagcggcgccggcgugaccgccgccugcaaguucggcagcagcaacagcuucuucagaaacaugguguggcugauccaccagagcggcaccuaccccgugaccaagagaaccuucaacaacaccaagggcagagacgugcuggugguguggggcauccaccaccccgccacccugaaggagcaccaggaccuguacaagaaggacagcagcuacguggccgugggcagcgagaccuacaacagaagauucacccccgagaucagcaccagacccaaggugaacggccaggccggcagaaugaccuucuacuggaccaucgugaagcccggcgagagcaucaccuucgagagcaacggcgccuuccuggcccccagauacgccuucgagaucgugagcgugggcaacggcaagcuguucagaagcgagcugaacaucgagagcugcagcaccaagugccagaccgagaucggcggcaucaacaccaacaagagcuuccacagcgugcacagaaacaccaucggcgacugccccaaguacgugaacgugaagagccugaagcuggccaccggccugagaaacgugcccgccaucgccagcaagggccuguucggcgccaucgccggcuucaucgagggcggcuggcccggccugaucaacggcugguacggcuuccagcacagaaacgaggagggcaccggcaucgccgccgacaaggagagcacccagaaggccaucgaccagaucaccagcaaggugaacaacaucguggacagaaugaacaccaacuucgagagcgugagacacgaguucagcgagaucgaggagagaaucaaccagcugagcaagcacguggacgacagcgugguggacaucuggagcuacaacgcccagcugcuggugcugcuggagaacgagaagacccuggaccugcacgacagcaacgugagaaaccugcacgagagagugagaagaaugcugaaggacaacgccaaggacgagggcaacggcugcuucaccuucuaccacaagugcgacaacgagugcaucgagagagugagaaacggcaccuacgaccacaaggaguucgaggaggagagcaagaucaacagacaggagaucgagggcgugaagcuggacagcagcggcaacguguacaagauccugagcaucuacagcugcaucgccagcagccuggugcuggccgcccugaucaugggcuucauccugugggccugcggcaacggcagcugcagaugcaccaucugcaucuga

SEQ ID NO: 170405 - RNA, 1698 nt, Artificial Sequence
  derived and/or modified CDS sequence (opt4) from hemagglutinin__InfluenzaA__AGQ81217
augaagaagacccugcuguucgccgccaucuuccuguacgccaaggccgacgagaucugcaucggcuaccugagcaacaacagcaccgacaagguggacaccaucaucgagaacaacgugaccgugaccagcagcguggagcugguggagaccgagcacaccggcagcuucugcagcaucaacggcaagcagcccaucagccugggcgacugcagcuucgccggcuggauccugggcaaccccaugugcgacgaccugaucggcaagaccagcuggagcuacaucguggagaagcccaaccccgccaacggcaucugcuaccccggcacccuggagaacgaggaggagcugagacugaaguucagcggcgugcuggaguucagcagauucgaggccuucaccagcaacggcuggggcgccgugaacagcggcgccggcgugaccgccgccugcaaguucggcagcagcaacagcuucuucagaaacaugguguggcugauccaccagagcggcaccuaccccgugaucaagagaaccuucaacaacaccaagggcagagacgugcuggugguguggggcauccaccaccccgccacccugaaggagcaccaggaccuguacaagaaggacagcagcuacguggccgugggcagcgagaccuacaacagaagauucauccccgagaucagcaccagacccaaggugaacggccaggccggcagaaugaccuucuacuggaccaucgugaagcccgaggagagcaucaccuucgagagcaacggcgccuuccuggcccccagauacgccuucgagaucgugagcgugggcaacggcaagcuguucagaagcgagcugaacaucgagagcugcagcaccaagugccagaccgagaucggcggcaucaacaccaacaagagcuuccacagcgugcacagaaacaccaucggcgacugccccaaguacgugaacgugaagagccugaagcuggccaccggccugagaaacgugcccgccaucgccagcagaggccuguucggcgccaucgccggcuucaucgagggcggcuggcccggccugaucaacggcugguacggcuuccagcacagaaacgaggagggcaccggcaucgccgccgacaaggagagcacccagaaggccaucgaccagaucaccagcaaggugaacaacaucguggacagaaugaacaccaacuucgagagcgugcagcacgaguucagcgagaucgaggagagaaucaaccagcugagcaagcacguggacgacagcgugguggacaucuggagcuacaacgcccagcugcuggugcugcuggagaacgagaagacccuggaccugcacgacagcaacgugagaaaccugcacgagaaggugagaagaaugcugaaggacaacgccaaggacgagggcaacggcugcuucaccuucuaccacaagugcgacaacgagugcaucgagagagugagaaacggcaccuacgaccacaaggaguucgaggaggagagcaagaucaacagacaggagaucgagggcgugaagcuggacagcagcggcaacguguacaagauccugagcaucuacagcugcaucgccagcagccugauccuggccgcccugaucaugggcuucauccugugggccugcagcaacggcagcugcagaugcaccaucugcaucuga

SEQ ID NO: 170406 - RNA, 1704 nt, Artificial Sequence
  derived and/or modified CDS sequence (opt4) from hemagglutinin__InfluenzaA__AGQ88499
auggagaagaucgugcugcuguucgccaccaucagccuggugaagagcgaccacaucugcaucggcuaccacgccaacaacagcaccgagcagguggacaccaucauggagaagaacgugaccgugacccacgcccaggacauccuggagaagacccacaacggcaagcugugcgaccugaacggcgugaagccccugauccugaaggacugcagcguggccggcuggcugcugggcaaccccaugugcgacgaguucaucaacgugcccgaguggagcuacaucguggagaaggccaaccccgccaacgaccugugcuaccccggcaacuucaacgacuacgaggagcugaagcaccugcugagcagaaucaaccacuucgagaagauccagaucauccccaaggacagcuggaccgaccacgaggccagccugggcgugagcgccgccugccccuaccagggcaacagcagcuucuucagaaacgugguguggcugaucaagaaggacaacgccuaccccaccaucaagaagggcuacaacaacaccaaccaggaggaccugcuggugcuguggggcauccaccaccccaacaacgaggccgagcagaccagacuguaccagaaccccaccaccuacaucagcaucggcaccagcacccugaaccagagacuggugcccaagaucgccaccagaagcaagaucaacggccagagcggcagaaucgacuucuucuggaccauccugaagcccaacgacgccauccacuucgagagcaacggcaacuucaucgcccccgaguacgccuacaagaucgugaagaagggcgacagcaccaucaugaagagcgagguggaguacggcaacugcaacaccagaugccagacccccaucggcgccaucaacagcagcaugcccuuccacaacauccacccccugaccaucggcgagugccccaaguacgugaagagcaacaagcuggugcuggccaccggccugagaaacagcccccagagagagagaagaagaaagagaggccuguucggcgccaucgccggcuucaucgagggcggcuggcagggcaugguggacggcugguacggcuaccaccacagcaacgagcagggcagcggcuacgccgccgacaaggagagcacccagaaggccaucgacggcgugaccaacaaggugaacagcaucaucgacaagaugaacacccaguucgaggccgugggcagagaguucaacaaccuggagagaagaaucgagaaccugaacaagaagauggaggacggcuuccuggacguguggaccuacaacgccgagcugcuggugcugauggagaacgagagaacccuggacuaccacgacagcaacgugagaaaccuguacgacaaggugagacugcagcugaaggacaacgccaaggagcugggcaacggcugcuucgaguucuaccacaagugcaacaacgagugcauggagagcgugagaaacggcaccuacgacuacccccaguacagcgaggaggccagacugaagagagaggagaucagcggcgugaagcuggagagcaucggcaucuaccagauccugagcaucuacagcaccguggccagcagccuggugcuggccaucaugauggccggccugagccuguggaugugcagcaacggcagccugcagugcagaaucugcaucuga

SEQ ID NO: 170407 - RNA, 1683 nt, Artificial Sequence; identical to SEQ ID NO: 170297
  derived and/or modified CDS sequence (opt4) from hemagglutinin__InfluenzaA__AGR33888

SEQ ID NO: 170408 - RNA, 1683 nt, Artificial Sequence; identical to SEQ ID NO: 170297
  derived and/or modified CDS sequence (opt4) from hemagglutinin__InfluenzaA__AGR33889

SEQ ID NO: 170409 - RNA, 1683 nt, Artificial Sequence
  derived and/or modified CDS sequence (opt4) from hemagglutinin__InfluenzaA__AGR33890
augaacacccagauccugguguucgcccugaucgccaucacccccaccaacagcgacaagaucugccugggccaccacgccgugagcaacggcaccaaggugaacacccugaccgagagaggcguggagguggugaacgccaccgagaccguggagagaaccagcauccccagaaucugcagcaagggcaagagaaccguggaccugggccagugcggccugcugggcaccaucaccggccccccccagugcgaccaguuccuggaguucagcgccgaccugaucaucgagagaagagagggcagcgacgugugcuaccccggcaaguucgugaacgaggaggcccugagacagauccugagagagagcggcggcaucgacaaggaggccaugggcuucaccuacagcggcaucagaaccaacggcgccaccagcgccugcagaagaagcggcagcagcuucuacgccgagaugaaguggcugcugagcaacaccgacaacgccgccuucccccccaugaccaagagcuacaagaacaccagaaaggcccccgcccugaucaucuggggcauccaccacagcgugagcaccgccgagcagaccaagcuguacggcagcggcaacaagcuggugaccgugagaagcagcaacuaccagcagagcuucgugcccagccccggcgccggcccccaggugaacggccagagcggcagaaucgacuuccacuggcugaugcugaaccccaacgacaccgugaccuucagcuucaacggcgccuucaucgcccccgacagagccagcuuccugagaggcaagagcaugggcauccagagcggcgugcagguggacgccaacugcgagggcgacugcuaccacagcggcggcaccaucaucagcaaccugcccuuccagaacaucgacagcagaguggugggcaagugccccagauacgugaagcagaagagccugcugcuggccaccggcaugaagaacgugcccgagauccccaagggcagaggccuguucggcgccaucgccggcuucaucgagaacggcugggagggccugaucgacggcugguacggcuucagacaccagaacgcccagggcgagggcaccgccgccgacuacaagagcacccagagcgccaucaaccagaugaccggcaagcugaacagacugaucgagaagaccaaccagcaguucgagcugaucgacaacgaguucaccgagguggagaagcagaucggcaacgugaucaacuggaccagagacagcaucaccgagguguggagcuacaacgccgagcugcugguggccauggagaaccagcacaccaucgaccuggccgacagcgagaugaacaagcuguacgagagagugaagagacagcugagagagaacgccgaggaggacggcaccggcugcuucgagaucuuccacaagugcgacgacgacugcauggccagcaucagaaacaacaccuacgaccacagcaaguacagagaggaggccaugcagaacagaauccagaucgaccccgugaagcugagcagcggcuacaaggacgugauccugugguucagcuucggcgccagcugcuucauccugcuggccaucgccaugggccugguguucaucugcgugaagaacggcaacaugagaugcaccaucugcaucuga

SEQ ID NO: 170410 - RNA, 1683 nt, Artificial Sequence
  derived and/or modified CDS sequence (opt4) from hemagglutinin__InfluenzaA__AGR33892
augaacacccagauccugguguucgcccugaucgccaucauccccaccaacgccgacaagaucugccugggccaccacgccgugagcaacggcaccaaggugaacacccugaccgagagaggcguggagguggugaacgccaccgagaccguggagagaaccagcauccccagaaucugcagcaagggcaagagaaccguggaccugggccagugcggccugcugggcaccaucaccggccccccccagugcgaccaguuccuggaguucagcgccgaccugaucaucgagagaagagagggcagcgacgugugcuaccccggcaaguucgugaacgaggaggcccugagacagauccugagagagagcggcggcaucaacaaggaggccaugggcuucaccuacagcggcaucagaaccaacggcgccaccagcgccugcagaagaagcggcagcagcuucuacgccgagaugaaguggcugcugagcaacaccgacaacgccgccuucccccccaugaccaagagcuacaagaacaccagaaaggcccccgcccugaucaucuggggcauccaccacagcggcagcaccgccgagcagaccaagcuguacggcagcggcaacaagauggugaccgugagaagcagcaacuaccagcagagcuucgugcccagccccggcgccggcccccaggugaacggccagagcggcagaaucgacuuccacuggcugaugcugaaccccaacgacaccgugaccuucagcuucaacggcgccuucaucgcccccgacagagccagcuuccugagaggcaagagcaugggcauccagagcggcgugcagguggacgccaacugcgagggcgacugcuaccacagcggcggcaccaucaucagcaaccugcccuuccagaacaucgacagcagaguggugggcaagugccccagauacgugaagcagaagagccugcugcuggccaccggcaugaagaacgugcccgagauccccaagggcagaggccuguucggcgccaucgccggcuucaucgagaacggcugggagggccugaucgacggcugguacggcuucagacaccagaacgcccagggcgagggcaccgccgccgacuacaagagcacccagagcgccaucaaccagaugaccggcaagcugaacagacugaucgagaagaccaaccagcaguucgagcugaucgacaacgaguucaccgagguggagaagcagaucggcaacgugaucaacuggaccagagacagcaucaccgagguguggagcuacaacgccgagcugcugguggccauggagaaccagcacaccaucgaccuggccgacagcgagaugaacaagcuguacgagagagugaagagacagcugagagagaacgccgaggaggacggcaccggcugcuucgagaucuuccacaagugcgacgacgacugcauggccagcaucagaaacaacaccuacgaccacagcaaguacagagaggaggccaugcagaacagaauccagaucgaccccgugaagcugagcagcggcuacaaggacgugauccugugguucagcuucggcgccagcugcuucauccugcuggccaucgccaugggccugguguucaucugcguggagaacggcaacaugagaugcaccaucugcaucuga

SEQ ID NO: 170411 - RNA, 1683 nt, Artificial Sequence; identical to SEQ ID NO: 170289
  derived and/or modified CDS sequence (opt4) from hemagglutinin__InfluenzaA__AGR33895

SEQ ID NO: 170412 - RNA, 1683 nt, Artificial Sequence; identical to SEQ ID NO: 170368
  derived and/or modified CDS sequence (opt4) from hemagglutinin__InfluenzaA__AGR33897

SEQ ID NO: 170413 - RNA, 1683 nt, Artificial Sequence
  derived and/or modified CDS sequence (opt4) from hemagglutinin__InfluenzaA__AGR33899
auggagaccgugagccugaucaccauccugcugguggccaccgugagcaacgccgacaagaucugcaucggcuaccagagcaccaacagcaccgagaccguggacacccugaccgagaacaacgugcccgugacccacgccaaggagcugcugcacaccgagcacaacggcaugcugugcgccaccagccugggccagccccugauccuggacaccugcaccaucgagggccugaucuacggcaaccccagcugcgaccugcugcuggagggcagagaguggagcuacaucguggagagacccagcgccgugaacggccugugcuaccccggcaacguggagaaccuggaggagcugagaagccuguucagcagcgccagaagcuaccagagaauccagaucuuccccgacaccaucuggaacgugagcuacaacggcaccagcaaggccugcagcggcagcuucuacagaagcaugagauggcugacccagaagaacagcaacuaccccauccaggacgcccaguacaccaacaaccagggcaagaacauccuguucauguggggcaucaaccacccccccaccgacaccacccagagagaccuguacaccagaaccgacaccaccaccagcguggccaccgaggagaucaacagaaucuucaagccccugaucggccccagaccccuggugaacggccugaugggcagaaucgacuacuacuggagcgugcugaagcccggccagacccugagaaucaagagcgacggcaaccugaucgcccccugguacggccacauccugagcggcgagagccacggcagaauccugaagaccgaccugaagaagggcagcugcaccgugcagugccagaccgagaagggcggccugaacaccacccugcccuuccagaacgugagcaaguacgccuucggcaacugcagcaaguacaucggcaucaagagccugaagcuggccgugggccugagaaacgugcccagcagaagcagcagaggccuguucggcgccaucgccggcuucaucgagggcggcuggagcggccugguggccggcugguacggcuuccagcacagcaacgaccagggcgugggcauggccgccgacagagacagcacccagaaggccaucgacaagaucaccagcaaggugaacaacaucguggacaagaugaacaagcaguacgagaucaucgaccacgaguucagcgagguggagaccagacugaacaugaucaacaacaagaucgacgaccagauccaggacaucugggccuacaacgccgagcugcuggugcugcuggagaaccagaagacccuggacgagcacgacgccaacgugaacaaccuguacaacaaggugaagagagcccugggcagcaacgccguggaggacggcaagggcugcuucgagcuguaccacaagugcgacgaccagugcauggagaccaucagaaacggcaccuacaacagaagcaaguaccaggaggagagcaagcuggagagacagaagaucgagggcgugaagcuggagagcgagggcaccuacaagauccugaccaucuacagcaccguggccagcagccuggugaucgccaugggcuucgccgccuuccuguucugggccaugagcaacggcagcugcagaugcaacaucugcaucuga

SEQ ID NO: 170414 - RNA, 1683 nt, Artificial Sequence
  derived and/or modified CDS sequence (opt4) from hemagglutinin__InfluenzaA__AGR33900
auggagaccgugagccugaucaccauccugcugguggccaccgugagcaacgccgacaagaucugcaucggcuaccagagcaccaacagcaccgagaccguggacacccugaccgagaacaacgugcccgugacccacgccaaggagcugcugcacaccgagcacaacggcaugcugugcgccaccagccugggccagccccugauccuggacaccugcaccaucgagggccugaucuacggcaaccccagcugcgaccugcugcuggagggcagagaguggagcuacaucguggagagacccagcgccgugaacggccugugcuaccccggcaacguggagaaccuggaggagcugagaagccuguucagcagcgccagaagcuaccagagaauccagaucuuccccgacaccaucuggaacgugagcuacaacggcaccagcaaggccugcagcggcagcuucuacagaagcaugagauggcugacccagaagaacagcgacuaccccauccaggacgcccaguacaccaacaaccagggcaagaacauccuguucauguggggcaucaaccacccccccaccgacaccacccagagagaccuguacaccagaaccgacaccaccaccagcguggccaccgaggagaucaacagaaucuucaagccccugaucggccccagaccccuggugaacggccugaugggcagaaucgacuacuacuggagcgugcugaagcccggccagacccugagaaucaagagcgacggcaaccugaucgcccccugguacggccacauccugagcggcgagagccacggcagaauccugaagaccgaccugaagaagggcagcugcaccgugcagugccagaccgagaagggcggccugaacaccacccugcccuuccagaacgugagcaaguacgccuucggcaacugcagcaaguacaucggcaucaagagccugaagcuggccgugggccugagaaacgugcccagcagaagcagcagaggccuguucggcgccaucgccggcuucaucgagggcggcuggagcggccugguggccggcugguacggcuuccagcacagcaacgaccagggcgugggcauggccgccgacagagacagcacccagaaggccaucgacaagaucaccagcaaggugaacaacaucguggacaagaugaacaagcaguacgagaucaucgaccacgaguucagcgagguggagaccagacugaacaugaucaacaacaagaucgacgaccagauccaggacaucugggccuacaacgccgagcugcuggugcugcuggagaaccagaagacccuggacgagcacgacgccaacgugaacaaccuguacaacaaggugaagagagcccugggcagcaacgccguggaggacggcaagggcugcuucgaccuguaccacaagugcgacgaccagugcauggagaccaucagaaacggcaccuacaacagaagaaaguaccaggaggagagcaagcuggagagacagaagaucgagggcgugaagcuggagagcgagggcaccuacaagauccugaccaucuacagcaccguggccagcagccuggugaucgccaugggcuucgccgccuuccuguucugggccaugagcaacggcagcugcagaugcaacaucugcaucuga

SEQ ID NO: 170415 - RNA, 1683 nt, Artificial Sequence
  derived and/or modified CDS sequence (opt4) from hemagglutinin__InfluenzaA__AGR33902
auggagaccgccagccugaucaccauccugcugguggccaccgugagcaacgccgacaagaucugcaucggcuaccagagcaccaacagcaccgagaccguggacacccugaccgagaacaacgugcccgugacccacgccaaggagcugcugcacaccgagcacaacggcaugcugugcgccaccagccugggccagccccugauccuggacaccugcaccaucgagggccugaucuacggcaaccccagcugcgaccugcugcuggagggcagagaguggagcuacaucguggagagacccagcgccgugaacggccugugcuaccccggcaacguggagaaccuggaggagcugagaagccuguucagcagcgccagaagcuaccagagaauccagaucuuccccgacaccaccuggaacgugagcuacaacggcaucagcaaggccugcagcggcagcuucuacagaagcaugagauggcugacccagaagaacagcaacuaccccauccaggacgcccaguacaccaacaaccagggcaagaacauccuguucauguggggcaucaaccacccccccaccgacaccacccagagagaccuguacaccagaaccgacaccaccaccagcguggccaccgaggagaucaacagaaucuucaagccccugaucggccccagaccccuggugaacggccugaugggcagaaucgacuacuacuggagcgugcugaagcccggccagacccugagaaucaagagcgacggcaaccugaucgcccccugguacggccacauccugagcggcgagagccacggcagaauccugaagaccgaccugaagagaggcagcugcaccgugcagugccagaccgagaagggcggccugaacaccacccugcccuuccagaacgugagcaaguacgccuucggcaacugcagcaaguacaucggcaucaagagccugaagcuggccgugggccugagaaacgugcccagcagaagcagcagaggccuguucggcgccaucgccggcuucaucgagggcggcuggagcggccugguggccggcugguacggcuuccagcacagcaacgaccagggcgugggcauggccgccgacagagacagcacccagaaggccaucgacaagaucaccagcaaggugaacaacaucguggacaagaugaacaagcaguacgagaucaucgaccacgaguucagcgagguggagaccagacugaacaugaucaacaacaagaucgacgaccagauccaggacaucugggccuacaacgccgagcugcuggugcugcuggagaaccagaagacccuggacgagcacgacgccaacgugaacaaccuguacaacaaggugaagagagcccugggcagcaacgccguggaggacggcaagggcugcuucgagcuguaccacaagugcgacaaccagugcauggagaccaucagaaacggcaccuacaacagaagaaaguaccaggaggagagcaagcuggagagacagaagaucgagggcgugaagcuggagagcgagggcaccuacaagauccugaccaucuacagcaccguggccagcagccuggugaucgccaugggcuucgccgccuuccuguucugggccaugagcaacggcagcugcagaugcaacaucugcaucuga

SEQ ID NO: 170416 - RNA, 1698 nt, Artificial Sequence; identical to SEQ ID NO: 165573
  derived and/or modified CDS sequence (opt4) from hemagglutinin__InfluenzaA__AGR49817

SEQ ID NO: 170417 - RNA, 1698 nt, Artificial Sequence
  derived and/or modified CDS sequence (opt4) from hemagglutinin__InfluenzaA__AGR49841
augaaggugaagcugcuggugcugcugugcaccuucaccgccaccuacgccgacaccaucugcaucggcuaccacgccaacaacagcaccgacaccguggacaccgugcuggagaagaacgugaccgugacccacagcgugaaccugcuggagaacagccacaacggcaagcugugccugcugaagggcaucgccccccugcagcugggcaacugcagcguggccggcuggauccugggcaaccccgagugcgagcugcugaucagcaaggagagcuggagcuacaucguggagaagcccaaccccgagaacggcaccugcuaccccggccacuucgccgacuacgaggagcugagagagcagcugagcagcgugagcagcuucgagagauucgagaucuuccccaaggagagcagcuggcccaaccacaccgugaccggcgugagcgccagcugcagccacaacggcgagagcagcuucuacagaaaccugcuguggcugaccggcaagaacggccuguaccccaaccugagcaagagcuacgccaacaacaaggagaaggaggugcuggugcuguggggcgugcaccacccccccaacaucguggaccagaagacccuguacagaaccgagaacgccuacgugagcguggugagcagccacuacagcagaaaguucacccccgagaucgccaagagacccaaggugagagaccaggagggcagaaucaacuacuacuggacccugcuggagcccagagacaccaucaucuucgaggccaacggcaaccugaucgcccccagauacgccuucgcccugagcagaggcuucggcagcggcaucaucaacagcaacgcccccaugggcaagugcgacgccaagugccagaccccccagggcgccaucaacagcagccugcccuuccagaacgugcaccccgugaccaucggcgagugccccaaguacgugagaagcgccaagcugagaauggugaccggccugagaaacauccccagcauccagagcagaggccuguucggcgccaucgccggcuucaucgagggcggcuggaccggcaugguggacggcugguacggcuaccaccaccagaacgagcagggcagcggcuacgccgccgaccagaagagcacccagaacgccaucaacggcaucaccaacaaggugaacagcgugaucgagaagaugaacacccaguucaccgccgugggcaaggaguucaacaagcuggagagaagaauggagaaccugaacaagaagguggacgacggcuucaucgacaucuggaccuacaacgccgagcugcuggugcugcuggagaacgagagaacccuggacuuccacgacagcaacgugaagaaccuguacgagaaggugaagagccagcugaagaacaacgccaaggagaucggcaacggcugcuucgaguucuaccacaagugcaacgacgagugcauggagagcgugaagaacggcaccuacgacuaccccaaguacagcgaggagagcaagcugaacagagagaagaucgacggcgugaagcuggagagcaucggcguguaccagauccuggccaucuacagcaccguggccagcagccuggugcugcuggugagccugggcgccaucagcuucuggaugugcagcaacggcagccugcagugcagaaucugcaucuga

SEQ ID NO: 170418 - RNA, 1698 nt, Artificial Sequence; identical to SEQ ID NO: 165573
  derived and/or modified CDS sequence (opt4) from hemagglutinin__InfluenzaA__AGR49853

SEQ ID NO: 170419 - RNA, 1698 nt, Artificial Sequence
  derived and/or modified CDS sequence (opt4) from hemagglutinin__InfluenzaA__AGR49865
augaaggugaagcugcuggugcugcugugcaccuucaccgccaccuacgccgacaccaucugcaucggcuaccacgccaacaacagcaccgacaccguggacaccgugcuggagaagaacgugaccgugacccacagcgugaaccugcuggagaacaaccacaacggcaagcugugccugcugaagggcaucgccccccugcagcugggcaacugcagcguggccggcuggauccugggcaaccccgagugcgagcugcugaucagcaaggagagcuggagcuacaucguggagaagcccaaccccgagaacggcaccugcuaccccggccacuucgccgacuacgaggagcugagagagcagcugagcagcgugagcagcuucgagagauucgagaucuuccccaaggagagcagcuggcccaaccacaccgugaccggcgugagcgccagcugcagccacaacggcgagagcagcuucuacagaaaccugcuguggcugaccggcaagaacggccuguaccccaaccugagcaagagcuacgccaacaacaaggagaaggaggugcuggugcuguggggcgugcaccacccccccaacaucgugaaccagaagacccuguacagaaccgagaacgccuacgugagcguggugagcagccacuacagcagaaaguucacccccgagaucgccaagagacccaaggugagagaccaggagggcagaaucaacuacuacuggacccugcuggagcccggcgacaccaucaucuucgaggccaacggcaaccugaucgcccccagauacgccuucgcccugaacagaggcuucggcagcggcaucaucaacagcaacgcccccauggacaagugcgacgccaagugccagaccccccagggcgccaucaacagcagccugcccuuccagaacgugcaccccgugaccaucggcgagugccccaaguacgugagaagcgccaagcugagaauggugaccggccugagaaacauccccagcauccagagcagaggccuguucggcgccaucgccggcuucaucgagggcggcuggaccggcaugguggacggcugguacggcuaccaccaccagaacgagcagggcagcggcuacgccgccgaccagaagagcacccagaacgccaucaacggcaucaccaacaaggugaacagcgugaucgagaagaugaacacccaguucaccgccgugggcaaggaguucaacaagcuggagagaagaauggagaaccugaacaagaagguggacgacggcuucaucgacguguggaccuacaacgccgagcugcuggugcugcuggagaacgagagaacccuggacuuccacgacagcaacgugaagaaccuguacgagaaggugaagagccagcugaagaacaacgccaaggagaucggcaacggcugcuucgaguucuaccacaagugcaacgacgagugcauggagagcgugaagaacggcaccuacgacuaccccaaguacagcgaggagagcaagcugaacagagagaagaucgacggcgugaagcuggagagcaugggcguguaccagauccuggccaucuacagcaccguggccagcagccuggugcugcuggugagccugggcgccaucagcuucuggaugugcagcaacggcagccugcagugcagaaucugcaucuga

SEQ ID NO: 170420 - RNA, 1701 nt, Artificial Sequence; identical to SEQ ID NO: 162716
  derived and/or modified CDS sequence (opt4) from hemagglutinin__InfluenzaA__AGR49877

SEQ ID NO: 170421 - RNA, 1701 nt, Artificial Sequence; identical to SEQ ID NO: 162494
  derived and/or modified CDS sequence (opt4) from hemagglutinin__InfluenzaA__AGR49888

SEQ ID NO: 170422 - RNA, 1701 nt, Artificial Sequence
  derived and/or modified CDS sequence (opt4) from hemagglutinin__InfluenzaA__AGR49900
augaagaccaucaucgcccugagcuacauccugugccugguguucgcccagaagcugcccggcaacgacaacagcaccgccacccugugccugggccaccacgccgugcccaacggcaccaucgugaagaccaucaccaacgaccagaucgaggugaccaacgccaccgagcuggugcagagcagcagcaccggcgagaucugcgacagcccccaccagauccuggacggcgagaacugcacccugaucgacgcccugcugggcgacccccagugcgacggcuuccagaacaagaagugggaccuguucguggagagaagcaaggccuacagcaagugcuaccccuacgacgugcccgacuacgccagccugagaagccugguggccagcagcggcacccuggaguucaacaacgagagcuucaacuggaccggcgugacccagaacggcaccagcagcgccugcaucagaagaagcaacaacagcuucuucagcagacugaacuggcugacccaccugaaguucaaguaccccgcccugaacgugaccaugcccaacaacgagaaguucgacaagcuguacaucuggggcgugcaccaccccggcaccgacaacgaccagaucuuccuguacgcccaggccagcggcagaaucaccgugagcaccaagagaagccagcagaccgugauccccaacaucggcagcagacccagagugagaaacauccccagcagaaucagcaucuacuggaccaucgugaagcccggcgacauccugcugaucaacagcaccggcaaccugaucgcccccagaggcuacuucaagaucagaagcggcaagagcagcaucaugagaagcgacgcccccaucggcaagugcaacagcgagugcaucacccccaacggcagcauccccaacgacaagcccuuccagaacgugaacagaaucaccuacggcgccugccccagauacgugaagcagaacacccugaagcuggccaccggcaugagaaacgugcccgagaagcagaccagaggcaucuucggcgccaucgccggcuucaucgagaacggcugggagggcaugguggacggcugguacggcuucagacaccagaacagcgagggcaucggccaggccgccgaccugaagagcacccaggccgccaucgaccagaucaacggcaagcugaacagacugaucggcaagaccaacgagaaguuccaccagaucgagaaggaguucagcgagguggagggcagaauccaggaccuggagaaguacguggaggacaccaagaucgaccuguggagcuacaacgccgagcugcugguggcccuggagaaccagcacaccaucgaccugaccgacagcgagaugaacaagcuguucgagaagaccaagaagcagcugagagagaacgccgaggacaugggcaacggcugcuucaagaucuaccacaagugcgacaacgccugcaucggcagcaucagaaacggcaccuacgaccacgacguguacagagacgaggcccugaacaacagauuccagaucaagggcguggagcugaagagcggcuacaaggacuggauccuguggaucagcuucgccaucagcugcuuccugcugugcguggcccugcugggcuucaucaugugggccugccagaagggcaacaucagaugcaacaucugcaucuga

SEQ ID NO: 170423 - RNA, 1701 nt, Artificial Sequence
  derived and/or modified CDS sequence (opt4) from hemagglutinin__InfluenzaA__AGR49912
augaagaccaucaucgcccugagcuacauccugugccuggugagcgcccagaagcugcccggcaacgacaacagcaccgccacccugugccugggccaccacgccgugcccaacggcaccaucgugaagaccaucaccaacgaccagaucgaggugaccaacgccaccgagcuggugcagagcagcagcaccggcgagaucugcgacagcccccaccagauccuggacggcgagaacugcacccugaucgacgcccugcugggcgacccccagugcgacggcuuccagaacaagaagugggaccuguucguggagagaagcaaggccuacagcaacugcuaccccuacgacgugcccgacuacgccagccugagaagccugguggccagcagcggcacccuggaguucaacaacgagagcuucaacuggaccggcgugacccagaacggcaccagcagcgccugcaucagaagaagcaacaacagcuucuucagcagacugaacuggcugacccaccugaaguucaaguaccccgcccugaacgugaccaugcccaacaacgaggaguucgacaagcuguacaucuggggcgugcaccaccccggcaccgacaacgaccagaucuuccuguacgcccaggccagcggcagaaucaccgugagcaccaagagaagccagcagaccgugauccccaacaucggcagcagacccagagugagaaacauccccagcagaaucagcaucuacuggaccaucgugaagcccggcgacauccugcugaucaacagcaccggcaaccugaucgcccccagaggcuacuucaagaucagaagcggcaagagcagcaucaugagaagcgacgcccccaucggcaagugcaacagcaagugcaucacccccaacggcagcauccccaacgacaagcccuuccagaacgugaacagaaucaccuacggcgccugccccagauacgugaagcagaacacccugaagcuggccaccggcaugagaaacgugcccgagaagcagaccagaggcaucuucggcgccaucgccggcuucaucgagaacggcugggagggcaugguggacggcugguacggcuucagacaccagaacagcgagggcaucggccaggccgccgaccugaagagcacccaggccgccaucgaccagaucaacggcaagcugaacagacugaucggcaagaccaacgagaaguuccaccagaucgagaaggaguucagcgagguggagggcagaauccaggaccuggagaaguacguggaggacaccaagaucgaccuguggagcuacaacgccgagcugcugguggcccuggagaaccagcacaccaucgaccugaccgacagcgagaugaacaagcuguucgagaagaccaagaagcagcugagagagaacgccgaggacaugggcaacggcugcuucaagaucuaccacaagugcgacaacgccugcaucggcagcaucagaaacggcaccuacgaccacgacguguacagagacgaggcccugaacaacagauuccagaucaagggcguggagcugaagagcggcuacaaggacuggauccuguggaucagcuucgccaucagcugcuuccugcugugcguggcccugcugggcuucaucaugugggccugccagaagggcaacaucagaugcaacaucugcaucuga

SEQ ID NO: 170424 - RNA, 1701 nt, Artificial Sequence
  derived and/or modified CDS sequence (opt4) from hemagglutinin__InfluenzaA__AGR49924
augaagaccaucaucgcccugagcuacauccugugccuggugagcgcccagaagcugcccggcaacgacaacagcaccgccacccugugccugggccaccacgccgugcccaacggcaccaucgugaagaccaucaccaacgaccagaucgaggugaccaacgccaccgagcuggugcagagcagcagcaccggcgagaucugcgacagcccccaccagauccuggacggcgagaacugcacccugaucgacgcccugcugggcgacccccagugcgacggcuuccagaacaagaagugggaccuguucguggagagaagcaaggccuacagcaacugcuaccccuacgacgugcccgacuacgccagccugagaagccugguggccagcagcggcacccuggaguucaacaacgagagcuucaacuggaccggcgugacccagaacggcaccagcagcgccugcaucagaagaagcaacaacagcuucuucagcagacugaacuggcugacccaccugaaguucaaguaccccgcccugaacgugaccaugcccaacaacgaggaguucgacaagcuguacaucuggggcgugcaccaccccggcaccgacaacgaccagaucuuccuguacgcccaggccagcggcagaaucaccgugagcaccaagagaagccagcagaccgugauccccaacaucggcagcagacccagagugagaaacauccccagcagaaucagcaucuacuggaccaucgugaagcccggcgacauccugcugaucaacagcaccggcaaccugaucgcccccagaggcuacuucaagaucagaagcggcaagagcagcaucaugagaagcgacgcccccaucggcaagugcaacagcaagugcaucacccccaacggcagcauccccaacgacaagcccuuccagaacgugaacagaaucaccuacggcgccugccccagauacgugaagcagaacacccugaagcuggccaccggcaugagaaacgugcccgagaagcagaccagaggcaucuucggcgccaucgccggcuucaucgagaacggcugggagggcaugguggacggcugguacggcuucagacaccagaacagcgagggcaucggccaggccgccgaccugaagagcacccaggccgccguggaccagaucaacggcaagcugaacagacugaucggcaagaccaacgagaaguuccaccagaucgagaaggaguucagcgagguggagggcagaauccaggaccuggagaaguacguggaggacaccaagaucgaccuguggagcuacaacgccgagcugcugguggcccuggagaaccagcacaccaucgaccugaccgacagcgagaugaacaagcuguucgagaagaccaagaagcagcugagagagaacgccgaggacaugggcaacggcugcuucaagaucuaccacaagugcgacaacgccugcaucggcagcaucagaaacggcaccuacgaccacgacguguacagagacgaggcccugaacaacagauuccagaucaagggcguggagcugaagagcggcuacaaggacuggauccuguggaucagcuucgccaucagcugcuuccugcugugcguggcccugcugggcuucaucaugugggccugccagaagggcaacaucagaugcaacaucugcaucuga

SEQ ID NO: 170425 - RNA, 1701 nt, Artificial Sequence
  derived and/or modified CDS sequence (opt4) from hemagglutinin__InfluenzaA__AGR49936
augaagaccaucaucgcccugagcuacauccugugccugaucagcgcccagaaguuccccggcaacgacaacagcaccgccacccugugccugggccaccacgccgugcccaacggcaccaucgugaagaccaucaccaacgaccagaucgaggugaccaacgccaccgagcuggugcagagcagcagcaccggcgagaucugcgacagcccccaccagauccuggacggcgagaacugcacccugaucgacgcccugcugggcgacccccagugcgacggcuuccagaacaagaagugggaccuguucguggagagaagcaaggccuacagcaacugcuaccccuacgacgugcccggcuacgccagccugagaagccugguggccagcagcggcacccuggaguucaacaacgagagcuucaacuggaccggcgugacccagaacggcaccagcagcgccugcaucagaagaagcaacaacagcuucuucagcagacugaacuggcugacccaccugaaguucaaguaccccgcccugaacgugaccaugcccaacaacgaggaguucgacaagcuguacaucuggggcgugcaccaccccggcaccgacaacgaccagaucuuccuguacgcccaggccagcggcagaaucaccgugagcaccaagagaagccagcagaccgugauccccaacaucggcagcagacccagagugagaaacauccccagcagaaucagcaucuacuggaccaucgugaagcccggcgacauccugcugaucaacagcaccggcaaccugaucgcccccagaggcuacuucaagaucagaagcggcaagagcagcaucaugagaagcgacgcccccaucggcaagugcaacagcgagugcaucacccccaacggcagcauccccaacgacaagcccuuccagaacgugaacagaaucaccuacggcgccugccccagauacgugaagcagaacacccugaagcuggccaccggcaugagaaacgugcccgagaagcagaccagaggcaucuucggcgccaucgccggcuucaucgagaacggcugggagggcaugguggacggcugguacggcuucagacaccagaacagcgagggcaucggccaggccgccgaccugaagagcacccaggccgccaucgaccagaucaacggcaagcugaacagacugaucggcaagaccaacgagaaguuccaccagaucgagaaggaguucagcgagguggagggcagaauccaggaccuggagaaguacguggaggacaccaagaucgaccuguggagcuacaacgccgagcugcugguggcccuggagaaccagcacaccaucgaccugaccgacagcgagaugaacaagcuguucgagaagaccaagaagcagcugagagagaacgccgaggacaugggcaacggcugcuucaagaucuaccacaagugcgacaacgccugcaucggcagcaucagaaacggcaccuacgaccacgacguguacagagacgaggcccugaacaacagauuccagaucaagggcguggagcugaagagcggcuacaaggacuggauccuguggaucagcuucgccaucagcugcuuccugcugugcguggcccugcugggcuucaucaugugggccugccagaagggcaacaucagaugcaacaucugcaucuga

SEQ ID NO: 170426 - RNA, 1701 nt, Artificial Sequence; identical to SEQ ID NO: 167754
  derived and/or modified CDS sequence (opt4) from hemagglutinin__InfluenzaA__AGR49948

SEQ ID NO: 170427 - RNA, 1701 nt, Artificial Sequence; identical to SEQ ID NO: 162587
  derived and/or modified CDS sequence (opt4) from hemagglutinin__InfluenzaA__AGR49960

SEQ ID NO: 170428 - RNA, 1701 nt, Artificial Sequence
  derived and/or modified CDS sequence (opt4) from hemagglutinin__InfluenzaA__AGR49972
augaaggccauccugguggugcugcuguacaccuucgccaccgccaacgccgacacccugugcaucggcuaccacgccaacaacagcaccgacaccguggacaccgugcuggagaagaacgugaccgugacccacagcgugaaccugcuggaggacaagcacaacggcaagcugugcaagcugagaggcguggccccccugcaccugggcaagugcaacaucgccggcuggauccugggcaaccccgagugcgagagccugagcaccgccagcagcuggagcuacaucguggagaccagcagcagcgacaacggcaccugcuaccccggcgacuucaucgacuacgaggagcugagagagcagcugagcagcgugagcagcuucgagagauucgagaucuuccccaagaccagcagcuggcccaaccacgacagcaacaagggcgugaccgccgccugcccccacgccggcgccaagagcuucuacaagaaccugaucuggcuggugaagaagggcaacagcuaccccaagcugagcaagagcuacaucaacgacaagggcaaggaggugcuggugcuguggggcauccaccaccccagcaccagcgccgaccagcagagccuguaccagaacgccgacgccuacguguucgugggcagcagcagauacagcaagaaguucaagcccgagaucgccaucagacccaaggugagagaccaggagggcagaaugaacuacuacuggaccaucguggagcccggcgacaagaucaccuucgaggccaccggcaaccugguggugcccagauacgccuucgccauggagagaaacgccggcagcggcaucaucaucagcgacacccccgugcacgacugcaacaccaccugccagacccccaagggcgccaucaacaccagccugcccuuccagaacauccaccccaucaccaucggcaagugccccaaguacgugaagagcaccaagcugagacuggccaccggccugagaaacgugcccagcauccagagcagaggccuguucggcgccaucgccggcuucaucgagggcggcuggaccggcaugguggacggcugguacggcuaccaccaccagaacgagcagggcagcggcuacgccgccgaccugaagagcacccagaacgccaucgacgagaucaccaacaaggugaacagcgugaucgagaagaugaacacccaguucaccgccgugggcaaggaguucaaccaccuggagaagagaaucgagaaccugaacaagaagguggacgacggcuuccuggacaucuggaccuacaacgccgagcugcuggugcugcuggagaacgagagaacccuggacuaccacgacagcaacgugaagaaccuguacgagaaggugagaagccagcugaagaacaacgccaaggagaucggcaacggcugcuucgaguucuaccacaagugcgacaacaccugcauggagagcgugaagaacggcaccuacgacuaccccaaguacagcgaggaggccaagcugaacagagaggagaucgacggcgugaagcuggagagcaccagaaucuaccagauccuggccaucuacagcaccguggccagcagccuggugcugguggugagccugggcgccaucagcuucuggaugugcagcaacggcagccugcagugcagaaucugcaucuga

SEQ ID NO: 170429 - RNA, 1698 nt, Artificial Sequence; identical to SEQ ID NO: 166758
  derived and/or modified CDS sequence (opt4) from hemagglutinin__InfluenzaA__AGR49983

SEQ ID NO: 170430 - RNA, 1698 nt, Artificial Sequence; identical to SEQ ID NO: 166758
  derived and/or modified CDS sequence (opt4) from hemagglutinin__InfluenzaA__AGR49995

SEQ ID NO: 170431 - RNA, 1701 nt, Artificial Sequence; identical to SEQ ID NO: 162716
  derived and/or modified CDS sequence (opt4) from hemagglutinin__InfluenzaA__AGR50007

SEQ ID NO: 170432 - RNA, 1701 nt, Artificial Sequence; identical to SEQ ID NO: 162716
  derived and/or modified CDS sequence (opt4) from hemagglutinin__InfluenzaA__AGR50018

SEQ ID NO: 170433 - RNA, 1701 nt, Artificial Sequence; identical to SEQ ID NO: 162716
  derived and/or modified CDS sequence (opt4) from hemagglutinin__InfluenzaA__AGR50029

SEQ ID NO: 170434 - RNA, 1701 nt, Artificial Sequence
  derived and/or modified CDS sequence (opt4) from hemagglutinin__InfluenzaA__AGR50040
augaagaccaucaucgcccugagcuacauccugugccugguguucgcccagaagcugcccggcaacgacaacagcaccgccacccugugccugggccaccacgccgugcccaacggcaccaucgugaagaccaucaccaacgaccagaucgaggugaccaacgccaccgagcuggugcagagcagcagcaccggcgagaucugcgacagcccccaccagauccuggacggcgagaacugcacccugaucgacgcccugcugggcgacccccagugcgacggcuuccagaacaagaagugggaccuguucguggagagaagcaaggccuacagcaacugcuaccccuacgacgugcccgacuacgccagccugagaagccugguggccagcagcggcacccuggaguucaacaacgagagcuucaacuggaccggcgugacccagaacggcaccagcagcgccugcaucagaagaagcaacaacagcuucuucagcagacugaacuggcugacccaccugaaguucaaguaccccgcccugaacgugaccaugcccaacaacgagcaguucgacaagcuguacaucuggggcgugcaccaccccggcaccgacaacgaccagaucuuccuguacgcccaggccagcggcagaaucaccgugagcaccaagagaagccagcagaccgugauccccaacaucggcagcagacccagagugagaaacauccccagcagaaucagcaucuacuggaccaucgugaagcccggcgacauccugcugaucaacagcaccggcaaccugaucgcccccagaggcuacuucaagaucagaagcggcaagagcagcaucaugagaagcgacgcccccaucggcaagugcaacagcgagugcaucacccccaacggcagcauccccaacgacaagcccuuccagaacgugaacagaaucaccuacggcgccugccccagauacgugaagcagaacacccugaagcuggccaccggcaugagaaacgugcccgagaagcagaccagaggcaucuucggcgccaucgccggcuucaucgagaacggcugggagggcaugguggacggcugguacggcuucagacaccagaacagcgagggcagaggccaggccgccgaccugaagagcacccaggccgccaucgaccagaucaacggcaagcugaacagacugaucggcaagaccaacgagaaguuccaccagaucgagaaggaguucagcgagguggagggcagaauccaggaccuggagaaguacguggaggacaccaagaucgaccuguggagcuacaacgccgagcugcugguggcccuggagaaccagcacaccaucgaccugaccgacagcgagaugaacaagcuguucgagaagaccaagaagcagcugagagagaacgccgaggacaugggcaacggcugcuucaagaucuaccacaagugcgacaacgccugcaugggcagcaucagaaacggcaccuacgaccacgacguguacagagacgaggcccugaacaacagauuccagaucaagggcguggagcugaagagcggcuacaaggacuggauccuguggaucagcuucgccaucagcugcuuccugcugugcguggcccugcugggcuucaucaugugggccugccagaagggcaacaucagaugcaacaucugcaucuga

SEQ ID NO: 170435 - RNA, 1701 nt, Artificial Sequence; identical to SEQ ID NO: 162716
  derived and/or modified CDS sequence (opt4) from hemagglutinin__InfluenzaA__AGR50052

SEQ ID NO: 170436 - RNA, 1701 nt, Artificial Sequence; identical to SEQ ID NO: 162716
  derived and/or modified CDS sequence (opt4) from hemagglutinin__InfluenzaA__AGR50063

SEQ ID NO: 170437 - RNA, 1701 nt, Artificial Sequence
  derived and/or modified CDS sequence (opt4) from hemagglutinin__InfluenzaA__AGR50074
augaaggccauccugguggugcugcuguacaccuucgccaccgccaacgccgacacccugugcaucggcuaccacgccaacaacagcaccgacaccguggacaccgugcuggagaagaacgugaccgugacccacagcgugaaccugcuggaggacaagcacaacggcaagcugugcaagcugagaggcguggccccccugcaccugggcaagugcaacaucgccggcuggauccugggcaaccccgagugcgagagccugagcaccgccagcagcuggagcuacaucguggagaccagcagcagcgacaacggcaccugcuaccccggcgacuucaucgacuacgaggagcugagagagcagcugagcagcgugagcagcuucgagagauucgagaucuuccccaagaccagcagcuggcccaaccacgacagcaacaagggcgugaccgccgccugcccccacgccggcgccaagagcuucuacaagaaccugaucuggcuggugaagaagggcaacagcuaccccaagcugagcaagagcuacaucaacgacaagggcaaggaggugcuggugcuguggggcauccaccaccccagcaccagcgccgaccagcagagccuguaccagaacgccgacgccuacguguucgugggcagcagcagauacagcaagaaguucaagcccgagaucgccaucagacccaaggugagaaaccaggagggcagaaugaacuacuacuggacccugguggagcccggcgacaagaucaccuucgaggccaccggcaaccugguggugcccagauacgccuucgccauggagagaaacgccggcagcggcaucaucaucagcgacacccccgugcacgacugcaacaccaccugccagacccccaagggcgccaucaacaccagccugcccuuccagaacauccaccccaucaccaucggcaagugccccaaguacgugaagagcaccaagcugagacuggccaccggccugagaaacgugcccagcauccagagcagaggccuguucggcgccaucgccggcuucaucgagggcggcuggaccggcaugguggacggcugguacggcuaccaccaccagaacgagcagggcagcggcuacgccgccgaccugaagagcacccagaacgccaucgacgagaucaccaacaaggugaacagcgugaucgagaagaugaacacccaguucaccgccgugggcaaggaguucaaccaccuggagaagagaaucgagaaccugaacaagaagguggacgacggcuuccuggacaucuggaccuacaacgccgagcugcuggugcugcuggagaacgagagaacccuggacuaccacgacagcaacgugaagaaccuguacgagaaggugagaagccagcugaagaacaacgccaaggagaucggcaacggcugcuucgaguucuaccacaagugcgacaacaccugcauggagagcgugaagaacggcaccuacgacuaccccaaguacagcgaggaggccaagcugaacagagaggagaucgacggcgugaagcuggagagcaccagaaucuaccagauccuggccaucuacagcaccguggccagcagccuggugcugguggugagccugggcgccaucagcuucuggaugugcagcaacggcagccugcagugcagaaucugcaucuga

SEQ ID NO: 170438 - RNA, 1701 nt, Artificial Sequence; identical to SEQ ID NO: 162716
  derived and/or modified CDS sequence (opt4) from hemagglutinin__InfluenzaA__AGR50085

SEQ ID NO: 170439 - RNA, 1701 nt, Artificial Sequence; identical to SEQ ID NO: 162716
  derived and/or modified CDS sequence (opt4) from hemagglutinin__InfluenzaA__AGR50096

SEQ ID NO: 170440 - RNA, 1701 nt, Artificial Sequence; identical to SEQ ID NO: 162716
  derived and/or modified CDS sequence (opt4) from hemagglutinin__InfluenzaA__AGR50107

SEQ ID NO: 170441 - RNA, 1701 nt, Artificial Sequence; identical to SEQ ID NO: 162909
  derived and/or modified CDS sequence (opt4) from hemagglutinin__InfluenzaA__AGR50118

SEQ ID NO: 170442 - RNA, 1701 nt, Artificial Sequence
  derived and/or modified CDS sequence (opt4) from hemagglutinin__InfluenzaA__AGR50129
augaaggccauccugguggugcugcuguacaccuucgccaccgccaacgccgacacccugugcaucggcuaccacgccaacaacagcaccgacaccguggacaccgugcuggagaagaacgugaccgugacccacagcgugaaccugcuggaggacaagcacaacggcaagcugugcaagcugagaggcguggccccccugcaccugggcaagugcaacaucgccggcuggauccugggcaaccccgagugcgagagccugagcaccgccagcagcuggagcuacaucguggagaccagcagcagcgacaacggcaccugcuaccccggcgacuucaucgacuacgaggagcugagagagcagcugagcagcgugagcagcuucgagagauucgagaucuuccccaagaccagcagcuggcccaaccacgacagcaacaagggcgugaccgccgccugcccccacgccggcgccaagagcuucuacaagaaccugaucuggcuggugaagaagggcaacagcuaccccaagcugagcaagagcuacaucaacgacaagggcaaggaggugcuggugcuguggggcauccaccaccccagcaccagcgccgaccagcagagccuguaccagaacgccgacgccuacguguucgugggcagcagcagauacagcaagaaguucaagcccgagaucgccaucagacccaaggugagagaccaggagggcagaaugaacuacuacuggacccugguggagcccggcgacaagaucaccuucgaggccaccggcaaccugguggugcccagauacgccuucgccauggagagaaacgccggcagcggcaucaucaucagcgacacccccgugcacgacugcaacaccaccugccagacccccaagggcgccaucaacaccagccugcccuuccagaacauccaccccaucaccaucggccagugccccaaguacgugaagagcaccaagcugagacuggccaccggccugagaaacgugcccagcauccagagcagaggccuguucggcgccaucgccggcuucaucgagggcggcuggaccggcaugguggacggcugguacggcuaccaccaccagaacgagcagggcagcggcuacgccgccgaccugaagagcacccagaacgccaucgacgagaucaccaacaaggugaacagcgugaucgagaagaugaacacccaguucaccgccgugggcaaggaguucaaccaccuggagaagagaaucgagaaccugaacaagaagguggacgacggcuuccuggacaucuggaccuacaacgccgagcugcuggugcugcuggagaacgagagaacccuggacuaccacgacagcaacgugaagaaccuguacgagaaggugagaagccagcugaagaacaacgccaaggagaucggcaacggcugcuucgaguucuaccacaagugcgacaacaccugcauggagagcgugaagaacggcaccuacgacuaccccaaguacagcgaggaggccaagcugaacagagaggagaucgacggcgugaagcuggagagcaccagaaucuaccagauccuggccaucuacagcaccguggccagcagccuggugcugguggugagccugggcgccaucagcuucuggaugugcagcaacggcagccugcagugcagaaucugcaucuga

SEQ ID NO: 170443 - RNA, 1701 nt, Artificial Sequence; identical to SEQ ID NO: 162716
  derived and/or modified CDS sequence (opt4) from hemagglutinin__InfluenzaA__AGR50140

SEQ ID NO: 170444 - RNA, 1701 nt, Artificial Sequence; identical to SEQ ID NO: 162911
  derived and/or modified CDS sequence (opt4) from hemagglutinin__InfluenzaA__AGR50151

SEQ ID NO: 170445 - RNA, 1698 nt, Artificial Sequence; identical to SEQ ID NO: 166758
  derived and/or modified CDS sequence (opt4) from hemagglutinin__InfluenzaA__AGR50162

SEQ ID NO: 170446 - RNA, 1701 nt, Artificial Sequence; identical to SEQ ID NO: 162716
  derived and/or modified CDS sequence (opt4) from hemagglutinin__InfluenzaA__AGR50174

SEQ ID NO: 170447 - RNA, 1701 nt, Artificial Sequence; identical to SEQ ID NO: 162755
  derived and/or modified CDS sequence (opt4) from hemagglutinin__InfluenzaA__AGR50185

SEQ ID NO: 170448 - RNA, 1701 nt, Artificial Sequence; identical to SEQ ID NO: 162716
  derived and/or modified CDS sequence (opt4) from hemagglutinin__InfluenzaA__AGR50196

SEQ ID NO: 170449 - RNA, 1701 nt, Artificial Sequence
  derived and/or modified CDS sequence (opt4) from hemagglutinin__InfluenzaA__AGR50207
augaaggccauccugguggugcugcuguacaccuucgccaccgccaacgccgacacccugugcaucggcuaccacgccaacaacagcaccgacaccguggacaccgugcuggagaagaacgugaccgugacccacagcgugaaccugcuggaggacaagcacaacggcaagcugugcaagcugagaggcguggccccccugcaccugggcaagugcaacaucgccggcuggauccugggcaaccccgagugcgagagccugagcaccgccagcagcuggagcuacaucguggagaccagcagcagcgacaacggcaccugcuaccccggcgacuucaucgacuacgaggagcugagagagcagcugagcagcgugagcagcuucgagagauucgagaucuuccccaagaccagcagcuggcccaaccacgacagcaacaagggcgugaccgccgccugcccccacgccggcgccaagagcuucuacaagaaccugaucuggcuggugaagaagggcaagagcuaccccaagcugagcaagagcuacaucaacgacaagggcaaggaggugcuggugcuguggggcauccaccaccccagcaccagcgccgaccagcagagccuguaccagaacgccgacgccuacguguucgugggcagcagcagauacagcaagaaguucaagcccgagaucgccaucagacccaaggugagagaccaggagggcagaaugaacuacuacuggacccugguggagcccggcgacaagaucaccuucgaggccaccggcaaccugguggugcccagauacgccuucgccauggagagaaacgccggcagcggcaucaucaucagcgacacccccgugcacgacugcaacaccaccugccagacccccaagggcgccaucaacaccagccugcccuuccagaacauccaccccaucaccaucggcaagugccccaaguacgugaagagcaccaagcugagacuggccaccggccugagaaacgugcccagcauccagagcagaggccuguucggcgccaucgccggcuucaucgagggcggcuggaccggcaugguggacggcugguacggcuaccaccaccagaacgagcagggcagcggcuacgccgccgaccugaagagcacccagaacgccaucgacgagaucaccaacaaggugaacagcgugaucgagaagaugaacacccaguucaccgccgugggcaaggaguucaaccaccuggagaagagaaucgagaaccugaacaagaagguggacgacggcuuccuggacaucuggaccuacaacgccgagcugcuggugcugcuggagaacgagagaacccuggacuaccacgacagcaacgugaagaaccuguacgagaaggugagaagccagcugaagaacaacgccaaggagaucggcaacggcugcuucgaguucuaccacaagugcgacaacaccugcauggagagcgugaagaacggcaccuacgacuaccccaaguacagcgaggaggccaagcugaacagagaggagaucgacggcgugaagcuggagagcaccagaaucuaccagauccuggccaucuacagcaccguggccagcagccuggugcugguggugagccugggcgccaucagcuucuggaugugcagcaacggcagccugcagugcagaaucugcaucuga

SEQ ID NO: 170450 - RNA, 1701 nt, Artificial Sequence; identical to SEQ ID NO: 162716
  derived and/or modified CDS sequence (opt4) from hemagglutinin__InfluenzaA__AGR50218

SEQ ID NO: 170451 - RNA, 1701 nt, Artificial Sequence; identical to SEQ ID NO: 162716
  derived and/or modified CDS sequence (opt4) from hemagglutinin__InfluenzaA__AGR50229

SEQ ID NO: 170452 - RNA, 1701 nt, Artificial Sequence; identical to SEQ ID NO: 162911
  derived and/or modified CDS sequence (opt4) from hemagglutinin__InfluenzaA__AGR50240

SEQ ID NO: 170453 - RNA, 1701 nt, Artificial Sequence; identical to SEQ ID NO: 162769
  derived and/or modified CDS sequence (opt4) from hemagglutinin__InfluenzaA__AGR50251

SEQ ID NO: 170454 - RNA, 1701 nt, Artificial Sequence
  derived and/or modified CDS sequence (opt4) from hemagglutinin__InfluenzaA__AGR50262
augaaggccauccugguggugcugcuguacaccuucgccaccgccaacgccgacacccugugcaucggcuaccacgccaacaacagcaccgacaccguggacaccgugcuggagaagaacgugaccgugacccacagcgugaaccugcuggaggacaagcacaacggcaagcugugcaagcugagaggcguggccccccugcaccugggcaagugcaacaucgccggcuggauccugggcaaccccgagugcgagagccugagcaccgccagcagcuggagcuacaucguggagaccagcagcagcgacaacggcaccugcuaccccggcgacuucaucgacuacgaggagcugagagagcagcugagcagcgugagcagcuucgagagauucgagaucuuccccaagaccagcagcuggcccaaccacgacagcaacaagggcgugaccgccgccugcccccacgccggcgccaagagcuucuacaagaaccugaucuggcuggugaagaagggcaacagcuaccccaagcugagcaagagcuacaucaacgacaagggcaaggaggugcuggugcuguggggcauccaccaccccagcaccagcgccgaccagcagagccuguaccagaacgccgacgccuacguguucgugggcagcagcagauacagcaagaaguucaagcccgagaucgccaucagacccaaggugagagaccaggagggcagaaugaacuacuacuggacccugguggagcccggcgacaagaucaccuucgaggccaccggcaaccugguggugcccagauacgccuucgccauggagagaaacgccggcagcggcaucaucaucagcgacacccccgugcacgacugcaacaccaccugccagacccccaagggcgccaucaacaccagccugcccuuccagaacauccaccccaucaccaucggcaagugccccaaguacgugaagagcaccaagcugagacuggccaccggccugagaaacgugcccagcauccagagcagaggccuguucggcgccaucgccggcuucaucgagggcggcuggaccggcaugguggacggcugguacggcuaccaccaccagaacgagcagggcagcggcuacgccgccgaccugaagagcacccagaacgccaucgacgagaucaccaacaaggugaacagcgugaucgagaagaugaacacccaguucaccgccgugggcaaggaguucaaccaccuggagaagagaaucgagaaccugaacaagaagguggacgacggcuuccuggacaucuggaccuacaacgccgagcugcuggugcugcuggagaacgagaagacccuggacuaccacgacagcaacgugaagaaccuguacgagaaggugagaagccagcugaagaacaacgccaaggagaucggcaacggcugcuucgaguucuaccacaagugcgacaacaccugcauggagagcgugaagaacggcaccuacgacuaccccaaguacagcgaggaggccaagcugaacagagaggagaucgacggcgugaagcuggagagcaccagaaucuaccagauccuggccaucuacagcaccguggccagcagccuggugcugguggugagccugggcgccaucagcuucuggaugugcagcaacggcagccugcagugcagaaucugcaucuga

SEQ ID NO: 170455 - RNA, 1701 nt, Artificial Sequence; identical to SEQ ID NO: 162716
  derived and/or modified CDS sequence (opt4) from hemagglutinin__InfluenzaA__AGR50273

SEQ ID NO: 170456 - RNA, 1701 nt, Artificial Sequence
  derived and/or modified CDS sequence (opt4) from hemagglutinin__InfluenzaA__AGR50284
augaaggccauccugguggugcugcuguacaccuucgccaccgccaacgccgacacccugugcaucggcuaccacgccaacaacagcaccgacaccguggacaccgugcuggagaagaacgugaccgugacccacagcgugaaccugcuggaggacaagcacaacggcaagcugugcaagcugagaggcguggccccccugcaccugggcaagugcaacaucgccggcuggauccugggcaaccccgagugcgagagccugagcaccgccagcagcuggagcuacaucguggagaccagcagcagcgacaacggcaccugcuaccccggcgacuucaucgacuacgaggagcugagagagcagcugagcagcgugagcagcuucgagagauucgagaucuuccccaagaccagcagcuggcccaaccacgacagcaacaagggcgugaccgccgccugcccccacgccggcgccaagagcuucuacaagaaccugaucuggcuggugaagaagggcaacagcuaccccaagcugagcaagagcuacaucaacgacaagggcaaggaggugcuggugcuguggggcauccaccaccccagcaccagcgccgaccagcagagccuguaccagaacgccgacgccuacguguucgugggcagcagcagauacagcaagaaguucaagcccgagaucgccaucagacccaaggugagagaccaggagggcagaaugaacuacuacuggacccugguggagcccggcgacaagaucaccuucgaggccaccggcaaccugguggugcccagauacgccuucgccauggagagaaacgccggcagcggcaucaucaucagcgacagccccgugcacgacugcaacaccaccugccagacccccaagggcgccaucaacaccagccugcccuuccagaacauccaccccaucaccaucggcaagugccccaaguacgugaagagcaccaagcugagacuggccaccggccugagaaacgugcccagcauccagagcagaggccuguucggcgccaucgccggcuucaucgagggcggcuggaccggcaugguggacggcugguacggcuaccaccaccagaacgagcagggcagcggcuacgccgccgaccugaagagcacccagaacgccaucgacgagaucaccaacaaggugaacagcgugaucgagaagaugaacacccaguucaccgccgugggcaaggaguucaaccaccuggagaagagaaucgagaaccugaacaagaagguggacgacggcuuccuggacaucuggaccuacaacgccgagcugcuggugcugcuggagaacgagagaacccuggacuaccacgacagcaacgugaagaaccuguacgagaaggugagaagccagcugaagaacaacgccaaggagaucggcaacggcugcuucgaguucuaccacaagugcgacaacaccugcauggagagcgugaagaacggcaccuacgacuaccccaaguacagcgaggaggccaagcugaacagagaggagaucgacggcgugaagcuggagagcaccagaaucuaccagauccuggccaucuacagcaccguggccagcagccuggugcugguggugagccugggcgccaucagcuucuggaugugcagcaacggcagccugcagugcagaaucugcaucuga

SEQ ID NO: 170457 - RNA, 1701 nt, Artificial Sequence; identical to SEQ ID NO: 163459
  derived and/or modified CDS sequence (opt4) from hemagglutinin__InfluenzaA__AGR50295

SEQ ID NO: 170458 - RNA, 1701 nt, Artificial Sequence; identical to SEQ ID NO: 162716
  derived and/or modified CDS sequence (opt4) from hemagglutinin__InfluenzaA__AGR50306

SEQ ID NO: 170459 - RNA, 1701 nt, Artificial Sequence; identical to SEQ ID NO: 162716
  derived and/or modified CDS sequence (opt4) from hemagglutinin__InfluenzaA__AGR50317

SEQ ID NO: 170460 - RNA, 1701 nt, Artificial Sequence; identical to SEQ ID NO: 170449
  derived and/or modified CDS sequence (opt4) from hemagglutinin__InfluenzaA__AGR50328

SEQ ID NO: 170461 - RNA, 1701 nt, Artificial Sequence
  derived and/or modified CDS sequence (opt4) from hemagglutinin__InfluenzaA__AGR50339
augaaggccauccugguggugcugcuguacaccuucgccaccgccaacgccgacacccugugcaucggcuaccacgccaacaacagcaccgacaccguggacaccgugcuggagaagaacgugaccgugacccacagcgugaaccugcuggaggacaagcacaacggcaagcugugcaagcugagaggcguggccccccugcaccugggcaagugcaacaucgccggcuggauccugggcaaccccgagugcgagagccugagcaccgccagcagcuggagcuacaucguggagaccagcagcagcgacaacggcaccugcuaccccggcgacuucaucgacuacgaggagcugagagagcagcugagcagcgugagcagcuucgagagauucgagaucuuccccaagaccagcagcuggcccaaccacgacagcaacaagggcgugaccgccgccugcccccacgccggcgccaagagcuucuacaagaaccugaucuggcuggugaagaagggcaacagcuaccccaagcugagcaagagcuacaucaacgacaagggcaaggaggugcuggugcuguggggcauccaccaccccagcaccagcgccgaccagcagagccuguaccagaacgccgacgccuacguguucgugggcagcagcagauacagcaagaaguucaagcccgagaucgccaucagacccaaggugagagaccaggagggcagaaugaacuacuacuggacccugguggagcccggcgacaagaucaccuucgaggccaccggcaaccugguggugcccagauacgccuucgccauggagagaaacgccggcagcggcaucaucaucagcgacacccccgugcacgacugcaacaccaccugccagaccagcaagggcgccaucaacaccagccugcccuuccagaacauccaccccaucaccaucggcaagugccccaaguacgugaagagcaccaagcugagacuggccaccggccugagaaacgugcccagcauccagagcagaggccuguucggcgccaucgccggcuucaucgagggcggcuggaccggcaugguggacggcugguacggcuaccaccaccagaacgagcagggcagcggcuacgccgccgaccugaagagcacccagaacgccaucgacgagaucaccaacaaggugaacagcgugaucgagaagaugaacacccaguucaccgccgugggcaaggaguucaaccaccuggagaagagaaucgagaaccugaacaagaagguggacgacggcuuccuggacaucuggaccuacaacgccgagcugcuggugcugcuggagaacgagagaacccuggacuaccacgacagcaacgugaagaaccuguacgagaaggugagaagccagcugaagaacaacgccaaggagaucggcaacggcugcuucgaguucuaccacaagugcgacaacaccugcauggagagcgugaagaacggcaccuacgacuaccccaaguacagcgaggaggccaagcugaacagagaggagaucgacggcgugaagcuggagagcaccagaaucuaccagauccuggccaucuacagcaccguggccagcagccuggugcugguggugagccugggcgccaucagcuucuggaugugcagcaacggcagccugcagugcagaaucugcaucuga

SEQ ID NO: 170462 - RNA, 1701 nt, Artificial Sequence
  derived and/or modified CDS sequence (opt4) from hemagglutinin__InfluenzaA__AGR50350
augaaggccauccugguggugcugcuguacaccuucgccaccgccaacgccgacacccugugcaucggcuaccacgccaacaacagcaccgacaccguggacaccgugcuggagaagaacgugaccgugacccacagcgugaaccugcuggaggacaagcacaacggcaagcugugcaagcugagaggcguggccccccugcaccugggcaagugcaacaucgccggcuggaucaugggcaaccccgagugcgagagccugagcaccgccagcagcuggagcuacaucguggagaccagcagcagcgacaacggcaccugcuaccccggcgacuucaucgacuacgaggagcugagagagcagcugagcagcgugagcagcuucgagagauucgagaucuuccccaagaccagcagcuggcccaaccacgacagcaacaagggcgugaccgccgccugcccccacgccggcgccaagagcuucuacaagaaccugaucuggcuggugaagaagggcaacagcuaccccaagcugagcaagagcuacaucaacgacaagggcaaggaggugcuggugcuguggggcauccaccaccccagcaccagcgccgaccagcagagccuguaccagaacgccgacgccuacguguucgugggcagcagcagauacagcaagaaguucaagcccgagaucgccaucagacccaaggugagagaccaggagggcagaaugaacuacuacuggacccugguggagcccggcgacaagaucaccuucgaggccaccggcaaccugguggugcccagauacgccuucgccauggagagaaacgccggcagcggcaucaucaucagcgacacccccgugcacgacugcaacaccaccugccagacccccaagggcgccaucaacaccagccugcccuuccagaacauccaccccaucaccaucggcaagugccccaaguacgugaagagcaccaagcugagacuggccaccggccugagaaacgugcccagcauccagagcagaggccuguucggcgccaucgccggcuucaucgagggcggcuggaccggcaugguggacggcugguacggcuaccaccaccagaacgagcagggcagcggcuacgccgccgaccugaagagcacccagaacgccaucgacgagaucaccaacaaggugaacagcgugaucgagaagaugaacacccaguucaccgccgugggcaaggaguucaaccaccuggagaagagaaucgagaaccugaacaagaagguggacgacggcuuccuggacaucuggaccuacaacgccgagcugcuggugcugcuggagaacgagagaacccuggacuaccacgacagcaacgugaagaaccuguacgagaaggugagaagccagcugaagaacaacgccaaggagaucggcaacggcugcuucgaguucuaccacaagugcgacaacaccugcauggagagcgugaagaacggcaccuacgacuaccccaaguacagcgaggaggccaagcugaacagagaggagaucgacggcgugaagcuggagagcaccagaaucuaccagauccuggccaucuacagcaccguggccagcagccuggugcugguggugagccugggcgccaucagcuucuggaugugcagcaacggcagccugcagugcagaaucugcaucuga

SEQ ID NO: 170463 - RNA, 1698 nt, Artificial Sequence
  derived and/or modified CDS sequence (opt4) from hemagglutinin__InfluenzaA__AGR50361
augaaggugcagcugcuggugcugcugugcaccuucaccgccaccuacgccgacaccaucugcaucggcuaccacgccaacaacagcaccgacaccguggacaccgugcuggagaagaacgugaccgugacccacagcgugaaccugcuggagaacagccacaacggcaagcugugccugcugaagggcaucgccccccugcagcugggcaacugcagcguggccggcuggauccugggcaaccccgagugcgagcugcugaucagcaaggagagcuggagcuacaucguggagaagcccaaccccgagaacggcaccugcuaccccggccacuucgccgacuacgaggagcugagagagcagcugagcagcgugagcagcuucgagagauucgagaucuuccccaaggagagcagcuggcccaaccacaccgugaccggcgugagcgccagcugcagccacaacggcgagagcagcuucuacagaaaccugcuguggcugaccggcaagaacggccuguaccccaaccugagcaagagcuacgccaacaacaaggagaaggaggugcuggugcuguggggcgugcaccacccccccaacaucguggaccagaagacccuguacagaaccgagaacgccuacgugagcguggugagcagccacuacagcagaaaguucacccccgagaucgccaagagacccaaggugagagaccaggagggcagaaucaacuacuacuggacccugcuggagcccggcgacaccaucaucuucgaggccaacggcaaccugaucgcccccagauacgccuucgcccugagcagaggcuucggcagcggcaucaucaacagcaacgcccccaugggcaagugcgacgccaagugccagaccccccagggcgccaucaacagcagccugcccuuccagaacgugcaccccgugaccaucggcgagugccccaaguacgugagaagcgccaagcugagaauggugaccggccugagaaacauccccagcauccagagcagaggccuguucggcgccaucgccggcuucaucgagggcggcuggaccggcaugguggacggcugguacggcuaccaccaccagaacgagcagggcagcggcuacgccgccgaccagaagagcacccagaacgccaucaacggcaucaccaacaaggugaacagcgugaucgagaagaugaacacccaguucaccgccgugggcaaggaguucaacaagcuggagagaagaauggagaaccugaacaagaagguggacgacggcuucaucgacaucuggaccuacaacgccgagcugcuggugcugcuggagaacgagagaacccuggacuuccacgacagcaacgugaagaaccuguacgagaaggugaagagccagcugaagaacaacgccaaggagaucggcaacggcugcuucgaguucuaccacaagugcaacgacgagugcauggagagcgugaagaacggcaccuacgacuaccccaaguacagcgaggagagcaagcugaacagagagaagaucgacggcgugaagcuggagagcaugggcguguaccagauccuggccaucuacagcaccguggccagcagccuggugcugcuggugagccugggcgccaucagcuucuggaugugcagcaacggcagccugcagugcagaaucugcaucuga

SEQ ID NO: 170464 - RNA, 1701 nt, Artificial Sequence
  derived and/or modified CDS sequence (opt4) from hemagglutinin__InfluenzaA__AGT18718
augaaggugauccugguggugcugcuguacaccuucgccaccgccaacgccgacacccugugcaucggcuaccacgccaacaacagcaccgacaccguggacaccgugcuggagaagaacgugaccgugacccacagcgugaaccugcuggaggacaagcacaacggcaagcugugcaagcugagaggcguggccccccugcaccugggcaagugcaacaucgccggcuggauccugggcaaccccgagugcgagagccugagcaccgccagcagcuggagcuacaucguggagaccagcagcagcgacaacggcaccugcuaccccggcgacuucaucaacuacgaggagcugagagagcagcugagcagcgugagcagcuucgagagauucgagaucuuccccaagaccagcagcuggcccaaccacgacagcaacaagggcgugaccgccgccugcccccacgccggcgccaagagcuucuacaagaaccugaucuggcuggugaagaagggcaacagcuaccccaagcugagcaagagcuacaucaacgacaagggcaaggaggugcuggugcuguggggcauccaccaccccagcaccaccgccgaccagcagagccuguaccagaacgccgacgccuacguguucgugggcaccagcagauacagcaagaaguucaagcccgagaucgccaucagacccaaggugagagaccaggagggcagaaugaacuacuacuggacccugaucgagcccggcgacaagaucaccuucgaggccaccggcaaccugguggugcccagauacgccuucgccauggagagaaacgccggcagcggcaucaucaucagcgacacccccgugcacgacugcaacaccaccugccagacccccgagggcgccaucaacaccagccugcccuuccagaacauccaccccaucaccaucggcaagugccccaaguacgugaagagcaccaagcugagacuggccaccggccugagaaacgugcccagcauccagagcagaggccuguucggcgccaucgccggcuucaucgagggcggcuggaccggcaugguggacggcugguacggcuaccaccaccagaacgagcagggcagcggcuacgccgccgaccugaagagcacccagaacgccaucgacaagaucaccaacaaggugaacagcgugaucgagaagaugaacacccaguucaccgccgugggcaaggaguucaaccaccuggagaagagaaucgagaaccugaacaagaagguggacgacggcuuccuggacaucuggaccuacaacgccgagcugcuggugcugcuggagaacgagagaacccuggacuaccacgacagcaacgugaagaaccuguacgagaaggugagaaaccagcugaagaacaacgccaaggagaucggcaacggcugcuucgaguucuaccacaagugcgacaacaccugcauggagagcgugaagaacggcaccuacgacuaccccaaguacagcgaggaggccaagcugaacagagagaagaucgacggcgugaagcuggagagcaccagaaucuaccagauccuggccaucuacagcaccguggccagcagccuggugcugguggugagccugggcgccaucagcuucuggaugugcagcaacggcagccugcagugcagaaucugcaucuga

SEQ ID NO: 170465 - RNA, 1701 nt, Artificial Sequence
  derived and/or modified CDS sequence (opt4) from hemagglutinin__InfluenzaA__AGT18720
augaaggugauccugguggugcugcuguacaccuucgccaccgccaacgccgacacccugugcaucggcuaccacgccaacaacagcaccgacaccguggacaccgugcuggagaagaacgugaccgugacccacagcgugaaccugcuggaggacaagcacaacggcaagcugugcaagcugagaggcguggccccccugcaccugggcaagugcaacaucgccggcuggauccugggcaaccccgagugcgagagccugagcaccgccagcagcuggagcuacaucguggagaccagcagcagcgacaacggcaccugcuaccccggcgacuucaucaacuacgaggagcugagagagcagcugagcagcgugagcagcuucgagagauucgagaucuuccccaaggccagcagcuggcccaaccacgacagcaacaagggcgugaccgccgccugcccccacgccggcgccaagagcuucuacaagaaccugaucuggcuggugaagaagggcaacagcuaccccaagcugagcaagagcuacaucaacgacaagggcaaggaggugcuggugcuguggggcauccaccaccccaacaccaccgccgaccagcagagccuguaccagaacgccgacgccuacguguucgugggcaccagcagauacagcaagaaguucaagcccgagaucgccaucagacccaaggugagagaccaggagagaagaaugaacuacuacuggacccugaucgagcccggcgacaagaucaccuucgaggccaccggcaaccugguggugcccagauacgccuucgccauggagagaaacgccggcagcggcaucaucaucagcgacacccccgugcacgacugcaacaccaccugccagacccccgagggcgccaucaacaccagccugcccuuccagaacauccaccccaucaccaucggcaagugccccaaguacgugaagagcaccaagcugagacuggccaccggccugagaaacgugcccagcauccagagcagaggccuguucggcgccaucgccggcuucaucgagggcggcuggaccggcaugguggacggcugguacggcuaccaccaccagaacgagcagggcagcggcuacgccgccgaccugaagagcacccagaacgccaucgacaagaucaccaacaaggugaacagcgugaucgagaagaugaacacccaguucaccgccgugggcaaggaguucaaccaccuggagaagagaaucgagaaccugaacaagaagguggacgacggcuuccuggacaucuggaccuacaacgccgagcugcuggugcugcuggagaacgagagaacccuggacuaccacgacagcaacgugaagaaccuguacgagaaggugagaaaccagcugaagaacaacgccaaggagaucggcaacggcugcuucgaguucuaccacaagugcgacaacaccugcauggagagcgugaagaacggcaccuacgacuaccccaaguacagcgaggaggccaagcugaacagagagaagaucgacggcgugaagcuggagagcaccagaaucuaccagauccuggccaucuacagcaccguggccagcagccuggugcugguggugagccugggcgccaucagcuucuggaugugcagcaacggcagccugcagugcagaaucugcaucuga

SEQ ID NO: 170466 - RNA, 1701 nt, Artificial Sequence
  derived and/or modified CDS sequence (opt4) from hemagglutinin__InfluenzaA__AGT18721
augaaggccauccugguggugcugcuguacaccuucgccaccgccaacgccgacacccugugcaucggcuaccacgccaacaacagcaccgacaccguggacaccgugcuggagaagaacgugaccgugacccacagcgugaaccugcuggaggacaagcacaacggcaagcugugcaagcugagaggcguggccccccugcaccugggcaagugcaacaucgccggcuggauccugggcaaccccgagugcgagagccugagcaccgccagcagcuggagcuacaucguggagaccagcagcagcgacaacggcaccugcuaccccggcgacuucaucaacuacgaggagcugagagagcagcugagcagcgugagcagcauccagagaagcgagaucugcaccaagaccagcagcuggcccaaccacgacagcaacaagggcgugaccgccgccugcccccacgccggcgccaagagcuucuacaagaaccugaucuggcuggugaagaagggcaacagcuaccccaagcugagcaagagcuacaucaacgacaagggcaaggaggugcuggugcuguggggcauccaccaccagaacagcagaggccaccagcagagccuguaccagaacgccgacgccuacguguucgugggcaccagcagauacagcaagaaguucaagcccgagaucgccaucagacccaaggugaaggagcaggacggcagaauggacuacuacuggacccugaucgagcccggcgacaagaucaccuucgaggccaccggcaaccugguggugcccagauacgccuucgccauggagagaaacgccggcagcggcaucaucaucagcgacacccccgugcacgacugcaacaccaccugccagacccccgagggcgccaucaacaccagccugcccuuccagaacauccaccccaucaccaucggcaagugccccaaguacgugaagagcaccaagcugagacuggccaccggccugagaaacgugcccagcauccagagcagaggccuguucggcgccaucgccggcuucaucgagggcggcuggaccggcaugguggacggcugguacggcuaccaccaccagaacgagcagggcagcggcuacgccgccgaccugaagagcacccagaacgccaucgacaagaucaccaacaaggugaacagcgugaucgagaagaugaacacccaguucaccgccgugggcaaggaguucaaccaccuggagaagagaaucgagaaccugaacaagaagguggacgacggcuuccuggacaucuggaccuacaacgccgagcugcuggugcugcuggagaacgagagaacccuggacuaccacgacagcaacgugaagaaccuguacgagaaggugagaaaccagcugaagaacaacgccaaggagaucggcaacggcugcuucgaguucuaccacaagugcgacaacaccugcauggagagcgugaagaacggcaccuacgacuaccccaaguacagcgaggaggccaagcugaacagagagaagaucgacggcgugaagcuggagagcaccagaaucuaccagauccuggccaucuacagcaccguggccagcagccuggugcugguggugagccugggcgccaucagcuucuggaugugcagcaacggcagccugcagugcagaaucugcaucuga

SEQ ID NO: 170467 - RNA, 1701 nt, Artificial Sequence
  derived and/or modified CDS sequence (opt4) from hemagglutinin__InfluenzaA__AGT18722
augaaggccauccugguggugcugcuguacaccuucgccaccgccaacgccgacacccugugcaucggcuaccacgccaacaacagcaccgacaccguggacaccgugcuggagaagaacgugaccgugacccacagcgugaaccugcuggaggacaagcacaacggcaagcugugcaagcugagaggcguggccccccugcaccugggcaagugcaacaucgccggcuggauccugggcaaccccgagugcgagagccugagcaccgccagcagcuggagcuacaucguggagaccagcaagagcaacaacagaaccugcuaccccggcgacuucaucaacuacgaggagcugagagagcagcugagcagcgugagcagcuucgagagauucgagaucuuccccaagaccagcagcuggcccaaccacgacagcaacaagggcgugaccgccgccugcccccacgccggcgccaagagcuucuacaagaaccugaucuggcuggugaagaagggcaacagcuaccccaagcugagcaagagcuacaucaacgacaagggcaaggaggugcuggugcuguggggcauccaccaccccagcaccaccgccgaccagcagagccuguaccagaacgccgacgccuacguguucgugggcaccagcagauacagcaagaaguucaagcccgagaucgccaucagacccaaggugagagaccaggagggcagaaugaacuacuacuggacccugaucgagcccggcgacaagaucaccuucgaggccaccggcaaccugguggugcccagauacgccuucgccauggagagaaacgccggcagcggcaucaucaucagcgacacccccgugcacgacugcaacaccaccugccagacccccgagggcgccaucaacaccagccugcccuuccagaacauccaccccaucaccaucggcaagugccccaaguacgugaagagcaccaagcugagacuggccaccggccugagaaacgugcccagcauccagagcagaggccuguucggcgccaucgccggcuucaucgagggcggcuggaccggcaugguggacggcugguacggcuaccaccaccagaacgagcagggcagcggcuacgccgccgaccugaagagcacccagaacgccaucgacaagaucaccaacaaggugaacagcgugaucgagaagaugaacacccaguucaccgccgugggcaaggaguucaaccaccuggagaagagaaucgagaaccugaacaagaagguggacgacggcuuccuggacaucuggaccuacaacgccgagcugcuggugcugcuggagaacgagagaacccuggacuaccacgacagcaacgugaagaaccuguacgagaaggugagaaaccagcugaagaacaacgccaaggagaucggcaacggcugcuucgaguucuaccacaagugcgacaacaccugcauggagagcgugaagaacggcaccuacgacuaccccaaguacagcgaggaggccaagcugaacagagagaagaucgacggcgugaagcuggagagcaccagaaucuaccagauccuggccaucuacagcaccguggccagcagccuggugcugguggugagccugggcgccaucagcuucuggaugugcagcaacggcagccugcagugcagaaucugcaucuga

SEQ ID NO: 170468 - RNA, 1701 nt, Artificial Sequence
  derived and/or modified CDS sequence (opt4) from hemagglutinin__InfluenzaA__AGT18723
augaaggccauccugguggugcugcuguacaccuucgccaccgccaacgccgacacccugugcaucggcuaccacgccaacaacagcaccgacaccguggacaccgugcuggagaagaacgugaccgugacccacagcgugaaccugcuggaggacaagcacaacggcaagcugugcaagcugagaggcguggccccccugcaccugggcaagugcaacaucgccggcuggauccugggcaaccccgagugcgagagccugagcaccgccagcagcuggagcuacaucguggagaccagcaagaccaacaacagaaccugcuaccccggcgacuucaucaacuacgaggagcugagagagcagcugagcagcgugagcagcuucgagagauucgagaucuuccccaagaccagcagcuggcccaaccacgacagcaacaagggcgugaccgccgccugcccccacgccggcgccaagagcuucuacaagaaccugaucuggcuggugaagaagggcaacagcuaccccaagcugagcaagagcuacaucaacgacaagggcaaggaggugcuggugcuguggggcauccaccaccagaacaagaaggccgagcagcagacccccuaccagaacgccgacgccuacguguucgugggcaccagcagauacagcaagaaguucaagcccgagaucgccaucagacccaaggugagagaccaggagggcagaauggacuacuacuggacccugaucgagcccggcgacaagaucaccuucgaggccaccggcaaccugguggugcccagauacgccuucgccauggagagaaacgccggcagcggcaucaucaucagcgacacccccgugcacgacugcaacaccaccugccagacccccgagggcgccaucaacaccagccugcccuuccagaacauccaccccaucaccaucggcaagugccccaaguacgugaagagcaccaagcugagacuggccaccggccugagaaacgugcccagcauccagagcagaggccuguucggcgccaucgccggcuucaucgagggcggcuggaccggcaugguggacggcugguacggcuaccaccaccagaacgagcagggcagcggcuacgccgccgaccugaagagcacccagaacgccaucgacaagaucaccaacaaggugaacagcgugaucgagaagaugaacacccaguucaccgccgugggcaaggaguucaaccaccuggagaagagaaucgagaaccugaacaagaagguggacgacggcuuccuggacaucuggaccuacaacgccgagcugcuggugcugcuggagaacgagagaacccuggacuaccacgacagcaacgugaagaaccuguacgagaaggugagaaaccagcugaagaacaacgccaaggagaucggcaacggcugcuucgaguucuaccacaagugcgacaacaccugcauggagagcgugaagaacggcaccuacgacuaccccaaguacagcgaggaggccaagcugaacagagagaagaucgacggcgugaagcuggagagcaccagaaucuaccagauccuggccaucuacagcaccguggccagcagccuggugcugguggugagccugggcgccaucagcuucuggaugugcagcaacggcagccugcagugcagaaucugcaucuga

SEQ ID NO: 170469 - RNA, 1701 nt, Artificial Sequence
  derived and/or modified CDS sequence (opt4) from hemagglutinin__InfluenzaA__AGT18724
augaaggccauccugguggugcugcuguacaccuucgccaccgccaacgccgacacccugugcaucggcuaccacgccaacaacagcaccgacaccguggacaccgugcuggagaagaacgugaccgugacccacagcgugaaccugcuggaggacaagcacaacggcaagcugugcaagcugagaggcguggugccccugcaccugggcaagugcaacaucgccggcuggauccugggcaaccccgagugcgagagccugagcaccgccagcagcuggagcuacaucguggagaccagcaagaccaacaacagaaccugcuaccccggcgacuucaucaacuacgaggagcugagagagcagcugagcagcgugagcagcuucgagagauucgagaucuuccccaagaccagcagcuggcccaaccacgacagcaacaagggcgugaccgccgccugcccccacgccggcgccaagagcuucuacaagaaccugaucuggcuggugaagaagggcaacagcuaccccaagcugagcaagagcuacaucaacgacaagggcaaggaggugcuggugcuguggggcauccaccaccccagcaccaccgccgaccagcagacccuguaccagaacgccgacgccuacguguucgugggcaccagcagauacagcaagaaguucaagcccgagaucgccaucagacccaaggugagagaccaggagggcagaaugaacuacuacagaacccugaucgagcccgagaacaagaucaccuucgaggccaccggcaaccugguggugcccagauacgccuucgccauggagagaaacgccggcagcggcaucaucaucagcgacacccccgugcacgacugcaacaccaccugccagacccccgagggcgccaucaacaccagccugcccuuccagaacauccaccccaucaccaucggcaagugccccaaguacgugaagagcaccaagcugagacuggccaccggccugagaaacgugcccagcauccagagcagaggccuguucggcgccaucgccggcuucaucgagggcggcuggaccggcaugguggacggcugguacggcuaccaccaccagaacgagcagggcagcggcuacgccgccgaccugaagagcacccagaacgccaucgacaagaucaccaacaaggugaacagcgugaucgagaagaugaacacccaguucaccgccgugggcaaggaguucaaccaccuggagaagagaaucgagaaccugaacaagaagguggacgacggcuuccuggacaucuggaccuacaacgccgagcugcuggugcugcuggagaacgagagaacccuggacuaccacgacagcaacgugaagaaccuguacgagaaggugagaaaccagcugaagaacaacgccaaggagaucggcaacggcugcuucgaguucuaccacaagugcgacaacaccugcauggagagcgugaagaacggcaccuacgacuaccccaaguacagcgaggaggccaagcugaacagagagaagaucgacggcgugaagcuggagagcaccagaaucuaccagauccuggccaucuacagcaccguggccagcagccuggugcugguggugagccugggcgccaucagcuucuggaugugcagcaacggcagccugcagugcagaaucugcaucuga

SEQ ID NO: 170470 - RNA, 1701 nt, Artificial Sequence
  derived and/or modified CDS sequence (opt4) from hemagglutinin__InfluenzaA__AGT18725
augaaggugauccugguggugcugcuguacaccuucgccaccgccaacgccgacacccugugcaucggcuaccacgccaacaacagcaccgacaccguggacaccgugcuggagaagaacgugaccgugacccacagcgugaaccugcuggaggacaagcacaacggcaagcugugcaagcugagaggcguggccccccugcaccugggcaagugcaacaucgccggcuggauccugggcaaccccgagugcgagagccugagcaccgccagcagcuggagcuacaucguggagaccagcagcagcgacaacggcaccugcuaccccggcgacuucaucaacuacgaggagcugagagagcagcugagcagcgugagcagcuucgagagauucgagaucuuccccaagaccagcagcuggcccaaccacgacagcaacaagggcgugaccgccgccugcccccacgccggcgccaagagcuucuacaagaaccugaucuggcuggugaagaagggcaacagcuaccccaagcugagcaagagcuacaucaacgacaagggcaaggaggugcuggugcuguggggcauccaccaccccagcaccagcgccgaccagcagagccuguaccagaacgccgacgccuacguguucgugggcaccagcagauacagcaagaaguucaagcccgagaucgccaucagacccaaggugagagaccaggagggcagaaugaacuacuacuggacccugguggagcccggcgacaagaucaccuucgaggccaccggcaaccugguggugcccagauacgccuucgccauggagagaaacgccggcagcggcaucaucaucagcgacacccccgugcacgacugcaacaccaccugccagacccccgagggcgccaucaacaccagccugcccuuccagaacauccaccccaucaccaucggcaagugccccaaguacgugaagagcaccaagcugagacuggccaccggccugagaaacgugcccagcauccagagcagaggccuguucggcgccaucgccggcuucaucgagggcggcuggaccggcaugguggacggcugguacggcuaccaccaccagaacgagcagggcagcggcuacgccgccgaccugaagagcacccagaacgccaucgacaagaucaccaacaaggugaacagcgugaucgagaagaugaacacccaguucaccgccgugggcaaggaguucaaccaccuggagaagagaaucgagaaccugaacaagaagguggacgacggcuuccuggacaucuggaccuacaacgccgagcugcuggugcugcuggagaacgagagaacccuggacuaccacgacagcaacgugaagaaccuguacgagaaggugagaacccagcugaagaacaacgccaaggagaucggcaacggcugcuucgaguucuaccacaagugcgacaacaccugcauggagagcgugaagaacggcaccuacgacuaccccaaguacagcgaggaggccaagcugaacagagagaagaucgacggcgugaagcuggagagcaccagaaucuaccagauccuggccaucuacagcaccguggccagcagccuggugcugguggugagccugggcgccaucagcuucuggaugugcagcaacggcagccugcagugcagaaucugcaucuga

SEQ ID NO: 170471 - RNA, 1701 nt, Artificial Sequence
  derived and/or modified CDS sequence (opt4) from hemagglutinin__InfluenzaA__AGT18734
augaaggccauccugguggugcugcuguacaccuucgccaccgccaacgccgacacccugugcaucggcuaccacgccaacaacagcaccgacaccguggacaccgugcuggagaagaacgugaccgugacccacagcgugaaccugcuggaggacaagcacaacggcaagcugugcaagcugagaggcguggccccccugcaccugggcaagugcaacaucgccggcuggauccugggcaaccccgagugcgagagccugagcaccgccagcagcuggagcuacaucguggagaccagcagcagcgacaacggcaccugcuaccccggcgacuucaucaacuacgaggagcugagagagcagcugagcagcgugagcagcuucgagagauucgagaucuuccccaagaccagcagcuggcccaaccacgacagcaacaagggcgugaccgccgccugcccccacgccggcgccaagagcuucuacaagaaccugaucuggcuggugaagaagggcaacagcuaccccaagcugagcaagagcuacaucaacgacaagggcaaggaggugcuggugcuguggggcauccaccaccccagcaccaccgccgaccagcagagccuguaccagaacgccgacgccuacguguucgugggcaccagcagauacagcaagaaguucaagcccgagaucgccaucagacccaaggugagagaccaggagggcagaaucaacuacuacuggacccugaucgagcccggcgacaagaucaccuucgaggccaccggcaaccugguggugcccagauacgccuucgccauggagagaaacgccggcagcggcaucaucaucagcgacacccccgugcacgacugcaacaccaccugccagacccccgagggcgccaucaacaccagccugcccuuccagaacauccaccccaucaccaucggcaagugccccaaguacgugaagagcaccaagcugagacuggccaccggccugagaaacgugcccagcauccagagcagaggccuguucggcgccaucgccggcuucaucgagggcggcuggaccggcaugguggacggcugguacggcuaccaccaccagaacgagcagggcagcggcuacgccgccgaccugaagagcacccagaacgccaucgacaagaucaccaacaaggugaacagcgugaucgagaagaugaacacccaguucaccgccgugggcaaggaguucaaccaccuggagaagagaaucgagaaccugaacaagaagguggacgacggcuuccuggacaucuggaccuacaacgccgagcugcuggugcugcuggagaacgagagaacccuggacuaccacgacagcaacgugaagaaccuguacgagaaggugagaaaccagcugaagaacaacgccaaggagaucggcaacggcugcuucgaguucuaccacaagugcgacaacaccugcauggagagcgugaagaacggcaccuacgacuaccccaaguacagcgaggaggccaagcugaacagagagaagaucgacggcgugaagcuggagagcaccagaaucuaccagauccuggccaucuacagcaccguggccagcagccuggugcugguggugagccugggcgccaucagcuucuggaugugcagcaacggcagccugcagugcagaaucugcaucuga

SEQ ID NO: 170472 - RNA, 1701 nt, Artificial Sequence; identical to SEQ ID NO: 170183
  derived and/or modified CDS sequence (opt4) from hemagglutinin__InfluenzaA__AGT18735

SEQ ID NO: 170473 - RNA, 1701 nt, Artificial Sequence
  derived and/or modified CDS sequence (opt4) from hemagglutinin__InfluenzaA__AGT18748
augaagaccaucaucgcccugagcuacauccugugccugguguucgcccagaagcugcccggcaacgacaacagcaccgccacccugugccugggccaccacgccgugcccaacggcaccaucgugaagaccaucaccaacgacagaaucgaggugaccaacgccaccgagcuggugcagaacagcagcaucggcgagaucugcgacagcccccaccagauccuggacgaggagaacugcacccugaucgacgcccugcugggcgacccccagugcgacgacuuccagaacaagaagugggaccuguucguggagagaagcaaggccuacagcaacugcuaccccuacgacgugcccgacuacgccagccugagaagccugguggccagcagcggcacccuggaguucaacaacgagagcuucaacugggccggcgugacccagaacggcaccagcagcgccugcagaagaggcagcaacagcagcuucuucagcagacugaacuggcugacccaccugaacuucaaguaccccgcccugaacgugaccaugcccaacaacgagcaguucgacaagcuguacaucuggggcgugcaccaccccagcaccgacaaggaccagaucuuccuguacgcccagagcagcggcagaaucaccgugagcaccaagagaagccagcaggccgugauccccaacaucggcagcagacccagaaucagaaacauccccagcagaaucagcaucuacuggaccaucgugaagcccggcgacauccugcugaucaacagcaccggcaaccugaucgcccccagaggcuacuucaagaucagaagcggcaagagcagcaucaugagaagcgacgcccccaucggcaagugcaagagcgagugcaucacccccaacggcagcauccccaacgacaagcccuuccagaacgugaacagaaucaccuacggcgccugccccagauacgugaagcagagcacccugaagcuggccaccggcaugagaaacgugcccgagaagcagaccagaggcaucuucggcgccaucgccggcuucaucgagaacggcugggagggcaugguggacggcugguacggcuucagacaccagaacagcgagggcagaggccaggccgccgaccugaagagcacccaggccgccaucgaccagaucaacggcaagcugaacagacugaucggcaagaccaacgagaaguuccaccagaucgagaaggaguucagcgagguggagggcagaauccaggaccuggagaaguacguggaggacaccaagaucgaccuguggagcuacaacgccgagcugcugguggcccuggagaaccagcacaccaucgaccugaccgacagcgagaugaacaagcuguucgagaagaccaagaagcagcugagagagaacgccgaggacaugggcaacggcugcuucaagaucuaccacaagugcgacaacgccugcaucggcagcaucagaaacggcaccuacgaccacgacguguacagagacgaggcccugaacaacagauuccagaucaagggcguggagcugaagagcggcuacaaggacuggauccuguggaucagcuucgccaucagcugcuuccugcugugcguggcccugcugggcuucaucaugugggccugccagaagggcaacaucagaugcaacaucugcaucuga

SEQ ID NO: 170474 - RNA, 1701 nt, Artificial Sequence
  derived and/or modified CDS sequence (opt4) from hemagglutinin__InfluenzaA__AGT18749
augaagaccaucaucgcccugagcuacauccugugccugguguucgcccagaagcugcccgagaacgacaacagcaccgccacccugugccugggccaccacgccgugcccaacggcaccaucgugaagaccaucaccgacgaccagaucgaggugaccaacgccaccgagcuggugcagaacagcagcaccggcgagaucugcgacagcccccaccagauccuggacggcgagaacugcacccugaucgacgcccugcugggcgacccccagugcgacggcuuccagaacaagaagugggaccuguucguggagagaagcaaggccuacagcaacugcuaccccuacgacgugcccgacuacgccagccugagaagccugguggccagcagcggcacccuggaguucaacaacgagagcuucaacuggaccggcgugacccagaacggcaccagcagcgccugcaucagaagaagcaacaacagcuucuucagcagacugaacuggcugacccaccugaacuucaaguaccccgcccugaacgugaccaugcccaacaacgagcaguucgacaagcuguacaucuggggcgugcaccaccccggcaccgacaaggaccagaucuuccuguacgcccaggccagcggcagaaucaccgugagcaccaagagaagccagcaggccgugauccccaacaucggcagcagacccagagugagaaacauccccagcagaaucagcaucuacuggaccaucgugaagcccggcgacauccugcugaucaacagcaccggcaaccugaucgcccccagaggcuacuucagaaucagaagcggcagaagcagcaucaugagaagcgacgcccccaucggcaagugcaacagcgagugcaucacccccaacggcagcauccccaacgacaagcccuuccagaacgugaacagaaucaccuacggcgccugccccagauacgugaagcagaacacccugaagcuggccaccggcaugagaaacgugcccgagaagcagaccagaggcaucuucggcgccaucgccggcuucaucgagaacggcugggagggcaugguggacggcugguacggcuucagacaccagaacagcgagggcagaggccaggccgccgaccugaagagcacccaggccgccaucgaccagaucaacggcaagcugaacagacugaucggcaagaccaacgagaaguuccaccagaucgagaaggaguucagcgagguggagggcagaauccaggaccuggagaaguacguggaggacaccaagaucgaccuguggagcuacaacgccgagcugcugguggcccuggagaaccagcacaccaucgaccugaccgacagcgagaugaacaagcuguucgagaagaccaagaagcagcugagagagaacgccgaggacaugggcaacggcugcuucaagaucuaccacaagugcgacaacgccugcaucggcagcaucagaaacggcaccuacgaccacgacguguacagagacgaggcccugaacaacagauuccagaucaagggcguggagcugaagagcggcuacaaggacuggauccuguggaucagcuucgccaucagcugcuuccugcugugcguggcccugcugggcuucaucaugugggccugccagaagggcaacaucagaugcaacaucugcaucuga

SEQ ID NO: 170475 - RNA, 1701 nt, Artificial Sequence
  derived and/or modified CDS sequence (opt4) from hemagglutinin__InfluenzaA__AGT18751
augaagaccgugaucgcccugagcuacauccugugccugguguucgcccagaagcugcccggcaacgacaacagcaccgccacccugugccugggccaccacgccgugcccaacggcaccaucgugaagaccaucaccaacgaccagaucgaggugaccaacgccaccgagcuggugcagaacagcagcaccggcgagaucugcgacagcccccaccagauccuggacggcgagaacugcacccugaucgacgcccugcugggcgacccccagugcgacggcuuccagaacaagaagugggaccuguucguggagagaagcaaggccuacagcaacugcuaccccuacgacgugcccgacuacgccagccugagaagccugguggccagcagcggcacccuggaguucaacaacgagagcuucaacuggaccggcgugacccagaacggcaccagcagcgccugcaucagaagaagcaacaacagcuucuucagcagacugaacuggcugacccaccugaacuucaaguaccccgcccugaacgugaccaugcccaacaacgagcaguucgacaagcuguacaucuggggcgugcaccaccccggcaccgacaaggaccagaucuuccuguacgcccaggccagcggcagaaucaccgugagcaccaagagaagccagcaggccgugauccccaacaucggcagcagacccagagugagaaacauccccagcagaaucagcaucuacuggaccaucgugaagcccggcgacauccugcugaucaacagcaccggcaaccugaucgcccccagaggcuacuucaagaucagaagcggcagaagcagcaucaugagaagcgacgcccccaucggcaagugcaacagcgagugcaucacccccaacggcagcauccccaacgacaagcccuuccagaacgugaacagaaucaccuacggcgccugccccagauacgugaagcagaacacccugaagcuggccaccggcaugagaaacgugcccgagaagcagaccagaggcaucuucggcgccaucgccggcuucaucgagaacggcugggagggcaugguggacggcugguacggcuucagacaccagaacagcgagggcagaggccaggccgccgaccugaagagcacccaggccgccaucgaccagaucaacggcaagcugaacagacugaucggcaagaccaacgagaaguuccaccagaucgagaaggaguucagcgagguggagggcagaauccaggaccuggagaaguacguggaggacaccaagaucgaccuguggagcuacaagagcgagcugcugguggcccuggagaaccagcacaccaucgaccugaccgacagcgagaugaacaagcuguucgagaagaccaagaagcagcugagagagaacgccgaggacaugggcaacggcugcuucaagaucuaccacaagugcgacaacgccugcaucggcagcaucagaaacggcaccuacgaccacgacguguacagagacgaggcccugaacaacagauuccagaucaagggcguggagcugaagagcggcuacaaggacuggauccuguggaucagcuucgccaucagcugcuuccugcugugcguggcccugcugggcuucaucaugugggccugccagaagggcaacaucagaugcaacaucugcaucuga

SEQ ID NO: 170476 - RNA, 1701 nt, Artificial Sequence
  derived and/or modified CDS sequence (opt4) from hemagglutinin__InfluenzaA__AGT18752
augaagaccaucaucgcccugagcuacaucaucugccugguguucgcccagaagcugcccggcaacgacaacagcaccgccacccugugccugggccaccacgccgugcccaacggcaccaucgugaagaccaucaccaacgaccagaucgaggugaccaacgccaccgagcuggugcagaacagcagcaccggcgagaucugcaacagcccccaccagauccuggacggcgagaacugcacccugaucgacgcccugcugggcgacccccagugcgacggcuuccagaacaagaagugggaccuguucguggagagaagcaaggccuacagcaacugcuaccccuacgacgugcccgacuacgccagccugagaagccugguggccagcagcggcacccuggaguucaacaacgagagcuucaacuggaccggcgugacccagaacggcaccagcagcgccugcaucagaagaagcaacaacagcuucuucagcagacugaacuggcugacccaccugaacuucaaguaccccgcccugaacgugaccaugcccaacaacgagcaguucgacaagcuguacaucuggggcgugcaccaccccggcaccgacaaggaccagaucuuccuguacgcccaggccagcggcagaaucaccgugagcaccaagagaagccagcaggccgugauccccaacaucggcagcagacccagagugagaaacauccccagcagaaucagcaucuacuggaccaucgugaagcccggcgacauccugcugaucaacagcaccggcaaccugaucgcccccagaggcuacuucaagaucagaagcggcagaagcagcaucaugagaagcgacgcccccaucggcaagugcaacagcgagugcaucacccccaacggcagcauccccaacgacaagcccuuccagaacgugaacagaaucaccuacggcgccugccccagauacgugaagcagaacacccugaagcuggccaccggcaugagaaacgugcccgagaagcagaccagaggcaucuucggcgccaucgccggcuucaucgagaacggcugggagggcaugguggacggcugguacggcuucagacaccagaacagcgagggcagaggccaggccgccgaccugaagagcacccaggccgccaucgaccagaucaacggcaagcugaacagacugaucggcaagaccaacgagaaguuccaccagaucgagaaggaguucagcgagguggagggcagaauccaggaccuggagaaguacguggaggacaccaagaucgaccuguggagcuacagcagcgagcugcugguggcccuggagaaccagcacaccaucgaccugaccgacagcgagaugaacaagcuguucgagaagaccaagaagcagcugagagagaacgccgaggacaugggcaacggcugcuucaagaucuaccacaagugcgacaacgccugcaucggcagcaucagaaacggcaccuacgaccacgacguguacagagacgaggcccugaacaacagauuccagaucaagggcguggagcugaagagcggcuacaaggacuggauccuguggaucagcuucgccaucagcugcuuccugcugugcguggcccugcugggcuucaucaugugggccugccagaagggcaacaucagaugcaacaucugcaucuga

SEQ ID NO: 170477 - RNA, 1701 nt, Artificial Sequence
  derived and/or modified CDS sequence (opt4) from hemagglutinin__InfluenzaA__AGT18753
augaagaccaucaucgcccugagcuacauccugugccugguguucgcccagaagcugcccggcaacgacaacagcaccgccacccugugccugggccaccacgccgugcccaacggcaccaucgugaagaccaucaccaacgaccagaucgaggugaccaacgccaccgagcuggugcagaacagcagcaccggcgagaucugcaacagcccccaccagauccuggacggcgagaacugcacccugaucgacgcccugcugggcgacccccagugcgacggcuuccagaacaagaagugggaccuguucguggagagaagcaaggccuacagcaacugcuaccccuacgacgugcccgacuacgccagccugagaagccugguggccagcagcggcacccuggaguucaacaacgagagcuucaacuggaccggcgugacccagaacggcaccagcagcgccugcaucagaagaagcaacaacagcuucuucagcagacugaacuggcugacccaccugaacuucaaguaccccgcccugaacgugaccaugcccaacaacgagcaguucgacaagcuguacaucuggggcgugcaccaccccggcaccgacaaggaccagaucuuccuguacgcccaggccagcggcagaaucaccgugagcaccaagagaagccagcaggccgugauccccaacaucggcagcagacccagagugagaaacauccccagcagaaucagcaucuacuggaccaucgugaagcccggcgacauccugcugaucaacagcaccggcaaccugaucgcccccagaggcuacuucaagaucagaagcggcagaagcagcaucaugagaagcgacgcccccaucggcaagugcaacagcgagugcaucacccccaacggcagcauccccaacgacaagcccuuccagaacgugaacagaaucaccuacggcgccugccccagauacgugaagcagaacacccugaagcuggccaccggcaugagaaacgugcccgagaagcagaccagaggcaucuucggcgccaucgccggcuucaucgagaacggcugggagggcaugguggacggcugguacggcuucagacaccagaacagcgagggcagaggccaggccgccgaccugaagagcacccaggccgccaucgaccagaucaacggcaagcugaacagacugaucggcaagaccaacgagaaguuccaccagaucgagaaggaguucagcgagguggagggcagaauccaggaccuggagaaguacguggaggacaccaagaucgaccuguggagcuacaagagcgagcugcugguggcccuggagaaccagcacaccaucgaccugaccgacagcgagaugaacaagcuguucgagaagaccaagaagcagcugagagagaacgccgaggacaugggcaacggcugcuucaagaucuaccacaagugcgacaacgccugcaucggcagcaucagaaacggcaccuacgaccacgacguguacagagacgaggcccugaacaacagauuccagaucaagggcguggagcugaagagcggcuacaaggacuggauccuguggaucagcuucgccaucagcugcuuccugcugugcguggcccugcugggcuucaucaugugggccugccagaagggcaacaucagaugcaacaucugcaucuga

SEQ ID NO: 170478 - RNA, 1701 nt, Artificial Sequence
  derived and/or modified CDS sequence (opt4) from hemagglutinin__InfluenzaA__AGT18754
augaagaccaucaucgcccugagcuacauccugugccugguguucgcccagaagcugcccgagaacgacaacagcaccgccacccugugccugggccaccacgccgugcccaacggcaccaucgugaagaccaucaccgacgaccagaucgaggugaccaacgccaccgagcuggugcagaacagcagcaccggcgagaucugcgacagcccccaccagauccuggacggcgagaacugcacccugaucgacgcccugcugggcgacccccagugcgacggcuuccagaacaagaagugggaccuguucguggagagaggcaaggccuacagcaacugcuaccccuacgacgugcccgacuacgccagccugagaagccugguggccaccagcggcacccuggaguucaacaacgagagcuucaacuggaccggcgugacccagaacggcaccagcagcgccugcaucagaagaagcaacaacagcuucuucagcagacugaacuggcugacccaccugaacuucaaguaccccgcccugaacgugaccaugcccaacaacgagcaguucgacaagcuguacaucuggggcgugcaccaccccggcaccgacaaggaccagaucuuccuguacgcccaggccagcggcagaaucaccgugagcaccaagagaagccagcaggccgugauccccaacaucggcagcagacccagagugagaaacauccccagcagaaucagcaucuacuggaccaucgugaagcccggcgacauccugcugaucaacagcaccggcaaccugaucgcccccagaggcuacuucaagaucagaagcggcagaagcagcaucaugagaagcgacgcccccaucggcaagugcaacagcgagugcaucacccccaacggcagcauccccaacgacaagcccuuccagaacgugaacagaaucaccuacggcgccugccccagauacgugaagcagaacacccugaagcuggccaccggcaugagaaacgugcccgagaagcagaccagaggcaucuucggcgccaucgccggcuucaucgagaacggcugggagggcaugguggacggcugguacggcuucagacaccagaacagcgagggcagaggccaggccgccgaccugaagagcacccaggccgccaucgaccagaucaacggcaagcugaacagacugaucggcaagaccaacgagaaguuccaccagaucgagaaggaguucagcgagguggagggcagaauccaggaccuggagaaguacguggaggacaccaagaucgaccuguggagcuacaacgccgagcugcugguggcccuggagaaccagcacaccaucgaccugaccgacagcgagaugaacaagcuguucgagaagaccaagaagcagcugagagagaacgccgaggacaugggcaacggcugcuucaagaucuaccacaagugcgacaacgccugcaucggcagcaucagaaacggcaccuacgaccacgacguguacagagacgaggcccugaacaacagauuccagaucaagggcguggagcugaagagcggcuacaaggacuggauccuguggaucagcuucgccaucagcugcuuccugcugugcguggcccugcugggcuucaucaugugggccugccagaagggcaacaucagaugcaacaucugcaucuga

SEQ ID NO: 170479 - RNA, 1701 nt, Artificial Sequence
  derived and/or modified CDS sequence (opt4) from hemagglutinin__InfluenzaA__AGT18756
augaagaccaucaucgcccugagcuacgugcugugccugguguucgcccagaagcugcccggcaacgacaacagcaccgccacccugugccugggccaccacgccgugcccaacggcaccaucgugaagaccaucaccaacgacagaaucgaggugaccaacgccaccgagcuggugcagaacagcagcaucggcgagaucugcgacagcccccaccagauccuggacggcgagaacugcacccugaucgacgcccugcugggcgacccccagugcgacgacuuccagaacaagaagugggaccuguucguggagagaagcaaggccuacagcaacugcuaccccuacgacgugcccgacuacgccagccugagaagccugguggccagcagcggcacccuggaguucaacaacgagagcuucaacugggccggcgugacccagaacggcaccagcagcgccugcagaagaggcagcaacagcagcuucuucagcagacugaacuggcugacccaccugaacuucaaguaccccgcccugaacgugaccaugcccaacaacgagcaguucgacaagcuguacaucuggggcgugcaccaccccggcaccgacaaggaccagaucuuccuguacgcccagagcagcggcagaaucaccgugagcaccaagagaagccagcaggccgugauccccaacaucggcagcagacccagaaucagaaacauccccagcagaaucagcaucuacuggaccaucgugaagcccggcgacauccugcugaucaacagcaccggcaaccugaucgcccccagaggcuacuucaagaucagaagcggcaagagcagcaucaugagaagcgacgcccccaucggcaagugcaagagcgagugcaucacccccaacggcagcauccccaacgacaagcccuuccagaacgugaacagaaucaccuacggcgccugccccagauacgugaagcagagcacccugaagcuggccaccggcaugagaaacgugcccgagaagcagaccagaggcaucuucggcgccaucgccggcuucaucgagaacggcugggagggcaugguggacggcugguacggcuucagacaccagaacagcgagggcagaggccaggccgccgaccugaagagcacccaggccgccaucgaccagaucaacggcaagcugaacagacugaucggcaagaccaacgagaaguuccaccagaucgagaaggaguucagcgagguggagggcagaauccaggaccuggagaaguacguggaggacaccaagaucgaccuguggagcuacaagagcgagcugcugguggcccuggagaaccagcacaccaucgaccugaccgacagcgagaugaacaagcuguucgagaagaccaagaagcagcugagagagaacgccgaggacaugggcaacggcugcuucaagaucuaccacaagugcgacaacgccugcaucggcagcaucagaaacggcaccuacgaccacgacguguacagagacgaggcccugaacaacagauuccagaucaagggcguggagcugaagagcggcuacaaggacuggauccuguggaucagcuucgccaucagcugcuuccugcugugcguggcccugcugggcuucaucaugugggccugccagaagggcaacaucagaugcaacaucugcaucuga

SEQ ID NO: 170480 - RNA, 1701 nt, Artificial Sequence
  derived and/or modified CDS sequence (opt4) from hemagglutinin__InfluenzaA__AGT18757
augaagaccaucaucgcccugagcuacauccugugccugguguucgcccagaagcugcccggcaacgacaacagcaccgccacccugugccugggccaccacgccgugcccaacggcaccaucgugaagaccaucaccaacgacagaaucgaggugaccaacgccaccgagcuggugcagaacagcagcaucggcgagaucugcgacagcccccaccagauccuggacggcgagaacugcacccugaucgacgcccugcugggcgacccccagugcgacgacuuccagaacaagaagugggaccuguucguggagagaagcaaggccuacagcaacugcuaccccuacgacgugcccgacuacgccagccugagaagccugguggccagcagcggcacccuggaguucaacaacgagagcuucaacugggccggcgugacccagaacggcaccagcagcgccugcagaagaggcagcaacagcagcuucuucagcagacugaacuggcugacccaccugaacuucaaguaccccgcccugaacgugaccaugcccaacaacgagcaguucgacaagcuguacaucuggggcgugcaccaccccggcaccgacaaggaccagaucuuccuguacgcccagagcagcggcagaaucaccgugagcaccaagagaagccagcaggccgugauccccaacaucggcagcagacccagaaucagaaacauccccagcagaaucagcaucuacuggaccaucgugaagcccggcgacauccugcugaucaacagcaccggcaaccugaucgcccccagaggcuacuucaagaucagaagcggcaagagcagcaucaugagaagcgacgcccccaucggcaagugcaagagcgagugcaucacccccaacggcagcauccccaacgacaagcccuuccagaacgugaacagaaucaccuacggcgccugccccagauacgugaagcagagcacccugaagcuggccaccggcaugagaaacgugcccgagaagcagaccagaggcaucuucggcgccaucgccggcuucaucgagaacggcugggagggcaugguggacggcugguacggcuucagacaccagaacagcgagggcagaggccaggccgccgaccugaagagcacccaggccgccaucgaccagaucaacggcaagcugaacagacugaucggcaagaccaacgagaaguuccaccagaucgagaaggaguucagcgagguggagggcagaauccaggaccuggagaaguacguggaggacaccaagaucgaccuguggagcuacaacgccgagcugcugguggcccuggagaaccagcacaccaucgaccugaccgacagcgagaugaacaagcuguucgagaagaccaagaagcagcugagagagaacgccgaggacaugggcaacggcugcuucaagaucuaccacaagugcgacaacgccugcaucggcagcaucagaaacggcaccuacgaccacgacguguacagagacgaggcccugaacaacagauuccagaucaagggcguggagcugaagagcggcuacaaggacuggauccuguggaucagcuucgccaucagcugcuuccugcugugcguggcccugcugggcuucaucaugugggccugccagaagggcaacaucagaugcaacaucugcaucuga

SEQ ID NO: 170481 - RNA, 1701 nt, Artificial Sequence
  derived and/or modified CDS sequence (opt4) from hemagglutinin__InfluenzaA__AGT18758
augaagaccaucaucgcccugagcuacauccugugccugguguucgcccagaagcugcccggcaacgacaacagcaccgccacccugugccugggccaccacgccgugcccaacggcaccaucgugaagaccaucaccaacgacagaaucgaggugaccaacgccaccgagcuggugcagaacagcagcaucggcgagaucugcgacagcccccaccagauccuggacggcgagaacugcacccugaucgacgcccugcugggcgacccccagugcgacgacuuccagaacaagaagugggaccuguucguggagagaagcaaggccuacagcaacugcuaccccuacgacgugcccgacuacgccagccugagaagccugguggccagcagcggcacccuggaguucaacaacgagagcuucaacugggccggcgugacccagaacggcaccagcagcgccugcagaagaggcagcaacagcagcuucuucagcagacugaacuggcugacccaccugaacuucaaguaccccgcccugaacgugaccaugcccaacaacgagcaguucgacaagcuguacaucuggggcgugcaccaccccggcaccgacaaggaccagaucuuccuguacgcccagagcagcggcagaaucaccgugagcaccaagagaagccagcaggccgugauccccaacaucggcagcagacccagaaucagaaacauccccagcagaaucagcaucuacuggaccaucgugaagcccggcgacauccugcugaucaacagcaccggcaaccugaucgcccccagaggcuacuucaagaucagaagcggcaagagcagcaucaugagaagcgacgcccccaucggcaagugcaagagcgagugcaucacccccaacggcagcauccccaacgacaagcccuuccagaacgugaacagaaucaccuacggcgccugccccagauacgugaagcagagcacccugaagcuggccaccggcaugagaaacgugcccgagaagcagaccagaggcaucuucggcgccaucgccggcuucaucgagaacggcugggagggcaugguggacggcugguacggcuucagacaccagaacagcgagggcagaggccaggccgccgaccugaagagcacccaggccgccaucgaccagaucaacggcaagcugaacagacugaucggcaagaccaacgagaaguuccaccagaucgagaaggaguucagcgagguggagggcagaauccaggaccuggagaaguacguggaggacaccaagaucgaccuguggagcuacagcagcgagcugcugguggcccuggagaaccagcacaccaucgaccugaccgacagcgagaugaacaagcuguucgagaagaccaagaagcagcugagagagaacgccgaggacaugggcaacggcugcuucaagaucuaccacaagugcgacaacaccugcaucggcagcaucagaaacggcaccuacgaccacgacguguacagagacgaggcccugaacaacagauuccagaucaagggcguggagcugaagagcggcuacaaggacuggauccuguggaucagcuucgccaucagcugcuuccuggugugcguggcccugcugggcuucaucaugugggccugccagaagggcaacaucagaugcaacaucugcaucuga

SEQ ID NO: 170482 - RNA, 1701 nt, Artificial Sequence
  derived and/or modified CDS sequence (opt4) from hemagglutinin__InfluenzaA__AGT18759
augaagaccaucaucgcccugagcuacauccugugccugguguucgcccagaagcugcccggcaacgacaacagcaccgccacccugugccugggccaccacgccgugcccaacggcaccaucgugaagaccaucaccaacgacagaaucgaggugaccaacgccaccgagcuggugcagaacagcagcaucggcgagaucugcgacagcccccaccagauccuggacggcgagaacugcacccugaucgacgcccugcugggcgacccccagugcgacgacuuccagaacaagaagugggaccuguucguggagagaagcaaggccuacagcaacugcuaccccuacgacgugcccgacuacgccagccugagaagccugguggccagcagcggcacccuggaguucaacaacgagagcuucaacugggccggcgugacccagaacggcaccagcagcgccugcagaagaggcagcaacagcagcuucuucagcagacugaacuggcugacccaccugaacuucaaguaccccgcccugaacgugaccaugcccaacaacgagcaguucgacaagcuguacaucuggggcgugcaccaccccggcaccgacaaggaccagaucuuccuguacgcccagagcagcggcagaaucaccgugagcaccaagagaagccagcaggccgugauccccaacaucggcagcagacccagaaucagaaacauccccagcagaaucagcaucuacuggaccaucgugaagcccggcgacauccugcugaucaacagcaccggcaaccugaucgcccccagaggcuacuucaagaucagaagcggcaagagcagcaucaugagaagcgacgcccccaucggcaagugcaagagcgagugcaucacccccaacggcagcauccccaacgacaagcccuuccagaacgugaacagaaucaccuacggcgccugccccagauacgugaagcagagcacccugaagcuggccaccggcaugagaaacgugcccgagaagcagaccagaggcaucuucggcgccaucgccggcuucaucgagaacggcugggagggcaugguggacggcugguacggcuucagacaccagaacagcgagggcagaggccaggccgccgaccugaagagcacccaggccgccaucgaccagaucaacggcaagcugaacagacugaucggcaagaccaacgagaaguuccaccagaucgagaaggaguucagcgagguggagggcagaauccaggaccuggagaaguacguggaggacaccaagaucgaccuguggagcuacagcagcgagcugcugguggcccuggagaaccagcacaccaucgaccugaccgacagcgagaugaacaagcuguucgagaagaccaagaagcagcugagagagaacgccgaggacaugggcaacggcugcuucaagaucuaccacaagugcgacaacgccugcaucggcagcaucagaaacggcaccuacgaccacgacguguacagagacgaggcccugaacaacagauuccagaucaagggcguggagcugaagagcggcuacaaggacuggauccuguggaucagcuucgccaucagcugcuuccuggugugcguggcccugcugggcuucaucaugugggccugccagaagggcaacaucagaugcaacaucugcaucuga

SEQ ID NO: 170483 - RNA, 1701 nt, Artificial Sequence
  derived and/or modified CDS sequence (opt4) from hemagglutinin__InfluenzaA__AGT18760
augaagaccaucaucgcccugagcuacauccugugccugguguucgcccagaagcugcccggcaacgacaacagcaccgccacccugugccugggccaccacgccgugcccaacggcaccaucgugaagaccaucaccaacgacagaaucgaggugaccaacgccaccgagcuggugcagaacagcagcaucggcgagaucugcgacagcccccaccagauccuggacggcgagaacugcacccugaucgacgcccugcugggcgacccccagugcgacgacuuccagaacaagaagugggaccuguucguggagagaaacaaggccuacagcaacugcuaccccuacgacgugcccgacuacgccagccugagaagccugguggccagcagcggcacccuggaguucaacaacgagagcuucaacugggccggcgugacccagaacggcaccagcagcgccugcagaagaggcagcaacagcagcuucuucagcagacugaacuggcugacccaccugaacuucaaguaccccgcccugaacgugaccaugcccaacaacgagcaguucgacaagcuguacaucuggggcgugcaccaccccggcaccgacaaggaccagaucuuccuguacgcccagagcagcggcagaaucaccgugagcaccaagagaagccagcaggccgugauccccaacaucggcagcagacccagaaucagaaacauccccagcagaaucagcaucuacuggaccaucgugaagcccggcgacauccugcugaucaacagcaccggcaaccugaucgcccccagaggcuacuucaagaucagaagcggcaagagcagcaucaugagaagcgacgcccccaucggcaagugcaagagcgagugcaucacccccaacggcagcauccccaacgacaagcccuuccagaacgugaacagaaucaccuacggcgccugccccagauacgugaagcagagcacccugaagcuggccaccggcaugagaaacgugcccgagaagcagaccagaggcaucuucggcgccaucgccggcuucaucgagaacggcugggagggcaugguggacggcugguacggcuucagacaccagaacagcgagggcagaggccaggccgccgaccugaagagcacccaggccgccaucgaccagaucaacggcaagcugaacagacugaucggcaagaccaacgagaaguuccaccagaucgagaaggaguucagcgagguggagggcagaauccaggaccuggagaaguacguggaggacaccaagaucgaccuguggagcuacaagagcgagcugcugguggcccuggagaaccagcacaccaucgaccugaccgacagcgagaugaacaagcuguucgagaagaccaagaagcagcugagagagaacgccgaggacaugggcaacggcugcuucaagaucuaccacaagugcgacaacgccugcaucggcagcaucagaaacggcaccuacgaccacgacguguacagagacgaggcccugaacaacagauuccagaucaagggcguggagcugaagagcggcuacaaggacuggauccuguggaucagcuucgccaucagcugcuuccuggugugcguggcccugcugggcuucaucaugugggccugccagaagggcaacaucagaugcaacaucugcaucuga

SEQ ID NO: 170484 - RNA, 1701 nt, Artificial Sequence
  derived and/or modified CDS sequence (opt4) from hemagglutinin__InfluenzaA__AGT18761
augaagaccaucaucgcccugagcuacauccugugccugguguucgcccagaagcugcccggcaacgacaacagcaccgccacccugugccugggccaccacgccgugcccaacggcaccaucgugaagaccaucaccaacgacagaaucgaggugaccaacgccaccgagcuggugcagaacagcagcaucggcgagaucugcgacagcccccaccagauccuggacggcgagaacugcacccugaucgacgcccugcugggcgacccccagugcgacgacuuccagaacaagaagugggaccuguucguggagagaagcaaggccuacagcaacugcuaccccuacgacgugcccgacuacgccagccugagaagccugguggccagcagcggcacccuggaguucaacaacgagagcuucaacugggccggcgugacccagaacggcaccagcagcgccugcagaagaggcagcaacagcagcuucuucagcagacugaacuggcugacccaccugaacuucaaguaccccgcccugaacgugaccaugcccaacaacgagcaguucgacaagcuguacaucuggggcgugcaccaccccggcaccgacaaggaccagaucuuccuguacgcccagagcagcggcagaaucaccgugagcaccaagagaagccagcaggccgugauccccaacaucggcagcagacccagaaucagaaacauccccagcagaaucagcaucuacuggaccaucgugaagcccggcgacauccugcugaucaacagcaccggcaaccugaucgcccccagaggcuacuucaagaucagaagcggcaagagcagcaucaugagaagcgacgcccccaucggcaagugcaagagcgagugcaucacccccaacggcagcauccccaacgacaagcccuuccagaacgugaacagaaucaccuacggcgccugccccagauacgugaagcagagcacccugaagcuggccaccggcaugagaaacgugcccgagaagcagaccagaggcaucuucggcgccaucgccggcuucaucgagaacggcugggagggcaugguggacggcugguacggcuucagacaccagaacagcgagggcagaggccaggccgccgaccugaagagcacccaggccgccaucgaccagaucaacggcaagcugaacagacugaucggcaagaccaacgagaaguuccaccagaucgagaaggaguucagcgagguggagggcagaauccaggaccuggagaaguacguggaggacaccaagaucgaccuguggagcuacagcagcgaguuccugguggcccuggagaaccagcacaccaucgaccugaccgacagcgagaugaacaagcuguucgagaagaccaagaagcagcugagagagaacgccgaggacaugggcaacggcugcuucaagaucuaccacaagugcgacaacgccugcaucggcagcaucagaaacggcaccuacgaccacgacguguacagagacgaggcccugaacaacagauuccagaucaagggcguggagcugaagagcggcuacaaggacuggauccuguggaucagcuucgccaucagcugcuuccuggugugcguggcccugcugggcuucaucaugugggccugccagaagggcaacaucagaugcaacaucugcaucuga

SEQ ID NO: 170485 - RNA, 1701 nt, Artificial Sequence
  derived and/or modified CDS sequence (opt4) from hemagglutinin__InfluenzaA__AGT37102
auggaggccaagcugguggugcuguucugcgccuucaccacccugaaggccgacaucaucugcgugggcuaccacgccaacaacagcaccgacaccguggacaccaucauggagaagaacgugaccgugacccacagcgugaaccugcuggagaacagccacaacggcaagcugugcagccugaacggcaaggccccccugcagcugggcaacugcaacguggccggcuggauccugggcaaccccgagugcgaccugcugcugaccgccaacagcuggagcuacaucaucgagaccagcagcagcaagaacggcaccugcuaccccggcgaguucagcgacuacgaggagcugagagagcugcugagcaccgugagcagcuucgagagauucgagaucuuccccaaggccaccagcuggcccaaccacgagaccaccaagggcgccaccaucgccugcagccacagcggcgccagcagcuucuacagaaaccugcuguggaucgugaagaagggcaacagcuaccccaagaucagcaagagcuacaccaacaacagaggcaaggaggugcuggugaucuggggcgugcaccacccccccaccgacagcagccagcaggcccuguaccagaacacccacaccuacaucagcgugggcagcagcaaguacuaccagagauucacccccgugguggccgccagacccaagaucagagagcaggagggcagaaugaacuacuacuggacccugcuggagcagggcgacaccaucaccuucgaggccaccggcaaccugaucgcccccugguacgccuucgcccuggacaugggcagcagcagcggcaucauggugagcgacgcccccgugcacaacugcaccaccaagugccagaccccccacggcgcccugaagagcaaccugcccuuccagaacgugcaccccaucaccaucggcgagugccccaaguacgugaagagcacccagcugagaauggccaccggccugagaaacauccccagcauccagagcagaggccuguucggcgccaucgccggcuucaucgagggcggcuggaccggcaugaucgacggcugguacggcuaccaccaccagaacgagcagggcagcggcuacgccgccgaccagaagagcacccagaucgccaucgacggcaucagcaacaaggugaacagcaucaucgagaagaugaacgugcaguucaccagcgugggcaaggaguucaacgaccuggagaagagaaucgagaaccugaacaagaagguggacgacggcuuccuggacguguggaccuacaacgccgagcugcuggugcugcuggagaacgagagaacccuggacuuccacgacuucaacgugaagaaccuguacgagaaggugaagagccagcugagaaacaacgccaaggagaucggcaacggcugcuucgaguucuaccacaagugcgacaacgagugcauggagaacgugaagaacggcaccuacaacuaccccaaguacagcgaggagagcaagcugaacagagagaagaucgacggcgugaagcuggagagcaucggcgugcaccagauccuggccaucuacagcaccguggccagcagccuggugcugcuggugagccugggcgccaucagcuucuggaugugcagcaacggcagccugcagugcagaaucugcaucuga

SEQ ID NO: 170486 - RNA, 1701 nt, Artificial Sequence
  derived and/or modified CDS sequence (opt4) from hemagglutinin__InfluenzaA__AGU01877
augaaggccauccugguggugcugcuguacaccuucgccaccgccaacgccgacacccugugcaucggcuaccacgccaacaacagcaccgacaccguggacaccgugcuggagaagaacgugaccgugacccacagcgugaaccugcuggaggacaagcacaacggcaagcugugcaagcugagaggcguggccccccugcaccugggcaagugcaacaucgccggcuggauccugggcaaccccgagugcgagagccugagcaccgccagcagcuggagcuacaucguggagaccagcagcagcgacaacggcaccugcuaccccggcgacuucaucaacuacgaggagcugagagagcagcugagcagcgugagcagcuucgagagauucgagaucuuccccaagaccagcagcuggcccaaccacgacagcaacaagggcgugaccgccgccugcccccacgccggcgccaagagcuucuacaagaaccugaucuggcuggugaagaagggcaacagcuaccccaagcugagcaagagcuacaucaacgacaagggcaaggaggugcuggugcuguggggcauccaccaccccagcaccaccaccgaccagcagagccuguaccagaacgccgacgccuacguguucgugggcaccagcagauacagcaagaaguucaagcccgagaucgccaucagacccaaggugagagaccaggagggcagaaugaacuacuacuggacccugaucgagcccggcgacaagaucaccuucgaggccaccggcaaccugguggugcccagauacgccuucgccauggagagaaacgccggcagcggcaucaucaucagcgacacccccgugcacgacugcaacaccaccugccagacccccgagggcgccaucaacaccagccugcccuuccagaacauccaccccaucaccaucggcaagugccccaaguacgugaagagcaccaagcugagacuggccaccggccugagaaacgugcccagcauccagagcagaggccuguucggcgccaucgccggcuucaucgagggcggcuggaccggcaugguggacggcugguacggcuaccaccaccagaacgagcagggcagcggcuacgccgccgaccugaagagcacccagaacgccaucgacaagaucaccaacaaggugaacagcgugaucgagaagaugaacacccaguucaccgccgugggcaaggaguucaaccaccuggagaagagaaucgagaaccugaacaagaagguggacgacggcuuccuggacaucuggaccuacaacgccgagcugcuggugcugcuggagaacgagagaacccuggacuaccacgacagcaacgugaagaaccuguacgagaaggugagaaaccagcugaagaacaacgccaaggagaucggcaacggcugcuucgaguucuaccacaagugcgacaacaccugcauggagagcgugaagaacggcaccuacgacuaccccaaguacagcgaggaggccaagcugaacagagagaagaucgacggcgugaagcuggagagcaccagaaucuaccagauccuggccaucuacagcaccguggccagcagccuggugcugguggugagccugggcgccaucagcuucuggaugugcagcaacggcagccugcagugcagaaucugcaucuga

SEQ ID NO: 170487 - RNA, 1701 nt, Artificial Sequence
  derived and/or modified CDS sequence (opt4) from hemagglutinin__InfluenzaA__AGU01878
augaaggccauccugguggugaugcuguacacccuggccaccgccaacgccgacacccugugcaucggcuaccacgccaacaacagcaccgacaccguggacaccgugcuggagaagaacgugaccgugacccacagcgugaaccugcuggaggacaagcacgacggcaagcugugcaagcugagaggcguggccccccugcaccugggcaagugcaacaucgccggcuggauccugggcaaccccgagugcgagagccugagcaccgccagcagcuggagcuacaucguggagaccagcggcagcgacaacggcaccugcuaccccggcgacuucaucgacuacgaggagcugagagagcagcugagcagcgugagcagcuucgagagauucgagaucuuccccaagaccagcagcuggcccaaccacgacagcaacaagggcgugaccgccgccugcccccacgccggcgccaagggcuucuacaagaaccugaucuggcuggugaagaagggcaacagcuaccccaagcugagcaucagcuacaucaacgacaagggcaaggaggugcuggugcuguggggcauccaccaccccagcaccaccgccgaccagcagagccuguaccagaacgccgacaccuacguguucgugggcaccagcagauacagcaagaaguucaagcccgagaucgccaucagacccaaggugagagaccaggagggcagaaugaacuacuacuggacccugguggagcccggcgacaagaucaccuucgaggccaccggcaaccugguggugcccagauacgccuucgccauggagagaaacgccggcagcggcaucaucaucagcgacacccccgugcacgacugcaacaccaccugccagacccccaagggcgccaucaacaccagccugcccuuccagaacauccaccccaucaccaucggcaagugccccaaguacgugaagagcaccaagcugagacuggccaccggccugagaaacgugcccagcauccagagcagaggccuguucggcgccaucgccggcuucaucgagggcggcuggaccggcaugguggacggcugguacggcuaccaccaccagaacgagcagggcagcggcuacgccgccgaccugaagagcacccagaacgccaucgacaagaucaccaacaaggugaacagcgugaucgagaagaugaacacccaguucaccgccgugggcaaggaguucaaccaccuggagaagagaaucgagaaccugaacaagaagguggacgacggcuuccuggacaucuggaccuacaacgccgagcugcuggugcugcuggagaacgagagaacccuggacuaccacgacagcaacgugaagaaccuguacgagaaggugagaaaccagcugaagaacaacgccaaggagaucggcaacggcugcuucgaguucuaccacaagugcgacaacaccugcauggagagcgugaagaacggcaccuacgacuaccccaaguacagcgaggaggccaagcugaacagagaggagaucgacggcgugaagcuggagagcaccagaaucuaccagauccuggccaucuacagcaccgccgccagcagccuggugcugguggugagccugggcgccaucagcuucuggaugugcagcaacggcagccugcagugcagaaucugcaucuga

SEQ ID NO: 170488 - RNA, 1701 nt, Artificial Sequence
  derived and/or modified CDS sequence (opt4) from hemagglutinin__InfluenzaA__AGU01879
augaaggccauccugguggugaugcuguacaccuucgccaccgccaacgccgacacccugugcaucggcuaccacgccaacaacagcaccgacaccguggacaccgugcuggagaagaacgugaccgugacccacagcgugaaccugcuggaggacaagcacaacgagaagcugugcaagcugagaggcguggccccccugcaccugggcaagugcaacaucgccggcuggauccugggcaaccccgagugcgagagccugagcaccgccagcagcuggagcuacaucguggagaccagcggcagcgacaacggcaccugcuaccccggcgacuucaucgacuacgaggagcugagagagcagcugagcagcgugagcagcuucgagagauucgagaucuuccccaagaccagcagcuggcccaaccacgacagcaacaagggcgugaccgccgccugcccccaggccggcgccaagggcuucuacaagaaccugaucuggcuggugaagaagggcaacagcuaccccaagcugagcaagagcuacaucaacgacaagggcaaggaggugcuggugcuguggggcauccaccaccccagcaccaccgccgaccagcagagccuguaccagaacgccgacaccuacguguucgugggcaccagcagauacagcaagaaguucaagcccgagaucgccaucagacccaaggugagagaccaggagggcagaaugaacuacuacuggacccugguggagcccggcgacaagaucaccuucgaggccaccggcaaccugguggugcccagauacgccuucgccauggagagaaacgccggcagcggcaucaucaucagcgacacccccgugcacgacugcaacaccaccugccagacccccaagggcgccaucaacaccagccugcccuuccagaacauccaccccaucaccaucggcaagugccccaaguacgugaagagcaccaagcugagacuggccaccggccugagaaacgugcccagcauccagagcagaggccuguucggcgccaucgccggcuucaucgagggcggcuggaccggcaugguggacggcugguacggcuaccaccaccagaacgagcagggcagcggcuacgccgccgaccugaagagcacccagaacgccaucgacaagaucaccaacaaggugaacagcgugaucgagaagaugaacacccaguucaccgccgugggcaaggaguucaaccaccuggagaagagaaucgagaaccugaacaagaagguggacgacggcuuccuggacaucuggaccuacaacgccgagcugcuggugcugcuggagaacgagagaacccuggacuaccacgacagcaacgugaagaaccuguacgagaaggugagaaaccagcugaagaacaacgccaaggagaucggcaacggcugcuucgaguucuaccacaagugcgacaacaccugcauggagagcgugaagaacggcaccuacgacuaccccaaguacagcgaggaggccaagcugaacagagaggagaucgacggcgugaagcuggagagcaccagaaucuaccagauccuggccaucuacagcaccguggccagcagccuggugcugguggugagccugggcgccaucagcuucuggaugugcagcaacggcagccugcagugcagaaucugcaucuga

SEQ ID NO: 170489 - RNA, 1701 nt, Artificial Sequence
  derived and/or modified CDS sequence (opt4) from hemagglutinin__InfluenzaA__AGU01881
augaaggccauccugguggugcugcuguacaccuucgccaccgccaacgccgacacccugugcaucggcuaccacgccaacaacagcaccgacaccguggacaccgugcuggagaagaacgugaccgugacccacagcgugaaccugcuggaggacaagcacaacggcaagcugugcaagcugagaggcgugaccccccugcaccugggcaagugcaacaucgccggcuggauccugggcaaccccgagugcgagagccugagcaccgccagcagcuggagcuacaucguggagaccagcagcagcgacaacggcaccugcuaccccggcgacuucaucaacuacgaggagcugagagagcagcugagcagcgugagcagcuucgagagauucgagauguuccccaagaccagcagcuggcccaaccacgacagcaacaagggcgugaccgccgccugcccccaggccggcgccaagagcuucuacaagaaccugaucuggcuggugaagaagggcaacagcuaccccaagcugagcaagagcuacaucaacgacaagggcaaggaggugcuggugcuguggggcauccaccaccccagcaccaccgccgaccagcagagccuguaccagaacgccgacgccuacguguucgugggcaccagcagauacagcaagaaguucaagcccgagaucgccaucagacccaaggugagagaccaggagggcagaaugaacuacuacuggacccugaucgagcccggcgacaagaucaccuucgaggccaccggcaaccugguggugcccagauacgccuucgccauggagagaaacgccggcagcggcaucaucaucagcgacacccccgugcacgacugcaacaccaccugccagacccccgagggcgccaucaacaccagccugcccuuccagaacauccaccccaucaccaucggcaagugccccaaguacgugaagagcaccaagcugagacuggccaccggccugagaaacgugcccagcauccagagcagaggccuguucggcgccaucgccggcuucaucgagggcggcuggaccggcaugguggacggcugguacggcuaccaccaccagaacgagcagggcagcggcuacgccgccgaccugaagagcacccagaacgccaucgacaagaucaccaacaaggugaacagcgugaucgagaagaugaacacccaguucaccgccgugggcaaggaguucaaccaccuggagaagagaaucgagaaccugaacaagaagguggacgacggcuuccuggacaucuggaccuacaacgccgagcugcuggugcugcuggagaacgagagaacccuggacuaccacgacagcaacgugaagaaccuguacgagaaggugagaaaccagcugaagaacaacgccaaggagaucggcaacggcugcuucgaguucuaccacaagugcgacaacaccugcauggagagcgugaagaacggcaccuacgacuaccccaaguacagcgaggaggccaagcugaacagagagaagaucgacggcgugaagcuggagagcaccagaaucuaccagauccuggccaucuacagcaccguggccagcagccuggugcugguggugagccugggcgccaucagcuucuggaugugcagcaacggcagccugcagugcagaaucugcaucuga

SEQ ID NO: 170490 - RNA, 1701 nt, Artificial Sequence
  derived and/or modified CDS sequence (opt4) from hemagglutinin__InfluenzaA__AGU01883
augaaggccauccugguggugaugcuguacaccuucgccaccgccaacgccgacacccugugcaucggcuaccacgccaacaacagcaccgacaccguggacaccgugcuggagaagaacgugaccgugacccacagcgugaaccugcuggaggacaagcacaacggcaagcugugcaagcugagaggcguggccccccugcaccugggcaagugcaacaucgccggcuggauccugggcaaccccgagugcgagagccugagcaccgccagcagcuggagcuacaucguggagaccagcggcagcgacaacggcaccugcuaccccggcgacuucaucgacuacgaggagcugagagagcagcugagcagcgugagcagcuucgagagauucgagaucuuccccaagaccagcagcuggcccaaccacgacagcaacaagggcgugaccgccgccugcccccacgccggcgccaagggcuucuacaagaaccugaucuggcuggugaagaagggcaacagcuaccccaagcugagcaucagcuacaucaacaacaaggagaaggaggugcuggugcuguggggcauccaccaccccagcaccaccgccgaccagcagagccuguaccagaacgccgacaccuacguguucgugggcaccagcagauacagcaagaaguucaagcccgagaucgccaucagacccaaggugagagaccaggagggcagaaugaacuacuacuggacccugguggagcccggcgacaagaucaccuucgaggccaccggcaaccugguggugcccagauacgccuucgccauggagagaaacgccggcagcggcaucaucaucagcgacacccccgugcacgacugcaacaccaccugccagacccccaagggcgccaucaacaccagccugcccuuccagaacauccaccccaucaccaucggcaagugccccaaguacgugaagagcaccaagcugagacuggccaccggccugagaaacgugcccagcauccagagcagaggccuguucggcgccaucgccggcuucaucgagggcggcuggaccggcaugguggacggcugguacggcuaccaccaccagaacgagcagggcagcggcuacgccgccgaccugaagagcacccagaacgccaucgacaagaucaccaacaaggugaacagcgugaucgagaagaugaacacccaguucaccgccgugggcaaggaguucaaccaccuggagaagagaaucgagaaccugaacaagaagguggacgacggcuuccuggacaucuggaccuacaacgccgagcugcuggugcugcuggagaacgagagaacccuggacuaccacgacagcaacgugaagaaccuguacgagaaggugagaaaccagcugaagaacaacgccaaggagaucggcaacggcugcuucgaguucuaccacaagugcgacaacaccugcauggagagcgugaagaacggcaccuacgacuaccccaaguacagcgaggaggccaagcugaacagagaggagaucgacggcgugaagcuggagagcaccagaaucuaccagauccuggccaucuacagcaccgccgccagcagccuggugcugguggugagccugggcgccaucagcuucuggaugugcagcaacggcagccugcagugcagaaucugcaucuga

SEQ ID NO: 170491 - RNA, 1701 nt, Artificial Sequence; identical to SEQ ID NO: 170120
  derived and/or modified CDS sequence (opt4) from hemagglutinin__InfluenzaA__AGU01884

SEQ ID NO: 170492 - RNA, 1701 nt, Artificial Sequence
  derived and/or modified CDS sequence (opt4) from hemagglutinin__InfluenzaA__AGU01885
augaaggccauccugguggugaugcuguacaccuucgccaccgccaacgccgacacccugugcaucggcuaccacgccaacaacagcaccgacaccguggacaccgugcuggagaagaacgugaccgugacccacagcgugaaccugcuggaggacaagcacaacgagaagcugugcaagcugagaggcguggccccccugcaccugggcaagugcaacaucgccggcuggauccugggcaaccccgagugcgagagccugagcaccgccagcagcuggagcuacaucguggagaccagcggcagcgacaacggcaccugcuaccccggcgacuucaucgacuacgaggagcugagagagcagcugagcagcgugagcagcuucgagagauucgagaucuuccccaagaccagcagcuggcccaaccacgacagcaacaagggcgugaccgccgccugcccccaggccggcgccaagggcuucuacaagaaccugaucuggcuggugaagaagggcaacagcuaccccaagcugagcaagagcuacaucaacgacaagggcaaggaggugcuggugcuguggggcauccaccaccccagcaccaccgccgaccagcagagccuguaccagaacgccgacaccuacguguucgugggcaccagcagauacagcaagaaguucaagcccgagaucgccaucagacccaaggugagagaccaggagggcagaaugaacuacuacuggacccugguggagcccggcgacaagaucaccuucgaggccaccggcaaccugguggugcccagauacgccuucgccauggagagaaacgccggcagcggcaucaucaucagcgacacccccgugcacgacugcaacaccaccugccagacccccaagggcgccaucaacaccagccugcccuuccagaacgugcaccccaucaccaucggcaagugccccaaguacgugaagagcaccaagcugagacuggccaccggccugagaaacgugcccagcauccagagcagaggccuguucggcgccaucgccggcuucaucgagggcggcuggaccggcaugguggacggcugguacggcuaccaccaccagaacgagcagggcagcggcuacgccgccgaccugaagagcacccagaacgccaucgacaagaucaccaacaaggugaacagcgugaucgagaagaugaacacccaguucaccgccgugggcaaggaguucaaccaccuggagaagagaaucgagaaccugaacaagaagguggacgacggcuuccuggacaucuggaccuacaacgccgagcugcuggugcugcuggagaacgagagaacccuggacuaccacgacagcaacgugaagaaccuguacgagaaggugagaaaccagcugaagaacaacgccaaggagaucggcaacggcugcuucgaguucuaccacaagugcgacaacaccugcauggagagcgugaagaacggcaccuacgacuaccccaaguacagcgaggaggccaagcugaacagagaggagaucgacggcgugaagcuggagagcaccagaaucuaccagauccuggccaucuacagcaccguggccagcagccuggugcugguggugagccugggcgccaucagcuucuggaugugcagcaacggcagccugcagugcagaaucugcaucuga

SEQ ID NO: 170493 - RNA, 1701 nt, Artificial Sequence
  derived and/or modified CDS sequence (opt4) from hemagglutinin__InfluenzaA__AGU01887
augaaggccauccugguggugcugcuguacaccuucgccaccgccaacgccgacacccugugcaucggcuaccacgccaacaacagcaccgacaccguggacaccgugcuggagaagaacgugaccgugacccacagcgugaaccugcuggaggacaagcacaacggcaagcugugcaagcugagaggcguggccccccugcaccugggcaagugcaacaucgccggcuggauccugggcaaccccgagugcgagagccugagcaccgccagcagcuggagcuacaucguggagaccagcagcagcgacaacggcaccugcuaccccggcgacuucaucaacuacgaggagcugagagagcagcugagcagcgugagcagcuucgagagauucgagaucuuccccaagaccagcagcuggcccaaccacgacagcaacaagggcgugaccgccgccugcccccacgccggcgccaagagcuucuacaagaaccugaucuggcuggugaagaagggcaacagcuaccccaagcugagcaagagcuacaucaacgacaagggcaaggaggugcuggugcuguggggcauccaccaccccagcaccaccgccgaccagcagagccuguaccagaacgccgacgccuacguguucgugggcaccagcagauacagcaagaaguucaagcccgagaucgccaucagacccaaggugagagaccaggagggcagaaugaacuacuacuggacccugaucgagcccggcgacaagaucaccuucgaggccaccggcaaccugguggugcccagauacgccuucgccguggagagaaacgccggcagcggcaucaucaucagcgacacccccgugcacaacugcaacaccaccugccagacccccgagggcgccaucaacaccagccugcccuuccagaacauccaccccaucaccaucggcaagugccccaaguacgugaagagcaccaagcugagacuggccaccggccugagaaacgugcccagcauccagagcagaggccuguucggcgccaucgccggcuucaucgagggcggcuggaccggcaugguggacggcugguacggcuaccaccaccagaacgagcagggcagcggcuacgccgccgaccugaagagcacccagaacgccaucgacaagaucaccaacaaggugaacagcgugaucgagaagaugaacacccaguucaccgccgugggcaaggaguucaaccaccuggagaagagaaucgagaaccugaacaagaagguggacgacggcuuccuggacaucuggaccuacaacgccgagcugcuggugcugcuggagaacgagagaacccuggacuaccacgacagcaacgugaagaaccuguacgagaaggugagaaaccagcugaagaacaacgccaaggagaucggcaacggcugcuucgaguucuaccacaagugcgacaacaccugcauggagagcgugaagaacggcaccuacgacuaccccaaguacagcgaggaggccaagcugaacagagagaagaucgacggcgugaagcuggagagcaccagaaucuaccagauccuggccaucuacagcaccguggccagcagccuggugcugguggugagccugggcgccaucagcuucuggaugugcagcaacggcagccugcagugcagaaucugcaucuga

SEQ ID NO: 170494 - RNA, 1701 nt, Artificial Sequence
  derived and/or modified CDS sequence (opt4) from hemagglutinin__InfluenzaA__AGU01888
augaaggccauccugguggugaugcuguacaccuucgccaccgccaacgccgacacccugugcaucggcuaccacgccaacaacagcaccgacaccguggacaccgugcuggagaagaacgugaccgugacccacagcgugaaccugcuggaggacaagcacaacggcaagcugugcaagcugagaggcguggccccccugcaccugggcaagugcaacaucgccggcuggauccugggcaaccccgagugcgagagccugagcaccgccagcagcuggagcuacaucguggagaccagcggcagcgacaacggcaccugcuaccccggcgacuucaucgacuacgaggagcugagagagcagcugagcagcgugagcagcuucgagagauucgagaucuuccccaagaccagcagcuggcccaaccacgacagcaacaagggcgugaccgccgccugcccccaggccggcgccaagggcuucuacaagaaccugaucuggcuggugaagaagggcaacagcuaccccaagcugagcaagagcuacaucaacgacaagggcaaggaggugcuggugcuguggggcauccaccaccccagcaccaccgccgaccagcagagccuguaccagaacgccgacaccuacguguucgugggcaccagcagauacagcaagaaguucaagcccgagaucgccaucagacccaaggugagagaccaggagggcagaaugaacuacuacuggacccugguggagcccggcgacaagaucaccuucgaggccaccggcaaccugguggugcccagauacgccuucgccauggagagaaacgccggcagcggcaucaucaucagcgacacccccgugcacgacugcaacaccaccugccagacccccaagggcgccaucaacaccagccugcccuuccagaacauccaccccaucaccaucggcaagugccccaaguacgugaagagcaccaagcugagacuggccaccggccugagaaacgugcccagcauccagagcagaggccuguucggcgccaucgccggcuucaucgagggcggcuggaccggcaugguggacggcugguacggcuaccaccaccagaacgagcagggcagcggcuacgccgccgaccugaagagcacccagaacgccaucgacaagaucaccaacaaggugaacagcgugaucgagaagaugaacaccagauucaccgccgugggcaaggaguucaaccaccuggagaagagaaucgagaaccugaacaagaagguggacgacggcuuccuggacaucuggaccuacaacgccgagcugcuggugcugcuggagaacgagagaacccuggacuaccacgacagcaacgugaagaaccuguacgagaaggugagaaaccagcugaagaacaacgccaaggagaucggcaacggcugcuucgaguucuaccacaagugcgacaacaccugcauggagagcgugaagaacggcaccuacgacuaccccaaguacagcgaggaggccaagcugaacagagaggagaucgacggcgugaagcuggagagcaccagaaucuaccagauccuggccaucuacagcaccguggccagcagccuggugcugguggugagccugggcgccaucagcuucuggaugugcagcaacggcagccugcagugcagaaucugcaucuga

SEQ ID NO: 170495 - RNA, 1701 nt, Artificial Sequence; identical to SEQ ID NO: 170486
  derived and/or modified CDS sequence (opt4) from hemagglutinin__InfluenzaA__AGU01889

SEQ ID NO: 170496 - RNA, 1701 nt, Artificial Sequence
  derived and/or modified CDS sequence (opt4) from hemagglutinin__InfluenzaA__AGU01890
augaaggccauccugguggugaugcuguacaccuucgccaccgccaacgccgacacccugugcaucggcuaccacgccaacaacagcaccgacaccguggacaccgugcuggagaagaacgugaccgugacccacagcgugaaccugcuggaggacaagcacaacggcaagcugugcaagcugagaggcguggccccccugcaccugggcaagugcaacaucgccggcuggauccugggcaaccccgagugcgagagccugagcaccgccagcagcuggagcuacaucguggagaccagcggcagcgacaacggcaccugcuaccccggcgacuucaucgacuacgaggagcugagagagcagcugagcagcgugagcagcuucgagagauucgagaucuuccccaagaccagcagcuggcccaaccacgacagcaacaagggcgugaccgccgccugcccccaggccggcgccaagggcuucuacaagaaccugaucuggcuggugaagaagggcaacagcuaccccaagcugagcaagagcuacaucaacgacaagggcaaggaggugcuggugcuguggggcauccaccaccccagcaccaccgccgaccagcagagccuguaccagaacgccgacaccuacguguucgugggcaccagcagauacagcaagaaguucaagcccgagaucgccaucagacccaaggugagagaccaggagggcagaaugaacuacuacuggacccugguggagcccggcgacaagaucaccuucgaggccaccggcaaccugguggugcccagauacgccuucgccauggagagaaacgccggcagcggcaucaucaucagcgacacccccgugcacgacugcaacaccaccugccagacccccaagggcgccaucaacaccagccugcccuuccagaacauccaccccaucaccaucggcaagugccccaaguacgugaagagcaccaagcugagacuggccaccggccugagaaacgugcccagcauccagagcagaggccuguucggcgccaucgccggcuucaucgagggcggcuggaccggcaugguggacggcugguacggcuaccaccaccagaacgagcagggcagcggcuacgccgccgaccugaagagcacccagaacgccaucgacaagaucaccaacaaggugaacagcgugaucgagaagaugaacacccaguucaccgccgugggcaaggaguucaaccaccuggagaagagaaucgagaaccugaacaagaagguggacgacggcuuccuggacaucuggaccuacaacgccgagcugcuggugcugcuggagaacgagagaacccuggacuaccacgacagcaacgugaagaaccuguacgagaaggugagaaaccagcugaagaacaacgccaaggagaucggcaacggcugcuucgaguucuaccacaagugcgacaacaccugcauggagagcgugaagaacggcaccuacgacuaccccaaguacagcgaggaggccaagcugaacagagaggagaucgacggcgugaagcuggagagcaccagaaucuaccagauccuggccaucuacagcaccguggccagcagccuggugcugguggugagccugggcgccaucagcuucuggaugugcagcaacggcagccugcagugcagaaucugcaucuga

SEQ ID NO: 170497 - RNA, 1701 nt, Artificial Sequence
  derived and/or modified CDS sequence (opt4) from hemagglutinin__InfluenzaA__AGU92645
augaaggccauccugguggugcugcuguacaccuucgccaccgccaacgccgacacccugugcaucggcuaccacgccaacaacagcaccgacaccguggacaccgugcuggagaagaacgugaccgugacccacagcgugaaccugcuggaggacaagcacaacggcaagcugugcaagcugagaggcguggccccccugcaccugggcaagugcaacaucgccggcuggauccugggcaaccccgagugcgagacccugagcaccgccagcagcuggagcuacaucguggagaccagcagcagcgacaacggcaccugcuaccccggcgacuucaucgacuacgaggagcugagagagcagcugagcagcgugagcagcuucgagagauucgagaucuuccccaagaccagcagcuggcccaaccacgacagcaacaagggcgugaccgccgccugcccccacgccggcgccaagggcuucuacaagaaccugaucuggcuggugaagaagggcaacagcuaccccaagcugagcaagagcuacaucaacgacaagggcaaggaggugcuggugcuguggggcauccaccaccccagcaccaccgccgaccagcagagccuguaccagaacgccgacaccuacguguucgugggcaccagcagauacagcaagaaguucaagcccgagaucgagaccagacccaaggugagagaccaggagggcagaaugaacuacuacuggacccugguggagcccggcgacaagaucaccuucgaggccaccggcaaccugguggugcccagauacgccuucgccauggagagagacgccggcagcggcaucaucaucagcgacacccccgugcacgacugcaacaccaccugccagacccccaagggcgccaucaacaccagccugcccuuccagaacauccaccccaucaccaucggcaagugccccaaguacgugaagagcaccaagcugagacuggccaccggccugagaaacgugcccagcauccagagcagaggccuguucggcgccaucgccggcuucaucgagggcggcuggaccggcaugguggacggcugguacggcuaccaccaccagaacgagcagggcagcggcuacgccgccgaccugaagagcacccagaacgccaucgacaagaucaccaacaaggugaacagcgugaucgagaagaugaacacccaguucaccgccgugggcaaggaguucaaccaccuggagaagagaaucgagaaccugaacaagaagguggacgacggcuuccuggacaucuggaccuacaacgccgagcugcuggugcugcuggagaacgagagaacccuggacuaccacgacagcaacgugaagaaccuguacgagaaggugagaaaccagcugaagaacaacgccaaggagaucggcaacggcugcuucgaguucuaccacaagugcgacaacaccugcauggagagcgugaagaacggcaccuacgacuaccccaaguacagcgaggaggccaagcugaacagagaggagaucgacggcgugaagcuggagagcaccagaaucuaccagauccuggccaucuacagcaccgccgccagcagccuggugcugguggugagccugggcgccaucagcuucuggaugugcagcaacggcagccugcagugcagaaucugcaucuga

SEQ ID NO: 170498 - RNA, 1701 nt, Artificial Sequence
  derived and/or modified CDS sequence (opt4) from hemagglutinin__InfluenzaA__AGU92667
augaaggccauccugguggugcugcuguacaccuucgccaccgccaacgccgacacccugugcaucggcuaccacgccaacaacagcaccgacaccguggacaccgugcuggagaagaacgugaccgugacccacagcgugaaccugcuggaggacaagcacaacggcaagcugugcaagcugagaggcguggccccccugcaccugggcaagugcaacaucgccggcuggauccugggcaaccccgagugcgagacccugagcaccgccagcagcuggagcuacaucguggagaccagcagcagcgacaacggcaccugcuaccccggcgacuucaucgacuacgaggagcugagagagcagcugagcagcgugagcagcuucgagagauucgagaucuuccccaagaccagcagcuggcccaaccacgacagcaacaagggcgugaccgccgccugcccccacgccggcgccaagggcuucuacaagaaccugaucuggcuggugaagaagggcaacagcuaccccaagcugagcaagagcuacaucaacgacaagggcaaggaggugcuggugcuguggggcauccaccaccccagcaccaccgccgaccagcagagccuguaccagaacgccgacaccuacguguucgugggcaccagcagauacagcaagaaguucaagcccgagaucgccaccagacccaaggugagagaccaggagggcagaaugaacuacuacuggacccugguggagcccggcgacaagaucaccuucgaggccaccggcaaccugguggugcccagauacgccuucgccauggagagagacgccggcagcggcaucaucaucagcgacacccccgugcacgacugcaacaccaccugccagacccccaagggcgccaucaacaccagccugcccuuccagaacauccaccccaucaccaucggcaagugccccaaguacgugaagagcaccaagcugagacuggccaccggccugagaaacgugcccagcauccagagcagaggccuguucggcgccaucgccggcuucaucgagggcggcuggaccggcaugguggacggcugguacggcuaccaccaccagaacgagcagggcagcggcuacgccgccgaccugaagagcacccagaacgccaucgacaagaucaccaacaaggugaacagcgugaucgagaagaugaacacccaguucaccgccgugggcaaggaguucaaccaccuggagaagagaaucgagaaccugaacaagaagguggacgacggcuuccuggacaucuggaccuacaacgccgagcugcuggugcugcuggagaacgagagagcccuggacuaccacgacagcaacgugaagaaccuguacgagaaggugagaaaccagcugaagaacaacgccaaggagaucggcaacggcugcuucgaguucuaccacaagugcgacaacaccugcauggagagcgugaagaacggcaccuacgacuaccccaaguacagcgaggaggccaagcugaacagagaggagaucgacggcgugaagcuggagagcaccagaaucuaccagauccuggccaucuacagcaccgccgccagcagccuggugcugguggugagccugggcgccaucagcuucuggaugugcagcaacggcagccugcagugcagaaucugcaucuga

SEQ ID NO: 170499 - RNA, 1701 nt, Artificial Sequence
  derived and/or modified CDS sequence (opt4) from hemagglutinin__InfluenzaA__AGU92678
augaaggccauccugguggugcugcuguacaccuucgccaccgccaacgccgacacccugugcaucggccaccacgccaacaacagcaccgacaccguggacaccgugcuggagaagaacgugaccgugacccacagcgugaaccugcuggaggacaagcacaacggcaagcugugcaagcugagaggcguggccccccugcaccugggcaagugcaacaucgccggcuggauccugggcaaccccgagugcgagacccugagcaccgccagcagcuggagcuacaucguggagaccagcagcagcgacaacggcaccugcuaccccggcgacuucaucgacuacgaggagcugagagagcagcugagcagcgugagcagcuucgagagauucgagaucuuccccaagaccagcagcuggcccaaccacgacagcaacaagggcgugaccgccgccugcccccacgccggcgccaagggcuucuacaagaaccugaucuggcuggugaagaagggcaacagcuaccccaagcugagcaagagcuacaucaacgacaagggcaaggaggugcuggugcuguggggcauccaccaccccagcaccaccgccgaccagcagagccuguaccagaacgccgacaccuacguguucgugggcaccagcagauacagcaagaaguucaagcccgagaucgccaccagacccaaggugagagaccaggagggcagaaugaacuacuacuggacccugguggagcccggcgacaagaucaccuucgaggccaccggcaaccugguggugcccagauacgccuucgccauggagagagacgccggcagcggcaucaucaucagcgacacccccgugcacgacugcaacaccaccugccagacccccaagggcgccaucaacaccagccugcccuuccagaacauccaccccaucaccaucggcaagugccccaaguacgugaagagcaccaagcugagacuggccaccggccugagaaacgugcccagcauccagagcagaggccuguucggcgccaucgccggcuucaucgagggcggcuggaccggcaugguggacggcugguacggcuaccaccaccagaacgagcagggcagcggcuacgccgccgaccugaagagcacccagaacgccaucgacaagaucaccaacaaggugaacagcgugaucgagaagaugaacacccaguucaccgccgugggcaaggaguucaaccaccuggagaagagaaucgagaaccugaacaagaagguggacgacggcuuccuggacaucuggaccuacaacgccgagcugcuggugcugcuggagaacgagagaacccuggacuaccacgacagcaacgugaagaaccuguacgagaaggugagaaaccagcugaagaacaacgccaaggagaucggcaacggcugcuucgaguucuaccacaagugcgacaacaccugcauggagagcgugaagaacggcaccuacgacuaccccaaguacagcgaggaggccaagcugaacagagaggagaucgacggcgugaagcuggagagcaccagaaucuaccagauccuggccaucuacagcaccgccgccagcagccuggugcugguggugagccugggcgccaucagcuucuggaugugcagcaacggcagccugcagugcagaaucugcaucuga

SEQ ID NO: 170500 - RNA, 1701 nt, Artificial Sequence
  derived and/or modified CDS sequence (opt4) from hemagglutinin__InfluenzaA__AGU92711
augaaggccauccugguggugcugcuguacaccuucgccaccgccaacgccgacacccugugcaucggcuaccacgccaacaacagcaccgacaccguggacaccgugcuggagaagaacgugaccgugacccacagcgugaaccugcuggaggacaagcacaacggcaagcugugcaagcugagaggcguggccccccugcaccugggcaagugcaacaucgccggcuggauccugggcaaccccgagugcgagagccugagcaccgccagcagcuggagcuacaucguggagaccagcagcagcgacaacggcaccugcuaccccggcgacuucaucgacuacgaggagcugagagagcagcugagcagcgugagcagcuucgagagauucgagaucuuccccaagaccagcagcuggcccaaccacgacagcaacaagggcgugaccgccgccugcccccacgccggcgccaagagcuucuacaagaaccugaucuggcuggugaagcagggcaacagcuaccccaagcugagcaagagcuacaucaacgacaagggcaaggaggugcuggugcuguggggcauccaccaccccagcaccagcgccgaccagcagagccuguaccagaacgccgacgccuacguguucgugggcagcagcagauacagcaagaaguucaagcccgagaucgccaucagacccaaggugagagaccaggagggcagaaugaacuacuacuggacccugguggagcccggcgacaagaucaccuucgaggccaccggcaaccugguggugcccagauacgccuucgccauggagagaaacgccggcagcggcaucaucaucagcgacacccccgugcacgacugcaacaccaccugccagacccccaagggcgccaucaacaccagccugcccuuccagaacauccaccccaucaccaucggcaagugccccaaguacgugaagagcaccaagcugagacuggccaccggccugagaaacgugcccagcauccagagcagaggccuguucggcgccaucgccggcuucaucgagggcggcuggaccggcaugguggacggcugguacggcuaccaccaccagaacgagcagggcagcggcuacgccgccgaccugaagagcacccagaacgccaucgacgagaucaccaacaaggugaacagcgugaucgagaagaugaacacccaguucaccgccgugggcaaggaguucaaccaccuggagaagagaaucgagaaccugaacaagaagguggacgacggcuuccuggacaucuggaccuacaacgccgagcugcuggugcugcuggagaacgagagaacccuggacuaccacgacagcaacgugaagaaccuguacgagaaggugagaagccagcugaagaacaacgccaaggagaucggcaacggcugcuucgaguucuaccacaagugcgacaacaccugcauggagagcgugaagaacggcaccuacgacuaccccaaguacagcgaggaggccaagcugaacagagaggagaucgacggcgugaagcuggagagcaccagaaucuaccagauccuggccaucuacagcaccguggccagcagccuggugcugguggugagccugggcgccaucagcuucuggaugugcagcaacggcagccugcagugcagaaucugcaucuga

SEQ ID NO: 170501 - RNA, 1701 nt, Artificial Sequence
  derived and/or modified CDS sequence (opt4) from hemagglutinin__InfluenzaA__AGU92722
augaaggccauccugguggugcugcuguacaccuucgccaccgccaacgccgacacccugugcaucggcuaccacgccaacaacagcaccgacaccguggacaccgugcuggagaagaacgugaccgugacccacagcgugaaccugcuggaggacaagcacaacggcaagcugugcaagcugagaggcguggccccccugcaccugggcaagugcaacaucgccggcuggauccugggcaaccccgagugcgagagccugagcaccgccagcagcuggagcuacaucguggagaccagcagcagcgacaacggcaccugcuaccccggcgacuucaucgacuacgaggagcugagagagcagcugagcagcgugagcagcuucgagagauucgagaucuuccccaagaccagcagcuggcccaaccacgacagcgacaagggcgugaccgccgccugcccccacgccggcgccaagagcuucuacaagaaccugaucuggcuggugaagaagggcaacagcuaccccaagcugagcaagagcuacaucaacgacaagggcaaggaggugcuggugcuguggggcauccaccaccccagcaccagcgccgaccagcagagccuguaccagaacgccgacgccuacguguucgugggcagcagcagauacagcaagaaguucaagcccgagaucgccaucagacccaaggugagagaccaggagggcagaaugaacuacuacuggacccugguggagcccggcgacaagaucaccuucgaggccaccggcaaccugguggugcccagauacgccuucgccauggagagaaacgccggcagcggcaucaucaucagcgacacccccgugcacgacugcaacaccaccugccagacccccaagggcgccaucaacaccagccugcccuuccagaacauccaccccaucaccaucggcaagugccccaaguacgugaagagcaccaagcugagacuggccaccggccugagaaacgugcccagcauccagagcagaggccuguucggcgccaucgccggcuucaucgagggcggcuggaccggcaugguggacggcugguacggcuaccaccaccagaacgagcagggcagcggcuacgccgccgaccugaagagcacccagaacgccaucgacgagaucaccaacaaggugaacagcgugaucgagaagaugaacacccaguucaccgccgugggcaaggaguucaaccaccuggagaagagaaucgagaaccugaacaagaagguggacgacggcuuccuggacaucuggaccuacaacgccgagcugcuggugcugcuggagaacgagagaacccuggacuaccacgacagcaacgugaagaaccuguacgagaaggugagaagccagcugaagaacaacgccaaggagaucggcaacggcugcuucgaguucuaccacaagugcgacaacaccugcauggagagcgugaagaacggcaccuacgacuaccccaaguacagcgaggaggccaagcugaacagagaggagaucgacggcgugaagcuggagagcaccagaaucuaccagauccuggccaucuacagcaccguggccagcagccuggugcugguggugagccugggcgccaucagcuucuggaugugcagcaacggcagccugcagugcagaaucugcaucuga

SEQ ID NO: 170502 - RNA, 1701 nt, Artificial Sequence; identical to SEQ ID NO: 170501
  derived and/or modified CDS sequence (opt4) from hemagglutinin__InfluenzaA__AGU92733

SEQ ID NO: 170503 - RNA, 1701 nt, Artificial Sequence
  derived and/or modified CDS sequence (opt4) from hemagglutinin__InfluenzaA__AGU92744
augaaggccauccugguggugcugcuguacaccuucgccaccgccaacgccgacacccugugcaucggcuaccacgccaacaacagcaccgacaccguggacaccgugcuggagaagaacgugaccgugacccacagcgugaaccugcuggaggacaagcacaacggcaagcugugcaagcugagaggcguggccccccugcaccugggcaagugcaacaucgccggcuggauccugggcaaccccgagugcgagagccugagcaccgccagcagcuggagcuacaucguggagaccagcagcagcgacaacggcaccugcuaccccggcgacuucaucgacuacgaggagcugagagagcagcugagcagcgugagcagcuucgagagauucgagaucuuccccaagaccagcagcuggcccaaccacgacagcgacaagggcgugaccgccgccugcccccacgccggcgccaagagcuucuacaagaaccugaucuggcuggugaagaagggcaacagcuaccccaagcugagcaagagcuacaucaacgacaagggcaaggaggugcuggugcuguggggcauccaccaccccagcaccagcgccgaccagcagagccuguaccagaacgccgacgccuacguguucgugggcagcagcagauacagcaagaaguucaagcccgagaucgccaucagacccaaggugagagaccaggagggcagaaugaacuacuacuggacccugguggagcccggcgacaagaucaccuucgaggccaccggcaaccugguggugcccagauacgccuucgccauggagagaaacgccggcagcggcaucaucaucagcgacacccccgugcacgacugcaacaccaccugccagacccccaagggcgccaucaacaccagccugcccuuccagaacauccaccccaucaccaucggcaagugccccaaguacgugaagagcaccaagcugagacuggccaccggccugagaaacgugcccagcauccagagcagaggccuguucggcgccaucgccggcuucaucgagggcggcuggaccggcaugguggacggcugguacggcuaccaccaccagaacgagcagggcagcggcuacgccgccgaccugaagagcacccagaacgccaucgacgagaucaccaacaaggugaacagcgugaucgagaagaugaacacccaguucaccgccgugggcaaggaguucaaccaccuggagaagagaaucgagaaccugaacaagaagguggacgacggcuuccuggacaucuggaccuacaacgccgagcugcuggugcugcuggagaacgagagaacccuggacuaccacgacagcaacgugaagaaccuguacgagaaggugagaagccagcugaagaacaacgccaaggagaucggcaacggcugcuucgaguucuaccacaagugcgacaacaccugcauggagagcgugaagaacggcgccuacgacuaccccaaguacagcgaggaggccaagcugaacagagaggagaucgacggcgugaagcuggagagcaccagaaucuaccagauccuggccaucuacagcaccguggccagcagccuggugcugguggugagccugggcgccaucagcuucuggaugugcagcaacggcagccugcagugcagaaucugcaucuga

SEQ ID NO: 170504 - RNA, 1701 nt, Artificial Sequence
  derived and/or modified CDS sequence (opt4) from hemagglutinin__InfluenzaA__AGU92755
augaaggccauccugguggugcugcuguacaccuucgccaccgccaacgccgacacccugugcaucggcuaccacgccaacaacagcaccgacaccguggacaccgugcuggagaagaacgugaccgugacccacagcgugaaccugcuggaggacaagcacaacggcaagcugugcaagcugagaggcguggccccccugcaccugggcaagugcaacaucgccggcuggauccugggcaaccccgagugcgagagccugagcaccgccagcagcuggagcuacaucguggagaccagcagcagcgacaacggcaccugcuaccccggcgacuucaucgacuacgaggagcugagagagcagcugagcagcgugagcagcuucgagagauucgagaucuuccccaagaccagcagcuggcccaaccacgacagcaacaagggcgugaccgccgccugcccccacgccggcgccaagagcuucuacaagaaccugaucuggcuggugaagaagggcaacagcuaccccaagcugagcaagagcuacaucaacgacaagggcaaggaggugcuggugcuguggggcauccaccaccccagcaccagcgccgaccagcagagccuguaccagaacgccgacgccuacguguucgugggcagcagcagauacagcaaggaguucaagcccgagaucgccaucagacccaaggugagagaccaggagggcagaaugaacuacuacuggacccugguggagcccggcgacaagaucaccuucgaggccaccggcaaccugguggugcccagauacgccuucgccauggagagaaacgccggcagcggcaucaucaucagcgacacccccgugcacgacugcaacaccaccugccagacccccaagggcgccaucaacaccagccugcccuuccagaacauccaccccaucaccaucggcaagugccccaaguacgugaagagcaccaagcugagacuggccaccggccugagaaacgugcccagcauccagagcagaggccuguucggcgccaucgccggcuucaucgagggcggcuggaccggcaugguggacggcugguacggcuaccaccaccagaacgagcagggcagcggcuacgccgccgaccugaagagcacccagaacgccaucgacgagaucaccaacaaggugaacagcgugaucgagaagaugaacacccaguucaccgccgugggcaaggaguucaaccaccuggagaagagaaucgagaaccugaacaagaagguggacgacggcuuccuggacaucuggaccuacaacgccgagcugcuggugcugcuggagaacgagagaacccuggacuaccacgacagcaacgugaagaaccuguacgagaaggugagaagccagcugaagaacaacgccaaggagaucggcaacggcugcuucgaguucuaccacaagugcgacaacaccugcauggagagcgugaagaacggcaccuacgacuaccccaaguacagcgaggaggccaagcugaacagagaggagaucgacggcgugaagcuggagagcaccagaaucuaccagauccuggccaucuacagcaccguggccagcagccuggugcugguggugagccugggcgccaucagcuucuggaugugcagcaacggcagccugcagugcagaaucugcaucuga

SEQ ID NO: 170505 - RNA, 1701 nt, Artificial Sequence
  derived and/or modified CDS sequence (opt4) from hemagglutinin__InfluenzaA__AGU92766
augaaggccauccugguggugcugcuguacaccuucgccaccgccaacgccgacacccugugcaucggcuaccacgccaacaacagcaccgacaccguggacaccgugcuggagaagaacgugaccgugacccacagcgugaaccugcuggaggacaagcacaacggcaagcugugcaagcugagaggcguggccccccugcaccugggcaagugcaacaucgccggcuggauccugggcaaccccgagugcgagacccugagcaccgccagcagcuggagcuacaucguggagaccagcagcagcgacaacggcaccugcuaccccggcgacuucaucgacuacgaggagcugagagagcagcugagcagcgugagcagcuucgagagauucgagaucuuccccaagaccagcagcuggcccaaccacgagagcaacaagggcgugaccgccgccugcccccacgccggcgccaagggcuucuacaagaaccugaucuggcuggugaagaagggcaacagcuaccccaagcugagcaagagcuacaucaacgacaagggcaaggaggugcuggugcuguggggcauccaccaccccagcaccaccgccgaccagcagagccuguaccagaacgccgacgccuacguguucgugggcaccagcagauacagcaagaaguucaagcccgagaucgccaccagacccaaggugagagaccaggagggcagaaugaacuacuacuggacccugguggagcccggcgacaagaucaccuucgaggccaccggcaaccugguggugcccagauacgccuucgccauggagagagacgccggcagcggcaucaucaucagcgacacccccgugcacgacugcaacaccaccugccagacccccaagggcgccaucaacaccagccugcccuuccagaacauccaccccaucaccaucggcaagugccccaaguacgugaagagcaccaagcugagacuggccaccggccugagaaacgugcccagcauccagagcagaggccuguucggcgccaucgccggcuucaucgagggcggcuggaccggcaugguggacggcugguacggcuaccaccaccagaacgagcagggcagcggcuacgccgccgaccugaagagcacccagaacgccaucgacaagaucaccaacaaggugaacagcgugaucgagaagaugaacacccaguucaccgccgugggcaaggaguucaaccaccuggagaagagaaucgagaaccugaacaagaagguggacgacggcuuccuggacaucuggaccuacaacgccgagcugcuggugcugcuggagaacgagagaacccuggacuaccacgacagcaacgugaagaaccuguacgagaaggugagaaaccagcugaagaacaacgccaaggagaucggcaacggcugcuucgaguucuaccacaagugcgacaacaccugcauggagagcgugaagaacggcaccuacgacuaccccaaguacagcgaggaggccaagcugaacagagaggagaucgacggcgugaagcuggagagcaccagaaucuaccagauccuggccaucuacagcaccgccgccagcagccuggugcugguggugagccugggcgccaucagcuucuggaugugcagcaacggcagccugcagugcagaaucugcaucuga

SEQ ID NO: 170506 - RNA, 1701 nt, Artificial Sequence
  derived and/or modified CDS sequence (opt4) from hemagglutinin__InfluenzaA__AGU92777
augaaggccauccugguggugcugcuguacaccuucgccaccgccaacgccgacacccugugcaucggcuaccacgccaacaacagcaccgacaccguggacaccgugcuggagaagaacgugaccgugacccacagcgugaaccugcuggaggacaagcacaacggcaagcugugcaagcugagaggcguggccccccugcaccugggcaagugcaacaucgccggcuggauccugggcaaccccgagugcgagacccugagcaccgccagcagcuggagcuacaucguggagaccagcagcagcgacaacggcaccugcuaccccggcgacuucaucgacuacgaggagcugagagagcagcugagcagcgugagcagcuucgagagauucgagaucuuccccaagaccagcagcuggcccaaccacgagagcaacaagggcgugaccgccgccugcccccacgccggcgccaagggcuucuacaagaaccugaucuggcuggugaagaagggcaacagcuaccccaagcugagcaagagcuacaucaacgacaagggcaaggaggugcuggugcuguggggcauccaccaccccagcaccaccgccgaccagcagagcaucuaccagaacgccgacaccuacguguucgugggcaccagcagauacagcaagaaguucaagcccgagaucgccaccagacccaaggugagagaccaggagggcagaaugaacuacuacuggacccugguggagcccggcgacaagaucaccuucgaggccaccggcaaccugguggugcccagauacgccuucgccauggagagagacgccggcagcggcaucaucaucagcgacacccccgugcacgacugcaacaccaccugccagacccccaagggcgccaucaacaccagccugcccuuccagaacauccaccccaucaccaucggcaagugccccaaguacgugaagagcaccaagcugagacuggccaccggccugagaaacgugcccagcauccagagcagaggccuguucggcgccaucgccggcuucaucgagggcggcuggaccggcaugguggacggcugguacggcuaccaccaccagaacgagcagggcagcggcuacgccgccgaccugaagagcacccagaacgccaucgacaagaucaccaacaaggugaacagcgugaucgagaagaugaacacccaguucaccgccgugggcaaggaguucaaccaccuggagaagagaaucgagaaccugaacaagaagguggacgacggcuuccuggacaucuggaccuacaacgccgagcugcuggugcugcuggagaacgagagaacccuggacuaccacgacagcaacgugaagaaccuguacgagaaggugagaaaccagcugaagaacaacgccaaggagaucggcaacggcugcuucgaguucuaccacaagugcgacaacaccugcauggagagcgugaagaacggcaccuacgacuaccccaaguacagcgaggaggccaagcugaacagagaggagaucgacggcgugaagcuggagagcaccagaaucuaccagauccuggccaucuacagcaccgccgccagcagccuggugcugguggugagccugggcgccaucagcuucuggaugugcagcaacggcagccugcagugcagaaucugcaucuga

SEQ ID NO: 170507 - RNA, 1701 nt, Artificial Sequence
  derived and/or modified CDS sequence (opt4) from hemagglutinin__InfluenzaA__AGU92788
augaaggccauccugguggugcugcuguacaccuucgccaccgccaacgccgacacccugugcaucggcuaccacgccaacaacagcaccgacaccguggacaccgugcuggagaagaacgugaccgugacccacagcgugaaccugcuggaggacaagcacaacggcaagcugugcaagcugagaggcguggccccccugcaccugggcaagugcaacaucgccggcuggauccugggcaaccccgagugcgagacccugagcaccgccagcagcuggagcuacaucguggagaccagcagcagcgacaacggcaccugcuaccccggcgacuucaucgacuacgaggagcugagagagcagcugagcagcgugagcagcuucgagagauucgagaucuuccccaagaccagcagcuggcccaaccacgacagcgacaagggcgugaccgccgccugcccccacgccggcgccaagggcuucuacaagaaccugaucuggcuggugaagaagggcaacagcuaccccaagcugagcaagagcuacaucaacgacaagggcaaggaggugcuggugcuguggggcauccaccaccccagcaccaccgccgaccagcagagccuguaccagaacgccgacgccuacguguucgugggcaccagcagauacagcaagaaguucaagcccgagaucgccaccagacccaaggugagagacagagagggcagaaugaacuacuacuggacccugguggagcccggcgacaagaucaccuucgaggccaccggcaaccugguggugcccagauacgccuucgccauggagagagacgccggcagcggcaucaucaucagcgacacccccgugcacgacugcaacaccaccugccagacccccaagggcgccaucaacaccagccugcccuuccagaacauccaccccaucaccaucggcaagugccccaaguacgugaagagcaccaagcugagacuggccaccggccugagaaacgugcccagcauccagagcagaggccuguucggcgccaucgccggcuucaucgagggcggcuggaccggcaugcuggacggcugguacggcuaccaccaccagaacgagcagggcagcggcuacgccgccgaccugaagagcacccagaacgccaucgacaagaucaccaacaaggugaacagcgugaucgagaagaugaacacccaguucaccgccgugggcaaggaguucaaccaccuggagaagagaaucgagaaccugaacaagaagguggacgacggcuuccuggacaucuggaccuacaacgccgagcugcuggugcugcuggagaacgagagaacccuggacuaccacgacagcaacgugaagaaccuguacgagaaggugagaaaccagcugaagaacaacgccaaggagaucggcaacggcugcuucgaguucuaccacaagugcgacaacaccugcauggagagcgugaagaacggcaccuacgacuaccccaaguacagcgaggaggccaagcugaacagagaggagaucgacggcgugaagcuggagagcaccagaaucuaccagauccuggccaucuacagcaccgccgccagcagccuggugcugguggugagccugggcgccaucagcuucuggaugugcagcaacggcagccugcagugcagaaucugcaucuga

SEQ ID NO: 170508 - RNA, 1701 nt, Artificial Sequence
  derived and/or modified CDS sequence (opt4) from hemagglutinin__InfluenzaA__AGU92799
augaaggccauccugguggugcugcuguacaccuucgccaccgccaacgccgacacccugugcaucggcuaccacgccaacaacagcaccgacaccguggacaccgugcuggagaagaacgugaccgugacccacagcgugaaccugcuggaggacaagcacaacggcaagcugugcaagcugagaggcguggccccccugcaccugggcaagugcaacaucgccggcuggauccugggcaaccccgagugcgagacccugagcaccgccagcagcuggagcuacaucguggagaccagcagcagcgacaacggcaccugcuaccccggcgacuucaucgacuacgaggagcugagagagcagcugagcagcgugagcagcuucgagagauucgagaucuuccccaagaccagcagcuggcccgaccacgacagcaacaagggcgugaccgccgccugcccccacgccggcgccaagggcuucuacaagaaccugaucuggcuggugaagaagggcaacagcuaccccaagcugagcaagagcuacaucaacgacaagggcaaggaggugcuggugcuguggggcauccaccaccccagcaccaccgccgaccagcagagccuguaccagaacgccgacgccuacguguucgugggcaccagcagauacagcaagaaguucaagcccgagaucgccaccagacccaaggugagagacagagagggcagaaugaacuacuacuggacccugguggagcccggcgacaagaucaccuucgaggccaccggcaaccugguggugcccagauacgccuucgccauggagagagacgccggcagcggcaucaucaucagcgacacccccgugcacgacugcaacaccaccugccagacccccaagggcgccaucaacaccagccugcccuuccagaacauccaccccaucaccaucggcaagugccccaaguacgugaagagcaccaagcugagacuggccaccggccugagaaacgugcccagcauccagagcagaggccuguucggcgccaucgccggcuucaucgagggcggcuggaccggcaugguggacggcugguacggcuaccaccaccagaacgagcagggcagcggcuacgccgccgaccugaagagcacccagaacgccaucgacaagaucaccaacaaggugaacagcgugaucgagaagaugaacacccaguucaccgccgugggcaaggaguucaaccaccuggagaagagaaucgagaaccugaacaagaagguggacgacggcuuccuggacaucuggaccuacaacgccgagcugcuggugcugcuggagaacgagagaacccuggacuaccacgacagcaacgugaagaaccuguacgagaaggugagaaaccagcugaagaacaacgccaaggagaucggcaacggcugcuucgaguucuaccacaagugcgacaacaccugcauggagagcgugaagaacggcaccuacgacuaccccaaguacagcgaggaggccaagcugaacagagaggagaucgacggcgugaagcuggagagcaccagaaucuaccagauccuggccaucuacagcaccgccgccagcagccuggugcugguggugagccugggcgccaucagcuucuggaugugcagcaacggcagccugcagugcagaaucugcaucuga

SEQ ID NO: 170509 - RNA, 1701 nt, Artificial Sequence
  derived and/or modified CDS sequence (opt4) from hemagglutinin__InfluenzaA__AGU92821
augaaggccauccugguggugcugcuguacaccuucgccaccgccaacgccgacacccugugcaucggcuaccacgccaacaacagcaccgacaccguggacaccgugcuggagaagaacgugaccgugacccacagcgugaaccugcuggaggacaagcacaacggcaagcugugcaagcugagaggcguggccccccugcaccugggcaagugcaacaucgccggcuggauccugggcaaccccgagugcgagacccugagcaccgccagcagcuggagcuacaucguggagaccagcagcagcgacaacggcaccugcuaccccggcgacuucaucgacuacgaggagcugagagagcagcugagcagcgugagcagcuucgagagauucgagaucuuccccaagaccagcagcuggcccaaccacgacagcaacaagggcgugaccgccgccugcccccacgccggcgccaagggcuucuacaagaaccugaucuggcuggugaagaagggcaacagcuaccccaagcugagcaagagcuacaucaacgacaagggcaaggaggugcuggugcuguggggcauccaccaccccagcaccaccgccgaccagcagagccuguaccagaacgccgacaccuacguguucgugggcaccagcagauacagcaagauguucaagcccgagaucgccaccagacccaaggugagagacagagagggcagaaugaacuacuacuggacccugguggagcccggcgacaagaucaccuucgaggccaccggcaaccugguggugcccagauacgccuucgccauggagagagacgccggcagcggcaucaucaucagcgacacccccgugcacgacugcaacaccaccugccagacccccaagggcgccaucaacaccagccugcccuuccagaacauccaccccaucaccaucggcaagugccccaaguacgugaagagcaccaagcugagacuggccaccggccugagaaacgugcccagcauccagagcagaggccuguucggcgccaucgccggcuucaucgagggcggcuggaccggcaugguggacggcugguacggcuaccaccaccagaacgagcagggcagcggcuacgccgccgaccugaagagcacccagaacgccaucgacaagaucaccaacaaggugaacagcgugaucgagaagaugaacacccaguucaccgccgugggcaaggaguucaaccaccuggagaagagaaucgagaaccugaacaagaagguggacgacggcuuccuggacaucuggaccuacaacgccgagcugcuggugcugcuggagaacgagagaacccuggacuaccacgacagcaacgugaagaaccuguacgagaaggugagaaaccagcugaagaacaacgccaaggagaucggcaacggcugcuucgaguucuaccacaagugcgacaacaccugcauggagagcgugaagaacggcaccuacgacuaccccaaguacagcgaggaggccaagcugaacagagaggagaucgacggcgugaagcuggagagcaccagaaucuaccagauccuggccaucuacagcaccgccgccagcagccuggugcugguggugagccugggcgccaucagcuucuggaugugcagcaacggcagccugcagugcagaaucugcaucuga

SEQ ID NO: 170510 - RNA, 1701 nt, Artificial Sequence
  derived and/or modified CDS sequence (opt4) from hemagglutinin__InfluenzaA__AGU92843
augaaggccauccugguggugcugcuguacaccuucgccaccgccaacgccgacacccugugcaucggcuaccacgccaacaacagcaccgacaccguggacaccgugcuggagaagaacgugaccgugacccacagcgugaaccugcuggaggacaagcacaacggcaagcugugcaagcugagaggcguggccccccugcaccugggcaagugcaacaucgccggcuggauccugggcaaccccgagugcgagagccugagcaccgccagcagcuggagcuacaucguggagaccagcagcagcgacaacggcaccugcuaccccggcgacuucaucgacuacgaggagcugagagagcagcugagcagcgugagcagcuucgagagauucgagaucuuccccaagaccagcagcuggcccaaccacgacagcaacaagggcgugaccgccgccugcccccacgccggcgccaagagcuucuacaagaaccugaucuggcuggugaagaagggcgacagcuaccccaagcugagcaagagcuacaucaacgacaagggcaaggaggugcuggugcuguggggcauccaccaccccagcaccagcgccgaccagcagagccuguaccagaacgccgacgccuacguguucgugggcagcagcagauacagcaagaaguucaagcccgagaucgccaucagacccaaggugagagacagagagggcagaaugaacuacuacuggacccugguggagcccggcgacaagaucaccuucgaggccaccggcaaccugguggugcccagauacgccuucgccauggagagaaacgccggcagcggcaucaucaucagcgacacccccgugcacgacugcaacaccaccugccagacccccaagggcgccaucaacaccagccugcccuuccagaacauccaccccaucaccaucggcaagugccccaaguacgugaagagcaccaagcugagacuggccaccggccugagaaacgugcccagcauccagagcagaggccuguucggcgccaucgccggcuucaucgagggcggcuggaccggcaugguggacggcugguacggcuaccaccaccagaacgagcagggcagcggcuacgccgccgaccugaagagcacccagaacgccaucgacgagaucaccaacaaggugaacagcgugaucgagaagaugaacacccaguucaccgccgugggcaaggaguucaaccaccuggagaagagaaucgagaaccugaacaagaagguggacgacggcuuccuggacaucuggaccuacaacgccgagcugcuggugcugcuggagaacgagagaacccuggacuaccacgacagcaacgugaagaaccuguacgagaaggugagaagccagcugaagaacaacgccaaggagaucggcaacggcugcuucgaguucuaccacaagugcgacaacaccugcauggagagcgugaagaacggcaccuacgacuaccccaaguacagcgaggaggccaagcugaacagagaggagaucgacggcgugaagcuggagagcaccagaaucuaccagauccuggccaucuacagcaccguggccagcagccuggugcugguggugagccugggcgccaucagcuucuggaugugcagcaacggcagccugcagugcagaaucugcaucuga

SEQ ID NO: 170511 - RNA, 1710 nt, Artificial Sequence
  derived and/or modified CDS sequence (opt4) from hemagglutinin__InfluenzaA__AGU92854
augaaggccauccugguggugcugcuguacaccuucgccaccgccaacgccgacacccugugcaucggcuaccacgccaacaacagcaccgacaccguggacaccgugcuggagaagaacgugaccgugacccacagcgugaaccugcuggaggacaagcacaacggcaagcugugcaagcugagaggcguggccccccugcaccugggcaagugcaacaucgccggcuggauccugggcaaccccgagugcgagagccugagcaccgccagcagcuggagcuacaucguggagaccagcagcagcgacaacggcaccugcuaccccggcgacuucaucgacuacgaggagcugagagagcagcugagcagcgugagcagcuucgagagauucgagaucuuccccaagaccagcagcuggcccaaccacgacagcgacaagggcgugaccgccgccugcccccacgccggcgccaagagcuucuacaagaaccugaucuggcuggugaagaagggcaacagcuaccccaagcugagcaagagcuacaucaacgacaagggcaaggaggugcuggugcuguggggcauccaccaccccagcaccagcgccgaccagcagagccuguaccagaacgccgacgccuacguguucgugggcagcagcagauacagcaagaaguucaagcccgagaucgccaucagacccaaggugagagacagagagggcagaaugaacuacuacuggacccugguggagcccggcgacaagaucaccuucgaggccaccggcaaccugguggugcccagauacgccuucgccauggagagaaacgccggcagcggcaucaucaucagcgacacccccgugcacgacugcaacaccaccugccagacccccaagggcgccaucaacaccagccugaccagccugcccuuccagaacauccaccccaucaccaucggcaagugccccaaguacgugaagagcaccaagcugagacuggccaccggccugagaaacgugcccagcauccagagcagaggccuguucggcgccaucgccggcuucaucgagggcggcuggaccggcaugguggacggcugguacggcuaccaccaccagaacgagcagggcagcggcuacgccgccgaccugaagagcacccagaacgccaucgacgagaucaccaacaaggugaacagcgugaucgagaagaugaacacccaguucaccgccgugggcaaggaguucaaccaccuggagaagagaaucgagaaccugaacaagaagguggacgacggcuuccuggacaucuggaccuacaacgccgagcugcuggugcugcuggagaacgagagaacccuggacuaccacgacagcaacgugaagaaccuguacgagaaggugagaagccagcugaagaacaacgccaaggagaucggcaacggcugcuucgaguucuaccacaagugcgacaacaccugcauggagagcgugaagaacggcaccuacgacuaccccaaguacagcgaggaggccaagcugaacagagaggagaucgacggcgugaagcuggagagcaccagaaucuaccagauccuggccaucuacagcaccguggccagcagccuggugcugguggugagccugggcgccaucagcuucuggaugugcagcaacggcagccugcagugcagaaucugcaucuga

SEQ ID NO: 170512 - RNA, 1701 nt, Artificial Sequence
  derived and/or modified CDS sequence (opt4) from hemagglutinin__InfluenzaA__AGU92887
augaaggccauccugguggugcugcuguacaccuucgccaccgccaacgccgacacccugugcaucggcuaccacgccaacaacagcaccgacaccguggacaccgugcuggagaagaacgugaccgugacccacagcgugaaccugcuggaggacaagcacaacggcaagcugugcaagcugagaggcguggccccccugcaccugggcaagugcaacaucgccggcuggauccugggcaaccccgagugcgagagccugagcaccgccagcagcuggagcuacaucguggagaccagcagcagcgacaacggcaccugcuaccccggcgacuucaucgacuacgaggagcugagagagcagcugagcagcgugagcagcuucgagagauucgagaucuuccccaagaccagcagcuggcccaaccacgacagcaacaagggcgugaccgccgccugcccccacgccggcgccaagagcuucuacaagaaccugaucuggcuggugaagaagggcaacagcuaccccaagcugagcaagagcuacaucaacgacaagggcaaggaggugcuggugcuguggggcauccaccaccccagcaccagcgacgaccagcagagccuguaccagaacgccgacgccuacguguucgugggcagcagcagauacagcaagaaguucaagcccgagaucgccaucagacccaaggugagagacagagagggcagaaugaacuacuacuggacccugguggagcccggcgacaagaucaccuucgaggccaccggcaaccugguggugcccagauacgccuucgccauggagagaaacgccggcagcggcaucaucaucagcgacacccccgugcacgacugcaacaccaccugccagacccccaagggcgccaucaacaccagccugcccuuccagaacauccaccccaucaccaucggcaagugccccaaguacgugaagagcaccaagcugagacuggccaccggccugagaaacgugcccagcauccagagcagaggccuguucggcgccaucgccggcuucaucgagggcggcuggaccggcaugguggacggcugguacggcuaccaccaccagaacgagcagggcagcggcuacgccgccgaccugaagagcacccagaacgccaucgacgagaucaccaacaaggugaacagcgugaucgagaagaugaacacccaguucaccgccgugggcaaggaguucaaccaccuggagaagagaaucgagaaccugaacaagaagguggacgacggcuuccuggacaucuggaccuacaacgccgagcugcuggugcugcuggagaacgagagaacccuggacuaccacgacagcaacgugaagaaccuguacgagaaggugagaagccagcugaagaacaacgccaaggagaucggcaacggcugcuucgaguucuaccacaagugcgacaacaccugcauggagagcgugaagaacggcaccuacgacuaccccaaguacagcgaggaggccaagcugaacagagaggagaucgacggcgugaagcuggagagcaccagaaucuaccagauccuggccaucuacagcaccguggccagcagccuggugcugguggugagccugggcgccaucagcuucuggaugugcagcaacggcagccugcagugcagaaucugcaucuga

SEQ ID NO: 170513 - RNA, 1701 nt, Artificial Sequence; identical to SEQ ID NO: 170497
  derived and/or modified CDS sequence (opt4) from hemagglutinin__InfluenzaA__AGU92898

SEQ ID NO: 170514 - RNA, 1701 nt, Artificial Sequence; identical to SEQ ID NO: 170498
  derived and/or modified CDS sequence (opt4) from hemagglutinin__InfluenzaA__AGU92909

SEQ ID NO: 170515 - RNA, 1701 nt, Artificial Sequence; identical to SEQ ID NO: 170500
  derived and/or modified CDS sequence (opt4) from hemagglutinin__InfluenzaA__AGU92931

SEQ ID NO: 170516 - RNA, 1701 nt, Artificial Sequence; identical to SEQ ID NO: 170501
  derived and/or modified CDS sequence (opt4) from hemagglutinin__InfluenzaA__AGU92942

SEQ ID NO: 170517 - RNA, 1701 nt, Artificial Sequence; identical to SEQ ID NO: 170501
  derived and/or modified CDS sequence (opt4) from hemagglutinin__InfluenzaA__AGU92953

SEQ ID NO: 170518 - RNA, 1701 nt, Artificial Sequence
  derived and/or modified CDS sequence (opt4) from hemagglutinin__InfluenzaA__AGU92964
augaaggccauccugguggugcugcuguacaccuucgccaccgccaacgccgacacccugugcaucggcuaccacgccaacaacagcaccgacaccguggacaccgugcuggagaagaacgugaccgugacccacagcgugaaccugcuggaggacaagcacaacggcaagcugugcaagcugagaggcguggccccccugcaccugggcaagugcaacaucgccggcuggauccugggcaaccccgagugcgagacccugagcaccgccagcagcuggagcuacaucguggagaccagcagcagcgacaacggcaccugcuaccccggcgacuucaucgacuacgaggagcugagagagcagcugagcagcgugagcagcuucgagagauucgagaucuuccccaagaccagcagcuggcccaaccacgacagcaacaagggcgugaccgccgccugcccccacgccggcgccaagggcuucuacaagaaccugaucuggcuggugaagaagggcaacagcuaccccaagcugagcaagagcuacaucaacgacaagggcaaggaggugcuggugcuguggggcauccaccaccccagcaccaccgccgaccagcagagccuguaccagaacgccgacgccuacguguucgugggcaccagcagauacagcaagaaguucaagcccgagaucgccaccagacccaaggugagagacagagagggcagaaugaacuacuacuggacccugguggagcccggcgacaagaucaccuucgaggccaccggcaaccugguggugcccagauacgccuucgccauggagagagacgccggcagcggcaucaucaucagcgacacccccgugcacgacugcaacaccaccugccagacccccaagggcgccaucaacaccagccugcccuuccagaacauccaccccaucaccaucggcaagugccccaaguacgugaagagcaccaagcugagacuggccaccggccugagaaacgugcccagcauccagagcagaggccuguucggcgccaucgccggcuucaucgagggcggcuggaccggcaugcuggacggcugguacggcuaccaccaccagaacgagcagggcagcggcuacgccgccgaccugaagagcacccagaacgccaucgacaagaucaccaacaaggugaacagcgugaucgagaagaugaacacccaguucaccgccgugggcaaggaguucaaccaccuggagaagagaaucgagaaccugaacaagaagguggacgacggcuuccuggacaucuggaccuacaacgccgagcugcuggugcugcuggagaacgagagaacccuggacuaccacgacagcaacgugaagaaccuguacgagaaggugagaaaccagcugaagaacaacgccaaggagaucggcaacggcugcuucgaguucuaccacaagugcgacaacaccugcauggagagcgugaagaacggcaccuacgacuaccccaaguacagcgaggaggccaagcugaacagagaggagaucgacggcgugaagcuggagagcaccagaaucuaccagauccuggccaucuacagcaccgccgccagcagccuggugcugguggugagccugggcgccaucagcuucuggaugugcagcaacggcagccugcagugcagaaucugcaucuga

SEQ ID NO: 170519 - RNA, 1701 nt, Artificial Sequence
  derived and/or modified CDS sequence (opt4) from hemagglutinin__InfluenzaA__AGU92975
augaaggccauccugguggugcugcuguacaccuucgccaccgccaacgccgacacccugugcaucggcuaccacgccaacaacagcaccgacaccguggacaccgugcuggagaagaacgugaccgugacccacagcgugaaccugcuggaggacaagcacaacggcaagcugugcaagcugagaggcguggccccccugcaccugggcaagugcaacaucgccggcuggauccugggcaaccccgagugcgagacccugagcaccgccagcagcuggagcuacaucguggagaccagcagcagcgacaacggcaccugcuaccccggcgacuucaucgacuacgaggagcugagagagcagcugagcagcgugagcagcuucgagagauucgagaucuuccccaagaccagcagcuggcccaaccacgacagcaacaagggcgugaccgccgccugcccccacgccggcgccaagggcuucuacaagaaccugaucuggcuggugaagaaggagaacagcuaccccaagcugagcaagagcuacaucaacgacaagggcaaggaggugcuggugcuguggggcauccaccaccccagcaccaccgccgaccagcagagccuguaccagaacgccgacaccuacguguucgugggcaccagcagauacagcaagaaguucaagcccgagaucgccaccagacccaaggugagagacagagagggcagaaugaacuacuacuggacccugguggagcccggcgacaagaucaccuucgaggccaccggcaaccugguggugcccagauacgccuucgccauggagagagacgccggcagcggcaucaucaucagcgacacccccgugcacgacugcaacaccaccugccagacccccaagggcgccaucaacaccagccugcccuuccagaacauccaccccaucaccaucggcaagugccccaaguacgugaagagcaccaagcugagacuggccaccggccugagaaacgugcccagcauccagagcagaggccuguucggcgccaucgccggcuucaucgagggcggcuggaccggcaugguggacggcugguacggcuaccaccaccagaacgagcagggcagcggcuacgccgccgaccugaagagcacccagaacgccaucgacaagaucaccaacaaggugaacagcgugaucgagaagaugaacacccaguucaccgccgugggcaaggaguucaaccaccuggagaagagaaucgagaaccugaacaagaagguggacgacggcuuccuggacaucuggaccuacaacgccgagcugcuggugcugcuggagaacgagagaacccuggacuaccacgacagcaacgugaagaaccuguacgagaaggugagaaaccagcugaagaacaacgccaaggagaucggcaacggcugcuucgaguucuaccacaagugcgacaacaccugcauggagagcgugaagaacggcaccuacgacuaccccaaguacagcgaggaggccaagcugaacagagaggagaucgacggcgugaagcuggagagcaccagaaucuaccagauccuggccaucuacagcaccgccgccagcagccuggugcugguggugagccugggcgccaucagcuucuggaugugcagcaacggcagccugcagugcagaaucugcaucuga

SEQ ID NO: 170520 - RNA, 1701 nt, Artificial Sequence; identical to SEQ ID NO: 170510
  derived and/or modified CDS sequence (opt4) from hemagglutinin__InfluenzaA__AGU92986

SEQ ID NO: 170521 - RNA, 1701 nt, Artificial Sequence
  derived and/or modified CDS sequence (opt4) from hemagglutinin__InfluenzaA__AGU92997
augaaggccauccugguggugcugcuguacaccuucgccaccgccaacgccgacacccugugcaucggcuaccacgccaacaacagcaccgacaccguggacaccgugcuggagaagaacgugaccgugacccacagcgugaaccugcuggaggacaagcacaacggcaagcugugcaagcugagaggcguggccccccugcaccugggcaagugcaacaucgccggcuggauccugggcaaccccgagugcgagagccugagcaccgccagcagcuggagcuacaucguggagaccagcagcagcgacaacggcaccugcuaccccggcgacuucaucgacuacgaggagcugagagagcagcugagcagcgugagcagcuucgagagauucgagaucuuccccaagaccagcagcuggcccaaccacgacagcaacaagggcgugaccgccgccugcccccacgccggcgccaagagcuucuacaagaaccugaucuggcuggugaagaagggcaacagcuaccccaagcugagcaagagcuacaucaacgacaagggcaaggaggugcuggugcuguggggcauccaccaccccagcaccagcgccgaccagcagagccuguaccagaacgccgacgccuacguguucgugggcagcagcagauacagcaagauguucaagcccgagaucgccaucagacccaaggugagagacagagagggcagaaugaacuacuacuggacccugguggagcccggcgacaagaucaccuucgaggccaccggcaaccugguggugcccagauacgccuucgccauggagagaaacgccggcagcggcaucaucaucagcgacacccccgugcacgacugcaacaccaccugccagacccccaagggcgccaucaacaccagccugcccuuccagaacauccaccccaucaccaucggcaagugccccaaguacgugaagagcaccaagcugagacuggccaccggccugagaaacgugcccagcauccagagcagaggccuguucggcgccaucgccggcuucaucgagggcggcuggaccggcaugguggacggcugguacggcuaccaccaccagaacgagcagggcagcggcuacgccgccgaccugaagagcacccagaacgccaucgacgagaucaccaacaaggugaacagcgugaucgagaagaugaacacccaguucaccgccgugggcaaggaguucaaccaccuggagaagagaaucgagaaccugaacaagaagguggacgacggcuuccuggacaucuggaccuacaacgccgagcugcuggugcugcuggagaacgagagaacccuggacuaccacgacagcaacgugaagaaccuguacgagaaggugagaagccagcugaagaacaacgccaaggagaucggcaacggcugcuucgaguucuaccacaagugcgacaacaccugcauggagagcgugaagaacggcaccuacgacuaccccaaguacagcgaggaggccaagcugaacagagaggagaucgacggcgugaagcuggagagcaccagaaucuaccagauccuggccaucuacagcaccguggccagcagccuggugcugguggugagccugggcgccaucagcuucuggaugugcagcaacggcagccugcagugcagaaucugcaucuga

SEQ ID NO: 170522 - RNA, 1701 nt, Artificial Sequence; identical to SEQ ID NO: 170512
  derived and/or modified CDS sequence (opt4) from hemagglutinin__InfluenzaA__AGU93008

SEQ ID NO: 170523 - RNA, 1698 nt, Artificial Sequence; identical to SEQ ID NO: 166614
  derived and/or modified CDS sequence (opt4) from hemagglutinin__InfluenzaA__AGU93019

SEQ ID NO: 170524 - RNA, 1701 nt, Artificial Sequence; identical to SEQ ID NO: 167110
  derived and/or modified CDS sequence (opt4) from hemagglutinin__InfluenzaA__AGU93031

SEQ ID NO: 170525 - RNA, 1701 nt, Artificial Sequence
  derived and/or modified CDS sequence (opt4) from hemagglutinin__InfluenzaA__AGU93042
augaaggccauccugguggugcugcuguacaccuucgccaccgccaacgccgacacccugugcaucggcuaccacgccaacaacagcaccgacaccguggacaccgugcuggagaagaacgugaccgugacccacagcgugaaccugcuggaggacaagcacaacggcaagcugugcaagcugagaggcguggccccccugcaccugggcaagugcaacaucgccggcuggauccugggcaaccccgagugcgagacccugagcaccgccaacagcuggagcuacaucguggagaccagcagcagcgacaacggcaccugcuaccccggcgacuucaucgacuacgaggagcugagagagcagcugagcagcgugagcagcuucgagagauucgagaucuuccccaagaccagcagcuggcccaaccacgacagcaacaagggcgugaccgccgccugcccccacgccggcgccaagggcuucuacaagaaccugaucuggcuggugaagaagggcaacagcuaccccaagcugagcaagagcuacaucaacgacaagggcaaggaggugcuggugcuguggggcauccaccaccccagcaccaccgccgaccagcagagccuguaccagaacgccgacaccuacguguucgugggcaccagcagauacagcaagaaguucaagcccgagaucgccaucagacccaaggugagagaccaggagggcagaaugaacuacuacuggacccugguggagcccggcgacaagaucaccuucgaggccaccggcaaccugguggugcccagauacgccuucgccauggagagagacgccggcagcggcaucaucaucagcgacacccccgugcacgacugcaacaccaccugccagacccccaagggcgccaucaacaccagccugcccuuccagaacauccaccccaucaccaucggcaagugccccaaguacgugaagagcaccaagcugagacuggccaccggccugagaaacgugcccagcauccagagcagaggccuguucggcgccaucgccggcuucaucgagggcggcuggaccggcaugguggacggcugguacggcuaccaccaccagaacgagcagggcagcggcuacgccgccgaccugaagagcacccagaacgccaucgacaagaucaccaacaaggugaacagcgugaucgagaagaugaacauccaguucaccgccgugggcaaggaguucaaccaccuggagaagagaaucgagaaccugaacaagaagguggacgacggcuuccuggacaucuggaccuacaacgccgagcugcuggugcugcuggagaacgagagaacccuggacuaccacgacagcaacgugaagaaccuguacgagaaggugagaaaccagcugaagaacaacgccaaggagaucggcaacggcugcuucgaguucuaccacaagugcgacaacaccugcauggagagcgugaagaacggcaccuacgacuaccccaaguacagcgaggaggccaagcugaacagagaggagaucgacggcgugaagcuggagagcaccagaaucuaccagauccuggccaucuacagcaccgccgccagcagccuggugcugguggugagccugggcgccaucagcuucuggaugugcagcaacggcagccugcagugcagaaucugcaucuga

SEQ ID NO: 170526 - RNA, 1701 nt, Artificial Sequence
  derived and/or modified CDS sequence (opt4) from hemagglutinin__InfluenzaA__AGU93053
augaaggccauccugguggugcugcuguacaccuucgccaccgccaacgccgacacccugugcaucggcuaccacgccaacaacagcaccgacaccguggacaccgugcuggagaagaacgugaccgugacccacagcgugaaccugcuggaggacaagcacaacggcaagcugugcaagcugagaggcguggccccccugcaccugggcaagugcaacaucgccggcuggauccugggcaaccccgagugcgagacccugagcaccgccagcagcuggagcuacaucguggagaccagcagcagcgacaacggcaccugcuaccccggcgacuucaucgacuacgaggagcugagagagcagcugagcagcgugagcagcuucgagagauucgagaucuuccccaagaccagcagcuggcccaaccacgacagcaacaagggcgugaccgccgccugcccccacgccggcgccaagggcuucuacaagaaccugaucuggcuggugaagaagggcaacagcuaccccaagcugagcaagagcuacaucaacgacaagggcaaggaggugcuggugcuguggggcauccaccaccccagcaccaccgccgaccagcagagccuguaccagaacgccgacaccuacguguucgugggcaccagcagauacagcaagaaguucaagcccgagaucgccaccagacccaaggugagagaccaggagggcagaaugaacuacuacuggacccugguggagcccggcgacaagaucaccuucgaggccaccggcaaccugguggugcccagauacgccuucgccauggagagagacgccggcagcggcaucaucaucagcgacacccccgugcacgacugcaacaccaccugccagacccccaagggcgccaucaacaccagccugcccuuccagaacauccaccccaucaccaucggcaagugccccaaguacgugaagagcaccaagcugagacuggccaccggccugagaaacgugcccagcauccagagcagaggccuguucggcgccaucgccggcuucaucgagggcggcuggaccggcaugguggacggcugguacggcuaccaccaccagaacgagcagggcagcggcuacgccgccgaccugaagagcacccagaacgccaucgacaagaucaccaacaaggugaacagcgugaucgagaagaugaacacccaguucaccgccgugggcaaggaguucaaccaccuggagaagagaaucgagaaccugaacaagaagguggacgacggcuuccuggacaucuggaccuacaacgccgagcugcuggugcugcuggagaacgagagaacccuggacuaccacgacagcaacgugaagaaccuguacgagaaggugagaaaccagcugaagaacaacgccaaggagaucggcaacggcugcuucgaguucuaccacaagugcgacaacaccugcauggagagcgugaagaacggcaccuacgacuaccccaaguacagcgaggaggccaagcugaacagagaggagaucgacggcgugaagcuggagagcaccagaaucuaccagauccuggccaucuacagcaccgccgccagcagccuggugcugguggugagccugggcgccaucagcuucuggaugugcagcaacggcagccugcagugcagaaucugcaucuga

SEQ ID NO: 170527 - RNA, 1701 nt, Artificial Sequence
  derived and/or modified CDS sequence (opt4) from hemagglutinin__InfluenzaA__AGV99014
augaagaccaucaucgcccugagcuacauccugugccugguguucgcccagaagcugcccggcaacgacaacagcaccgccacccugugccugggccaccacgccgugcccaacggcaccaucgugaagaccaucaccaacgacagaaucgaggugaccaacgccaccgagcuggugcagaacagcagcaucggcgagaucugcgacagcccccaccagauccuggacggcgagaacugcacccugaucgacgcccugcugggcgacccccagugcgacggcuuccagaacaagaagugggaccuguucguggagagaagcaaggccuacagcaacugcuaccccuacgacgugcccgacuacgccagccugagaagccugguggccagcagcggcacccuggaguucaacaacgagagcuucaacuggaccggcgugacccagaacggcaccagcagcgccugcaucagaagaagcaacaacagcuucuucagcagacugaacuggcugacccacagcaacuucaaguaccccgcccugaacgugaccaugcccaacaacgagcaguucgacaagcuguacaucuggggcgugcaccaccccggcaccgacaaggaccagaucuuccuguacgcccagagcagcggcagaaucaccgugagcaccaagagaagccagcaggccgugauccccaacaucggcagcagacccagaaucagaaacauccccagcagaaucagcaucuacuggaccaucgugaagcccggcgacauccugcugaucaacagcaccggcaaccugaucgcccccagaggcuacuucaagaucagaagcggcaagagcagcaucaugagaagcgacgcccccaucggcaagugcaagagcgagugcaucacccccaacggcagcauccccaacgacaagcccuuccagaacgugaacagaaucaccuacggcgccugccccagauacgugaagcagagcacccugaagcuggccaccggcaugagaaacgugcccgagaagcagaccagaggcaucuucggcgccaucgccggcuucaucgagaacggcugggagggcaugauggacggcugguacggcuucagacaccagaacagcgagggcagaggccaggccgccgaccugaagagcacccaggccgccaucgaccagaucaacggcaagcugaacagacugaucggcaagaccaacgagaaguuccaccagaucgagaaggaguucagcgagguggagggcagaauccaggaccuggagaaguacguggaggacaccaagaucgaccuguggagcuacaacgccgagcugcugguggcccuggagaaccagcacaccaucgaccugaccgacagcgagaugaacaagcuguucgagaagaccaagaagcagcugagagagaacgccgaggacaugggcaacggcugcuucaagaucuaccacaagugcgacaacgccugcaucggcagcaucagaaacggcaccuacgaccacgacguguacagagacgaggcccugaacaacagauuccagaucaagggcguggagcugaagagcggcuacaaggacuggauccuguggaucagcuucgccaucagcugcuuccugcugugcguggcccugcugggcuucaucaugugggccugccagaagggcaacaucagaugcaacaucugcaucuga

SEQ ID NO: 170528 - RNA, 1701 nt, Artificial Sequence; identical to SEQ ID NO: 170054
  derived and/or modified CDS sequence (opt4) from hemagglutinin__InfluenzaA__AGV99037

SEQ ID NO: 170529 - RNA, 1701 nt, Artificial Sequence
  derived and/or modified CDS sequence (opt4) from hemagglutinin__InfluenzaA__AGV99049
augaagaccaucaucgcccugagcuacauccugugccugguguucgcccagaagcugcccggcaacgacaacagcaccgccacccugugccugggccaccacgccgugcccaacggcaccguggugaagaccaucaccaacgacagaaucgaggugaccaacgccaccgagcuggugcagaacagcagcaucggcgagaucugcgacagcccccaccagauccuggacggcgagaacugcacccugaucgacgcccugcugggcgacccccagugcgacggcuuccagaacaagaagugggaccuguucguggagagaagcaaggccuacagcaacugcuaccccuacgacgugcccgacuacgccagccugagaagccugguggccagcagcggcacccuggaguucaacaacgagagcuucaacuggaccggcgugacccagaacggcaccagcagcgccugcaucagaagaagcaacaacagcuucuucagcagacugaacuggcugacccaccugaacuucaaguaccccgcccugaacgugaccaugcccaacaacgagcaguucgacaagcuguacaucuggggcgugcaccaccccggcaccgacaaggaccagaucuuccuguacgcccagagcagcggcagaaucaccgugagcaccaagagaagccagcaggccgugauccccaacaucggcagcagacccagaaucagaaacauccccagcagaaucagcaucuacuggaccaucgugaagcccggcgacauccugcugaucaacagcaccggcaaccugaucgcccccagaggcuacuucaagaucagaagcggcaagagcagcaucaugagaagcgacgcccccaucggcaagugcaagagcgagugcaucacccccaacggcagcauccccaacgacaagcccuuccagaacgugaacagaaucaccuacggcgccugccccagauacgugaagcagagcacccugaagcuggccaccggcaugagaaacgugcccgagaagcagaccagaggcaucuucggcgccaucgccggcuucaucgagaacggcugggagggcaugguggacggcugguacggcuucagacaccagaacagcgagggcagaggccaggccgccgaccugaagagcacccaggccgccaucgaccagaucaacggcaagcugaacagacugaucggcaagaccaacggcaaguuccaccagaucgagaaggaguucagcgagguggagggcagaauccaggaccuggagaaguacguggaggacaccaagaucgaccuguggagcuacaacgccgagcugcugguggcccuggagaaccagcacaccaucgaccugaccgacagcgagaugaacaagcuguucgagaagaccaagaagcagcugagagagaacgccgaggacaugggcaacggcugcuucaagaucuaccacaagugcgacaacgccugcaucggcagcaucagaaacggcaccuacgaccacgacguguacagagacgaggcccugaacaacagauuccagaucaagggcguggagcugaagagcggcuacaaggacuggauccuguggaucagcuucgccaucagcugcuuccugcugugcguggugcugcugggcuucaucaugugggccugccagaagggcaacaucagaugcaacaucugcaucuga

SEQ ID NO: 170530 - RNA, 1701 nt, Artificial Sequence
  derived and/or modified CDS sequence (opt4) from hemagglutinin__InfluenzaA__AGV99073
augaagaccaucaucgcccugagcuacauccugugccugguguucgcccagaagauccccggcaacgacaacagcaccgccacccugugccugggccaccacgccgugcccaacggcaccaucgugaagaccaucaccaacgacagaaucgaggugaccaacgccaccgagcuggugcagaacagcagcaucggcgagaucugcgacagcccccaccagauccuggacggcgagaacugcacccugaucgacgcccugcugggcgacccccagugcgacggcuuccagaacaagaagugggaccuguucguggagagaagcaaggccuacagcaacugcuaccccuacgacgugcccgacuacgccagccugagaagccugguggccagcagcggcacccuggaguucaacaacgagagcuucaacuggaccggcgugacccagaacggcaccagcagcgccugcaucagaggcagcaacagcagcuucuucagcagacugaacuggcugacccaccugaacuucaaguaccccgcccugaacgugaccaugcccaacaacgagcaguucgacaagcuguacaucuggggcgugcaccaccccggcaccgacaaggaccagaucuuccuguacgcccagagcagcggcagaaucaccgugagcaccaagagaagccagcaggccgugauccccaacaucggcagcagacccagaaucagaaacauccccagcagaaucagcaucuacuggaccaucgugaagcccggcgacauccugcugaucaacagcaccggcaaccugaucgcccccagaggcuacuucaagaucagaagcggcaagagcagcaucaugagaagcgacgcccccaucggcaagugcaagagcgagugcaucacccccaacggcagcauccccaacgacaagcccuuccagaacgugaacagaaucaccuacggcgccugccccagauacgugaagcagagcacccugaagcuggccaccggcaugagaaacgugcccgagaagcagaccagaggcaucuucggcgccaucgccggcuucaucgagaacggcugggagggcaugguggacggcugguacggcuucagacaccagaacagcgagggcagaggccaggccgccgaccugaagagcacccaggccgccaucgaccagaucaacggcaagcugaacagacugaucggcaagaccaacgagaaguuccaccagaucgagaaggaguucagcgagguggagggcagaauccaggaccuggagaaguacguggaggacaccaagaucgaccuguggagcuacaacgccgagcugcugguggcccuggagaaccagcacaccaucgaccugaccgacagcgagaugaacaagcuguucgagaagaccaagaagcagcugagagagaacgccgaggacaugggcaacggcugcuucaagaucuaccacaagugcgacaacgccugcaucggcagcaucagaaacggcaccuacgaccacgacguguacagagacgaggcccugaacaacagauuccagaucaagggcguggagcugaagcccggcuacaaggacuggauccuguggaucagcuucgccaucagcugcuuccugcugugcguggcccugcugggcuucaucaugugggccugccagaagggcaacaucagaugcaacaucugcaucuga

SEQ ID NO: 170531 - RNA, 1701 nt, Artificial Sequence; identical to SEQ ID NO: 169918
  derived and/or modified CDS sequence (opt4) from hemagglutinin__InfluenzaA__AGV99085

SEQ ID NO: 170532 - RNA, 1701 nt, Artificial Sequence
  derived and/or modified CDS sequence (opt4) from hemagglutinin__InfluenzaA__AGV99097
augaagaccaucaucgcccugagcuacauccugugccugguguucgcccagaagcugcccggcaacgacaacagcaccgccacccugugccugggccaccacgccgugcccaacggcaccaucgugaagaccaucaccaacgacagaaucgaggugaccaacgccaccgagcuggugcagaacagcagcaucggcgagaucugcgacagcccccaccagauccuggacggcgagaacugcacccugaucgacgcccugcugggcgacccccagugcgacggcuuccagaacaagaagugggaccuguucguggagagaagcaaggccuacagcaacugcuaccccuacgacgugcccgacuacgccagccugagaagccugguggccagcagcggcacccuggaguucaacaacgagagcuucaacuggaccggcgugacccagaacggcaccagcagcgccugcaucagaagaagcaacagcagcuucuucagcagacugaacuggcugacccaccugaacuucaaguaccccgcccugaacgugaccaugcccaacaacgagcaguucgacaagcuguacaucuggggcgugcaccaccccggcaccgacaaggaccagaucuuccuguacgcccagagcagcggcagaaucaccgugagcaccaagagaagccagcaggccgugauccccaacaucggcagcagacccagaaucagaaacauccccagcagaaucagcaucuacuggaccaucgugaagcccggcgacauccugcugaucaacagcaccggcaaccugaucgcccccagaggcuacuucaagaucagaagcggcaagagcagcaucaugagaagcgacgcccccaucggcaagugcaagagcgagugcaucacccccaacggcagcauccccaacgacaagcccuuccagaacgugaacagaaucaccuacggcgccugccccagauacgugaagcagagcacccugaagcuggccaccggcaugagaaacgugcccgagaagcagaccagaggcaucuucggcgccaucgccggcuucaucgagaacggcugggagggcaugguggacggcugguacggcuucagacaccagaacagcgagggcagaggccaggccgccgaccugaagagcacccaggccgccaucgaccagaucaacggcaagcugaacagacugaucggcaagaccaacgagaaguuccaccagaucgagaaggaguucagcgagguggagggcagaauccaggaccuggagaaguacguggaggacaccaagaucgaccuguggagcuacaacgccgagauccugguggcccuggagaaccagcacaccaucgaccugaccgacagcgagaugaacaagcuguucgagaagaccaagaagcagcugagagagaacgccgaggacaugggcaacggcugcuucaagaucuaccacaagugcgacaacgccugcaucggcagcaucagaaacggcaccuacgaccacgacguguacagagacgaggcccugaacaacagauuccagaucaagggcguggagcugaagagcggcuacaaggacuggauccuguggaucagcuucgccaucagcugcuuccugcugugcguggcccugcugggcuucaucaugugggccugccagaagggcaacaucagaugcaacaucugcaucuga

SEQ ID NO: 170533 - RNA, 1701 nt, Artificial Sequence
  derived and/or modified CDS sequence (opt4) from hemagglutinin__InfluenzaA__AGV99121
augaagaccaucaucgcccugagcuacauccugugccugguguucgcccagaagcugcccggcaacgacaacagcaccgccacccugugccugggccaccacgccgugcccaacggcaccaucgugaagaccaucaccaacgacagaaucgaggugaccaacgccaccgagcuggugcagaacagcagcaucggcgagaucugcgacagcccccaccagauccuggacggcgagaacugcacccugaucgacgcccugcugggcgacccccagugcgacgacuuccagaacaagaagugggaccuguucguggagagaagcaaggccuacagcaacugcuaccccuacgacgugcccgacuacgccagccugagaagccugguggccagcagcggcacccuggaguucaacaacgagagcuucaacugggccggcgugacccagaacggcaccagcagcgccugcaucagaggcagcaacagcagcuucuucagcagacugaacuggcugacccaccugaacuucaaguaccccgcccugaacgugaccaugcccaacaacgagcaguucgacaagcuguacaucuggggcgugcaccaccccggcaccgacaaggaccagaucuuccuguacgcccagagcagcggcagaaucaccgugagcaccaagagaagccagcaggccgugauccccaacaucggcagcagacccagaaucagaaacauccccagcagaaucagcaucuacuggaccaucgugaagcccggcgacauccugcugaucaacagcaccggcaaccugaucgcccccagaggcuacuucaagaucagaagcggcaagagcagcaucaugagaagcgacgcccccaucggcaagugcaagagcgagugcaucacccccaacggcagcauccccaacgacaagcccuuccagaacgugaacagaaucaccuacggcgccugccccagauacgugaagcagagcacccugaagcuggccaccggcaugagaaacgugcccgagaagcagaccagaggcaucuucggcgccaucgccggcuucaucgagaacggcugggagggcaugguggacggcugguacggcuucagacaccagaacagcgagggcagaggccaggccgccgaccugaagagcacccaggccgccaucgaccagaucaacggcaagcugaacagacugaucggcaagaccaacgagaaguuccaccagaucgagaaggaguucagcgagguggagggcagaauccaggaccuggagaaguacguggaggacaccaagaucgaccuguggagcuacaacgccgagcugcugguggcccuggagaaccagcacaccaucgaccugaccgacagcgagaugaacaagcuguucgagaagaccaagaagcagcugagagagaacgccgaggacaugggcaacggcugcuucaagaucuaccacaagugcgacaacgccugcaucggcagcaucagaaacggcaccuacgaccacgacguguacagagacgaggcccugaacaacagauuccagaucaagggcguggagcugaagagcggcuacaaggacuggauccuguggaucagcuucgccaucagcugcuuccugcugugcguggcccugcugggcuucaucaugugggccugccagaagggcaacaucagaugcaacaucugcaucuga

SEQ ID NO: 170534 - RNA, 1701 nt, Artificial Sequence; identical to SEQ ID NO: 170533
  derived and/or modified CDS sequence (opt4) from hemagglutinin__InfluenzaA__AGV99133

SEQ ID NO: 170535 - RNA, 1701 nt, Artificial Sequence; identical to SEQ ID NO: 170527
  derived and/or modified CDS sequence (opt4) from hemagglutinin__InfluenzaA__AGV99145

SEQ ID NO: 170536 - RNA, 1701 nt, Artificial Sequence
  derived and/or modified CDS sequence (opt4) from hemagglutinin__InfluenzaA__AGV99157
augaagaccaucaucgcccugagcuacauccugugccugguguucgcccagaagcugcccggcaacgacaacagcaccgccacccugugccugggccaccacgccgugcccaacggcaccaucgugaagaccaucaccaacgacagaaucgaggugaccaacgccaccgagcuggugcagaacagcagcaucggcgagaucugcgacagcccccaccagauccuggacggcgagaacugcacccugaucgacgcccugcugggcgacccccagugcgacggcuuccagaacaagaagugggaccuguucaucgagagaagcaaggccuacagcaacugcuaccccuacgacgugcccgacuacgccagccugagaagccugguggccagcagcggcacccuggaguucaacaacgagagcuucaacuggaccggcgugacccagaacggcaccagcagcgccugcaucagaagaagcaacaacagcuucuucagcagacugaacuggcugacccacagcaacuucaaguaccccgcccugaacgugaccaugcccaacaacgagcaguucgacaagcuguacaucuggggcgugcaccaccccggcaccgacaaggaccagaucuuccuguacgcccagagcagcggcagaaucaccgugagcaccaagagaagccagcaggccgugauccccaacaucggcagcagacccagaaucagaaacauccccagcagaaucagcaucuacuggaccaucgugaagcccggcgacauccugcugaucaacagcaccggcaaccugaucgcccccagaggcuacuucaagaucagaagcggcaagagcagcaucaugagaagcgacacccccaucggcaagugcaagagcgagugcaucacccccaacggcagcauccccaacgacaagcccuuccagaacgugaacagaaucaccuacggcgccugccccagauacgugaagcagagcacccugaagcuggccaccggcaugagaaacgugcccgagaagcagaccagaggcaucuucggcgccaucgccggcuucaucgagaacggcugggagggcaugauggacggcugguacggcuucagacaccagaacagcgagggcagaggccaggccgccgaccugaagagcacccaggccgccaucgaccagaucaacggcaagcugaacagacugaucggcaagaccaacgagaaguuccaccagaucgagaaggaguucagcgagguggagggcagaauccaggaccuggagaaguacguggaggacaccaagaucgaccuguggagcuacaacgccgagcugcugguggcccuggagaaccagcacaccaucgaccugaccgacagcgagaugaacaagcuguucgagaagaccaagaagcagcugagagagaacgccgaggacaugggcaacggcugcuucaagaucuaccacaagugcgacaacgccugcaucggcagcaucagaaacggcaccuacgaccacgacguguacagagacgaggcccugaacaacagauuccagaucaagggcguggagcugaagagcggcuacaaggacuggauccuguggaucagcuucgccaucagcugcuuccugcugugcguggcccugcugggcuucaucaugugggccugccagaagggcaacaucagaugcaacaucugcaucuga

SEQ ID NO: 170537 - RNA, 1701 nt, Artificial Sequence; identical to SEQ ID NO: 170054
  derived and/or modified CDS sequence (opt4) from hemagglutinin__InfluenzaA__AGV99169

SEQ ID NO: 170538 - RNA, 1701 nt, Artificial Sequence; identical to SEQ ID NO: 170527
  derived and/or modified CDS sequence (opt4) from hemagglutinin__InfluenzaA__AGV99181

SEQ ID NO: 170539 - RNA, 1701 nt, Artificial Sequence
  derived and/or modified CDS sequence (opt4) from hemagglutinin__InfluenzaA__AGV99193
augaagaccaucaucgcccugagcuacauccugugccugguguucgcccagaagcugcccggcaacgacaacagcaccgccacccugugccugggccaccacgccgugcccaacggcaccaucgugaagaccaucaccaacgacagaaucgaggugaccaacgccaccgagcuggugcagaacagcagcaucggcgagaucugcgacagcccccaccagauccuggacggcgagaacugcacccugaucgacgcccugcugggcgacccccagugcgacggcuuccagaacaagaagugggaccuguucguggagagaagcaaggccuacagcaacugcuaccccuacgacgugcccgacuacgccagccugagaagccugguggccagcagcggcacccuggaguucaacaacgagagcuucaacuggaccggcgugacccagaacggcaccagcagcgccugcaucagaagaagcaacaacagcuucuucagcagacugaacuggcugacccacagcaacuucaaguaccccgcccugaacgugaccaugcccaacaacgagcaguucgacaagcuguacaucuggggcgugcaccaccccggcaccgacaaggaccagaucuuccuguacgcccagagcagcggcagaaucaccgugagcaccaagagaagccagcaggccgugauccccaacaucggcagcagacccagaaucagaaacauccccagcagaaucagcaucuacuggaccaucgugaagcccggcgacauccugcugaucaacagcaccggcaaccugaucgcccccagaggcuacuucaagaucagaagcggcaagagcagcaucaugagaagcgacacccccaucggcaagugcaagagcgagugcaucacccccaacggcagcauccccaacgacaagcccuuccagaacgugaacagaaucaccuacggcgccugccccagauacgugaagcagagcacccugaagcuggccaccggcaugagaaacgugcccgagaagcagaccagaggcaucuucggcgccaucgccggcuucaucgagaacggcugggagggcaugauggacggcugguacggcuucagacaccagaacagcgagggcagaggccaggccgccgaccugaagagcacccaggccgccaucgaccagaucaacggcaagcugaacagacugaucggcaagaccaacgagaaguuccaccagaucgagaaggaguucagcgagguggagggcagaauccaggaccuggagaaguacguggaggacaccaagaucgaccuguggagcuacaacgccgagcugcugguggcccuggagaaccagcacaccaucgaccugaccgacagcgagaugaacaagcuguucgagaagaccaagaagcagcugagagagaacgccgaggacaugggcaacggcugcuucaagaucuaccacaagugcgacaacgccugcaucggcagcaucagaaacggcaccuacgaccacgacguguacagagacgaggcccugaacaacagauuccagaucaagggcguggagcugaagagcggcuacaaggacuggauccuguggaucagcuucgccaucagcugcuuccugcugugcguggcccugcugggcuucaucaugugggccugccagaagggcaacaucagaugcaacaucugcaucuga

SEQ ID NO: 170540 - RNA, 1701 nt, Artificial Sequence; identical to SEQ ID NO: 169928
  derived and/or modified CDS sequence (opt4) from hemagglutinin__InfluenzaA__AGV99956

SEQ ID NO: 170541 - RNA, 1701 nt, Artificial Sequence
  derived and/or modified CDS sequence (opt4) from hemagglutinin__InfluenzaA__AGV99986
augaagaccaucaucgcccugagcuacauccugugccugguguucgcccagaagcugcccggcaacgacaacagcaccgccacccugugccugggccaccacgccgugcccaacggcaccaucgugaagaccaucaccaacgacagaaucgaggugaccaacgccaccgagcuggugcagaacagcagcaucggcgagaucugcgacagcccccaccagauccuggacggcgagaacugcacccugaucgacgcccugcugggcgacccccagugcgacggcuuccagaacaagaagugggaccuguucguggagagaagcaaggccuacagcaacugcuaccccuacgacgugcccgacuacgccagccugagaagccugaucgccagcagcggcacccuggaguucaacaacgagagcuucaacuggaccggcgugacccagaacggcaccagcagcgccugcaucagaagaagcaacaacagcuucuucagcagacugaacuggcugacccacagcaacuucaaguaccccgcccugaacgugaccaugcccaacaacgagcaguucgacaagcuguacaucuggggcgugcaccaccccggcaccgacaaggaccagaucuuccuguacgcccagagcagcggcagaaucaccgugagcaccaagagaagccagcaggccgugauccccaacaucggcagcagacccagaaucagaaacauccccagcagaaucagcaucuacuggaccaucgugaagcccggcgacauccugcugaucaacagcaccggcaaccugaucgcccccagaggcuacuucaagaucagaagcggcaagagcagcaucaugagaagcgacgcccccaucggcaagugcaagagcgagugcaucacccccaacggcagcauccccaacgacaagcccuuccagaacgugaacagaaucaccuacggcgccugccccagauacgugaagcagagcacccugaagcuggccaccggcaugagaaacgugcccgagaagcagaccagaggcaucuucggcgccaucgccggcuucaucgagaacggcugggagggcaugauggacggcugguacggcuucagacaccagaacagcgagggcagaggccaggccgccgaccugaagagcacccaggccgccaucgaccagaucaacggcaagcugaacagacugaucggcaagaccaacgagaaguuccaccagaucgagaaggaguucagcgagguggagggcagaauccaggaccuggagaaguacguggaggacaccaagaucgaccuguggagcuacaacgccgagcugcugguggcccuggagaaccagcacaccaucgaccugaccgacagcgagaugaacaagcuguucgagaagaccaagaagcagcugagagagaacgccgaggacaugggcaacggcugcuucaagaucuaccacaagugcgacaacgccugcaucggcagcaucagaaacggcaccuacgaccacgacguguacagagacgaggcccugaacaacagauuccagaucaagggcguggagcugaagagcggcuacaaggacuggauccuguggaucagcuucgccaucagcugcuuccugcugugcguggcccugcugggcuucaucaugugggccugccagaagggcaacaucagaugcaacaucugcaucuga

SEQ ID NO: 170542 - RNA, 1701 nt, Artificial Sequence
  derived and/or modified CDS sequence (opt4) from hemagglutinin__InfluenzaA__AGW00065
augaagaccaucaucgcccugagcuacauccugugccugguguucgcccagaagcugcccggcaacgacaacagcaccgccacccugugccugggccaccacgccgugcccaacggcaccaucgugaagaccaucaccaacgacagaaucgaggugaccaacgccaccgagcuggugcagaacagcagcaucggcgagaucugcgacagcccccaccagauccuggacggcgagaacugcacccugaucgacgcccugcugggcgacccccagugcgacggcuuccagaacaagaagugggaccuguucguggagagaagcaaggccuacagcaacugcuaccccuacgacgugcccgacuacaccagccugagaagccugguggccagcagcggcacccuggaguucaacaacgagagcuucaacuggaccggcgugacccagaacggcaccagcagcgccugcaucagaagaagcaacagcagcuucuucagcagacugaacuggcugacccaccugaacuucaaguaccccgcccugaacgugaccaugcccaacaacgagcaguucgacaagcuguacaucuggggcgugcaccaccccggcaccgacaaggaccagaucuuccuguacgcccagagcagcggcagaaucaccgugagcaccaagagaagccagcaggccgugauccccaacaucggcagcagacccagaaucagaaacauccccagcagaaucagcaucuacuggaccaucgugaagcccggcgacauccugcugaucaacagcaccggcaaccugaucgcccccagaggcuacuucaagaucagaagcggcaagagcagcaucaugagaagcgacgcccccaucggcaagugcaagagcgagugcaucacccccaacggcagcauccccaacgacaagcccuuccagaacgugaacagaaucaccuacggcgccugccccagauacgugaagcagagcacccugaagcuggccaccggcaugagaaacgugcccgagaagcagaccagaggcaucuucggcgccaucgccggcuucaucgagaacggcugggagggcaugguggacggcugguacggcuucagacaccagaacagcgagggcagaggccaggccgccgaccugaagagcacccaggccgccaucgaccagaucaacggcaagcugaacagacugaucggcaagaccaacgagaaguuccaccagaucgagaaggaguucagcgagguggagggcagaauccaggaccuggagaaguacguggaggacaccaagaucgaccuguggagcuacaacgccgagcugcugguggcccuggagaaccagcacaccaucgaccugaccgacagcgagaugaacaagcuguucgagaagaccaagaagcagcugagagagaacgccgaggacaugggcaacggcugcuucaagaucuaccacaagugcgacaacgccugcaucggcagcaucagaaacggcaccuacgaccacgacguguacagagacgaggcccugaacaacagauuccagaucaagggcguggagcugaagagcggcuacaaggacuggauccuguggaucagcuucgccaucagcugcuuccugcugugcguggcccugcugggcuucaucaugugggccugccagaagggcaacaucagaugcaacaucugcaucuga

SEQ ID NO: 170543 - RNA, 1701 nt, Artificial Sequence; identical to SEQ ID NO: 170054
  derived and/or modified CDS sequence (opt4) from hemagglutinin__InfluenzaA__AGW00077

SEQ ID NO: 170544 - RNA, 1701 nt, Artificial Sequence; identical to SEQ ID NO: 169918
  derived and/or modified CDS sequence (opt4) from hemagglutinin__InfluenzaA__AGW00089

SEQ ID NO: 170545 - RNA, 1701 nt, Artificial Sequence; identical to SEQ ID NO: 170054
  derived and/or modified CDS sequence (opt4) from hemagglutinin__InfluenzaA__AGW00101

SEQ ID NO: 170546 - RNA, 1701 nt, Artificial Sequence
  derived and/or modified CDS sequence (opt4) from hemagglutinin__InfluenzaA__AGW00113
augaagaccaucaucgcccugagcuacauccugugccugguguucgcccagaagcugcccggcaacgacaacagcaccgccacccugugccugggccaccacgccgugcccaacggcaccaucgugaagaccaucaccaacgacagaaucgaggugaccaacgccaccgagcuggugcagaacagcagcaucggcgagaucugcgacagcccccaccagauccuggacggcgagaacugcacccugaucgacgcccugcugggcgacccccagugcgacggcuuccagaacaagaagugggaccuguucguggagagaagcaaggccuacagcaacugcuaccccuacgacgugcccgacuacgccagccugagaagccugguggccagcagcggcacccuggaguucaacaacgagagcuucaacugggccggcgugacccagaacggcaccagcagcgccugcaucagaggcagcaacagcagcuucuucagcagacugaacuggcugacccaccugaacuucaaguaccccgcccugaacgugaccaugcccaacaacgagcaguucgacaagcuguacaucuggggcgugcaccaccccggcaccgacaaggaccagaccuuccuguacgcccagagcagcggcagaaucaccgugagcaccaagagaagccagcaggccgugauccccaacaucggcagcagacccagaaucagaaacauccccagcagaaucagcaucuacuggaccaucgugaagcccggcgacauccugcugaucaacagcaccggcaaccugaucgcccccagaggcuacuucaagaucagaagcggcaagagcagcaucaugagaagcgacgcccccaucggcaagugcaagagcgagugcaucacccccaacggcagcauccccaacgacaagcccuuccagaacgugaacagaaucaccuacggcgccugccccagauacgugaagcagagcacccugaagcuggccaccggcaugagaaacgugcccgagaagcagaccagaggcaucuucggcgccaucgccggcuucaucgagaacggcugggagggcaugguggacggcugguacggcuucagacaccagaacagcgagggcagaggccaggccgccgaccugaagagcacccaggccgccaucgaccagaucaacggcaagcugaacagacugaucggcaagaccaacgagaaguuccaccagaucgagaaggaguucagcgagguggagggcagaauccaggaccuggagaaguacguggaggacaccaagaucgaccuguggagcuacaacgccgagcugcugguggcccuggagaaccagcacaccaucgaccugaccgacagcgagaugaacaagcuguucgagaagaccaagaagcagcugagagagaacgccgaggacaugggcaacggcugcuucaagaucuaccacaagugcgacaacgccugcaucggcagcaucagaaacggcaccuacgaccacgacguguacagagacgaggcccugaacaacagauuccagaucaagggcguggagcugaagagcggcuacaaggacuggauccuguggaucagcuucgccaucagcugcuuccugcugugcguggcccugcugggcuucaucaugugggccugccagaagggcaacaucagaugcaacaucugcaucuga

SEQ ID NO: 170547 - RNA, 1701 nt, Artificial Sequence; identical to SEQ ID NO: 170054
  derived and/or modified CDS sequence (opt4) from hemagglutinin__InfluenzaA__AGW00125

SEQ ID NO: 170548 - RNA, 1701 nt, Artificial Sequence; identical to SEQ ID NO: 170054
  derived and/or modified CDS sequence (opt4) from hemagglutinin__InfluenzaA__AGW00137

SEQ ID NO: 170549 - RNA, 1701 nt, Artificial Sequence; identical to SEQ ID NO: 170054
  derived and/or modified CDS sequence (opt4) from hemagglutinin__InfluenzaA__AGW00149

SEQ ID NO: 170550 - RNA, 1701 nt, Artificial Sequence; identical to SEQ ID NO: 170054
  derived and/or modified CDS sequence (opt4) from hemagglutinin__InfluenzaA__AGW00161

SEQ ID NO: 170551 - RNA, 1701 nt, Artificial Sequence; identical to SEQ ID NO: 170054
  derived and/or modified CDS sequence (opt4) from hemagglutinin__InfluenzaA__AGW00173

SEQ ID NO: 170552 - RNA, 1701 nt, Artificial Sequence
  derived and/or modified CDS sequence (opt4) from hemagglutinin__InfluenzaA__AGW00185
augaagaccaucaucgcccugagcuacauccugugccugguguucgcccagaagcugcccggcaacgacaacagcaccgccacccugugccugggccaccacgccgugcccaacggcaccaucgugaagaccaucaccaacgacagaaucgaggugaccaacgccaccgagcuggugcagaacagcagcaucggcgagaucugcgacagcccccaccagauccuggacggcgagaacugcacccugaucgacgcccugcugggcgacccccagugcgacggcuuccagaacaagaagugggaccuguucaucgagagaagcaaggccuacagcaacugcuaccccuacgacgugcccgacuacgccagccugagaagccugguggccagcagcggcacccuggaguucaacaacgagagcuucaacuggaccggcgugacccagaacggcaccagcagcgccugcaucagaagaagcaacaacagcuucuucagcagacugaacuggcugacccacagcaacuucaaguaccccgcccugaacgugaccaugcccaacaacgagcaguucgacaagcuguacaucuggggcgugcaccaccccggcaccgacaaggaccagaucuuccuguacgcccagagcagcggcagaaucaccgugagcaccaagagaagccagcaggccgugauccccaacaucggcagcagacccagaaucagaaacauccccagcagaaucagcaucuacuggaccaucgugaagcccggcgacauccugcugaucaacagcaccggcaaccugaucgcccccagaggcuacuucaagaucagaagcggcaagagcagcaucaugagaagcgacgcccccaucggcaagugcaagagcgagugcaucacccccaacggcagcauccccaacgacaagcccuuccagaacgugaacagaaucaccuacggcgccugccccagauacgugaagcagagcacccugaagcuggccaccggcaugagaaacgugcccgagaagcagaccagaggcaucuucggcgccaucgccggcuucaucgagaacggcugggagggcaugauggacggcugguacggcuucagacaccagaacagcgagggcagaggccaggccgccgaccugaagagcacccaggccgccaucgaccagaucaacggcaagcugaacagacugaucggcaagaccaacgagaaguuccaccagaucgagaaggaguucagcgagguggagggcagaauccaggaccuggagaaguacguggaggacaccaagaucgaccuguggagcuacaacgccgagcugcugguggcccuggagaaccagcacaccaucgaccugaccgacagcgagaugaacaagcuguucgagaagaccaagaagcagcugagagagaacgccgaggacaugggcaacggcugcuucaagaucuaccacaagugcgacaacgccugcaucggcagcaucagaaacggcaccuacgaccacgacguguacagagacgaggcccugaacaacagauuccagaucaagggcguggagcugaagagcggcuacaaggacuggauccuguggaucagcuucgccaucagcugcuuccugcugugcguggcccugcugggcuucaucaugugggccugccagaagggcaacaucagaugcaacaucugcaucuga

SEQ ID NO: 170553 - RNA, 1701 nt, Artificial Sequence; identical to SEQ ID NO: 170054
  derived and/or modified CDS sequence (opt4) from hemagglutinin__InfluenzaA__AGW00709

SEQ ID NO: 170554 - RNA, 1701 nt, Artificial Sequence; identical to SEQ ID NO: 170054
  derived and/or modified CDS sequence (opt4) from hemagglutinin__InfluenzaA__AGW00721

SEQ ID NO: 170555 - RNA, 1701 nt, Artificial Sequence; identical to SEQ ID NO: 170054
  derived and/or modified CDS sequence (opt4) from hemagglutinin__InfluenzaA__AGW00733

SEQ ID NO: 170556 - RNA, 1701 nt, Artificial Sequence; identical to SEQ ID NO: 170054
  derived and/or modified CDS sequence (opt4) from hemagglutinin__InfluenzaA__AGW00745

SEQ ID NO: 170557 - RNA, 1701 nt, Artificial Sequence
  derived and/or modified CDS sequence (opt4) from hemagglutinin__InfluenzaA__AGW00757
augaagaccaucaucgcccugagcuacauccugugccugguguucgcccagaagcugcccggcaacgacaacagcaccgccacccugugccugggccaccacgccgugcccaacggcaccaucgugaagaccaucaccaacgacagaaucgaggugaccaacgccaccgagcuggugcagaacagcagcaucggcgagaucugcgacagcccccaccagauccuggacggcgagaacugcacccugaucgacgcccugcugggcgacccccagugcgacggcuuccagaacaagaagugggaccuguucguggagagaagcaaggccuacagcaacugcuaccccuacgacgugcccgacuacgccagccugagaagccugguggccagcagcggcacccuggaguucaacaacgagagcuucaacugggccggcgugacccagaacggcaccagcagcgccugcaucagaggcagcaacagcagcuucuucagcagacugaacuggcugacccaccugaacuucaaguaccccgcccugaacgugaccaugcccaacaacgagcaguucgacaagcuguacaucuggggcgugcaccaccccggcaccgacaaggaccagaucuuccuguacgcccagagcagcggcagaaucaccgugagcaccaagagaagccagcaggccgugauccccaacaucggcagcagacccagaaucagaaacauccccagcagaaucagcaucuacuggaccaucgugaagcccggcgacauccugcugaucaacagcaccggcaaccugaucgcccccagaggcuacuucaagaucagaagcggcaagagcagcaucaugagaagcgacgcccccaucggcaagugcaagagcgagugcaucacccccaacggcagcauccccaacgacaagcccuuccagaaccugaacagaaucaccuacggcgccugccccagauacgugaagcagagcacccugaagcuggccaccggcaugagaaacgugcccgagaagcagaccagaggcaucuucggcgccaucgccggcuucaucgagaacggcugggagggcaugguggacggcugguacggcuucagacaccagaacagcgagggcagaggccaggccgccgaccugaagagcacccaggccgccaucgaccagaucaacggcaagcugaacagacugaucggcaagaccaacgagaaguuccaccagaucgagaaggaguucagcgagguggagggcagaauccaggaccuggagaaguacguggaggacaccaagaucgaccuguggagcuacaacgccgagcugcugguggcccuggagaaccagcacaccaucgaccugaccgacagcgagaugaacaagcuguucgagaagaccaagaagcagcugagagagaacgccgaggacaugggcaacggcugcuucaagaucuaccacaagugcgacaacgccugcaucggcagcaucagaaacggcaccuacgaccacgacguguacagagacgaggcccugaacaacagauuccagaucaagggcguggagcugaagagcggcuacaaggacuggauccuguggaucagcuucgccaucagcugcuuccugcugugcguggcccugcugggcuucaucaugugggccugccagaagggcaacaucagaugcaacaucugcaucuga

SEQ ID NO: 170558 - RNA, 1701 nt, Artificial Sequence; identical to SEQ ID NO: 170057
  derived and/or modified CDS sequence (opt4) from hemagglutinin__InfluenzaA__AGW00769

SEQ ID NO: 170559 - RNA, 1701 nt, Artificial Sequence; identical to SEQ ID NO: 169943
  derived and/or modified CDS sequence (opt4) from hemagglutinin__InfluenzaA__AGW00781

SEQ ID NO: 170560 - RNA, 1701 nt, Artificial Sequence; identical to SEQ ID NO: 170542
  derived and/or modified CDS sequence (opt4) from hemagglutinin__InfluenzaA__AGW00793

SEQ ID NO: 170561 - RNA, 1701 nt, Artificial Sequence; identical to SEQ ID NO: 170054
  derived and/or modified CDS sequence (opt4) from hemagglutinin__InfluenzaA__AGW00805

SEQ ID NO: 170562 - RNA, 1701 nt, Artificial Sequence; identical to SEQ ID NO: 169895
  derived and/or modified CDS sequence (opt4) from hemagglutinin__InfluenzaA__AGW00817

SEQ ID NO: 170563 - RNA, 1701 nt, Artificial Sequence; identical to SEQ ID NO: 170541
  derived and/or modified CDS sequence (opt4) from hemagglutinin__InfluenzaA__AGW00829

SEQ ID NO: 170564 - RNA, 1701 nt, Artificial Sequence
  derived and/or modified CDS sequence (opt4) from hemagglutinin__InfluenzaA__AGW00841
augaagaccaucaucgcccugagcuacauccugugccugguguucgcccagaagcugcccggcaacgacaacagcaccgccacccugugccugggccaccacgccgugcccaacggcaccaucgugaagaccaucaccaacggcagaaucgaggugaccaacgccaccgagcuggugcagaacagcagcaucggcgagaucugcgacagcccccaccagauccuggacggcgagaacugcacccugaucgacgcccugcugggcgacccccagugcgacggcuuccagaacaagaagugggaccuguucguggagagaagcaaggccuacagcaacugcuaccccuacgacgugcccgacuacgccagccugagaagccugguggccagcagcggcacccuggaguucaacaacgagagcuucaacugggccggcgugacccagaacggcaccagcagcgccugcaucagaggcagcaacagcagcuucuucagcagacugaacuggcugacccaccugaacuucaaguaccccgcccugaacgugaccaugcccaacaacgagcaguucgacaagcuguacaucuggggcgugcaccaccccggcaccgacaaggaccagaucuuccuguacgcccagagcagcggcagaaucaccgugagcaccaagagaagccagcaggccgugauccccaacaucggcagcagacccagaaucagaaacauccccagcagaaucagcaucuacuggaccaucgugaagcccggcgacauccugcugaucaacagcaccggcaaccugaucgcccccagaggcuacuucaagaucagaagcggcaagagcagcaucaugagaagcgacgcccccaucggcaagugcaagagcgagugcaucacccccaacggcagcauccccaacgacaagcccuuccagaacgugaacagaaucaccuacggcgccugccccagauacgugaagcagagcacccugaagcuggccaccggcaugagaaacgugcccgagaagcagaccagaggcaucuucggcgccaucgccggcuucaucgagaacggcugggagggcaugguggacggcugguacggcuucagacaccagaacagcgagggcagaggccaggccgccgaccugaagagcacccaggccgccaucgaccagaucaacggcaagcugaacagacugaucggcaagaccaacgagaaguuccaccagaucgagaaggaguucagcgagguggagggcagaauccaggaccuggagaaguacguggaggacaccaagaucgaccuguggagcuacaacgccgagcugcugguggcccuggagaaccagcacaccaucgaccugaccgacagcgagaugaacaagcuguucgagaagaccaagaagcagcugagagagaacgccgaggacaugggcaacggcugcuucaagaucuaccacaagugcgacaacgccugcaucggcagcaucagaaacggcaccuacgaccacgacguguacagagacgaggcccugaacaacagauuccagaucaagggcguggagcugaagagcggcuacaaggacuggauccuguggaucagcuucgccaucagcugcuuccugcugugcguggcccugcugggcuucaucaugugggccugccagaagggcaacaucagaugcaacaucugcaucuga

SEQ ID NO: 170565 - RNA, 1701 nt, Artificial Sequence
  derived and/or modified CDS sequence (opt4) from hemagglutinin__InfluenzaA__AGW00853
augaagaccaucaucgcccugagcuacauccugugccugguguucgcccagaagcugcccggcaacgacaacagcaccgccacccugugccugggccaccacgccgugcccaacggcaccaucgugaagaccaucaccaacgacagaaucgaggugaccaacgccaccgagcuggugcagaacagcagcaucggcgagaucugcgacagcccccaccagauccuggacggcgagaacugcacccugaucgacgcccugcugggcgacccccagugcgacggcuuccagaacaagaagugggaccuguucguggagagaagcaaggccuacagcaacugcuaccccuacgacgugcccgacuacgccagccugagaagccugguggccagcagcggcacccuggaguucaacaacgagagcuucaacuggaccggcgugacccagaacggcaccagcagcgccugcaucagaagaagcaacagcagcuucuucagcagacugaacuggcugacccaccugaacuucaaguaccccgcccugaacgugaccaugcccaacaacgagcaguucgacaagcuguacaucuggggcgugcaccaccccggcaccgacaaggaccagaucuuccuguacgcccagcccagcggcagaaucaccgugagcaccaagagaagccagcaggccgugauccccaacaucggcagcagacccagaaucagaaacauccccagcagaaucagcaucuacuggaccaucgugaagcccggcgacauccugcugaucaacagcaccggcaaccugaucgcccccagaggcuacuucaagaucagaagcggcaagagcagcaucaugagaagcgacgcccccaucggcaagugcaagagcgagugcaucacccccaacggcagcauccccaacgacaagcccuuccagaacgugaacagaaucaccuacggcgccugccccagauacgugaagcagagcacccugaagcuggccaccggcaugagaaacgugcccgagaagcagaccagaggcaucuucggcgccaucgccggcuucaucgagaacggcugggagggcaugguggacggcugguacggcuucagacaccagaacagcgagggcagaggccaggccgccgaccugaagagcacccaggccgccaucgaccagaucaacggcaagcugaacagacugaucggcaagaccaacgagaaguuccaccagaucgagaaggaguucagcgagguggagggcagaauccaggaccuggagaaguacguggaggacaccaagaucgaccuguggagcuacaacgccgagcugcugguggcccuggagaaccagcacaccaucgaccugaccgacagcgagaugaacaagcuguucgagaagaccaagaagcagcugagagagaacgccgaggacaugggcaacggcugcuucaagaucuaccacaagugcgacaacgccugcaucggcagcaucagaaacggcaccuacgaccacaacguguacagagacgaggcccugaacaacagauuccagaucaagggcguggagcugaagagcggcuacaaggacuggauccuguggaucagcuucgccaucagcugcuuccugcugugcguggcccugcugggcuucaucaugugggccugccagaagggcaacaucagaugcaacaucugcaucuga

SEQ ID NO: 170566 - RNA, 1701 nt, Artificial Sequence; identical to SEQ ID NO: 169918
  derived and/or modified CDS sequence (opt4) from hemagglutinin__InfluenzaA__AGW00865

SEQ ID NO: 170567 - RNA, 1701 nt, Artificial Sequence
  derived and/or modified CDS sequence (opt4) from hemagglutinin__InfluenzaA__AGW00877
augaagaccaucaucgcccugagcuacauccugugccugguguucgcccaggagcugcccggcaacgacgacagcaccgccacccugugccugggccaccacgccgugcccaacggcaccaucgugaagaccaucaccaacgaccagaucgaggugaccaacgccaccgagcuggugcagagcagcagcaccggcgagaucugcaacagcccccaccagauccuggacggcgagaacugcacccugaucgacgcccugcugggcgacccccagugcgacggcuuccagaacaagaagugggaccuguucguggagagaagcaaggcccacagcaacugcuaccccuacgacgugcccgacuacgccagccugagaagccugguggccagcagcggcacccuggaguucaacaacgagagcuucaacuggaccggcgugacccagaacggcaccagcagcgccugcaucagaagaagcaacaacagcuucuucagcagacugaacuggcugacccaccugaacuucaaguaccccgcccugaacgugaccaugcccaacaacgagcaguucgacaagcuguacaucuggggcgugcaccaccccggcaccgacaaggaccagaucuuccuguacgcccaggccagcggcagaaucaccgugagcaccaagagaagccagcaggccgugauccccaacaucggcuucagacccagagugagaaacauccccagcagagugagcaucuacuggaccaucgugaagcccggcgacauccugcugaucaacagcaccggcaaccugaucgcccccagaggcuacuucaagaucagaagcggcaagagcagcaucaugagaagcgacgcccccaucggcaagugcaacagcgccugcaucacccccaacggcagcauccccaacgacaagcccuuccagaacgugaacagaaucaccuacggcgccugccccagauacgugaagcagaacacccugaagcuggccaccggcaugagaaacgugcccgagaagcagaccagaggcaucuucggcgccaucgccggcuucaucgagaacggcugggagggcaugguggacggcugguacggcuucagacaccagaacagcgagggcagaggccaggccgccgaccugaagagcacccaggccgccaucgaccagaucaacggcaagcugaacagacugaucggcaagaccaacgagaaguuccaccagaucgagaaggaguucagcgagguggagggcagaauccaggaccuggagaaguacguggaggacaccaagaucgaccuguggagcuacaacgccgagcugcugguggcccuggagaaccagcacaccaucgaccugaccgacagcgagaugaacaagcuguucgagaagaccaagaagcagcugagagagaacgccgaggacaugggcaacggcugcuucaagaucuaccacaagugcgacaacgccugcaucggcagcaucagaaacggcaccuacgaccacgacguguacagagacgaggcccugaacaacagauuccagaucaagggcguggagcugaagagcggcuacaaggacuggauccuguggaucagcuucgccaucagcugcuuccugcugugcguggcccugcugggcuucaucaugugggccugccagaagggcaacaucagaugcaacaucugcaucuga

SEQ ID NO: 170568 - RNA, 1701 nt, Artificial Sequence
  derived and/or modified CDS sequence (opt4) from hemagglutinin__InfluenzaA__AGW00889
augaagaccaucaucgcccugagcuacauccugugccugguguucgcccagaagcugcccggcaacgacaacagcaccgccacccugugccugggccaccacgccgugcccaacggcaccaucgugaagaccaucaccaacgacagaaucgaggugaccaacgccaccgagcuggugcagaacagcagcaucggcgagaucugcgacagcccccaccagauccuggacggcgagaacugcacccugaucgacgcccugcugggcgacccccagugcgacggcuuccagaacaagaagugggaccuguucguggagagaagcaaggccuacagcaacugcuaccccuacgacgugcccgacuacgccagccugagaagccugguggccagcagcggcacccuggaguucaacaacgagagcuucaacuggaccggcgugacccagaacggcaccagcagcgccugcaucagaagaagcaacagcagcuucuucagcagacugaacuggcugacccaccugaacuucaaguaccccgcccugaacgugaccaugcccaacaacgagcaguucgacaagcuguacaucuggggcgugcaccaccccggcaccgacaaggaccagaucuuccuguacgcccagagcagcggcagaaucaccgugagcaccaagagaagccagcaggccgugauccccaacaucggcagcagacccagaaucagaaacauccccagcagaaucagcaucuacuggaccaucgugaagcccggcgacauccugcugaucaacagcaccggcaaccugaucgcccccagaggcuacuucaagaucagaagcggcaagagcagcaucaugagaagcgacgcccccaucggcaagugcaagagcgagugcaucacccccaacggcagcauccccaacgacaagcccuuccagaacgugaacagaaucaccuacggcgccugccccagauacgugaagcagagcacccugaagcuggccaccggcaugagaaacgugcccgagaagcagaccagaggcaucuucggcgccaucgccggcuucaucgagaacggcugggagggcaugguggacggcugguacggcuucagacaccagaacagcgagggcagaggccaggccgccgaccugaagagcacccaggccgccaucgaccagaucaacggcaagcugaacagacugaucggcaagaccaacgagaaguuccaccagaucgagaaggaguucagcgagguggagggcagaauccaggaccuggagaaguacguggaggacaccaagaucgaccuguggagcuacaacgccgagcugcugguggcccuggagaaccagcacaccaucgaccugaccgacagcgagaugaacaagcuguucgagaagaccaagaagcagcugagagagaacgccgaggacaugggcaacggcugcuucaagaucuaccacaagugcgacaacgccugcaucggcagcaucagaaacggcaccuacgaccacaacguguacagagacgaggcccugaacaacagauuccagaucaagggcguggagcugaagagcggcuacaaggacugggugcuguggaucagcuucgccaucagcugcuuccugcugugcguggcccugcugggcuucaucaugugggccugccagaagggcaacaucagaugcaacaucugcaucuga

SEQ ID NO: 170569 - RNA, 1701 nt, Artificial Sequence; identical to SEQ ID NO: 169918
  derived and/or modified CDS sequence (opt4) from hemagglutinin__InfluenzaA__AGW00901

SEQ ID NO: 170570 - RNA, 1701 nt, Artificial Sequence; identical to SEQ ID NO: 169918
  derived and/or modified CDS sequence (opt4) from hemagglutinin__InfluenzaA__AGW00913

SEQ ID NO: 170571 - RNA, 1701 nt, Artificial Sequence; identical to SEQ ID NO: 170054
  derived and/or modified CDS sequence (opt4) from hemagglutinin__InfluenzaA__AGW00931

SEQ ID NO: 170572 - RNA, 1701 nt, Artificial Sequence; identical to SEQ ID NO: 170054
  derived and/or modified CDS sequence (opt4) from hemagglutinin__InfluenzaA__AGW01244

SEQ ID NO: 170573 - RNA, 1701 nt, Artificial Sequence; identical to SEQ ID NO: 169928
  derived and/or modified CDS sequence (opt4) from hemagglutinin__InfluenzaA__AGW01256

SEQ ID NO: 170574 - RNA, 1701 nt, Artificial Sequence
  derived and/or modified CDS sequence (opt4) from hemagglutinin__InfluenzaA__AGW01295
augaagaccaucaucgcccugagcuacauccugugccugguguucgcccagaagcugcccggcaacgacaacagcaccgccacccugugccugggccaccacgccgugcccaacggcaccaucgugaagaccaucaccaacgacagaaucgaggugaccaacgccaccgagcuggugcagaacagcagcaucggcgagaucugcgacagcccccaccagauccuggacggcgagaacugcacccugaucgacgcccugcugggcgacccccagugcgacggcuuccagaacaagaagugggaccuguucguggagagaagcaaggccuacagcaacugcuaccccuacgacgugcccgacuacgccagccugagaagccugguggccagcagcggcacccuggaguucaacaacgagagcuucaacuggaccggcgugacccagaacggcaccagcagcgccugcaucagaagaagcaacagcagcuucuucagcagacugaacuggcugacccaccugaacuucaaguaccccgcccugaacgugaccaugcccaacaacgagcaguucgacaagcuguacaucuggggcgugcaccaccccggcaccgacaaggaccagaucuuccuguacgcccagagcagcggcagaaucaccgugagcaccaagagaagccagcaggccgugauccccaacaucggcagcagacccagaaucagaaacauccccagcagaaucagcaucuacuggaccaucgugaagcccggcgacauccugcugaucaacagcaccggcaaccugaucgcccccagaggcuacuucaagaucagaagcggcaagagcagcaucaugagaagcgacgcccccaucggcaagugcaagagcgagugcaucacccccaacggcagcauccccaacgacaagcccuuccagaacgugaacagaaucaccuacggcgccugccccagauacgugaagcagagcacccugaagcuggccaccggcaugagaaacgugcccgagaagcagaccagaggcaucuucggcgccaucgccggcuucaucgagaacggcugggagggcaugguggacggcugguacggcuucagacaccagaacagcgagggcagaggccaggccgccgaccugaagagcacccaggccgccaucgaccagaucaacggcaagcugaacagacugaucggcaagaccaacgagaaguuccaccagaucgagaaggaguucagcgagguggagggcagaauccaggaccuggagaaguacguggaggacaccaagaucgaccuguggagcuacaacgccgagauccugguggcccuggagaaccagcacaccaucgaccugaccgacagcgagaugaacaagcuguucgagaagaccaagaagcagcugagagagaacgccgaggacaugggcaacggcugcuucaagaucuaccacaagugcgacaacgccugcaucggcagcaucagaaacggcaccuacgaccacaacguguacagagacgaggcccugaacaacagauuccagaucaagggcguggagcugaagagcggcuacaaggacuggauccuguggaucagcuucgccaucagcugcuuccugcugugcguggcccugcugggcuucaucaugugggccugccagaagggcaacaucagaugcaacaucugcaucuga

SEQ ID NO: 170575 - RNA, 1701 nt, Artificial Sequence; identical to SEQ ID NO: 169918
  derived and/or modified CDS sequence (opt4) from hemagglutinin__InfluenzaA__AGW01307

SEQ ID NO: 170576 - RNA, 1701 nt, Artificial Sequence
  derived and/or modified CDS sequence (opt4) from hemagglutinin__InfluenzaA__AGW01319
augaagaccaucaucgcccugagcuacauccugugccugguguucgcccaggagcugcccggcaacgacgacagcaccgccacccugugccugggccaccacgccgugcccaacggcaccaucgugaagaccaucaccaacgaccagaucgaggugaccaacgccaccgagcuggugcagagcagcagcaccggcgagaucugcaacagcccccaccagauccuggacggcgagaacugcacccugaucgacgcccugcugggcgacccccagugcgacggcuuccagaacaagaagugggaccuguucguggagagaagcaaggcccacagcaacugcuaccccuacgacgugcccgacuacgccagccugagaagccugguggccagcagcggcacccuggaguucaacaacgagagcuucaacuggaccggcgugacccaggacggcaccagcagcgccugcaucagaagaagcaacaacagcuucuucagcagacugaacuggcugacccaccugaacuucaaguaccccgcccugaacgugaccaugcccaacaacgagcaguucgacaagcuguacaucuggggcgugcaccaccccggcaccgacaaggaccagaucuuccuguacgcccaggccagcggcagaaucaccgugagcaccaagagaagccagcaggccgugauccccaacaucggcagcagacccagagugagaaacauccccagcagagugagcaucuacuggaccaucgugaagcccggcgacauccugcugaucaacagcaccggcaaccugaucgcccccagaggcuacuucaagaucagaagcggcaagagcagcaucaugagaagcgacgcccccaucggcaagugcaacagcgccugcaucacccccaacggcagcauccccaacgacaagcccuuccagaacgugaacagaaucaccuacggcgccugccccagauacgugaagcagaacacccugaagcuggccaccggcaugagaaacgugcccgagaagcagaccagaggcaucuucggcgccaucgccggcuucaucgagaacggcugggagggcaugguggacggcugguacggcuucagacaccagaacagcgagggcagaggccaggccgccgaccugaagagcacccaggccgccaucgaccagaucaacggcaagcugaacaagcugaucggcaagaccaacgagaaguuccaccagaucgagaaggaguucagcgagguggagggcagaauccaggaccuggagaaguacguggaggacaccaagaucgaccuguggagcuacaacgccgagcugcugguggcccuggagaaccagcacaccaucgaccugaccgacagcgagaugaacaagcuguucgagaagaccaagaagcagcugagagagaacgccgaggacaugggcaacggcugcuucaagaucuaccacaagugcgacaacgccugcaucggcagcaucagaaacggcaccuacgaccacgacguguacagagacgaggcccugaacaacagauuccagaucaagggcguggagcugaagagcggcuacaaggacuggauccuguggaucagcuucgccaucagcugcuuccugcugugcguggcccugcugggcuucaucaugugggccugccagaagggcaacaucagaugcaacaucugcaucuga

SEQ ID NO: 170577 - RNA, 1701 nt, Artificial Sequence
  derived and/or modified CDS sequence (opt4) from hemagglutinin__InfluenzaA__AGW01331
augaagaccaucaucgcccugagcuacauccugugccugguguucgcccagaagcugcccggcaacgacaacagcaccgccacccugugccugggccaccacgccgugcccaacggcaccaucgugaagaccaucaccaacgacagaaucgaggugaccaacgccaccgagcuggugcagaacagcagcaucggcgagaucugcgacagcccccaccagauccuggacggcgagaacugcacccugaucgacgcccugcugggcgacccccagugcgacggcuuccagaacaagaagugggaccuguucguggagagaagcaaggccuacagcaacugcuaccccuacgacgugcccgacuacgccagccugagaagccugguggccagcagcggcacccuggaguucaacaacgagagcuucaacugggccggcgugacccagaacggcaccagcagcgccugcaucagaggcagcaacagcagcuucuucagcagacugaacuggcugacccaccugaacuucaaguaccccgcccugaacgugaccaugcccaacaacgagcaguucgacaagcuguacaucuggggcgugcaccaccccggcaccgacaaggaccagaucuuccuguacgcccagagcagcggcagaaucaccgugagcaccaagagaagccagcaggccgugauccccaacaucggcagcagacccagaaucagaaacauccccagcagaaucagcaucuacuggaccaucgugaagcccggcgacauccugcugaucaacagcaccggcaaccugaucgcccccagaggcuacuucaagaucagaagcggcaagagcagcaucaugagaagcgacgcccccaucggcaagugcaagagcgagugcaucacccccaacggcagcauccccaacgacaagcccuuccagaacgugaacagaaucaccuacggcgccugccccagauacgugaagcagagcacccugaagcuggccaccggcaugagaaacgugcccgagaagcagaccagaggcaucuucggcgccaucgccggcuucaucgagaacggcugggagggcaugguggacggcugguacggcuucagacaccagaacagcgagggcagaggccaggccgccgaccugaagagcacccaggccgccaucgaccagaucaacggcaagcugaacagacugaucggcaagaccaacgagaaguuccaccagaucgagaaggaguucagcgagguggagggcagaauccaggaccuggagaaguacguggaggacaccaagaucgaccuguggagcuacaacgccgagcugcugguggcccuggagaaccagcacaccaucgaccugaccgacagcgagaugaacaagcuguucgagaagaccaagaagcagcugagagagaacgccgaggacaugggcaacggcugcuucaagaucuaccacaagugcgacaacgccugcaucggcagcaucagaaacggcaccuacgagcacgacguguacagagacgaggcccugaacaacagauuccagaucaagggcguggagcugaagagcggcuacaaggacuggauccuguggaucagcuucgccaucagcugcuuccugcugugcguggcccugcugggcuucaucaugugggccugccagaagggcaacaucagaugcaacaucugcaucuga

SEQ ID NO: 170578 - RNA, 1701 nt, Artificial Sequence; identical to SEQ ID NO: 170054
  derived and/or modified CDS sequence (opt4) from hemagglutinin__InfluenzaA__AGW01343

SEQ ID NO: 170579 - RNA, 1701 nt, Artificial Sequence; identical to SEQ ID NO: 170057
  derived and/or modified CDS sequence (opt4) from hemagglutinin__InfluenzaA__AGW01355

SEQ ID NO: 170580 - RNA, 1701 nt, Artificial Sequence; identical to SEQ ID NO: 169928
  derived and/or modified CDS sequence (opt4) from hemagglutinin__InfluenzaA__AGW01367

SEQ ID NO: 170581 - RNA, 1701 nt, Artificial Sequence; identical to SEQ ID NO: 170054
  derived and/or modified CDS sequence (opt4) from hemagglutinin__InfluenzaA__AGW01391

SEQ ID NO: 170582 - RNA, 1701 nt, Artificial Sequence
  derived and/or modified CDS sequence (opt4) from hemagglutinin__InfluenzaA__AGW01403
augaagaccaucaucgcccugagcuacauccugugccugaucuucgcccagaagcugcccggcaacgacaacagcaccgccacccugugccugggccaccacgccgugcccaacggcaccaucgugaagaccaucaccaacgaccagaucgaggugaccaacgccaccgagcuggugcagagcagcagcaccggcgagaucugcaacagcccccaccagauccuggacggcgagaacugcacccugaucgacgcccugcugggcgacccccagugcgacggcuuccagaacaagaagugggaccuguucguggagagaagcaaggcccacagcaacugcuaccccuacgacgugcccgacuacgccagccugagaagccugguggccagcagcggcacccuggaguucaacaacgagagcuucaacuggaccggcgugacccagaacggcaccagcagcgccugcaucagaagaagcaacaacagcuucuucagcagacugaacuggcugacccaccugaacuucaaguaccccgcccugaacgugaccaugcccaacaacgagcaguucgacaagcuguacaucuggggcgugcaccaccccggcaccgacaaggaccagaucuuccuguacgcccaggccgccggcagaaucaccgugagcaccaagagaagccagcaggccgugauccccaacaucggcagcagacccagagugagaaacauccccagcagagugagcaucuacuggaccaucgugaagcccggcgacauccugcugaucaacagcaccggcaaccugaucgcccccagaggcuacuucaagaucagaagcggcaagagcagcaucaugagaagcgacgcccccaucggcaagugcaacagcgccugcaucacccccaacggcagcauccccaacgacaagcccuuccagaacgugaacagaaucaccuacggcgccugccccagauacgugaagcagaacacccugaagcuggccaccggcaugagaaacgugcccgagaagcagaccagaggcaucuucggcgccaucgccggcuucaucgagaacggcugggagggcaugguggacggcugguacggcuucagacaccagaacagcgagggcagaggccaggccgccgaccugaagagcacccaggccgccaucgaccagaucaacggcaagcugaacagacugaucggcaagaccaacgagaaguuccaccagaucgagaaggaguucagcgagguggagggcagaauccaggaccuggagaaguacguggaggacaccaagaucgaccuguggagcuacaacgccgagcugcugguggcccuggagaaccagcacaccaucgaccugaccgacagcgagaugaacaagcuguucgagaagaccaagaagcagcugagagagaacgccgaggacaugggcaacggcugcuucaagaucuaccacaagugcgacaacgccugcaucggcagcaucagaaacggcaccuacgaccacuacguguacagagacgaggcccugaacaacagauuccagaucaagggcguggagcugaagagcggcuacaaggacuggauccuguggaucagcuucgccaccagcugcuuccugcugugcguggcccugcugggcuucaucaugugggccugccagaagggcaacaucagaugcaacaucugcaucuga

SEQ ID NO: 170583 - RNA, 1701 nt, Artificial Sequence; identical to SEQ ID NO: 169918
  derived and/or modified CDS sequence (opt4) from hemagglutinin__InfluenzaA__AGW01415

SEQ ID NO: 170584 - RNA, 1701 nt, Artificial Sequence; identical to SEQ ID NO: 169918
  derived and/or modified CDS sequence (opt4) from hemagglutinin__InfluenzaA__AGW01427

SEQ ID NO: 170585 - RNA, 1701 nt, Artificial Sequence; identical to SEQ ID NO: 169918
  derived and/or modified CDS sequence (opt4) from hemagglutinin__InfluenzaA__AGW01439

SEQ ID NO: 170586 - RNA, 1701 nt, Artificial Sequence
  derived and/or modified CDS sequence (opt4) from hemagglutinin__InfluenzaA__AGW01451
augaagaccaucaucgcccugagcuacauccugugccugguguucgcccagaagcugcccggcaacgacaacagcaccgccacccugugccugggccaccacgccgugcccaacggcaccaucgugaagaccaucaccaacgacagaaucgaggugaccaacgccaccgagcuggugcagaacagcagcaucggcgagaucugcgacagcccccaccagauccuggacggcgagaacugcacccugaucgacgcccugcugggcgacccccagugcgacggcuuccagaacaagaagugggaccuguucguggagagaagcaaggccuacagcaacugcuaccccuacgacgugcccgacuacgccagccugagaagccugguggccagcagcggcacccuggaguucaacaacgagagcuucaacugggccggcgugacccagaacggcaccagcagcgccugcaucagaggcagcaacagcagcuucuucagcagacugaacuggcugacccaccugaacuucaaguaccccgcccugaacgugaccaugcccaacaacgagcaguucgacaagcuguacaucuggggcgugcaccaccccggcaccgacaaggaccagaucuuccuguacgcccagagcagcggcagaaucaccgugagcaccaagagaagccagcaggccgugauccccaacaucggcagcagacccagaaucagaaacauccccagcagaaucagcaucuacuggaccaucgugaagcccggcgacauccugcugaucaacagcaccggcaaccugaucgcccccagaggcuacuucaagaucagaagcggcaagagcagcaucaugagaagcgacgcccccaucggcaagugcaagagcgagugcaucacccccaacggcagcauccccaacgacaagcccuuccagaacgugaacagaaucaccuacggcgccugccccagauacgugaagcagagcacccugaagcuggccaccggcaugagaaacgugcccgagaagcagaccagaggcaucuucggcgccaucgccggcuucaucgagaacggcugggagggcaugauggacggcugguacggcuucagacaccagaacagcgagggcagaggccaggccgccgaccugaagagcacccaggccgccaucgaccagaucaacggcaagcugaacagacugaucggcaagaccaacgagaaguuccaccagaucgagaaggaguucagcgagguggagggcagaauccaggaccuggagaaguacgugguggacaccaagaucgaccuguggagcuacaacgccgagcugcugguggcccuggagaaccagcacaccaucgaccugaccgacagcgagaugaacaagcuguucgagaagaccaagaagcagcugagagagaacgccgaggacaugggcaacggcugcuucaagaucuaccacaagugcgacaacgccugcaucggcagcaucagaaacggcaccuacgaccacgacguguacagagacgaggcccugaacaacagauuccagaucaagggcguggagcugaagagcggcuacaaggacuggauccuguggaucagcuucgccaucagcugcuuccugcugugcguggcccugcugggcuucaucaugugggccugccagaagggcaacaucagaugcaacaucugcaucuga

SEQ ID NO: 170587 - RNA, 1701 nt, Artificial Sequence; identical to SEQ ID NO: 170054
  derived and/or modified CDS sequence (opt4) from hemagglutinin__InfluenzaA__AGW01463

SEQ ID NO: 170588 - RNA, 1701 nt, Artificial Sequence; identical to SEQ ID NO: 170054
  derived and/or modified CDS sequence (opt4) from hemagglutinin__InfluenzaA__AGW01475

SEQ ID NO: 170589 - RNA, 1701 nt, Artificial Sequence
  derived and/or modified CDS sequence (opt4) from hemagglutinin__InfluenzaA__AGW01487
augaagaccaucaucgcccugagcuacauccugugccugguguucgcccagaagcugcccggcaacgacaacagcaccgccacccugugccugggccaccacgccgugcccaacggcaccaucgugaagaccaucaccaacgacagaaucgaggugaccaacgccaccgagcuggugcagaacagcagcaucggcgagaucugcgacagcccccaccagauccuggacggcgagaacugcacccugaucgacgcccugcugggcgacccccagugcgacggcuuccagaacaagaagugggaccuguucguggagagaagcaaggccuacagcaacugcuaccccuacgacgugcccgacuacgccagccugagaagccugguggccagcagcggcacccuggaguucaacaacgagagcuucaacuggaccggcgugacccagaacggcaccagcagcgccugcaucagaagaagcaacaacagcuucuucagcagacugaacuggcugacccacagcaacuucaaguaccccgcccugaacgugaccaugcccaacaacgagcaguucgacaagcuguacaucuggggcgugcaccaccccggcaccggcaaggaccagaucuuccuguacgcccagagcagcggcagaaucaccgugagcaccaagagaagccagcaggccgugauccccaacaucggcagcagacccagaaucagaaacauccccagcagaaucagcaucuacuggaccaucgugaagcccggcgacauccugcugaucaacagcaccggcaaccugaucgcccccagaggcuacuucaagaucagaagcggcaagagcagcaucaugagaagcgacgcccccaucggcaagugcaagagcgagugcaucacccccaacggcagcauccccaacgacaagcccuuccagaacgugaacagaaucaccuacggcgccugccccagauacgugaagcagagcacccugaagcuggccaccggcaugagaaacgugcccgagaagcagaccagaggcaucuucggcgccaucgccggcuucaucgagaacggcugggagggcaugauggacggcugguacggcuucagacaccagaacagcgagggcagaggccaggccgccgaccugaagagcacccaggccgccaucgaccagaucaacggcaagcugaacagacugaucggcaagaccaacgagaaguuccaccagaucgagaaggaguucagcgagguggagggcagaauccaggaccuggagaaguacguggaggacaccaagaucgaccuguggagcuacaacgccgagcugcugguggcccuggagaaccagcacaccaucgaccugaccgacagcgagaugaacaagcuguucgagaagaccaagaagcagcugagagagaacgccgaggacaugggcaacggcugcuucaagaucuaccacaagugcgacaacgccugcaucggcagcaucagaaacggcaccuacgaccacgacguguacagagacgaggcccugaacaacagauuccagaucaagggcguggagcugaagagcggcuacaaggacuggauccuguggaucagcuucgccaucagcugcuuccugcugugcguggcccugcugggcuucaucaugugggccugccagaagggcaacaucagaugcaacaucugcaucuga

SEQ ID NO: 170590 - RNA, 1701 nt, Artificial Sequence; identical to SEQ ID NO: 169918
  derived and/or modified CDS sequence (opt4) from hemagglutinin__InfluenzaA__AGW01499

SEQ ID NO: 170591 - RNA, 1701 nt, Artificial Sequence
  derived and/or modified CDS sequence (opt4) from hemagglutinin__InfluenzaA__AGW01511
augaagaccaucaucgcccugagcuacauccugugccugguguucgcccagaagcugcccggcaacgacaacagcaccgccacccugugccugggccaccacgccgugcccaacggcaccaucgugaagaccaucaccaacgacagaaucgaggugaccaacgccaccgagcuggugcagaacagcagcaucggcgagaucugcgacagcccccaccagauccuggacggcgagaacugcacccugaucgacgcccugcugggcgacccccagugcgacggcuuccagaacaagaagugggaccuguucguggagagaagcaaggccuacagcaacugcuaccccuacgacgugcccgacuacgccagccugagaagccugguggccagcagcggcacccuggaguucaacaacgagagcuucaacugggccggcgugacccagaacggcaccagcagcgccugcaucagaggcagcaacagcagcuucuucagcagacugaacuggcugacccaccugaacuucaaguaccccgcccugaacgugaccaugcccaacaacgagcaguucgacaagcuguacaucuggggcgugcaccaccccggcaccgacaaggaccagaucuuccuguacgcccagagcagcggcagaaucaccgugagcaccaagagaagccagcaggccgugauccccaacaucggcagcagacccagaaucagaaacauccccagcagaaucagcaucuacuggaccaucgugaagcccggcgacauccugcugaucaacagcaccggcaaccugaucgcccccagaggcuacuucaagaucagaagcggcaagagcagcaucaugagaagcgacgcccccaucggcaagugcaagagcgagugcaucacccccaacggcagcauccccaacgacaagcccuuccagaacgugaacagaaucaccuacggcgccugccccagauacgugaagcagagcacccugaagcuggccaccggcaugagaaacgugcccgagaagcagaccagaggcaucuucggcgccaucgccggcuucaucgagaacggcugggagggcaugguggacggcugguacggcuucagacaccagaacagcgagggcagaggccaggccgccgaccugaagagcacccaggccgccaucgaccagaucaacggcaagcugaacagacugaucggcaagaccaacgagaaguuccaccagaucgagaaggaguucagcgagguggagggcagaauccaggaccuggagaaguacguggaggacaccaagaucgaccuguggagcuacaacgccgagcugcugguggcccuggagaaccagcacaccaucgaccugaccgacagcgagaugaacaagcuguucgagaagaccaagaagcagcugagagagaacgccgaggacaugggcaacggcugcuucaagaucuaccacaagugcgacaacgccugcaucggcagcaucagaaacggcaccuacgaccacgacguguacagagacgaggcccugaacaacagauuccagaucaagggcguggagcugaagagcggcuacaaggacuggauccuguggaucagcuucgccaucagcugcuuccugcugugcgccgcccugcugggcuucaucaugugggccugccagaagggcaacaucagaugcaacaucugcaucuga

SEQ ID NO: 170592 - RNA, 1701 nt, Artificial Sequence
  derived and/or modified CDS sequence (opt4) from hemagglutinin__InfluenzaA__AGW01535
augaagaccaucaucgcccugagcuacauccugugccugguguucgcccagaagcugcccggcaacgacaacagcaccgccacccugugccugggccaccacgccgugcccaacggcaccaucgugaagaccaucaccaacgacagaaucgaggugaccaacgccaccgagcuggugcagaacagcagcaucggcgagaucugcgacagcccccaccagauccuggacggcgagaacugcacccugaucgacgcccugcugggcgacccccagugcgacggcuuccagaacaagaagugggaccuguucguggagagaagcaaggccuacagcaacugcuaccccuacgacgugcccgacuacgccagccugagaagccugguggccagcagcggcacccuggaguucaacaaggagagcuucaacugggccggcgugacccagaacggcaccagcagcgccugcaucagaggcagcaacagcagcuucuucagcagacugaacuggcugacccaccugaacuucaaguaccccgcccugaacgugaccaugcccaacaacgagcaguucgacaagcuguacaucuggggcgugcaccaccccggcaccgacaaggaccagaucuuccuguacgcccagagcagcggcagaaucaccgugagcaccaagagaagccagcaggccgugauccccaacaucggcagcagacccagaaucagaaacauccccagcagaaucagcaucuacuggaccaucgugaagcccggcgacauccugcugaucaacagcaccggcaaccugaucgcccccagaggcuacuucaagaucagaagcggcaagagcagcaucaugagaagcgacgcccccaucggcaagugcaagagcgagugcaucacccccaacggcagcauccccaacgacaagcccuuccagaacgugaacagaaucaccuacggcgccugccccagauacgugaagcagagcacccugaagcuggccaccggcaugagaaacgugcccgagaagcagaccagaggcaucuucggcgccaucgccggcuucaucgagaacggcugggagggcaugguggacggcugguacggcuucagacaccagaacagcgagggcagaggccaggccgccgaccugaagagcacccaggccgccaucgaccagaucaacggcaagcugaacagacugaucggcaagaccaacgagaaguuccaccagaucgagaaggaguucagcgagguggagggcagaauccaggaccuggagaaguacguggaggacaccaagaucgaccuguggagcuacaacgccgagcugcugguggcccuggagaaccagcacaccaucgaccugaccgacagcgagaugaacaagcuguucgagaagaccaagaagcagcugagagagaacgccgaggacaugggcaacggcugcuucaagaucuaccacaagugcgacaacgccugcaucggcagcaucagaaacggcaccuacgaccacgacguguacagagacgaggcccugaacaacagauuccagaucaagggcguggagcugaagagcggcuacaaggacuggauccuguggaucagcuucgccaucagcugcuuccugcugugcguggcccugcugggcuucaucaugugggccugccagaagggcaacaucagaugcaacaucugcaucuga

SEQ ID NO: 170593 - RNA, 1701 nt, Artificial Sequence; identical to SEQ ID NO: 169918
  derived and/or modified CDS sequence (opt4) from hemagglutinin__InfluenzaA__AGW01547

SEQ ID NO: 170594 - RNA, 1701 nt, Artificial Sequence; identical to SEQ ID NO: 170054
  derived and/or modified CDS sequence (opt4) from hemagglutinin__InfluenzaA__AGW01559

SEQ ID NO: 170595 - RNA, 1701 nt, Artificial Sequence; identical to SEQ ID NO: 170054
  derived and/or modified CDS sequence (opt4) from hemagglutinin__InfluenzaA__AGW01571

SEQ ID NO: 170596 - RNA, 1701 nt, Artificial Sequence; identical to SEQ ID NO: 170054
  derived and/or modified CDS sequence (opt4) from hemagglutinin__InfluenzaA__AGW01583

SEQ ID NO: 170597 - RNA, 1701 nt, Artificial Sequence; identical to SEQ ID NO: 170054
  derived and/or modified CDS sequence (opt4) from hemagglutinin__InfluenzaA__AGW01595

SEQ ID NO: 170598 - RNA, 1701 nt, Artificial Sequence
  derived and/or modified CDS sequence (opt4) from hemagglutinin__InfluenzaA__AGW01607
augaagaccaucaucgcccugagcuacauccugugccuggugcuggcccagaagcugcccggcaacgacaacagcaccgccacccugugccugggccaccacgccgugcccaacggcaccaucgugaagaccaucaccaacgacagaaucgaggugaccaacgccaccgagcuggugcagaacagcagcaucggcgagaucugcgacagcccccaccagauccuggacggcgagaacugcacccugaucgacgcccugcugggcgacccccagugcgacggcuuccagaacaagaagugggaccuguucguggagagaagcaaggccuacagcaacugcuaccccuacgacgugcccgacuacgccagccugagaagccugguggccagcagcggcacccuggaguucaacaacgagagcuucaacugggccggcgugacccagaacggcaccagcagcgccugcaucagaggcagcaacagcagcuucuucagcagacugaacuggcugacccaccugaacuucaaguaccccgcccugaacgugaccaugcccaacaacgagcaguucgacaagcuguacaucuggggcgugcaccaccccggcaccgacaaggaccagaucuuccuguacgcccagagcagcggcagaaucaccgugagcaccaagagaagccagcaggccgugauccccaacaucggcagcagacccagaaucagaaacauccccagcagaaucagcaucuacuggaccaucgugaagcccggcgacauccugcugaucaacagcaccggcaaccugaucgcccccagaggcuacuucaagaucagaagcggcaagagcagcaucaugagaagcgacgcccccaucggcaagugcaagagcgagugcaucacccccaacggcagcauccccaacgacaagcccuuccagaacgugaacagaaucaccuacggcgccugccccagauacgugaagcagagcacccugaagcuggccaccggcaugagaaacgugcccgagaagcagaccagaggcaucuucggcgccaucgccggcuucaucgagaacggcugggagggcaugguggacggcugguacggcuucagacaccagaacagcgagggcagaggccaggccgccgaccugaagagcacccaggccgccaucgaccagaucaacggcaagcugaacagacugaucggcaagaccaacgagaaguuccaccagaucgagaaggaguucagcgagguggagggcagaauccaggaccuggagaaguacguggaggacaccaagaucgaccuguggagcuacaacgccgagcugcugguggcccuggagaaccagcacaccaucgaccugaccgacagcgagaugaacaagcuguucgagaagaccaagaagcagcugagagagaacgccgaggacaugggcaacggcugcuucaagaucuaccacaagugcgacaacgccugcaucggcagcaucagaaacggcaccuacgaccacgacguguacagagacgaggcccugaacaacagauuccagaucaagggcguggagcugaagagcggcuacaaggacuggauccuguggaucagcuucgccaucagcugcuuccugcugugcguggcccugcugggcuucaucaugugggccugccagaagggcaacaucagaugcaacaucugcaucuga

SEQ ID NO: 170599 - RNA, 1701 nt, Artificial Sequence; identical to SEQ ID NO: 170057
  derived and/or modified CDS sequence (opt4) from hemagglutinin__InfluenzaA__AGW01619

SEQ ID NO: 170600 - RNA, 1701 nt, Artificial Sequence; identical to SEQ ID NO: 170054
  derived and/or modified CDS sequence (opt4) from hemagglutinin__InfluenzaA__AGW01631

SEQ ID NO: 170601 - RNA, 1701 nt, Artificial Sequence
  derived and/or modified CDS sequence (opt4) from hemagglutinin__InfluenzaA__AGW01643
augaagaccaucaucgcccugagcuacauccugugccugguguucgcccagaagcugcccggcaacgacaacagcaccgccacccugugccugggccaccacgccgugcccaacggcaccaucgugaagaccaucaccaacgacagaaucgaggugaccaacgccaccgagcuggugcagaacagcagcaucggcgagaucugcgacagcccccaccagauccuggacggcgagaacugcacccugaucgacgcccugcugggcgacccccagugcgacggcuuccagaacaagaagugggaccuguucguggagagaagcaaggccuacagcaacugcuaccccuacgacgugcccgacuacgccagccugagaagccugguggccagcagcggcacccuggaguucaacaacgagagcuucaacuggaccggcgugacccagaacggcaccagcagcgccugcaucagaggcagcaacagcagcuucuucagcagacugaacuggcugacccaccugaacuucaaguaccccgcccugaacgugaccaugcccaacaacgagcaguucgacaagcuguacaucuggggcgugcaccaccccggcaccgacaaggaccagaucuuccuguacgcccagagcagcggcagaaucaccgugagcaccaagagaagccagcaggccgugauccccaacaucggcagcagacccagaaucagaaacauccccagcagaaucagcaucuacuggaccaucgugaagcccggcgacauccugcugaucaacagcaccggcaaccugaucgcccccagaggcuacuucaagaucagaagcggcaagagcagcaucaugagaagcgacgcccccaucggcaagugcaagagcgagugcaucacccccaacggcagcauccccaacgacaagcccuuccagaacgugaacagaaucaccuacggcgccugccccagauacgugaagcagagcacccugaagcuggccaccggcaugagaaacgugcccgagaagcagaccagaggcaucuucggcgccaucgccggcuucaucgagaacggcugggagggcaugauggacggcugguacggcuucagacaccagaacagcgagggcagaggccaggccgccgaccugaagagcacccaggccgccaucgaccagaucaacggcaagcugaacagacugaucggcaagaccaacgagaaguuccaccagaucgagaaggaguucagcgagguggagggcagaauccaggaccuggagaaguacguggaggacaccaagaucgaccuguggagcuacaacgccgagcugcugguggcccuggagaaccagcacaccaucgaccugaccgacagcgagaugaacaagcuguucgagaagaccaagaagcagcugagagagaacgccgaggacaugggcaacggcugcuucaagaucuaccacaagugcgacaacgccugcaucggcagcaucagaaacggcaccuacgaccacgacguguacagagacgaggcccugaacaacagauuccagaucaagggcguggagcugaagagcggcuacaaggacuggauccuguggaucagcuucgccaucagcugcuuccugcugugcguggcccugcugggcuucaucaugugggccugccagaagggcaacaucagaugcaacaucugcaucuga

SEQ ID NO: 170602 - RNA, 1701 nt, Artificial Sequence; identical to SEQ ID NO: 170054
  derived and/or modified CDS sequence (opt4) from hemagglutinin__InfluenzaA__AGW01655

SEQ ID NO: 170603 - RNA, 1701 nt, Artificial Sequence
  derived and/or modified CDS sequence (opt4) from hemagglutinin__InfluenzaA__AGW01667
augaagaccaucaucgcccugagcuacauccugugccugguguucgcccagaagcugcccggcaacgacaacagcaccgccacccugugccugggccaccacgccgugcccaacggcaccaucgugaagaccaucaccaacgacagaaucgaggugaccaacgccaccgagcuggugcagaacagcagcaucggcgagaucugcgacagcccccaccagauccuggacggcgagaacugcacccugaucgacgcccugcugggcgacccccagugcgacggcuuccagaacaagaagugggaccuguucguggagagaagcaaggccuacagcaacugcuaccccuacgacgugcccgacuacgccagccugagaagccugguggccagcagcggcacccuggaguucaacaacgagagcuucaacugggccggcgugacccagaacggcaccagcagcgccugcaucagaggcagcaacagcagcuucuucagcagacugaacuggcugacccaccugaacuucaaguaccccgcccugaacgugaccaugcccaacaacgagcaguucgacaagcuguacaucuggggcgugcaccaccccggcaccgacaaggaccagaucuuccuguacgcccagagcagcggcagaaucaccgugagcaccaagagaagccagcaggccgugauccccaacaucggcagcagacccagaaucagaaacauccccagcagaaucagcaucuacuggaccaucgugaagcccggcgacauccugcugaucaacagcaccggcaaccugaucgcccccagaggcuacuucaagaucagaagcggcaagagcagcaucaugagaagcgacgcccccaucggcaagugcaagagcgagugcaucacccccaacggcagcauccccaacgacaagcccuuccagaacgugaacagaaucaccuacggcgccugccccagauacgugaagcagagcacccugaagcuggccaccggcaugagaaacgugcccgagaagcagaccagaggcaucuucggcgccaucgccggcuucaucgagaacggcugggagggcaugguggacggcugguacggcuucagacaccagaacagcgagggcagaggccaggccgccgaccugaagagcacccaggccgccaucgaccagaucaacggcaagcugaacagacugaucggcaagaccaacgagaaguuccaccagaucgagaaggaguucagcgagguggagggcagaauccaggaccuggagaaguacguggaggacaccaagaucgaccuguggagcuacaacgccgagcugcugguggcccuggagaaccagcacaccaucgaccugaccgacagcgagaugaacaagcuguucgagaagaccaagaagcagcugagagagaacgccgaggacaugggcaacggcugcuucaagaucuaccacaagugcgacaacgccugcaucggcagcaucagaaacgagaccuacgaccacgacguguacagagacgaggcccugaacaacagauuccagaucaagggcguggagcugaagagcggcuacaaggacuggauccuguggaucagcuucgccaucagcugcuuccugcugugcguggcccugcugggcuucaucaugugggccugccagaagggcaacaucagaugcaacaucugcaucuga

SEQ ID NO: 170604 - RNA, 1701 nt, Artificial Sequence; identical to SEQ ID NO: 170054
  derived and/or modified CDS sequence (opt4) from hemagglutinin__InfluenzaA__AGW01679

SEQ ID NO: 170605 - RNA, 1701 nt, Artificial Sequence
  derived and/or modified CDS sequence (opt4) from hemagglutinin__InfluenzaA__AGW01691
augaagaccaucaucgcccugagcuacauccugugccugguguucgcccagaagcugcccggcaacgacaacagcaccgccacccugugccugggccaccacgccgugcccaacggcaccaucgugaagaccaucaccaacgacagaaucgaggugaccaacgccaccgagcuggugcagaacagcagcaucggcgagaucugcgacagcccccaccagauccuggacggcgagaacugcacccugaucgacgcccugcugggcgacccccagugcgacggcuuccagaacaagaagugggaccuguucguggagagaagcaaggccuacagcaacugcuaccccuacgacgugcccgacuacgccagccugagaagccugguggccagcagcggcacccuggaguucaacaacgagagcuucaacuggaccggcgugacccagaacggcaccagcagcgccugcaucagaagaagcaacagcagcuucuucagcagacugaacuggcugacccaccugaacuucaaguaccccgcccugaacgugaccaugcccaacaacgagcaguucgacaagcuguacaucuggggcgugcaccaccccggcaccgacaaggaccagaucuuccuguacgcccagagcagcggcagaaucaccgugagcaccaagagaagccagcaggccgugauccccaacaucggcagcagacccagaaucagaaacauccccagcagaaucagcaucuacuggaccaucgugaagcccggcgacauccugcugaucaacagcaccggcaaccugaucgcccccagaggcuacuucaagaucagaagcggcaagagcagcaucaugagaagcgacgcccccaucggcaagugcaagagcgagugcaucacccccaacggcagcauccccaacgacaagcccuuccagaacgugaacagaaucaccuacggcgccugccccagauacgugaagcagagcacccugaagcuggccaccggcaugagaaacgugcccgagaagcagaccagaggcaucuucggcgccaucgccggcuucaucgagaacggcugggagggcaugguggacggcugguacggcuucagacaccagaacagcgagggcagaggccaggccgccgaccugaagagcacccaggccgccaucgaccagaucaacggcaagcugaacagacugaucggcaagaccaacgagaaguuccaccagaucgagaaggaguucagcgagguggagggcagaauccaggaccuggagaaguacguggaggacaccaagaucgaccuguggagcuacaacgccgagcugcugguggcccuggagaaccagcacaccaucgaccugaccgacagcgagaugaacaagcuguucgagaagaccaagaagcagcugagagagaacgccgaggacaugggcaacggcugcuucaagaucuaccacaagugcgacaacgccugcaucggcagcaucagaaacggcaccuacgaccacgacguguacagagacgaggcccugaacaacagauuccagaucaagggcguggagcugaagagcggcuacaaggacuggauccuguggaucagcuucgccaucagcugcuuccugcugugcguggcccugcugggcuucgugaugugggccugccagaagggcaacaucagaugcaacaucugcaucuga

SEQ ID NO: 170606 - RNA, 1701 nt, Artificial Sequence; identical to SEQ ID NO: 169918
  derived and/or modified CDS sequence (opt4) from hemagglutinin__InfluenzaA__AGW01701

SEQ ID NO: 170607 - RNA, 1701 nt, Artificial Sequence; identical to SEQ ID NO: 169918
  derived and/or modified CDS sequence (opt4) from hemagglutinin__InfluenzaA__AGW01713

SEQ ID NO: 170608 - RNA, 1701 nt, Artificial Sequence
  derived and/or modified CDS sequence (opt4) from hemagglutinin__InfluenzaA__AGW01725
augaagaccaucaucgcccugagcuacauccugugccugguguucgcccagaagcugcccggcaacgacaacagcaccgccacccugugccugggccaccacgccgugcccaacggcaccaucgugaagaccaucaccaacgacagaaucgaggugaccaacgccaccgagcuggugcagaacagcagcaucggcgagaucugcgacagcccccaccagauccuggacggcgagaacugcacccugaucgacgcccugcugggcgacccccagugcgacggcuuccagaacaagaagugggaccuguucguggagagaagcaaggccuacagcaacugcuaccccuacgacgugcccgacuacgccagccugagaagccugguggccagcagcggcacccuggaguucaacaacgagagcuucaacuggaccggcgugacccagaacggcaccagcagcgccugcaucagaagaagcaacagcagcuucuucagcagacugaacuggcugacccaccugaacuucaaguaccccgcccugaacgugaccaugcccaacaacgagcaguucgacaagcuguacaucuggggcgugcaccaccccggcaccgacaaggaccagaucuuccuguacgcccagagcagcggcagaaucaccgugagcaccaagagaagccagcaggccgugauccccaacaucggcagcagacccagaaucagaaacauccccagcagaaucagcaucuacuggaccaucgugaagcccggcgacauccugcugaucaacagcaccggcaaccugaucgcccccagaggcuacuucaagaucagaagcggcaagagcagcaucaugagaagcgacgcccccaucggcaagugcaagagcgagugcaucacccccaacggcagcauccccaacgacaagcccuuccagaacgugaacagaaucaccuacggcgccugccccagauacgugaagcagagcacccugaagcuggccaccggcaugagaaacgugcccgagaagcagaccagaggcaucuucggcgccaucgccggcuucaucgagaacggcugggagggcaugguggacggcugguacggcuucagacaccagaacagcgagggcagaggccaggccgccgaccugaagagcacccaggccgccaucgaccagaucaacggcaagcugaacagacugaucggcaagaccaacgagaaguuccaccagaucgagaaggaguucagcgagguggagggcagaauccaggaccuggagaaguacguggaggacaccaagaucgaccuguggagcuacaacgccgagcugcugguggcccuggagaaccagcacaccaucgaccugaccgacagcgagaugaacaagcuguucgagaagaccaagaagcagcugagagagaacgccgaggacaugggcaacggcugcuucaagaucuaccacaagugcgacaacgccugcaucggcagcaucagaaacggcaccuacgaccacaacguguacagagacgaggcccugaacaacagauuccagaucaagggcguggagcugaagagcggcuacaaggacuggauccuguggaucagcuucgccaucagcugcuuccugaucugcguggcccugcugggcuucaucaugugggccugccagaagggcaacaucagaugcaacaucugcaucuga

SEQ ID NO: 170609 - RNA, 1701 nt, Artificial Sequence; identical to SEQ ID NO: 169918
  derived and/or modified CDS sequence (opt4) from hemagglutinin__InfluenzaA__AGW01737

SEQ ID NO: 170610 - RNA, 1701 nt, Artificial Sequence; identical to SEQ ID NO: 170054
  derived and/or modified CDS sequence (opt4) from hemagglutinin__InfluenzaA__AGW01749

SEQ ID NO: 170611 - RNA, 1701 nt, Artificial Sequence; identical to SEQ ID NO: 170054
  derived and/or modified CDS sequence (opt4) from hemagglutinin__InfluenzaA__AGW01761

SEQ ID NO: 170612 - RNA, 1701 nt, Artificial Sequence; identical to SEQ ID NO: 169918
  derived and/or modified CDS sequence (opt4) from hemagglutinin__InfluenzaA__AGW01773

SEQ ID NO: 170613 - RNA, 1701 nt, Artificial Sequence; identical to SEQ ID NO: 170054
  derived and/or modified CDS sequence (opt4) from hemagglutinin__InfluenzaA__AGW01785

SEQ ID NO: 170614 - RNA, 1701 nt, Artificial Sequence; identical to SEQ ID NO: 169918
  derived and/or modified CDS sequence (opt4) from hemagglutinin__InfluenzaA__AGW01797

SEQ ID NO: 170615 - RNA, 1701 nt, Artificial Sequence; identical to SEQ ID NO: 170054
  derived and/or modified CDS sequence (opt4) from hemagglutinin__InfluenzaA__AGW01809

SEQ ID NO: 170616 - RNA, 1701 nt, Artificial Sequence; identical to SEQ ID NO: 170054
  derived and/or modified CDS sequence (opt4) from hemagglutinin__InfluenzaA__AGW01821

SEQ ID NO: 170617 - RNA, 1701 nt, Artificial Sequence; identical to SEQ ID NO: 170053
  derived and/or modified CDS sequence (opt4) from hemagglutinin__InfluenzaA__AGW01833

SEQ ID NO: 170618 - RNA, 1701 nt, Artificial Sequence
  derived and/or modified CDS sequence (opt4) from hemagglutinin__InfluenzaA__AGW01845
augaagaccaucaucgcccugagcuacauccugugccugguguucgcccagaagcugcccggcaacgacaacagcaccgccacccugugccugggccaccacgccgugcccaacggcaccaucgugaagaccaucaccaacgacagaaucgaggugaccaacgccaccgagcuggugcagaacagcagcaucggcgagaucugcgacagcccccaccagauccuggacggcgagaacugcacccugaucgacgcccugcugggcgacccccagugcgacggcuuccagaacaagaagugggaccuguucguggagagaagcaaggccuacagcaacugcuaccccuacgacgugcccgacuacgccagccugagaagccugguggccagcagcggcacccuggaguucaccaacgagagcuucaacuggaccggcgugacccagaacggcaccagcagcgccugcaucagaagaagcaacagcagcuucuucagcagacugaacuggcugacccaccugaacuucaaguaccccgcccugaacgugaccaugcccaacaacgagcaguucgacaagcuguacaucuggggcgugcaccaccccggcaccgacaaggaccagaucuuccuguacgcccagagcagcggcagaaucaccgugagcaccaagagaagccagcaggccgugauccccaacaucggcagcagacccagaaucagaaacauccccagcagaaucagcaucuacuggaccaucgugaagcccggcgacauccugcugaucaacagcaccggcaaccugaucgcccccagaggcuacuucaagaucagaagcggcaagagcagcaucaugagaagcgacgcccccaucggcaagugcaagagcgagugcaucacccccaacggcagcauccccaacgacaagcccuuccagaacgugaacagaaucaccuacggcgccugccccagauacgugaagcagagcacccugaagcuggccaccggcaugagaaacgugcccgagaagcagaccagaggcaucuucggcgccaucgccggcuucaucgagaacggcugggagggcaugguggacggcugguacggcuucagacaccagaacagcgagggcagaggccaggccgccgaccugaagagcacccaggccgccaucgaccagaucaacggcaagcugaacagacugaucggcaagaccaacgagaaguuccaccagaucgagaaggaguucagcgagguggagggcagaauccaggaccuggagaaguacguggaggacaccaagaucgaccuguggagcuacaacgccgagcugcugguggcccuggagaaccagcacaccaucgaccugaccgacagcgagaugaacaagcuguucgagaagaccaagaagcagcugagagagaacgccgaggacaugggcaacggcugcuucaagaucuaccacaagugcgacaacgccugcaucggcagcaucagaaacggcaccuacgaccacaacguguacagagacgaggcccugaacaacagauuccagaucaagggcguggagcugaagagcggcuacaaggacuggauccuguggaucagcuucgccaucagcugcuuccugcugugcguggcccugcugggcuucaucaugugggccugccagaagggcaacaucagaugcaacaucugcaucuga

SEQ ID NO: 170619 - RNA, 1701 nt, Artificial Sequence; identical to SEQ ID NO: 170054
  derived and/or modified CDS sequence (opt4) from hemagglutinin__InfluenzaA__AGW01857

SEQ ID NO: 170620 - RNA, 1701 nt, Artificial Sequence; identical to SEQ ID NO: 170054
  derived and/or modified CDS sequence (opt4) from hemagglutinin__InfluenzaA__AGW01869

SEQ ID NO: 170621 - RNA, 1701 nt, Artificial Sequence; identical to SEQ ID NO: 170605
  derived and/or modified CDS sequence (opt4) from hemagglutinin__InfluenzaA__AGW01881

SEQ ID NO: 170622 - RNA, 1701 nt, Artificial Sequence; identical to SEQ ID NO: 169928
  derived and/or modified CDS sequence (opt4) from hemagglutinin__InfluenzaA__AGW01893

SEQ ID NO: 170623 - RNA, 1701 nt, Artificial Sequence; identical to SEQ ID NO: 169943
  derived and/or modified CDS sequence (opt4) from hemagglutinin__InfluenzaA__AGW01905

SEQ ID NO: 170624 - RNA, 1701 nt, Artificial Sequence; identical to SEQ ID NO: 170054
  derived and/or modified CDS sequence (opt4) from hemagglutinin__InfluenzaA__AGW01917

SEQ ID NO: 170625 - RNA, 1701 nt, Artificial Sequence; identical to SEQ ID NO: 169918
  derived and/or modified CDS sequence (opt4) from hemagglutinin__InfluenzaA__AGW01929

SEQ ID NO: 170626 - RNA, 1701 nt, Artificial Sequence; identical to SEQ ID NO: 170054
  derived and/or modified CDS sequence (opt4) from hemagglutinin__InfluenzaA__AGW01941

SEQ ID NO: 170627 - RNA, 1701 nt, Artificial Sequence; identical to SEQ ID NO: 169918
  derived and/or modified CDS sequence (opt4) from hemagglutinin__InfluenzaA__AGW01953

SEQ ID NO: 170628 - RNA, 1701 nt, Artificial Sequence
  derived and/or modified CDS sequence (opt4) from hemagglutinin__InfluenzaA__AGW01965
augaagaccaucaucgcccugagcuacauccugugccugguguucgcccaggagcugcccggcaacgacgacagcauggccacccugugccugggccaccacgccgugcccaacggcaccaucgugaagaccaucaccaacgaccagaucgaggugaccaacgccaccgagcuggugcagagcagcagcaccggcgagaucugcaacagcccccaccagauccuggacggcgagaacugcacccugaucgacgcccugcugggcgacccccagugcgacggcuuccagaacaagaagugggaccuguucguggagagaagcaaggcccacagcaacugcuaccccuacgacgugcccgacuacgccagccugagaagccugguggccagcagcggcacccuggaguucaacaacgagagcuucaacuggaccggcgugacccagaacggcaccagcagcgccugcaucagaagaagcaacaacagcuucuucagcagacugaacuggcugacccaccugaacuucaaguaccccgcccugaacgugaccaugcccaacaacgagcaguucgacaagcuguacaucuggggcgugcaccaccccggcaccgacaaggaccagaucuuccuguacgcccaggccagcggcagaaucaccgugagcaccaagagaagccagcaggccgugauccccaacaucggcagcagacccagagugagaaacauccccagcagagugagcaucuacuggaccaucgugaagcccggcgacauccugcugaucaacagcaccggcaaccugaucgcccccagaggcuacuucaagaucagaagcggcaagagcagcaucaugagaagcgacgcccccaucggcaagugcaacagcgccugcaucacccccaacggcagcauccccaacgacaagcccuuccagaacgugaacagaaucaccuacggcgccugccccagauacgugaagcagaacacccugaagcuggccaccggcaugagaaacgugcccgagaagcagaccagaggcaucuucggcgccaucgccggcuucaucgagaacggcugggagggcaugguggacggcugguacggcuucagacaccagaacagcgagggcagaggccaggccgccgaccugaagagcacccaggccgccaucgaccagaucaacggcaagcugaacagacugaucggcaagaccaacgagaaguuccaccagaucgagaaggaguucagcgagguggagggcagaauccaggaccuggagaaguacguggaggacaccaagaucgaccuguggagcuacaacgccgagcugcugguggcccuggagaaccagcacaccaucgaccugaccgacagcgagaugaacaagcuguucgagaagaccaagaagcagcugagagagaacgccgaggacaugggcaacggcugcuucaagaucuaccacaagugcgacaacgacugcaucggcagcaucagaaacggcaccuacgaccacaacguguacagagacgaggcccugaacaacagauuccagaucaagggcaucgagcugaagagcggcuacaaggacuggauccuguggaucagcuucgccaucagcugcuuccugcugugcguggcccugcugggcuucaucaugugggccugccagaagggcaacaucagaugcaacaucugcaucuga

SEQ ID NO: 170629 - RNA, 1701 nt, Artificial Sequence; identical to SEQ ID NO: 170054
  derived and/or modified CDS sequence (opt4) from hemagglutinin__InfluenzaA__AGW01977

SEQ ID NO: 170630 - RNA, 1701 nt, Artificial Sequence; identical to SEQ ID NO: 170054
  derived and/or modified CDS sequence (opt4) from hemagglutinin__InfluenzaA__AGW01989

SEQ ID NO: 170631 - RNA, 1701 nt, Artificial Sequence; identical to SEQ ID NO: 170054
  derived and/or modified CDS sequence (opt4) from hemagglutinin__InfluenzaA__AGW02001

SEQ ID NO: 170632 - RNA, 1701 nt, Artificial Sequence; identical to SEQ ID NO: 170054
  derived and/or modified CDS sequence (opt4) from hemagglutinin__InfluenzaA__AGW02013

SEQ ID NO: 170633 - RNA, 1701 nt, Artificial Sequence; identical to SEQ ID NO: 169918
  derived and/or modified CDS sequence (opt4) from hemagglutinin__InfluenzaA__AGW02025

SEQ ID NO: 170634 - RNA, 1701 nt, Artificial Sequence; identical to SEQ ID NO: 170054
  derived and/or modified CDS sequence (opt4) from hemagglutinin__InfluenzaA__AGW02037

SEQ ID NO: 170635 - RNA, 1701 nt, Artificial Sequence; identical to SEQ ID NO: 170054
  derived and/or modified CDS sequence (opt4) from hemagglutinin__InfluenzaA__AGW02061

SEQ ID NO: 170636 - RNA, 1701 nt, Artificial Sequence; identical to SEQ ID NO: 170054
  derived and/or modified CDS sequence (opt4) from hemagglutinin__InfluenzaA__AGW02073

SEQ ID NO: 170637 - RNA, 1701 nt, Artificial Sequence; identical to SEQ ID NO: 170054
  derived and/or modified CDS sequence (opt4) from hemagglutinin__InfluenzaA__AGW02085

SEQ ID NO: 170638 - RNA, 1701 nt, Artificial Sequence; identical to SEQ ID NO: 169943
  derived and/or modified CDS sequence (opt4) from hemagglutinin__InfluenzaA__AGW02097

SEQ ID NO: 170639 - RNA, 1701 nt, Artificial Sequence; identical to SEQ ID NO: 169918
  derived and/or modified CDS sequence (opt4) from hemagglutinin__InfluenzaA__AGW02109

SEQ ID NO: 170640 - RNA, 1701 nt, Artificial Sequence; identical to SEQ ID NO: 170054
  derived and/or modified CDS sequence (opt4) from hemagglutinin__InfluenzaA__AGW02133

SEQ ID NO: 170641 - RNA, 1701 nt, Artificial Sequence; identical to SEQ ID NO: 170054
  derived and/or modified CDS sequence (opt4) from hemagglutinin__InfluenzaA__AGW02157

SEQ ID NO: 170642 - RNA, 1701 nt, Artificial Sequence; identical to SEQ ID NO: 169918
  derived and/or modified CDS sequence (opt4) from hemagglutinin__InfluenzaA__AGW02169

SEQ ID NO: 170643 - RNA, 1701 nt, Artificial Sequence; identical to SEQ ID NO: 170054
  derived and/or modified CDS sequence (opt4) from hemagglutinin__InfluenzaA__AGW02181

SEQ ID NO: 170644 - RNA, 1701 nt, Artificial Sequence; identical to SEQ ID NO: 169928
  derived and/or modified CDS sequence (opt4) from hemagglutinin__InfluenzaA__AGW02193

SEQ ID NO: 170645 - RNA, 1701 nt, Artificial Sequence; identical to SEQ ID NO: 169895
  derived and/or modified CDS sequence (opt4) from hemagglutinin__InfluenzaA__AGW04171

SEQ ID NO: 170646 - RNA, 1707 nt, Artificial Sequence
  derived and/or modified CDS sequence (opt4) from hemagglutinin__InfluenzaA__AGW27061
auggagaagaucgugcugcuguucgccaucgugaaccuggugaagagcgaccacaucugcaucggcuaccacgccaacaacagcaccgagcagguggacaccaucauggagaagaacgugaccgugacccacgcccaggacauccuggagaagacccacaacggcaagcugugcgaccugaacggcgugaagccccugauccugaaggacugcagcguggccggcuggcugcugggcaaccccaugugcgacgaguucaucgacgugcccgaguggagcuacaucguggagaaggccaaccccgccaacgaccugugcuaccccggcaacuucaacgacuacgaggagcugaagcaccugcugagcagaaucaaccacuucgagaagaucagaaucauccccaaggacagcuggcccgaccacgaggccagccugggcgugagcgccgccugcagcuaccagggcaacagcagcuucuucagaaacgugguguggcugcugaagaagaacgacgccuaccccaucaucaagaagagcuacaacaacaccaacaaggaggaccugcuggugcuguggggcauccaccaccccaacgacgaggccgagcagaucagacuguaccagaaccccaccaccuacgugagcaccggcaccagcacccugaaccagagacuggugcccagaaucgccaccagaagcaaggugaacggccagagcggcagaaucgacuucuucuggaccauccugaagcccaacgacgccaucaacuucgagagcaacggcaacuucaucgcccccgaguacgccuacaagaucgugaagaagggcgacagcaccaucaugagaagcgagguggaguacggcaacugcagcaccagaugccagacccccaugggcgccaucaacagcagcaugcccuuccacaacauccacccccugaccaucggcgagugccccaaguacgugaagagcaacaagcuggugcuggccaccggccugagaaacagcccccagaucgagagaagaagaagaaagagaggccuguucggcgccaucgccggcuucaucgagggcggcuggcagggcaugguggacggcugguacggcuaccaccacagcaacgagcagggcagcggcuacgccgccgacaaggagagcacccagaaggccaucgacggcgugaccaacaaggugaacagcaucaucgacaagaugaacacccaguucgaggccgugggcagagaguucaacaaccuggagagaagaaucgagaaccugaacaagaagauggaggacggcuuccuggacguguggaccuacaacgccgagcugcuggugcugauggagaacgagagaacccuggacuuccacgacagcaacgugaagaaccuguacgacaaggugagacugcagcugagagacaacgccaaggagcugggcaacggcugcuucgaguucuaccacaagugcgacaacgagugcauggagagcgugagaaacggcaccuacgacuacccccaguacagcgaggaggccagacugaagagagaggagaucagcggcgugaagcuggagagcaucggcaccuaccagauccugagcaucuacagcaccguggccagcagccuggugcugagcaucaugguggccggccugagccuguggaugugcagcaacggcagccugcagugcagaaugugcaucuga

SEQ ID NO: 170647 - RNA, 1698 nt, Artificial Sequence
  derived and/or modified CDS sequence (opt4) from hemagglutinin__InfluenzaA__AGY14471
augaaggugaagcugcugauccugcugugcaccuucaccgccaccuacgccgacaccaucugcaucggcuaccacgccaacaacagcaccgacaccguggacaccauccuggagaagaacgugaccgugacccacagcgugaaccugcuggaggacagccacaacggcaagcugugccugcugaagggcaucgccccccugcagcugggcaacugcagcguggccggcuggauccugggcaaccccgagugcggccugcugauccccaaggagagcuggagcuacaucguggagacccccaaccccgagaacggcaccugcuaccccggcuacuucgacgacuacgaggagcugagagagcagcugagcagcgugagcagcuucgagagauucgagaucuuccccaaggagagcagcuggcccaaccacaccgugaccggcgugagcgccagcugcagccacaacggcaagagcagcuucuacagaaaccugcuguggcugaccggcaagaacggccuguaccccaaccugagcaagagcuacgccaacaacaaggagaaggaggugcugauccuguggggcgugcaccaccccagcaacaucggcaaccagagaacccuguaccacaccgagaacaccuacgugagcguggugagcagccacuacagcagaagauucacccccgagaucaccaagagacccaaggugagagaccaggagggcagaaucaacuacuacuggacccugcuggagcccggcgacaccaucaucuucgaggccaacggcaaccugaucgcccccugguacgccuucgcccugagcaagggcuucggcagcggcaucaucaccagcaacgcccccauggacgagugcgacgccaagugccagaccccccagggcgccaucaacagcaaccugcccuuccagaacgugcaccccgugaccaucggcgagugccccaaguacgugagaagcaccaagcugagaauggugaccggccugagaaacauccccagcauccagagcagaggccuguucggcgccaucgccggcuucaucgagggcggcuggaccggcaugguggacggcugguacggcuaccaccaccagaacgagcagggcagcggcuacgccgccgaccaggagagcacccagaacgccaucaacggcaucaccaacaaggugaacagcgugaucgagaagaugaacacccaguucaccguggugggcaaggaguucaacaagcuggagagaagaauggagaaccugaacaagaagguggacgacggcuuccuggacaucuggaccuacaacgccgagcugcuggugcugcuggagaacgagagaacccuggacuuccacgacagcaacgugaugaaccuguacgagaaggugaagggccagcugaagaacaacgccaaggagaucggcaacggcugcuucgaguucuaccacaagugcaacaacgagugcauggagagcgugaagaacggcaccuacgacuaccccaaguacagcgaggagagcaagcugaacagagagaagaucgacggcgugaagcuggagagcaugggcguguaccagauccuggccaucuacagcaccguggccagcagccuggugcugcuggugagccugggcgccaucagcuucuggaugugcagcaacggcagccugcagugcagaaucugcaucuga

SEQ ID NO: 170648 - RNA, 1698 nt, Artificial Sequence; identical to SEQ ID NO: 170647
  derived and/or modified CDS sequence (opt4) from hemagglutinin__InfluenzaA__AGY14477

SEQ ID NO: 170649 - RNA, 1701 nt, Artificial Sequence
  derived and/or modified CDS sequence (opt4) from hemagglutinin__InfluenzaA__AHC57459
augaagaccaucaucgcccugagcuacauccugugccugguguucgcccagaagcugcccggcaacgacaacagcaccgccacccugugccugggccaccacgccgugcccaacggcaccaucgugaagaccaucaccaacgaccagaucgaggugaccaacgccaccgagcuggugcagagcagcagcaccggcgagaucugcaacagcccccaccagauccuggacggcgagaacugcacccugaucgacgcccugcugggcgacccccagugcgacggcuuccagaacaagaagugggaccuguucguggagagaagcaaggcccacagcaacugcuaccccuacgacgugcccgacuacgccagccugagaagccugguggccagcagcggcacccuggaguucaacaacgagagcuucaacuggaccggcgugacccagaacggcaccagcagcgccugcaucagaagaagcaacaacagcuucuucagcagacugaacuggcugacccaccugaacuucaaguaccccgcccugaacgugaccaugcccaacaacgagcaguucgacaagcuguacaucuggggcgugcaccaccccggcaccgacaaggaccagaucuuccuguacgcccaggccgccggcagaaucaccgugagcaccaagagaagccagcaggccgugauccccaacaucggcagcagacccagaaucagaaacauccccagcagagugagcaucuacuggaccaucgugaagcccggcgacauccugcugaucaacagcaccggcaaccugaucgcccccagaggcuacuucaagaucagaagcggcaagagcagcaucaugagaagcgacgcccccaucggcaagugcaacagcgccugcaucacccccaacggcagcauccccaacgacaagcccuuccagaacgugaacagaaucaccuacggcgccugccccagauacgugaagcagaacacccugaagcuggccaccggcaugagaaacgugcccgagaagcagaccagaggcaucuucggcgccaucgccggcuucaucgagaacggcugggagggcaugguggacggcugguacggcuucagacaccagaacagcgagggcagaggccaggccgccgaccugaagagcacccaggccgccaucgaccagaucaacggcaagcugaacagacugaucggcaagaccaacgagaaguuccaccagaucgagaaggaguucagcgagguggagggcagaauccaggaccuggagaaguacguggaggacaccaagaucgaccuguggagcuacaacgccgagcugcugguggcccuggagaaccagcacaccaucgaccugaccgacagcgagaugaacaagcuguucgagaagaccaagaagcagcugagagagaacgccgaggacaugggcaacggcugcuucaagaucuaccacaagugcgacaacgccugcaucggcagcaucagaaacggcaccuacgaccacgacguguacagagacgaggcccugaacaacagauuccagaucaagggcguggagcugaagagcggcuacaaggacuggauccuguggaucagcuucgccaucagcugcuuccugcugugcguggcccugcugggcuucaucaugugggccugccagaagggcaacaucagaugcaacaucugcaucuga

SEQ ID NO: 170650 - RNA, 1701 nt, Artificial Sequence; identical to SEQ ID NO: 167042
  derived and/or modified CDS sequence (opt4) from hemagglutinin__InfluenzaA__AHC57465

SEQ ID NO: 170651 - RNA, 1701 nt, Artificial Sequence; identical to SEQ ID NO: 166915
  derived and/or modified CDS sequence (opt4) from hemagglutinin__InfluenzaA__AHC57487

SEQ ID NO: 170652 - RNA, 1701 nt, Artificial Sequence; identical to SEQ ID NO: 167842
  derived and/or modified CDS sequence (opt4) from hemagglutinin__InfluenzaA__AHC57499

SEQ ID NO: 170653 - RNA, 1701 nt, Artificial Sequence; identical to SEQ ID NO: 167842
  derived and/or modified CDS sequence (opt4) from hemagglutinin__InfluenzaA__AHC57511

SEQ ID NO: 170654 - RNA, 1701 nt, Artificial Sequence; identical to SEQ ID NO: 167842
  derived and/or modified CDS sequence (opt4) from hemagglutinin__InfluenzaA__AHC57523

SEQ ID NO: 170655 - RNA, 1701 nt, Artificial Sequence; identical to SEQ ID NO: 167042
  derived and/or modified CDS sequence (opt4) from hemagglutinin__InfluenzaA__AHC57675

SEQ ID NO: 170656 - RNA, 1701 nt, Artificial Sequence; identical to SEQ ID NO: 167042
  derived and/or modified CDS sequence (opt4) from hemagglutinin__InfluenzaA__AHC57827

SEQ ID NO: 170657 - RNA, 1701 nt, Artificial Sequence; identical to SEQ ID NO: 166915
  derived and/or modified CDS sequence (opt4) from hemagglutinin__InfluenzaA__AHC57956

SEQ ID NO: 170658 - RNA, 1701 nt, Artificial Sequence
  derived and/or modified CDS sequence (opt4) from hemagglutinin__InfluenzaA__AHC57981
augaagaccaucaucgcccugagcuacauccugugccugguguucgcccagaagauccccggcaacgacaacagcaccgccacccugugccugggccaccacgccgugcccaacggcaccaucgugaagaccaucaccaacgaccagaucgaggugaccaacgccaccgagcuggugcagaacagcagcaccggcgagaucugcgacagcccccaccagauccuggacggcgagaacugcacccugaucgacgcccugcugggcgacccccagugcgacggcuuccagaacaagaagugggaccuguucguggagagaagcaaggccuacagcaacugcuaccccuacgacgugcccgacuacgccagccugagaagccugaucgccagcagcggcacccuggaguucaacaacgagagcuucaacuggaccggcgugacccagaacggcaccagcagcgccugcaucagaagaagcaacaacagcuucuucagcagacugaacuggcugacccaccugaacuucaaguaccccgcccugaacgugaccaugcccaacaacgagcaguucgacaagcuguacaucuggggcgugcaccaccccggcaccgacaaggaccagaucuuccuguacgcccaggccagcggcagaaucaccgugagcaccaagagaagccagcaggccgugauccccaacaucggcagcagacccagagugagaaacauccccagcagaaucagcaucuacuggaccaucgugaagcccggcgacauccugcugaucaacagcaccggcaaccugaucgcccccagaggcuacuucaagaucagaagcggcaagagcagcaucaugagaagcgacgcccccaucggcaagugcaacagcgagugcaucacccccaacggcagcauccccaacgacaagcccuuccagaacgugaacagaaucaccuacggcgccugccccagauacgugaagcagaacacccugaagcuggccaccggcaugagaaacgugcccgagaagcagaccagaggcaucuucggcgccaucgccggcuucaucgagaacggcugggagggcaugguggacggcugguacggcuucagacaccagaacagcgagggcagaggccaggccgccgaccugaagagcacccaggccgccaucgaccagaucaacggcaaccugaacagacugaucggcaagaccaacgagaaguuccaccagaucgagaaggaguucagcgagguggagggcagaauccaggaccuggagaaguacguggaggacaccaagaucgaccuguggagcuacaacgccgagcugcugguggcccuggagaaccagcacaccaucgaccugaccgacagcgagaugaacaagcuguucgagaagaccaagaagcagcugagagagaacgccgaggacaugggcaacggcugcuucaagaucuaccacaagugcgacaacgccugcaucggcagcaucagaaacggcaccuacgaccacgacguguacagagacgaggcccugaacaacagauuccagaucaagggcguggagcugaagagcggcuacaaggacuggauccuguggaucagcuucgccaucagcugcuuccugcugugcguggcccugcugggcuucaucaugugggccugccagaagggcaacaucagaugcaacaucugcaucuga

SEQ ID NO: 170659 - RNA, 1701 nt, Artificial Sequence; identical to SEQ ID NO: 167842
  derived and/or modified CDS sequence (opt4) from hemagglutinin__InfluenzaA__AHC57993

SEQ ID NO: 170660 - RNA, 1701 nt, Artificial Sequence; identical to SEQ ID NO: 169134
  derived and/or modified CDS sequence (opt4) from hemagglutinin__InfluenzaA__AHC58005

SEQ ID NO: 170661 - RNA, 1701 nt, Artificial Sequence
  derived and/or modified CDS sequence (opt4) from hemagglutinin__InfluenzaA__AHC58017
augaagaccaucaucgcccugagcuacauccugugccugguguucgcccagaagcugcccggcaacgacaacagcaccgccacccugugccugggccaccacgccgugcccaacggcaccaucgugaagaccaucaccaacgaccagaucgaggugaccaacgccaccgagcuggugcagagcagcagcaccggcgagaucugcaacagcccccaccagauccuggacggcgagaacugcacccugaucgacgcccugcugggcgacccccagugcgacggcuuccagaacaagaagugggaccuguucguggagagaagcaaggcccacagcaacugcuaccccuacgacgugcccgacuacgccagccugagaagccugguggccagcagcggcacccuggaguucaacaacgagagcuucaacuggaccggcgugacccagaacggcaccagcagcgccugcaucagaagaagcaacaacagcuucuucagcagacugaacuggcugacccaccugaacuucaaguaccccgcccugaacgugaccaugcccaacaacgagcaguucgacaagcuguacaucuggggcgugcaccaccccggcaccgacaaggaccagaucuuccuguacgcccaggccgccggcagaaucaccgugagcaccaagagaagccagcaggccgugauccccaacaucggcagcagacccagagugagaaacauccccagcagagugagcaucuacuggaccaucgugaagcccggcgacauccugcugaucaacagcaccggcaaccugaucgcccccagaggcuacuucaagaucagaagcggcaagagcagcaucaugagaagcgacgcccccaucggcaagugcaacagcgccugcaucacccccaacggcagcauccccaacgacaagcccuuccagaacgugaacagaaucaccuacggcgccugccccagauacgugaagcagaacacccugaagcuggccaccggcaugagaaacgugcccgagaagcagaccagaggcaucuucggcgccaucgccggcuucaucgagaacggcugggagggcaugguggacggcugguacggcuucagacaccagaacagcgagggcagaggccaggccgccgaccugaagagcacccaggccgccaucgaccagaucaacggcaagcugaacagacugaucggcaagaccaacgagaaguuccaccagaucgagaaggaguucagcgagguggagggcagaauccaggaccuggagaaguacguggaggacaccaagaucgaccuguggagcuacaacgccgagcugcugguggcccuggagaaccagcacaccaucgaccugaccgacagcgagaugaacaagcuguucgagaagaccaagaagcagcugagagagaacgccgaggacaugggcaacggcugcuucaagaucuaccacaagugcgacaacgccugcaucgugagcaucagaaacggcaccuacgaccacgacguguacagagacgaggcccugaacaacagauuccagaucaagggcguggagcugaagagcggcuacaaggacuggauccuguggaucagcuucgccaucagcugcuuccugcugugcguggcccugcugggcuucaucaugugggccugccagaagggcaacaucagaugcaacaucugcaucuga

SEQ ID NO: 170662 - RNA, 1701 nt, Artificial Sequence
  derived and/or modified CDS sequence (opt4) from hemagglutinin__InfluenzaA__AHC58029
augaagaccaucaucgcccugagcuacauccugugccugguguucgcccagaagcugcccggcaacgacaacagcaccgccacccugugccugggccaccacgccgugcccaacggcaccaucgugaagaccaucaccaacgaccagaucgaggugaccaacgccaccgagcuggugcagagcagcagcaccggcgagaucugcaacagcccccaccagauccuggacggcgagaacugcacccugaucgacgcccugcugggcgacccccagugcgacggcuuccagaacaagaagugggaccuguucguggagagaagcaaggcccacagcaacugcuaccccuacgacgugcccgacuacgccagccugagaagccugguggccagcagcggcacccuggaguucaacaacgagagcuucaacuggaccggcgugacccagaacggcaccagcagcgccugcaucagaggcagcaacaacagcuucuucagcagacugaacuggcugacccagcugaacuucaaguaccccgcccugaacgugaccaugcccaacaacgagcaguucgacaagcuguacaucuggggcgugcaccaccccggcaccgacaaggaccagaucuuccuguacgcccaggccagcggcagaaucaccgugagcaccaagagaagccagcaggccgugauccccaacaucggcagcagacccagagugagaaacauccccagcagagugagcaucuacuggaccaucgugaagcccggcgacauccugcugaucaacagcaccggcaaccugaucgcccccagaggcuacuucaagaucagaagcggcaagagcagcaucaugagaagcgacgcccccaucggcaagugcaacagcgccugcaucacccccaacggcagcauccccaacgacaagcccuuccagaacgugaacagaaucaccuacggcgccugccccagauacgugaagcagaacacccugaagcuggccaccggcaugagaaacgugcccgagaagcagaccagaggcaucuucggcgccaucgccggcuucaucgagaacggcugggagggcaugguggacggcugguacggcuucagacaccagaacagcgagggcagaggccaggccgccgaccugaagagcacccaggccgccaucgaccagaucaacggcaagcugaacagacugaucggcaagaccaacgagaaguuccaccagaucgagaaggaguucagcgagguggagggcagaauccaggaccuggagaaguacguggaggacaccaagaucgaccuguggagcuacaacgccgagcugcugguggcccuggagaaccagcacaccaucgaccugaccgacagcgagaugaacaagcuguucgagaagaccaagaagcagcugagagagaacgccgaggacaugggcaacggcugcuucaagaucuaccacaagugcgacaacgccugcaucggcagcaucagaaacggcaccuacgaccacgacguguacagagacgaggcccugaacaacagauuccagaucaagggcguggagcugaagagcggcuacaaggacuggauccuguggaucagcuucgccaucagcugcuuccugcugugcguggcccugcugggcuucaucaugugggccugccagaagggcaacaucagaugcaacaucugcaucuga

SEQ ID NO: 170663 - RNA, 1701 nt, Artificial Sequence
  derived and/or modified CDS sequence (opt4) from hemagglutinin__InfluenzaA__AHC58050
augaagaccaucaucgcccugagcuacauccugugccugguguucgcccagaagcugcccggcaacgacaacagcaccgccacccugugccugggccaccacgccgugcccaacggcaccaucgugaagaccaucaccaacgaccagaucgaggugaccaacgccaccgagcuggugcagagcagcagcaccggcgagaucugcgacagcccccaccagauccuggacggcgagaacugcacccugaucgacgcccugcugggcgacccccagugcgacggcuuccagaacaagaagugggaccuguucguggagagaagcaaggccuacagcaacugcuaccccuacgacgugcccgacuacgccagccugagaagccugguggccagcagcggcacccuggaguucaacaacgagagcuucaacuggaccggcgugacccagaacggcaccagcagcgccugcaucagaagaagcaacagcagcuucuucagcagacugaacuggcugacccaccugaacuucaaguaccccgcccugaacgugaccaugcccaacaacgagcaguucgacaagcuguacaucuggggcgugcaccaccccggcaccgacaaggaccagaucuuccuguacgcccagagcagcggcagaaucaccgugagcaccagaagaagccagcaggccgugauccccaacaucggcagcagacccagaaucagaaacauccccagcagaaucagcaucuacuggaccaucgugaagcccggcgacauccugcugaucaacagcaccggcaaccugaucgcccccagaggcuacuucaagaucagaagcggcaagagcagcaucaugagaagcgacgcccccaucggcaagugcaacagcgagugcaucacccccaacggcagcauccccaacgacaagcccuuccagaacgugaacagaaucaccuacggcgccugccccagauacgugaagcagagcacccugaagcuggccaccggcaugagaaacgugcccgagaagcagaccagaggcaucuucggcgccaucgccggcuucaucgagaacggcugggagggcaugguggacggcugguacggcuucagacaccagaacagcgagggcagaggccaggccgccgaccugaagagcacccaggccgccaucgaccagaucaacggcaagcugaacagacugaucggcaagaccaacgagaaguuccaccagaucgagaaggaguucagcgagguggagggcagaauccaggaccuggagaaguacguggaggacaccaagaucgaccuguggagcuacaacgccgagcugcugguggcccuggagaaccagcacaccaucgaccugaccgacagcgagaugaacaagcuguucgagaagaccaagaagcagcugagagagaacgccgaggacaugggcaacggcugcuucaagaucuaccacaagugcgacaacgccugcaucggcagcaucagaaacggcaccuacaaccacgacguguacagagacgaggcccugaacaacagauuccagaucaagggcguggagcugaagagcggcuacaaggacuggauccuguggaucagcuucgccaucagcugcuuccugcugugcguggcccugcugggcuucaucaugugggccugccagaagggcaacaucagaugcaacaucugcaucuga

SEQ ID NO: 170664 - RNA, 1701 nt, Artificial Sequence; identical to SEQ ID NO: 167842
  derived and/or modified CDS sequence (opt4) from hemagglutinin__InfluenzaA__AHC58074

SEQ ID NO: 170665 - RNA, 1701 nt, Artificial Sequence; identical to SEQ ID NO: 167842
  derived and/or modified CDS sequence (opt4) from hemagglutinin__InfluenzaA__AHC58098

SEQ ID NO: 170666 - RNA, 1701 nt, Artificial Sequence; identical to SEQ ID NO: 167842
  derived and/or modified CDS sequence (opt4) from hemagglutinin__InfluenzaA__AHC58110

SEQ ID NO: 170667 - RNA, 1701 nt, Artificial Sequence; identical to SEQ ID NO: 167842
  derived and/or modified CDS sequence (opt4) from hemagglutinin__InfluenzaA__AHC58126

SEQ ID NO: 170668 - RNA, 1701 nt, Artificial Sequence; identical to SEQ ID NO: 167842
  derived and/or modified CDS sequence (opt4) from hemagglutinin__InfluenzaA__AHC58138

SEQ ID NO: 170669 - RNA, 1701 nt, Artificial Sequence; identical to SEQ ID NO: 167842
  derived and/or modified CDS sequence (opt4) from hemagglutinin__InfluenzaA__AHC58162

SEQ ID NO: 170670 - RNA, 1701 nt, Artificial Sequence; identical to SEQ ID NO: 169134
  derived and/or modified CDS sequence (opt4) from hemagglutinin__InfluenzaA__AHC58186

SEQ ID NO: 170671 - RNA, 1701 nt, Artificial Sequence
  derived and/or modified CDS sequence (opt4) from hemagglutinin__InfluenzaA__AHC58198
augaagaccaucaucgcccugagcuacauccugugccugguguucgcccagaagcugcccggcaacgacaacagcaccgccacccugugccugggccaccacgccgugcccaacggcaccaucgugaagaccaucaccaacgaccagaucgaggugaccaacgccaccgagcuggugcagaacagcagcaccggcgagaucugcgacagcccccaccagauccuggacggcgagaacugcacccugaucgacgcccugcugggcgacccccagugcgacggcuuccagaacaagaagugggaccuguucguggagagaagcaaggccuacagcaacugcuaccccuacgacgugcccgacuacgccagccugagaagccugguggccagcagcggcacccuggaguucaacaacgagagcuucaacuggaccggcgugacccagaacggcaccagcagcgccugcaucagaagaagcaacaacagcuucuucagcagacugaacuggcugacccaccugaacuucaaguaccccgcccugaacgugaccaugcccaacaacgagcaguucgacaagcuguacaucuggggcgugcaccaccccggcaccgacaaggaccagaucuuccuguacgcccaggccagcggcagaaucaccgugagcaccaagagaagccagcaggccgugauccccaacaucggcagcagacccagagugagaaacauccccagcagaaucagcaucuacuggaccaucgugaagcccggcgacauccugcugaucaacagcaccggcaaccugaucgcccccagaggcuacuucaagaucagaagcggcaagagcagcaucaugagaagcgacgcccccaucggcaagugcaacagcgagugcaucacccccaacggcagcauccccaacgacaagcccuuccagaacgugaacagaaucaccuacggcgccugccccagauacgugaagcagaacacccugaagcuggccaccggcaugagaaacgugcccgagaagcagaccagaggcaucuucggcgccaucgccggcuucaucgagaacggcugggagggcaugguggacggcugguacggcuucagacaccagaacagcgagggcagaggccaggccgccgaccugaagagcacccaggccgccaucgaccagaucaacggcaagcugaacagacugaucggcaagaccaacgagaaguuccaccagaucgagaaggaguucagcgagguggagggcagaauccagaaccuggagaaguacguggaggacaccaagaucgaccuguggagcuacaacgccgagcugcugguggcccuggagaaccagcacaccaucgaccugaccgacagcgagaugaacaagcuguucgagaagaccaagaagcagcugagagagaacgccgaggacaugggcaacggcugcuucaagaucuaccacaagugcgacaacgccugcaucggcagcaucagaaacggcaccuacgaccacgacguguacagagacgaggcccugaacaacagauuccagaucaagggcguggagcugaagagcggcuacaaggacuggauccuguggaucagcuucgccaucagcugcuuccugcugugcguggcccugcugggcuucaucaugugggacugccagaagggcaacaucagaugcaacaucugcaucuga

SEQ ID NO: 170672 - RNA, 1701 nt, Artificial Sequence
  derived and/or modified CDS sequence (opt4) from hemagglutinin__InfluenzaA__AHC58210
augaagaccaucaucgcccugagcuacauccugugccugguguucgcccagaagcugcccggcaacgacaacagcaccgccacccugugccugggccaccacgccgugcccaacggcaccaucgugaagaccaucaccaacgaccagaucgaggugaccaacgccaccgagcuggugcagaacagcagcaccggcgagaucugcgacagcccccaccagauccuggacggcgagaacugcacccugaucgacgcccugcugggcgacccccagugcgacggcuuccagaacaagaagugggaccuguucguggagagaagcaaggccuacagcaacugcuaccccuacgacgugcccgacuacgccagccugagaagccugguggccagcagcggcacccuggaguucaacaacgagagcuucaacugggccggcgugacccagaacggcaccagcagcgccugcaucagaagaagcaacaacagcuucuucagcagacugaacuggcugacccaccugaacuucaaguaccccgcccugaacgugaccaugcccaacaacgagcaguucgacaagcuguacaucuggggcgugcaccaccccggcaccgacaaggaccagaucuuccuguacgcccaggccagcggcagaaucaccgugagcaccaagagaagccagcaggccgugauccccaacaucggcagcagacccagagugagaaacauccccagcagaaucagcaucuacuggaccaucgugaagcccggcgacauccugcugaucaacagcaccggcaaccugaucgcccccagaggcuacuucaagaucagaagcggcaagagcagcaucaugagaagcgacgcccccaucggcaagugcaacagcgagugcaucacccccaacggcagcauccccaacgacaagcccuuccagaacgugaacagaaucaccuacggcgccugccccagauacgugaagcagaacacccugaagcuggccaccggcaugagaaacgugcccgagaagcagaccagaggcaucuucggcgccaucgccggcuucaucgagaacggcugggagggcaugguggacggcugguacggcuucagacaccagaacagcgagggcagaggccaggccgccgaccugaagagcacccaggccgccaucgaccagaucaacggcaagcugaacagacugaucggcaagaccaacgagaaguuccaccagaucgagaaggaguucagcgagguggagggcagaauccaggaccuggagaaguacguggaggacaccaagaucgaccuguggagcuacaacgccgagcugcugguggcccuggagaaccagcacaccaucgaccugaccgacagcgagaugaacaagcuguucgagaagaccaagaagcagcugagagagaacgccgaggacaugggcaacggcugcuucaagaucuaccacaagugcgacaacgccugcaucggcagcaucagaaacggcaccuacgaccacgacguguacagagacgaggcccugaacaacagauuccagaucaagggcguggagcugaagagcggcuacaaggacuggauccuguggaucagcuucgccaucagcugcuuccugcugugcguggcccugcugggcuucaucaugugggccugccagaagggcaacaucagaugcaacaucugcaucuga

SEQ ID NO: 170673 - RNA, 1701 nt, Artificial Sequence; identical to SEQ ID NO: 167042
  derived and/or modified CDS sequence (opt4) from hemagglutinin__InfluenzaA__AHC58234

SEQ ID NO: 170674 - RNA, 1701 nt, Artificial Sequence; identical to SEQ ID NO: 167842
  derived and/or modified CDS sequence (opt4) from hemagglutinin__InfluenzaA__AHC58246

SEQ ID NO: 170675 - RNA, 1701 nt, Artificial Sequence; identical to SEQ ID NO: 167042
  derived and/or modified CDS sequence (opt4) from hemagglutinin__InfluenzaA__AHC58258

SEQ ID NO: 170676 - RNA, 1701 nt, Artificial Sequence; identical to SEQ ID NO: 166915
  derived and/or modified CDS sequence (opt4) from hemagglutinin__InfluenzaA__AHC58270

SEQ ID NO: 170677 - RNA, 1701 nt, Artificial Sequence
  derived and/or modified CDS sequence (opt4) from hemagglutinin__InfluenzaA__AHC58372
augaagaccaucaucgcccugagcuacauccugugccugguguucgcccagaagcugcccggcaacgacaacagcaccgccacccugugccugggccaccacgccgugcccaacggcaccaucgugaagaccaucaccaacgaccagaucgaggugaccaacgccaccgagcuggugcagagcagcagcaccggcgagaucugcgacagcccccaccagauccuggacggcgagaacugcacccugaucgacgcccugcugggcgacccccagugcgacggcuuccagaacaagaagugggaccuguucguggagagaagcaaggccuacagcaacugcuaccccuacgacgugcccgacuacgccagccugagaagccugguggccagcagcggcacccuggaguucaacaacgagagcuucaacuggaccggcgugacccagaacggcaccagcagcgccugcaucagaagaagcaacagcagcuucuucagcagacugaacuggcugacccaccugaacuucaaguaccccgcccugaacgugaccaugcccaacaacgagcaguucgacaagcuguacaucuggggcgugcaccaccccggcaccgacaaggaccagaucuuccuguacgcccagagcagcggcagaaucaccgugagcaccaagagaagccagcaggccgugacccccaacaucggcagcagacccagaaucagaaacauccccagcagaaucagcaucuacuggaccaucgugaagcccggcgacauccugcugaucaacagcaccggcaaccugaucgcccccagaggcuacuucaagaucagaagcggcaagagcagcaucaugagaagcgacgcccccaucggcaagugcaacagcgagugcaucacccccaacggcagcauccccaacgacaagcccuuccagaacgugaacagaaucaccuacggcgccugccccagauacgugaagcagagcacccugaagcuggccaccggcaugagaaacgugcccgagaagcagaccagaggcaucuucggcgccaucgccggcuucaucgagaacggcugggagggcaugguggacggcugguacggcuucagacaccagaacagcgagggcagaggccaggccgccgaccugaagagcacccaggccgccaucgaccagaucaacggcaagcugaacagacugaucggcaagaccaacgagaaguuccaccagaucgagaaggaguucagcgagguggagggcagaauccaggaccuggagaaguacguggaggacaccaagaucgaccuguggagcuacaacgccgagcugcugguggcccuggagaaccagcacaccaucgaccugaccgacagcgagaugaacaagcuguucgagaagaccaagaagcagcugagagagaacgccgaggacaugggcaacggcugcuucaagaucuaccacaagugcgacaacgccugcaucggcagcaucagaaacggcaccuacaaccacgacguguacagagacgaggcccugaacaacagauuccagaucaagggcguggagcugaagagcggcuacaaggacuggauccuguggaucagcuucgccaucagcugcuuccugcugugcguggcccugcugggcuucaucaugugggccugccagaagggcaacaucagaugcaacaucugcaucuga

SEQ ID NO: 170678 - RNA, 1701 nt, Artificial Sequence
  derived and/or modified CDS sequence (opt4) from hemagglutinin__InfluenzaA__AHC58396
augaagaccaucaucgcccugagcuacauccugugccugguguucgcccagaagcugcccggcaacgacaacagcaccgccacccugugccugggccaccacgccgugcccaacggcaccaucgugaagaccaucaccaacgaccagaucgaggugaccaacgccaccgagcuggugcagagcagcagcaccggcgagaucugcaacagcccccaccagauccuggacggcgagaacugcacccugaucgacgcccugcugggcgacccccagugcgacggcuuccagaacaagaagugggaccuguucguggagagaagcaaggcccacagcaacugcuaccccuacgacgugcccgacuacgccagccugagaagccugguggccagcagcggcacccuggaguucaacaacgagagcuucaacuggaccggcgugacccagaacggcaccagcagcgccugcaucagaggcagcaacaacagcuucuucagcagacugaacuggcugacccaccugaacuucaaguaccccgcccugaacgugaccaugcccaacaacgagcaguucgacaagcuguacaucuggggcgugcaccaccccggcaccgacaaggaccagaucuuccuguacgcccaggccagcggcagaaucaccgugagcaccaagagaagccagcaggccgugauccccaacaucggcagcagacccagagugagaaacauccccagcagagugagcaucuacuggaccaucgugaagcccggcgacauccugcugaucaacagcaccggcaaccugaucgcccccagaggcuacuucaagaucagaagcggcaagagcagcaucaugagaagcgacgcccccaucggcaagugcaacagcgccugcaucacccccaacggcagcauccccaacgacaagcccuuccagaacgugaacagaaucaccuacggcgccugccccagauacgugaagcagaacacccugaagcuggccaccggcaugagaaacgugcccgagaagcagaccagaggcaucuucggcgccaucgccggcuucaucgagaacggcugggagggcaugguggacggcugguacggcuucagacaccagaacagcgagggcagaggccaggccgccgaccugaagagcacccaggccgccaucgaccagaucaacggcaagcugaacagacugaucggcaagaccaacgagaaguuccaccagaucgagaaggaguucagcgagguggagggcagaauccaggaccuggagaaguacguggaggacaccaagaucgaccuguggagcuacaacgccgagcugcugguggcccuggagaaccagcacaccaucgaccugaccgacagcgagaugaacaagcuguucgagaagaccaagaagcagcugagagagaacgccgaggacaugggcaacggcugcuucaagaucuaccacaagugcgacaacgccugcaucggcagcaucagaaacggcaccuacgaccacgacguguacagagacgaggcccugaacaacagauuccagaucaagggcguggagcugaagagcggcuacaaggacuggauccuguggaucagcuucgccaucagcugcuuccugcugugcguggcccugcugggcuucaucaugugggccugccagaagggcaacaucagaugcaacaucugcaucuga

SEQ ID NO: 170679 - RNA, 1701 nt, Artificial Sequence; identical to SEQ ID NO: 167842
  derived and/or modified CDS sequence (opt4) from hemagglutinin__InfluenzaA__AHC58408

SEQ ID NO: 170680 - RNA, 1701 nt, Artificial Sequence; identical to SEQ ID NO: 169134
  derived and/or modified CDS sequence (opt4) from hemagglutinin__InfluenzaA__AHC58420

SEQ ID NO: 170681 - RNA, 1701 nt, Artificial Sequence; identical to SEQ ID NO: 169134
  derived and/or modified CDS sequence (opt4) from hemagglutinin__InfluenzaA__AHC58432

SEQ ID NO: 170682 - RNA, 1701 nt, Artificial Sequence; identical to SEQ ID NO: 167042
  derived and/or modified CDS sequence (opt4) from hemagglutinin__InfluenzaA__AHC58444

SEQ ID NO: 170683 - RNA, 1701 nt, Artificial Sequence; identical to SEQ ID NO: 170678
  derived and/or modified CDS sequence (opt4) from hemagglutinin__InfluenzaA__AHC58456

SEQ ID NO: 170684 - RNA, 1701 nt, Artificial Sequence
  derived and/or modified CDS sequence (opt4) from hemagglutinin__InfluenzaA__AHC58468
augaaggccauccugguggugcugcuguacaccuucgccaccgccaacgccgacacccugugcaucggcuaccacgccaacaacagcaccgacaccguggacaccgugcuggagaagaacgugaccgugacccacagcgugaaccugcuggaggacaagcacaacggcaagcugugcaagcugagaggcguggccccccugcaccugggcaagugcaacaucgccggcuggauccugggcaaccccgagugcgagagccugagcaccgccagcagcuggagcuacaucguggagaccagcagcagcgacaacggcaccugcuaccccggcgacuucaucaacuacgaggagcugagagagcagcugagcagcgugagcagcuucgagagauucgagaucuuccccaagaccagcagcuggcccaaccacgacagcaacaagggcgugaccgccgccugcccccaggccggcgccaagagcuucuacaagaaccugaucuggcuggugaagaagggcaacagcuaccccaagcugagcaagagcuacaucaacgacaagggcaaggaggugcuggugcuguggggcauccaccaccccagcaccagcgccgaccagcagagccuguaccagaacgccgacgccuacguguucgugggcaccagcaaguacagcaagaaguucaagcccgagaucgccgugagacccaaggugagagaccaggagggcagaaugaacuacuacuggacccugguggagcccggcgacaagaucaccuucgaggccaccggcaaccugcuggugcccagauacgccuucgccauggagagaaacgccggcagcggcaucaucaucagcgacacccccgugcacgacugcaacaccaccugccagacccccaagggcgccaucaacaccagccugcccuuccagaacauccaccccaucaccaucggcaagugccccaaguacgugaagagcaccaagcugagacuggccaccggccugagaaacgugcccagcauccagagcagaggccuguucggcgccaucgccggcuucaucgagggcggcuggaccggcaugguggacggcugguacggcuaccaccaccagaacgcccagggcagcggcuacgccgccgaccugaagagcacccagaacgccaucgacaagaucaccaacaaggugaacagcgugaucgagaagaugaacacccaguucaccgccgugggcaaggaguucaaccaccuggagagaagaaucgagaaccugaacaagaagguggacgacggcuuccuggacaucuggaccuacaacgccgagcugcuggugcugcuggagaacgagagaacccuggacuaccacgacagcaacgugaagaaccuguacgagaaggugagaagccagcugaagaacaacgccaaggagaucggcaacggcugcuucgaguucuaccacaagugcgacaacaccugcauggagagcgugaagaacggcaccuacgacuaccccaaguacagcgaggaggccaagcugaacagagaggagaucgacggcgugaagcuggagagcaccagaaucuaccagauccuggccaucuacagcaccguggccagcagccuggugcugguggugagccugggcgccaucagcuucuggaugugcagcaacggcagccugcagugcagaaucugcaucuga

SEQ ID NO: 170685 - RNA, 1701 nt, Artificial Sequence
  derived and/or modified CDS sequence (opt4) from hemagglutinin__InfluenzaA__AHC58479
augaagaccaucaucgcccugagcuacauccugugccugguguucgcccagaagcugcccggcaacgacaacagcaccgccacccugugccugggccaccacgccgugcccaacggcaccaucgugaagaccaucaccaacgaccagaucgaggugaccaacgccaccgagcuggugcagaacagcagcaccggcgagaucugcgacagcccccaccagaucaucgacggcgagaacugcacccugaucgacgcccugcugggcgacccccagugcgacggcuuccagaacaagaagugggaccuguucguggagagaagcaaggccuacagcaacugcuaccccuacgacgugcccgacuacgccagccugagaagccugguggccagcagcggcacccuggaguucaacaacgagagcuucaacuggaccggcgugacccagaacggcaccagcagcgccugcaucagaagaagcaacaacagcuucuucagcagacugaacuggcugacccaccugaacuucaaguaccccgcccugaacgugaccaugcccaacaacgagcaguucgacaagcuguacaucuggggcgugcaccaccccggcaccgacaaggaccagaucuuccuguacgcccaggccagcggcagaaucaccgugagcaccaagagaagccagcaggccgugauccccaacaucggcagcagacccagagugagaaacauccccagcagaaucagcaucuacuggaccaucgugaagcccggcgacauccugcugaucaacagcaccggcaaccugaucgcccccagaggcuacuucaagaucagaagcggcaagagcagcaucaugagaagcgacgcccccaucggcaagugcaacagcgagugcaucacccccaacggcagcauccccaacgacaagcccuuccagaacgugaacagaaucaccuacggcgccugccccagauacgugaagcagaacacccugaagcuggccaccggcaugagaaacgugcccgagaagcagaccagaggcaucuucggcgccaucgccggcuucaucgagaacggcugggagggcaugguggacggcugguacggcuucagacaccagaacagcgagggcagaggccaggccgccgaccugaagagcacccaggccgccaucaaccagaucaacggcaagcugaacagacugaucggcaagaccaacgagaaguuccaccagaucgagaaggaguucagcgagguggagggcagaauccaggaccuggagaaguacguggaggacaccaagaucgaccuguggagcuacaacgccgagcugcugguggcccuggagaaccagcacaccaucgaccugaccgacagcgagaugaacaagcuguucgagaagaccaagaagcagcugagagagaacgccgaggacaugggcaacggcugcuucaagaucuaccacaagugcgacaacgccugcaucggcagcaucagaaacggcaccuacgaccacgacguguacagagacgaggcccugaacaacagauucaagaucaagggcguggagcugaagagcggcuacaaggacuggauccuguggaucagcuucgccaucagcugcuuccugcugugcguggcccugcugggcuucaucaugugggccugccagaagggcaacaucagaugcaacaucugcaucuga

SEQ ID NO: 170686 - RNA, 1701 nt, Artificial Sequence; identical to SEQ ID NO: 170678
  derived and/or modified CDS sequence (opt4) from hemagglutinin__InfluenzaA__AHC58491

SEQ ID NO: 170687 - RNA, 1701 nt, Artificial Sequence; identical to SEQ ID NO: 167042
  derived and/or modified CDS sequence (opt4) from hemagglutinin__InfluenzaA__AHC58515

SEQ ID NO: 170688 - RNA, 1701 nt, Artificial Sequence; identical to SEQ ID NO: 167842
  derived and/or modified CDS sequence (opt4) from hemagglutinin__InfluenzaA__AHC58527

SEQ ID NO: 170689 - RNA, 1701 nt, Artificial Sequence
  derived and/or modified CDS sequence (opt4) from hemagglutinin__InfluenzaA__AHC58563
augaagaccaucaucgcccugagcuacauccugugccugguguucgcccagaagcugcccggcaacgacaacagcaccgccacccugugccugggccaccacgccgugcccaacggcaccaucgugaagaccaucaccaacgaccagaucgaggugaccaacgccaccgagcuggugcagaacagcagcaccggcgagaucugcgacagcccccaccagaucaucgacggcgagaacugcacccugaucgacgcccugcugggcgacccccagugcgacggcuuccagaacaagaagugggaccuguucguggagagaagcaaggccuacagcaacugcuaccccuacgacgugcccgacuacgccagccugagaagccugguggccagcagcggcacccuggaguucaacaacgagagcuucaacuggaccggcgugacccagaacggcaccagcagcgccugcaucagaagaagcaacaacagcuucuucagcagacugaacuggcugacccaccugaacuucaaguaccccgcccugaacgugaccaugcccaacaacgagcaguucgacaagcuguacaucuggggcgugcaccaccccggcaccgacaaggaccagaucuuccuguacgcccaggccagcggcagaaucaccgugagcaccaagagaagccagcaggccgugauccccaacaucggcagcagacccagagugagaaacauccccagcagaaucagcaucuacuggaccaucgugaagcccggcgacauccugcugaucaacagcaccggcaaccugaucgcccccagaggcuacuucaagaucagaagcggcaagagcagcaucaugagaagcgacgcccccaucggcaagugcaacagcgagugcaucacccccaacggcagcauccccaacgacaagcccuuccagaacgugaacagaaucaccuacggcgccugccccagauacgugaagcagaacacccugaagcuggccaccggcaugagaaacgugcccgagaagcagaccagaggcaucuucggcgccaucgccggcuucaucgagaacggcugggagggcaugguggacggcugguacggcuucagacaccagaacagcgagggcagaggccaggccgccgaccugaagagcacccaggccgccaucgaccagaucaacggcaagcugaacagacugaucggcaagaccaacgagaaguuccaccagaucgagaaggaguucagcgagguggagggcagaauccaggaccuggagaaguacguggaggacaccaagaucgaccuguggagcuacaacgccgagcugcugguggcccuggagaaccagcacaccaucgaccugaccgacagcgagaugaacaagcuguucgagaagaccaagaagcagcugagagagaacgccgaggacaugggcaacggcugcuucaagaucuaccacaagugcgacaacgccugcaucggcagcaucagaaacggcaccuacgaccacgacguguacagagacgaggcccugaacaacagauuccagaucaagggcguggagcugaagagcggcuacaaggacuggauccuguggaucagcuucgccaucagcugcuuccugcugugcguggcccugcugggcuucaucaugugggccugccagaagggcaacaucagaugcaacaucugcaucuga

SEQ ID NO: 170690 - RNA, 1701 nt, Artificial Sequence; identical to SEQ ID NO: 167842
  derived and/or modified CDS sequence (opt4) from hemagglutinin__InfluenzaA__AHC58575

SEQ ID NO: 170691 - RNA, 1701 nt, Artificial Sequence; identical to SEQ ID NO: 166915
  derived and/or modified CDS sequence (opt4) from hemagglutinin__InfluenzaA__AHC58587

SEQ ID NO: 170692 - RNA, 1701 nt, Artificial Sequence; identical to SEQ ID NO: 167042
  derived and/or modified CDS sequence (opt4) from hemagglutinin__InfluenzaA__AHC58599

SEQ ID NO: 170693 - RNA, 1701 nt, Artificial Sequence; identical to SEQ ID NO: 167842
  derived and/or modified CDS sequence (opt4) from hemagglutinin__InfluenzaA__AHC58611

SEQ ID NO: 170694 - RNA, 1701 nt, Artificial Sequence; identical to SEQ ID NO: 167842
  derived and/or modified CDS sequence (opt4) from hemagglutinin__InfluenzaA__AHC58623

SEQ ID NO: 170695 - RNA, 1701 nt, Artificial Sequence; identical to SEQ ID NO: 167842
  derived and/or modified CDS sequence (opt4) from hemagglutinin__InfluenzaA__AHC58647

SEQ ID NO: 170696 - RNA, 1701 nt, Artificial Sequence; identical to SEQ ID NO: 167042
  derived and/or modified CDS sequence (opt4) from hemagglutinin__InfluenzaA__AHC58659

SEQ ID NO: 170697 - RNA, 1701 nt, Artificial Sequence; identical to SEQ ID NO: 166915
  derived and/or modified CDS sequence (opt4) from hemagglutinin__InfluenzaA__AHC58671

SEQ ID NO: 170698 - RNA, 1701 nt, Artificial Sequence; identical to SEQ ID NO: 169134
  derived and/or modified CDS sequence (opt4) from hemagglutinin__InfluenzaA__AHC58683

SEQ ID NO: 170699 - RNA, 1701 nt, Artificial Sequence; identical to SEQ ID NO: 166915
  derived and/or modified CDS sequence (opt4) from hemagglutinin__InfluenzaA__AHC58695

SEQ ID NO: 170700 - RNA, 1701 nt, Artificial Sequence; identical to SEQ ID NO: 169134
  derived and/or modified CDS sequence (opt4) from hemagglutinin__InfluenzaA__AHC58707

SEQ ID NO: 170701 - RNA, 1701 nt, Artificial Sequence; identical to SEQ ID NO: 169134
  derived and/or modified CDS sequence (opt4) from hemagglutinin__InfluenzaA__AHC58719

SEQ ID NO: 170702 - RNA, 1701 nt, Artificial Sequence; identical to SEQ ID NO: 170678
  derived and/or modified CDS sequence (opt4) from hemagglutinin__InfluenzaA__AHC58731

SEQ ID NO: 170703 - RNA, 1701 nt, Artificial Sequence
  derived and/or modified CDS sequence (opt4) from hemagglutinin__InfluenzaA__AHC58743
augaagaccaucaucgccuggagcuacauccugugccugguguucgcccagaagcugcccggcaacgacaacagcaccgccacccugugccugggccaccacgccgugcccaacggcaccaucgugaagaccaucaccaacgaccagaucgaggugaccaacgccaccgagcuggugcagaacagcagcaccggcgagaucugcgacagcccccaccagauccuggacggcgagaacugcacccugaucgacgcccugcugggcgacccccagugcgacggcuuccagaacaagaagugggaccuguucguggagagaagcaaggccuacagcaacugcuaccccuacgacgugcccgacuacgccagccugagaagccugguggccagcagcggcacccuggaguucaacaacgagagcuucaacuggaccggcgugacccagaacggcaccagcagcgccugcaucagaagaagcaacaacagcuucuucagcagacugaacuggcugacccaccugaacuucaaguaccccgcccugaacgugaccaugcccaacaacgagcaguucgacaagcuguacaucuggggcgugcaccaccccggcaccgacaaggaccagaucuuccuguacgcccaggccagcggcagaaucaccgugagcaccaagagaagccagcaggccgugauccccaacaucggcagcagacccagagugagaaacauccccagcagaaucagcaucuacuggaccaucgugaagcccggcgacauccugcugaucaacagcaccggcaaccugaucgcccccagaggcuacuucaagaucagaagcggcaagagcagcaucaugagaagcgacgcccccaucggcaagugcaacagcgagugcaucacccccaacggcagcauccccaacgacaagcccuuccagaacgugaacagaaucaccuacggcgccugccccagauacgugaagcagaacacccugaagcuggccaccggcaugagaaacgugcccgagaagcagaccagaggcaucuucggcgccaucgccggcuucaucgagaacggcugggagggcaugguggacggcugguacggcuucagacaccagaacagcgagggcagaggccaggccgccgaccugaagagcacccaggccgccaucgaccagaucaacggcaagcugaacagacugaucggcaagaccaacgagaaguuccaccagaucgagaaggaguucagcgagguggagggcagaauccaggaccuggagaaguacguggaggacaccaagaucgaccuguggagcuacaacgccgagcugcugguggcccuggagaaccagcacaccaucgaccugaccgacagcgagaugaacaagcuguucgagaagaccaagaagcagcugagagagaacgccgaggacaugggcaacggcugcuucaagaucuaccacaagugcgacaacgccugcaucggcagcaucagaaacggcaccuacgaccacgacguguacagagacgaggcccugaacaacagauuccagaucaagggcguggagcugaagagcggcuacaaggacuggauccuguggaucagcuucgccaucagcugcuuccugcugugcguggcccugcugggcuucaucaugugggccugccagaagggcaacaucagaugcaacaucugcaucuga

SEQ ID NO: 170704 - RNA, 1701 nt, Artificial Sequence; identical to SEQ ID NO: 170678
  derived and/or modified CDS sequence (opt4) from hemagglutinin__InfluenzaA__AHC58755

SEQ ID NO: 170705 - RNA, 1701 nt, Artificial Sequence; identical to SEQ ID NO: 166915
  derived and/or modified CDS sequence (opt4) from hemagglutinin__InfluenzaA__AHC58779

SEQ ID NO: 170706 - RNA, 1701 nt, Artificial Sequence; identical to SEQ ID NO: 170677
  derived and/or modified CDS sequence (opt4) from hemagglutinin__InfluenzaA__AHC58791

SEQ ID NO: 170707 - RNA, 1701 nt, Artificial Sequence
  derived and/or modified CDS sequence (opt4) from hemagglutinin__InfluenzaA__AHC58803
augaagaccaucaucgcccugagcuacauccugugccugguguucgcccagaagcugcccggcaacgacaacagcaccgccacccugugccugggccaccacgccgugcccaacggcaccaucgugaagaccaucaccaacgaccagaucgaggugaccaacgccaccgagcuggugcagaacagcagcaccggcgagaucugcgacagcccccaccagaucaucgacggcgagaacugcacccugaucgacgcccugcugggcgacccccagugcgacggcuuccagaacaagaagugggaccuguucguggagagaagcaaggccuacagcaacugcuaccccuacgacgugcccgacuacgccagccugagaagccugguggccagcagcggcacccuggaguucaacaacgagagcuucaacuggaccggcgugacccagaacggcaccagcagcgccugcaucagaagaagcaacaacagcuucuucagcagacugaacuggcugacccaccugaacuucaaguaccccgcccugaacgugaccaugcccaacaacgagcaguucgacaagcuguacaucuggggcgugcaccaccccggcaccgacaaggaccagaucuuccuguacgcccaggccagcggcagaaucaccgugagcaccaagagaagccagcaggccgugauccccaacaucggcagcagacccagagugagaaacauccccagcagaaucagcaucuacuggaccaucgugaagcccggcgacauccugcugaucaacagcaccggcaaccugaucgcccccagaggcuacuucaagaucagaagcggcaagagcagcaucaugaagagcgacgcccccaucggcaagugcaacagcgagugcaucacccccaacggcagcauccccaacgacaagcccuuccagaacgugaacagaaucaccuacggcgccugccccagauacgugaagcagaacacccugaagcuggccaccggcaugagaaacgugcccgagaagcagaccagaggcaucuucggcgccaucgccggcuucaucgagaacggcugggagggcaugguggacggcugguacggcuucagacaccagaacagcgagggcagaggccaggccgccgaccugaagagcacccaggccgccaucgaccagaucaacggcaagcugaacagacugaucggcaagaccaacgagaaguuccaccagaucgagaaggaguucagcgagguggagggcagaauccaggaccuggagaaguacguggaggacaccaagaucgaccuguggagcuacaacgccgagcugcugguggcccuggagaaccagcacaccaucgaccugaccgacagcgagaugaacaagcuguucgagaagaccaagaagcagcugagagagaacgccgaggacaugggcaacggcugcuucaagaucuaccacaagugcgacaacgccugcaucggcagcaucagaaacggcaccuacgaccacgacguguacagagacgaggcccugaacaacagauucaagaucaagggcguggagcugaagagcggcuacaaggacuggauccuguggaucagcuucgccaucagcugcuuccugcugugcguggcccugcugggcuucaucaugugggccugccagaagggcaacaucagaugcaacaucugcaucuga

SEQ ID NO: 170708 - RNA, 1701 nt, Artificial Sequence
  derived and/or modified CDS sequence (opt4) from hemagglutinin__InfluenzaA__AHC58815
augaagaccaucaucgcccugagcuacauccugugccugguguucgcccagaagcugcccggcaacgacaacagcaccgccacccugugccugggccaccacgccgugcccaacggcaccaucgugaagaccaucaccaacgaccagaucgaggugaccaacgccaccgagcuggugcagagcagcagcaccggcgagaucugcaacagcccccaccagauccuggacggcggcaacugcacccugaucgacgcccugcugggcgacccccagugcgacggcuuccagaacaagaagugggaccuguucguggagagaagcaaggccuacagcaacugcuaccccuacgacgugcccgacuacgccagccugagaagccugguggccagcagcggcacccuggaguucaacaacgagagcuucaacuggaccggcgugacccagaacggcaccagcagcgccugcaucagaagaagcaacaacagcuucuucagcagacugaacuggcugacccaccugaacuucaaguaccccgcccugaacgugaccaugcccaacaacgagcaguucgacaagcuguacaucuggggcgugcaccaccccggcaccgacaaggaccagaucuuccuguacgcccaggccagcggcagaaucaccgugagcaccaagagaagccagcaggccgugauccccaacaucggcagcagacccagagugagaaacauccccagcagaaucagcaucuacuggaccaucgugaagcccggcgacauccugcugaucaacagcaccggcaaccugaucgcccccagaggcuacuucaagaucagaagcggcaagagcagcaucaugagaagcgacgcccccaucggcaagugcaacagcgagugcaucacccccaacggcagcauccccaacgacaagcccuuccagaacgugaacagaaucaccuacggcgccugccccagauacgugaagcagaacacccugaagcuggccaccggcaugagaaacgugcccgagaagcagaccagaggcaucuucggcgccaucgccggcuucaucgagaacggcugggagggcaugguggacggcugguacggcuucagacaccagaacagcgagggcagaggccaggccgccgaccugaagagcacccaggccgccaucgaccagaucaacggcaagcugaacagacugaucggcaagaccaacgagaaguuccaccagaucgagaaggaguucagcgagguggagggcagaauccaggaccuggagaaguacguggaggacaccaagaucgaccuguggagcuacaacgccgagcugcugguggcccuggagaaccagcacaccaucgaccugaccgacagcgagaugaacaagcuguucgagaagaccaagaagcagcugagagagaacgccgaggacaugggcaacggcugcuucaagaucuaccacaagugcgacaacgccugcaucggcagcaucagaaacggcaccuacgaccacaacguguacagagacgaggcccugaacaacagauuccagaucaagggcguggagcugaagagcggcuacaaggacuggauccuguggaucagcuucgccaucagcugcuuccugcugugcguggcccugcugggcuucaucaugugggccugccagaagggcaacaucagaugcaacaucugcaucuga

SEQ ID NO: 170709 - RNA, 1701 nt, Artificial Sequence; identical to SEQ ID NO: 166915
  derived and/or modified CDS sequence (opt4) from hemagglutinin__InfluenzaA__AHC58827

SEQ ID NO: 170710 - RNA, 1701 nt, Artificial Sequence; identical to SEQ ID NO: 167842
  derived and/or modified CDS sequence (opt4) from hemagglutinin__InfluenzaA__AHC58839

SEQ ID NO: 170711 - RNA, 1701 nt, Artificial Sequence
  derived and/or modified CDS sequence (opt4) from hemagglutinin__InfluenzaA__AHC58863
augaagaccaucaucgcccugagcuacauccugugccugguguucgcccagaagcugcccggcaacgacaacagcaccgccacccugugccugggccaccacgccgugagcaacggcaccaucgugaagaccaucaccaacgaccagaucgaggugaccaacgccaccgagcuggugcagagcagcagcaccggcgagaucugcaacagcccccaccagauccuggacggcgagaacugcacccugaucgacgcccugcugggcgacccccagugcgacggcuuccagaacaagaagugggaccuguucguggagagaagcaaggcccacagcaacugcuaccccuacgacgugcccgacuacgccagccugagaagccugguggccagcagcggcacccuggaguucaacaacgagagcuucaacuggaccggcgugacccagaacggcaccagcagcgccugcaucagaggcagcaacaacagcuucuucagcagacugaacuggcugacccaccugaacuucaaguaccccgcccugaacgugaccaugcccaacaacgagcaguucgacaagcuguacaucuggggcgugcaccaccccggcaccgacaaggaccagaucuuccuguacgcccaggccagcggcagaaucaccgugagcaccaagagaagccagcaggccgugauccccaacaucggcagcagacccagagugagaaacauccccagcagagugagcaucuacuggaccaucgugaagcccggcgacauccugcugaucaacagcaccggcaaccugaucgcccccagaggcuacuucaagaucagaagcggcaagagcagcaucaugagaagcgacgcccccaucggcaagugcaacagcgccugcaucacccccaacggcagcauccccaacgacaagcccuuccagaacgugaacagaaucaccuacggcgccugccccagauacgugaagcagaacacccugaagcuggccaccggcaugagaaacgugcccgagaagcagaccagaggcaucuucggcgccaucgccggcuucaucgagaacggcugggagggcaugauggacggcugguacggcuucagacaccagaacagcgagggcagaggccaggccgccgaccugaagagcacccaggccgccaucgaccagaucaacggcaagcugaacagacugaucggcaagaccaacgagaaguuccaccagaucgagaaggaguucagcgagguggagggcagaauccaggaccuggagaaguacguggaggacaccaagaucgaccuguggagcuacaacgccgagcugcugguggcccuggagaaccagcacaccaucgaccugaccgacagcgagaugaacaagcuguucgagaagaccaagaagcagcugagagagaacgccgaggacaugggcaacggcugcuucaagaucuaccacaagugcgacaacgccugcaucggcagcaucagaaacggcaccuacgaccacgacguguacagagacgaggcccugaacaacagauuccagaucaagggcguggagcugaagagcggcuacaaggacuggauccuguggaucagcuucgccaucagcugcuuccugcugugcguggcccugcugggcuucaucaugugggccugccagaagggcaacaucagaugcaacaucugcaucuga

SEQ ID NO: 170712 - RNA, 1701 nt, Artificial Sequence; identical to SEQ ID NO: 166915
  derived and/or modified CDS sequence (opt4) from hemagglutinin__InfluenzaA__AHC58875

SEQ ID NO: 170713 - RNA, 1701 nt, Artificial Sequence; identical to SEQ ID NO: 167842
  derived and/or modified CDS sequence (opt4) from hemagglutinin__InfluenzaA__AHC58887

SEQ ID NO: 170714 - RNA, 1701 nt, Artificial Sequence; identical to SEQ ID NO: 170678
  derived and/or modified CDS sequence (opt4) from hemagglutinin__InfluenzaA__AHC58899

SEQ ID NO: 170715 - RNA, 1701 nt, Artificial Sequence; identical to SEQ ID NO: 167842
  derived and/or modified CDS sequence (opt4) from hemagglutinin__InfluenzaA__AHC58981

SEQ ID NO: 170716 - RNA, 1701 nt, Artificial Sequence; identical to SEQ ID NO: 167842
  derived and/or modified CDS sequence (opt4) from hemagglutinin__InfluenzaA__AHC58993

SEQ ID NO: 170717 - RNA, 1701 nt, Artificial Sequence; identical to SEQ ID NO: 167842
  derived and/or modified CDS sequence (opt4) from hemagglutinin__InfluenzaA__AHC59005

SEQ ID NO: 170718 - RNA, 1701 nt, Artificial Sequence
  derived and/or modified CDS sequence (opt4) from hemagglutinin__InfluenzaA__AHC59017
augaagaccaucaucgcccugagcuacauccugugccugguguucgcccagaagcugcccggcaacgacaacagcaccgccacccugugccugggccaccacgccgugcccaacggcaccaucgugaagaccaucaccaacgaccagaucgaggugaccaacgccaccgagcuggugcagagcagcagcaccggcgagaucugcaacagcccccaccagauccuggacggcgagaacugcacccugaucgacgcccugcugggcgacccccagugcgacggcuuccagaacaagaagugggaccuguucguggagagaagcaaggcccacagcaacugcuaccccuacgacgugcccgacuacgccagccugagaagccugguggccagcagcggcacccuggaguucaacaacgagagcuucaacuggaccggcgugacccagaacggcaccagcagcgccugcaucagaggcagcaacaacagcuucuucagcagacugaacuggcugacccaccugaacuucaaguaccccgcccugaacgugaccaugcccaacaacgagcaguucgacaagcuguacaucuggggcgugcaccaccccggcaccgacaaggaccagaucuuccuguacgcccaggccagcggcagaaucaccgugagcaccaagagaagccagcaggccgugauccccaacaucggcagcagacccagagugagaaacauccccagcagagugagcaucuacuggaccaucgugaagcccggcgacauccugcugaucaacagcaccggcaaccugaucgcccccagaggcuacuucaagaucagaagcggcaagagcagcaucaugagaagcgacgcccccaucggcaagugcaacagcgccugcaucacccccaacggcagcauccccaacgacaagcccuuccagaacgugaacagaaucaccuacggcgccugccccagauacgugaagcagaacacccugaagcuggccaccggcaugagaaacgugcccgagaagcagaccagaggcaucuucggcgccaucgccggcuucaucgagaacggcugggagggcaugguggacggcugguacggcuucagacaccagaacagcgagggcagaggccaggccgccgaccugaagagcacccaggccgccaucgaccagaucaacggcaagcugaacagacugaucggcaagaccaacgagaaguuccaccagaucgagaaggaguucagcgagguggagggcagaauccaggaccuggagaaguacguggaggacaccaagaucgaccuguggagcuacaacgccgagcugcugguggcccuggagaaccagcacaccaucgaccugaccgacagcgagaugagcaagcuguucgagaagaccaagaagcagcugagagagaacgccgaggacaugggcaacggcugcuucaagaucuaccacaagugcgacaacgccugcaucggcagcaucagaaacggcaccuacgaccacgacguguacagagacgaggcccugaacaacagauuccagaucaagggcguggagcugaagagcggcuacaaggacuggauccuguggaucagcuucgccaucagcugcuuccugcugugcguggcccugcugggcuucaucaugugggccugccagaagggcaacaucagaugcaacaucugcaucuga

SEQ ID NO: 170719 - RNA, 1701 nt, Artificial Sequence; identical to SEQ ID NO: 170678
  derived and/or modified CDS sequence (opt4) from hemagglutinin__InfluenzaA__AHC59029

SEQ ID NO: 170720 - RNA, 1701 nt, Artificial Sequence; identical to SEQ ID NO: 167042
  derived and/or modified CDS sequence (opt4) from hemagglutinin__InfluenzaA__AHC59041

SEQ ID NO: 170721 - RNA, 1701 nt, Artificial Sequence
  derived and/or modified CDS sequence (opt4) from hemagglutinin__InfluenzaA__AHC59053
augaagaccaucaucgcccugagcuacauccugugccugguguucgcccagaagcugcccggcaacgacaacagcaccgccacccugugccugggccaccacgccgugcccaacggcaccaucgugaagaccaucaccaacgaccagaucgaggugaccaacgccaccgagcuggugcagagcagcagcaccggcgagaucugcaacagcccccaccagauccuggacggcgagaacugcacccugaucgacgcccugcugggcgacccccagugcgacggcuuccagaacaagaagugggaccuguucguggagagaagcaaggcccacagcaacugcuaccccuacgacgugcccgacuacgccagccugagaagccugguggccagcagcggcacccuggaguucaacaacgagagcuucaacuggaccggcgugacccagaacggcaccagcagcgccugcaucagaagaagcaacaacagcuucuucagcagacugaacuggcugacccaccugaacuucaaguaccccgcccugaacgugaccaugcccaacaacgagcaguucgacaagcuguacaucuggggcgugcaccaccccggcaccgacaaggaccagaucuuccuguacgcccaggccgccggcagaaucaccgugagcaccaagagaagccagcaggccgugauccccaacaucggcagcagacccagagugagaaacauccccagcagagugagcaucuacuggaccaucgugaagcccggcgacauccugcugaucaacagcaccggcaaccugaucgcccccagaggcuacuucaagauccagagcggcaagagcagcaucaugagaagcgacgcccccaucggcaagugcaacagcgccugcaucacccccaacggcagcauccccaacgacaagcccuuccagaacgugaacagaaucaccuacggcgccugccccagauacgugaagcagaacacccugaagcuggccaccggcaugagaaacgugcccgagaagcagaccagaggcaucuucggcgccaucgccggcuucaucgagaacggcugggagggcaugguggacggcugguacggcuucagacaccagaacagcgagggcagaggccaggccgccgaccugaagagcacccaggccgccaucgaccagaucaacggcaagcugaacagacugaucggcaagaccaacgagaaguuccaccagaucgagaaggaguucagcgagguggagggcagaauccaggaccuggagaaguacguggaggacaccaagaucgaccuguggagcuacaacgccgagcugcugguggcccuggagaaccagcacaccaucgaccugaccgacagcgagaugaacaagcuguucgagaagaccaagaagcagcugagagagaacgccgaggacaugggcaacggcugcuucaagaucuaccacaagugcgacaacgccugcaucggcagcaucagaaacggcaccuacgaccacgacguguacagagacgaggcccugaacaacagauuccagaucaagggcguggagcugaagagcggcuacaaggacuggauccuguggaucagcuucgccaucagcugcuuccugcugugcguggcccugcugggcuucaucauguggaccugccagaagggcaacaucagaugcaacaucugcaucuga

SEQ ID NO: 170722 - RNA, 1701 nt, Artificial Sequence
  derived and/or modified CDS sequence (opt4) from hemagglutinin__InfluenzaA__AHC59077
augaagaccaucaucgcccugagcuacauccugugccugguguucgcccagaagcugcccggcaacgacaacagcaccgccacccugugccugggccaccacgccgugcccaacggcaccaucgugaagaccaucaccaacgaccagaucgaggugaccaacgccaccgagcuggugcagaacagcagcaccggcgagaucugcgacagcccccaccagauccuggacggcgagaacugcacccugaucgacgcccugcugggcgacccccagugcgacggcuuccagaacaagaagugggaccuguucguggagagaagcaaggccuacagcaacugcuaccccuacgacgugcccgacuacgccagccugagaagccugguggccagcagcggcacccuggaguucaacaacgagagcuucaacuggaccggcgugacccagaacggcaccagcagcgccugcaucagaagaagcaacaacagcuucuucagcagacugaacuggcugacccaccugaacuucaaguaccccgcccugaacgugaccaugcccaacaacgagcaguucgacaagcuguacaucuggggcgugcaccaccccggcaccgacaaggaccagaucuuccuguacgcccaggccagcggcagaaucaccgugagcaccaagagaagccagcaggccgugauccccaacaucggcagcagacccagagugagaaacauccccagcagaaucagcaucuacuggaccaucgugaagcccggcgacauccugcugaucaacagcaccggcaaccugaucgcccccagaggcuacuucaagaucagaagcggcaagagcagcaucaugagaagcgacgcccccaucggcaagugcaacagcgagugcaucacccccaacggcagcauccccaacgacaagcccuuccagaacgugaacagaaucaccuacggcgccugccccagauacgugaagcagaacacccugaagcuggccaccggcaugagaaacgugcccgagaagcagaccagaggcaucuucggcgccaucgccggcuucaucgagaacggcugggagggcaugguggacggcugguacggcuucagacaccagaacagcgagggcagaggccaggccgccgaccugaagagcacccaggccgccaucgaccagaucaacggcaagcugaacagacugaucggcaagaccaacgagaaguuccaccagaucgagaaggaguucagcgagguggagggcagaauccaggaccuggagaaguacguggaggacaccaagaucgaccuguggagcuacaacgccgagcugcugguggcccuggagaaccagcacaccaucgaccugaccgacagcgagaugaacaagcuguucgagaagaccaagaagcagcugagagagaacgccgaggacaugggcaacggcugcuucaagaucuaccacaagugcgacaacgccugcaucggcagcaucagaaacggcaccuacgaccacgacguguacagagacgaggcccugaacaacagauuccagaucaagggcguggagcugaagagcggcuacaaggacuggauccuguggaucagcuucgccaucagcugcuuccugcugugcguggugcugcugggcuucaucaugugggccugccagaagggcaacaucagaugcaacaucugcaucuga

SEQ ID NO: 170723 - RNA, 1701 nt, Artificial Sequence; identical to SEQ ID NO: 169134
  derived and/or modified CDS sequence (opt4) from hemagglutinin__InfluenzaA__AHC59089

SEQ ID NO: 170724 - RNA, 1701 nt, Artificial Sequence; identical to SEQ ID NO: 167842
  derived and/or modified CDS sequence (opt4) from hemagglutinin__InfluenzaA__AHC59101

SEQ ID NO: 170725 - RNA, 1701 nt, Artificial Sequence; identical to SEQ ID NO: 167042
  derived and/or modified CDS sequence (opt4) from hemagglutinin__InfluenzaA__AHC59113

SEQ ID NO: 170726 - RNA, 1701 nt, Artificial Sequence; identical to SEQ ID NO: 167842
  derived and/or modified CDS sequence (opt4) from hemagglutinin__InfluenzaA__AHC59125

SEQ ID NO: 170727 - RNA, 1701 nt, Artificial Sequence
  derived and/or modified CDS sequence (opt4) from hemagglutinin__InfluenzaA__AHC59137
augaagaccaucaucgcccugagcuacauccugugccugguguucgcccagaagauccccggcaacgacaacagcaccgccacccugugccugggccaccacgccgugagcaacggcaccaucgugaagaccaucaccaacgaccagaucgaggugaccaacgccaccgagcuggugcagagcagcagcaccggcgagaucugcaacagcccccaccagauccuggacggcgagaacugcacccugaucgacgcccugcugggcgacccccagugcgacggcuuccagaacaagaagugggaccuguucguggagagaagcaaggcccacagcaacugcuaccccuacgacgugcccgacuacgccagccugagaagccugguggccagcagcggcacccuggaguucaacaacgagagcuucaacuggaccggcgugacccagaacggcaccagcagcgccugcaucagaggcagcaacaacagcuucuucagcagacugaacuggcugacccaccugaacuucaaguaccccgcccugaacgugaccaugcccaacaacgagcaguucgacaagcuguacaucuggggcgugcaccaccccggcaccgacaaggaccagaucuuccuguacgcccaggccagcggcagaaucaccgugagcaccaagagaagccagcaggccgugauccccaacaucggcagcagacccagagugagaaacauccccagcagagugagcaucuacuggaccaucgugaagcccggcgacauccugcugaucaacagcaccggcaaccugaucgcccccagaggcuacuucaagaucagaagcggcaagagcagcaucaugagaagcgacgcccccaucggcaagugcaacagcgccugcaucacccccaacggcagcauccccaacgacaagcccuuccagaacgugaacagaaucaccuacggcgccugccccagauacgugaagcagaacacccugaagcuggccaccggcaugagaaacgugcccgagaagcagaccagaggcaucuucggcgccaucgccggcuucaucgagaacggcugggagggcaugauggacggcugguacggcuucagacaccagaacagcgagggcagaggccaggccgccgaccugaagagcacccaggccgccaucgaccagaucaacggcaagcugaacagacugaucggcaagaccaacgagaaguuccaccagaucgagaaggaguucagcgagguggagggcagaauccaggaccuggagaaguacguggaggacaccaagaucgaccuguggagcuacaacgccgagcugcugguggcccuggagaaccagcacaccaucgaccugaccgacagcgagaugaacaagcuguucgagaagaccaagaagcagcugagagagaacgccgaggacaugggcaacggcugcuucaagaucuaccacaagugcgacaacgccugcaucggcagcaucagaaacggcaccuacgaccacgacguguacagagacgaggcccugaacaacagauuccagaucaagggcguggagcugaagagcggcuacaaggacuggauccuguggaucagcuucgccaucagcugcuuccugcugugcguggcccugcugggcuucaucaugugggccugccagaagggcaacaucagaugcaacaucugcaucuga

SEQ ID NO: 170728 - RNA, 1701 nt, Artificial Sequence; identical to SEQ ID NO: 167042
  derived and/or modified CDS sequence (opt4) from hemagglutinin__InfluenzaA__AHC59149

SEQ ID NO: 170729 - RNA, 1701 nt, Artificial Sequence
  derived and/or modified CDS sequence (opt4) from hemagglutinin__InfluenzaA__AHC59185
augaagaccaucaucgcccugagcuacauccugugccugguguucgcccagaagcugcccggcaacgacaacagcaccgccacccugugccugggccaccacgccgugcccaacggcaccaucgugaagaccaucaccaacgaccagaucgaggugaccaacgccaccgagcuggugcagagcagcagcaccggcgagaucugcgacagcccccaccagauccuggacggcgagaacugcacccugaucgacgcccugcugggcgacccccagugcgacggcuuccagaacaagaagugggaccuguucguggagagaagcaaggccuacagcaacugcuaccccuacgacgugcccgacuacgccagccugagaagccugguggccagcagcggcacccuggaguucaacaacgagagcuucaacuggaccggcgugacccagaacggcaccagcagcgccugcaucagaagaagcaacagcagcuucuucagcagacugaacuggcugacccaccugaacuucaaguaccccgcccugaacgugaccaugcccaacaacgagcaguucgacaagcuguacaucuggggcgugcaccaccccggcaccgacaaggaccagaucuuccuguacgcccagagcagcggcagaaucaccgugagcaccaagagaagccagcaggccgugauccccaacaucggcagcagacccagaaucagaaacauccccagcagaaucagcaucuacuggaccaucgugaagcccggcgacauccugcugaucaacagcaccggcaaccugaucgcccccagaggcuacuucaagaucagaagcggcaagagcagcaucaugagaagcgacgcccccaucggcaagugcaacagcgagugcaucacccccaacggcagcauccccaacgacaagcccuuccagaacgugaacagaaucaccuacggcgccugccccagauacgugaagcagagcacccugaagcuggccaccggcaugagaaacgugcccgagaagcagaccagaggcaucuucggcgccaucgccggcuucaucgagaacggcugggagggcaugguggacggcugguacggcuucagacaccagaacagcgagggcagaggccaggccgccgaccugaagagcacccaggccgccaucgaccagaucaacggcaagcugaacagacugaucggcaagaccaacgagaaguuccaccagaucgagaaggaguucagcgagguggagggcagaauccaggaccuggagaaguacguggaggacaccaagaucgaccuguggagcuacaacgccgagcugcugguggcccuggagaaccagcacaccaucgaccugaccgacagcgagaugaacaagcuguucgagaagaccaagaagcagcugagagagaacgccgaggacaugggcaacggcugcuucaagaucuaccacaagugcgacaacgccugcaucggcagcaucagaaacggcaccuacgaccacaacguguacagagacgaggcccugaacaacagauuccagaucaagggcguggagcugaagagcggcuacaaggacuggauccuguggaucagcuucgccaucagcugcuuccugcugugcguggcccugcugggcuucaucaugugggccugccagaagggcaacaucagaugcaacaucugcaucuga

SEQ ID NO: 170730 - RNA, 1701 nt, Artificial Sequence; identical to SEQ ID NO: 166915
  derived and/or modified CDS sequence (opt4) from hemagglutinin__InfluenzaA__AHC59197

SEQ ID NO: 170731 - RNA, 1701 nt, Artificial Sequence
  derived and/or modified CDS sequence (opt4) from hemagglutinin__InfluenzaA__AHC59209
augaagaccaucaucgcccugagcuacauccugugccugguguucgcccaggagauccccggcaacgacaacagcaccgccacccugugccugggccaccacgccgugcccaacggcaccaucgugaagaccaucaccaacgaccagaucgaggugaccaacgccaccgagcuggugcagagcagcagcaccggcgagaucugcaacagcccccaccagauccuggacggcgagaacugcacccugaucgacgcccugcugggcgacccccagugcgacgacuuccagaacaagaagugggaccuguucguggagagaagcaaggcccacagcaacugcuaccccuacgacgugcccgacuacgccagccugagaagccugguggccagcagcggcacccuggaguucaacaacgagagcuucaacuggaccggcgugacccagaacggcaccagcagcgccugcaucagaagaagcaacaacagcuucuucagcagacugaacuggcugacccaccugaacuucaaguaccccgcccugaacgugaccaugcccaacaacgagcaguucgacaagcuguacaucuggggcgugcaccaccccggcaccgacaaggaccagaucuuccuguacgcccaggccagcggcagaaucaccgugagcaccaagagaagccagcaggccgugauccccaacaucggcagcagacccagagugagaaacauccccagcagagugagcaucuacuggaccaucgugaagcccggcgacauccugcugaucaacagcaccggcaaccugaucgcccccagaggcuacuucaagaucagaagcggcaagagcagcaucaugagaagcgacgcccccaucggcgagugcaacagcgccugcaucacccccaacggcagcauccccaacgacaagcccuuccagaacgugaacagaaucaccuacggcgccugccccagauacgugaagcagaacacccugaagcuggccaccggcaugagaaacgugcccgagaagcagaccagaggcaucuucggcgccaucgccggcuucaucgagaacggcugggagggcaugguggacggcugguacggcuucagacaccagaacagcgagggcagaggccaggccgccgaccugaagagcacccaggccgccaucgaccagaucaacggcaagcugaacagacugaucggcaagaccaacgagaaguuccaccagaucgagaaggaguucagcgagguggagggcagaauccaggaccuggagaaguacguggaggacaccaagaucgaccuguggagcuacaacgccgagcugcugguggcccuggagaaccagcacaccaucgaccugaccgacagcgagaugaacaagcuguucgagaagaccaagaagcagcugagagagaacgccgaggacaugggcaacggcugcuucaagaucuaccacaagugcgacaacgccugcaucggcagcaucagaaacggcaccuacgaccacgccguguacagagacgaggcccugaacaacagauuccagaucaagggcguggagcugaagagcggcuacaaggacuggauccuguggaucagcuucgccaucagcugcuuccugcugugcguggcccugcugggcuucaucaugugggccugccagaagggcaacaucagaugcaacaucugcaucuga

SEQ ID NO: 170732 - RNA, 1701 nt, Artificial Sequence; identical to SEQ ID NO: 167042
  derived and/or modified CDS sequence (opt4) from hemagglutinin__InfluenzaA__AHC59221

SEQ ID NO: 170733 - RNA, 1701 nt, Artificial Sequence; identical to SEQ ID NO: 170711
  derived and/or modified CDS sequence (opt4) from hemagglutinin__InfluenzaA__AHC59245

SEQ ID NO: 170734 - RNA, 1701 nt, Artificial Sequence; identical to SEQ ID NO: 170678
  derived and/or modified CDS sequence (opt4) from hemagglutinin__InfluenzaA__AHC59257

SEQ ID NO: 170735 - RNA, 1701 nt, Artificial Sequence; identical to SEQ ID NO: 167842
  derived and/or modified CDS sequence (opt4) from hemagglutinin__InfluenzaA__AHC59269

SEQ ID NO: 170736 - RNA, 1701 nt, Artificial Sequence; identical to SEQ ID NO: 170678
  derived and/or modified CDS sequence (opt4) from hemagglutinin__InfluenzaA__AHC59281

SEQ ID NO: 170737 - RNA, 1701 nt, Artificial Sequence; identical to SEQ ID NO: 167042
  derived and/or modified CDS sequence (opt4) from hemagglutinin__InfluenzaA__AHC59293

SEQ ID NO: 170738 - RNA, 1701 nt, Artificial Sequence
  derived and/or modified CDS sequence (opt4) from hemagglutinin__InfluenzaA__AHC59305
augaagaccaucaucgcccugagcuacauccugugccugguguucgcccagaagcugcccggcaacgacaacagcaccgccacccugugccugggccaccacgccgugcccaacggcaccaucgugaagaccaucaccaacgaccagaucgaggugaccaacgccaccgagcuggugcagagcagcagcaccggcgagaucugcagcagcccccaccagauccuggacggcgagaacugcacccugaucgacgcccugcugggcgacccccagugcgacggcuuccagaacaagaagugggaccuguucguggagagaagcaaggcccacagcaacugcuaccccuacgacgugcccgacuacgccagccugagaagccugguggccagcagcggcacccuggaguucaacaacgagagcuucaacuggaccggcgugacccagaacggcaccagcagcgccugcaucagaagaagcaacaacagcuucuucagcagacugaacuggcugacccaccugaacuucaaguaccccgcccugaacgugaccaugcccaacaacgagcaguucgacaagcuguacaucuggggcgugcaccaccccggcaccgacaaggaccagaucuuccuguacgcccaggccagcggcagaaucaccgugagcaccaagagaagccagcaggccgugauccccaacaucggcagcagacccagagugagaaacauccccagcagagugagcaucuacuggaccaucgugaagcccggcgacauccugcugaucaacagcaccggcaaccugaucgcccccagaggcuacuucaagaucagaagcggcaagagcagcaucaugagaagcgacgcccccaucggcaagugcaacagcgccugcaucacccccaacggcagcauccccaacgacaagcccuuccagaacgugaacagaaucaccuacggcgccugccccagauacgugaagcagaacacccugaagcuggccaccggcaugagaaacgugcccgagaagcagaccagaggcaucuucggcgccaucgccggcuucaucgagaacggcugggagggcaugguggacggcugguacggcuucagacaccagaacagcgagggcagaggccaggccgccgaccugaagagcacccaggccgccaucgaccagaucaacggcaagcugaacagacugaucggcaagaccaacgagaaguuccaccagaucgagaaggaguucagcgagguggagggcagaauccaggaccuggagaaguacguggaggacaccaagaucgaccuguggagcuacaacgccgagcugcugguggcccuggagaaccagcacaccaucgaccugaccgacagcgagaugaacaagcuguucgagaagaccaagaagcagcugagagagaacgccgaggacaugggcaacggcugcuucaagaucuaccacaagugcgacaacgccugcaucggcagcaucagaaacggcaccuacgaccacgacguguacagagacgaggcccugaacaacagauuccagaucaagggcguggagcugaagagcggcuacaaggacuggauccuguggaucagcuucgccaucagcugcuuccugcugugcguggcccugcugggcuucaucaugugggccugccagaagggcaacaucagaugcaacaucugcaucuga

SEQ ID NO: 170739 - RNA, 1701 nt, Artificial Sequence
  derived and/or modified CDS sequence (opt4) from hemagglutinin__InfluenzaA__AHC59329
augaagaccaucaucgcccugagcuacauccugugccugguguucgcccagaagcugcccggcaacgacaacagcaccgccacccugugccugggccaccacgccgugcccaacggcaccaucgugaagaccaucaccaacgacagaaucgaggugaccaacgccaccgagcuggugcagaacagcagcaucggcgagaucugcgacagcccccaccagauccuggacggcgagaacugcacccugaucgacgcccugcugggcgacccccagugcgacggcuuccagaacaagaagugggaccuguucguggagagaagcaaggccuacagcaacugcuaccccuacgacgugcccgacuacgccagccugagaagccugguggccagcagcggcacccuggaguucaacaacgagagcuucaacuggaccggcgugacccagaacggcaccagcagcgccugcaucagaagaagcaacaacagcuucuucagcagacugaacuggcugacccaccugaacuucaaguaccccgcccugaacgugaccaugcccaacaacgagcaguucgacaagcuguacaucuggggcgugcaccaccccggcaccgagaaggaccagaucuuccuguacgcccagagcagcggcagaaucaccgugagcaccaagagaagccagcaggccgugauccccaacaucggcagcagacccagaaucagaaacauccccagcagaaucagcaucuacuggaccaucgugaagcccggcgacauccugcugaucaacagcaccggcaaccugaucgcccccagaggcuacuucaagaucagaagcggcaagagcagcaucaugagaagcgacgcccccaucggcaagugcaagagcgagugcaucacccccaacggcagcauccccaacgacaagcccuuccagaacgugaacagaaucaccuacggcgccugccccagauacgugaagcagagcacccugaagcuggccaccggcaugagaaacgugcccgagaagcagaccagaggcaucuucggcgccaucgccggcuucaucgagaacggcugggagggcaugguggacggcugguacggcuucagacaccagaacagcgagggcagaggccaggccgccgaccugaagagcacccaggccgccaucgaccagaucaacggcaagcugaacagacugaucggcaagaccaacgagaaguuccaccagaucgagaaggaguucagcgagguggagggcagaauccaggaccuggagaaguacguggaggacaccaagaucgaccuguggagcuacaacgccgagcugcugguggcccuggagaaccagcacaccaucgaccugaccgacagcgagaugaacaagcuguucgagaagaccaagaagcagcugagagagaacgccgaggacaugggcaacggcugcuucaagaucuaccacaagugcgacaacgccugcaucggcagcaucagaaacggcaccuacgaccacgacguguacagagacgaggcccugaacaacagauuccagaucaagggcguggagcugaagagcggcuacaaggacuggauccuguggaucagcuucgccaucagcugcuuccugcugugcguggcccugcugggcuucaucaugugggccugccagaagggcaacaucagaugcaacaucugcaucuga

SEQ ID NO: 170740 - RNA, 1701 nt, Artificial Sequence; identical to SEQ ID NO: 169134
  derived and/or modified CDS sequence (opt4) from hemagglutinin__InfluenzaA__AHC59341

SEQ ID NO: 170741 - RNA, 1701 nt, Artificial Sequence; identical to SEQ ID NO: 170678
  derived and/or modified CDS sequence (opt4) from hemagglutinin__InfluenzaA__AHC59365

SEQ ID NO: 170742 - RNA, 1701 nt, Artificial Sequence
  derived and/or modified CDS sequence (opt4) from hemagglutinin__InfluenzaA__AHC59377
augaagaccaucaucgcccugagcuacauccugugccugguguucgcccagaagcugcccggcaacgacaacagcaccgccacccugugccugggccaccacgccgugcccaacggcaccguggugaagaccaucaccaacgaccagaucgaggugaccaacgccaccgagcuggugcagaacagcagcaccggcgagaucugcgacagcccccaccagauccuggacggcgagaacugcacccugaucgacgcccugcugggcgacccccagugcgacggcuuccagaacaagaagugggaccuguucguggagagaagcaaggccuacagcaacugcuaccccuacgacgugcccgacuacgccagccugagaagccugguggccagcagcggcacccuggaguucaacaacgagagcuucaacuggaccggcgugacccagaacggcaccagcagcgccugcaucagaagaagcaacaacagcuucuucagcagacugaacuggcugacccaccugaacuucaaguaccccgcccugaacgugaccaugcccaacaacgagcaguucgacaagcuguacaucuggggcgugcaccaccccggcaccgacaaggaccagaucuuccuguacgcccaggccagcggcagaaucaccgugagcaccaagagaagccagcaggccgugauccccaacaucggcagcagacccagagugagaaacauccccagcagaaucagcaucuacuggaccaucgugaagcccggcgacauccugcugaucaacagcaccggcaaccugaucgcccccagaggcuacuucaagaucagaagcggcaagagcagcaucaugagaagcgacgcccccaucggcaagugcaacagcgagugcaucacccccaacggcagcauccccaacgacaagcccuuccagaacgugaacagaaucaccuacggcgccugccccagauacgugaagcagaacacccugaagcuggccaccggcaugagaaacgugcccgagaagcagaccagaggcaucuucggcgccaucgccggcuucaucgagaacggcugggagggcaugguggacggcugguacggcuucagacaccagaacagcgagggcagaggccaggccgccgaccugaagagcacccaggccgccaucgaccagaucaacggcaagcugaacagacugaucggcaagaccaacgagaaguuccaccagaucgagaaggaguucagcgagguggagggcagaauccagaaccuggagaaguacguggaggacaccaagaucgaccuguggagcuacaacgccgagcugcugguggcccuggagaaccagcacaccaucgaccugaccgacagcgagaugaacaagcuguucgagaagaccaagaagcagcugagagagaacgccgaggacaugggcaacggcugcuucaagaucuaccacaagugcgacaacgccugcaucggcagcaucagaaacggcaccuacgaccacgacguguacagagacgaggcccugaacaacagauuccagaucaagggcguggagcugaagagcggcuacaaggacuggauccuguggaucagcuucgccaucagcugcuuccugcugugcguggcccugcugggcuucaucaugugggccugccagaagggcaacaucagaugcaacaucugcaucuga

SEQ ID NO: 170743 - RNA, 1701 nt, Artificial Sequence; identical to SEQ ID NO: 167042
  derived and/or modified CDS sequence (opt4) from hemagglutinin__InfluenzaA__AHC59413

SEQ ID NO: 170744 - RNA, 1701 nt, Artificial Sequence; identical to SEQ ID NO: 167842
  derived and/or modified CDS sequence (opt4) from hemagglutinin__InfluenzaA__AHC59425

SEQ ID NO: 170745 - RNA, 1701 nt, Artificial Sequence; identical to SEQ ID NO: 169134
  derived and/or modified CDS sequence (opt4) from hemagglutinin__InfluenzaA__AHC59437

SEQ ID NO: 170746 - RNA, 1701 nt, Artificial Sequence
  derived and/or modified CDS sequence (opt4) from hemagglutinin__InfluenzaA__AHC59449
augaagaccaucaucgcccugagcuacauccugugccugguguucgcccagaagcugcccggcaacgacaacagcaccgccacccugugccugggccaccacgccgugcccaacggcaccaucgugaagaccaucaccaacgaccagaucgaggugaccaacgccaccgagcuggugcagagcagcagcaccggcgagaucugcaacagcccccaccagauccuggacggcgagaacugcacccugaucgacgcccugcugggcgacccccagugcgacggcuuccagaacaagaagugggaccuguucguggagagaagcaaggcccacagcaacugcuaccccuacgacgugcccgacuacgccagccugagaagccugguggccagcagcggcacccuggaguucaacaacgagagcuucaacuggaccggcgugacccagaacggcaccagcagcgccugcaucagaggcagcaacaacagcuucuucagcagacugaacuggcugacccaccugaacuucaaguaccccgcccugaacgugaccaugcccaacaacgagcaguucgacaagcuguacaucuggggcgugcaccaccccggcaccgacaaggaccagaucuuccuguacgcccaggccagcggcagaaucaccgugagcaccaagagaagccagcaggccgugauccccaacaucggcagcagacccagagugagaaacauccccagcagagugagcaucuacuggaccaucgugaagcccggcgacauccugcugaucaacagcaccggcaaccugaucgcccccagaggcuacuucaagaucagaagcggcaagagcagcaucaugagaagcgacgcccccaucggcaagugcaacagcgccugcaucacccccaacggcagcauccccaacgacaagcccuuccagaacgugaacagaaucaccuacggcgccugccccagauacgugaagcagaacacccugaagcuggccaccggcaugagaaacgugcccgagaagcagaccagaggcaucuucggcgccaucgccggcuucaucgagaacggcugggagggcaugguggacggcugguacggcuucagacaccagaacagcgagggcagaggccaggccgccgaccugaagagcacccaggccgccaucgaccagaucaacggcaagcugaacagacugaucggcagaaccaacgagaaguuccaccagaucgagaaggaguucagcgagguggagggcagaauccaggaccuggagaaguacguggaggacaccaagaucgaccuguggagcuacaacgccgagcugcugguggcccuggagaaccagcacaccaucgaccugaccgacagcgagaugaacaagcuguucgagaagaccaagaagcagcugagagagaacgccgaggacaugggcaacggcugcuucaagaucuaccacaagugcgacaacgccugcaucggcagcaucagaaacggcaccuacgaccacgacguguacagagacgaggcccugaacaacagauuccagaucaagggcguggagcugaagagcggcuacaaggacuggauccuguggaucagcuucgccaucagcugcuuccugcugugcguggcccugcugggcuucaucaugugggccugccagaagggcaacaucagaugcaacaucugcaucuga

SEQ ID NO: 170747 - RNA, 1701 nt, Artificial Sequence; identical to SEQ ID NO: 166915
  derived and/or modified CDS sequence (opt4) from hemagglutinin__InfluenzaA__AHC59461

SEQ ID NO: 170748 - RNA, 1701 nt, Artificial Sequence; identical to SEQ ID NO: 170739
  derived and/or modified CDS sequence (opt4) from hemagglutinin__InfluenzaA__AHC59473

SEQ ID NO: 170749 - RNA, 1701 nt, Artificial Sequence; identical to SEQ ID NO: 167042
  derived and/or modified CDS sequence (opt4) from hemagglutinin__InfluenzaA__AHC59485

SEQ ID NO: 170750 - RNA, 1701 nt, Artificial Sequence; identical to SEQ ID NO: 167042
  derived and/or modified CDS sequence (opt4) from hemagglutinin__InfluenzaA__AHC59497

SEQ ID NO: 170751 - RNA, 1701 nt, Artificial Sequence; identical to SEQ ID NO: 166915
  derived and/or modified CDS sequence (opt4) from hemagglutinin__InfluenzaA__AHC59509

SEQ ID NO: 170752 - RNA, 1701 nt, Artificial Sequence; identical to SEQ ID NO: 166915
  derived and/or modified CDS sequence (opt4) from hemagglutinin__InfluenzaA__AHC59521

SEQ ID NO: 170753 - RNA, 1701 nt, Artificial Sequence
  derived and/or modified CDS sequence (opt4) from hemagglutinin__InfluenzaA__AHC59533
augaagaccaucaucgcccugagcuacauccugugccugguguucgcccagaagcugcccggcaacgacaacagcaccgccacccugugccugggccaccacgccgugcccaacggcaccaucgugaagaccaucaccaacgaccagaucgaggugaccaacgccaccgagcuggugcagagcagcagcaccggcgagaucugcaacagcccccaccagauccuggacggcgagaacugcacccugaucgacgcccugcugggcgacccccagugcgacggcuuccagaacaagaagugggaccuguucguggagagaagcaaggcccacagcaacugcuaccccuacgacgugcccgacuacgccagccugagaagccugguggccagcagcggcacccuggaguucaagaacgagagcuucaacuggaccggcgugacccagaacggcaccagcagcgccugcaucagaagaagcaacaacagcuucuucagcagacugaacuggcugacccaccugaacuucaaguaccccgcccugaacgugaccaugcccaacaacgagcaguucgacaagcuguacaucuggggcgugcaccaccccggcaccgacaaggaccagaucuuccuguacgcccaggccagcggcagaaucaccgugagcaccaagagaagccagcaggccgugauccccaacaucggcagcagacccagagugagaaacauccccagcagagugagcaucuacuggaccaucgugaagcccggcgacauccugcugaucaacagcaccggcaaccugaucgcccccagaggcuacuucaagaucagaagcggcaagagcagcaucaugagaagcgacgcccccaucggcaagugcaacagcgccugcaucacccccaacggcagcauccccaacgacaagcccuuccagaacgugaacagaaucaccuacggcgccugccccagauacgugaagcagaacacccugaagcuggccaccggcaugagaaacgugcccgagaagcagaccagaggcaucuucggcgccaucgccggcuucaucgagaacggcugggagggcaugguggacggcugguacggcuucagacaccagaacagcgagggcagaggccaggccgccgaccugaagagcacccaggccgccaucgaccagaucaacggcaagcugaacagacugaucggcaagaccaacgagaaguuccaccagaucgagaaggaguucagcgagguggagggcagaauccaggaccuggagaaguacguggaggacaccaagaucgaccuguggagcuacaacgccgagcugcugguggcccuggagaaccagcacaccaucgaccugaccgacagcgagaugaacaagcuguucgagaagaccaagaagcagcugagagagaacgccgaggacaugggcaacggcugcuucaagaucuaccacaagugcgacaacgccugcaucggcagcaucagaaacggcaccuacgaccacgacguguacagagacgaggcccugaacaacagauuccagaucaagggcguggagcugaagagcggcuacaaggacuggauccuguggaucagcuucgccaucagcugcuuccugcugugcguggcccugcugggcuucaucaugugggccugccagaagggcaacaucagaugcaacaucugcaucuga

SEQ ID NO: 170754 - RNA, 1701 nt, Artificial Sequence; identical to SEQ ID NO: 167042
  derived and/or modified CDS sequence (opt4) from hemagglutinin__InfluenzaA__AHC59545

SEQ ID NO: 170755 - RNA, 1701 nt, Artificial Sequence; identical to SEQ ID NO: 170678
  derived and/or modified CDS sequence (opt4) from hemagglutinin__InfluenzaA__AHC59557

SEQ ID NO: 170756 - RNA, 1701 nt, Artificial Sequence
  derived and/or modified CDS sequence (opt4) from hemagglutinin__InfluenzaA__AHC59569
augaagaccaucaucgcccugagcuacauccugugccugguguucgcccagaagcugcccggcaacgacaacagcaccgccacccugugccugggccaccacgccgugcccaacggcaccaucgugaagaccaucaccaacgaccagaucgaggugaccaacgccaccgagcuggugcagaacagcagcaccggcgagaucugcgacagcccccaccagauccuggacggcgagaacugcacccugaucgacgcccugcugggcgacccccagugcgacggcuuccagaacaagaagugggaccuguucguggagagaagcaaggccuacagcaacugcuaccccuacgacgugcccgacuacgccagccugagaagccugguggccagcagcggcacccuggaguucaacaacgagagcuucaacuggaccggcgugacccagaacggcaccagcagcgccugcaucagaagaagcaacaacagcuucuucagcagacugaacuggcugacccaccugaacuucaaguaccccgcccugaacgugaccaugcccaacaacgagcaguucgacaagcuguacaucuggggcgugcaccaccccggcaccgacaaggaccagaucuuccuguacgcccaggccagcggcagaaucaccgugagcaccaagagaagccagcaggccgugauccccaacaucggcagcagacccagagugagaaacauccccagcagaaucagcaucuacuggaccaucgugaagcccggcgacauccugcugaucaacagcaccggcaaccugaucgcccccagaggcuacuucaagaucagaagcggcaagagcagcaucaugagaagcgacgcccccaucggcaagugcaacagcgagugcaucacccccaacggcagcauccccaacgacaagcccuuccagaacgugaacagaaucaccuacggcgccugccccagauacgugaagcagaacacccugaagcuggccaccggcaugagaaacgugcccgagaagcagaccagaggcaucuucggcgccaucgccggcuucaucgagaacggcugggagggcaugauggacggcugguacggcuucagacaccagaacagcgagggcagaggccaggccgccgaccugaagagcacccaggccgccaucgaccagaucaacggcaagcugaacagacugaucggcaagaccaacgagaaguuccaccagaucgagaaggaguucagcgagguggagggcagaauccaggaccuggagaaguacguggaggacaccaagaucgaccuguggagcuacaacgccgagcugcugguggcccuggagaaccagcacaccaucgaccugaccgacagcgagaugaacaagcuguucgagaagaccaagaagcagcugagagagaacgccgaggacaugggcaacggcugcuucaagaucuaccacaagugcgacaacgccugcaucggcagcaucagaaacggcaccuacgaccacgacguguacagagacgaggcccugaacaacagauuccagaucaagggcguggagcugaagagcggcuacaaggacuggauccuguggaucagcuucgccaucagcugcuuccugcugugcguggcccugcugggcuucaucaugugggccugccagaagggcaacaucagaugcaacaucugcaucuga

SEQ ID NO: 170757 - RNA, 1701 nt, Artificial Sequence; identical to SEQ ID NO: 167042
  derived and/or modified CDS sequence (opt4) from hemagglutinin__InfluenzaA__AHC59581

SEQ ID NO: 170758 - RNA, 1701 nt, Artificial Sequence; identical to SEQ ID NO: 166915
  derived and/or modified CDS sequence (opt4) from hemagglutinin__InfluenzaA__AHC59593

SEQ ID NO: 170759 - RNA, 1701 nt, Artificial Sequence; identical to SEQ ID NO: 169134
  derived and/or modified CDS sequence (opt4) from hemagglutinin__InfluenzaA__AHC59605

SEQ ID NO: 170760 - RNA, 1701 nt, Artificial Sequence; identical to SEQ ID NO: 167042
  derived and/or modified CDS sequence (opt4) from hemagglutinin__InfluenzaA__AHC59617

SEQ ID NO: 170761 - RNA, 1701 nt, Artificial Sequence; identical to SEQ ID NO: 167042
  derived and/or modified CDS sequence (opt4) from hemagglutinin__InfluenzaA__AHC59629

SEQ ID NO: 170762 - RNA, 1701 nt, Artificial Sequence; identical to SEQ ID NO: 170678
  derived and/or modified CDS sequence (opt4) from hemagglutinin__InfluenzaA__AHC59641

SEQ ID NO: 170763 - RNA, 1701 nt, Artificial Sequence
  derived and/or modified CDS sequence (opt4) from hemagglutinin__InfluenzaA__AHC59653
augaagaccaucaucgcccugagcuacauccugugccugguguucgcccagaagcugcccggcaacgacaacagcaccgccacccugugccugggccaccacgccgugcccaacggcaccaucgugaagaccaucaccaacgaccagaucgaggugaccaacgccaccgagcuggugcagagcagcagcaccggcgagaucugcaacagcccccaccagauccuggacggcgagaacugcacccugaucgacgcccugcugggcgacccccagugcgacggcuuccagaacaagaagugggaccuguucguggagagaagcaaggcccacagcaacugcuaccccuacgacgugcccgacuacgccagccugagaagccugguggccagcagcggcacccuggaguucaacaacgagagcuucaacuggaccggcgugacccagaacggcaccagcagcgccugcaucagaagaagcaacaacagcuucuucagcagacugaacuggcugacccaccugaacuucaaguaccccgcccugaacgugaccaugcccaacaacgagcaguucgacaagcuguacaucuggggcgugcaccaccccggcaccgacaaggaccagaucuuccuguacgcccaggccagcggcagaaucaccgugagcacccagagaagccagcaggccgugauccccaacaucggcagcagacccagagugagaaacauccccagcagagugagcaucuacuggaccaucgugaagcccggcgacauccugcugaucaacagcaccggcaaccugaucgcccccagaggcuacuucaagaucagaagcggcaagagcagcaucaugagaagcgacgcccccaucggcaagugcaacagcgccugcaucacccccaacggcagcauccccaacgacaagcccuuccagaacgugaacagaaucaccuacggcgccugccccagauacgugaagcagaacacccugaagcuggccaccggcaugagaaacgugcccgagaagcagaccagaggcaucuucggcgccaucgccggcuucaucgagaacggcugggagggcaugguggacggcugguacggcuucagacaccagaacagcgagggcagaggccaggccgccgaccugaagagcacccaggccgccaucgaccagaucaacggcaagcugaacagacugaucggcaagaccaacgagaaguuccaccagaucgagaaggaguucagcgagguggagggcagaauccaggaccuggagaaguacguggaggacaccaagaucgaccuguggagcuacaacgccgagcugcugguggcccuggagaaccagcacaccaucgaccugaccgacagcgagaugaacaagcuguucgagaagaccaagaagcagcugagagagaacgccgaggacaugggcaacggcugcuucaagaucuaccacaagugcgacaacgccugcaucggcagcaucagaaacggcaccuacgaccacgacguguacagagacgaggcccugaacaacagauuccagaucaagggcguggagcugaagagcggcuacaaggacuggauccuguggaucagcuucgccaucagcugcuuccugcugugcguggcccugcugggcuucaucaugugggccugccagaagggcaacaucagaugcaacaucugcaucuga

SEQ ID NO: 170764 - RNA, 1701 nt, Artificial Sequence; identical to SEQ ID NO: 166915
  derived and/or modified CDS sequence (opt4) from hemagglutinin__InfluenzaA__AHC59665

SEQ ID NO: 170765 - RNA, 1701 nt, Artificial Sequence; identical to SEQ ID NO: 167042
  derived and/or modified CDS sequence (opt4) from hemagglutinin__InfluenzaA__AHC59677

SEQ ID NO: 170766 - RNA, 1701 nt, Artificial Sequence; identical to SEQ ID NO: 170763
  derived and/or modified CDS sequence (opt4) from hemagglutinin__InfluenzaA__AHC59689

SEQ ID NO: 170767 - RNA, 1701 nt, Artificial Sequence; identical to SEQ ID NO: 170678
  derived and/or modified CDS sequence (opt4) from hemagglutinin__InfluenzaA__AHC59701

SEQ ID NO: 170768 - RNA, 1701 nt, Artificial Sequence; identical to SEQ ID NO: 166915
  derived and/or modified CDS sequence (opt4) from hemagglutinin__InfluenzaA__AHC59713

SEQ ID NO: 170769 - RNA, 1701 nt, Artificial Sequence; identical to SEQ ID NO: 170689
  derived and/or modified CDS sequence (opt4) from hemagglutinin__InfluenzaA__AHC59737

SEQ ID NO: 170770 - RNA, 1701 nt, Artificial Sequence; identical to SEQ ID NO: 166915
  derived and/or modified CDS sequence (opt4) from hemagglutinin__InfluenzaA__AHC59749

SEQ ID NO: 170771 - RNA, 1701 nt, Artificial Sequence; identical to SEQ ID NO: 167042
  derived and/or modified CDS sequence (opt4) from hemagglutinin__InfluenzaA__AHC59761

SEQ ID NO: 170772 - RNA, 1701 nt, Artificial Sequence; identical to SEQ ID NO: 167042
  derived and/or modified CDS sequence (opt4) from hemagglutinin__InfluenzaA__AHC59773

SEQ ID NO: 170773 - RNA, 1701 nt, Artificial Sequence; identical to SEQ ID NO: 167842
  derived and/or modified CDS sequence (opt4) from hemagglutinin__InfluenzaA__AHC59785

SEQ ID NO: 170774 - RNA, 1701 nt, Artificial Sequence; identical to SEQ ID NO: 167042
  derived and/or modified CDS sequence (opt4) from hemagglutinin__InfluenzaA__AHC59797

SEQ ID NO: 170775 - RNA, 1701 nt, Artificial Sequence; identical to SEQ ID NO: 169134
  derived and/or modified CDS sequence (opt4) from hemagglutinin__InfluenzaA__AHC59809

SEQ ID NO: 170776 - RNA, 1701 nt, Artificial Sequence
  derived and/or modified CDS sequence (opt4) from hemagglutinin__InfluenzaA__AHC59821
augaagaccaucaucgcccugagcuacauccugugccugguguucgcccagaagcugcccggcaacgacaacagcaccgccacccugugccugggccaccacgccgugcccaacggcaccaucgugaagaccaucaccaacgaccagaucgaggugaccaacgccaccgagcuggugcagaacagcagcaccggcgagaucugcgacagcccccaccagauccuggacggcgagaacugcacccugaucgacgcccugcugggcgacccccagugcgacggccugcagaacaagaagugggaccuguucguggagagaagcaaggccuacagcaacugcuaccccuacgacgugcccgacuacgccagccugagaagccugguggccagcagcggcacccuggaguucaacaacgagagcuucaacuggaccggcgugacccagaacggcaccagcagcgccugcaucagaagaagcaacaacagcuucuucagcagacugaacuggcugacccaccugaacuucaaguaccccgcccugaacgugaccaugcccaacaacgagcaguucgacaagcuguacaucuggggcgugcaccaccccggcaccgacaaggaccagaucuuccuguacgcccaggccagcggcagaaucaccgugagcaccaagagaagccagcaggccgugauccccaacaucggcagcagacccagagugagaaacauccccagcagaaucagcaucuacuggaccaucgugaagcccggcgacauccugcugaucaacagcaccggcaaccugaucgcccccagaggcuacuucaagaucagaagcggcaagagcagcaucaugagaagcgacgcccccaucggcaagugcaacagcgagugcaucacccccaacggcagcauccccaacgacaagcccuuccagaacgugaacagaaucaccuacggcgccugccccagauacgugaagcagaacacccugaagcuggccaccggcaugagaaacgugcccgagaagcagaccagaggcaucuucggcgccaucgccggcuucaucgagaacggcugggagggcaugguggacggcugguacggcuucagacaccagaacagcgagggcagaggccaggccgccgaccugaagagcacccaggccgccaucgaccagaucaacggcaagcugaacagacugaucggcaagaccaacgagaaguuccaccagaucgagaaggaguucagcgagguggagggcagaauccaggaccuggagaaguacguggaggacaccaagaucgaccuguggagcuacaacgccgagcugcugguggcccuggagaaccagcacaccaucgaccugaccgacagcgagaugaacaagcugguggagaagaccaagaagcagcugagagagaacgccgaggacaugggcaacggcugcuucaagaucuaccacaagugcgacaacgccugcaucggcagcaucagaaacggcaccuacgaccacgacguguacagagacgaggcccugaacaacagauuccagaucaagggcguggagcugaagagcggcuacaaggacuggauccuguggaucagcuucgccaucagcugcuuccugcugugcguggcccugcugggcuucaucaugugggccugccagaagggcaacaucagaugcaacaucugcaucuga

SEQ ID NO: 170777 - RNA, 1701 nt, Artificial Sequence; identical to SEQ ID NO: 170678
  derived and/or modified CDS sequence (opt4) from hemagglutinin__InfluenzaA__AHC59833

SEQ ID NO: 170778 - RNA, 1701 nt, Artificial Sequence; identical to SEQ ID NO: 170677
  derived and/or modified CDS sequence (opt4) from hemagglutinin__InfluenzaA__AHC59845

SEQ ID NO: 170779 - RNA, 1701 nt, Artificial Sequence; identical to SEQ ID NO: 167842
  derived and/or modified CDS sequence (opt4) from hemagglutinin__InfluenzaA__AHC59857

SEQ ID NO: 170780 - RNA, 1701 nt, Artificial Sequence; identical to SEQ ID NO: 167042
  derived and/or modified CDS sequence (opt4) from hemagglutinin__InfluenzaA__AHC59869

SEQ ID NO: 170781 - RNA, 1701 nt, Artificial Sequence; identical to SEQ ID NO: 167042
  derived and/or modified CDS sequence (opt4) from hemagglutinin__InfluenzaA__AHC59881

SEQ ID NO: 170782 - RNA, 1701 nt, Artificial Sequence; identical to SEQ ID NO: 166915
  derived and/or modified CDS sequence (opt4) from hemagglutinin__InfluenzaA__AHC59892

SEQ ID NO: 170783 - RNA, 1701 nt, Artificial Sequence
  derived and/or modified CDS sequence (opt4) from hemagglutinin__InfluenzaA__AHC59904
augaagaccaucaucgcccugagcuacauccugugccugguguucgcccagaagcugcccggcaacgacaacagcaccgccacccugugccugggccaccacgccgugcccaacggcaccaucgugaagaccaucaccaacgaccagaucgaggugaccaacgccaccgagcuggugcagagcagcagcaccggcgagaucugcaacagcccccaccagauccuggacggcgagaacugcacccugaucgacgcccugcugggcgacccccagugcgacggcuuccagaacaagaagugggaccuguucguggagagaagcaaggcccacagcaacugcuaccccuacgacgugcccgacuacgccagccugagaagccugguggccagcagcggcacccuggaguucaacaacgagagcuucaacuggaccggcgugacccagaacggcaccagcagcgccugcaucagaggcagcaacaacagcuucuucagcagacugaacuggcugacccaccugaacuucaaguaccccgcccugaacgugaccaugcccaacaacgagcaguucgacaagcuguacaucuggggcgugcaccaccccggcaccgacaaggaccagaucuuccuguacgcccaggccagcggcagaaucaccgugagcaccaagagaagccagcaggccgugauccccaacaucggcagcagacccagagugagaaacauccccagcagagugagcaucuacuggaccaucgugaagcccggcgacauccugcugaucaacagcaccggcaaccugaucgcccccagaggcuacuucaagaucagaagcggcaagagcagcaucaugagaagcgacgcccccaucggcaagugcaacagcgccugcaucacccccaacggcagcauccccaacgacaagcccuuccagaacgugaacagaaucaccuacggcgccugccccagauacgugaagcagaacacccugaagcuggccaccggcaugagaaacgugcccgagaagcagaccagaggcaucuucggcgccaucgccggcuucaucgagaacggcugggagggcaugauggacggcugguacggcuucagacaccagaacagcgagggcagaggccaggccgccgaccugaagagcacccaggccgccaucgaccagaucaacggcaagcugaacagacugaucggcaagaccaacgagaaguuccaccagaucgagaaggaguucagcgagguggagggcagaauccaggaccuggagaaguacguggaggacaccaagaucgaccuguggagcuacaacgccgagcugcugguggcccuggagaaccagcacaccaucgaccugaccgacagcgagaugaacaagcuguucgagaagaccaagaagcagcugagagagaacgccgaggacaugggcaacggcugcuucaagaucuaccacaagugcgacaacgccugcaucggcagcaucagaaacggcaccuacgaccacgacguguacagagacgaggcccugaacaacagauuccagaucaagggcguggagcugaagagcggcuacaaggacuggauccuguggaucagcuucgccaucagcugcuuccugcugugcguggcccugcugggcuucaucaugugggccugccagaagggcaacaucagaugcaacaucugcaucuga

SEQ ID NO: 170784 - RNA, 1701 nt, Artificial Sequence
  derived and/or modified CDS sequence (opt4) from hemagglutinin__InfluenzaA__AHC59915
augaagaccgugaucgcccugagcuacauccugugccuggccuucgcccagaagcugcccggcaacgacaacagcaccgccacccugugccugggccaccacgccgugcccaacggcaccaucgugaagaccaucaccaacgaccagaucgaggugaccaacgccaccgagcuggugcagagcagcagcaccggcgagaucugcgacagcccccaccagauccuggacggcgagaacugcacccugaucgacgcccugcugggcgacccccagugcgacggcuuccagaacaagaagugggaccuguucguggagagaagcaaggccuacagcaacugcuaccccuacgacgugcccgacuacgccagccugagaagccugguggccagcagcggcacccuggaguucaacaacgagagcuucaacuggaccggcgugacccagaacggcaccagcagcgccugcaucagaagaagcaacaacagcuucuucagcagacugaacuggcugacccaccugaacuucaaguaccccgcccugaacgugaccaugcccaacaacgagcaguucgacaagcuguacaucuggggcgugcaccaccccggcaccgacaaggaccagaucuuccuguacgcccaggccagcggcagaaucaccgugagcaccaagagaagccagcaggccgugauccccaacaucggcagcagacccagagugagaaacauccccagcagaaucagcaucuacuggaccaucgugaagcccggcgacauccugcugaucaacagcaccggcaaccugaucgcccccagaggcuacuucaagaucagaagcggcaagagcagcaucaugagaagcgacgcccccaucggcaagugcaacagcgagugcaucacccccaacggcagcauccccaacgacaagcccuuccagaacgugaacagaaucaccuacggcgccugccccagauacgugaagcagaacacccugaagcuggccaccggcaugagaaacgugcccgagaagcagaccagaggcaucuucggcgccaucgccggcuucaucgagaacggcugggagggcaugguggacggcugguacggcuucagacaccagaacagcgagggcagaggccaggccgccgaccugaagagcacccaggccgccaucgaccagaucaacggcaagcugaacagacugaucggcaagaccaacgagaaguuccaccagaucgagaaggaguucagcgagguggagggcagaauccaggaccuggagaaguacguggaggacaccaagaucgaccuguggagcuacaacgccgagcugcugguggcccuggagaaccagcacaccaucgaccugaccgacagcgagaugaacaagcuguucgagaagaccaagaagcagcugagagagaacgccgaggacaugggcaacggcugcuucaagaucuaccacaagugcgacaacgccugcaucggcagcaucagaaacggcaccuacgaccacgacguguacagagacgaggcccugaacaacagauuccagaucaagggcguggagcugaagagcggcuacaaggacuggauccuguggaucagcuucgccaucagcugcuuccugcugugcguggcccugcugggcuucaucaugugggccugccagaagggcaacaucagaugcaacaucugcaucuga

SEQ ID NO: 170785 - RNA, 1701 nt, Artificial Sequence; identical to SEQ ID NO: 167042
  derived and/or modified CDS sequence (opt4) from hemagglutinin__InfluenzaA__AHC59939

SEQ ID NO: 170786 - RNA, 1701 nt, Artificial Sequence
  derived and/or modified CDS sequence (opt4) from hemagglutinin__InfluenzaA__AHC59963
augaagaccaucaucgcccugagcuacauccugugccugguguucgcccagaagcugcccggcaacgacaacagcaccgccacccugugccugggccaccacgccgugcccaacggcaccaucgugaagaccaucaccaacgaccagaucgaggugaccaacgccaccgagcuggugcagagcagcagcaccggcgagaucugcgacagcccccaccagauccuggacggcgagaacugcacccugaucgacgcccugcugggcgacccccagugcgacggcuuccagaacaagaagugggaccuguucguggagagaagcaaggccuacagcaacugcuaccccuacgacgugcccgacuacgccagccugagaagccugguggccagcagcggcacccuggaguucaacaacgagagcuucaacuggaccggcgugacccagaacggcaccagcagcgccugcaucagaagaagcaacagcagcuucuucagcagacugaacuggcugacccaccugaacuucaaguaccccgcccugaacgugaccaugcccaacaacgagcaguucgacaagcuguacaucuggggcgugcaccaccccggcaccgacaaggaccagaucuuccuguacgcccagagcagcggcagaaucaccgugagcaccaagagaagccagcaggccgugauccccaacaucggcagcagacccagaaucagaaacauccccagcagaaucagcaucuacuggaccaucgugaagcccggcgacauccugcugaucaacagcaccggcaaccugaucgcccccagaggcuacuucaagaucagaagcggcaagagcagcaucaugagaagcgacgcccccaucggcaagugcaacagcgagugcaucacccccaacggcagcauccccaacgacaagcccuuccagaacgugaacagaaucaccuacggcgccugccccagauacaucaagcagagcacccugaagcuggccaccggcaugagaaacgugcccgagaagcagaccagaggcaucuucggcgccaucgccggcuucaucgagaacggcugggagggcaugguggacggcugguacggcuucagacaccagaacagcgagggcagaggccaggccgccgaccugaagagcacccaggccgccaucgaccagaucaacggcaagcugaacagacugaucggcaagaccaacgagaaguuccaccagaucgagaaggaguucagcgagguggagggcagaauccaggaccuggagaaguacguggaggacaccaagaucgaccuguggagcuacaacgccgagcugcugguggcccuggagaaccagcacaccaucgaccugaccgacagcgagaugaacaagcuguucgagaagaccaagaagcagcugagagagaacgccgaggacaugggcaacggcugcuucaagaucuaccacaagugcgacaacgccugcaucggcagcaucagaaacggcaccuacaaccacgacguguacagagacgaggcccugaacaacagauuccagaucaagggcguggagcugaagagcggcuacaaggacuggauccuguggaucagcuucgccaucagcugcuuccugcugugcguggcccugcugggcuucaucaugugggccugccagaagggcaacaucagaugcaacaucugcaucuga

SEQ ID NO: 170787 - RNA, 1701 nt, Artificial Sequence; identical to SEQ ID NO: 166915
  derived and/or modified CDS sequence (opt4) from hemagglutinin__InfluenzaA__AHC59987

SEQ ID NO: 170788 - RNA, 1701 nt, Artificial Sequence; identical to SEQ ID NO: 166915
  derived and/or modified CDS sequence (opt4) from hemagglutinin__InfluenzaA__AHC59999

SEQ ID NO: 170789 - RNA, 1701 nt, Artificial Sequence; identical to SEQ ID NO: 167042
  derived and/or modified CDS sequence (opt4) from hemagglutinin__InfluenzaA__AHC60011

SEQ ID NO: 170790 - RNA, 1701 nt, Artificial Sequence; identical to SEQ ID NO: 166915
  derived and/or modified CDS sequence (opt4) from hemagglutinin__InfluenzaA__AHC60023

SEQ ID NO: 170791 - RNA, 1701 nt, Artificial Sequence; identical to SEQ ID NO: 167842
  derived and/or modified CDS sequence (opt4) from hemagglutinin__InfluenzaA__AHC60035

SEQ ID NO: 170792 - RNA, 1701 nt, Artificial Sequence; identical to SEQ ID NO: 167842
  derived and/or modified CDS sequence (opt4) from hemagglutinin__InfluenzaA__AHC60047

SEQ ID NO: 170793 - RNA, 1701 nt, Artificial Sequence
  derived and/or modified CDS sequence (opt4) from hemagglutinin__InfluenzaA__AHC60059
augaagaccaucaucgcccugagcuacauccugugccugguguucgcccagaagcugcccggcaacgacaacagcaccgccacccugugccugggccaccacgccgugcccaacggcaccaucgugaagaccaucaccaacgaccagaucgaggugaccaacgccaccgagcuggugcagaacagcagcaccggcgagaucugcgacagcccccaccagauccuggacggcgagaacugcacccugaucgacgcccugcugggcgacccccagugcgacggcuuccagaacaagaagugggaccuguucguggagagaagcaaggccuacagcaacugcuaccccuacgacgugcccgacuacgccagccugagaagccugguggccagcagcggcacccuggaguucaacaacgagagcuucaacuggaccggcgugacccagaacggcaccagcagcgccugcaucagaagaagcaacaacagcuucuucagcagacugaacuggcugacccaccugaacuucaaguaccccgcccugaacgugaccaugcccaacaacgagcaguucgacaagcuguacaucuggggcgugcaccaccccggcaccgacaaggaccagaucuuccuguacgcccaggccagcggcagaaucaccgugagcaccaagagaagccagcaggccgugauccccaacaucggcagcagacccagagugagaaacauccccagcagaaucagcaucuacuggaccaucgugaagcccggcgacauccugcugaucaacagcaccggcaaccugaucgcccccagaggcuacuucaagaucagaagcggcaagagcagcaucaugagaagcgacgcccccaucggcaagugcaacagcgccugcaucacccccaacggcagcauccccaacgacaagcccuuccagaacgugaacagaaucaccuacggcgccugccccagauacgugaagcagaacacccugaagcuggccaccggcaugagaaacgugcccgagaagcagaccagaggcaucuucggcgccaucgccggcuucaucgagaacggcugggagggcaugguggacggcugguacggcuucagacaccagaacagcgagggcagaggccaggccgccgaccugaagagcacccaggccgccaucgaccagaucaacggcaagcugaacagacugaucggcaagaccaacgagaaguuccaccagaucgagaaggaguucagcgagguggagggcagaauccaggaccuggagaaguacguggaggacaccaagaucgaccuguggagcuacaacgccgagcugcugguggcccuggagaaccagcacaccaucgaccugaccgacagcgagaugaacaagcuguucgagaagaccaagaagcagcugagagagaacgccgaggacaugggcaacggcugcuucaagaucuaccacaagugcgacaacgccugcaucggcagcaucagaaacggcaccuacaaccacgacguguacagagacgaggcccugaacaacagauuccagaucaagggcguggagcugaagagcggcuacaaggacuggauccuguggaucagcuucgccaucagcugcuuccugcugugcguggcccugcugggcuucaucaugugggccugccagaagggcaacaucagaugcaacaucugcaucuga

SEQ ID NO: 170794 - RNA, 1701 nt, Artificial Sequence; identical to SEQ ID NO: 169134
  derived and/or modified CDS sequence (opt4) from hemagglutinin__InfluenzaA__AHC60071

SEQ ID NO: 170795 - RNA, 1701 nt, Artificial Sequence; identical to SEQ ID NO: 170678
  derived and/or modified CDS sequence (opt4) from hemagglutinin__InfluenzaA__AHC60083

SEQ ID NO: 170796 - RNA, 1701 nt, Artificial Sequence; identical to SEQ ID NO: 167842
  derived and/or modified CDS sequence (opt4) from hemagglutinin__InfluenzaA__AHC60095

SEQ ID NO: 170797 - RNA, 1701 nt, Artificial Sequence
  derived and/or modified CDS sequence (opt4) from hemagglutinin__InfluenzaA__AHC60107
augaagaccaucaucgcccugagcuacauccugugccugguguucgcccagaagcugcccggcaacgacaacagcaccgccacccugugccugggccaccacgccgugcccaacggcaccaucgugaagaccaucaccaacgaccagaucgaggugaccaacgccaccgagcuggugcagaacagcagcaccggcgagaucugcgacagcccccaccagaucaucgacggcgagaacugcacccugaucgacgcccugcugggcgacccccagugcgacggcuuccagaacaagaagugggaccuguucguggagagaagcaaggccuacagcaacugcuaccccuacgacgugcccgacuacgccagccugagaagccugguggccagcagcggcacccuggaguucaacaacgagagcuucaacuggaccggcgugacccagaacggcaccagcagcgccugcaucagaagaagcaacaacagcuucuucagcagacugaacuggcugacccaccugaacuucaaguaccccgcccugaacgugaccaugcccaacaacgagcaguucgacaagcuguacaucuggggcgugcaccaccccggcaccgacaaggaccagaucuuccuguacgcccaggccagcggcagaaucaccgugagcaccaagagaagccagcaggccgugauccccaacaucggcagcagacccagagugagaaacauccccagcagaaucagcaucuacuggaccaucgugaagcccggcgacauccugcugaucaacagcaccggcaaccugaucgcccccagaggcuacuucaagaucagaagcggcaagagcagcaucaugagaagcgacgcccccaucggcaagugcaacagcgagugcaucacccccaacggcagcauccccaacgacaagcccuuccagaacgugaacagaaucaccuacggcgccugccccagauacgugaagcagaacacccugaagcuggccaccggcaugagaaacgugcccgagaagcagaccagaggcaucuucggcgccaucgccggcuucaucgagaacggcugggagggcaugguggacggcugguacggcuucagacaccagaacagcgagggcagaggccaggccgccgaccugaagagcacccaggccgccaucgaccagaucaacggcaagcugaacagacugaucggcaagaccaacgagaaguuccaccagaucgagaaggaguucagcgagguggagggcagaauccaggaccuggagaaguacguggaggacaccaagaucgaccuguggagcuacaacgccgagcugcugguggcccuggagaaccagcacaccaucgaccugaccgacagcgagaugaacaagcuguucgagaagaccaagaagcagcugagagagaacgccgaggacaugggcaacggcugcuucaagaucuaccacaagugcgacaacgccugcaucggcagcaucagaaacggcaccuacgaccacgacguguacagagacgaggcccugaacaacagauucaagaucaagggcguggagcugaagagcggcuacaaggacuggauccuguggaucagcuucgccaucagcugcuuccugcugugcguggcccugcugggcuucaucaugugggccugccagaagggcaacaucagaugcaacaucugcaucuga

SEQ ID NO: 170798 - RNA, 1701 nt, Artificial Sequence; identical to SEQ ID NO: 167042
  derived and/or modified CDS sequence (opt4) from hemagglutinin__InfluenzaA__AHC60119

SEQ ID NO: 170799 - RNA, 1701 nt, Artificial Sequence; identical to SEQ ID NO: 167042
  derived and/or modified CDS sequence (opt4) from hemagglutinin__InfluenzaA__AHC60131

SEQ ID NO: 170800 - RNA, 1701 nt, Artificial Sequence; identical to SEQ ID NO: 170708
  derived and/or modified CDS sequence (opt4) from hemagglutinin__InfluenzaA__AHC60143

SEQ ID NO: 170801 - RNA, 1701 nt, Artificial Sequence
  derived and/or modified CDS sequence (opt4) from hemagglutinin__InfluenzaA__AHC60155
augaagaccgugaucgcccugagcuacauccugugccuggccuucgcccagaagcugcccggcaacgacaacagcaccgccacccugugccugggccaccacgccgugcccaacggcaccaucgugaagaccaucaccaacgaccagaucgaggugaccaacgccaccgagcuggugcagagcagccccaccggcgagaucugcgacagcccccaccagauccuggacggcgagaacugcacccugaucgacgcccugcugggcgacccccagugcgacggcuuccagaacaagaagugggaccuguucguggagagaagcaaggccuacagcaacugcuaccccuacgacgugcccgacuacgccagccugagaagccugguggccagcagcggcacccuggaguucaacaacgagagcuucaacuggaccggcgugacccagaacggcaccagcagcgccugcaucagaagaagcaacaacagcuucuucagcagacugaacuggcugacccaccugaacuucaaguaccccgcccugaacgugaccaugcccaacaacgagcaguucgacaagcuguacaucuggggcgugcaccaccccggcaccgacaaggaccagaucuuccuguacgcccaggccagcggcagaaucaccgugagcaccaagagaagccagcaggccgugauccccaacaucggcagcagacccagagugagaaacauccccagcagaaucagcaucuacuggaccaucgugaagcccggcgacauccugcugaucaacagcaccggcaaccugaucgcccccagaggcuacuucaagaucagaagcggcaagagcagcaucaugagaagcgacgcccccaucggcaagugcaacagcgagugcaucacccccaacggcagcauccccaacgacaagcccuuccagaacgugaacagaaucaccuacggcgccugccccagauacgugaagcagaacacccugaagcuggccaccggcaugagaaacgugcccgagaagcagaccagaggcaucuucggcgccaucgccggcuucaucgagaacggcugggagggcaugguggacggcugguacggcuucagacaccagaacagcgagggcagaggccaggccgccgaccugaagagcacccaggccgccaucgaccagaucaacggcaagcugaacagacugaucggcaagaccaacgagaaguuccaccagaucgagaaggaguucagcgagguggagggcagaauccaggaccuggagaaguacguggaggacaccaagaucgaccuguggagcuacaacgccgagcugcugguggcccuggagaaccagcacaccaucgaccugaccgacagcgagaugaacaagcuguucgagaagaccaagaagcagcugagagagaacgccgaggacaugggcaacggcugcuucaagaucuaccacaagugcgacaacgccugcaucggcagcaucagaaacggcaccuacgaccacgacguguacagagacgaggcccugaacaacagauuccagaucaagggcguggagcugaagagcggcuacaaggacuggauccuguggaucagcuucgccaucagcugcuuccugcugugcguggcccugcugggcuucaucaugugggccugccagaagggcaacaucagaugcaacaucugcaucuga

SEQ ID NO: 170802 - RNA, 1701 nt, Artificial Sequence; identical to SEQ ID NO: 166915
  derived and/or modified CDS sequence (opt4) from hemagglutinin__InfluenzaA__AHC60167

SEQ ID NO: 170803 - RNA, 1701 nt, Artificial Sequence; identical to SEQ ID NO: 167842
  derived and/or modified CDS sequence (opt4) from hemagglutinin__InfluenzaA__AHC60179

SEQ ID NO: 170804 - RNA, 1701 nt, Artificial Sequence; identical to SEQ ID NO: 170753
  derived and/or modified CDS sequence (opt4) from hemagglutinin__InfluenzaA__AHC60191

SEQ ID NO: 170805 - RNA, 1701 nt, Artificial Sequence; identical to SEQ ID NO: 170753
  derived and/or modified CDS sequence (opt4) from hemagglutinin__InfluenzaA__AHC60203

SEQ ID NO: 170806 - RNA, 1701 nt, Artificial Sequence; identical to SEQ ID NO: 169134
  derived and/or modified CDS sequence (opt4) from hemagglutinin__InfluenzaA__AHC60215

SEQ ID NO: 170807 - RNA, 1701 nt, Artificial Sequence; identical to SEQ ID NO: 167842
  derived and/or modified CDS sequence (opt4) from hemagglutinin__InfluenzaA__AHC60239

SEQ ID NO: 170808 - RNA, 1701 nt, Artificial Sequence; identical to SEQ ID NO: 167842
  derived and/or modified CDS sequence (opt4) from hemagglutinin__InfluenzaA__AHC60251

SEQ ID NO: 170809 - RNA, 1701 nt, Artificial Sequence
  derived and/or modified CDS sequence (opt4) from hemagglutinin__InfluenzaA__AHC60263
augaagaccaucaucgcccugagcuacauccugugccugguguucgcccagaagcugcccggcaacgagaacagcaccgccacccugugccugggccaccacgccgugcccaacggcaccaucgugaagaccaucaccaacgaccagaucgaggugaccaacgccaccgagcuggugcagaacagcagcaccggcgagaucugcgacagcccccaccagauccuggacggcgagaacugcacccugaucgacgcccugcugggcgacccccagugcgacggcuuccagaacaagaagugggaccuguucguggagagaagcaaggccuacagcaacugcuaccccuacgacgugcccgacuacgccagccugagaagccugguggccagcagcggcacccuggaguucaacaacgagagcuucaacuggaccggcgugacccagaacggcaccagcagcgccugcaucagaagaagcaacaacagcuucuucagcagacugaacuggcugacccaccugaacuucaaguaccccgcccugaacgugaccaugcccaacaacgagcaguucgacaagcuguacaucuggggcgugcaccaccccggcaccgacaaggaccagaucuuccuguacgcccaggccagcggcagaaucaccgugagcaccaagagaagccagcaggccgugauccccaacaucggcagcagacccagagugagaaacauccccagcagaaucagcaucuacuggaccaucgugaagcccggcgacauccugcugaucaacagcaccggcaaccugaucgcccccagaggcuacuucaagaucagaagcggcaagagcagcaucaugagaagcgacgcccccaucggcaagugcaacagcgagugcaucacccccaacggcagcauccccaacgacaagcccuuccagaacgugaacagaaucaccuacggcgccugccccagauacgugaagcagaacacccugaagcuggccaccggcaugagaaacgugcccgagaagcagaccagaggcaucuucggcgccaucgccggcuucaucgagaacggcugggagggcaugguggacggcugguacggcuucagacaccagaacagcgagggcagaggccaggccgccgaccugaagagcacccaggccgccaucgaccagaucaacggcaagcugaacagacugaucggcaagaccaacgagaaguuccaccagaucgagaaggaguucagcgagguggagggcagaauccaggaccuggagaaguacguggaggacaccaagaucgaccuguggagcuacaacgccgagcugcugguggcccuggagaaccagcacaccaucgaccugaccgacagcgagaugaacaagcuguucgagaagaccaagaagcagcugagagagaacgccgaggacaugggcaacggcugcuucaagaucuaccacaagugcgacaacgccugcaucggcagcaucagaaacggcaccuacgaccacgacguguacagagacgaggcccugaacaacagauuccagaucaagggcguggagcugaagagcggcuacaaggacuggauccuguggaucagcuucgccaucagcugcuuccugcugugcguggcccugcugggcuucaucaugugggccugccagaagggcaacaucagaugcaacaucugcaucuga

SEQ ID NO: 170810 - RNA, 1701 nt, Artificial Sequence; identical to SEQ ID NO: 166915
  derived and/or modified CDS sequence (opt4) from hemagglutinin__InfluenzaA__AHC60275

SEQ ID NO: 170811 - RNA, 1701 nt, Artificial Sequence; identical to SEQ ID NO: 170797
  derived and/or modified CDS sequence (opt4) from hemagglutinin__InfluenzaA__AHC60287

SEQ ID NO: 170812 - RNA, 1701 nt, Artificial Sequence; identical to SEQ ID NO: 170678
  derived and/or modified CDS sequence (opt4) from hemagglutinin__InfluenzaA__AHC60299

SEQ ID NO: 170813 - RNA, 1701 nt, Artificial Sequence
  derived and/or modified CDS sequence (opt4) from hemagglutinin__InfluenzaA__AHC60311
augaagaccaucaucgcccugagcuacauccugugccugguguucgcccagaagcugcccggcaacgacaacagcaccgccacccugugccugggccaccacgccgugcccaacggcaccaucgugaagaccaucaccaacgaccagaucgaggugaccaacgccaccgagcuggugcagaacagcagcaccggcgagaucugcgacagcccccaccagauccuggacggcgagaacugcacccugaucgacgcccugcugggcgacccccagugcgacggcuuccagaacaagaagugggaccuguucguggagagaagcaaggccuacagcaacugcuaccccuacgacgugcccgacuacgccagccugagaagccugguggccagcagcggcacccuggaguucgacaacgagagcuucaacuggaccggcgugacccagaacggcaccagcagcgccugcaucagaagaagcaacaacagcuucuucagcagacugaacuggcugacccaccugaacuucaaguaccccgcccugaacgugaccaugcccaacaacgagcaguucgacaagcuguacaucuggggcgugcaccaccccggcaccgacaaggaccagaucuuccuguacgcccaggccagcggcagaaucaccgugagcaccaagagaagccagcaggccgugauccccaacaucggcagcagacccagagugagaaacauccccagcagaaucagcaucuacuggaccaucgugaagcccggcgacauccugcugaucaacagcaccggcaaccugaucgcccccagaggcuacuucaagaucagaagcggcaagagcagcaucaugagaagcgacgcccccaucggcaagugcaacagcgagugcaucacccccaacggcagcauccccaacgacaagcccuuccagaacgugaacagaaucaccuacggcgccugccccagauacgugaagcagaacacccugaagcuggccaccggcaugagaaacgugcccgagaagcagaccagaggcaucuucggcgccaucgccggcuucaucgagaacggcugggagggcaugguggacggcugguacggcuucagacaccagaacagcgagggcagaggccaggccgccgaccugaagagcacccaggccgccaucgaccagaucaacggcaagcugaacagacugaucggcaagaccaacgagaaguuccaccagaucgagaaggaguucagcgagguggagggcagaauccaggaccuggagaaguacguggaggacaccaagaucgaccuguggagcuacaacgccgagcugcugguggcccuggagaaccagcacaccaucgaccugaccgacagcgagaugaacaagcuguucgagaagaccaagaagcagcugagagagaacgccgaggacaugggcaacggcugcuucaagaucuaccacaagugcgacaacgccugcaucggcagcaucagaaacggcaccuacgaccacgacguguacagagacgaggcccugaacaacagauuccagaucaagggcguggagcugaagagcggcuacaaggacuggauccuguggaucagcuucgccaucagcugcuuccugcugugcguggcccugcugggcuucaucaugugggccugccagaagggcaacaucagaugcaacaucugcaucuga

SEQ ID NO: 170814 - RNA, 1701 nt, Artificial Sequence; identical to SEQ ID NO: 167842
  derived and/or modified CDS sequence (opt4) from hemagglutinin__InfluenzaA__AHC60323

SEQ ID NO: 170815 - RNA, 1701 nt, Artificial Sequence; identical to SEQ ID NO: 169134
  derived and/or modified CDS sequence (opt4) from hemagglutinin__InfluenzaA__AHC60335

SEQ ID NO: 170816 - RNA, 1701 nt, Artificial Sequence; identical to SEQ ID NO: 166915
  derived and/or modified CDS sequence (opt4) from hemagglutinin__InfluenzaA__AHC60347

SEQ ID NO: 170817 - RNA, 1701 nt, Artificial Sequence; identical to SEQ ID NO: 167042
  derived and/or modified CDS sequence (opt4) from hemagglutinin__InfluenzaA__AHC60359

SEQ ID NO: 170818 - RNA, 1701 nt, Artificial Sequence; identical to SEQ ID NO: 170739
  derived and/or modified CDS sequence (opt4) from hemagglutinin__InfluenzaA__AHC60371

SEQ ID NO: 170819 - RNA, 1701 nt, Artificial Sequence; identical to SEQ ID NO: 166915
  derived and/or modified CDS sequence (opt4) from hemagglutinin__InfluenzaA__AHC60383

SEQ ID NO: 170820 - RNA, 1701 nt, Artificial Sequence; identical to SEQ ID NO: 167042
  derived and/or modified CDS sequence (opt4) from hemagglutinin__InfluenzaA__AHC60395

SEQ ID NO: 170821 - RNA, 1701 nt, Artificial Sequence; identical to SEQ ID NO: 170753
  derived and/or modified CDS sequence (opt4) from hemagglutinin__InfluenzaA__AHC60407

SEQ ID NO: 170822 - RNA, 1701 nt, Artificial Sequence; identical to SEQ ID NO: 166915
  derived and/or modified CDS sequence (opt4) from hemagglutinin__InfluenzaA__AHC60419

SEQ ID NO: 170823 - RNA, 1701 nt, Artificial Sequence; identical to SEQ ID NO: 167042
  derived and/or modified CDS sequence (opt4) from hemagglutinin__InfluenzaA__AHC60431

SEQ ID NO: 170824 - RNA, 1701 nt, Artificial Sequence; identical to SEQ ID NO: 166915
  derived and/or modified CDS sequence (opt4) from hemagglutinin__InfluenzaA__AHC60455

SEQ ID NO: 170825 - RNA, 1701 nt, Artificial Sequence; identical to SEQ ID NO: 166915
  derived and/or modified CDS sequence (opt4) from hemagglutinin__InfluenzaA__AHC60467

SEQ ID NO: 170826 - RNA, 1701 nt, Artificial Sequence; identical to SEQ ID NO: 170677
  derived and/or modified CDS sequence (opt4) from hemagglutinin__InfluenzaA__AHC60479

SEQ ID NO: 170827 - RNA, 1701 nt, Artificial Sequence; identical to SEQ ID NO: 167842
  derived and/or modified CDS sequence (opt4) from hemagglutinin__InfluenzaA__AHC60491

SEQ ID NO: 170828 - RNA, 1701 nt, Artificial Sequence
  derived and/or modified CDS sequence (opt4) from hemagglutinin__InfluenzaA__AHC60503
augaagaccaucaucgcccugagcuacauccugugccugguguucgcccagaagcugcccggcaacgacaacagcaccgccacccugugccugggccaccacgccgugcccaacggcaccaucgugaagaccaucaccaacgaccagaucgaggugaccaacgccaccgagcuggugcagagcagcagcaccggcgagaucugcaacagcccccaccagauccuggacggcgagaacugcacccugaucgacgcccugcugggcgacccccagugcgacggcuuccagaacaagaagugggaccuguucguggagagaagcaaggccuacagcaacugcuaccccuacgacgugcccgacuacgccagccugagaagccugguggccagcagcggcacccuggaguucaacaacgagagcuucaacuggaccggcgugacccagaacggcaccagcagcgccugcaucagaagaagcaacaacagcuucuucagcagacugaacuggcugacccaccugaacuucaaguaccccgcccugaacgugaccaugcccaacaacgagcaguucgacaagcuguacaucuggggcgugcaccaccccggcaccgacaaggaccagaucuuccuguacgcccaggccagcggcagaaucaccgugagcaccaagagaagccagcaggccgugauccccaacaucggcagcagacccagagugagaaacauccccagcagaaucagcaucuacuggaccaucgugaagcccggcgacauccugcugaucaacagcaccggcaaccugaucgcccccagaggcuacuucaagaucagaagcggcaagagcagcaucaugagaagcgacgcccccaucggcaagugcaacagcgccugcaucacccccaacggcagcauccccaacgacaagcccuuccagaacgugaacagaaucaccuacggcgccugccccagauacgugaagcagaacacccugaagcuggccaccggcaugagaaacgugcccgagaagcagaccagaggcaucuucggcgccaucgccggcuucaucgagaacggcugggagggcaugguggacggcugguacggcuucagacaccagaacagcgagggcagaggccaggccgccgaccugaagagcacccaggccgccaucgaccagaucaacggcaagcugaacagacugaucggcaagaccaacgagaaguuccaccagaucgagaaggaguucagcgagguggagggcagaauccaggaccuggagaaguacguggaggacaccaagaucgaccuguggagcuacaacgccgagcugcugguggcccuggagaaccagcacaccaucgaccugaccgacagcgagaugaacaagcuguucgagaagaccaagaagcagcugagagagaacgccgaggacaugggcaacggcugcuucaagaucuaccacaagugcgacaacgccugcaucggcagcaucagaaacggcaccuacgaccacgacguguacagagacgaggcccugaacaacagauuccagaucaagggcguggagcugaagagcggcuacaaggacuggauccuguggaucagcuucgccaucagcugcuuccugcugugcguggugcugcugggcuucaucaugugggccugccagaagggcaacaucagaugcaacaucugcaucuga

SEQ ID NO: 170829 - RNA, 1701 nt, Artificial Sequence; identical to SEQ ID NO: 167042
  derived and/or modified CDS sequence (opt4) from hemagglutinin__InfluenzaA__AHC60515

SEQ ID NO: 170830 - RNA, 1701 nt, Artificial Sequence; identical to SEQ ID NO: 167842
  derived and/or modified CDS sequence (opt4) from hemagglutinin__InfluenzaA__AHC60527

SEQ ID NO: 170831 - RNA, 1701 nt, Artificial Sequence; identical to SEQ ID NO: 167042
  derived and/or modified CDS sequence (opt4) from hemagglutinin__InfluenzaA__AHC60539

SEQ ID NO: 170832 - RNA, 1701 nt, Artificial Sequence; identical to SEQ ID NO: 170689
  derived and/or modified CDS sequence (opt4) from hemagglutinin__InfluenzaA__AHC60551

SEQ ID NO: 170833 - RNA, 1701 nt, Artificial Sequence; identical to SEQ ID NO: 169134
  derived and/or modified CDS sequence (opt4) from hemagglutinin__InfluenzaA__AHC60563

SEQ ID NO: 170834 - RNA, 1701 nt, Artificial Sequence; identical to SEQ ID NO: 169134
  derived and/or modified CDS sequence (opt4) from hemagglutinin__InfluenzaA__AHC60575

SEQ ID NO: 170835 - RNA, 1701 nt, Artificial Sequence
  derived and/or modified CDS sequence (opt4) from hemagglutinin__InfluenzaA__AHC60587
augaagaccaucaucgcccugagcuacauccugugccugguguucgcccagaagcugcccggcaacgacaacagcaccgccacccugugccugggccaccacgccgugcccaacggcaccaucgugaagaccaucaccaacgaccagaucgaggugaccaacgccaccgagcuggugcagaacagcagcaccggcgagaucugcgacagcccccaccagauccuggacggcgagaacugcacccugaucgacgcccugcugggcgacccccagugcgacggcuuccagaacaagaagugggaccuguucguggagagaagcaaggccuacagcaacugcuaccccuacgacgugcccgacuacgccagccugagaagccugguggccagcagcggcacccuggaguucaacaacgagagcuucaacuggaccggcgugacccagaacggcaccagcagcgccugcaucagaagaagcaacaacagcuucuucagcagacugaacuggcugacccaccugaacuucaaguaccccgcccugaacgugaccaugcccaacaacgagcaguucgacaagcuguacaucuggggcgugcaccaccccggcaccgacaaggaccagaucuuccuguacgcccaggccagcggcagaaucaccgugagcaccaagagaagccagcaggccgugauccccaacaucggcagcagacccagagugagaaacauccccagcagaaucagcaucuacuggaccaucgugaagcccggcgacauccugcugaucaacagcaccggcaaccugaucgcccccagaggcuacuucaagaucagaagcggcaagagcagcaucaugagaagcgacgcccccaucggcaagugcaacagcgagugcaucacccccaacggcagcauccccaacgacaagcccuuccagaacgugaacagaaucaccuacggcgccugccccagauacgugaagcagaacacccugaagcuggccaccggcaugagaaacgugcccgagaagcagaccagaggcaucuucggcgccaucgccggcuucaucgagaacggcugggagggcaugguggacggcugguacggcuucagacaccagaacagcgagggcagaggccaggccgccgaccugaagagcacccaggccgccaucgaccagaucaacggcaagcugaacagacugaucggcaagaccaacgagaaguuccaccagaucgagaaggaguucagcgagguggagggcagaauccagaaccuggagaaguacguggaggacaccaagaucgaccuguggagcuacaacgccgagcugcugguggcccuggagaaccagcacaccaucgaccugaccgacagcgagaugaacaagcuguucgagaagaccaagaagcagcugagagagaacgccgaggacaugggcaacggcugcuucaagaucuaccacaagugcgacaacgccugcaucggcagcaucagaaacggcaccuacgaccacgacguguacagagacgaggcccugaacaacagauuccagaucaagggcguggagcugaagagcggcuacaaggacuggauccuguggaucagcuucgccaucagcugcuuccugcugugcguggcccugcugggcuucaucaugugggccugccagaagggcaacaucagaugcaacaucugcaucuga

SEQ ID NO: 170836 - RNA, 1701 nt, Artificial Sequence; identical to SEQ ID NO: 169134
  derived and/or modified CDS sequence (opt4) from hemagglutinin__InfluenzaA__AHC60599

SEQ ID NO: 170837 - RNA, 1701 nt, Artificial Sequence; identical to SEQ ID NO: 166915
  derived and/or modified CDS sequence (opt4) from hemagglutinin__InfluenzaA__AHC60611

SEQ ID NO: 170838 - RNA, 1701 nt, Artificial Sequence
  derived and/or modified CDS sequence (opt4) from hemagglutinin__InfluenzaA__AHC60623
augaagaccaucaucgcccugagcuacauccugugccugguguucgcccagaagcugcccggcaacgacaacagcaccgccacccugugccugggccaccacgccgugcccaacggcaccaucgugaagaccaucaccaacgaccagaucgaggugaccaacgccaccgagcuggugcagagcagcagcaccggcgagaucugcgacagcccccaccagauccuggacggcgagaacugcacccugaucgacgcccugcugggcgacccccagugcgacggcuuccagaacaagaagugggaccuguucguggagagaagcaaggccuacagcaacugcuaccccuacgacgugcccgacuacgccagccugagaagccugguggccagcagcggcacccuggaguucaacaacgagagcuucaacuggaccggcgugacccagaacggcaccagcagcgccugcaucagaagaagcaacagcagcuucuucagcagacugaacuggcugacccaccugaacuucaaguaccccgcccugaacgugaccaugcccaacaacgagcaguucgacaagcuguacaucuggggcgugcaccaccccggcaccgacaaggaccagaucuuccuguacgcccagagcagcggcagaaucaccgugagcaccaagagaagccagcaggccgugauccccaacaucggcagcagacccagaaucagaaacauccccagcagaaucagcaucuacuggaccaucgugaagcccggcgacauccugcugaucaacagcaccggcaaccugaucgcccccagaggcuacuucaagaucagaaacggcaagagcagcaucaugagaagcgacgcccccaucggcaagugcaacagcgagugcaucacccccaacggcagcauccccaacgacaagcccuuccagaacgugaacagaaucaccuacggcgccugccccagauacgugaagcagagcacccugaagcuggccaccggcaugagaaacgugcccgagaagcagaccagaggcaucuucggcgccaucgccggcuucaucgagaacggcugggagggcaugguggacggcugguacggcuucagacaccagaacagcgagggcagaggccaggccgccgaccugaagagcacccaggccgccaucgaccagaucaacggcaagcugaacagacugaucggcaagaccaacgagaaguuccaccagaucgagaaggaguucagcgagguggagggcagaauccaggaccuggagaaguacguggaggacaccaagaucgaccuguggagcuacaacgccgagcugcugguggcccuggagaaccagcacaccaucgaccugaccgacagcgagaugaacaagcuguucgagaagaccaagaagcagcugagagagaacgccgaggacaugggcaacggcugcuucaagaucuaccacaagugcgacaacgccugcaucggcagcaucagaaacggcaccuacaaccacgacguguacagagacgaggcccugaacaacagauuccagaucaagggcguggagcugaagagcggcuacaaggacuggauccuguggaucagcuucgccaucagcugcuuccugcugugcguggcccugcugggcuucaucaugugggccugccagaagggcaacaucagaugcaacaucugcaucuga

SEQ ID NO: 170839 - RNA, 1701 nt, Artificial Sequence; identical to SEQ ID NO: 169134
  derived and/or modified CDS sequence (opt4) from hemagglutinin__InfluenzaA__AHC60635

SEQ ID NO: 170840 - RNA, 1701 nt, Artificial Sequence
  derived and/or modified CDS sequence (opt4) from hemagglutinin__InfluenzaA__AHC60647
augaagaccaucaucgcccugagcuacauccugugccugguguucacccagaagcugcccggcaacgacaacagcaccgccacccugugccugggccaccacgccgugcccaacggcaccaucgugaagaccaucaccaacgaccagaucgaggugaccaacgccaccgagcuggugcagaacagcagcaccggcgagaucugcgacagcccccaccagauccuggacggcgagaacugcacccugaucgacgcccugcugggcgacccccagugcgacggcuuccagaacaagaagugggaccuguucguggagagaagcaaggccuacagcaacugcuaccccuacgacgugcccgacuacgccagccugagaagccugguggccagcagcggcacccuggaguucaacaacgagagcuucaacuggaccggcgugacccagaacggcaccagcagcgccugcaucagaagaagcaacaacagcuucuucagcagacugaacuggcugacccaccugaacuucaaguaccccgcccugaacgugaccaugcccaacaacgagcaguucgacaagcuguacaucuggggcgugcaccaccccggcaccgacaaggaccagaucuuccuguacgcccaggccagcggcagaaucaccgugagcaccaagagaagccagcaggccgugauccccaacaucggcagcagacccagagugagaaacauccccagcagaaucagcaucuacuggaccaucgugaagcccggcgacauccugcugaucaacagcaccggcaaccugaucgcccccagaggcuacuucaagaucagaagcggcaagagcagcaucaugagaagcgacgcccccaucggcaagugcaacagcgagugcaucacccccaacggcagcauccccaacgacaagcccuuccagaacgugaacagaaucaccuacggcgccugccccagauacgugaagcagaacacccugaagcuggccaccggcaugagaaacgugcccgagaagcagaccagaggcaucuucggcgccaucgccggcuucaucgagaacggcugggagggcaugguggacggcugguacggcuucagacaccagaacagcgagggcagaggccaggccgccgaccugaagagcacccaggccgccaucgaccagaucaacggcaagcugaacagacugaucggcaagaccaacgagaaguuccaccagaucgagaaggaguucagcgagguggagggcagaauccaggaccuggagaaguacguggaggacaccaagaucgaccuguggagcuacaacgccgagcugcugguggcccuggagaaccagcacaccaucgaccugaccgacagcgagaugaacaagcuguucgagaagaccaagaagcagcugagagagaacgccgaggacaugggcaacggcugcuucaagaucuaccacaagugcgacaacgccugcaucggcagcaucagaaacggcaccuacgaccacgacguguacagagacgaggcccugaacaacagauuccagaucaagggcguggagcugaagagcggcuacaaggacuggauccuguggaucagcuucgccaucagcugcuuccugcugugcguggcccugcugggcuucaucaugugggccugccagaagggcaacaucagaugcaacaucugcaucuga

SEQ ID NO: 170841 - RNA, 1701 nt, Artificial Sequence
  derived and/or modified CDS sequence (opt4) from hemagglutinin__InfluenzaA__AHC60659
augaagaccaucaucgcccugagcuacauccugugccugguguucacccagaagcugcccggcaacgacaacagcaccgccacccugugccugggccaccacgccgugcccaacggcaccaucgugaagaccaucaccaacgaccagaucgaggugaccaacgccaccgagcuggugcagagcagcagcaccggcgagaucugcaacagcccccaccagauccuggacggcgagaacugcacccugaucgacgcccugcugggcgacccccagugcgacggcuuccagaacaagaagugggaccuguucguggagagaagcaaggcccacagcaacugcuaccccuacgacgugcccgacuacgccagccugagaagccugguggccagcagcggcacccuggaguucaacaacgagagcuucaacuggaccggcgugacccagaacggcaccagcagcgccugcaucagaagaagcaacaacagcuucuucagcagacugaacuggcugacccaccugaacuucaaguaccccgcccugaacgugaccaugcccaacaacgagcaguucgacaagcuguacaucuggggcgugcaccaccccggcaccgacaaggaccagaucuuccuguacgcccaggccgccggcagaaucaccgugagcaccaagagaagccagcaggccgugauccccaacaucggcagcagacccagagugagaaacauccccagcagagugagcaucuacuggaccaucgugaagcccggcgacauccugcugaucaacagcaccggcaaccugaucgcccccagaggcuacuucaagaucagaagcggcaagagcagcaucaugagaagcgacgcccccaucggcaagugcaacagcgccugcaucacccccaacggcagcauccccaacgacaagcccuuccagaacgugaacagaaucaccuacggcgccugccccagauacgugaagcagaacacccugaagcuggccaccggcaugagaaacgugcccgagaagcagaccagaggcaucuucggcgccaucgccggcuucaucgagaacggcugggagggcaugguggacggcugguacggcuucagacaccagaacagcgagggcagaggccaggccgccgaccugaagagcacccaggccgccaucgaccagaucaacggcaagcugaacagacugaucggcaagaccaacgagaaguuccaccagaucgagaaggaguucagcgagguggagggcagaauccaggaccuggagaaguacguggaggacaccaagaucgaccuguggagcuacaacgccgagcugcugguggcccuggagaaccagcacaccaucgaccugaccgacagcgagaugaacaagcuguucgagaagaccaagaagcagcugagagagaacgccgaggacaugggcaacggcugcuucaagaucuaccacaagugcgacaacgccugcaucggcagcaucagaaacggcaccuacgaccacgacguguacagagacgaggcccugaacaacagauuccagaucaagggcguggagcugaagagcggcuacaaggacuggauccuguggaucagcuucgccaucagcugcuuccugcugugcguggcccugcugggcuucaucaugugggccugccagaagggcaacaucagaugcaacaucugcaucuga

SEQ ID NO: 170842 - RNA, 1701 nt, Artificial Sequence
  derived and/or modified CDS sequence (opt4) from hemagglutinin__InfluenzaA__AHC60671
augaagaccaucaucgcccugagcuacauccugugccugguguucgcccagaagcugcccggcaacgacaacagcaccgccacccugugccugggccaccacgccgugcccaacggcaccaucgugaagaccaucaccaacgaccagaucgaggugaccaacgccaccgagcuggugcagagcagcagcaccggcgagaucugcaacagcccccaccagauccuggacggcgagaacugcacccugaucgacgcccugcugggcgacccccagugcgacggcuuccagaacaaggagugggaccuguucguggagagaagcaaggcccacagcaacugcuaccccuacgacgugcccgacuacgccagccugagaagccugguggccagcagcggcacccuggaguucaacaacgagagcuucaacuggaccggcgugacccagaacggcaccagcagcgccugcaucagaagaagcaacaacagcuucuucagcagacugaacuggcugacccaccugaacuucaaguaccccgcccugaacgugaccaugcccaacaacgagcaguucgacaagcuguacaucuggggcgugcaccaccccggcaccgacaaggaccagaucuuccuguacgcccaggccagcggcagaaucaccgugagcaccaagagaagccagcaggccgugauccccaacaucggcagcagacccagagugagaaacauccccagcagagugagcaucuacuggaccaucgugaagcccggcgacauccugcugaucaacagcaccggcaaccugaucgcccccagaggcuacuucaagaucagaagcggcaagagcagcaucaugagaagcgacgcccccaucggcaagugcaacagcgccugcaucacccccaacggcagcauccccaacgacaagcccuuccagaacgugaacagaaucaccuacggcgccugccccagauacgugaagcagaacacccugaagcuggccaccggcaugagaaacgugcccgagaagcagaccagaggcaucuucggcgccaucgccggcuucaucgagaacggcugggagggcaugguggacggcugguacggcuucagacaccagaacagcgagggcagaggccaggccgccgaccugaagagcacccaggccgccaucgaccagaucaacggcaagcugaacagacugaucggcaagaccaacgagaaguuccaccagaucgagaaggaguucagcgagguggagggcagaauccaggaccuggagaaguacguggaggacaccaagaucgaccuguggagcuacaacgccgagcugcugguggcccuggagaaccagcacaccaucgaccugaccgacagcgagaugaacaagcuguucgagaagaccaagaagcagcugagagagaacgccgaggacaugggcaacggcugcuucaagaucuaccacaagugcgacaacgccugcaucggcagcaucagaaacggcaccuacgaccacgacguguacagagacgaggcccugaacaacagauuccagaucaagggcguggagcugaagagcggcuacaaggacuggauccuguggaucagcuucgccaucagcugcuuccugcugugcguggcccugcugggcuucaucaugugggccugccagaagggcaacaucagaugcaacaucugcaucuga

SEQ ID NO: 170843 - RNA, 1701 nt, Artificial Sequence
  derived and/or modified CDS sequence (opt4) from hemagglutinin__InfluenzaA__AHC60683
augaagaccaucaucgcccugagcuacauccugugccugguguucgcccagaagcugcccggcaacgacaacagcaccgccacccugugccugggccaccacgccgugcccaacggcaccaucgugaagaccaucaccaacgaccagaucgaggugaccaacgccaccgagcuggugcagagcagcagcaccggcgagaucugcaacagcccccaccagauccuggacggcgagaacugcacccugaucgacgcccugcugggcgacccccagugcgacggcuuccagaacaagaagugggaccuguucguggagagaagcaaggcccacagcaacugcuaccccuacgacgugcccgacuacgccagccugagaagccugguggccagcagcggcacccuggaguucaacaacgagagcuucaacuggaccggcgugacccagaacggcaccagcagcgccugcaucagaagaagcaacaacagcuucuucagcagacugaacuggcugacccaccugaacuucaaguaccccgcccugaacgugaccaugcccaacaacgagcaguucgacaagcuguacaucuggggcgugcaccaccccggcaccgacaaggaccagaucuuccuguacgcccaggccgccggcagaaucaccgugagcaccaagagaagccagcaggccgugauccccaacaucggcagcagacccagagugagaaacauccccagcagagugagcaucuacuggaccaucgugaagcccggcgacauccugcugaucaacagcaccggcaaccugaucgcccccagaggcuacuucaagaucagaagcggcaagagcagcaucaucagaagcgacgcccccaucggcaagugcaacagcgccugcaucacccccaacggcagcauccccaacgacaagcccuuccagaacgugaacagaaucaccuacggcgccugccccagauacgugaagcagaacacccugaagcuggccaccggcaugagaaacgugcccgagaagcagaccagaggcaucuucggcgccaucgccggcuucaucgagaacggcugggagggcaugguggacggcugguacggcuucagacaccagaacagcgagggcagaggccaggccgccgaccugaagagcacccaggccgccaucgaccagaucaacggcaagcugaacagacugaucggcaagaccaacgagaaguuccaccagaucgagaaggaguucagcgagguggagggcagaauccaggaccuggagaaguacguggaggacaccaagaucgaccuguggagcuacaacgccgagcugcugguggcccuggagaaccagcacaccaucgaccugaccgacagcgagaugaacaagcuguucgagaagaccaagaagcagcugagagagaacgccgaggacaugggcaacggcugcuucaagaucuaccacaagugcgacaacgccugcaucggcagcaucagaaacggcaccuacgaccacgacguguacagagacgaggcccugaacaacagauuccagaucaagggcguggagcugaagagcggcuacaaggacuggauccuguggaucagcuucgccaucagcugcuuccugcugugcguggcccugcugggcuucaucaugugggccugccagaagggcaacaucagaugcaacaucugcaucuga

SEQ ID NO: 170844 - RNA, 1701 nt, Artificial Sequence
  derived and/or modified CDS sequence (opt4) from hemagglutinin__InfluenzaA__AHC60695
augaagaccaucaucgcccugagcuacauccugugccugguguucgcccagaagcugcccggcaacgacaacagcaccgccacccugugccugggccaccacgccgugcccaacggcaccaucgugaagaccaucaccaacgaccagaucgaggugaccaacgccaccgagcuggugcagagcagcagcaccggcgagaucugcaacagcccccaccagauccuggacggcgagaacugcacccugaucgacgcccugcugggcgacccccagugcgacggcuuccagaacaagaagugggaccuguucguggagagaagcaaggcccacagcaacugcuaccccuacgacgugcccgacuacgccagccugagaagccugguggccagcagcggcacccuggaguucaacaacgagagcuucaacuggaccggcgugacccagaacggcaccagcagcgccugcaugagaggcagcaacaacagcuucuucagcagacugaacuggcugacccaccugaacuucaaguaccccgcccugaacgugaccaugcccaacaacgagcaguucgacaagcuguacaucuggggcgugcaccaccccggcaccgacaaggaccagaucuuccuguacgcccaggccagcggcagaaucaccgugagcaccaagagaagccagcaggccgugauccccaacaucggcagcagacccagagugagaaacauccccagcagagugagcaucuacuggaccaucgugaagcccggcgacauccugcugaucaacagcaccggcaaccugaucgcccccagaggcuacuucaagaucagaagcggcaagagcagcaucaugagaagcgacgcccccaucggcaagugcaacagcgccugcaucacccccaacggcagcauccccaacgacaagcccuuccagaacgugaacagaaucaccuacggcgccugccccagauacgugaagcagaacacccugaagcuggccaccggcaugagaaacgugcccgagaagcagaccagaggcaucuucggcgccaucgccggcuucaucgagaacggcugggagggcaugguggacggcugguacggcuucagacaccagaacagcgagggcagaggccaggccgccgaccugaagagcacccaggccgccaucgaccagaucaacggcaagcugaacagacugaucggcaagaccaacgagaaguuccaccagaucgagaaggaguucagcgagguggagggcagaauccaggaccuggagaaguacguggaggacaccaagaucgaccuguggagcuacaacgccgagcugcugguggcccuggagaaccagcacaccaucgaccugaccgacagcgagaugaacaagcuguucgagaagaccaagaagcagcugagagagaacgccgaggacaugggcaacggcugcuucaagaucuaccacaagugcgacaacgccugcaucggcagcaucagaaacggcaccuacgaccacgacguguacagagacgaggcccugaacaacagauuccagaucaagggcguggagcugaagagcggcuacaaggacuggauccuguggaucagcuucgccaucagcugcuuccugcugugcguggcccugcugggcuucaucaugugggccugccagaagggcaacaucagaugcaacaucugcaucuga

SEQ ID NO: 170845 - RNA, 1701 nt, Artificial Sequence
  derived and/or modified CDS sequence (opt4) from hemagglutinin__InfluenzaA__AHC60707
augaagaccaucaucgcccugagcuacauccugugccugguguucgcccagaagcugcccggcaacgacaacagcaccgccacccugugccugggccaccacgccgugcccaacggcaccaucgugaagaccaucaccgacgaccagaucgaggugaccaacgccaccgagcuggugcagaacagcagcaccggcgagaucugcgacagcccccaccagauccuggacggcgagaacugcacccugaucgacgcccugcugggcgacccccagugcgacggcuuccagaacaagaagugggaccuguucguggagagaagcaaggccuacagcaacugcuaccccuacgacgugcccgacuacgccagccugagaagccugguggccagcagcggcacccuggaguucaacaacgagagcuucaacuggaccggcgugacccagaacggcaccagcagcgccugcaucagaagaagcaacaacagcuucuucagcagacugaacuggcugacccaccugaacuucaaguaccccgcccugaacgugaccaugcccaacaacgagcaguucgacaagcuguacaucuggggcgugcaccaccccggcaccgacaaggaccagaucuuccuguacgcccaggccagcggcagaaucaccgugagcaccaagagaagccagcaggccgugauccccaacaucggcagcagacccagagugagaaacauccccagcagaaucagcaucuacuggaccaucgugaagcccggcgacauccugcugaucaacagcaccggcaaccugaucgcccccagaggcuacuucaagaucagaagcggcaagagcagcaucaugagaagcgacgcccccaucggcaagugcaacagcgagugcaucacccccaacggcagcauccccaacgacaagcccuuccagaacgugaacagaaucaccuacggcgccugccccagauacgugaagcagaacacccugaagcuggccaccggcaugagaaacgugcccgagaagcagaccagaggcaucuucggcgccaucgccggcuucaucgagaacggcugggagggcaugguggacggcugguacggcuucagacaccagaacagcgagggcagaggccaggccgccgaccugaagagcacccaggccgccaucgaccagaucaacggcaagcugaacagacugaucggcaagaccaacgagaaguuccaccagaucgagaaggaguucagcgagguggagggcagaauccaggaccuggagaaguacguggaggacaccaagaucgaccuguggagcuacaacgccgagcugcugguggcccuggagaaccagcacaccaucgaccugaccgacagcgagaugaacaagcuguucgagaagaccaagaagcagcugagagagaacgccgaggacaugggcaacggcugcuucaagaucuaccacaagugcgacaacgccugcaucggcagcaucagaaacggcaccuacgaccacgacguguacagagacgaggcccugaacaacagauuccagaucaagggcguggagcugaagagcggcuacaaggacuggaucaucuggaucagcuucgccaucagcugcuuccugcugugcguggcccugcugggcuucaucaugugggccugccagaagggcaacaucagaugcaacaucugcaucuga

SEQ ID NO: 170846 - RNA, 1701 nt, Artificial Sequence; identical to SEQ ID NO: 166915
  derived and/or modified CDS sequence (opt4) from hemagglutinin__InfluenzaA__AHC60719

SEQ ID NO: 170847 - RNA, 1701 nt, Artificial Sequence; identical to SEQ ID NO: 167042
  derived and/or modified CDS sequence (opt4) from hemagglutinin__InfluenzaA__AHC60731

SEQ ID NO: 170848 - RNA, 1701 nt, Artificial Sequence; identical to SEQ ID NO: 170753
  derived and/or modified CDS sequence (opt4) from hemagglutinin__InfluenzaA__AHC60743

SEQ ID NO: 170849 - RNA, 1701 nt, Artificial Sequence; identical to SEQ ID NO: 163471
  derived and/or modified CDS sequence (opt4) from hemagglutinin__InfluenzaA__AHC60767

SEQ ID NO: 170850 - RNA, 1701 nt, Artificial Sequence
  derived and/or modified CDS sequence (opt4) from hemagglutinin__InfluenzaA__AHC60779
augaagaccaucaucgcccugagcuacauccugugccugguguucgcccagaagcugcccggcaacgacaacagcaccgccacccugugccugggccaccacgccgugcccaacggcaccaucgugaagaccaucaccaacgaccagaucgaggugaccaacgccaccgagcuggugcagagcagcagcaccggcgagaucugcaacagcccccaccagauccuggacggcgagaacugcacccugaucgacgcccugcugggcgacccccagugcgacggcuuccagaacaagaagugggaccuguucguggagagaagcaaggcccacagcaacugcuaccccuacgacgugcccgacuacgccagccugagaagccugguggccagcagcggcacccuggaguucaacaacgagagauucaacuggaccggcgugacccagaacggcaccagcagcgccugcaucagaagaagcaacaacagcuucuucagcagacugaacuggcugacccaccugaacuucaaguaccccgcccugaacgugaccaugcccaacaacgagcaguucgacaagcuguacaucuggggcgugcaccaccccggcaccgacaaggaccagaucuuccuguacgcccaggccgccggcagaaucaccgugagcaccaagagaagccagcaggccgugauccccaacaucggcagcagacccagagugagaaacauccccagcagagugagcaucuacuggaccaucgugaagcccggcgacauccugcugaucaacagcaccggcaaccugaucgcccccagaggcuacuucaagaucagaagcggcaagagcagcaucaugagaagcgacgcccccaucggcaagugcaacagcgccugcaucacccccaacggcagcauccccaacgacaagcccuuccagaacgugaacagaaucaccuacggcgccugccccagauacgugaagcagaacacccugaagcuggccaccggcaugagaaacgugcccgagaagcagaccagaggcaucuucggcgccaucgccggcuucaucgagaacggcugggagggcaugguggacggcugguacggcuucagacaccagaacagcgagggcagaggccaggccgccgaccugaagagcacccaggccgccaucgaccagaucaacggcaagcugaacagacugaucggcaagaccaacgagaaguuccaccagaucgagaaggaguucagcgagguggagggcagaauccaggaccuggagaaguacguggaggacaccaagaucgaccuguggagcuacaacgccgagcugcugguggcccuggagaaccagcacaccaucgaccugaccgacagcgagaugaacaagcuguucgagaagaccaagaagcagcugagagagaacgccgaggacaugggcaacggcugcuucaagaucuaccacaagugcgacaacgccugcaucggcagcaucagaaacggcaccuacgaccacgacguguacagagacgaggcccugaacaacagauuccagaucaagggcguggagcugaagagcggcuacaaggacuggauccuguggaucagcuucgccaucagcugcuuccugcugugcguggcccugcugggcuucaucaugugggccugccagaagggcaacaucagaugcaacaucugcaucuga

SEQ ID NO: 170851 - RNA, 1701 nt, Artificial Sequence; identical to SEQ ID NO: 167042
  derived and/or modified CDS sequence (opt4) from hemagglutinin__InfluenzaA__AHC60791

SEQ ID NO: 170852 - RNA, 1701 nt, Artificial Sequence; identical to SEQ ID NO: 170711
  derived and/or modified CDS sequence (opt4) from hemagglutinin__InfluenzaA__AHC60803

SEQ ID NO: 170853 - RNA, 1701 nt, Artificial Sequence; identical to SEQ ID NO: 166915
  derived and/or modified CDS sequence (opt4) from hemagglutinin__InfluenzaA__AHC60815

SEQ ID NO: 170854 - RNA, 1701 nt, Artificial Sequence
  derived and/or modified CDS sequence (opt4) from hemagglutinin__InfluenzaA__AHC60827
augaagaccaucaucgcccugagcuacauccugugccugguguucgcccagaagcugcccggcaacgacaacagcaccgccacccugugccugggccaccacgccgugcccaacggcaccaucgugaagaccaucaccaacgaccagaucgaggugaccaacgccaccgagcuggugcagagcagcagcaccgacgagaucugcaacagcccccaccagauccuggacggcgagaacugcacccugaucgacgcccugcugggcgacccccagugcgacggcuuccagaacaagaagugggaccuguucguggagagaagcaaggcccacagcaacugcuaccccuacgacgugcccgacuacgccagccugagaagccugguggccagcagcggcacccuggaguucaacaacgagagcuucaacuggaccggcgugacccagaacggcaccagcagcgccugcaucagaggcagcaacaacagcuucuucagcagacugaacuggcugacccaccugaacuucaaguaccccgcccugaacgugaccaugcccaacaacgagcaguucgacaagcuguacaucuggggcgugcaccaccccggcaccgacaaggaccagaucuuccuguacgcccaggccagcggcagaaucaccgugagcaccaagagaagccagcaggccgugauccccaacaucggcagcagacccagagugagaaacauccccagcagagugagcaucuacuggaccaucgugaagcccggcgacauccugcugaucaacagcaccggcaaccugaucgcccccagaggcuacuucaagaucagaagcggcaagagcagcaucaugagaagcgacgcccccaucggcaagugcaacagcgccugcaucacccccaacggcagcauccccaacgacaagcccuuccagaacgugaacagaaucaccuacggcgccugccccagauacgugaagcagaacacccugaagcuggccaccggcaugagaaacgugcccgagaagcagaccagaggcaucuucggcgccaucgccggcuucaucgagaacggcugggagggcaugguggacggcugguacggcuucagacaccagaacagcgagggcagaggccaggccgccgaccugaagagcacccaggccgccaucgaccagaucaacggcaagcugaacagacugaucggcaagaccaacgagaaguuccaccagaucgagaaggaguucagcgagguggagggcagaauccaggaccuggagaaguacguggaggacaccaagaucgaccuguggagcuacaacgccgagcugcugguggcccuggagaaccagcacaccaucgaccugaccgacagcgagaugaacaagcuguucgagaagaccaagaagcagcugagagagaacgccgaggacaugggcaacggcugcuucaagaucuaccacaagugcgacaacgccugcaucggcagcaucagaaacggcaccuacgaccacgacguguacagagacgaggcccugaacaacagauuccagaucaagggcguggagcugaagagcggcuacaaggacuggauccuguggaucagcuucgccaucagcugcuuccugcugugcguggcccugcugggcuucaucaugugggccugccagaagggcaacaucagaugcaacaucugcaucuga

SEQ ID NO: 170855 - RNA, 1701 nt, Artificial Sequence; identical to SEQ ID NO: 170689
  derived and/or modified CDS sequence (opt4) from hemagglutinin__InfluenzaA__AHC60839

SEQ ID NO: 170856 - RNA, 1701 nt, Artificial Sequence; identical to SEQ ID NO: 167042
  derived and/or modified CDS sequence (opt4) from hemagglutinin__InfluenzaA__AHC60851

SEQ ID NO: 170857 - RNA, 1701 nt, Artificial Sequence
  derived and/or modified CDS sequence (opt4) from hemagglutinin__InfluenzaA__AHC60863
augaagaccaucaucgcccugagcuacauccugugccugguguucgcccagaagcugcccggcaacgacaacagcaccgccacccugugccugggccaccacgccgugcccaacggcaccaucgugaagaccaucaccaacgaccagaucgaggugaccaacgccaccgagcuggugcagagcagcagcaccggcgagaucugcaacagcccccaccagauccuggacggcgagaacugcacccugaucgacgcccugcugggcgacccccagugcgacggcuuccagaacaagaagugggaccuguucguggagagaagcaaggcccacagcaacugcuaccccuacgacgugcccgacuacgccagccugagaagccugguggccagcagcggcacccuggaguucaacaacgagagcuucaacuggaccggcgugacccagaacggcaccagcagcgccugcaucagaagaagcaacaacagcuucuucagcagacugaacuggcugacccaccugaacuucaaguaccccgcccugaacgugaccaugcccaacaacgagcaguucgacaagcuguacaucuggggcgugcaccaccccggcaccgacaaggaccagaucuuccuguacgcccaggccgccggcagaaucaccgugagcaccaagagaagccagcaggccgugauccccaacaucggcagcagacccagagugagaaacauccccagcagagugagcaucuacuggaccaucgugaagcccggcgacauccugcugaucaacagcaccggcaaccugaucgcccccagaggcuacuucaagaucagaagcggcaagagcagcaucaugagaagcgacgcccccaucggcaagugcaacagcgccugcaucacccccaacggcagcauccccaacgacaagcccuuccagaacgugaacagaaucaccuacggcgccugccccagauacgugaagcagaacacccugaagcuggccaccggcaugagaaacgugcccgagaagcagaccagaggcaucuucggcgccaucgccggcuucaucgagaacggcugggagggcaugguggacggcugguacggcuucagacaccagaacagcgagggcagaggccaggccgccgaccugaagagcacccaggccgccaucgaccagaucaacggcaagcugaacagacugaucggcaagaccaacgagaaguuccaccagaucgagaaggaguucagcgagguggagggcagaauccaggaccuggagaaguacguggaggacaccaagaucgaccuguggagcuacaacgccgagcugcugguggcccuggagaaccagcacaccaucgaccugaccgacagcgagaugaacaagcuguucgagaagaccaagaagcagcugagagagaacgccgaggacaugggcaacggcugcuucaagaucuaccacaagugcgacaacgccugcaucggcagcaucagaaacggcaccuacgaccacgacguguacagagacgaggcccugaacaacagauuccagaucaagggcguggagcugaaggccggcuacaaggacuggauccuguggaucagcuucgccaucagcugcuuccugcugugcguggcccugcugggcuucaucaugugggccugccagaagggcaacaucagaugcaacaucugcaucuga

SEQ ID NO: 170858 - RNA, 1701 nt, Artificial Sequence; identical to SEQ ID NO: 167042
  derived and/or modified CDS sequence (opt4) from hemagglutinin__InfluenzaA__AHC60875

SEQ ID NO: 170859 - RNA, 1701 nt, Artificial Sequence; identical to SEQ ID NO: 167042
  derived and/or modified CDS sequence (opt4) from hemagglutinin__InfluenzaA__AHC60887

SEQ ID NO: 170860 - RNA, 1701 nt, Artificial Sequence; identical to SEQ ID NO: 163471
  derived and/or modified CDS sequence (opt4) from hemagglutinin__InfluenzaA__AHC60899

SEQ ID NO: 170861 - RNA, 1701 nt, Artificial Sequence; identical to SEQ ID NO: 167842
  derived and/or modified CDS sequence (opt4) from hemagglutinin__InfluenzaA__AHC60911

SEQ ID NO: 170862 - RNA, 1701 nt, Artificial Sequence; identical to SEQ ID NO: 170678
  derived and/or modified CDS sequence (opt4) from hemagglutinin__InfluenzaA__AHC60923

SEQ ID NO: 170863 - RNA, 1701 nt, Artificial Sequence; identical to SEQ ID NO: 167842
  derived and/or modified CDS sequence (opt4) from hemagglutinin__InfluenzaA__AHC60935

SEQ ID NO: 170864 - RNA, 1701 nt, Artificial Sequence; identical to SEQ ID NO: 167042
  derived and/or modified CDS sequence (opt4) from hemagglutinin__InfluenzaA__AHC60947

SEQ ID NO: 170865 - RNA, 1701 nt, Artificial Sequence; identical to SEQ ID NO: 167842
  derived and/or modified CDS sequence (opt4) from hemagglutinin__InfluenzaA__AHC60959

SEQ ID NO: 170866 - RNA, 1701 nt, Artificial Sequence; identical to SEQ ID NO: 166915
  derived and/or modified CDS sequence (opt4) from hemagglutinin__InfluenzaA__AHC60971

SEQ ID NO: 170867 - RNA, 1701 nt, Artificial Sequence; identical to SEQ ID NO: 167842
  derived and/or modified CDS sequence (opt4) from hemagglutinin__InfluenzaA__AHC60983

SEQ ID NO: 170868 - RNA, 1701 nt, Artificial Sequence; identical to SEQ ID NO: 167042
  derived and/or modified CDS sequence (opt4) from hemagglutinin__InfluenzaA__AHC61007

SEQ ID NO: 170869 - RNA, 1701 nt, Artificial Sequence; identical to SEQ ID NO: 166915
  derived and/or modified CDS sequence (opt4) from hemagglutinin__InfluenzaA__AHC61019

SEQ ID NO: 170870 - RNA, 1701 nt, Artificial Sequence
  derived and/or modified CDS sequence (opt4) from hemagglutinin__InfluenzaA__AHC61031
augaagaccaucaucgcccugagcuacauccugugccugguguucgcccagaagcugcccggcaacgacaacagcaccgccacccugugccugggccaccacgccgugcccaacggcaccaucgugaagaccaucaccaacgaccagaucgaggugaccaacgccaccgagcuggugcagagcagcagcaccggcgagaucugcaacagcccccaccagauccuggacggcgagaacugcacccugaucgacgcccugcugggcgacccccagugcgacggcuuccagaacaagaagugggaccuguucguggagagaagcaaggcccacagcaacugcuaccccuacgacgugcccgacuacgccagccugagaagccugguggccagcagcggcacccuggaguucaacaacgagagcuucaacuggaccggcgugacccagaacggcaccagcagcgccugcaucagaagaagcaacaacagcuucuucagcagacugaacuggcugacccaccugaacuucaaguaccccgcccugaacgugaccaugcccaacaacgagcaguucgacaagcuguacaucuggggcgugcaccaccccggcaccgacaaggaccagaucuuccuguacgcccaggccgccggcagaaucaccgugagcaccaagagaagccagcaggccgugauccccaacaucggcagcagacccagagugagaaacauccccagcagagugagcaucuacuggaccaucgugaagcccggcgacauccugcugaucaacagcaccggcaaccugaucgcccccagaggcuacuucaagaucagaagcggcaagagcagcaucaugagaagcgacgcccccaucggcaagugcaacagcgccugcaucacccccaacggcagcauccccaacgacaagcccuuccagaacgugaacagaaucaccuacggcgccugccccagauacgugaagcagaacacccugaagcuggccaccggcaugagaaacgugcccgagaagcagaccagaggcaucuucggcgccaucgccggcuucaucgagaacggcugggagggcaugguggacggcugguacggcuucagacaccagaacagcgagggcagaggccaggccgccgaccugaagagcacccaggccgccaucgaccagaucaacggcaagcugaacagacugaucggcaagaccaacgagaaguuccaccagaucgagaaggaguucagcgagguggagggcagaauccaggaccuggagaaguacguggaggacaccaagaucgaccuguggagcuacaacgccgagcugcugguggcccuggagaaccagcacaccaucgaccugaccgacagcgagaugaacaagcuguucgagaagaccaagaagcagcugagagagaacgccgaggacaugggcaacggcugcuucaagaucuaccacaagugcgacaacgccugcaucggcagcaucagaaacggcaccuacgaccacgacguguacagagacgaggcccugaacaacagauuccagaucaagggcguggagcugaagagcggcuacaaggacuggauccuguggaucagcuucgccaucagcugcuuccugcugugcguggugcugcugggcuucaucaugugggccugccagaagggcaacaucagaugcaacaucugcaucuga

SEQ ID NO: 170871 - RNA, 1701 nt, Artificial Sequence; identical to SEQ ID NO: 167842
  derived and/or modified CDS sequence (opt4) from hemagglutinin__InfluenzaA__AHC61043

SEQ ID NO: 170872 - RNA, 1701 nt, Artificial Sequence
  derived and/or modified CDS sequence (opt4) from hemagglutinin__InfluenzaA__AHC61055
augaagaccaucaucgcccugagcuacauccugugccugguguucgcccagaagcugcccggcaacgacaacagcaccgccacccugugccugggccaccacgccgugcccaacggcaccaucgugaagaccaucaccaacgaccagaucgaggugaccaacgccaccgagcuggugcagagcagcagcaccggcgagaucugcaacagcccccaccagauccuggacggcgagaacugcacccugaucgacgcccugcugggcgacccccagugcgacggcuuccagaacaagaagugggaccuguucguggagagaagcaaggcccacagcaacugcuaccccuacgacgugcccgacuacgccagccugagaagccugguggccagcagcggcacccuggaguucaacaacgagagcuucaacuggaccggcgugacccagaacggcaccagcagcgccugcaucagaagaagcaacaacagcuucuucagcagacugaacuggcugacccaccugaacuucaaguaccccgcccugaacgugaccaugcccaacaacgagcaguucgacaagcuguacaucuggggcgugcaccaccccggcaccgacaaggaccagaucuuccuguacgcccaggccgccggcagaaucaccgugagcaccaagagaagccagcaggccgugauccccaacaucggcagcagacccagagugagaaacauccccagcagagugagcaucuacuggaccaucgugaagcccggcgacauccugcugaucaacagcaccggcaaccugaucgcccccagaggcuacuucaagaucagaagcggcaagagcagcaucaugagaagcgacgcccccaucggcaagugcaacagcgccugcaucacccccaacggcagcauccccaacgacaagcccuuccagaacgugaacagaaucaccuacggcgccugccccagauacgugaagcagaacacccugaagcuggccaccggcaugagaaacgugcccgagaagcagaccagaggcaucuucggcgccaucgccggcuucaucgagaacggcugggagggcaugguggacggcugguacggcuucagacaccagaacagcgagggcagaggccaggccgccgaccugaagagcacccaggccgccaucgaccagaucaacggcaagcugaacagacugaucggcaagaccaacgagaaguuccaccagaucgagaaggaguucagcgagguggagggcagaauccagaaccuggagaaguacguggaggacaccaagaucgaccuguggagcuacaacgccgagcugcugguggcccuggagaaccagcacaccaucgaccugaccgacagcgagaugaacaagcuguucgagaagaccaagaagcagcugagagagaacgccgaggacaugggcaacggcugcuucaagaucuaccacaagugcgacaacgccugcaucggcagcaucagaaacggcaccuacgaccacgacguguacagagacgaggcccugaacaacagauuccagaucaagggcguggagcugaagagcggcuacaaggacuggauccuguggaucagcuucgccaucagcugcuuccugcugugcguggcccugcugggcuucaucaugugggccugccagaagggcaacaucagaugcaacaucugcaucuga

SEQ ID NO: 170873 - RNA, 1701 nt, Artificial Sequence; identical to SEQ ID NO: 170739
  derived and/or modified CDS sequence (opt4) from hemagglutinin__InfluenzaA__AHC61067

SEQ ID NO: 170874 - RNA, 1701 nt, Artificial Sequence; identical to SEQ ID NO: 169134
  derived and/or modified CDS sequence (opt4) from hemagglutinin__InfluenzaA__AHC61079

SEQ ID NO: 170875 - RNA, 1701 nt, Artificial Sequence; identical to SEQ ID NO: 167042
  derived and/or modified CDS sequence (opt4) from hemagglutinin__InfluenzaA__AHC61103

SEQ ID NO: 170876 - RNA, 1701 nt, Artificial Sequence; identical to SEQ ID NO: 167042
  derived and/or modified CDS sequence (opt4) from hemagglutinin__InfluenzaA__AHC61115

SEQ ID NO: 170877 - RNA, 1701 nt, Artificial Sequence; identical to SEQ ID NO: 167842
  derived and/or modified CDS sequence (opt4) from hemagglutinin__InfluenzaA__AHC61127

SEQ ID NO: 170878 - RNA, 1701 nt, Artificial Sequence
  derived and/or modified CDS sequence (opt4) from hemagglutinin__InfluenzaA__AHC61139
augaagaccaucaucgcccugagcuacauccugugccugguguucgcccagaagcugcccggcaacgacaacagcaccgccacccugugccugggccaccacgccgugcccaacggcaccaucgugaagaccaucaccaacgaccagaucgaggugaccaacgccaccgagcuggugcagagcagcagcaccggcgagaucugcaacagcccccaccagauccuggacggcgagaacugcacccugaucgacgcccugcugggcgacccccagugcgacggcuuccagaacaagaagugggaccuguucguggagagaagcaaggcccacagcaacugcuaccccuacgacgugcccgacuacgccagccugagaagccugguggccagcagcggcacccuggaguucaacaacgagagcuucaacuggaccggcgugacccagaacggcaccagcagcgccugcaucagaagaagcaacaacagcuucuucagcagacugaacuggcugacccaccugaacuucaaguaccccgcccugaacgugaccaugcccaacaacgagcaguucgacaagcuguacaucuggggcgugcaccaccccggcaccgacaaggaccagaucuuccuguacgcccaggccagcggcagaaucaccgugagcacccagagaagccagcaggccgugauccccaacaucggcagcagacccagagugagaaacauccccagcagagugagcaucuacuggaccaucgugaagcccggcgacauccugcugaucaacagcaccggcaaccugaucgcccccagaggcuacuucaagaucagaagcggcaagagcagcaucaugagaagcgacgcccccaucggcaagugcaacagcgccugcaucacccccaacggcagcauccccaacgacaagcccuuccagaacgugaacagaaucaccuacggcgccugccccagauacgugaagcagaacacccugaagcuggccaccggcaugagaaacgugcccgagaagcagaccagaggcaucuucggcgccaucgccggcuucaucgagaacggcugggagggcaugguggacggcugguacggcuucagacaccagaacagcgagggcagaggccaggccgccgaccugaagagcacccaggccgccaucgaccagaucaacggcaagcugaacagacugaucggcaagaccaacgagaaguuccaccagaucgagaaggaguucagcgagguggagggcagaauccaggaccuggagaaguacguggaggacaccaagaucgaccuguggagcuacaacgccgagcugcugguggcccuggagaaccagcacaccaucgaccugaccgacagcgagaugaacaagcuguucgagaagaccaagaagcagcugagagagaacgccgaggacaugggcaacggcugcuucaagaucuaccacaagugcgacaacgccugcaucggcagcaucagaaacggcaccuacaaccacgacguguacagagacgaggcccugaacaacagauuccagaucaagggcguggagcugaagagcggcuacaaggacuggauccuguggaucagcuucgccaucagcugcuuccugcugugcguggcccugcugggcuucaucaugugggccugccagaagggcaacaucagaugcaacaucugcaucuga

SEQ ID NO: 170879 - RNA, 1701 nt, Artificial Sequence; identical to SEQ ID NO: 167042
  derived and/or modified CDS sequence (opt4) from hemagglutinin__InfluenzaA__AHC61151

SEQ ID NO: 170880 - RNA, 1701 nt, Artificial Sequence
  derived and/or modified CDS sequence (opt4) from hemagglutinin__InfluenzaA__AHC61163
augaagaccaucaucgcccugagcuacauccugugccugguguucgcccagaagcugcccggcaacgacaacagcaccgccacccugugccugggccaccacgccgugcccaacggcaccaucgugaagaccaucaccaacgaccagaucgaggugaccaacgccaccgagcuggugcagagcagcagcaccggcgagaucugcaacagcccccaccagauccuggacggcgagaacugcacccugaucgacgcccugcugggcgacccccagugcgacggcuuccagaacaagaagugggaccuguucguggagagaagcaaggcccacagcaacugcuaccccuacgacgugcccgacuacgccagccugagaagccugguggccagcagcggcacccuggaguucaagaacgagagcuucaacuggaccggcgugacccagaacggcaccagcagcgccugcaucagaagaagcaacaacagcuucuucagcagacugaacuggcugacccaccugaacuucaaguaccccgcccugaacgugaccaugcccaacaacgagcaguucgacaagcuguacaucuggggcgugcaccaccccggcaccgacaaggaccagaucuuccuguacgcccaggccagcggcagaaucaccgugagcaccaagagaagccagcaggccguggugcccaacaucggcagcagacccagagugagaaacauccccagcagagugagcaucuacuggaccaucgugaagcccggcgacauccugcugaucaacagcaccggcaaccugaucgcccccagaggcuacuucaagaucagaagcggcaagagcagcaucaugagaagcgacgcccccaucggcaagugcaacagcgccugcaucacccccaacggcagcauccccaacgacaagcccuuccagaacgugaacagaaucaccuacggcgccugccccagauacgugaagcagaacacccugaagcuggccaccggcaugagaaacgugcccgagaagcagaccagaggcaucuucggcgccaucgccggcuucaucgagaacggcugggagggcaugguggacggcugguacggcuucagacaccagaacagcgagggcagaggccaggccgccgaccugaagagcacccaggccgccaucgaccagaucaacggcaagcugaacagacugaucggcaagaccaacgagaaguuccaccagaucgagaaggaguucagcgagguggagggcagaauccaggaccuggagaaguacguggaggacaccaagaucgaccuguggagcuacaacgccgagcugcugguggcccuggagaaccagcacaccaucgaccugaccgacagcgagaugaacaagcuguucgagaagaccaagaagcagcugagagagaacgccgaggacaugggcaacggcugcuucaagaucuaccacaagugcgacaacgccugcaucggcagcaucagaaacggcaccuacgaccacgacguguacagagacgaggcccugaacaacagauuccagaucaagggcguggagcugaagagcggcuacaaggacuggauccuguggaucagcuucgccaucagcugcuuccugcugugcguggcccugcugggcuucaucaugugggccugccagaagggcaacaucagaugcaacaucugcaucuga

SEQ ID NO: 170881 - RNA, 1701 nt, Artificial Sequence; identical to SEQ ID NO: 167842
  derived and/or modified CDS sequence (opt4) from hemagglutinin__InfluenzaA__AHC61175

SEQ ID NO: 170882 - RNA, 1701 nt, Artificial Sequence; identical to SEQ ID NO: 167042
  derived and/or modified CDS sequence (opt4) from hemagglutinin__InfluenzaA__AHC61187

SEQ ID NO: 170883 - RNA, 1701 nt, Artificial Sequence; identical to SEQ ID NO: 166915
  derived and/or modified CDS sequence (opt4) from hemagglutinin__InfluenzaA__AHC61199

SEQ ID NO: 170884 - RNA, 1701 nt, Artificial Sequence; identical to SEQ ID NO: 170678
  derived and/or modified CDS sequence (opt4) from hemagglutinin__InfluenzaA__AHC61211

SEQ ID NO: 170885 - RNA, 1701 nt, Artificial Sequence; identical to SEQ ID NO: 166915
  derived and/or modified CDS sequence (opt4) from hemagglutinin__InfluenzaA__AHC61223

SEQ ID NO: 170886 - RNA, 1701 nt, Artificial Sequence; identical to SEQ ID NO: 167042
  derived and/or modified CDS sequence (opt4) from hemagglutinin__InfluenzaA__AHC61235

SEQ ID NO: 170887 - RNA, 1701 nt, Artificial Sequence; identical to SEQ ID NO: 167842
  derived and/or modified CDS sequence (opt4) from hemagglutinin__InfluenzaA__AHC61247

SEQ ID NO: 170888 - RNA, 1701 nt, Artificial Sequence; identical to SEQ ID NO: 167842
  derived and/or modified CDS sequence (opt4) from hemagglutinin__InfluenzaA__AHC61259

SEQ ID NO: 170889 - RNA, 1701 nt, Artificial Sequence; identical to SEQ ID NO: 167042
  derived and/or modified CDS sequence (opt4) from hemagglutinin__InfluenzaA__AHC61271

SEQ ID NO: 170890 - RNA, 1701 nt, Artificial Sequence; identical to SEQ ID NO: 166915
  derived and/or modified CDS sequence (opt4) from hemagglutinin__InfluenzaA__AHC61283

SEQ ID NO: 170891 - RNA, 1701 nt, Artificial Sequence; identical to SEQ ID NO: 169134
  derived and/or modified CDS sequence (opt4) from hemagglutinin__InfluenzaA__AHC61295

SEQ ID NO: 170892 - RNA, 1701 nt, Artificial Sequence; identical to SEQ ID NO: 170746
  derived and/or modified CDS sequence (opt4) from hemagglutinin__InfluenzaA__AHC61307

SEQ ID NO: 170893 - RNA, 1701 nt, Artificial Sequence; identical to SEQ ID NO: 167042
  derived and/or modified CDS sequence (opt4) from hemagglutinin__InfluenzaA__AHC61319

SEQ ID NO: 170894 - RNA, 1701 nt, Artificial Sequence; identical to SEQ ID NO: 170678
  derived and/or modified CDS sequence (opt4) from hemagglutinin__InfluenzaA__AHC61331

SEQ ID NO: 170895 - RNA, 1701 nt, Artificial Sequence
  derived and/or modified CDS sequence (opt4) from hemagglutinin__InfluenzaA__AHC61343
augaagaccaucaucgcccugagcuacauccugugccugguguucgcccagaagcugcccggcaacgacaacagcaccgccacccugugccugggccaccacgccgugcccaacggcaccaucgugaagaccaucaccaacgaccagaucgaggugaccaacgccaccgagcuggugcagagcagcagcaccggcgagaucugcaacagcccccaccagauccuggacggcgagaacugcacccugaucgacgcccugcugggcgacccccagugcgacggcuuccagaacaagaagugggaccuguucguggagagaagcaaggcccacagcaacugcuaccccuacgacgugcccgacuacgccagccugagaagccugguggccagcagcggcacccuggaguucaacaacgagagcuucaacuggaccggcgugacccagaacggcaccagcagcgccugcaucagaggcagcaacaacagcuucuucagcagacugaacuggcugacccaccugaacuucaaguaccccgcccugaacgugaccaugcccaacaacgagcaguucgacaagcuguacaucuggggcgugcaccaccccggcaccgacaaggaccagaucuuccuguacgcccaggccagcggcagaaucaccgugagcaccaagagaagccagcaggccgugauccccaacaucggcagcagacccagagugagaaacauccccagcagaaucagcaucuacuggaccaucgugaagcccggcgacauccugcugaucaacagcaccggcaaccugaucgcccccagaggcuacuucaagaucagaagcggcaagagcagcaucaugagaagcgacgcccccaucggcaagugcaacagcgccugcaucacccccaacggcagcauccccaacgacaagcccuuccagaacgugaacagaaucaccuacggcgccugccccagauacgugaagcagaacacccugaagcuggccaccggcaugagaaacgugcccgagaagcagaccagaggcaucuucggcgccaucgccggcuucaucgagaacggcugggagggcaugguggacggcugguacggcuucagacaccagaacagcgagggcagaggccaggccgccgaccugaagagcacccaggccgccaucgaccagaucaacggcaagcugaacagacugaucggcaagaccaacgagaaguuccaccagaucgagaaggaguucagcgagguggagggcagaauccaggaccuggagaaguacguggaggacaccaagaucgaccuguggagcuacaacgccgagcugcugguggcccuggagaaccagcacaccaucgaccugaccgacagcgagaugaacaagcuguucgagaagaccaagaagcagcugagagagaacgccgaggacaugggcaacggcugcuucaagaucuaccacaagugcgacaacgccugcaucggcagcaucagaaacggcaccuacgaccacgacguguacagagacgaggcccugaacaacagauuccagaucaagggcguggagcugaagagcggcuacaaggacuggauccuguggaucagcuucgccaucagcugcuuccugcugugcguggcccugcugggcuucaucaugugggccugccagaagggcaacaucagaugcaacaucugcaucuga

SEQ ID NO: 170896 - RNA, 1701 nt, Artificial Sequence; identical to SEQ ID NO: 166915
  derived and/or modified CDS sequence (opt4) from hemagglutinin__InfluenzaA__AHC61355

SEQ ID NO: 170897 - RNA, 1701 nt, Artificial Sequence; identical to SEQ ID NO: 166915
  derived and/or modified CDS sequence (opt4) from hemagglutinin__InfluenzaA__AHC61367

SEQ ID NO: 170898 - RNA, 1701 nt, Artificial Sequence; identical to SEQ ID NO: 167042
  derived and/or modified CDS sequence (opt4) from hemagglutinin__InfluenzaA__AHC61379

SEQ ID NO: 170899 - RNA, 1701 nt, Artificial Sequence; identical to SEQ ID NO: 166915
  derived and/or modified CDS sequence (opt4) from hemagglutinin__InfluenzaA__AHC61391

SEQ ID NO: 170900 - RNA, 1701 nt, Artificial Sequence
  derived and/or modified CDS sequence (opt4) from hemagglutinin__InfluenzaA__AHC61403
augaagaccaucaucgcccugagcuacauccugugccugguguucgcccagaagcugcccggcaacgacaacagcaccgccacccugugccugggccaccacgccgugcccaacggcaccaucgugaagaccaucaccaacgaccagaucgaggugaccaacgccaccgagcuggugcagagcagcagcaccggcgagaucugcaacagcccccaccagauccuggacggcgagaacugcacccugaucgacgcccugcugggcgacccccagugcgacggcuuccagaacaagaagugggaccuguucguggagagaagcaaggcccacagcaacugcuaccccuacgacgugcccgacuacgccagccugagaagccugguggccagcagcggcacccuggaguucaacaacgagagcuucaacuggaccggcgugacccagaacggcaccagcagcgccugcaucagaagaagcaacaacagcuucuucagcagacugaacuggcugacccaccugaacuucaaguaccccgcccugaacgugaccaugcccaacaacgagcaguucgacaagcuguacaucuggggcgugcaccaccccggcaccgacaaggaccagaucuuccuguacgcccaggccagcggcagaaucaccgugagcaccaagagaagccagcaggccgugauccccaacaucggcagcagacccagagugagaaacauccccagcagagugagcaucuacuggaccaucgugaagcccggcgacauccugcugaucaacagcaccggcaaccugaucgcccccagaggcuacuucaagaucagaagcggcaagagcagcaucaugagaagcgacgcccccaucggcaagugcaacagcgccugcaucacccccaacggcagcauccccaacgacaagcccuuccagaacgugaacagaaucaccuacggcgccugcagcagauacgugaagcagaacacccugaagcuggccaccggcaugagaaacgugcccgagaagcagaccagaggcaucuucggcgccaucgccggcuucaucgagaacggcugggagggcaugguggacggcugguacggcuucagacaccagaacagcgagggcagaggccaggccgccgaccugaagagcacccaggccgccaucgaccagaucaacggcaagcugaacagacugaucggcaagaccaacgagaaguuccaccagaucgagaaggaguucagcgagguggagggcagaauccaggaccuggagaaguacguggaggacaccaagaucgaccuguggagcuacaacgccgagcugcugguggcccuggagaaccagcacaccaucgaccugaccgacagcgagaugaacaagcuguucgagaagaccaagaagcagcugagagagaacgccgaggacaugggcaacggcugcuucaagaucuaccacaagugcgacaacgccugcaucggcagcaucagaaacggcaccuacgaccacgacguguacagagacgaggcccugaacaacagauuccagaucaagggcguggagcugaagagcggcuacaaggacuggauccuguggaucagcuucgccaucagcugcuuccugcugugcguggcccugcugggcuucaucaugugggccugccagaagggcaacaucagaugcaacaucugcaucuga

SEQ ID NO: 170901 - RNA, 1701 nt, Artificial Sequence; identical to SEQ ID NO: 167042
  derived and/or modified CDS sequence (opt4) from hemagglutinin__InfluenzaA__AHC61415

SEQ ID NO: 170902 - RNA, 1701 nt, Artificial Sequence
  derived and/or modified CDS sequence (opt4) from hemagglutinin__InfluenzaA__AHC61427
augaagaccaucaucgcccugagcuacauccugugccugguguucgcccagaagcugcccggcaacgacaacagcaccgccacccugugccugggccaccacgccgugcccaacggcaccaucgugaagaccaucaccaacgaccagaucgaggugaccaacgccaccgagcuggugcagagcagcagcaccggcgagaucugcaacagcccccaccagauccuggacggcgagaacugcacccugaucgacgcccugcugggcgacccccagugcgacggcuuccagaacaacaagugggaccuguucguggagagaagcaaggcccacagcaacugcuaccccuacgacgugcccgacuacgccagccugagaagccugguggccagcagcggcacccuggaguucaacaacgagagcuucaacuggaccggcgugacccagaacggcaccagcagcgccugcaucagaagaagcaacaacagcuucuucagcagacugaacuggcugacccaccugaacuucaaguaccccgcccugaacgugaccaugcccaacaacgagcaguucgacaagcuguacaucuggggcgugcaccaccccggcaccgacaaggaccagaucuuccuguacgcccaggccgccggcagaaucaccgugagcaccaagagaagccagcaggccgugauccccaacaucggcagcagacccagagugagaaacauccccagcagagugagcaucuacuggaccaucgugaagcccggcgacauccugcugaucaacagcaccggcaaccugaucgcccccagaggcuacuucaagaucagaagcggcaagagcagcaucaucagaagcgacgcccccaucggcaagugcaacagcgccugcaucacccccaacggcagcauccccaacgacaagcccuuccagaacgugaacagaaucaccuacggcgccugccccagauacgugaagcagaacacccugaagcuggccaccggcaugagaaacgugcccgagaagcagaccagaggcaucuucggcgccaucgccggcuucaucgagaacggcugggagggcaugguggacggcugguacggcuucagacaccagaacagcgagggcagaggccaggccgccgaccugaagagcacccaggccgccaucgaccagaucaacggcaagcugaacagacugaucggcaagaccaacgagaaguuccaccagaucgagaaggaguucagcgagguggagggcagaauccaggaccuggagaaguacguggaggacaccaagaucgaccuguggagcuacaacgccgagcugcugguggcccuggagaaccagcacaccaucgaccugaccgacagcgagaugaacaagcuguucgagaagaccaagaagcagcugagagagaacgccgaggacaugggcaacggcugcuucaagaucuaccacaagugcgacaacgccugcaucggcagcaucagaaacggcaccuacgaccacgacguguacagagacgaggcccugaacaacagauuccagaucaagggcguggagcugaagagcggcuacaaggacuggauccuguggaucagcuucgccaucagcugcuuccugcugugcguggcccugcugggcuucaucaugugggccugccagaagggcaacaucagaugcaacaucugcaucuga

SEQ ID NO: 170903 - RNA, 1701 nt, Artificial Sequence
  derived and/or modified CDS sequence (opt4) from hemagglutinin__InfluenzaA__AHC61439
augaagaccaucaucgcccugagcuacauccugugccugguguucgcccagaagcugcccggcaacgacaacagcaccgccacccugugccugggccaccacgccgugcccaacggcaccaucgugaagaccaucaccaacgaccagaucgaggugaccaacgccaccgagcuggugcagagcagcagcaccggcgagaucugcaacagcccccaccagauccuggacggcgagaacugcacccugaucgacgcccugcugggcgacccccagugcgacggcuuccagaacaagaagugggaccuguucguggagagaagcaaggcccacagcaacugcuaccccuacgacgugcccgacuacgccagccugagaagccugguggccagcagcggcacccuggaguucaacaacgagagcuucaacuggaccggcgugacccagaacggcaccagcagcgccugcaucagaagaagcaacaacagcuucuucagcagacugaacuggcugacccaccugaacuucaaguaccccgcccugaacgugaccaugcccaacaacgagcaguucgacaagcuguacaucuggggcgugcaccaccccggcaccgacaaggaccagaucuuccuguacgcccaggccgccggcagaaucaccgugagcaccaagagaagccagcaggccgugauccccaacaucggcagcagacccagagugagaaacauccccagcagagugagcaucuacuggaccaucgugaagcccggcgacauccugcugaucaacagcaccggcaaccugaucgcccccagaggcuacuucaagaucagaagcggcaagagcagcaucaugagaagcgacgcccccaucggcaagugcaacagcaccugcaucacccccaacggcagcauccccaacgacaagcccuuccagaacgugaacagaaucaccuacggcgccugccccagauacgugaagcagaacacccugaagcuggccaccggcaugagaaacgugcccgagaagcagaccagaggcaucuucggcgccaucgccggcuucaucgagaacggcugggagggcaugguggacggcugguacggcuucagacaccagaacagcgagggcagaggccaggccgccgaccugaagagcacccaggccgccaucgaccagaucaacggcaagcugaacagacugaucggcaagaccaacgagaaguuccaccagaucgagaaggaguucagcgagguggagggcagaauccaggaccuggagaaguacguggaggacaccaagaucgaccuguggagcuacaacgccgagcugcugguggcccuggagaaccagcacaccaucgaccugaccgacagcgagaugaacaagcuguucgagaagaccaagaagcagcugagagagaacgccgaggacaugggcaacggcugcuucaagaucuaccacaagugcgacaacgccugcaucggcagcaucagaaacggcaccuacgaccacgacguguacagagacgaggcccugaacaacagauuccagaucaagggcguggagcugaagagcggcuacaaggacuggauccuguggaucagcuucgccaucagcugcuuccugcugugcguggcccugcugggcuucaucaugugggccugccagaagggcaacaucagaugcaacaucugcaucuga

SEQ ID NO: 170904 - RNA, 1701 nt, Artificial Sequence; identical to SEQ ID NO: 166915
  derived and/or modified CDS sequence (opt4) from hemagglutinin__InfluenzaA__AHC61451

SEQ ID NO: 170905 - RNA, 1701 nt, Artificial Sequence; identical to SEQ ID NO: 166915
  derived and/or modified CDS sequence (opt4) from hemagglutinin__InfluenzaA__AHC61463

SEQ ID NO: 170906 - RNA, 1701 nt, Artificial Sequence; identical to SEQ ID NO: 167842
  derived and/or modified CDS sequence (opt4) from hemagglutinin__InfluenzaA__AHC61475

SEQ ID NO: 170907 - RNA, 1701 nt, Artificial Sequence; identical to SEQ ID NO: 167042
  derived and/or modified CDS sequence (opt4) from hemagglutinin__InfluenzaA__AHC61487

SEQ ID NO: 170908 - RNA, 1701 nt, Artificial Sequence; identical to SEQ ID NO: 167842
  derived and/or modified CDS sequence (opt4) from hemagglutinin__InfluenzaA__AHC61499

SEQ ID NO: 170909 - RNA, 1701 nt, Artificial Sequence; identical to SEQ ID NO: 166915
  derived and/or modified CDS sequence (opt4) from hemagglutinin__InfluenzaA__AHC61511

SEQ ID NO: 170910 - RNA, 1701 nt, Artificial Sequence; identical to SEQ ID NO: 169134
  derived and/or modified CDS sequence (opt4) from hemagglutinin__InfluenzaA__AHC61523

SEQ ID NO: 170911 - RNA, 1701 nt, Artificial Sequence
  derived and/or modified CDS sequence (opt4) from hemagglutinin__InfluenzaA__AHC61535
augaagaccaucaucgcccugagcuacauccugugccugguguucgcccagaagcugcccggcaacgacaacagcaccgccacccugugccugggccaccacgccgugcccaacggcaccaucgugaagaccaucaccaacgaccagaucgaggugaccaacgccaccgagcuggugcagagcagcagcaccggcgagaucugcaacagcccccaccagauccuggacggcgagaacugcacccugaucgacgcccugcugggcgacccccagugcgacggcuuccagaacaagaagugggaccuguucguggagagaagcaaggcccacagcaacugcuaccccuacgacgugcccgacuacgccagccugagaagccugguggccagcagcggcacccuggaguucaacaacgagagcuucaacuggaccggcgugacccagaacggcaccagcagcgccugcaucagaagaagcaacaacagcuucuucagcagacugaacuggcugacccaccugaacuucaaguaccccgcccugaacgugaccaugcccaacaacgagcaguucgacaagcuguacaucuggggcgugcaccaccccggcaccgacaaggaccagaucuuccuguacgcccaggccagcggcagaaucaccgugagcaccaagagaagccagcaggccgugauccccaacaucggcagcagacccagagugagaaacauccccagcagagugagcaucuacuggaccaucgugaagcccggcgacauccugcugaucaacagcaccggcaaccugaucgcccccagaggcuacuucaagaucagaagcggcaagagcagcaucaugagaagcgacgcccccaucggcaagugcaacagcgccugcaucacccccaacggcagcauccccaacgacaagcccuuccagaacgugaacagaaucaccuacggcgccugccccagauacgugaagcagaacacccugaagcuggccaccggcaugagaaacgugcccgagaagcagaccagaggcaucuucggcgccaucgccggcuucaucgagaacggcugggagggcaugguggacggcugguacggcuucagacaccagaacagcgagggcagaggccaggccgccgaccugaagagcacccaggccgccaucgaccagaucaacggcaagcugaacagacugaucggcaagaccaacgagaaguuccaccagaucgagaaggaguucagcgagguggagggcagaauccaggaccuggagaaguacguggaggacaccaagaucgaccuguggagcuacaacgccgagcugcugguggcccuggagaaccagcacaccaucgaccugaccgacagcgagaugaccaagcuguucgagaagaccaagaagcagcugagagagaacgccgaggacaugggcaacggcugcuucaagaucuaccacaagugcgacaacgccugcaucggcagcaucagaaacggcaccuacgaccacgacguguacagagacgaggcccugaacaacagauuccagaucaagggcguggagcugaagagcggcuacaaggacuggauccuguggaucagcuucgccaucagcugcuuccugcugugcguggcccugcugggcuucaucaugugggccugccagaagggcaacaucagaugcaacaucugcaucuga

SEQ ID NO: 170912 - RNA, 1701 nt, Artificial Sequence; identical to SEQ ID NO: 166915
  derived and/or modified CDS sequence (opt4) from hemagglutinin__InfluenzaA__AHC61547

SEQ ID NO: 170913 - RNA, 1701 nt, Artificial Sequence
  derived and/or modified CDS sequence (opt4) from hemagglutinin__InfluenzaA__AHC61559
augaagaccaucaucgcccugagcuacauccugugccugguguucgcccagaagcugcccggcaacgacaacagcaccgccacccugugccugggccaccacgccgugcccaacggcaccaucgugaagaccaucaccaacgaccagaucgaggugaccaacgccaccgagcuggugcagaacagcagcaccggcgagaucugcgacagcccccaccagaucaucgacggcgagaacugcacccugaucgacgcccugcugggcgacccccagugcgacggcuuccagaacaagaagugggaccuguucguggagagaagcaaggccuacagcaacugcuaccccuacgacgugcccgacuacgccagccugagaagccugguggccagcagcggcacccuggaguucaacaacgagagcuucaacuggaccggcgugacccagaacggcaccagcagcgccugcaucagaagaagcaacaacagcuucuucagcagacugaacuggcugacccaccugaacuucaaguaccccgcccugaacgugaccaugcccaacaacgagcaguucgacaagcuguacaucuggggcgugcaccaccccggcaccgacaaggaccagaucuuccuguacgcccaggccagcggcagaaucaccgugagcaccaagagaagccagcaggccgugauccccaacaucggcagcagacccagagugagaaacauccccagcagaaucagcaucuacuggaccaucgugaagcccggcgacauccugcugaucaacagcaccggcaaccugaucgcccccagaggcuacuucaagaucagaagcggcaagagcagcaucaugagaagcgacgcccccaucggcaagugcaacagcgagugcaucacccccaacggcagcauccccaacgacaagcccuuccagaacgugaacagaaucaccuacggcgccugccccagauacgugaagcagaacacccugaagcuggccaccggcaugagaaacgugcccgagaagcagaccagaggcaucuucggcgccaucgccggcuucaucgagaacggcugggagggcaugguggacggcugguacggcuucagacaccagaacagcgagggcagaggccaggccgccgaccugaagagcacccaggccgccaucgaccagaucaacggcaagcugaacagacugaucagaaagaccaacgagaaguuccaccagaucgagaaggaguucagcgagguggagggcagaauccaggaccuggagaaguacguggaggacaccaagaucgaccuguggagcuacaacgccgagcugcugguggcccuggagaaccagcacaccaucgaccugaccgacagcgagaugaacaagcuguucgagaagaccaagaagcagcugagagagaacgccgaggacaugggcaacggcugcuucaagaucuaccacaagugcgacaacgccugcaucggcagcaucagaaacggcaccuacgaccacgacguguacagagacgaggcccugaacaacagauuccagaucaagggcguggagcugaagagcggccacaaggacuggauccuguggaucagcuucgccaucagcugcuuccugcugugcguggcccugcugggcuucaucaugugggccugccagaagggcaacaucagaugcaacaucugcaucuga

SEQ ID NO: 170914 - RNA, 1701 nt, Artificial Sequence; identical to SEQ ID NO: 169134
  derived and/or modified CDS sequence (opt4) from hemagglutinin__InfluenzaA__AHC61571

SEQ ID NO: 170915 - RNA, 1701 nt, Artificial Sequence; identical to SEQ ID NO: 166915
  derived and/or modified CDS sequence (opt4) from hemagglutinin__InfluenzaA__AHC61583

SEQ ID NO: 170916 - RNA, 1701 nt, Artificial Sequence; identical to SEQ ID NO: 169134
  derived and/or modified CDS sequence (opt4) from hemagglutinin__InfluenzaA__AHC61595

SEQ ID NO: 170917 - RNA, 1701 nt, Artificial Sequence
  derived and/or modified CDS sequence (opt4) from hemagglutinin__InfluenzaA__AHC61607
augaagaccaucaucgcccugagcuacauccugugccugguguucgcccagaagcugcccggcaacgacaacagcaccgccacccugugccugggccaccacgccgugcccaacggcaccaucgugaagaccaucaccaacgaccagaucgaggugaccaacgccaccgagcuggugcagaacagcagcaccggcgagaucugcgacagcccccaccagauccuggacggcgagaacugcacccugaucgacgcccugcugggcgacccccagugcgacggcuuccagaacaagaagugggaccuguucguggagagaagcaaggccuacagcaacugcuaccccuacgacgugcccgacuacgccagccugagaagccugguggccagcagcggcacccuggaguucaacaacgagagcuucaacuggaccggcgugacccagaacggcaccagcagcgccugcaucagaagaagcaacaacagcuucuucagcagacugaacuggcugacccaccugaacuucaaguaccccgcccugaacgugaccaugcccaacaacgagcaguucgacaagcuguacaucuggggcgugcaccaccccggcaccgacaaggaccagaucuuccuguacgcccaggccagcggcagaaucaccgugagcaccaagagaagccagcaggccgugauccccaacaucggcagcagacccagagugagaaacauccccagcagaaucagcaucuacuggaccaucgugaagcccggcgacauccugcugaucaacagcaccggcaaccugaucgcccccagaggcuacuucaagaucagaagcggcaagagcagcaucaugagaagcgacgcccccaucggcaagugcaacagcgagugcaucacccccaacggcagcauccccaacgacaagcccuuccagaacgugaacagaaucaccuacggcgccugccccagauacgugaagcagcacacccugaagcuggccaccggcaugagaaacgugcccgagaagcagaccagaggcaucuucggcgccaucgccggcuucaucgagaacggcugggagggcaugguggacggcugguacggcuucagacaccagaacagcgagggcagaggccaggccgccgaccugaagagcacccaggccgccaucgaccagaucaacggcaagcugaacagacugaucggcaagaccaacgagaaguuccaccagaucgagaaggaguucagcgagguggagggcagaauccaggaccuggagaaguacguggaggacaccaagaucgaccuguggagcuacaacgccgagcugcugguggcccuggagaaccagcacaccaucgaccugaccgacagcgagaugaacaagcuguucgagaagaccaagaagcagcugagagagaacgccgaggacaugggcaacggcugcuucaagaucuaccacaagugcgacaacgccugcaucggcagcaucagaaacggcaccuacgaccacgacguguacagagacgaggcccugaacaacagauuccagaucaagggcguggagcugaagagcggcuacaaggacuggauccuguggaucagcuucgccaucagcugcuuccugcugugcguggcccugcugggcuucaucaugugggccugccagaagggcaacaucagaugcaacaucugcaucuga

SEQ ID NO: 170918 - RNA, 1701 nt, Artificial Sequence; identical to SEQ ID NO: 169134
  derived and/or modified CDS sequence (opt4) from hemagglutinin__InfluenzaA__AHC61619

SEQ ID NO: 170919 - RNA, 1701 nt, Artificial Sequence
  derived and/or modified CDS sequence (opt4) from hemagglutinin__InfluenzaA__AHC61631
augaagaccaucaucgcccugagcuacauccugugccugguguucgcccagaagcugcccggcaacgacaacagcaccgccacccugugccugggccaccacgccgugcccaacggcaccaucgugaagaccaucaccaacgaccagaucgaggugaccaacgccaccgagcuggugcagagcagcagcaccggcgagaucugcaacagcccccaccagauccuggacggcgagaacugcaccaucaucgacgcccugcugggcgacccccagugcgacggcuuccagaacaagaagugggaccuguucguggagagaagcaaggcccacagcaacugcuaccccuacgacgugcccgacuacgccagccugagaagccugguggccagcagcggcacccuggaguucaacaacgagagcuucaacuggaccggcgugacccagaacggcaccagcagcgccugcaucagaagaagcaacaacagcuucuucagcagacugaacuggcugacccaccugaacuucaaguaccccgcccugaacgugaccaugcccaacaacgagcaguucgacaagcuguacaucuggggcgugcaccaccccggcaccgacaaggaccagaucuuccuguacgcccaggccgccggcagaaucaccgugagcaccaagagaagccagcaggccgugauccccaacaucggcagcagacccagagugagaaacauccccagcagagugagcaucuacuggaccaucgugaagcccggcgacauccugcugaucaacagcaccggcaaccugaucgcccccagaggcuacuucaagaucagaagcggcaagagcagcaucaugagaagcgacgcccccaucggcaagugcaacagcgccugcaucacccccaacggcagcauccccaacgacaagcccuuccagaacgugaacagaaucaccuacggcgccugccccagauacgugaagcagaacacccugaagcuggccaccggcaugagaaacgugcccgagaagcagaccagaggcaucuucggcgccaucgccggcuucaucgagaacggcugggagggcaugguggacggcugguacggcuucagacaccagaacagcgagggcagaggccaggccgccgaccugaagagcacccaggccgccaucgaccagaucaacggcaagcugaacagacugaucggcaagaccaacgagaaguuccaccagaucgagaaggaguucagcgagguggagggcagaauccaggaccuggagaaguacguggaggacaccaagaucgaccuguggagcuacaacgccgagcugcugguggcccuggagaaccagcacaccaucgaccugaccgacagcgagaugaacaagcuguucgagaagaccaagaagcagcugagagagaacgccgaggacaugggcaacggcugcuucaagaucuaccacaagugcgacaacgccugcaucggcagcaucagaaacggcaccuacgaccacgacguguacagagacgaggcccugaacaacagauuccagaucaagggcguggagcugaagagcggcuacaaggacuggauccuguggaucagcuucgccaucagcugcuuccugcugugcguggcccugcugggcuucaucaugugggccugccagaagggcaacaucagaugcaacaucugcaucuga

SEQ ID NO: 170920 - RNA, 1701 nt, Artificial Sequence
  derived and/or modified CDS sequence (opt4) from hemagglutinin__InfluenzaA__AHC61643
augaagaccaucaucgcccugagcuacgugcugugccugguguucgcccagaagcugcccggcaacgacaacagcaccgccacccugugccugggccaccacgccgugcccaacggcaccaucgugaagaccaucaccaacgaccagaucgaggugaccaacgccaccgagcuggugcagagcagcagcaccggcgagaucugcaacagcccccaccagauccuggacggcgagaacugcacccugaucgacgcccugcugggcgacccccagugcgacggcuuccagaacaagaagugggaccuguucguggagagaagcaaggcccacagcaacugcuaccccuacgacgugcccgacuacgccagccugagaagccugguggccagcagcggcacccuggaguucaacaacgagagcuucaacuggaccggcgugacccagaacggcaccagcagcgccugcaucagaagaagcaacaacagcuucuucagcagacugaacuggcugacccaccugaacuucaaguaccccgcccugaacgugaccaugcccaacaacgagcaguucgacaagcuguacaucuggggcgugcaccaccccggcaccgacaaggaccagaucuuccuguacgcccaggccgccggcagaaucaccgugagcaccaagagaagccagcaggccgugauccccaacaucggcagcagacccagagugagaaacauccccagcagagugagcaucuacuggaccaucgugaagcccggcgacauccugcugaucaacagcaccggcaaccugaucgcccccagaggcuacuucaagaucagaagcggcaagagcagcaucaugagaagcgacgcccccaucggcaagugcaacagcgccugcaucacccccaacggcagcauccccaacgacaagcccuuccagaacgugaacagaaucaccuacggcgccugccccagauacgugaagcagaacacccugaagcuggccaccggcaugagaaacgugcccgagaagcagaccagaggcaucuucggcgccaucgccggcuucaucgagaacggcugggagggcaugguggacggcugguacggcuucagacaccagaacagcgagggcagaggccaggccgccgaccugaagagcacccaggccgccaucgaccagaucaacggcaagcugaacagacugaucggcaagaccaacgagaaguuccaccagaucgagaaggaguucagcgagguggagggcagaauccaggaccuggagaaguacguggaggacaccaagaucgaccuguggagcuacaacgccgagcugcugguggcccuggagaaccagcacaccaucgaccugaccgacagcgagaugaacaagcuguucgagaagaccaagaagcagcugagagagaacgccgaggacaugggcaacggcugcuucaagaucuaccacaagugcgacaacgccugcaucggcagcaucagaaacggcaccuacgaccacgacguguacagagacgaggcccugaacaacagauuccagaucaagggcguggagcugaagagcggcuacaaggacuggauccuguggaucagcuucgccaucagcugcuuccugcugugcguggcccugcugggcuucaucaugugggccugccagaagggcaacaucagaugcaacaucugcaucuga

SEQ ID NO: 170921 - RNA, 1701 nt, Artificial Sequence
  derived and/or modified CDS sequence (opt4) from hemagglutinin__InfluenzaA__AHC61655
augaagaccaucaucgcccugagcuacauccugugccugguguucacccagaagcugcccggcaacgacaacagcaccgccacccugugccugggccaccacgccgugcccaacggcaccaucgugaagaccaucaccaacgaccagaucgaggugaccaacgccaccgagcuggugcagagcagcagcaccggcgagaucugcaacagcccccaccagauccuggacggcgagaacugcacccugaucgacgcccugcugggcgacccccagugcgacggcuuccagaacaacaagugggaccuguucguggagagaagcaaggcccacagcaacugcuaccccuacgacgugcccgacuacgccagccugagaagccugguggccagcagcggcacccuggaguucaacaacgagagcuucaacuggaccggcgugacccagaacggcaccagcagcgccugcaucagaagaagcaacaacagcuucuucagcagacugaacuggcugacccaccugaacuucaaguaccccgcccugaacgugaccaugcccaacaacgagcaguucgacaagcuguacaucuggggcgugcaccaccccggcaccgacaaggaccagaucuuccuguacgcccaggccgccggcagaaucaccgugagcaccaagagaagccagcaggccgugauccccaacaucggcagcagacccagagugagaaacauccccagcagagugagcaucuacuggaccaucgugaagcccggcgacauccugcugaucaacagcaccggcaaccugaucgcccccagaggcuacuucaagaucagaagcggcaagagcagcaucaucagaagcgacgcccccaucggcaagugcaacagcgccugcaucacccccaacggcagcauccccaacgacaagcccuuccagaacgugaacagaaucaccuacggcgccugccccagauacgugaagcagaacacccugaagcuggccaccggcaugagaaacgugcccgagaagcagaccagaggcaucuucggcgccaucgccggcuucaucgagaacggcugggagggcaugguggacggcugguacggcuucagacaccagaacagcgagggcagaggccaggccgccgaccugaagagcacccaggccgccaucgaccagaucaacggcaagcugaacagacugaucggcaagaccaacgagaaguuccaccagaucgagaaggaguucagcgagguggagggcagaauccaggaccuggagaaguacguggaggacaccaagaucgaccuguggagcuacaacgccgagcugcugguggcccuggagaaccagcacaccaucgaccugaccgacagcgagaugaacaagcuguucgagaagaccaagaagcagcugagagagaacgccgaggacaugggcaacggcugcuucaagaucuaccacaagugcgacaacgccugcaucggcagcaucagaaacggcaccuacgaccacgacguguacagagacgaggcccugaacaacagauuccagaucaagggcguggagcugaagagcggcuacaaggacuggauccuguggaucagcuucgccaucagcugcuuccugcugugcguggcccugcugggcuucaucaugugggccugccagaagggcaacaucagaugcaacaucugcaucuga

SEQ ID NO: 170922 - RNA, 1701 nt, Artificial Sequence
  derived and/or modified CDS sequence (opt4) from hemagglutinin__InfluenzaA__AHC61667
augaagaccaucaucgcccugagcuacauccugugccugguguucgcccagaagcugcccggcaacgacaacagcaccgccacccugugccugggccaccacgccgugcccaacggcaccaucgugaagaccaucaccaacgaccagaucgaggugaccaacgccaccgagcuggugcagagcagcagcaccggcgagaucugcgacagcccccaccagauccuggacggcgagaacugcacccugaucgacgcccugcugggcgacccccagugcgacggcuuccagaacaagaagugggaccuguucguggagagaagcaaggccuacagcaacugcuaccccuacgacgugcccgacuacgccagccugagaagccugguggccagcagcggcacccuggaguucaacaacgagagcuucaacuggaccggcgugacccagaacggcaccagcagcgccugcaucagaagaagcaacaacagcuucuucagcagacugaacuggcugacccaccugaacuucaaguaccccgcccugaacgugaccaugcccaacaacgagcaguucgacaagcuguacaucuggggcgugcaccaccccggcaccgacaaggaccagaucuuccuguacgcccagagcagcggcagaaucaccgugagcaccaagagaagccagcaggccgugauccccaacaucggcagcagacccagaaucagaaacauccccagcagaaucagcaucuacuggaccaucgugaagcccggcgacauccugcugaucaacagcaccggcaaccugaucgcccccagaggcuacuucaagaucagaagcggcaagagcagcaucaugagaagcgacgcccccaucggcaagugcaacagcgagugcaucacccccaacggcagcauccccaacgacaagcccuuccagaacgugaacagaaucaccuacggcgccugccccagauacgugaagcagagcacccugaagcuggccaccggcaugagaaacgugcccgagaagcagaccagaggcaucuucggcgccaucgccggcuucaucgagaacggcugggagggcaugguggacggcugguacggcuucagacaccagaacagcgagggcagaggccaggccgccgaccugaagagcacccaggccgccaucgaccagaucaacggcaagcugaacagacugaucggcaagaccaacgagaaguuccaccagaucgagaaggaguucagcgagguggagggcagaauccaggaccuggagaaguacguggaggacaccaagaucgaccuguggagcuacaacgccgagcugcugguggcccuggagaaccagcacaccaucgaccugaccgacagcgagaugaacaagcuguucgagaagaccaagaagcagcugagagagaacgccgaggacaugggcaacggcugcuucaagaucuaccacaagugcgacaacgccugcaucggcagcaucagaaacggcaccuacaaccacgacguguacagagacgaggcccugaacaacagauuccagaucaagggcguggagcugaagagcggcuacaaggacuggauccuguggaucagcuucgccaucagcugcuuccugcugugcguggcccugcugggcuucaucaugugggccugccagaagggcaacaucagaugcaacaucugcaucuga

SEQ ID NO: 170923 - RNA, 1701 nt, Artificial Sequence; identical to SEQ ID NO: 170678
  derived and/or modified CDS sequence (opt4) from hemagglutinin__InfluenzaA__AHC61679

SEQ ID NO: 170924 - RNA, 1701 nt, Artificial Sequence; identical to SEQ ID NO: 169134
  derived and/or modified CDS sequence (opt4) from hemagglutinin__InfluenzaA__AHC61691

SEQ ID NO: 170925 - RNA, 1701 nt, Artificial Sequence; identical to SEQ ID NO: 166915
  derived and/or modified CDS sequence (opt4) from hemagglutinin__InfluenzaA__AHC61703

SEQ ID NO: 170926 - RNA, 1701 nt, Artificial Sequence; identical to SEQ ID NO: 170711
  derived and/or modified CDS sequence (opt4) from hemagglutinin__InfluenzaA__AHC61715

SEQ ID NO: 170927 - RNA, 1701 nt, Artificial Sequence; identical to SEQ ID NO: 167842
  derived and/or modified CDS sequence (opt4) from hemagglutinin__InfluenzaA__AHC61727

SEQ ID NO: 170928 - RNA, 1701 nt, Artificial Sequence; identical to SEQ ID NO: 166915
  derived and/or modified CDS sequence (opt4) from hemagglutinin__InfluenzaA__AHC61739

SEQ ID NO: 170929 - RNA, 1701 nt, Artificial Sequence
  derived and/or modified CDS sequence (opt4) from hemagglutinin__InfluenzaA__AHC61751
augaagaccaucaucgcccugagcuacauccugugccugguguucgcccagaagcugcccggcaacgacaacagcaccgccacccugugccugggccaccacgccgugcccaacggcaccaucgugaagaccaucaccaacgaccagaucgaggugaccaacgccaccgagcuggugcagaacagcagcaccggcgagaucugcgacagcccccaccagauccuggacggcgagaacugcacccugaucgacgcccugcugggcgacccccagugcgacggcuuccagaacaagaagugggaccuguucguggagagaagcaaggccuacagcaacugcuaccccuacgacgugcccgacuacgccagccugagaagccugguggccagcagcggcacccuggaguucaacaacgagagcuucaacuggaccggcgugacccagaacggcaccagcagcgccugcaucagaagaagcaacaacagcuucuucagcagacugaacuggcugacccaccugaacuucaaguaccccgcccugaacgugaccaugcccaacaacgagcaguucgacaagcuguacaucuggggcgugcaccaccccggcaccgacaaggaccagaucuuccuguacgcccaggccagcggcagaaucaccgugagcaccaagagaagccagcaggccgugauccccaacgugggcagcagacccagagugagaaacauccccagcagaaucagcaucuacuggaccaucgugaagcccggcgacauccugcugaucaacagcaccggcaaccugaucgcccccagaggcuacuucaagaucagaagcggcaagagcagcaucaugagaagcgacgcccccaucggcaagugcaacagcgagugcaucacccccaacggcagcauccccaacgacaagcccuuccagaacgugaacagaaucaccuacggcgccugccccagauacgugaagcagaacacccugaagcuggccaccggcaugagaaacgugcccgagaagcagaccagaggcaucuucggcgccaucgccggcuucaucgagaacggcugggagggcaugguggacggcugguacggcuucagacaccagaacagcgagggcagaggccaggccgccgaccugaagagcacccaggccgccaucgaccagaucaacggcaagcugaacagacugaucggcaagaccaacgagaaguuccaccagaucgagaaggaguucagcgagguggagggcagaauccaggaccuggagaaguacguggaggacaccaagaucgaccuguggagcuacaacgccgagcugcugguggcccuggagaaccagcacaccaucgaccugaccgacagcgagaugaacaagcuguucgagaagaccaagaagcagcugagagagaacgccgaggacaugggcaacggcugcuucaagaucuaccacaagugcgacaacgccugcaucggcagcaucagaaacggcaccuacgaccacgacguguacagagacgaggcccugaacaacagauuccagaucaagggcguggagcugaagagcggcuacaaggacuggauccuguggaucagcuucgccaucagcugcuuccugcugugcguggcccugcugggcuucaucaugugggccugccagaagggcaacaucagaugcaacaucugcaucuga

SEQ ID NO: 170930 - RNA, 1701 nt, Artificial Sequence
  derived and/or modified CDS sequence (opt4) from hemagglutinin__InfluenzaA__AHC61763
augaagaccaucaucgcccugagcuacauccugugccugguguucgcccagaagcugcccggcaacgacaacagcaccgccacccugugccugggccaccacgccgugcccaacggcaccaucgugaagaccaucaccaacgaccagaucgaggugaccaacgccaccgagcuggugcagagcagcagcaccggcgagaucugcaacagcccccaccagauccuggacggcgagaacugcacccugaucgacgcccugcugggcgacccccagugcgacggcuuccagaacaagaagugggaccuguucguggagagaagcaaggcccacagcaacugcuaccccuacgacgugcccgacuacgccagccugagaagccugguggccagcagcggcacccuggaguucaacaacgagagcuucaacuggaccggcgugacccagaacggcaccagcagcgccugcaucagaagaagcaacaacagcuucuucagcagacugaacuggcugacccaccugaacuucaaguaccccgcccugaacgugaccaugcccaacaacgagcaguucgacaagcuguacaucuggggcgugcaccaccccggcaccgacaaggaccagaucuuccuguacgcccaggccgccggcagaaucaccgugagcaccaagagaagccagcagaccgugauccccaacaucggcagcagacccagagugagaaacauccccagcagagugagcaucuacuggaccaucgugaagcccggcgacauccugcugaucaacagcaccggcaaccugaucgcccccagaggcuacuucaagaucagaagcggcaagagcagcaucaugagaagcgacgcccccaucggcaagugcaacagcgccugcaucacccccaacggcagcauccccaacgacaagcccuuccagaacgugaacagaaucaccuacggcgccugccccagauacgugaagcagaacacccugaagcuggccaccggcaugagaaacgugcccgagaagcagaccagaggcaucuucggcgccaucgccggcuucaucgagaacggcugggagggcaugguggacggcugguacggcuucagacaccagaacagcgagggcagaggccaggccgccgaccugaagagcacccaggccgccaucgaccagaucaacggcaagcugaacagacugaucggcaagaccaacgagaaguuccaccagaucgagaaggaguucagcgagguggagggcagaauccaggaccuggagaaguacguggaggacaccaagaucgaccuguggagcuacaacgccgagcugcugguggcccuggagaaccagcacaccaucgaccugaccgacagcgagaugaacaagcuguucgagaagaccaagaagcagcugagagagaacgccgaggacaugggcaacggcugcuucaagaucuaccacaagugcgacaacgccugcaucggcagcaucagaaacggcaccuacgaccacgacguguacagagacgaggcccugaacaacagauuccagaucaagggcguggagcugaagagcggcuacaaggacuggauccuguggaucagcuucgccaucagcugcuuccugcugugcguggcccugcugggcuucaucaugugggccugccagaagggcaacaucagaugcaacaucugcaucuga

SEQ ID NO: 170931 - RNA, 1701 nt, Artificial Sequence; identical to SEQ ID NO: 167042
  derived and/or modified CDS sequence (opt4) from hemagglutinin__InfluenzaA__AHC61775

SEQ ID NO: 170932 - RNA, 1701 nt, Artificial Sequence; identical to SEQ ID NO: 167842
  derived and/or modified CDS sequence (opt4) from hemagglutinin__InfluenzaA__AHC61787

SEQ ID NO: 170933 - RNA, 1701 nt, Artificial Sequence; identical to SEQ ID NO: 170678
  derived and/or modified CDS sequence (opt4) from hemagglutinin__InfluenzaA__AHC61799

SEQ ID NO: 170934 - RNA, 1701 nt, Artificial Sequence
  derived and/or modified CDS sequence (opt4) from hemagglutinin__InfluenzaA__AHC61823
augaagaccaucaucgcccugagcuacauccugugccugguguucgcccagaagcugcccggcaacgacaacagcaccgccacccugugccugggccaccacgccgugcccaacggcaccaucgugaagaccaucaccaacgaccagaucgaggugaccaacgccaccgagcuggugcagagcagcagcaccggcgagaucugcgacagcccccaccagauccuggacggcgagaacugcacccugaucgacgcccugcugggcgacccccagugcgacggcuuccagaacaagaagugggaccuguucguggagagaagcaaggccuacagcaacugcuaccccuacgacgugcccgacuacgccagccugagaagccugguggccagcagcggcacccuggaguucaacaacgagagcuucaacuggaccggcgugacccagaacggcaccagcagcgccugcaucagaagaagcaacagcagcuucuucagcagacugaacuggcugacccaccugaacuucaaguaccccgcccugaacgugaccaugcccaacaacgagcaguucgacaagcuguacaucuggggcgugcaccaccccggcaccgacaaggaccagaucuuccuguacgcccagagcagcggcagaaucaccgugagcaccaagagaagccagcaggccgugauccccaacaucggcagcagacccagaaucagaaacauccccagcagaaucagcaucuacuggaccaucgugaagcccggcgacauccugcugaucaacagcaccggcaaccugaucgcccccagaggcuacuucaagaucagaagcggcaagagcagcaucaugaagagcgacgcccccaucgacaagugcaacagcgagugcaucacccccaacggcagcauccccaacgacaagcccuuccagaacgugaacagaaucaccuacggcgccugccccagauacgugaagcagagcacccugaagcuggccaccggcaugagaaacgugcccgagaagcagaccagaggcaucuucggcgccaucgccggcuucaucgagaacggcugggagggcaugguggacggcugguacggcuucagacaccagaacagcgagggcagaggccaggccgccgaccugaagagcacccaggccgccaucgaccagaucaacggcaagcugaacagacugaucggcaagaccaacgagaaguuccaccagaucgagaaggaguucagcgagguggagggcagaauccaggaccuggagaaguacguggaggacaccaagaucgaccuguggagcuacaacgccgagcugcugguggcccuggagaaccagcacaccaucgaccugaccgacagcgagaugaacaagcuguucgagaagaccaagaagcagcugagagagaacgccgaggacaugggcaacggcugcuucaagaucuaccacaagugcgacaacgccugcaucggcagcaucagaaacggcaccuacaaccacgacguguacagagacgaggcccugaacaacagauuccagaucaagggcguggagcugaagagcggcuacaaggacuggauccuguggaucagcuucgccaucagcugcuuccugcugugcguggcccugcugggcuucaucaugugggccugccagaagggcaacaucagaugcaacaucugcaucuga

SEQ ID NO: 170935 - RNA, 1701 nt, Artificial Sequence; identical to SEQ ID NO: 167842
  derived and/or modified CDS sequence (opt4) from hemagglutinin__InfluenzaA__AHC61835

SEQ ID NO: 170936 - RNA, 1701 nt, Artificial Sequence; identical to SEQ ID NO: 167042
  derived and/or modified CDS sequence (opt4) from hemagglutinin__InfluenzaA__AHC61847

SEQ ID NO: 170937 - RNA, 1701 nt, Artificial Sequence; identical to SEQ ID NO: 166915
  derived and/or modified CDS sequence (opt4) from hemagglutinin__InfluenzaA__AHC61859

SEQ ID NO: 170938 - RNA, 1701 nt, Artificial Sequence; identical to SEQ ID NO: 167842
  derived and/or modified CDS sequence (opt4) from hemagglutinin__InfluenzaA__AHC61871

SEQ ID NO: 170939 - RNA, 1701 nt, Artificial Sequence
  derived and/or modified CDS sequence (opt4) from hemagglutinin__InfluenzaA__AHC61883
augaagaccaucaucgcccugagcuacauccugugccugguguucgcccagaagcugcccggcaacgacaacagcaccgccacccugugccugggccaccacgccgugcccaacggcaccaucgugaagaccaucaccaacgaccagaucgaggugaccaacgccaccgagcuggugcagagcagcagcaccggcgagaucugcgacagcccccaccagauccuggacggcgagaacugcacccugaucgacgcccugcugggcgacccccagugcgacggcuuccagaacaagaagugggaccuguucguggagagaagcaaggccuacagcaacugcuaccccuacgacgugcccgacuacgccagccugagaagccugguggccagcagcggcacccuggaguucaacaacgagagcuucaacuggaccggcgugacccagaacggcaccagcagcgccugcaucagaagaagcaacagcagcuucuucagcagacugaacuggcugacccaccugaacuucaaguaccccgcccugaacgugaccaugcccaacaacgagcaguucgacaagcuguacaucuggggcgugcaccaccccggcaccgacaaggaccagaucuuccuguacgcccagagcagcggcagaaucaccgugagcaccaagagaagccagcaggccgugauccccaacaucggcagcagacccagaaucagaaacauccccagcagaaucagcaucuacuggaccaucgugaagcccggcgacauccugcugaucaacagcaccggcaaccugaucgcccccagaggcuacuucaagaucagaagcggcaagagcagcaucaugagaagcgacgcccccaucggcaagugcaacagcgagugcaucacccccaacggcagcauccccaacgacaagcccuuccagaacgugaacagaaucaccuacggcgccugccccagauacgugaagcagagcacccugaagcuggccaccggcaugagaaacgugcccgagaagcagaccagaggcaucuucggcgccaucgccggcuucaucgagaacggcugggagggcaugguggacggcugguacggcuucagacaccagaacagcgagggcagaggccaggccgccgaccugaagagcacccaggccgccaucgaccagaucaacggcaagcugaacagacugaucggcaagaccaacgagaaguuccaccagaucgagaaggaguucagcgagguggagggcagaauccaggaccuggagaaguacguggaggacaccaagaucgaccuguggagcuacaacgccgagcugcugguggcccuggagaaccagcacaccaucgaccuggccgacagcgagaugaacaagcuguucgagaagaccaagaagcagcugagagagaacgccgaggacaugggcaacggcugcuucaagaucuaccacaagugcgacaacgccugcaucggcagcaucagaaacggcaccuacaaccacgacguguacagagacgaggcccugaacaacagauuccagaucaagggcguggagcugaagagcggcuacaaggacuggauccuguggaucagcuucgccaucagcugcuuccugcugugcguggcccugcugggcuucaucaugugggccugccagaagggcaacaucagaugcaacaucugcaucuga

SEQ ID NO: 170940 - RNA, 1701 nt, Artificial Sequence; identical to SEQ ID NO: 167042
  derived and/or modified CDS sequence (opt4) from hemagglutinin__InfluenzaA__AHC61895

SEQ ID NO: 170941 - RNA, 1701 nt, Artificial Sequence; identical to SEQ ID NO: 167042
  derived and/or modified CDS sequence (opt4) from hemagglutinin__InfluenzaA__AHC61907

SEQ ID NO: 170942 - RNA, 1701 nt, Artificial Sequence
  derived and/or modified CDS sequence (opt4) from hemagglutinin__InfluenzaA__AHC61931
augaagaccaucaucgcccugagcuacauccugugccugguguucgcccagaagcugcccggcaacgacaacagcaccgccacccugugccugggccaccacgccgugcccaacggcaccaucgugaagaccaucaccaacgaccagaucgaggugaccaacgccaccgagcuggugcagagcagcagcaccggcgagaucugcaacagcccccaccagauccuggacggcgagaacugcacccugaucgacgcccugcugggcgacccccagugcgacggcuuccagaacaagaagugggaccuguucguggagagaagcaaggcccacagcaacugcuaccccuacgacgugcccgacuacgccagccugagaagccugguggccagcagcggcacccuggaguucaacaacgagagcuucaacuggaccggcgugacccagaacggcaccagcagcgccugcaucagaagaagcaacaacagcuucuucagcagacugaacuggcugacccaccugaacuucaaguaccccgcccugaacgugaccaugcccaacaacgagcaguucgacaagcuguacaucuggggcgugcaccaccccggcaccgacaaggaccagaucuuccuguacgcccaggccgccggcagaaucaccgugagcaccaagagaagccagcaggccgugauccccaacaucggcagcagacccagagugagaaacauccccagcagagugagcaucuacuggaccaucgugaagcccggcgacauccugcugaucaacagcaccggcaaccugaucgcccccagaggcuacuucaagaucagaagcggcaagagcagcaucaugagaagcgacgcccccaucggcaagugcaacagcgccugcaucacccccaacggcagcauccccaacgacaagcccuuccagaacgugaacagaaucaccuacggcgccugccccagauacgugaagcagaacacccugaagcuggccaccggcaugagaaacgugcccgagaagcagaccagaggcaucuucggcgccaucgccggcuucaucgagaacggcugggagggcaugguggacggcugguacggcuucagacaccagaacagcgagggcagaggccaggccgccgaccugaagagcacccaggccgccaucgaccagaucaacggcaagcugaacagacugaucggcaagaccaacgagaaguuccaccagaucgagaaggaguucagcgagguggagggcagaauccaggaccuggagaaguacguggaggacaccaagaucgaccuguggagcuacaacgccgagcugcugguggcccuggagaaccagcacaccaucgaccugaccgacagcgagaugaacaagcuguucgagaagaccaagaagcagcugagagagaacgccgaggacaugggcaacggcugcuucaagaucuaccacaagugcgacaacgccugcaucggcagcaucagaaacggcaccuacgaccacgacguguacagagacgaggcccugaacaacagauuccagaucaagggcguggagcugaagagcggcuacaagggcuggauccuguggaucagcuucgccaucagcugcuuccugcugugcguggcccugcugggcuucaucaugugggccugccagaagggcaacaucagaugcaacaucugcaucuga

SEQ ID NO: 170943 - RNA, 1701 nt, Artificial Sequence; identical to SEQ ID NO: 167842
  derived and/or modified CDS sequence (opt4) from hemagglutinin__InfluenzaA__AHC61943

SEQ ID NO: 170944 - RNA, 1701 nt, Artificial Sequence; identical to SEQ ID NO: 169134
  derived and/or modified CDS sequence (opt4) from hemagglutinin__InfluenzaA__AHC61955

SEQ ID NO: 170945 - RNA, 1701 nt, Artificial Sequence; identical to SEQ ID NO: 167842
  derived and/or modified CDS sequence (opt4) from hemagglutinin__InfluenzaA__AHC61967

SEQ ID NO: 170946 - RNA, 1701 nt, Artificial Sequence; identical to SEQ ID NO: 166915
  derived and/or modified CDS sequence (opt4) from hemagglutinin__InfluenzaA__AHC61979

SEQ ID NO: 170947 - RNA, 1701 nt, Artificial Sequence; identical to SEQ ID NO: 167042
  derived and/or modified CDS sequence (opt4) from hemagglutinin__InfluenzaA__AHC61991

SEQ ID NO: 170948 - RNA, 1701 nt, Artificial Sequence; identical to SEQ ID NO: 170753
  derived and/or modified CDS sequence (opt4) from hemagglutinin__InfluenzaA__AHC62003

SEQ ID NO: 170949 - RNA, 1701 nt, Artificial Sequence; identical to SEQ ID NO: 167842
  derived and/or modified CDS sequence (opt4) from hemagglutinin__InfluenzaA__AHC62015

SEQ ID NO: 170950 - RNA, 1701 nt, Artificial Sequence; identical to SEQ ID NO: 169134
  derived and/or modified CDS sequence (opt4) from hemagglutinin__InfluenzaA__AHC62027

SEQ ID NO: 170951 - RNA, 1701 nt, Artificial Sequence
  derived and/or modified CDS sequence (opt4) from hemagglutinin__InfluenzaA__AHC62039
augaagaccaucaucgcccugagcuacauccugugccugguguucgcccagaagcugcccggcaacgacaacagcaccgccacccugugccugggccaccacgccgugcccaacggcaccaucgugaagaccaucaccaacgaccagaucgaggugaccaacgccaccgagcuggugcagagcagcagcaccggcgagaucugcaacagcccccaccagauccuggacggcgagaacugcacccugaucgacgcccugcugggcgacccccagugcgacggcuuccagaacaagaagugggaccuguucguggagagaagcaaggcccacagcaacugcuaccccuacgacgugcccgacuacgccagccugagaagccugguggccagcagcggcacccuggaguucaacaacgagagcuucaacuggaccggcgugacccagaacggcaccagcagcgccugcaucagaggcagcaacaacagcuucuucagcagacugaacuggcugacccaccugaacuucaaguaccccgcccugaacgugaccaugcccaacaacgagcaguucgacaagcuguacaucuggggcgugcaccaccccggcaccgacaaggaccagaucuuccuguacgcccaggccagcggcagaaucaccgugagcaccaagagaagccagcaggccgugauccccaacaucggcagcagacccagagugagaaacauccccagcagagugagcaucuacuggaccaucgugaagcccggcgacauccugcugaucaacagcaccggcaaccugaucgcccccagaggcuacuucaagaucagaagcggcaagagcagcaucaugaagagcgacgcccccaucggcaagugcaacagcgccugcaucacccccaacggcagcauccccaacgacaagcccuuccagaacgugaacagaaucaccuacggcgccugccccagauacgugaagcagaacacccugaagcuggccaccggcaugagaaacgugcccgagaagcagaccagaggcaucuucggcgccaucgccggcuucaucgagaacggcugggagggcaugauggacggcugguacggcuucagacaccagaacagcgagggcagaggccaggccgccgaccugaagagcacccaggccgccaucgaccagaucaacggcaagcugaacagacugaucggcaagaccaacgagaaguuccaccagaucgagaaggaguucagcgagguggagggcagaauccaggaccuggagaaguacguggaggacaccaagaucgaccuguggagcuacaacgccgagcugcugguggcccuggagaaccagcacaccaucgaccugaccgacagcgagaugaacaagcuguucgagaagaccaagaagcagcugagagagaacgccgaggacaugggcaacggcugcuucaagaucuaccacaagugcgacaacgccugcaucggcagcaucagaaacggcaccuacgaccacgacguguacagagacgaggcccugaacaacagauuccagaucaagggcguggagcugaagagcggcuacaaggacuggauccuguggaucagcuucgccaucagcugcuuccugcugugcguggcccugcugggcuucaucaugugggccugccagaagggcaacaucagaugcaacaucugcaucuga

SEQ ID NO: 170952 - RNA, 1701 nt, Artificial Sequence
  derived and/or modified CDS sequence (opt4) from hemagglutinin__InfluenzaA__AHC62050
augaagaccaucaucgcccugagcuacauccugugccugguguucgcccagaagcugcccggcaacgacaacagcaccgccacccugugccugggccaccacgccgugcccaacggcaccaucgugaagaccaucaccaacgaccagaucgaggugaccaacgccaccgagcuggugcagagcagcagcaccggcgagaucugcaacagcccccaccagauccuggacggcgagaacugcacccugaucgacgcccugcugggcgacccccagugcgacggcuuccagaacaagaagugggaccuguucguggagagaagcaaggcccacagcaacugcuaccccuacgacgugcccgacuacgccagccugagaagccugguggccagcagcggcacccuggaguucaacaacgagagcuucaacuggaccggcgugacccagaacggcaccagcagcgccugcaucagaagaagcaacaacagcuucuucagcagacugaacuggcugacccaccugaacuucaaguaccccgcccugaacgugaccaugcccaacaacgagcaguucgacaagcuguacaucuggggcgugcaccaccccggcaccgacaaggaccagaucuuccuguacgcccaggccagcggcagaaucaccgugagcaccaagagaagccagcaggccgugauccccaacaucggcagcagacccagagugagaaacgugcccagcagagugagcaucuacuggaccaucgugaagcccggcgacauccugcugaucaacagcaccggcaaccugaucgcccccagaggcuacuucaagaucagaagcggcaagagcagcaucaugagaagcgacgcccccaucggcaagugcaacagcgccugcaucacccccaacggcagcauccccaacgacaagcccuuccagaacgugaacagaaucaccuacggcgccugccccagauacgugaagcagaacacccugaagcuggccaccggcaugagaaacgugcccgagaagcagaccagaggcaucuucggcgccaucgccggcuucaucgagaacggcugggagggcaugguggacggcugguacggcuucagacaccagaacagcgagggcagaggccaggccgccgaccugaagagcacccaggccgccaucgaccagaucaacggcaagcugaacagacugaucggcaagaccaacgagaaguuccaccagaucgagaaggaguucagcgagguggagggcagaauccaggaccuggagaaguacguggaggacaccaagaucgaccuguggagcuacaacgccgagcugcugguggcccuggagaaccagcacaccaucgaccugaccgacagcgagaugaacaagcuguucgagaagaccaagaagcagcugagagagaacgccgaggacaugggcaacggcugcuucaagaucuaccacaagugcgacaacgccugcaucggcagcaucagaaacggcaccuacgaccacgacguguacagagacgaggcccugaacaacagauuccagaucaagggcguggagcugaagagcggcuacaaggacuggauccuguggaucagcuucgccaucagcugcuuccugcugugcguggcccugcugggcuucaucaugugggccugccagaagggcaacaucagaugcaacaucugcaucuga

SEQ ID NO: 170953 - RNA, 1701 nt, Artificial Sequence; identical to SEQ ID NO: 169134
  derived and/or modified CDS sequence (opt4) from hemagglutinin__InfluenzaA__AHC62062

SEQ ID NO: 170954 - RNA, 1701 nt, Artificial Sequence
  derived and/or modified CDS sequence (opt4) from hemagglutinin__InfluenzaA__AHC62074
augaagaccaucaucgcccugagcuacauccugugccugguguucgcccagaagcugcccggcaacgacaacagcaccgccacccugugccugggccaccacgccgugcccaacggcaccaucgugaagaccaucaccaacgaccagaucgaggugaccaacgccaccgagcuggugcagagcagcagcaccggcgagaucugcgacagcccccaccagauccuggacggcgagaacugcacccugaucgacgcccugcugggcgacccccagugcgacggcuuccagaacaagaagugggaccuguucguggagagaagcaaggccuacagcaacugcuaccccuacgacgugcccgacuacgccagccugagaagccugguggccagcagcggcacccuggaguucaacaacgagagcuucaacuggaccggcgugacccagaacggcaccagcagcgccugcaucagaagaagcaacaacagcuucuucagcagacugaacuggcugacccaccugaacuucaaguaccccgcccugaacgugaccaugcccaacaacgagcaguucgacaagcuguacaucuggggcgugcaccaccccggcaccgacaaggaccagaucuuccuguacgcccaggccagcggcagaaucaccgugagcaccaagagaaaccagcaggccgugauccccaacaucggcagcagacccagagugagaaacauccccagcagaaucagcaucuacuggaccaucgugaagcccggcgacauccugcugaucaacagcaccggcaaccugaucgcccccagaggcuacuucaagaucagaagcggcaagagcagcaucaugagaagcgacgcccccaucggcaagugcaacagcgagugcaucacccccaacggcagcauccccaacgacaagcccuuccagaacgugaacagaaucaccuacggcgccugccccagauacgugaagcagaacacccugaagcuggccaccggcaugagaaacgugcccgagaagcagaccagaggcaucuucggcgccaucgccggcuucaucgagaacggcugggagggcaugguggacggcugguacggcuucagacaccagaacagcgagggcagaggccaggccgccgaccugaagagcacccaggccgccaucgaccagaucaacggcaagcugaacagacugaucggcaagaccaacgagaaguuccaccagaucgagaaggaguucagcgagguggagggcagaauccaggaccuggagaaguacguggaggacaccaagaucgaccuguggagcuacaacgccgagcugcugguggcccuggagaaccagcacaccaucgaccugaccgacagcgagaugaacaagcuguucgagaagaccaagaagcagcugagagagaacgccgaggacaugggcaacggcugcuucaagaucuaccacaagugcgacaacgccugcaucggcagcaucagaaacggcaccuacaaccacgacguguacagagacgaggcccugaacaacagauuccagaucaagggcguggagcugaagagcggcuacaaggacuggauccuguggaucagcuucgccaucagcugcuuccugcugugcguggcccugcugggcuucaucaugugggccugccagaagggcaacaucagaugcaacaucugcaucuga

SEQ ID NO: 170955 - RNA, 1701 nt, Artificial Sequence; identical to SEQ ID NO: 166915
  derived and/or modified CDS sequence (opt4) from hemagglutinin__InfluenzaA__AHC62086

SEQ ID NO: 170956 - RNA, 1701 nt, Artificial Sequence; identical to SEQ ID NO: 167842
  derived and/or modified CDS sequence (opt4) from hemagglutinin__InfluenzaA__AHC62098

SEQ ID NO: 170957 - RNA, 1701 nt, Artificial Sequence; identical to SEQ ID NO: 166915
  derived and/or modified CDS sequence (opt4) from hemagglutinin__InfluenzaA__AHC62110

SEQ ID NO: 170958 - RNA, 1701 nt, Artificial Sequence
  derived and/or modified CDS sequence (opt4) from hemagglutinin__InfluenzaA__AHC62122
augaagaccaucaucgcccugagcuacauccugugccugguguucgcccagaagcugcccggcaacgacaacagcaccgccacccugugccugggccaccacgccgugcccaacggcaccaucgugaagaccaucaccaacgaccagaucgaggugaccaacgccaccgagauggugcagagcagcagcaccggcgagaucugcaacagcccccaccagauccuggacggcgagaacugcacccugaucgacgcccugcugggcgacccccagugcgacggcuuccagaacaagaagugggaccuguucguggagagaagcaaggcccacagcaacugcuaccccuacgacgugcccgacuacgccagccugagaagccugguggccagcagcggcacccuggaguucaacaacgagagcuucaacuggaccggcgugacccagaacggcaccagcagcgccugcaucagaggcagcaacaacagcuucuucagcagacugaacuggcugacccacagcaacuucaaguaccccgcccugaacgugaccaugcccaacaacgagcaguucgacaagcuguacaucuggggcgugcaccaccccggcaccgacaaggaccagaucuuccuguacgcccaggccagcggcagaaucaccgugagcaccaagagaagccagcaggccgugauccccaacaucggcagcagacccagagugagaaacauccccagcagagugagcaucuacuggaccaucgugaagcccggcgacauccugcugaucaacagcaccggcaaccugaucgcccccagaggcuacuucaagaucagaagcggcaagagcagcaucaugagaagcgacgcccccaucggcaagugcaacagcgccugcaucacccccaacggcagcauccccaacgacaagcccuuccagaacgugaacagaaucaccuacggcgccugccccagauacgugaagcagaacacccugaagcuggccaccggcaugagaaacgugcccgagaagcagaccagaggcaucuucggcgccaucgccggcuucaucgagaacggcugggagggcaugguggacggcugguacggcuucagacaccagaacagcgagggcagaggccaggccgccgaccugaagagcacccaggccgccaucgaccagaucaacggcaagcugaacagacugaucggcaagaccaacgagaaguuccaccagaucgagaaggaguucagcgagguggagggcagaauccaggaccuggagaaguacguggaggacaccaagaucgaccuguggagcuacaacgccgagcugcugguggcccuggagaaccagcacaccaucgaccugaccgacagcgagaugaacaagcuguucgagaagaccaagaagcagcugagagagaacgccgaggacaugggcaacggcugcuucaagaucuaccacaagugcgacaacgccugcaucggcagcaucagaaacggcaccuacgaccacgacguguacagagacgaggcccugaacaacagauucagaaucaagggcguggagcugaagagcggcuacaaggacuggauccuguggaucagcuucgccaucagcugcuuccugcugugcguggcccugcugggcuucaucaugugggccugccagaagggcaacaucagaugcaacaucugcaucuga

SEQ ID NO: 170959 - RNA, 1701 nt, Artificial Sequence; identical to SEQ ID NO: 166915
  derived and/or modified CDS sequence (opt4) from hemagglutinin__InfluenzaA__AHC62134

SEQ ID NO: 170960 - RNA, 1701 nt, Artificial Sequence
  derived and/or modified CDS sequence (opt4) from hemagglutinin__InfluenzaA__AHC62146
augaagaccaucaucgcccugagcuacauccugugccugguguucgcccagaagcugcccggcaacgacaacagcaccgccacccugugccugggccaccacgccgugcccaacggcaccaucgugaagaccaucaccaacgaccagaucgaggugaccaacgccaccgagcuggugcagagcagcagcaccggcgagaucugcaacagcccccaccagauccuggacggcgagaacugcacccugaucgacgcccugcugggcgacccccagugcgacggcuuccagaacaagaagugggaccuguucguggagagaagcaaggccuacagcaacugcuaccccuacgacgugcccgacuacgccagccugagaagccugguggccagcagcggcacccuggaguucaacaacgagagcuucaacuggaccggcgugacccagaacggcaccagcagcgccugcaucagaagaagcaacagcagcuucuucagcagacugaacuggcugacccaccugaacuucaaguaccccgcccugaacgugaccaugcccaacaacgagcaguucgacaagcuguacaucuggggcgugcaccaccccggcaccgacaaggaccagaucuuccuguacgcccagagcagcggcagaaucaccgugagcaccaagagaagccagcaggccgugauccccaacaucggcagcagacccagaaucagaaacauccccagcagaaucagcaucuacuggaccaucgugaagcccggcgacauccugcugaucaacagcaccggcaaccugaucgcccccagaggcuacuucaagaucagaagcggcaagagcagcaucaugagaagcgacgcccccaucggcaagugcaacagcgagugcaucacccccaacggcagcauccccaacgacaagcccuuccagaacgugaacagaaucaccuacggcgccugccccagauacgugaagcagagcacccugaagcuggccaccggcaugagaaacgugcccgagaagcagaccagaggcaucuucggcgccaucgccggcuucaucgagaacggcugggagggcaugguggacggcugguacggcuucagacaccagaacuacgagggcagaggccaggccgccgaccugaagagcacccaggccgccaucgaccagaucaacggcaagcugaacagacugaucggcaagaccaacgagaaguuccaccagaucgagaaggaguucagcgagguggagggcagaauccaggaccuggagaaguacguggaggacaccaagaucgaccuguggagcuacaacgccgagcugcugguggcccuggagaaccagcacaccaucgaccugaccgacagcgagaugaacaagcuguucgagaagaccaagaagcagcugagagagaacgccgaggacaugggcaacggcugcuucaagaucuaccacaagugcgacaacgccugcaucggcagcaucagaaacggcaccuacaaccacgacguguacagagacgaggcccugaacaacagauuccagaucaagggcguggagcugaagagcggcuacaaggacuggauccuguggaucagcuucgccaucagcugcuuccugcugugcguggcccugcugggcuucaucaugugggccugccagaagggcaacaucagaugcaacaucugcaucuga

SEQ ID NO: 170961 - RNA, 1701 nt, Artificial Sequence; identical to SEQ ID NO: 167042
  derived and/or modified CDS sequence (opt4) from hemagglutinin__InfluenzaA__AHC62158

SEQ ID NO: 170962 - RNA, 1701 nt, Artificial Sequence
  derived and/or modified CDS sequence (opt4) from hemagglutinin__InfluenzaA__AHC62170
augaagaccaucaucgcccugagcuacauccugugccugguguucgcccagaagcugcccggcaacgacaacagcaccgccacccugugccugggccaccacgccgugcccaacggcaccaucgugaagaccaucaccaacgaccagaucgaggugaccaacgccaccgagcuggugcagagcagcagcaccggcgagaucugcaacagcccccaccagauccuggacggcgagaacugcacccugaucgacgcccugcugggcgacccccagugcgacggcuuccagaacaagaagugggaccuguucguggagagaagcaaggcccacagcaacugcuaccccuacgacgugcccgacuacgccagccugagaagccugguggccagcagcggcacccuggaguucaacaacgagagcuucaacuggaccggcgugacccagaacggcaccagcagcgccugcaucagaggcagcaacaacagcuucuucagcagacugaacuggcugacccaccugaacuucaaguaccccgcccugaacgugaccaugcccaacaacgagcaguucgacaagcuguacaucuggggcgugcaccaccccggcaccgacaaggaccagaucuuccuguacgcccaggccagcggcagaaucaccgugagcaccaagagaagccagcaggccgugauccccaacaucggcagcagacccagagugagaaacauccccagcagagugagcaucuacuggaccaucgugaagcccggcgacauccugcugaucaacagcaccggcaaccugaucgcccccagaggcuacuucaagaucagaagcggcaagagcagcaucaugagaagcgacgcccccaucggcaagugcaacagcgccugcaucacccccaacggcagcauccccaacgacaagcccuuccagaacgugaacagaaucaccuacggcgccugccccagauacgugaagcagaacacccugaagcuggccaccggcaugagaaacgugcccgagaagcagaccagaggcaucuucggcgccaucgccggcuucaucgagaacggcugggagggcaugauggacggcugguacggcuucagacaccagaacagcgagggcagaggccaggccgccgaccugaagagcacccaggccgccaucgaccagaucaacggcaagcugaacagacugaucggcaagaccaacgagaaguuccaccagaucgagaaggaguucagcgagguggagggcagaauccaggaccuggagaaguacguggaggacaccaagaucgaccuguggagcuacaacgccgagcugcugguggcccuggagaaccagcacaccaucgaccugaccgacagcgagaugaacaagcuguucgagaagaccaagaagcagcugagagagaacgccgaggacaugggcaacggcugcuucaagaucuaccacaagugcgacaacgccugcaucggcagcaucagaaacggcaccuacgaccacaacguguacagagacgaggcccugaacaacagauuccagaucaagggcguggagcugaagagcggcuacaaggacuggauccuguggaucagcuucgccaucagcugcuuccugcugugcguggcccugcugggcuucaucaugugggccugccagaagggcaacaucagaugcaacaucugcaucuga

SEQ ID NO: 170963 - RNA, 1701 nt, Artificial Sequence; identical to SEQ ID NO: 166915
  derived and/or modified CDS sequence (opt4) from hemagglutinin__InfluenzaA__AHC62182

SEQ ID NO: 170964 - RNA, 1701 nt, Artificial Sequence; identical to SEQ ID NO: 169134
  derived and/or modified CDS sequence (opt4) from hemagglutinin__InfluenzaA__AHC62194

SEQ ID NO: 170965 - RNA, 1701 nt, Artificial Sequence
  derived and/or modified CDS sequence (opt4) from hemagglutinin__InfluenzaA__AHC62206
augaagaccaucaucgcccugagcuacauccugugccugguguucgcccagaagcugcccggcaacgacaacagcaccgccacccugugccugggccaccacgccgugcccaacggcaccaucgugaagaccaucaccaacgaccagaucgaggugaccaacgccaccgagcuggugcagagcagcagcaccggcgagaucugcgacagcccccaccagauccuggacggcgagaacugcacccugaucgacgcccugcugggcgacccccagugcgacggcuuccagaacaagaagugggaccuguucguggagagaagcaaggccuacagcaacugcuaccccuacgacgugcccgacuacgccagccugagaagccugguggccagcagcggcacccuggaguucaacaacgagagcuucaucuggaccggcgugacccagaacggcaccagcagcgccugcaucagaagaagcaacagcagcuucuucagcagacugaacuggcugacccaccugaacuucaaguaccccgcccugaacgugaccaugcccaacaacgagcaguucgacaagcuguacaucuggggcgugcaccaccccggcaccgacaaggaccagaucuuccuguacgcccagagcagcggcagaaucaccgugagcaccaagagaagccagcaggccgugauccccaacaucggcagcagacccagaaucagaaacauccccagcagaaucagcaucuacuggaccaucgugaagcccggcgacauccugcugaucaacagcaccggcaaccugaucgcccccagaggcuacuucaagaucagaagcggcaagagcagcaucaugagaagcgacgcccccaucggcaagugcaacagcgagugcaucacccccaacggcagcauccccaacgacaagcccuuccagaacgugaacagaaucaccuacggcgccugccccagauacgugaagcagagcacccugaagcuggccaccggcaugagaaacgugcccgagaagcagaccagaggcaucuucggcgccaucgccggcuucaucgagaacggcugggagggcaugguggacggcugguacggcuucagacaccagaacagcgagggcagaggccaggccgccgaccugaagagcacccaggccgccaucgaccagaucaacggcaagcugaacagacugaucggcaagaccaacgagaaguuccaccagaucgagaaggaguucagcgagguggagggcagaauccaggaccuggagaaguacguggaggacaccaagaucgaccuguggagcuacaacgccgagcugcugguggcccuggagaaccagcacaccaucgaccugaccgacagcgagaugaacaagcuguucgagaagaccaagaagcagcugagagagaacgccgaggacaugggcaacggcugcuucaagaucuaccacaagugcgacaacgccugcaucggcagcaucagaaacggcaccuacaaccacgacguguacagagacgaggcccugaacaacagauuccagaucaagggcguggagcugaagagcggcuacaaggacuggauccuguggaucagcuucgccaucagcugcuuccugcugugcguggcccugcugggcuucaucaugugggccugccagaagggcaacaucagaugcaacaucugcaucuga

SEQ ID NO: 170966 - RNA, 1701 nt, Artificial Sequence; identical to SEQ ID NO: 167042
  derived and/or modified CDS sequence (opt4) from hemagglutinin__InfluenzaA__AHC62218

SEQ ID NO: 170967 - RNA, 1701 nt, Artificial Sequence
  derived and/or modified CDS sequence (opt4) from hemagglutinin__InfluenzaA__AHC62242
augaagaccaucaucgcccugagcuacauccugugccugguguucgcccagaagauccccggcaacgacaacagcaccgccacccugugccugggccaccacgccgugcccaacggcaccaucgugaagaccaucaccaacgaccagaucgaggugaccaacgccaccgagcuggugcagaacagcagcaccggcgagaucugcgacagcccccaccagauccuggacggcgagaacugcacccugaucgacgcccugcugggcgacccccagugcgacggcuuccagaacaagaagugggaccuguucguggagagaagcaaggccuacagcaacugcuaccccuacgacgugcccgacuacgccagccugagaagccugguggccagcagcggcacccuggaguucaacaacgagagcuucaacuggaccggcgugacccagaacggcaccagcagcgccugcaucagaagaagcaacaacagcuucuucagcagacugaacuggcugacccaccugaacuucaaguaccccgcccugaacgugaccaugcccaacaacgagcaguucgacaagcuguacaucuggggcgugcaccaccccggcaccgacaaggaccagaucuuccuguacgcccaggccagcggcagaaucaccgugagcaccaagagaagccagcaggccgugauccccaacaucggcagcagacccagagugagaaacauccccagcagaaucagcaucuacuggaccaucgugaagcccggcgacauccugcugaucaacagcaccggcaaccugaucgcccccagaggcuacuucaagaucagaagcggcaagagcagcaucaugagaagcgacgcccccaucggcaagugcaacagcgagugcaucacccccaacggcagcauccccaacgacaagcccuuccagaacgugaacagaaucaccuacggcgccugccccagauacgugaagcagaacacccugaagcuggccaccggcaugagaaacgugcccgagaagcagaccagaggcaucuucggcgccaucgccggcuucaucgagaacggcugggagggcaugguggacggcugguacggcuucagacaccagaacagcgagggcagaggccaggccgccgaccugaagagcacccaggccgccaucgaccagaucaacggcaagcugaacagacugaucggcaagaccaacgagaaguuccaccagaucgagaaggaguucagcgagguggagggcagaauccaggaccuggagaaguacguggaggacaccaagaucgaccuguggagcuacaacgccgagcugcugaucgcccuggagaaccagcacaccaucgaccugaccgacagcgagaugaacaagcuguucgagaagaccaagaagcagcugagagagaacgccgaggacaugggcaacggcugcuucaagaucuaccacaagugcgacaacgccugcaucggcagcaucagaaacggcaccuacgaccacgacguguacagagacgaggcccugaacaacagauuccagaucaagggcguggagcugaagagcggcuacaaggacuggauccuguggaucagcuucgccaucagcugcuuccugcugugcguggcccugcugggcuucaucaugugggccugccagaagggcaacaucagaugcaacaucugcaucuga

SEQ ID NO: 170968 - RNA, 1701 nt, Artificial Sequence; identical to SEQ ID NO: 170677
  derived and/or modified CDS sequence (opt4) from hemagglutinin__InfluenzaA__AHC62254

SEQ ID NO: 170969 - RNA, 1701 nt, Artificial Sequence; identical to SEQ ID NO: 167042
  derived and/or modified CDS sequence (opt4) from hemagglutinin__InfluenzaA__AHC62266

SEQ ID NO: 170970 - RNA, 1701 nt, Artificial Sequence; identical to SEQ ID NO: 170841
  derived and/or modified CDS sequence (opt4) from hemagglutinin__InfluenzaA__AHC62278

SEQ ID NO: 170971 - RNA, 1701 nt, Artificial Sequence
  derived and/or modified CDS sequence (opt4) from hemagglutinin__InfluenzaA__AHC62290
augaagaccaucaucgcccugagcuacauccugugccugaucuucgcccagaagcugcccggcaacgacaacagcaccgccacccugugccugggccaccacgccgugcccaacggcaccaucgugaagaccaucaccaacgaccagaucgaggugaccaacgccaccgagcuggugcagagcagcagcaccggcgagaucugcaacagcccccaccagauccuggacggcgagaacugcacccugaucgacgcccugcugggcgacccccagugcgacggcuuccagaacaagaagugggaccuguucguggagagaagcaaggcccacagcaacugcuaccccuacgacgugcccgacuacgccagccugagaagccugguggccagcagcggcacccuggaguucaacaacgagagcuucaacuggaccggcgugacccagaacggcaccagcagcgccugcaucagaagaagcaacaacagcuucuucagcagacugaacuggcugacccaccugaacuucaaguaccccgcccugaacgugaccaugcccaacaacgagcaguucgacaagcuguacaucuggggcgugcaccaccccggcaccgacaaggaccagaucuuccuguacgcccaggccagcggcagaaucaccgugagcaccaagagaagccagcaggccgugauccccaacaucggcagcagacccagagugagaaacauccccagcagagugagcaucuacuggaccaucgugaagcccggcgacauccugcugaucaacagcaccggcaaccugaucgcccccagaggcuacuucaagaucagaagcggcaagagcagcaucaugagaagcgacgcccccaucggcaagugcaacagcgccugcaucacccccaacggcagcauccccaacgacaagcccuuccagaacgugaacagaaucaccuacggcgccugccccagauacgugaagcagaacacccugaagcuggccaccggcaugagaaacgugcccgagaagcagaccagaggcaucuucggcgccaucgccggcuucaucgagaacggcugggagggcaugguggacggcugguacggcuucagacaccagaacagcgagggcagaggccaggccgccgaccugaagagcacccaggccgccaucgaccagaucaacggcaagcugaacagacugaucggcaagaccaacgagaaguuccaccagaucgagaaggaguucagcgagguggagggcagaauccaggaccuggagaaguacguggaggacaccaagaucgaccuguggagcuacaacgccgagcugcugguggcccuggagaaccagcacaccaucgaccugaccgacagcgagaugaacaagcuguucgagaagaccaagaagcagcugagagagaacgccgaggacaugggcaacggcugcuucaagaucuaccacaagugcgacaacgccugcaucggcagcaucagaaacggcaccuacgaccacgacguguacagagacgaggcccugaacaacagauuccagaucaagggcguggagcugaagagcggcuacaaggacuggauccuguggaucagcuucgccaucagcugcuuccugcugugcguggcccugcugggcuucaucaugugggccugccagaagggcaacaucagaugcaacaucugcaucuga

SEQ ID NO: 170972 - RNA, 1701 nt, Artificial Sequence
  derived and/or modified CDS sequence (opt4) from hemagglutinin__InfluenzaA__AHC62302
augaagaccaucaucgcccugagcuacauccugugccugguguucgcccagaagcugcccggcaacgacaacagcaccgccacccugugccugggccaccacgccgugcccaacggcaccaucgugaagaccaucaccaacgaccagaucgaggugaccaacgccaccgagcuggugcagagcagcagcaccggcgagaucugcaacagcccccaccagauccuggacggcgagaacugcacccugaucgacgcccugcugggcgacccccagugcgacggcuuccagaacaagaagugggaccuguucguggagagaagcaaggcccacagcaacugcuaccccuacgacgugcccgacuacgccagccugagaagccugguggccagcagcggcacccuggaguucaacaacgagagcuucaacuggaccggcgugacccagaacggcaccagcagcgccugcaucagaagaagcaacaacagcuucuucagcagacugaacuggcugacccaccugaacuucaaguaccccgcccugaacgugaccaugcccaacaacgagcaguucgacaagcuguacaucuggggcgugcaccaccccggcaccgacaaggaccagaucuuccuguacgcccaggccgccggcagaaucaccgugagcaccaagagaagccagcaggccgugauccccaacaucggcagcagacccagagugagaaacauccccagcagagugagcaucuacuggaccaucgugaagcccggcgacauccugcugaucaacagcaccggcaaccugaucgcccccagaggcuacuucaagaucagaaacggcaagagcagcaucaugagaagcgacgcccccaucggcaagugcaacagcgccugcaucacccccaacggcagcauccccaacgacaagcccuuccagaacgugaacagaaucaccuacggcgccugccccagauacgugaagcagaacacccugaagcuggccaccggcaugagaaacgugcccgagaagcagaccagaggcaucuucggcgccaucgccggcuucaucgagaacggcugggagggcaugguggacggcugguacggcuucagacaccagaacagcgagggcagaggccaggccgccgaccugaagagcacccaggccgccaucgaccagaucaacggcaagcugaacagacugaucggcaagaccaacgagaaguuccaccagaucgagaaggaguucagcgagguggagggcagaauccaggaccuggagaaguacguggaggacaccaagaucgaccuguggagcuacaacgccgagcugcugguggcccuggagaaccagcacaccaucgaccugaccgacagcgagaugaacaagcuguucgagaagaccaagaagcagcugagagagaacgccgaggacaugggcaacggcugcuucaagaucuaccacaagugcgacaacgccugcaucggcagcaucagaaacggcaccuacgaccacgacguguacagagacgaggcccugaacaacagauuccagaucaagggcguggagcugaagagcggcuacaaggacuggauccuguggaucagcuucgccaucagcugcuuccugcugugcguggcccugcugggcuucaucaugugggccugccagaagggcaacaucagaugcaacaucugcaucuga

SEQ ID NO: 170973 - RNA, 1701 nt, Artificial Sequence
  derived and/or modified CDS sequence (opt4) from hemagglutinin__InfluenzaA__AHC62314
augaagaccaucaucgcccugagcuacauccugugccugguguucgcccagaagcugcccggcaacgacaacagcaccgccacccugugccugggccaccacgccgugcccaacggcaccaucgugaagaccaucaccaacgaccagaucgaggugaccaacgccaccgagcuggugcagaacagcagcaccggcgagaucugcgacagcccccaccagauccuggacggcgagaacugcacccugaucgacgcccugcugggcgacccccagugcgacggcuuccagaacaagaagugggaccuguucguggagagaagcaaggccuacagcaacugcuaccccuacgacgugcccgacuacgccagccugagaagccugguggccagcagcggcacccuggaguucaacaacgagagcuucaacuggaccggcgugacccagaacggcaccagcagcgccugcaucagaagaagcaacaacagcuucuucagcagacugaacuggcugacccaccugaacuucaaguaccccgcccugaacgugaccaugcccaacaacgagcaguucgacaagcuguacaucuggggcgugcaccaccccggcaccgacaaggaccagaucuuccuguacgcccaggccagcggcagaaucaccgugagcaccaagagaagccagcaggccgugauccccaacaucggcagcagacccagagugagaaacauccccagcagaaucagcaucuacuggaccaucgugaagcccggcgacauccugcugaucaacagcaccggcaaccugaucgcccccagaggcuacuucaagaucagaagcggcaagagcagcaucaugagaagcgacgcccccaucggcaagugcaacagcgagugcaucacccccaacggcagcauccccaacgacaagcccuuccagaacgugaacagaaucaccuacggcgccugccccagauacgugaagcagaacacccugaagcuggccaccggcaugagaaacgugcccgagaagcagaccagaggcaucuucggcgccaucgccggcuucaucgagaacggcugggagggcaugguggacggcugguacggcuucagacaccagaacagcgagggcagaggccaggccgccgaccugaagagcacccaggccgccaucgaccagaucaacggcaagcugaacagacugaucggcaagaccaacgagaaguuccaccagaucgagaaggaguucagcgagguggagggcagaauccaggaccuggagaaguacguggaggacaccaagaucgaccuguggagcuacaacgccgagcugcugguggcccuggagaaccagcacaccaucgaccugaccgacagcgagaugaacaagcuguucgagaagaccaagaagcagcugagagagaacgccgaggacaugggcaacggcugcuucaagaucuaccacaagugcgacaacgccugcaucggcagcaucagaaacggcaccuacgaccacgacguguacagagacgaggcccugaacaacagauuccagaucagaggcguggagcugaagagcggcuacaaggacuggauccuguggaucagcuucgccaucagcugcuuccugcugugcguggcccugcugggcuucaucaugugggccugccagaagggcaacaucagaugcaacaucugcaucuga

SEQ ID NO: 170974 - RNA, 1701 nt, Artificial Sequence; identical to SEQ ID NO: 170838
  derived and/or modified CDS sequence (opt4) from hemagglutinin__InfluenzaA__AHC62326

SEQ ID NO: 170975 - RNA, 1701 nt, Artificial Sequence; identical to SEQ ID NO: 167842
  derived and/or modified CDS sequence (opt4) from hemagglutinin__InfluenzaA__AHC62338

SEQ ID NO: 170976 - RNA, 1701 nt, Artificial Sequence; identical to SEQ ID NO: 166915
  derived and/or modified CDS sequence (opt4) from hemagglutinin__InfluenzaA__AHC62350

SEQ ID NO: 170977 - RNA, 1701 nt, Artificial Sequence; identical to SEQ ID NO: 167842
  derived and/or modified CDS sequence (opt4) from hemagglutinin__InfluenzaA__AHC62362

SEQ ID NO: 170978 - RNA, 1701 nt, Artificial Sequence; identical to SEQ ID NO: 167842
  derived and/or modified CDS sequence (opt4) from hemagglutinin__InfluenzaA__AHC62374

SEQ ID NO: 170979 - RNA, 1701 nt, Artificial Sequence; identical to SEQ ID NO: 170841
  derived and/or modified CDS sequence (opt4) from hemagglutinin__InfluenzaA__AHC62386

SEQ ID NO: 170980 - RNA, 1701 nt, Artificial Sequence; identical to SEQ ID NO: 166915
  derived and/or modified CDS sequence (opt4) from hemagglutinin__InfluenzaA__AHC62398

SEQ ID NO: 170981 - RNA, 1701 nt, Artificial Sequence
  derived and/or modified CDS sequence (opt4) from hemagglutinin__InfluenzaA__AHC62410
augaagaccaucaucgcccugagcuacauccugugccugguguucgcccagaagcugcccggcaacgacaacagcaccgccacccugugccugggccaccacgccgugcccaacggcaccaucgugaagaccaucaccaacgaccagaucgaggugaccaacgccaccgagcuggugcagagcagcagcaccggcgagaucugcaacagcccccaccagauccuggacggcgagaacugcacccugaucgacgcccugcugggcgacccccagugcgacggcuuccagaacaagaagugggaccuguucguggagagaagcaaggcccacagcaacugcuaccccuacgacgugcccgacuacgccagccugagaagccugguggccagcagcggcacccuggaguucaacaacgagagcuucaacuggaccggcgugacccagaacggcaccagcagcgccugcaucagaagaagcaacaacagcuucuucagcagacugaacuggcugacccaccugaacuucaaguaccccgcccugaacgugaccaugcccaacaacgagcaguucgacaagcuguacaucuggggcgugcaccaccccggcaccgacaaggaccagaucuuccuguacgcccaggccagcggcagaaucaccgugagcaccaagagaagccagcaggccgugauccccaacaucggcagcagacccagagugagaaacauccccagcagagugagcaucuacuggaccaucgugaagcccggcgacauccugcugaucaacagcaccggcaaccugaucgcccccagaggcuacuucaagaucagaagcggcaagagcagcaucaucagaagcgacgcccccaucggcaagugcaacagcgccugcaucacccccaacggcagcauccccaacgacaagcccuuccagaacgugaacagaaucaccuacggcgccugccccagauacgugaagcagaacacccugaagcuggccaccggcaugagaaacgugcccgagaagcagaccagaggcaucuucggcgccaucgccggcuucaucgagaacggcugggagggcaugguggacggcugguacggcuucagacaccagaacagcgagggcagaggccaggccgccgaccugaagagcacccaggccgccaucgaccagaucaacggcaagcugaacagacugaucggcaagaccaacgagaaguuccaccagaucgagaaggaguucagcgagguggagggcagaauccaggaccuggagaaguacguggaggacaccaagaucgaccuguggagcuacaacgccgagcugcugguggcccuggagaaccagcacaccaucgaccugaccgacagcgagaugaacaagcuguucgagaagaccaagaagcagcugagagagaacgccgaggacaugggcaacggcugcuucaagaucuaccacaagugcgacaacgccugcaucggcagcaucagaaacggcaccuacgaccacgacguguacagagacgaggcccugaacaacagauuccagaucaagggcguggagcugaagagcggcuacaaggacuggauccuguggaucagcuucgccaucagcugcuuccugcugugcguggcccugcugggcuucaucaugugggccugccagaagggcaacaucagaugcaacaucugcaucuga

SEQ ID NO: 170982 - RNA, 1701 nt, Artificial Sequence; identical to SEQ ID NO: 170784
  derived and/or modified CDS sequence (opt4) from hemagglutinin__InfluenzaA__AHC62422

SEQ ID NO: 170983 - RNA, 1701 nt, Artificial Sequence
  derived and/or modified CDS sequence (opt4) from hemagglutinin__InfluenzaA__AHC62434
augaagaccaucaucgcccugagcuacauccugugccugguguucgcccagaagcugcccggcaacgacaacagcaccgccacccugugccugggccaccacgccgugcccaacggcaccaucgugaagaccaucaccaacgaccagaucgaggugaccaacgccaccgagcuggugcagagcagcagcaccggcgagaucugcaacagcccccaccagauccuggacggcgagaacugcacccugaucgacgcccugcugggcgacccccagugcgacggcuuccagaacaagaagugggaccuguucguggagagaagcaaggcccacagcaacugcuaccccuacgacgugcccgacuacgccagccugagaagccugguggccagcagcggcacccuggaguucaacaacgagagcuucaacuggaccggcgugacccagaacggcaccagcagcgccugcaucagaagaagcaacaacagcuucuucagcagacugaacuggcugacccaccugaacuucaaguaccccgcccugaacgugaccaugcccaacaacgagcaguucgacaagcuguacaucuggggcgugcaccaccccggcaccgacaaggaccagaucuuccuguacgcccaggccgccggcagaaucaccgugagcaccaagagaagccagcaggccgugauccccaacaucggcagcagacccagagugagaaacauccccagcagagugagcaucuacuggaccaucgugaagcccggcgacauccugcugaucaacagcaccggcaaccugaucgcccccagaggcuacuucaagauccagagcggcaagagcagcaucaugagaagcgacgcccccaucggcaagugcaacagcgccugcaucacccccaacggcagcauccccaacgacaagcccuuccagaacgugaacagaaucaccuacggcgccugccccagauacgugaagcagaacacccugaagcuggccaccggcaugagaaacgugcccgagaagcagaccagaggcaucuucggcgccaucgccggcuucaucgagaacggcugggagggcaugguggacggcugguacggcuucagacaccagaacagcgagggcagaggccaggccgccgaccugaagagcacccaggccgccaucgaccagaucaacggcaagcugaacagacugaucggcaagaccaacgagaaguuccaccagaucgagaaggaguucagcgagguggagggcagaauccaggaccuggagaaguacguggaggacaccaagaucgaccuguggagcuacaacgccgagcugcugguggcccuggagaaccagcacaccaucgaccugaccgacagcgagaugaacaagcuguucgagaagaccaagaagcagcugagagagaacgccgaggacaugggcaacggcugcuucaagaucuaccacaagugcgacaacgccugcaucggcagcaucagaaacggcaccuacgaccacgacguguacagagacgaggcccugaacaacagauuccagaucaagggcguggagcugaagagcggcuacaaggacuggauccuguggaucagcuucgccaucagcugcuuccugcugugcguggcccugcugggcuucaucaugugggccugccagaagggcaacaucagaugcaacaucugcaucuga

SEQ ID NO: 170984 - RNA, 1701 nt, Artificial Sequence; identical to SEQ ID NO: 166915
  derived and/or modified CDS sequence (opt4) from hemagglutinin__InfluenzaA__AHC62446

SEQ ID NO: 170985 - RNA, 1701 nt, Artificial Sequence; identical to SEQ ID NO: 167042
  derived and/or modified CDS sequence (opt4) from hemagglutinin__InfluenzaA__AHC62458

SEQ ID NO: 170986 - RNA, 1701 nt, Artificial Sequence
  derived and/or modified CDS sequence (opt4) from hemagglutinin__InfluenzaA__AHC62470
augaagaccaucaucgcccugagcuacauccugugccugguguucgcccagaagcugcccggcaacgacaacagcaccgccacccugugccugggccaccacgccgugcccaacggcaccaucgugaagaccaucaccaacgaccagaucgaggugaccaacgccaccgagcuggugcagaacagcagcaccggcgagaucugcgacagcccccaccagauccuggacggcgagaacugcacccugaucgacgcccugcugggcgacccccagugcgacggcuuccagaacaagaagugggaccuguucguggagagaagcaaggccuacagcaacugcuaccccuacgacgugcccgacuacgccagccugagaagccugguggccagcagcggcacccuggaguucaacaacgagagcuucaacuggaccggcgugacccagaacggcaccagcagcgccugcaucagaagaagcaacaacagcuucuucagcagacugaacuggcugacccaccugaacuucaaguaccccgcccugaacgugaccaugcccaacaacgagcaguucgacaagcuguacaucuggggcgugcaccaccccggcaccgacaaggaccagaucuuccuguacgcccaggccagcggcagaaucaccgugagcaccaagagaagccagcaggccgugauccccaacaucggcagcagacccagagugagaaacauccccagcagaaucagcaucuacuggaccaucgugaagcccggcgacauccugcugaucaacagcaccggcaaccugaucgcccccagaggcuacuucaagaucagaagcggcaagagcagcaucaugagaagcgacgcccccaucggcaagugcaacagcgagugcaucacccccaacggcagcauccccaacggcaagcccuuccagaacgugaacagaaucaccuacggcgccugccccagauacgugaagcagaacacccugaagcuggccaccggcaugagaaacgugcccgagaagcagaccagaggcaucuucggcgccaucgccggcuucaucgagaacggcugggagggcaugguggacggcugguacggcuucagacaccagaacagcgagggcagaggccaggccgccgaccugaagagcacccaggccgccaucgaccagaucaacggcaagcugaacagacugaucggcaagaccaacgagaaguuccaccagaucgagaaggaguucagcgagguggagggcagaauccaggaccuggagaaguacguggaggacaccaagaucgaccuguggagcuacaacgccgagcugcugguggcccuggagaaccagcacaccaucgaccugaccgacagcgagaugaacaagcuguucgagaagaccaagaagcagcugagagagaacgccgaggacaugggcaacggcugcuucaagaucuaccacaagugcgacaacgccugcaucggcagcaucagaaacggcaccuacgaccacgacguguacagagacgaggcccugaacaacagauuccagaucaagggcguggagcugaagagcggcuacaaggacuggauccuguggaucagcuucgccaucagcugcuuccugcugugcguggcccugcugggcuucaucaugugggccugccagaagggcaacaucagaugcaacaucugcaucuga

SEQ ID NO: 170987 - RNA, 1701 nt, Artificial Sequence; identical to SEQ ID NO: 170739
  derived and/or modified CDS sequence (opt4) from hemagglutinin__InfluenzaA__AHC62482

SEQ ID NO: 170988 - RNA, 1701 nt, Artificial Sequence; identical to SEQ ID NO: 166915
  derived and/or modified CDS sequence (opt4) from hemagglutinin__InfluenzaA__AHC62506

SEQ ID NO: 170989 - RNA, 1701 nt, Artificial Sequence; identical to SEQ ID NO: 167042
  derived and/or modified CDS sequence (opt4) from hemagglutinin__InfluenzaA__AHC62518

SEQ ID NO: 170990 - RNA, 1701 nt, Artificial Sequence
  derived and/or modified CDS sequence (opt4) from hemagglutinin__InfluenzaA__AHC62530
augaagaccaucaucgcccugagcuacauccugugccugguguucgcccagaagauccccggcaacgacaacagcaccgccacccugugccugggccaccacgccgugcccaacggcaccaucgugaagaccaucaccaacgaccagaucgaggugaccaacgccaccgagcuggugcagagcagcagcaccggcgagaucugcaacagcccccaccagauccuggacggcgagaacugcacccugaucgacgcccugcugggcgacccccagugcgacggcuuccagaacaagaagugggaccuguucguggagagaagcaaggcccacagcaacugcuaccccuacgacgugcccgacuacgccagccugagaagccugguggccagcagcggcacccuggaguucaacaacgagagcuucaacuggaccggcgugacccagaacggcaccagcagcgccugcaucagaagaagcaacaacagcuucuucagcagacugaacuggcugacccaccugaacuucaaguaccccgcccugaacgugaccaugcccaacaacgagcaguucgacaagcuguacaucuggggcgugcaccaccccggcaccgacaaggaccagaucuuccuguacgcccaggccagcggcagaaucaccgugagcaccaagagaagccagcaggccgugauccccaacaucggcagcagacccagagugagaaacauccccagcagagugagcaucuacuggaccaucgugaagcccggcgacauccugcugaucaacagcaccggcaaccugaucgcccccagaggcuacuucaagaucagaagcggcaagagcagcaucaugagaagcgacgcccccaucggcaagugcaacagcgccugcaucacccccaacggcagcauccccaacgacaagcccuuccagaacgugaacagaaucaccuacggcgccugccccagauacgugaagcagaacacccugaagcuggccaccggcaugagaaacgugcccgagaagcagaccagaggcaucuucggcgccaucgccggcuucaucgagaacggcugggagggcaugguggacggcugguacggcuucagacaccagaacagcgagggcagaggccaggccgccgaccugaagagcacccaggccgccaucgaccagaucaacggcaagcugaacagacugaucggcaagaccaacgagaaguuccaccagaucgagaaggaguucagcgagguggagggcagaauccaggaccuggagaaguacguggaggacaccaagaucgaccuguggagcuacaacgccgagcugcugguggcccuggagaaccagcacaccaucgaccugaccgacagcgagaugaacaagcuguucgagaagaccaagaagcagcugagagagaacgccgaggacaugggcaacggcugcuucaagaucuaccacaagugcgacaacgccugcaucggcagcaucagaaacggcaccuacgaccacgacguguacagagacgaggcccugaacaacagauuccagaucaagggcguggagcugaagagcggcuacaaggacuggauccuguggaucagcuucgccaucagcugcuuccugcugugcguggcccugcugggcuucaucaugugggccugccagaagggcaacaucagaugcaacaucugcaucuga

SEQ ID NO: 170991 - RNA, 1701 nt, Artificial Sequence; identical to SEQ ID NO: 170711
  derived and/or modified CDS sequence (opt4) from hemagglutinin__InfluenzaA__AHC62542

SEQ ID NO: 170992 - RNA, 1701 nt, Artificial Sequence; identical to SEQ ID NO: 166915
  derived and/or modified CDS sequence (opt4) from hemagglutinin__InfluenzaA__AHC62554

SEQ ID NO: 170993 - RNA, 1701 nt, Artificial Sequence
  derived and/or modified CDS sequence (opt4) from hemagglutinin__InfluenzaA__AHC62566
augaagaccaucaucgcccugagcuacauccugugccugguguucgcccagaagcugcccggcaacgacaacagcaccgccacccugugccugggccaccacgccgugcccaacggcaccauggugaagaccaucaccaacgaccagaucgaggugaccaacgccaccgagcuggugcagaacagcagcaccggcgagaucugcgacagcccccaccagauccuggacggcgagaacugcacccugaucgacgcccugcugggcgacccccagugcgacggcuuccagaacaagaagugggaccuguucguggagagaagcaaggccuacagcaacugcuaccccuacgacgugcccgacuacgccagccugagaagccugguggccagcagcggcacccuggaguucaacaacgagagcuucaacuggaccggcgugacccagaacggcaccagcagcgccugcaucagaagaagcaacaacagcuucuucagcagacugaacuggcugacccaccugaacuucaaguaccccgcccugaacgugaccaugcccaacaacgagcaguucgacaagcuguacaucuggggcgugcaccaccccggcaccgacaaggaccagaucuuccuguacgcccaggccagcggcagaaucaccgugagcaccaagagaagccagcaggccgugauccccaacaucggcagcagacccagagugagaaacauccccagcagaaucagcaucuacuggaccaucgugaagcccggcgacauccugcugaucaacagcaccggcaaccugaucgcccccagaggcuacuucaagaucagaagcggcaagagcagcaucaugagaagcgacgcccccaucggcaagugcaacagcgagugcaucacccccaacggcagcauccccaacgacaagcccuuccagaacgugaacagaaucaccuacggcgccugccccagauacgugaagcagaacacccugaagcuggccaccggcaugagaaacgugcccgagaagcagaccagaggcaucuucggcgccaucgccggcuucaucgagaacggcugggagggcaugguggacggcugguacggcuucagacaccagaacagcgagggcagaggccaggccgccgaccugaagagcacccaggccgccaucgaccagaucaacggcaagcugaacagacugaucggcaagaccaacgagaaguuccaccagaucgagaaggaguucagcgagguggagggcagaauccaggaccuggagaaguacguggaggacaccaagaucgaccuguggagcuacaacgccgagcugcugguggcccuggagaaccagcacaccaucgaccugaccgacagcgagaugaacaagcuguucgagaagaccaagaagcagcugagagagaacgccgaggacaugggcaacggcugcuucaagaucuaccacaagugcgacaacgccugcaucggcagcaucagaaacggcaccuacgaccacgacguguacagagacgaggcccugaacaacagauuccagaucaagggcguggagcugaagagcggcuacaaggacuggauccuguggaucagcuucgccaucagcugcuuccugcugugcguggcccugcugggcuucaucaugugggccugccagaagggcaacaucagaugcaacaucugcaucuga

SEQ ID NO: 170994 - RNA, 1701 nt, Artificial Sequence; identical to SEQ ID NO: 166915
  derived and/or modified CDS sequence (opt4) from hemagglutinin__InfluenzaA__AHC62578

SEQ ID NO: 170995 - RNA, 1701 nt, Artificial Sequence; identical to SEQ ID NO: 166915
  derived and/or modified CDS sequence (opt4) from hemagglutinin__InfluenzaA__AHC62590

SEQ ID NO: 170996 - RNA, 1701 nt, Artificial Sequence; identical to SEQ ID NO: 167042
  derived and/or modified CDS sequence (opt4) from hemagglutinin__InfluenzaA__AHC62602

SEQ ID NO: 170997 - RNA, 1701 nt, Artificial Sequence
  derived and/or modified CDS sequence (opt4) from hemagglutinin__InfluenzaA__AHC62614
augaagaccaucaucgcccugagcuacauccugugccugguguucgcccagaagcugcccggcaacgacaacagcaccgccacccugugccugggccaccacgccgugcccaacggcaccaucgugaagaccaucaccaacgaccagaucgaggugaccaacgccaccgagcuggugcagagcagcagcaccggcgagaucugcaacagcccccaccagaucaucgacggcgagaacugcacccugaucgacgcccugcugggcgacccccagugcgacggcuuccagaacaagaagugggaccuguucguggagagaagcaaggcccacagcaacugcuaccccuacgacgugcccgacuacgccagccugagaagccugguggccagcagcggcacccuggaguucaacaacgagagcuucaacuggaccggcgugacccagaacggcaccagcagcgccugcaucagaggcagcaacaacagcuucuucagcagacugaacuggcugacccaccugaacuucaaguaccccgcccugaacgugaccaugcccaacaacgagcaguucgacaagcuguacaucuggggcgugcaccaccccggcaccgacaaggaccagaucuuccuguacgcccaggccagcggcagaaucaccgugagcaccaagagaagccagcaggccgugauccccaacaucggcagcagacccagagugagaaacauccccagcagagugagcaucuacuggaccaucgugaagcccggcgacauccugcugaucaacagcaccggcaaccugaucgcccccagaggcuacuucaagaucagaagcggcaagagcagcaucaugagaagcgacgcccccaucggcaagugcaacagcgccugcaucacccccaacggcagcauccccaacgacaagcccuuccagaacgugaacagaaucaccuacggcgccugccccagauacgugaagcagaacacccugaagcuggccaccggcaugagaaacgugcccgagaagcagaccagaggcaucuucggcgccaucgccggcuucaucgagaacggcugggagggcaugguggacggcugguacggcuucagacaccagaacagcgagggcagaggccaggccgccgaccugaagagcacccaggccgccaucgaccagaucaacggcaagcugaacagacugaucggcaagaccaacgagaaguuccaccagaucgagaaggaguucagcgagguggagggcagaauccaggaccuggagaaguacguggaggacaccaagaucgaccuguggagcuacaacgccgagcugcugguggcccuggagaaccagcacaccaucgaccugaccgacagcgagaugaacaagcuguucgagaagaccaagaagcagcugagagagaacgccgaggacaugggcaacggcugcuucaagaucuaccacaagugcgacaacgccugcaucggcagcaucagaaacggcaccuacgaccacgacguguacagagacgaggcccugaacaacagauuccagaucaagggcguggagcugaagagcggcuacaaggacuggauccuguggaucagcuucgccaucagcugcuuccugcugugcguggcccugcugggcuucaucaugugggccugccagaagggcaacaucagaugcaacaucugcaucuga

SEQ ID NO: 170998 - RNA, 1701 nt, Artificial Sequence; identical to SEQ ID NO: 170678
  derived and/or modified CDS sequence (opt4) from hemagglutinin__InfluenzaA__AHC62626

SEQ ID NO: 170999 - RNA, 1701 nt, Artificial Sequence; identical to SEQ ID NO: 167042
  derived and/or modified CDS sequence (opt4) from hemagglutinin__InfluenzaA__AHC62638

SEQ ID NO: 171000 - RNA, 1701 nt, Artificial Sequence; identical to SEQ ID NO: 170842
  derived and/or modified CDS sequence (opt4) from hemagglutinin__InfluenzaA__AHC62650

SEQ ID NO: 171001 - RNA, 1701 nt, Artificial Sequence
  derived and/or modified CDS sequence (opt4) from hemagglutinin__InfluenzaA__AHC62662
augaagaccaucaucgcccugagcuacauccugugccugguguucgcccagaagcugcccggcaacgacaacagcaccgccacccugugccugggccaccacgccgugcccaacggcaccaucgugaagaccaucaccaacgaccagaucgaggugaccaacgccaccgagcuggugcagagcagcagcaccggcgagaucugcaacagcccccaccagauccuggacggcgagaacugcacccugaucgacgcccugcugggcgacccccagugcgacggcuuccagaacaagaagugggaccuguucguggagagaagcaaggcccacagcagcugcuaccccuacgacgugcccgacuacgccagccugagaagccugguggccagcagcggcacccuggaguucaacaacgagagcuucaacuggaccggcgugacccagaacggcaccagcagcgccugcaucagaggcagcaacaacagcuucuucagcagacugaacuggcugacccaccugaacuucaaguaccccgcccugaacgugaccaugcccaacaacgagcaguucgacaagcuguacaucuggggcgugcaccaccccggcaccgacaaggaccagaucuuccuguacgcccaggccagcggcagaaucaccgugagcaccaagagaagccagcaggccgugauccccaacaucggcagcagacccagagugagaaacauccccagcagagugagcaucuacuggaccaucgugaagcccggcgacauccugcugaucaacagcaccggcaaccugaucgcccccagaggcuacuucaagaucagaagcggcaagagcagcaucaugagaagcgacgcccccaucggcaagugcaacagcgccugcaucacccccaacggcagcauccccaacgacaagcccuuccagaacgugaacagaaucaccuacggcgccugccccagauacgugaagcagaacacccugaagcuggccaccggcaugagaaacgugcccgagaagcagaccagaggcaucuucggcgccaucgccggcuucaucgagaacggcugggagggcaugguggacggcugguacggcuucagacaccagaacagcgagggcagaggccaggccgccgaccugaagagcacccaggccgccaucgaccagaucaacggcaagcugaacagacugaucggcaagaccaacgagaaguuccaccagaucgagaaggaguucagcgagguggagggcagaauccaggaccuggagaaguacguggaggacaccaagaucgaccuguggagcuacaacgccgagcugcugguggcccuggagaaccagcacaccaucgaccugaccgacagcgagaugaacaagcuguucgagaagaccaagaagcagcugagagagaacgccgaggacaugggcaacggcugcuucaagaucuaccacaagugcgacaacgccugcaucggcagcaucagaaacggcaccuacgaccacgacguguacagagacgaggcccugaacaacagauuccagaucaagggcguggagcugaagagcggcuacaaggacuggauccuguggaucagcuucgccaucagcugcuuccugcugugcguggcccugcugggcuucaucaugugggccugccagaagggcaacaucagaugcaacaucugcaucuga

SEQ ID NO: 171002 - RNA, 1701 nt, Artificial Sequence
  derived and/or modified CDS sequence (opt4) from hemagglutinin__InfluenzaA__AHC62674
augaagaccaucaucgcccugagcuacauccugugccugguguucgcccagaagcugcccggcaacgacaacagcaccgccacccugugccugggccaccacgccgugcccaacggcaccaucgugaagaccaucaccaacgaccagaucgaggugaccaacgccaccgagcuggugcagagcagcagcaccggcgagaucugcaacagcccccaccagauccuggacggcgagaacugcacccugaucgacgcccugcugggcgacccccagugcgacggcuuccagaacaagaagugggaccuguucguggagagaagcaaggcccacagcaacugcuaccccuacgacgugcccgacuacgccagccugagaagccugaucgccagcagcggcacccuggaguucaacaacgagagcuucaacuggaccggcgugacccagaacggcaccagcagcgccugcaucagaggcagcaacaacagcuucuucagcagacugaacuggcugacccaccugaacuucaaguaccccgcccugaacgugaccaugcccaacaacgagcaguucgacaagcuguacaucuggggcgugcaccaccccggcaccgacaaggaccagaucuuccuguacgcccaggccagcggcagaaucaccgugagcaccaagagaagccagcaggccgugauccccaacaucggcagcagacccagagugagaaacauccccagcagagugagcaucuacuggaccaucgugaagcccggcgacauccugcugaucaacagcaccggcaaccugaucgcccccagaggcuacuucaagaucagaagcggcaagagcagcaucaugagaagcgacgcccccaucggcaagugcaacagcgccugcaucacccccaacggcagcauccccaacgacaagcccuuccagaacgugaacagaaucaccuacggcgccugccccagauacgugaagcagaacacccugaagcuggccaccggcaugagaaacgugcccgagaagcagaccagaggcaucuucggcgccaucgccggcuucaucgagaacggcugggagggcaugguggacggcugguacggcuucagacaccagaacagcgagggcagaggccaggccgccgaccugaagagcacccaggccgccaucgaccagaucaacggcaagcugaacagacugaucggcaagaccaacgagaaguuccaccagaucgagaaggaguucagcgagguggagggcagaauccaggaccuggagaaguacguggaggacaccaagaucgaccuguggagcuacaacgccgagcugcugguggcccuggagaaccagcacaccaucgaccugaccgacagcgagaugaacaagcuguucgagaagaccaagaagcagcugagagagaacgccgaggacaugggcaacggcugcuucaagaucuaccacaagugcgacaacaccugcaucgagagcaucagaaacggcaccuacgaccacgacguguacagagacgaggcccugaacaacagauuccagaucaagggcguggagcugaagagcggcuacaaggacuggauccuguggaucagcuucgccaucagcugcuuccugcugugcguggcccugcugggcuucaucaugugggccugccagaagggcaacaucagaugcaacaucugcaucuga

SEQ ID NO: 171003 - RNA, 1701 nt, Artificial Sequence; identical to SEQ ID NO: 170120
  derived and/or modified CDS sequence (opt4) from hemagglutinin__InfluenzaA__AHE37972

SEQ ID NO: 171004 - RNA, 1701 nt, Artificial Sequence
  derived and/or modified CDS sequence (opt4) from hemagglutinin__InfluenzaA__AHE37973
augaaggccauccugguggugcugcuguacaccuucgccaccgccaacgccgacacccugugcaucggcuaccacgccaacaacagcaccgacaccguggacaccgugcuggagaagaacgugaccgugacccacagcgugaaccugcuggaggacaagcacaacggcaagcugugcaagcugagaggcguggccccccugcaccugggcaagugcaacaucgccggcuggauccugggcaaccccgagugcgagagccugagcaccgccagcagcuggagcuacaucguggagaccagcagcagcgacaacggcaccugcuaccccggcgacuucaucaacuacgaggagcugagagagcagcugagcagcgugagcagcuucgagagauucgagaucuuccccaagaccagcagcuggcccaaccacgacagcaacaagggcgugaccgccgccugcccccacgccggcaccaagagcuucuacaagaaccugaucuggcuggugaagaagggcaacagcuaccccaagcugagcaagagcuacaucaacgacaagggcaaggaggugcuggugcuguggggcauccaccaccccagcaccaccgccgaccagcagagccuguaccagaacgccgacgccuacguguucgugggcaccagcagauacagcaagaaguucaagcccgagaucgccaucagacccaaggugagagaccaggagggcagaaucaacuacuacuggacccugaucgagcccggcgacaagaucaccuucgaggccaccggcaaccugguggugcccagauacgccuucgccauggagagaaacgccggcagcggcaucaucaucagcgacacccccgugcacgacugcaacaccaccugccagacccccgagggcgccaucaacaccagccugcccuuccagaacauccaccccaucaccaucggcaagugccccaaguacgugaagagcaccaagcugagacuggccaccggccugagaaacgugcccagcauccagagcagaggccuguucggcgccaucgccggcuucaucgagggcggcuggaccggcaugguggacggcugguacggcuaccaccaccagaacgagcagggcagcggcuacgccgccgaccugaagagcacccagaacgccaucgacaagaucaccaacaaggugaacagcgugaucgagaagaugaacacccaguucaccgccgugggcaaggaguucaaccaccuggagaagagaaucgagaaccugaacaagaagguggacgacggcuuccuggacaucuggaccuacaacgccgagcugcuggugcugcuggagaacgagagaacccuggacuaccacgacagcaacgugaagaaccuguacgagaaggugagaaaccagcugaagaacaacgccaaggagaucggcaacggcugcuucgaguucuaccacaagugcgacaacaccugcauggagagcgugaagaacggcaccuacgacuaccccaaguacagcgaggaggccaagcugaacagagagaagaucgacggcgugaagcuggagagcaccagaaucuaccagauccuggccaucuacagcaccguggccagcagccuggugcugguggugagccugggcgccaucagcuucuggaugugcagcaacggcagccugcagugcagaaucugcaucuga

SEQ ID NO: 171005 - RNA, 1701 nt, Artificial Sequence
  derived and/or modified CDS sequence (opt4) from hemagglutinin__InfluenzaA__AHE37974
augaaggccauccugguggugcugcuguacaccuucgccaccgccaacgccgacacccugugcaucggcuaccacgccaacaacagcaccgacaccguggacaccgugcuggagaagaacgugaccgugacccacagcgugaaccugcuggaggacaagcacaacggcaagcugugcaagcugagaggcguggccccccugcaccugggcaagugcaacaucgccggcuggauccugggcaaccccgagugcgagagccugagcaccgccagcagcuggagcuacaucguggagaccagcagcagcgacaacggcaccugcuaccccggcgacuucaucaacuacgaggagcugagagagcagcugagcagcgugagcagcuucgagagauucgagauguuccccaagaccagcagcuggcccaaccacgacagcaacaagggcgugaccgccgccugcccccacgccggcgccaagagcuucuacaagaaccugaucuggcuggugaagaagggcaacagcuaccccaagcugagcaagagcuacaucaacgacaagggcaaggaggugcuggugcuguggggcauccaccaccccagcaccaccgccgaccagcagagccuguaccagaacgccgacgccuacguguucgugggcaccagcaaguacagcaagaaguucaagcccgagaucgccaucagacccaaggugagagaccaggagggcagaaugaacuacuacuggacccugaucgagcccggcgacaagaucaccuucgaggccaccggcaaccugguggugcccagauacgccuucgccauggagagaaacgccggcagcggcaucaucaucagcgacacccccgugcacgacugcaacaccaccugccagacccccgagggcgccaucaacaccagccugcccuuccagaacauccaccccaucaccaucggcaagugccccaaguacgugaagagcaccaagcugagacuggccaccggccugagaaacgugcccagcauccagagcagaggccuguucggcgccaucgccggcuucaucgagggcggcuggaccggcaugguggacggcugguacggcuaccaccaccagaacgagcagggcagcggcuacgccgccgaccugaagagcacccagaacgccaucgacaagaucaccaacaaggugaacagcgugaucgagaagaugaacacccaguucaccgccgugggcaaggaguucaaccaccuggagaagagaaucgagaaccugaacaagaagguggacgacggcuuccuggacaucuggaccuacaacgccgagcugcuggugcugcuggagaacgagagaacccuggacuaccacgacagcaacgugaagaaccuguacgagaaggugagaaaccagcugaagaacaacgccaaggagaucggcaacggcugcuucgaguucuaccacaagugcgacaacaccugcauggagagcgugaagaacggcaccuacgacuaccccaaguacagcgaggaggccaagcugaacagagagaagaucgacggcgugaagcuggagagcaccagaaucuaccagauccuggccaucuacagcaccguggccagcagccuggugcugguggugagccugggcgccaucagcuucuggaugugcagcaacggcagccugcagugcagaaucugcaucuga

SEQ ID NO: 171006 - RNA, 1701 nt, Artificial Sequence; identical to SEQ ID NO: 170100
  derived and/or modified CDS sequence (opt4) from hemagglutinin__InfluenzaA__AHE37975

SEQ ID NO: 171007 - RNA, 1701 nt, Artificial Sequence
  derived and/or modified CDS sequence (opt4) from hemagglutinin__InfluenzaA__AHE37976
augaaggccauccugguggugcugcuguacaccuucgccaccgccaacgccgacacccugugcaucggcuaccacgccaacaacagcaccgacaccguggacaccgugcuggagaagaacgugaccgugacccacagcgugaaccugcuggaggacaagcacaacggcaagcugugcaagcugagaggcguggccccccugcaccugggcaagugcaacaucgccggcuggauccugggcaaccccgagugcgagagccugagcgccgccagcagcuggagcuacaucguggagaccagcagcagcaacaacggcaccugcuaccccggcgacuucaucaacuacgaggagcugagagagcagcugagcagcgugagcagcuucgagagauucgagaucuuccccaagaccagcagcuggcccaaccacgacagcaacaagggcgugaccgccgccugcccccacgccggcgccaagagcuucuacaagaaccugaucuggcuggugaagaagggcaacagcuaccccaagcugagcaagagcuacaucaacgacaagggcaaggagauccuggugcuguggggcauccaccaccccagcaccaccaccgaccagcagagccuguaccagaacgccgacgccuacguguucgugggcaccagcagauacagcaagaaguucaagcccgagaucgccaucagacccaaggugagagaccaggagggcagaaugaacuacuacuggacccugaucgagcccggcgacaagaucaccuucgaggccaccggcaaccugguggugcccagauacgccuucgccauggagagaaacgccggcagcggcaucaucaucagcgacacccccgugcacgacugcaacaccaccugccagacccccgagggcgccaucaacaccagccugcccuuccagaacauccaccccaucaccaucggcaagugccccaaguacgugaagagcaccaagcugagacuggccaccggccugagaaacgugcccagcauccagagcagaggccuguucggcgccaucgccggcuucaucgagggcggcuggaccggcaugguggacggcugguacggcuaccaccaccagaacgagcagggcagcggcuacgccgccgaccugaagagcacccagaacgccaucgacaagaucaccaacaaggugaacagcgugaucgagaagaugaacacccaguucaccgccgugggcaaggaguucaaccaccuggagaagagaaucgagaaccugaacaagaagguggacgacggcuuccuggacaucuggaccuacaacgccgagcugcuggugcugcuggagaacgagagaacccuggacuaccacgacagcaacgugaagaaccuguacgagaaggugagaaaccagcugaagaacaacgccaaggagaucggcaacggcugcuucgaguucuaccacaagugcgacaacaccugcauggagagcgugaagaacggcaccuacgacuaccccaaguacagcgaggaggccaagcugaacagaggcaagaucgacggcgugaagcuggagagcaccagaaucuaccagauccuggccaucuacagcaccguggccagcagccuggugcugguggugagccugggcgccaucagcuucuggaugugcagcaacggcagccugcagugcagaaucugcaucuga

SEQ ID NO: 171008 - RNA, 1701 nt, Artificial Sequence; identical to SEQ ID NO: 170100
  derived and/or modified CDS sequence (opt4) from hemagglutinin__InfluenzaA__AHE37977

SEQ ID NO: 171009 - RNA, 1701 nt, Artificial Sequence; identical to SEQ ID NO: 170120
  derived and/or modified CDS sequence (opt4) from hemagglutinin__InfluenzaA__AHE37978

SEQ ID NO: 171010 - RNA, 1701 nt, Artificial Sequence; identical to SEQ ID NO: 170100
  derived and/or modified CDS sequence (opt4) from hemagglutinin__InfluenzaA__AHE37979

SEQ ID NO: 171011 - RNA, 1701 nt, Artificial Sequence
  derived and/or modified CDS sequence (opt4) from hemagglutinin__InfluenzaA__AHE37980
augaaggccauccugguggugcugcuguacaccuucgccaccgccaacgccgacacccugugcaucggcuaccacgccaacaacagcaccgacaccguggacaccgugcuggagaagaacgugaccgugacccacagcgugaaccugcuggaggacaagcacaacggcaagcugugcaagcugagaggcgugaccccccugcaccugggcaagugcaacaucgccggcuggauccugggcaaccccgagugcgagagccugagcaccgccagcagcuggagcuacaucguggagaccagcagcagcgacaacggcaccugcuaccccggcgacuucaucaacuacgaggagcugagagagcagcugagcagcgugagcagcuucgagagauucgagaucuuccccaagaccagcagcuggcccaaccacgacagcaacaagggcgugaccgccgccugcccccacgccggcgccaagagcuucuacaagaaccugaucuggcuggugaagaagggcaacagcuaccccaagcugagcaagagcuacaucaacgacaagggcaaggaggugcuggugcuguggggcauccaccaccccagcaccaccgccgaccagcagagccuguaccagaacgccgacgccuacguguucgugggcaccagcagauacagcaagaaguucaagcccgagaucgccaucagacccaaggugagagaccaggagggcagaaugaacuacuacuggacccugaucgagcccggcgacaagaucaccuucgaggccaccggcaaccugguggugcccagauacgccuucgccauggagagaaacgccggcagcggcaucaucaucagcgacacccccgugcacgacugcaacaccaccugccagacccccgagggcgccaucaacaccagccugcccuuccagaacauccaccccaucaccaucggcaagugccccaaguacgugaagagcaccaagcugagacuggccaccggccugagaaacgugcccagcauccagagcagaggccuguucggcgccaucgccggcuucaucgagggcggcuggaccggcaugguggacggcugguacggcuaccaccaccagaacgagcagggcagcggcuacgccgccgaccugaagagcacccagaacgccaucgacaagaucaccaacaaggugaacagcgugaucgagaagaugaacacccaguucaccgccgugggcaaggaguucaaccaccuggagaagagaaucgagaaccugaacaagaagguggacgacggcuuccuggacaucuggaccuacaacgccgagcugcuggugcugcuggagaacgagagaacccuggacuaccacgacagcaacgugaagaaccuguacgagaaggugagaaaccagcugaagaacaacgccaaggagaucggcaacggcugcuucgaguucuaccacaagugcgacaacaccugcauggagagcgugaagaacggcaccuacgacuaccccaaguacagcgaggaggccaagcugaacagagagaagaucgacggcgugaagcuggagagcaccagaaucuaccagauccuggccaucuacagcaccguggccagcagccuggugcugguggugagccugggcgccaucagcuucuggaugugcagcaacggcagccugcagugcagaaucugcaucuga

SEQ ID NO: 171012 - RNA, 1701 nt, Artificial Sequence
  derived and/or modified CDS sequence (opt4) from hemagglutinin__InfluenzaA__AHE37981
augaaggccauccugguggugcugcuguacaccuucgccaccgccaacgccgacacccugugcaucggcuaccacgccaacaacagcaccgacaccguggacaccgugcuggagaagaacgugaccgugacccacagcgugaaccugcuggaggacaagcacaacggcaagcugugcaagcugagaggcguggccccccugcaccugggcaagugcaacaucgccggcuggauccugggcaaccccgagugcgagagccugagcaccgccagcagcuggagcuacaucguggagaccagcagcagcgacaacggcaccugcuaccccggcgacuucaucaacuacgaggagcugagagagcagcugagcagcgugagcagcuucgagagauucgagauguuccccaagaccagcagcuggcccaaccacgacagcaacaagggcgugaccgccgccugcccccacgccggcgccaagagcuucuacaagaaccugaucuggcuggugaagaagggcaacagcuaccccaagcugagcaagagcuacaucaacgacaagggcaaggaggugcuggugcuguggggcauccaccaccccagcaccaccgccgaccagcagagccuguaccagaacgccgacgccuacguguucgugggcaccagcaaguacagcaagaaguucaagcccgagaucgccaucagacccaaggugagagaccaggagggcagaaugaacuacuacuggacccugaucgagcccggcgacaagaucaccuucgaggccaccggcaaccugguggugcccagauacgccuucgccauggagagaaacgccggcagcggcaucaucaucagcgacacccccgugcacgacugcaacaccaccugccagacccccgagggcgccaucaacaccagccugcccuuccagaacauccaccccaucaccaucggcaagugccccaaguacgugaagagcaccaagcugagacuggccaccggccugagaaacgugcccagcauccagagcagaggccuguucggcgccaucgccggcuucaucgagggcggcuggaccggcaugguggacggcugguacggcuaccaccaccagaacgagcagggcagcggcuacgccgccgaccugaagagcacccagaacgccaucgacaagaucaccaacaaggugaacagcgugaucgagaagaugaacauccaguucaccgccgugggcaaggaguucaaccaccuggagaagagaaucgagaaccugaacaagaagguggacgacggcuuccuggacaucuggaccuacaacgccgagcugcuggugcugcuggagaacgagagaacccuggacuaccacgacagcaacgugaagaaccuguacgagaaggugagaaaccagcugaagaacaacgccaaggagaucggcaacggcugcuucgaguucuaccacaagugcgacaacaccugcauggagagcgugaagaacggcaccuacgacuaccccaaguacagcgaggaggccaagcugaacagagagaagaucgacggcgugaagcuggagagcaccagaaucuaccagauccuggccaucuacagcaccguggccagcagccuggugcugguggugagccugggcgccaucagcuucuggaugugcagcaacggcagccugcagugcagaaucugcaucuga

SEQ ID NO: 171013 - RNA, 1701 nt, Artificial Sequence; identical to SEQ ID NO: 170100
  derived and/or modified CDS sequence (opt4) from hemagglutinin__InfluenzaA__AHE37982

SEQ ID NO: 171014 - RNA, 1701 nt, Artificial Sequence
  derived and/or modified CDS sequence (opt4) from hemagglutinin__InfluenzaA__AHE37983
augaaggccauccugguggugcugcuguacaccuucgccaccgccaacgccgacacccugugcaucggcuaccacgccaacaacagcaccgacaccguggacaccgugcuggagaagaacgugaccgugacccacagcgugaaccugcuggaggacaagcacaacggcaagcugugcaagcugagaggcguggccccccugcaccugggcaagugcaacaucgccggcuggauccugggcaaccccgagugcgagagccugagcaccgccagcagcuggagcuacaucguggagaccagcagcagcgacaacggcaccugcuaccccggcgacuucaucaacuacgaggagcugagagagcagcugagcagcgugagcagcuucgagagauucgagaucuuccccaagaccagcagcuggcccaaccacgacagcaacaagggcgugaccgccgccugcccccacgccggcgccaagagcuucuacaagaaccugaucuggcuggugaagaagggcaacagcuaccccaagcugagcgagagcuacaucaacgacaagggcaaggaggugcuggugcuguggggcauccaccaccccagcaccaccgccgaccagcagagccuguaccagaacgccgacgccuacguguucgugggcaccagcagauacagcaagaaguucaagcccgagaucgccaucagacccaaggugagagaccaggagggcagaaugaacuacuacuggacccugaucgagcccggcgacaagaucaccuucgaggccaccggcaaccugguggugcccagauacgccuucgccauggagagaaacgccggcagcggcaucaucaucagcgacacccccgugcacgacugcaacaccaccugccagacccccgagggcgccaucaacaccagccugcccuuccagaacauccaccccaucaccaucggcaagugccccaaguacgugaagagcaccaagcugagacuggccaccggccugagaaacgugcccagcauccagagcagaggccuguucggcgccaucgccggcuucaucgagggcggcuggaccggcaugguggacggcugguacggcuaccaccaccagaacgagcagggcagcggcuacgccgccgaccugaagagcacccagaacgccaucgacaagaucaccaacaaggugaacagcgugaucgagaagaugaacacccaguucaccgccgugggcaaggaguucaaccaccuggagaagagaaucgagaaccugaacaagaagguggacgacggcuuccuggacaucuggaccuacaacgccgagcugcuggugcugcuggagaacgagagaacccuggacuaccacgacagcaacgugaagaaccuguacgagaaggugagaaaccagcugaagaacaacgccaaggagaucggcaacggcugcuucgaguucuaccacaagugcgacaacaccugcauggagagcgugaagaacggcaccuacgacuaccccaaguacagcgaggaggccaagcugaacagagagaagaucgacggcgugaagcuggagagcaccagaaucuaccagauccuggccaucuacagcaccguggccagcagccuggugcugguggugagccugggcgccaucagcuucuggaugugcagcaacggcagccugcagugcagaaucugcaucuga

SEQ ID NO: 171015 - RNA, 1701 nt, Artificial Sequence
  derived and/or modified CDS sequence (opt4) from hemagglutinin__InfluenzaA__AHE37984
auggaggccauccugguggugcugcuguacaccuucgccaccgccaacgccgacacccugugcaucggcuaccacgccaacaacagcaccgacaccguggacaccgugcuggagaagaacgugaccgugacccacagcgugaaccugcuggaggacaagcacaacggcaagcugugcaagcugagaggcguggccccccugcaccugggcaagugcaacaucgccggcuggauccugggcaaccccgagugcgagagccugagcaccgccagcagcuggagcuacaucguggagaccagcagcagcgacaacggcaccugcuaccccggcgacuucaucaacuacgaggagcugagagagcagcugagcagcgugagcagcuucgagagauucgagaucuuccccaagaccagcagcuggcccaaccacgacagcaacaagggcgugaccgccgccugcccccacgccggcgccaagagcuucuacaagaaccugaucuggcuggugaagaagggcaacagcuaccccaagcugagcaagagcuacaucaacgacaagggcaaggaggugcuggugcuguggggcauccaccaccccagcaccaccgccgaccagcagagccuguaccagaacgccgacgccuacguguucgugggcaccagcagauacagcaagaaguucaagcccgagaucgccaucagacccaaggugagagaccaggagggcagaaugaacuacuacuggacccugaucgagcccggcgacaagaucaccuucgaggccaccggcaaccugguggugcccagauacgccuucgccauggagagaaacgccggcagcggcaucaucaucagcgacacccccgugcacgacugcaacaccaccugccagacccccgagggcgccaucaacaccagccugcccuuccagaacauccaccccaucaccaucggcaagugccccaaguacgugaagagcaccaagcugagacuggccaccggccugagaaacgugcccagcauccagagcagaggccuguucggcgccaucgccggcuucaucgagggcggcuggaccggcaugguggacggcugguacggcuaccaccaccagaacgagcagggcagcggcuacgccgccgaccugaagagcacccagaacgccaucgacaagaucaccaacaaggugaacagcgugaucgagaagaugaacacccaguucaccgccgugggcaaggaguucaaccaccuggagaagagaaucgagaaccugaacaagaagguggacgacggcuuccuggacaucuggaccuacaacgccgagcugcuggugcugcuggagaacgagagaacccuggacuaccacgacagcaacgugaagaaccuguacgagaaggugagaaaccagcugaagaacaacgccaaggagaucggcaacggcugcuucgaguucuaccacaagugcgacaacaccugcauggagagcgugaagaacggcaccuacgacuaccccaaguacagcgaggaggccaagcugaacagagagaagaucgacggcgugaagcuggagagcaccagaaucuaccagauccuggccaucuacagcaccguggccagcagccuggugcugguggugagccugggcgccaucagcuucuggaugugcagcaacggcagccugcagugcagaaucugcaucuga

SEQ ID NO: 171016 - RNA, 1701 nt, Artificial Sequence
  derived and/or modified CDS sequence (opt4) from hemagglutinin__InfluenzaA__AHE37985
augaagaccaucaucgcccugagcuacauccugugccugguguucgcccaggagcugcccggcaacgacgacagcaccgccacccugugccugggccaccacgccgugcccaacggcaccaucgugaagaccaucaccaacgaccagaucgaggugaccaacgccaccgagcuggugcagagcagcagcaccggcgagaucugcaacagcccccaccagauccuggacggcgagaacugcacccugaucgacgcccugcugggcgacccccagugcgacggcuuccagaacaagaagugggaccuguucguggagagaagcaaggcccacagcaacugcuaccccuacgacgugcccgacuacgccagccugagaagccugguggccagcagcggcacccuggaguucaacaacgagagcuucaacuggaccggcgugacccagaacggcaccagcagcgccugcaucagaagaagcaacaacagcuucuucagcagacugaacuggcugacccaccugaacuucaaguaccccgcccugaacgugaccaugcccaacaacgagcaguucgacaagcuguacaucuggggcgugcaccaccccggcaccgacaaggaccagaucuuccuguacgcccaggccagcggcagaaucaccgugagcaccaagagaagccagcaggccgugauccccaacaucggcagcagacccagagugagaaacauccccagcagagugagcaucuacuggaccaucgugaagcccggcgacauccugcugaucaacagcaccggcaaccugaucgcccccagaggcuacuucaagaucagaagcggcaagagcagcaucaugaagagcgacgcccccaucggcaagugcaacagcgccugcaucacccccaacggcagcauccccaacgacaagcccuuccagaacgugaacagaaucaccuacggcgccugccccagauacgugaagcagaacacccugaagcuggccaccggcaugagaaacgugcccgagaagcagaccagaggcaucuucggcgccaucgccggcuucaucgagaacggcugggagggcaugguggacggcugguacggcuucagacaccagaacagcgagggcagaggccaggccgccgaccugaagagcacccaggccgccaucgaccagaucaacggcaagcugaacagacugaucggcaagaccaacgagaaguuccaccagaucgagaaggaguucagcgagguggagggcagaauccaggaccuggagaaguacguggaggacaccaagaucgaccuguggagcuacaacgccgagcugcugguggcccuggagaaccagcacaccaucgaccugaccgacagcgagaugaacaagcuguucgagaagaccaagaagcagcugagagagaacgccgaggacaugggcaacggcugcuucaagaucuaccacaagugcgacaacgccugcaucggcagcaucagaaacggcaccuacgaccacgacguguacagagacgaggcccugaacaacagauuccagaucaagggcguggagcugaagagcggcuacaaggacuggauccuguggaucagcuucgccaucagcugcuuccugcugugcguggcccugcugggcuucaucaugugggccugccagaagggcaacaucagaugcaacaucugcaucuga

SEQ ID NO: 171017 - RNA, 1701 nt, Artificial Sequence; identical to SEQ ID NO: 169982
  derived and/or modified CDS sequence (opt4) from hemagglutinin__InfluenzaA__AHE37986

SEQ ID NO: 171018 - RNA, 1701 nt, Artificial Sequence; identical to SEQ ID NO: 169918
  derived and/or modified CDS sequence (opt4) from hemagglutinin__InfluenzaA__AHE37987

SEQ ID NO: 171019 - RNA, 1701 nt, Artificial Sequence
  derived and/or modified CDS sequence (opt4) from hemagglutinin__InfluenzaA__AHE37988
augaagaccaucaucgcccugagcuacauccugugccugguguucgcccagaagcugcccggcaacgacaacagcaccgccacccugugccugggccaccacgccgugcccaacggcaccaucgugaagaccaucaccaacgacagaaucgaggugaccaacgccaccgagcuggugcagaacagcagcaucggcgagaucugcgacagcccccaccagauccuggacggcgagaacugcacccugaucgacgcccugcugggcgacccccagugcgacggcuuccagaacaagaagugggaccuguucguggagagaagcaaggccuacagcaacugcuaccccuacgacgugcccgacuacgccagccugagaagccugguggccagcagcggcacccuggaguucaacaacgagagcuucaacuggaccggcgugacccagaacggcaccagcagcgccugcaucagaagaagcaacagcagcuucuucagcagacugaacuggcugacccaccugaacuucaaguaccccgcccugaacgugaccaugcccaacaacgagcaguucgacaagcuguacaucuggggcgugcaccaccccggcaccgacaaggaccagaucuuccuguacgcccagagcagcggcagaaucaccgugagcaccaagagaagccagcaggccgugauccccaacaucggcagcagacccagaaucagaaacauccccagcagaaucagcaucuacuggaccaucgugaagcccggcgacauccugcugaucaacagcaccggcaaccugaucgcccccagaggcuacuucaagaucagaagcggcaagagcagcaucaugagaagcgacgcccccaucggcaagugcaagagcgagugcaucacccccaacggcagcauccccaacgacaagcccuuccagaacgugaacagaaucaccuacggcgccugccccagauacgugaagcagagcacccugaagcuggccaccggcaugagaaacgugcccgagaagcagaccagaggcaucuucggcgccaucgccggcuucaucgagaacggcugggagggcaugauggacggcugguacggcuucagacaccagaacagcgagggcagaggccaggccgccgaccugaagagcacccaggccgccaucgaccagaucaacggcaagcugaacagacugaucggcaagaccaacgagaaguuccaccagaucgagaaggaguucagcgagguggagggcagaauccagaaccuggagaaguacguggaggacaccaagaucgaccuguggagcuacaacgccgagcugcugguggcccuggagaaccagcacaccaucgaccugaccgacagcgagaugaacaagcuguucgagaagaccaagaagcagcugagagagaacgccgaggacaugggcaacggcugcuucaagaucuaccacaagugcgacaacgccugcaucggcagcaucagaaacggcaccuacgaccacaacguguacagagacgaggcccugaacaacagauuccagaucaagggcguggagcugaagagcggcuacaaggacuggauccuguggaucagcuucgccaucagcugcuuccugcugugcguggcccugcugggcuucaucaugugggccugccagaagggcaacaucagaugcaacaucugcaucuga

SEQ ID NO: 171020 - RNA, 1701 nt, Artificial Sequence; identical to SEQ ID NO: 170054
  derived and/or modified CDS sequence (opt4) from hemagglutinin__InfluenzaA__AHE37989

SEQ ID NO: 171021 - RNA, 1701 nt, Artificial Sequence; identical to SEQ ID NO: 169918
  derived and/or modified CDS sequence (opt4) from hemagglutinin__InfluenzaA__AHE37990

SEQ ID NO: 171022 - RNA, 1701 nt, Artificial Sequence; identical to SEQ ID NO: 169918
  derived and/or modified CDS sequence (opt4) from hemagglutinin__InfluenzaA__AHE37991

SEQ ID NO: 171023 - RNA, 1701 nt, Artificial Sequence
  derived and/or modified CDS sequence (opt4) from hemagglutinin__InfluenzaA__AHE37992
augaagaccaucaucgcccugagcuacauccugugccugguguucgcccaggagcugcccggcaacgacgacagcaccgccacccugugccugggccaccacgccgugcccaacggcaccaucgugaagaccaucaccaacgaccagaucgaggugaccaacgccaccgagcuggugcagagcagcagcaccggcgagaucugcaacagcccccaccagauccuggacggcgagaacugcacccugaucgacgcccugcugggcgacccccagugcgacggcuuccagaacaagaagugggaccuguucguggagagaagcaaggcccacagcaacugcuaccccuacgacgugcccgacuacgccagccugagaagccugguggccagcagcggcacccuggaguucgacaacgagagcuucaacuggaccggcgugacccagaacggcaccagcagcgccugcaucagaagaagcaacaacagcuucuucagcagacugaacuggcugacccaccugaacuucaaguaccccgcccugaacgugaccaugcccaacaacgagcaguucgacaagcuguacaucuggggcgugcaccaccccggcaccgacaaggaccagaucuuccuguacgcccaggccagcggcagaaucaccgugagcaccaagagaagccagcaggccgugauccccaacaucggcagcagacccagagugagaaacauccccagcagagugagcaucuacuggaccaucgugaagcccggcgacauccugcugaucaacagcaccggcaaccugaucgcccccagaggcuacuucaagaucagaagcggcaagagcagcaucaugagaagcgacgcccccaucggcaagugcaacagcgccugcaucacccccaacggcagcauccccaacgacaagcccuuccagaacgugaacagaaucaccuacggcgccugccccagauacgugaagcagaacacccugaagcuggccaccggcaugagaaacgugcccgagaagcagaccagaggcaucuucggcgccaucgccggcuucaucgagaacggcugggagggcaugguggacggcugguacggcuucagacaccagaacagcgagggcagaggccaggccgccgaccugaagagcacccaggccgccaucgaccagaucaacggcaagcugaacagacugaucggcaagaccaacgagaaguuccaccagaucgagaaggaguucagcgagguggagggcagaauccaggaccuggagaaguacguggaggacaccaagaucgaccuguggagcuacaacgccgagcugcugguggcccuggagaaccagcacaccaucgaccugaccgacagcgagaugaacaagcuguucgagaagaccaagaagcagcugagagagaacgccgaggacaugggcaacggcugcuucaagaucuaccacaagugcgacaacgccugcaucggcagcaucagaaacggcaccuacgaccacgacguguacagagacgaggcccugaacaacagauuccagaucaagggcguggagcugaagagcggcuacaaggacuggauccuguggaucagcuucgccaucagcugcuuccugcugugcguggcccugcugggcuucaucaugugggccugccagaagggcaacaucagaugcaacaucugcaucuga

SEQ ID NO: 171024 - RNA, 1701 nt, Artificial Sequence; identical to SEQ ID NO: 170100
  derived and/or modified CDS sequence (opt4) from hemagglutinin__InfluenzaA__AHE38023

SEQ ID NO: 171025 - RNA, 1701 nt, Artificial Sequence
  derived and/or modified CDS sequence (opt4) from hemagglutinin__InfluenzaA__AHE38024
augaaggccauccugguggugcugcuguacaccuucgccaccgccaacgccgacacccugugcaucggcuaccacgccaacaacagcaccgacaccguggacaccgugcuggagaagaacgugaccgugacccacagcgugaaccugcuggaggacaagcacaacggcaagcugugcaagcugagaggcguggccccccugcaccugggcaagugcaacaucgccggcuggauccugggcaaccccgagugcgagagccugagcaccgccagcagcuggagcuacaucguggagaccagcagcagcgacaacggcaccugcuaccccggcgacuucaucaacuacgaggagcugagagagcagcugagcagcgugagcagcuucgagagauucgagaucuuccccaagaccagcagcuggcccaaccacgacagcaacaagggcgugaccgccgccugcccccacgccggcgccaagagcuucuacaagaaccugaucuggcuggugaagaagggcaacagcuaccccaagcugagccagagcuacaucaacgacaagggcaaggaggugcuggugcuguggggcauccaccaccccagcaccaccgccgaccagcagagccuguaccagaacgccgacgccuacguguucgugggcaccagcagauacagcaagaaguucaagcccgagaucgccaccagacccaaggugagagaccaggagggcagaaugaacuacuacuggacccugguggagcccggcgacaagaucaccuucgaggccaccggcaaccugguggugcccagauacgccuucaccauggagagaaacgccggcagcggcaucaucaucagcgacacccccgugcacgacugcaacaccaccugccagacccccgagggcgccaucaacaccagccugcccuuccagaacauccaccccaucaccaucggcaagugccccaaguacgugaagagcaccaagcugagacuggccaccggccugagaaacgugcccagcauccagagcagaggccuguucggcgccaucgccggcuucaucgagggcggcuggaccggcaugguggacggcugguacggcuaccaccaccagaacgagcagggcagcggcuacgccgccgaccugaagagcacccagaacgccaucgacaagaucaccaacaaggugaacagcgugaucgagaagaugaacacccaguucaccgccgugggcaaggaguucaaccaccuggagaagagaaucgagaaccugaacaagaagguggacgacggcuuccuggacaucuggaccuacaacgccgagcugcuggugcugcuggagaacgagagaacccuggacuaccacgacagcaacgugaagaaccuguacgagaaggugagaaaccagcugaagaacaacgccaaggagaucggcaacggcugcuucgaguucuaccacaagugcgacaacaccugcauggagagcgugaagaacggcaccuacgacuaccccaaguacagcgaggaggccaagcugaacagagagaagaucgacggcgugaagcuggagagcaccagaaucuaccagauccuggccaucuacagcaccguggccagcagccuggugcugguggugagccugggcgccaucagcuucuggaugugcagcaacggcagccugcagugcagaaucugcaucuga

SEQ ID NO: 171026 - RNA, 1701 nt, Artificial Sequence
  derived and/or modified CDS sequence (opt4) from hemagglutinin__InfluenzaA__AHE38026
augaaggccauccugguggugcugcuguacaccuucgccaccgccaacgccgacacccugugcaucggcuaccacgccaacaacagcaccgacaccguggacaccgugcuggagaagaacgugaccgugacccacagcgugaaccugcuggaggacaagcacaacggcaagcugugcaagcugagaggcguggccccccugcaccugggcaagugcaacaucgccggcuggauccugggcaaccccgagugcgagagccugagcaccgccagcagcuggagcuacaucguggagaccagcagcagcgacaacggcaccugcuaccccggcgacuucaucaacuacgaggagcugagagagcagcugagcagcgugagcagcuucgagagauucgagaucuuccccaagaccagcagcuggcccaaccacgacagcaacaagggcgugaccgccgccugcccccacgccggcgccaagagcuucuacaagaaccugaucuggcuggugaagaagggcaacagcuaccccaagcugagccagagcuacaucaacgagaagggcaaggaggugcuggugcuguggggcauccaccaccccagcaccaccgccgaccagcagagccuguaccagaacgccgacgccuacguguucgugggcaccagcagauacagcaagaaguucaagcccgagaucgccaucagacccaaggugagagaccaggagggcagaaugaacuacuacuggacccugguggagcccggcgacaagaucaccuucgaggccaccggcaaccugguggugcccagauacgccuucaccauggagagaaacgccggcagcggcaucaucaucagcgacacccccgugcacgacugcaacaccaccugccagacccccgagggcgccaucaacaccagccugcccuuccagaacauccaccccaucaccaucggcaagugccccaaguacgugaagagcaccaagcugagacuggccaccggccugagaaacgugcccagcauccagagcagaggccuguucggcgccaucgccggcuucaucgagggcggcuggaccggcaugguggacggcugguacggcuaccaccaccagaacgagcagggcagcggcuacgccgccgaccugaagagcacccagaacgccaucgacaagaucaccaacaaggugaacagcgugaucgagaagaugaacacccaguucaccgccgugggcaaggaguucaaccaccuggagaagagaaucgagaaccugaacaagaagguggacgacggcuuccuggacaucuggaccuacaacgccgagcugcuggugcugcuggagaacgagagaacccuggacuaccacgacagcaacgugaagaaccuguacgagaaggugagaaaccagcugaagaacaacgccaaggagaucggcaacggcugcuucgaguucuaccacaagugcgacaacaccugcauggagagcgugaagaacggcaccuacgacuaccccaaguacagcgaggaggccaagcugaacagagagaagaucgacggcgugaagcuggagagcaccagaaucuaccagauccuggccaucuacagcaccguggccagcagccuggugcugguggugagccugggcgccaucagcuucuggaugugcagcaacggcagccugcagugcagaaucugcaucuga

SEQ ID NO: 171027 - RNA, 1701 nt, Artificial Sequence; identical to SEQ ID NO: 169943
  derived and/or modified CDS sequence (opt4) from hemagglutinin__InfluenzaA__AHE38027

SEQ ID NO: 171028 - RNA, 1683 nt, Artificial Sequence
  derived and/or modified CDS sequence (opt4) from hemagglutinin__InfluenzaA__AHF20558
augaacacccagauccugguguucgcccugaucgccaucauccccaccaacgccgacaagaucugccugggccaccacgccgugagcaacggcaccaaggugaacacccugaccgagagaggcguggagguggugaacgccaccgagaccguggagagaaccaacauccccagaaucugcagcaagggcaagagaaccguggaccugggccagugcggccugcugggcaccaucaccggccccccccagugcgaccaguuccuggaguucagcgccgaccugaucaucgagagaagagagggcagcgacgugugcuaccccggcaaguucgugaacgaggaggcccugagacagauccugagagagagcggcggcaucgacaaggaggccaugggcuucaccuacagcggcaucagaaccaacggcgccaccagcgccugcagaagaagcggcagcagcuucuacgccgagaugaaguggcugcugagcaacaccgacaacgccgccuucccccagaugaccaagagcuacaagaacaccagaaagagccccgcccugaucguguggggcauccaccacagcgugagcaccgccgagcagaccaagcuguacggcagcggcaacaagcuggugaccgugggcagcagcaacuaccagcagagcuucgugcccagccccggcgccagaccccaggugaacggccugagcggcagaaucgacuuccacuggcugaugcugaaccccaacgacaccgugaccuucagcuucaacggcgccuucaucgcccccgacagagccagcuuccugagaggcaagagcaugggcauccagagcggcgugcagguggacgccaacugcgagggcgacugcuaccacagcggcggcaccaucaucagcaaccugcccuuccagaacaucgacagcagagccgugggcaagugccccagauacgugaagcagagaagccugcugcuggccaccggcaugaagaacgugcccgagauccccaagggcagaggccuguucggcgccaucgccggcuucaucgagaacggcugggagggccugaucgacggcugguacggcuucagacaccagaacgcccagggcgagggcaccgccgccgacuacaagagcacccagagcgccaucgaccagaucaccggcaagcugaacagacugaucgagaagaccaaccagcaguucgagcugaucgacaacgaguucaacgagguggagaagcagaucggcaacgugaucaacuggaccagagacagcaucaccgagguguggagcuacaacgccgagcugcugguggccauggagaaccagcacaccaucgaccuggccgacagcgagauggacaagcuguacgagagagugaagagacagcugagagagaacgccgaggaggacggcaccggcugcuucgagaucuuccacaagugcgacgacgacugcauggccagcaucagaaacaacaccuacgaccacagcaaguacagagaggaggccaugcagaacagaauccagaucgaccccgugaagcugagcagcggcuacaaggacgugauccugugguucagcuucggcgccagcugcuucauccugcuggccaucgugaugggccugguguucaucugcgugcagaacggcaacaugagaugcaccaucggcaucuga

SEQ ID NO: 171029 - RNA, 1683 nt, Artificial Sequence
  derived and/or modified CDS sequence (opt4) from hemagglutinin__InfluenzaA__AHF20568
augaacacccagauccugguguucgcccugaucgccaucauccccaccaacgccgacaagaucugccugggccaccacgccgugagcaacggcaccaaggugaacacccugaccgagagaggcguggagguggugaacgccaccgagaccguggagagaaccaacauccccagaaucugcagcaagggcaagagaaccguggaccugggccagugcggccugcugggcaccaucaccggccccccccagugcgaccaguuccuggaguucagcgccgaccugaucaucgagagaagagagggcagcgacgugugcuaccccggcaaguucgugaacgaggaggcccugagacagauccugagagagagcggcggcaucgacaaggaggccaugggcuucaccuacagcggcaucagaaccaacggcgccaccagcgccugcagaagaagcggcagcagcuucuacgccgagaugaaguggcugcugagcaacaccgacaacgccgccuucccccagaugaccaagagcuacaagaacaccagaaagagccccgcccugaucguguggggcauccaccacagcgugagcaccgccgagcagaccaagcuguacggcagcggcaacaagcuggugaccgugggcagcagcaacuaccagcagagcuucgugcccagccccggcgccagaccccaggugaacggccugagcggcagaaucgacuuccacuggcugaugcugaaccccaacgacaccgugaccuucagcuucaacggcgccuucaucgcccccgacagagccagcuuccugagaggcaagagcaugggcauccagagcggcgugcagguggacgccaacugcgagggcgacugcuaccacagcggcggcaccaucaugagcaaccugcccuuccagaacaucgacagcagagccgugggcaagugccccagauacgugaagcagagaagccugcugcuggccaccggcaugaagaacgugcccgagauccccaagggcagaggccuguucggcgccaucgccggcuucaucgagaacggcugggagggccugaucgacggcugguacggcuucagacaccagaacgcccagggcgagggcaccgccgccgacuacaagagcacccagagcgccaucgaccagaucaccggcaagcugaacagacugaucgagaagaccaaccagcaguucgagcugaucgacaacgaguucaacgagguggagaagcagaucggcaacgugaucaacuggaccagagacagcaucaccgagguguggagcuacaacgccgagcugcugguggccauggagaaccagcacaccaucgaccuggccgacagcgagauggacaagcuguacgagagagugaagagacagcugagagagaacgccgaggaggacggcaccggcugcuucgagaucuuccacaagugcgacgacgacugcauggccagcaucagaaacaacaccuacgaccacagcaaguacagagaggaggccaugcagaacagaauccagaucgaccccgugaagcugagcagcggcuacaaggacgugauccugugguucagcuucggcgccagcugcuucauccugcuggccaucgugaugggccugguguucaucugcgugaagaacggcaacaugagaugcaccaucugcaucuga

SEQ ID NO: 171030 - RNA, 1698 nt, Artificial Sequence; identical to SEQ ID NO: 167853
  derived and/or modified CDS sequence (opt4) from hemagglutinin__InfluenzaA__AHG96108

SEQ ID NO: 171031 - RNA, 1698 nt, Artificial Sequence; identical to SEQ ID NO: 167853
  derived and/or modified CDS sequence (opt4) from hemagglutinin__InfluenzaA__AHG96120

SEQ ID NO: 171032 - RNA, 1698 nt, Artificial Sequence; identical to SEQ ID NO: 167853
  derived and/or modified CDS sequence (opt4) from hemagglutinin__InfluenzaA__AHG96132

SEQ ID NO: 171033 - RNA, 1698 nt, Artificial Sequence
  derived and/or modified CDS sequence (opt4) from hemagglutinin__InfluenzaA__AHG96144
augaaggugaagcugcuggugcugcugugcaccuucaccgccaccuacgccgacaccaucugcaucggcuaccacgccaacaacagcaccgacaccguggacaccgugcuggagaagaacgugaccgugacccacagcgugaaccugcuggagaacagccacaacggcaagcugugccugcugaagggcaucgccccccugcagcugggcaacugcagcguggccggcuggauccugggcaaccccgagugcgagcugcugaucagcaaggagagcuggagcuacaucguggagaagcccaaccccgagaacggcaccugcuaccccggccacuucgccgacuacgaggagcugagagagcagcugagcagcgugagcagcuucgagagauucgagaucuuccccaaggagagcagcuggcccaaccacaccgugaccggcgugagcgccagcugcagccacaacggcgagagcagcuucuacagaaaccugcuguggcugaccggcaagaacggccuguaccccaaccugagcaagagcuacgccaacaacaaggagaaggaggugcuggugcuguggggcgugcaccacccccccaacaucggcgugcagaaggcccuguaccacaccgagaacgccuacgugagcguggugagcagccacuacagcagaaaguucacccccgagaucgccaagagacccaaggugagagaccaggagggcagaaucaacuacuacuggacccugcuggagcccggcgacaccaucaucuucgaggccaacggcaaccugaucgcccccagauacgccuucgcccugagcagaggcuucggcagcggcaucaucaacagcaacgcccccauggacaagugcgacgccaagugccagaccccccagggcgccaucaacagcagccugcccuuccagaacgugcaccccgugaccaucggcgagugccccaaguacgugagaagcgccaagcugagaauggugaccggccugagaaacauccccagcauccagagcagaggccuguucggcgccaucgccggcuucaucgagggcggcuggaccggcaugguggacggcugguacggcuaccaccaccagaacgagcagggcagcggcuacgccgccgaccagaagagcacccagaacgccaucaacggcaucaccaacaaggugaacagcgugaucgagaagaugaacacccaguucaccgccgugggcaaggaguucaacaagcuggagagaagaauggagaaccugaacaagaagguggacgacggcuucaucgacaucuggaccuacaacgccgagcugcuggugcugcuggagaacgagagaacccuggacuuccacgacagcaacgugaagaaccuguacgagaaggugaagagccagcugaagaacaacgccaaggagaucggcaacggcugcuucgaguucuaccacaagugcaacgacgagugcauggagagcgugaagaacggcaccuacgacuaccccaaguacagcgaggagagcaagcugaacagagagaagaucgacggcgugaagcuggagagcaugggcguguaccagauccuggccaucuacagcaccguggccagcagccuggugcugcuggugagccugggcgccaucagcuucuggaugugcagcaacggcagccugcagugcagaaucugcaucuga

SEQ ID NO: 171034 - RNA, 1698 nt, Artificial Sequence; identical to SEQ ID NO: 167853
  derived and/or modified CDS sequence (opt4) from hemagglutinin__InfluenzaA__AHG96156

SEQ ID NO: 171035 - RNA, 1698 nt, Artificial Sequence; identical to SEQ ID NO: 167853
  derived and/or modified CDS sequence (opt4) from hemagglutinin__InfluenzaA__AHG96168

SEQ ID NO: 171036 - RNA, 1698 nt, Artificial Sequence; identical to SEQ ID NO: 167853
  derived and/or modified CDS sequence (opt4) from hemagglutinin__InfluenzaA__AHG96180

SEQ ID NO: 171037 - RNA, 1698 nt, Artificial Sequence; identical to SEQ ID NO: 167853
  derived and/or modified CDS sequence (opt4) from hemagglutinin__InfluenzaA__AHG96192

SEQ ID NO: 171038 - RNA, 1698 nt, Artificial Sequence; identical to SEQ ID NO: 167853
  derived and/or modified CDS sequence (opt4) from hemagglutinin__InfluenzaA__AHG96204

SEQ ID NO: 171039 - RNA, 1698 nt, Artificial Sequence; identical to SEQ ID NO: 167853
  derived and/or modified CDS sequence (opt4) from hemagglutinin__InfluenzaA__AHG96216

SEQ ID NO: 171040 - RNA, 1698 nt, Artificial Sequence; identical to SEQ ID NO: 167853
  derived and/or modified CDS sequence (opt4) from hemagglutinin__InfluenzaA__AHG96228

SEQ ID NO: 171041 - RNA, 1698 nt, Artificial Sequence; identical to SEQ ID NO: 171033
  derived and/or modified CDS sequence (opt4) from hemagglutinin__InfluenzaA__AHG96240

SEQ ID NO: 171042 - RNA, 1698 nt, Artificial Sequence; identical to SEQ ID NO: 167853
  derived and/or modified CDS sequence (opt4) from hemagglutinin__InfluenzaA__AHG96252

SEQ ID NO: 171043 - RNA, 1698 nt, Artificial Sequence; identical to SEQ ID NO: 167853
  derived and/or modified CDS sequence (opt4) from hemagglutinin__InfluenzaA__AHG96264

SEQ ID NO: 171044 - RNA, 1698 nt, Artificial Sequence; identical to SEQ ID NO: 167853
  derived and/or modified CDS sequence (opt4) from hemagglutinin__InfluenzaA__AHG96276

SEQ ID NO: 171045 - RNA, 1698 nt, Artificial Sequence; identical to SEQ ID NO: 167853
  derived and/or modified CDS sequence (opt4) from hemagglutinin__InfluenzaA__AHG96288

SEQ ID NO: 171046 - RNA, 1698 nt, Artificial Sequence; identical to SEQ ID NO: 167853
  derived and/or modified CDS sequence (opt4) from hemagglutinin__InfluenzaA__AHG96300

SEQ ID NO: 171047 - RNA, 1701 nt, Artificial Sequence
  derived and/or modified CDS sequence (opt4) from hemagglutinin__InfluenzaA__AHG96312
augaaggccauccugguggugcugcuguacaccuucgccaccgccaacgccgacacccugugcaucggcuaccacgccaacaacagcaccgacaccguggacaccgugcuggagaagaacgugaccgugacccacagcgugaaccugcuggaggacaagcacaacggcaagcugugcaagcugagaggcguggugccccugcaccugggcaagugcaacaucgccggcuggauccugggcaaccccgagugcgagagccugagcaccgccagcagcuggagcuacaucguggagaccagcagcagcgacaacggcaccugcuaccccggcgacuucaucaacuacgaggagcugagagagcagcugagcagcgugagcagcuucgagagauucgagaucuuccccaagaccagcagcuggcccaaccacgacagcaacaagggcgugaccgccgccugcccccacgccggcgccaagagcuucuacaagaaccugaucuggcuggugaagaagggcaacagcuaccccaagcugagccagagcuacaucaacgacaagggcaaggaggugcuggugcuguggggcauccaccaccccagcaccaccgccgaccagcagagccuguaccagaacgccgacgccuacguguucgugggcaccagcagauacagcaagaaguucaagcccgagaucgccaucagacccaaggugagagaccaggagggcagaaugaacuacuacuggacccugguggagcccggcgacaagaucaccuucgaggccaccggcaaccugguggugcccagauacgccuucaccauggagagaaacgccggcagcggcaucaucaucagcgacacccccgugcacgacugcaacaccaccugccagacccccgagggcgccaucaacaccagccugcccuuccagaacauccaccccaucaccaucggcaagugccccaaguacgugaagagcaccaagcugagacuggccaccggccugagaaacgugcccagcauccagagcagaggccuguucggcgccaucgccggcuucaucgagggcggcuggaccggcaugguggacggcugguacggcuaccaccaccagaacgagcagggcagcggcuacgccgccgaccugaagagcacccagaacgccaucgacaagaucaccaacaaggugaacagcgugaucgagaagaugaacacccaguucaccgccgugggcaaggaguucaaccaccuggagaagagaaucgagaaccugaacaagaagguggacgacggcuuccuggacaucuggaccuacaacgccgagcugcuggugcugcuggagaacgagagaacccuggacuaccacgacagcaacgugaagaaccuguacgagaaggugagaaaccagcugaagaacaacgccaaggagaucggcaacggcugcuucgaguucuaccacaagugcgacaacaccugcauggagagcgugaagaacggcaccuacgacuaccccaaguacagcgaggaggccaagcugaacagagagaagaucgacggcgugaagcuggagagcaccagaaucuaccagauccuggccaucuacagcaccguggccagcagccuggugcugguggugagccugggcgccaucagcuucuggaugugcagcaacggcagccugcagugcagaaucugcaucuga

SEQ ID NO: 171048 - RNA, 1701 nt, Artificial Sequence; identical to SEQ ID NO: 170100
  derived and/or modified CDS sequence (opt4) from hemagglutinin__InfluenzaA__AHG96313

SEQ ID NO: 171049 - RNA, 1701 nt, Artificial Sequence
  derived and/or modified CDS sequence (opt4) from hemagglutinin__InfluenzaA__AHG96314
augaaggccauccugguggugcugcuguacaccuucgccaccgccaacgccgacacccugugcaucggcuaccacgccaacaacagcaccgacaccguggacaccgugcuggagaagaacgugaccgugacccacagcgugaaccugcuggaggacaagcacaacggcaagcugugcaagcugagaggcguggccccccugcaccugggcaagugcaacaucgccggcuggauccugggcaaccccgagugcgagagccugagcaccgccagcagcuggagcuacaucguggagaccagcagcagcgacaacggcaccugcuaccccggcgacuucaucaacuacgaggagcugagagagcagcugagcagcgugagcagcuucgagagauucgagaucuuccccaagaccagcagcuggcccaaccacgacagcaacaagggcgugaccgccgccugcccccacgccggcgccaagagcuucuacaagaaccugaucuggcuggugaagaagggcaacagcuaccccaagcugagccagagcuacaucaacgacaagggcaaggaggugcuggugcuguggggcauccaccaccccagcaccaccgccgaccagcagagccuguaccagaacgccgacgccuacguguucgugggcaccagcagauacagcaagaaguucaagcccgagaucgccaucagacccaaggugagagaccaggagggcagaaugaacuacuacuggacccugguggagcccggcgacaagaucaccuucgaggccaccggcaaccugguggugcccagauacgccuucaccauggagagaaacgccggcagcggcaucaucaucagcgacacccccgugcacgacugcaacaccaccugccagacccccgagggcgccaucaacaccagccugcccuuccagaacauccaccccaucaccaucggcaagugccccaaguacgugaagagcaccaagcugagacuggccaccggccugagaaacgugcccagcauccagagcagaggccuguucggcgccaucgccggcuucaucgagggcggcuggaccggcaugguggacggcugguacggcuaccaccaccagaacgagcagggcagcggcuacgccgccgaccugaagagcacccagaacgccaucgacaagaucaccaacaaggugaacagcgugaucgagaagaugaacacccaguacaccgccgugggcaaggaguucaaccaccuggagaagagaaucgagaaccugaacaagaagguggacgacggcuuccuggacaucuggaccuacaacgccgagcugcuggugcugcuggagaacgagagaacccuggacuaccacgacagcaacgugaagaaccuguacgagaaggugagaaaccagcugaagaacaacgccaaggagaucggcaacggcugcuucgaguucuaccacaagugcgacaacaccugcauggagagcgugaagaacggcaccuacgacuaccccaaguacagcgaggaggccaagcugaacagagagaagaucgacggcgugaagcuggagagcaccagaaucuaccagauccuggccaucuacagcaccguggccagcagccuggugcugguggugagccugggcgccaucagcuucuggaugugcagcaacggcagccugcagugcagaaucugcaucuga

SEQ ID NO: 171050 - RNA, 1701 nt, Artificial Sequence; identical to SEQ ID NO: 170100
  derived and/or modified CDS sequence (opt4) from hemagglutinin__InfluenzaA__AHG96315

SEQ ID NO: 171051 - RNA, 1701 nt, Artificial Sequence; identical to SEQ ID NO: 170100
  derived and/or modified CDS sequence (opt4) from hemagglutinin__InfluenzaA__AHG96316

SEQ ID NO: 171052 - RNA, 1701 nt, Artificial Sequence; identical to SEQ ID NO: 170100
  derived and/or modified CDS sequence (opt4) from hemagglutinin__InfluenzaA__AHG96317

SEQ ID NO: 171053 - RNA, 1701 nt, Artificial Sequence; identical to SEQ ID NO: 170100
  derived and/or modified CDS sequence (opt4) from hemagglutinin__InfluenzaA__AHG96320

SEQ ID NO: 171054 - RNA, 1701 nt, Artificial Sequence; identical to SEQ ID NO: 170100
  derived and/or modified CDS sequence (opt4) from hemagglutinin__InfluenzaA__AHG96321

SEQ ID NO: 171055 - RNA, 1701 nt, Artificial Sequence; identical to SEQ ID NO: 170100
  derived and/or modified CDS sequence (opt4) from hemagglutinin__InfluenzaA__AHG96322

SEQ ID NO: 171056 - RNA, 1701 nt, Artificial Sequence; identical to SEQ ID NO: 170100
  derived and/or modified CDS sequence (opt4) from hemagglutinin__InfluenzaA__AHG96324

SEQ ID NO: 171057 - RNA, 1701 nt, Artificial Sequence; identical to SEQ ID NO: 170100
  derived and/or modified CDS sequence (opt4) from hemagglutinin__InfluenzaA__AHG96325

SEQ ID NO: 171058 - RNA, 1701 nt, Artificial Sequence
  derived and/or modified CDS sequence (opt4) from hemagglutinin__InfluenzaA__AHG96326
augaaggccauccugguggugcugcuguacaccuucgccaccgccaacgccgacacccugugcaucggcuaccacgccaacaacagcaccgacaccguggacaccgugcuggagaagaacgugaccgugacccacagcgugaaccugcuggaggacaagcacaacggcaagcugugcaagcugagaggcguggccccccugcaccugggcaagugcaacaucgccggcuggauccugggcaaccccgagugcgagagccugagcaccgccagcagcuggagcuacaucguggagaccagcaacagcgacaacggcaccugcuaccccggcgacuucaucaacuacgaggagcugagagagcagcugagcagcgugagcagcuucgagagauucgagaucuuccccaagaccagcagcuggcccaaccacgacagcaacaagggcgugaccgccgccugcccccacgccggcgccaagagcuucuacaagaaccugaucuggcuggugaagaagggcaacagcuaccccaagcugagccagagcuacaucaacgacaagggcaaggaggugcuggugcuguggggcauccaccaccccagcaccaccgccgaccagcagagccuguaccagaacgccgacgccuacguguucgugggcaccagcagauacagcaagaaguucaagcccgagaucgccaucagacccaaggugagagaccaggagggcagaaugaacuacuacuggacccugguggagcccggcgacaagaucaccuucgaggccaccggcaaccugguggugcccagauacgccuucaccauggagagaaacgccggcagcggcaucaucaucagcgacacccccgugcacgacugcaacaccaccugccagacccccgagggcgccaucaacaccagccugcccuuccagaacauccaccccaucaccaucggcaagugccccaaguacgugaagagcaccaagcugagacuggccaccggccugagaaacgugcccagcauccagagcagaggccuguucggcgccaucgccggcuucaucgagggcggcuggaccggcaugguggacggcugguacggcuaccaccaccagaacgagcagggcagcggcuacgccgccgaccugaagagcacccagaacgccaucgacaagaucaccaacaaggugaacagcgugaucgagaagaugaacacccaguucaccgccgugggcaaggaguucaaccaccuggagaagagaaucgagaaccugaacaagaagguggacgacggcuuccuggacaucuggaccuacaacgccgagcugcuggugcugcuggagaacgagagaacccuggacuaccacgacagcaacgugaagaaccuguacgagaaggugagaaaccagcugaagaacaacgccaaggagaucggcaacggcugcuucgaguucuaccacaagugcgacaacaccugcauggagagcgugaagaacggcaccuacgacuaccccaaguacagcgaggaggccaagcugaacagagagaagaucgacggcgugaagcuggagagcaccagaaucuaccagauccuggccaucuacagcaccguggccagcagccuggugcugguggugagccugggcgccaucagcuucuggaugugcagcaacggcagccugcagugcagaaucugcaucuga

SEQ ID NO: 171059 - RNA, 1701 nt, Artificial Sequence; identical to SEQ ID NO: 170100
  derived and/or modified CDS sequence (opt4) from hemagglutinin__InfluenzaA__AHG96327

SEQ ID NO: 171060 - RNA, 1701 nt, Artificial Sequence
  derived and/or modified CDS sequence (opt4) from hemagglutinin__InfluenzaA__AHG96329
augaaggccauccugguggugcugcuguacaccuucaccaccgccaacgccgacacccugugcaucggcuaccacgccaacaacagcaccgacaccguggacaccgugcuggagaagaacgugaccgugacccacagcgugaaccugcuggaggacaagcacaacggcaagcugugcaagcugagaggcguggccccccugcaccugggcaagugcaacaucgccggcuggauccugggcaaccccgagugcgagagccugagcaccgccagcagcuggagcuacaucguggagaccagcagcagcgacaacggcaccugcuaccccggcgacuucaucaacuacgaggagcugagagagcagcugagcagcgugagcagcuucgagagauucgagaucuuccccaagaccagcagcuggcccaaccacgacagcaacaagggcgugaccgccgccugcccccacgccggcgccaagagcuucuacaagaaccugaucuggcuggugaagaagggcaacagcuaccccaagcugagccagagcuacaucaacgacaagggcaaggaggugcuggugcuguggggcauccaccaccccagcaccaccgccgaccagcagagccuguaccagaacgccgacgccuacguguucgugggcaccagcagauacagcaagaaguucaagcccgagaucgccaucagacccaaggugagagaccaggagggcagaaugaacuacuacuggacccugguggagcccggcgacaagaucaccuucgaggccaccggcaaccugguggugcccagauacgccuucaccauggagagaaacgccggcagcggcaucaucaucagcgacacccccgugcacgacugcaacaccaccugccagacccccgagggcgccaucaacaccagccugcccuuccagaacauccaccccaucaccaucggcaagugccccaaguacgugaagagcaccaagcugagacuggccaccggccugagaaacgugcccagcauccagagcagaggccuguucggcgccaucgccggcuucaucgagggcggcuggaccggcaugguggacggcugguacggcuaccaccaccagaacgagcagggcagcggcuacgccgccgaccugaagagcacccagaacgccaucgacaagaucaccaacaaggugaacagcgugaucgagaagaugaacacccaguucaccgccgugggcaaggaguucaaccaccuggagaagagaaucgagaaccugaacaagaagguggacgacggcuuccuggacaucuggaccuacaacgccgagcugcuggugcugcuggagaacgagagaacccuggacuaccacgacagcaacgugaagaaccuguacgagaagaucagaaaccagcugaagaacaacgccaaggagaucggcaacggcugcuucgaguucuaccacaagugcgacaacaccugcauggagagcgugaagaacggcaccuacgaguaccccaaguacagcgaggaggccaagcugaacagagagaagaucgacggcgugaagcuggagagcaccaagaucuaccagauccuggccaucuacagcaccguggccagcagccuggugcugguggugagccugggcgccaucagcuucuggaugugcagcaacggcagccugcagugcagaaucugcaucuga

SEQ ID NO: 171061 - RNA, 1701 nt, Artificial Sequence
  derived and/or modified CDS sequence (opt4) from hemagglutinin__InfluenzaA__AHG96330
augaaggccauccugguggugcugcuguacaccuucgccaccgccaccgccgacacccugugcaucggcuaccacgccaacaacagcaccgacaccguggacaccgugcuggagaagaacgugaccgugacccacagcgugaaccugcuggaggacaagcacaacggcaagcugugcaagcugagaggcguggccccccugcaccugggcaagugcaacaucgccggcuggauccugggcaaccccgagugcgagagccugagcaccgccagcagcuggagcuacaucguggagaccagcagcagcgacaacggcaccugcuaccccggcgacuucaucaacuacgaggagcugagagagcagcugagcagcgugagcagcuucgagagauucgagaucuuccccaagaccagcagcuggcccaaccacgacagcaacaagggcgugaccgccgccugcccccacgccggcgccaagagcuucuacaagaaccugaucuggcuggugaagaagggcaacagcuaccccaagcugagccagagcuacaucaacgacaagggcaaggaggugcuggugcuguggggcauccaccaccccagcaccaccgccgaccagcagagccuguaccagaacgccgacgccuacguguucgugggcaccagcagauacagcaagaaguucaagcccgagaucgccaucagacccaaggugagagaccaggagggcagaaugaacuacuacuggacccugguggagcccggcgacaagaucaccuucgaggccaccggcaaccugguggugcccagauacgccuucaccauggagagaaacgccggcagcggcaucaucaucagcgacacccccgugcacgacugcaacaccaccugccagacccccgagggcgccaucaacaccagccugcccuuccagaacauccaccccaucaccaucggcaagugccccaaguacgugaagagcaccaagcugagccuggccaccggccugagaaacgugcccagcauccagagcagaggccuguucggcgccaucgccggcuucaucgagggcggcuggaccggcaugguggacggcugguacggcuaccaccaccagaacgagcagggcagcggcuacgccgccgaccugaagagcacccagaacgccaucgacaagaucaccaacaaggugaacagcgugaucgagaagaugaacacccaguucaccgccgugggcaaggaguucaaccaccuggagaagagaaucgagaaccugaacaagaagguggacgacggcuuccuggacaucuggaccuacaacgccgagcugcuggugcugcuggagaacgagagaacccuggacuaccacgacagcaacgugaagaaccuguacgagaagaucagaaaccagcugaagaacaacgccaaggagaucggcaacggcugcuucgaguucuaccacaagugcgacaacaccugcauggagagcgugaagaacggcaccuacgacuaccccaaguacagcgaggaggccaagcugaacagagagaagaucgacggcgugaagcuggagagcaccagaaucuaccagauccuggccaucuacagcaccguggccagcagccuggugcugguggugagccugggcgccaucagcuucuggaugugcagcaacggcagccugcagugcagaaucugcaucuga

SEQ ID NO: 171062 - RNA, 1701 nt, Artificial Sequence; identical to SEQ ID NO: 170100
  derived and/or modified CDS sequence (opt4) from hemagglutinin__InfluenzaA__AHG96332

SEQ ID NO: 171063 - RNA, 1701 nt, Artificial Sequence
  derived and/or modified CDS sequence (opt4) from hemagglutinin__InfluenzaA__AHG96334
augaaggccauccugguggugcugcuguacacccuggccaccgccaacgccgacacccugugcaucggcuaccacgccaacaacagcaccgacaccguggacaccgugcuggagaagaacgugaccgugacccacagcgugaaccugcuggaggacaagcacaacggcaagcugugcaagcugagaggcguggccccccugcaccugggcaagugcaacaucgccggcuggauccugggcaaccccgagugcgagagccugagcaccgccagcagcuggagcuacaucguggagaccagcagcagcgacaacggcaccugcuaccccggcgacuucaucaacuacgaggagcugagagagcagcugagcagcgugagcagcuucgagagauucgagaucuuccccaagaccagcagcuggcccaaccacgacagcaacaagggcgugaccgccgccugcccccacgccggcgccaagagcuucuacaagaaccugaucuggcuggugaagaagggcaacagcuaccccaagcugagccagagcuacaucaacgacaagggcaaggaggugcuggugcuguggggcauccaccaccccagcaccaccgccgaccagcagagccuguaccagaacgccgacgccuacguguucgugggcaccagcagauacagcaagaaguucaagcccgagaucgccaucagacccaaggugagagaccaggagggcagaaugaacuacuacuggacccugguggagcccggcgacaagaucaccuucgaggccaccggcaaccugguggugcccagauacgccuucaccauggagagaaacgccggcagcggcaucaucaucagcgacacccccgugcacgacugcaacaccaccugccagacccccgagggcgccaucaacaccagccugcccuuccagaacauccaccccaucaccaucggcaagugccccaaguacgugaagagcaccaagcugagacuggccaccggccugagaaacgugcccagcauccagagcagaggccuguucggcgccaucgccggcuucaucgagggcggcuggaccggcaugguggacggcugguacggcuaccaccaccagaacgagcagggcagcggcuacgccgccgaccugaagagcacccagaacgccaucgacaagaucaccaacaaggugaacagcgugaucgagaagaugaacacccaguucaccgccgugggcaaggaguucaaccaccuggagaagagaaucgagaaccugaacaagaagguggacgacggcuuccuggacaucuggaccuacaacgccgagcugcuggugcugcuggagaacgagagaacccuggacuaccacgacagcaacgugaagaaccuguacgagaaggugagaaaccagcugaagaacaacgccaaggagaucggcaacggcugcuucgaguucuaccacaagugcgacaacaccugcauggagagcgugaagaacggcaccuacgacuaccccaaguacagcgaggaggccaagcugaacagagagaagaucgacggcgugaagcuggagagcaccagaaucuaccagauccuggccaucuacagcaccguggccagcagccuggugcugguggugagccugggcgccaucagcuucuggaugugcagcaacggcagccugcagugcagaaucugcaucuga

SEQ ID NO: 171064 - RNA, 1701 nt, Artificial Sequence
  derived and/or modified CDS sequence (opt4) from hemagglutinin__InfluenzaA__AHG96335
augaaggccauccugguggugcugcuguacaccuucgagaccgccaacgccgacacccugugcaucggcuaccacgccaacaacagcaccgacaccguggacaccgugcuggagaagaacgugaccgugacccacagcgugaaccugcuggaggacaagcacaacggcaagcugugcaagcugaagggcguggccccccugcaccugggcaagugcaacaucgccggcuggauccugggcaaccccgagugcgagagccugagcaccgccagcagcuggagcuacaucguggagaccagcagcagcgacaacggcaccugcuaccccggcgacuucaucaacuacgaggagcugagagagcagcugagcagcgugagcagcuucgagagauucgagaucuuccccaagaccagcagcuggcccaaccacgacagcaacaagggcgugaccgccgccugcccccacgccggcgccaagagcuucuacaagaaccugaucuggcuggugaagaagggcaacagcuaccccaagcugagccagagcuacaucaacgacaagggcaaggaggugcuggugcuguggggcauccaccaccccagcaccaccgccgaccagcagagccuguaccagaacgccgacgccuacguguucgugggcaccagcagauacagcaagaaguucaagcccgagaucgccaucagacccaaggugagagaccaggagggcagaaugaacuacuacuggacccugguggagcccggcgacaagaucaccuucgaggccaccggcaaccugguggugcccagauacgccuucaccauggagagaaacgccggcagcggcaucaucaucagcgacacccccgugcacgacugcaacaccaccugccagacccccgagggcgccaucaacaccagccugcccuuccagaacauccaccccaucaccaucggcaagugccccaaguacgugaagagcaccaagcugagacuggccaccggccugagaaacgugcccagcauccagagcagaggccuguucggcgccaucgccggcuucaucgagggcggcuggaccggcaugguggacggcugguacggcuaccaccaccagaacgagcagggcagcggcuacgccgccgaccugaagagcacccagaacgccaucgacaagaucaccaacaaggugaacagcgugaucgagaagaugaacacccaguucaccgccgugggcaaggaguucaaccaccuggagaagagaaucgagaaccugaacaagaagguggacgacggcuuccuggacaucuggaccuacaacgccgagcugcuggugcugcuggagaacgagagaacccuggacuaccacgacagcaacgugaagaaccuguacgagaaggugagaaaccagcugaagaacaacgccaaggagaucggcaacggcugcuucgaguucuaccacaagugcgacaacaccugcauggagagcgugaagaacggcaccuacgacuaccccaaguacagcgaggaggccaagcugaacagagagaagaucgacggcgugaagcuggagagcaccagaaucuaccagauccuggccaucuacagcaccguggccagcagccuggugcugguggugagccugggcgccaucagcuucuggaugugcagcaacggcagccugcagugcagaaucugcaucuga

SEQ ID NO: 171065 - RNA, 1701 nt, Artificial Sequence
  derived and/or modified CDS sequence (opt4) from hemagglutinin__InfluenzaA__AHG96336
augaaggccauccugguggugcugcuguacaccuucgccaccgccaacgccgacacccugugcaucggcuaccacgccaacaacagcaccgacaccguggacaccgugcuggagaagaacgugaccgugacccacagcgugaaccugcuggaggacaagcacaacggcaagcugugcaagcugagaggcguggccccccugcaccugggcaagugcaacaucgccggcuggauccugggcaaccccgagugcgagagccugagcaccgccagcagcuggagcuacaucguggagaccagcagcagcgacaacggcaccugcuaccccggcgacuucaucaacuacgaggagcugagagagcagcugagcagcgugagcagcuucgagagauucgagaucuuccccaagaccagcagcuggcccaaccacgacagcaacaagggcgugaccgccgccugcccccacgccggcgccaagagcuucuacaagaaccugaucuggcuggugaagaagggcaacagcuaccccaagcugagccagagcuacaucaacgacaagggcaaggaggugcuggugcuguggggcauccaccaccccagcaccaccgccgaccagcagagccuguaccagaacgccgacgccuacguguucgugggcaccagcagauacagcaagaaguucaagcccgagaucgccaucagacccaaggugagagaccaggagggcagaaugaacuacuacuggacccugguggagcccggcgacaagaucaccuucgaggccaccggcaaccugguggugcccagauacgccuucaccauggagagaaacgccggcagcggcaucaucaucagcgacacccccgugagagacugcaacaccaccugccagacccccgagggcgccaucaacaccagccugcccuuccagaacauccaccccaucaccaucggcaagugccccaaguacgugaagagcaccaagcugagacuggccaccggccugagaaacgugcccagcauccagagcagaggccuguucggcgccaucgccggcuucaucgagggcggcuggaccggcaugguggacggcugguacggcuaccaccaccagaacgagcagggcagcggcuacgccgccgaccugaagagcacccagaacgccaucgacaagaucaccaacaaggugaacagcgugaucgagaagaugaacacccaguucaccgccgugggcaaggaguucaaccaccuggagaagagaaucgagaaccugaacaagaagguggacgacggcuuccuggacaucuggaccuacaacgccgagcugcuggugcugcuggagaacgagagaacccuggacuaccacgacagcaacgugaagaaccuguacgagaaggugagaaaccagcugaagaacaacgccaaggagaucggcaacggcugcuucgaguucuaccacaagugcgacaacaccugcauggagagcgugaagaacggcaccuacgacuaccccaaguacagcgaggaggccaagcugaacagagagaagaucgacggcgugaagcuggagagcaccagaaucuaccagauccuggccaucuacagcaccguggccagcagccuggugcugguggugagccugggcgccaucagcuucuggaugugcagcaacggcagccugcagugcagaaucugcaucuga

SEQ ID NO: 171066 - RNA, 1701 nt, Artificial Sequence
  derived and/or modified CDS sequence (opt4) from hemagglutinin__InfluenzaA__AHG96338
augaaggccauccugguggugcugcuguacaccuucgccaccgccaacgccgacacccugugcaucggcuaccacgccaacaacagcaccgacaccguggacaccgugcuggagaagaacgugaccgugacccacagcgugaaccugcuggaggacaagcacaacggcaagcugugcaagcugagaggcguggccccccugcaccugggcaagugcaacaucgccggcuggauccugggcaaccccgagugcgagagccugagcaccgccagcagcuggagcuacaucguggagaccagcagcagcgacaacggcaccugcuaccccggcgacuucaucaacuacgaggagcugagagagcagcugagcagcgugagcagcuucgagagauucgagaucuuccccaagaccagcagcuggcccaaccacgacagcaacaagggcgugaccgccgccugcagccacgccggcgccaagagcuucuacaagaaccugaucuggcuggugaagaagggcaacagcuaccccaagcugagccagagcuacaucaacgacaagggcaaggaggugcuggugcuguggggcauccaccaccccagcaccaccgccgaccagcagagccuguaccagaacgccgacgccuacguguucgugggcaccagcagauacagcaagaaguucaagcccgagaucgccaucagacccaaggugagagaccaggagggcagaaugaacuacuacuggacccugguggagcccggcgacaagaucaccuucgaggccaccggcaaccugguggugcccagauacgccuucaccauggagagaaacgccggcagcggcaucaucaucagcgacacccccgugcacgacugcaacaccaccugccagacccccgagggcgccaucaacaccagccugcccuuccagaacauccaccccaucaccaucggcaagugccccaaguacgugaagagcaccaagcugagacuggccaccggccugagaaacgugcccagcauccagagcagaggccuguucggcgccaucgccggcuucaucgagggcggcuggaccggcaugguggacggcugguacggcuaccaccaccagaacgagcagggcagcggcuacgccgccgaccugaagagcacccagaacgccaucgacaagaucaccaacaaggugaacagcgugaucgagaagaugaacacccaguucaccgccgugggcaaggaguucaaccaccuggagaagagaaucgagaaccugaacaagaagguggacgacggcuuccuggacaucuggaccuacaacgccgagcugcuggugcugcuggagaacgagagaacccuggacuaccacgacagcaacgugaagaaccuguacgagaaggugagaaaccagcugaagaacaacgccaaggagaucggcaacggcugcuucgaguucuaccacaagugcgacaacaccugcauggagagcgugaagaacggcaccuacgacuaccccaaguacagcgaggaggccaagcugaacagagagaagaucgacggcgugaagcuggagagcaccagaaucuaccagauccuggccaucuacagcaccguggccagcagccuggugcugguggugagccugggcgccaucagcuucuggaugugcagcaacggcagccugcagugcagaaucugcaucuga

SEQ ID NO: 171067 - RNA, 1701 nt, Artificial Sequence
  derived and/or modified CDS sequence (opt4) from hemagglutinin__InfluenzaA__AHG96339
augaaggccauccugguggugcugcuguacaccuucgccaccgccaacgccgacacccugugcaucggcuaccacgccaacaacagcaccgacaccguggacaccgugcuggagaagaacgugaccgugacccacagcgugaaccugcuggaggacaagcacaacggcaagcugugcaagcugagaggcguggccccccugcaccugggcaagugcaacaucgccggcuggauccugggcaaccccgagugcgagagccugagcaccgccagcagcuggagcuacaucguggagaccagcagcagcgacaacggcaccugcuaccccggcgacuucaucaacuacgaggagcugagagagcagcugagcagcgugagcagcuucgagagauucgagaucuuccccaagaccagcagcuggcccaaccacgacagcaacaagggcgugaccgccgccugcccccacgccggcgccaagagcuucuacaagaaccugaucuggcuggugaagaagggcaacagcuaccccaagcugagccagagcuacaucaacgacaagggcaaggagauccuggugcuguggggcauccaccaccccagcaccaccgccgaccagcagagccuguaccagaacgccgacgccuacguguucgugggcaccagcagauacagcaagaaguucaagcccgagaucgccaucagacccaaggugagagaccaggagggcagaaugaacuacuacuggacccugguggagcccggcgacaagaucaccuucgaggccaccggcaaccugguggugcccagauacgccuucaccauggagagaaacgccggcagcggcaucaucaucagcgacacccccgugcacgacugcaacaccaccugccagacccccgagggcgccaucaacaccagccugcccuuccagaacauccaccccaucaccaucggcaagugccccaaguacgugaagagcaccaagcugagacuggccaccggccugagaaacgugcccagcauccagagcagaggccuguucggcgccaucgccggcuucaucgagggcggcuggaccggcaugguggacggcugguacggcuaccaccaccagaacgagcagggcagcggcuacgccgccgaccugaagagcacccagaacgccaucgacaagaucaccaacaaggugaacagcgugaucgagaagaugaacacccaguucaccgccgugggcaaggaguucaaccaccuggagaagagaaucgagaaccugaacaagaagguggacgacggcuuccuggacaucuggaccuacaacgccgagcugcuggugcugcuggagaacgagagaacccuggacuaccacgacagcaacgugaagaaccuguacgagaaggugagaaaccagcugaagaacaacgccaaggagaucggcaacggcugcuucgaguucuaccacaagugcgacaacaccugcauggagagcgugaagaacggcaccuacgacuaccccaaguacagcgaggaggccaagcugaacagagagaagaucgacggcgugaagcuggagagcaccagaaucuaccagauccuggccaucuacagcaccguggccagcagccuggugcugguggugagccugggcgccaucagcuucuggaugugcagcaacggcagccugcagugcagaaucugcaucuga

SEQ ID NO: 171068 - RNA, 1701 nt, Artificial Sequence; identical to SEQ ID NO: 170100
  derived and/or modified CDS sequence (opt4) from hemagglutinin__InfluenzaA__AHG96340

SEQ ID NO: 171069 - RNA, 1701 nt, Artificial Sequence
  derived and/or modified CDS sequence (opt4) from hemagglutinin__InfluenzaA__AHG96341
augaaggccauccugguggugcugcuguacaccuucgccaccgccaacgccgacacccugugcaucggcuaccacgccaacaacagcaccgacaccguggacaccgugcuggagaagaacgugaccgugacccacagcgugaaccugcuggaggacaagcacaacggcaagcugugcaagcugagaggcguggccccccugcaccugggcaagugcaacaucgccggcuggauccugggcaaccccgagugcgagagccugagcaccgccagcagcuggagcuacaucguggagaccagcagcagcgacaacggcaccugcuaccccggcgacuucaucaacuacgaggagcugagagagcagcugagcagcgugagcagcuucgagagauucgagaucuuccccaagaccagcagcuggcccaaccacgacagcaacaagggcgugaccgccgccugcccccacgccggcgccaagagcuucuacaagaaccugaucuggcuggugaagaagggcaacagcuaccccaagcugagccagagcuacaucaacgacaagggcaaggaggugcuggugcuguggggcauccaccaccccagcaccaccgccgaccagcagagccuguaccagaacgccgacgccuacguguucgugggcaccagcaaguacagcaagaaguucaagcccgagaucgccaucagacccaaggugagagaccaggagggcagaaugaacuacuacuggacccugguggagcccggcgacaagaucaccuucgaggccaccggcaaccugguggugcccagauacgccuucaccauggagagaaacgccggcagcggcaucaucaucagcgacacccccgugcacgacugcaacaccaccugccagacccccgagggcgccaucaacaccagccugcccuuccagaacauccaccccaucaccaucggcaagugccccaaguacgugaagagcaccaagcugagacuggccaccggccugagaaacauccccagcauccagagcagaggccuguucggcgccaucgccggcuucaucgagggcggcuggaccggcaugguggacggcugguacggcuaccaccaccagaacgagcagggcagcggcuacgccgccgaccugaagagcacccagaacgccaucgacaagaucaccaacaaggugaacagcgugaucgagaagaugaacacccaguucaccgccgugggcaaggaguucaaccaccuggagaagagaaucgagaaccugaacaagaagguggacgacggcuuccuggacaucuggaccuacaacgccgagcugcuggugcugcuggagaacgagagaacccuggacuaccacgacagcaacgugaagaaccuguacgagaaggugagaaaccagcugaagaacaacgccaaggagaucggcaacggcugcuucgaguucuaccacaagugcgacaacaccugcauggagagcgugaagaacggcaccuacgacuaccccaaguacagcgaggaggccaagcugaacagagagaagaucgacggcgugaagcuggagagcaccagaaucuaccagauccuggccaucuacagcaccguggccagcagccuggugcugguggugagccugggcgccaucagcuucuggaugugcagcaacggcagccugcagugcagaaucugcaucuga

SEQ ID NO: 171070 - RNA, 1701 nt, Artificial Sequence
  derived and/or modified CDS sequence (opt4) from hemagglutinin__InfluenzaA__AHG96342
augaaggccauccugguggugcugcuguacaccuucgccaccgccaacgccgacacccugugcaucggcuaccacgccaacaacagcaccgacaccguggacaccgugcuggagaagaacgugaccgugacccacagcgugaaccugcuggaggacaagcacaacggcaagcugugcaagcugagaggcguggccccccugcaccugggcaagugcaacaucgccggcuggauccugggcaaccccgagugcgagagccugagcaccgccagcagcuggagcuacaucguggagaccagcagcagcgacaacggcaccugcuaccccggcgacuucaucaacuacgaggagcugagagagcagcugagcagcgugagcagcuucgagagauucgagaucuuccccaagaccagcagcuggcccaaccacgacagcaacaagggcgugaccgccgccugcccccacgccggcgccaagagcuucuacaagaaccugaucuggcuggugaagaagggcaacagcuaccccaagcugagccagagcuacaucaacgacaagggcaaggaggugcuggugcuguggggcauccaccaccccagcaccaccgccgaccagcagagccuguaccagaacgccgacgccuacguguucgugggcaccagcagauacagcaagaaguucaagcccgagaucgccaucagacccaaggugagagaccaggagggcagaaugaacuacuacuggacccugguggagcccggcgacaagaucaccuucgaggccaccggcaaccugguggugcccagauacgccuucaccauggagagaaacgccggcagcggcaucaucaucagcgacacccccgugcacgacugcaacaccaccugccagacccccgagggcgccaucaacaccagccugcccuuccagaacauccaccccaucaccaucggcaagugccccaaguacgugaagagcaccaagcugagacuggccaccggccugagaaacauccccagcauccagagcagaggccuguucggcgccaucgccggcuucaucgagggcggcuggaccggcaugguggacggcugguacggcuaccaccaccagaacgagcagggcagcggcuacgccgccgaccugaagagcacccagaacgccaucgacaagaucaccaacaaggugaacagcgugaucgagaagaugaacacccaguucaccgccgugggcaaggaguucaaccaccuggagaagagaaucgagaaccugaacaagaagguggacgacggcuuccuggacaucuggaccuacaacgccgagcugcuggugcugcuggagaacgagagaacccuggacuaccacgacagcaacgugaagaaccuguacgagaaggugagaaaccagcugaagaacaacgccaaggagaucggcaacggcugcuucgaguucuaccacaagugcgacaacaugugcauggagagcgugaagaacggcaccuacgacuaccccaaguacagcgaggaggccaagcugaacagagagaagaucgacggcgugaagcuggagagcaccagaaucuaccagauccuggccaucuacagcaccguggccagcagccuggugcugguggugagccugggcgccaucagcuucuggaugugcagcaacggcagccugcagugcagaaucugcaucuga

SEQ ID NO: 171071 - RNA, 1701 nt, Artificial Sequence
  derived and/or modified CDS sequence (opt4) from hemagglutinin__InfluenzaA__AHG96343
augaaggccauccugguggugcugcuguacaccuucgccaccgccaccgccgacacccugugcaucggcuaccacgccaacaacagcaccgacaccguggacaccgugcuggagaagaacgugaccgugacccacagcgugaaccugcuggaggacaagcacaacggcaagcugugcaagcugagaggcguggccccccugcaccugggcaagugcaacaucgccggcuggauccugggcaaccccgagugcgagagccugagcaccgccagcagcuggagcuacaucguggagaccagcaacagcgacaacggcaccugcuaccccggcgacuucaucaacuacgaggagcugagagagcagcugagcagcgugagcagcuucgagagauucgagaucuuccccaagaccagcagcuggcccaaccacgacagcaacaagggcgugaccgccgccugcccccacgccggcgccaagagcuucuacaagaaccugaucuggcuggugaagaagggcaacagcuaccccaagcugagccagagcuacaucaacgacaagggcaaggaggugcuggugcuguggggcauccaccaccccagcaccaccgccgaccagcagagccuguaccagaacgccgacgccuacguguucgugggcaccagcagauacagcaagaaguucaagcccgagaucgccaucagacccaaggugagagaccaggagggcagaaugaacuacuacuggacccugguggagcccggcgacaagaucaccuucgaggccaccggcaaccugguggugcccagauacgccuucaccauggagagaaacgccggcagcggcaucaucaucagcgacacccccgugcacgacugcaacaccaccugccagacccccgagggcgccaucaacaccagccugcccuuccagaacauccaccccaucaccaucggcaagugccccaaguacgugaagagcaccaagcugagacuggccaccggccugagaaacgugcccagcauccagagcagaggccuguucggcgccaucgccggcuucaucgagggcggcuggaccggcaugguggacggcugguacggcuaccaccaccagaacgagcagggcagcggcuacgccgccgaccugaagagcacccagaacgccaucgacaagaucaccaacaaggugaacagcgugaucgagaagaugaacacccaguucaccgccgugggcaaggaguucaaccaccuggagaagagaaucgagaaccugaacaagaagguggacgacggcuuccuggacaucuggaccuacaacgccgagcugcuggugcugcuggagaacgagagaacccuggacuaccacgacagcaacgugaagaaccuguacgagaaggugagaaaccagcugaagaacaacgccaaggagaucggcaacggcugcuucgaguucuaccacaagugcgacaacaccugcauggagagcgugaagaacggcaccuacgacuaccccaaguacagcgaggaggccaagcugaacagagagaagaucgacggcgugaagcuggagagcaccagaaucuaccagauccuggccaucuacagcaccguggccagcagccuggugcugguggugagccugggcgccaucagcuucuggaugugcagcaacggcagccugcagugcagaaucugcaucuga

SEQ ID NO: 171072 - RNA, 1701 nt, Artificial Sequence; identical to SEQ ID NO: 170100
  derived and/or modified CDS sequence (opt4) from hemagglutinin__InfluenzaA__AHG96344

SEQ ID NO: 171073 - RNA, 1701 nt, Artificial Sequence; identical to SEQ ID NO: 171063
  derived and/or modified CDS sequence (opt4) from hemagglutinin__InfluenzaA__AHG96345

SEQ ID NO: 171074 - RNA, 1701 nt, Artificial Sequence; identical to SEQ ID NO: 170100
  derived and/or modified CDS sequence (opt4) from hemagglutinin__InfluenzaA__AHG96346

SEQ ID NO: 171075 - RNA, 1701 nt, Artificial Sequence; identical to SEQ ID NO: 170100
  derived and/or modified CDS sequence (opt4) from hemagglutinin__InfluenzaA__AHG96347

SEQ ID NO: 171076 - RNA, 1701 nt, Artificial Sequence; identical to SEQ ID NO: 170100
  derived and/or modified CDS sequence (opt4) from hemagglutinin__InfluenzaA__AHG96348

SEQ ID NO: 171077 - RNA, 1701 nt, Artificial Sequence; identical to SEQ ID NO: 170100
  derived and/or modified CDS sequence (opt4) from hemagglutinin__InfluenzaA__AHG96349

SEQ ID NO: 171078 - RNA, 1701 nt, Artificial Sequence; identical to SEQ ID NO: 170100
  derived and/or modified CDS sequence (opt4) from hemagglutinin__InfluenzaA__AHG96350

SEQ ID NO: 171079 - RNA, 1701 nt, Artificial Sequence; identical to SEQ ID NO: 170100
  derived and/or modified CDS sequence (opt4) from hemagglutinin__InfluenzaA__AHG96351

SEQ ID NO: 171080 - RNA, 1701 nt, Artificial Sequence; identical to SEQ ID NO: 170100
  derived and/or modified CDS sequence (opt4) from hemagglutinin__InfluenzaA__AHG96352

SEQ ID NO: 171081 - RNA, 1701 nt, Artificial Sequence
  derived and/or modified CDS sequence (opt4) from hemagglutinin__InfluenzaA__AHG96353
augaaggccauccugguggugcugcuguacaccuucgccaccaccaacgccgacacccugugcaucggcuaccacgccaacaacagcaccgacaccguggacaccgugcuggagaagaacgugaccgugacccacagcgugaaccugcuggaggacaagcacaacggcaagcugugcaagcugagaggcguggccccccugcaccugggcaagugcaacaucgccggcuggauccugggcaaccccgagugcgagagccugagcaccgccagcagcuggagcuacaucguggagaccagcagcagcgacaacggcaccugcuaccccggcgacuucaucaacuacgaggagcugagagagcagcugagcagcgugagcagcuucgagagauucgagaucuuccccaagaccagcagcuggcccaaccacgacagcaacaagggcgugaccgccgccugcccccacgccggcgccaagagcuucuacaagaaccugaucuggcuggugaagaagggcaacagcuaccccaagcugagccagagcuacaucaacgacaagggcaaggaggugcuggugcuguggggcauccaccaccccagcaccaccgccgaccagcagagccuguaccagaacgccgacgccuacguguucgugggcaccagcagauacagcaagaaguucaagcccgagaucgccaucagacccaaggugagagaccaggagggcagaaugaacuacuacuggacccugguggagcccggcgacaagaucaccuucgaggccaccggcaaccugguggugcccagauacgccuucaccauggagagaaacgccggcagcggcaucaucaucagcgacacccccgugcacgacugcaacaccaccugccagacccccgagggcgccaucaacaccagccugcccuuccagaacauccaccccaucaccaucggcaagugccccaaguacgugaagagcaccaagcugagacuggccaccggccugagaaacgugcccagcauccagagcagaggccuguucggcgccaucgccggcuucaucgagggcggcuggaccggcaugguggacggcugguacggcuaccaccaccagaacgagcagggcagcggcuacgccgccgaccugaagagcacccagaacgccaucgacaagaucaccaacaaggugaacagcgugaucgagaagaugaacacccaguucaccgccgugggcaaggaguucaaccaccuggagaagagaaucgagaaccugaacaagaagguggacgacggcuuccuggacaucuggaccuacaacgccgagcugcuggugcugcuggagaacgagagaacccuggacuaccacgacagcaacgugaagaaccuguacgagaaggugagaaaccagcugaagaacaacgccaaggagaucggcaacggcugcuucgaguucuaccacaagugcgacaacaccugcauggagagcgugaagaacggcaccuacgacuaccccaaguacagcgaggaggccaagcugaacagagagaagaucgacggcgugaagcuggagagcaccagaaucuaccagauccuggccaucuacagcaccguggccagcagccuggugcugguggugagccugggcgccaucagcuucuggaugugcagcaacggcagccugcagugcagaaucugcaucuga

SEQ ID NO: 171082 - RNA, 1701 nt, Artificial Sequence; identical to SEQ ID NO: 170100
  derived and/or modified CDS sequence (opt4) from hemagglutinin__InfluenzaA__AHG96354

SEQ ID NO: 171083 - RNA, 1701 nt, Artificial Sequence
  derived and/or modified CDS sequence (opt4) from hemagglutinin__InfluenzaA__AHG96355
augaaggccauccugguggugcugcuguacacccuggccaccgccaacgccgacacccugugcaucggcuaccacgccaacaacagcaccgacaccguggacaccgugcuggagaagaacgugaccgugacccacagcgugaaccugcuggaggacaagcacaacggcaagcugugcaagcugagaggcguggccccccugcaccugggcaagugcaacaucgccggcuggauccugggcaaccccgagugcgagagccugagcaccgccagcagcuggagcuacaucguggagaccagcagcagcgacaacggcaccugcuaccccggcgacuucaucaacuacgaggagcugagagagcagcugagcagcgugagcagcuucgagagauucgagaucuuccccaagaccagcagcuggcccaaccacgacagcaacaagggcgugaccgccgccugcccccacgccggcgccaagagcuucuacaagaaccugaucuggcuggugaagaagggcaacagcuaccccaagcugagccagagcuacaucaacgacaagggcaaggaggugcuggugcuguggggcauccaccaccccagcaccaccgccgaccagcagagccuguaccagaacgccgacgccuacguguucgugggcaccagcagauacagcaagaaguucaagcccgagaucgccaucagacccaaggugagagaccaggagggcagaaugaacuacuacuggacccugguggagcccggcgacaagaucaccuucgaggccaccggcaaccugguggugcccagauacgccuucaccauggagagaaacgccggcagcggcaucaucaucagcgacacccccgugcacgacugcaacaccaccugccagacccccgagggcgccaucaacaccagccugcccuuccagaacauccaccccaucaccaucggcaagugccccaaguacgugaagagcaccaagcugagacuggccaccggccugagaaacgugcccagcauccagagcagaggccuguucggcgccaucgccggcuucaucgagggcggcuggaccggcaugguggacggcugguacggcuaccaccaccagaacgagcagggcagcggcuacgccgccgaccugaagagcacccagaacgccaucgacaagaucaccaacaaggugaacagcgugaucgagaagaugaacacccaguucaccgccgugggcaaggaguucaaccagcuggagaagagaaucgagaaccugaacaagaagguggacgacggcuuccuggacaucuggaccuacaacgccgagcugcuggugcugcuggagaacgagagaacccuggacuaccacgacagcaacgugaagaaccuguacgagaaggugagaaaccagcugaagaacaacgccaaggagaucggcaacggcugcuucgaguucuaccacaagugcgacaacaccugcauggagagcgugaagaacggcaccuacgacuaccccaaguacagcgaggaggccaagcugaacagagagaagaucgacggcgugaagcuggagagcaccagaaucuaccagauccuggccaucuacagcaccguggccagcagccuggugcugguggugagccugggcgccaucagcuucuggaugugcagcaacggcagccugcagugcagaaucugcaucuga

SEQ ID NO: 171084 - RNA, 1701 nt, Artificial Sequence; identical to SEQ ID NO: 169918
  derived and/or modified CDS sequence (opt4) from hemagglutinin__InfluenzaA__AHG96356

SEQ ID NO: 171085 - RNA, 1701 nt, Artificial Sequence
  derived and/or modified CDS sequence (opt4) from hemagglutinin__InfluenzaA__AHG96359
augaagaccaucaucgcccugagcuacauccugugccugguguucgcccagaagcugcccggcaacgacaacagcaccgccacccugugccugggccaccacgccgugcccaacggcaccaucgugaagaccaucaccaacgaccagaucgaggugaccaacgccaccgagcuggugcagagcagcagcaccggcggcaucugcgacagcccccaccagauccuggacggcgagaacugcacccugaucgacgcccugcugggcgacccccagugcgacggcuuccagaacaagaagugggaccuguucguggagagaagcaaggccuacagcaacugcuaccccuacgacgugcccgacuacgccagccugagaagccugguggccagcagcggcacccuggaguucaacgacgagagcuucaacuggaccggcgugacccagaacggcaccagcagcagcugcaagagaagaagcaacaacagcuucuucagcagacugaacuggcugacccaccugaaguucaaguaccccgcccugaacgugaccaugcccaacaacgagaaguucgacaagcuguacaucuggggcgugcaccaccccgugaccgacaacgaccagaucuuccuguacgcccaggccagcggcagaaucaccgugagcaccaagagaagccagcagaccgugauccccaacaucggcagcagacccagaaucagaaacauccccagcagaaucagcaucuacuggaccaucgugaagcccggcgacauccugcugaucaacagcaccggcaaccugaucgcccccagaggcuacuucaagaucagaagcggcaagagcagcaucaugagaagcgacgcccccaucggcaagugcaacagcgagugcaucacccccaacggcagcauccccaacgacaagcccuuccagaacgugaacagaaucaccuacggcgccugccccagauacgugaagcagaacacccugaagcuggccaccggcaugagaaacgugcccgagaagcagaccagaggcaucuucggcgccaucgccggcuucaucgagaacggcugggagggcaugguggacggcugguacggcuucagacaccagaacagcgagggcaucggccaggccgccgaccugaagagcacccaggccgccaucaaccagaucaacggcaagcugaacagacugaucggcaagaccaacgagaaguuccaccagaucgagaaggaguucagcgagguggagggcagaauccaggaccuggagaaguacguggaggacaccaagaucgaccuguggagcuacaacgccgagcugcugguggcccuggagaaccagcacaccaucgaccugaccgacagcgagaugaacaagcuguucgagagaaccaagaagcagcugagagagaacgccgaggacaugggcaacggcugcuucaagaucuaccacaagugcgacaacgccugcaucggcagcaucagaaacggcaccuacgaccacgacguguacagagacgaggcccugaacaacagauuccagaucaagggcguggagcugaagagcggcuacaaggacuggauccuguggaucagcuucgccaucagcugcuuccugcugugcguggcccugcugggcuucaucaugugggccugccagaagggcaacaucagaugcaacaucugcaucuga

SEQ ID NO: 171086 - RNA, 1701 nt, Artificial Sequence; identical to SEQ ID NO: 171085
  derived and/or modified CDS sequence (opt4) from hemagglutinin__InfluenzaA__AHG96371

SEQ ID NO: 171087 - RNA, 1701 nt, Artificial Sequence; identical to SEQ ID NO: 171085
  derived and/or modified CDS sequence (opt4) from hemagglutinin__InfluenzaA__AHG96383

SEQ ID NO: 171088 - RNA, 1698 nt, Artificial Sequence; identical to SEQ ID NO: 167853
  derived and/or modified CDS sequence (opt4) from hemagglutinin__InfluenzaA__AHG96395

SEQ ID NO: 171089 - RNA, 1701 nt, Artificial Sequence; identical to SEQ ID NO: 171085
  derived and/or modified CDS sequence (opt4) from hemagglutinin__InfluenzaA__AHG96407

SEQ ID NO: 171090 - RNA, 1701 nt, Artificial Sequence; identical to SEQ ID NO: 171085
  derived and/or modified CDS sequence (opt4) from hemagglutinin__InfluenzaA__AHG96419

SEQ ID NO: 171091 - RNA, 1701 nt, Artificial Sequence; identical to SEQ ID NO: 171085
  derived and/or modified CDS sequence (opt4) from hemagglutinin__InfluenzaA__AHG96431

SEQ ID NO: 171092 - RNA, 1701 nt, Artificial Sequence; identical to SEQ ID NO: 171085
  derived and/or modified CDS sequence (opt4) from hemagglutinin__InfluenzaA__AHG96443

SEQ ID NO: 171093 - RNA, 1701 nt, Artificial Sequence; identical to SEQ ID NO: 171085
  derived and/or modified CDS sequence (opt4) from hemagglutinin__InfluenzaA__AHG96455

SEQ ID NO: 171094 - RNA, 1701 nt, Artificial Sequence; identical to SEQ ID NO: 171085
  derived and/or modified CDS sequence (opt4) from hemagglutinin__InfluenzaA__AHG96467

SEQ ID NO: 171095 - RNA, 1701 nt, Artificial Sequence; identical to SEQ ID NO: 171085
  derived and/or modified CDS sequence (opt4) from hemagglutinin__InfluenzaA__AHG96479

SEQ ID NO: 171096 - RNA, 1701 nt, Artificial Sequence; identical to SEQ ID NO: 171085
  derived and/or modified CDS sequence (opt4) from hemagglutinin__InfluenzaA__AHG96491

SEQ ID NO: 171097 - RNA, 1701 nt, Artificial Sequence; identical to SEQ ID NO: 162416
  derived and/or modified CDS sequence (opt4) from hemagglutinin__InfluenzaA__AHG96503

SEQ ID NO: 171098 - RNA, 1698 nt, Artificial Sequence; identical to SEQ ID NO: 167853
  derived and/or modified CDS sequence (opt4) from hemagglutinin__InfluenzaA__AHG96515

SEQ ID NO: 171099 - RNA, 1698 nt, Artificial Sequence; identical to SEQ ID NO: 167853
  derived and/or modified CDS sequence (opt4) from hemagglutinin__InfluenzaA__AHG96527

SEQ ID NO: 171100 - RNA, 1698 nt, Artificial Sequence; identical to SEQ ID NO: 167853
  derived and/or modified CDS sequence (opt4) from hemagglutinin__InfluenzaA__AHG96539

SEQ ID NO: 171101 - RNA, 1698 nt, Artificial Sequence; identical to SEQ ID NO: 167853
  derived and/or modified CDS sequence (opt4) from hemagglutinin__InfluenzaA__AHG96551

SEQ ID NO: 171102 - RNA, 1698 nt, Artificial Sequence; identical to SEQ ID NO: 171033
  derived and/or modified CDS sequence (opt4) from hemagglutinin__InfluenzaA__AHG96563

SEQ ID NO: 171103 - RNA, 1698 nt, Artificial Sequence; identical to SEQ ID NO: 167853
  derived and/or modified CDS sequence (opt4) from hemagglutinin__InfluenzaA__AHG96575

SEQ ID NO: 171104 - RNA, 1698 nt, Artificial Sequence; identical to SEQ ID NO: 167853
  derived and/or modified CDS sequence (opt4) from hemagglutinin__InfluenzaA__AHG96587

SEQ ID NO: 171105 - RNA, 1698 nt, Artificial Sequence; identical to SEQ ID NO: 167853
  derived and/or modified CDS sequence (opt4) from hemagglutinin__InfluenzaA__AHG96599

SEQ ID NO: 171106 - RNA, 1698 nt, Artificial Sequence; identical to SEQ ID NO: 167853
  derived and/or modified CDS sequence (opt4) from hemagglutinin__InfluenzaA__AHG96611

SEQ ID NO: 171107 - RNA, 1698 nt, Artificial Sequence; identical to SEQ ID NO: 167853
  derived and/or modified CDS sequence (opt4) from hemagglutinin__InfluenzaA__AHG96623

SEQ ID NO: 171108 - RNA, 1698 nt, Artificial Sequence; identical to SEQ ID NO: 167853
  derived and/or modified CDS sequence (opt4) from hemagglutinin__InfluenzaA__AHG96635

SEQ ID NO: 171109 - RNA, 1698 nt, Artificial Sequence; identical to SEQ ID NO: 167853
  derived and/or modified CDS sequence (opt4) from hemagglutinin__InfluenzaA__AHG96647

SEQ ID NO: 171110 - RNA, 1698 nt, Artificial Sequence; identical to SEQ ID NO: 167853
  derived and/or modified CDS sequence (opt4) from hemagglutinin__InfluenzaA__AHG96659

SEQ ID NO: 171111 - RNA, 1698 nt, Artificial Sequence; identical to SEQ ID NO: 167853
  derived and/or modified CDS sequence (opt4) from hemagglutinin__InfluenzaA__AHG96671

SEQ ID NO: 171112 - RNA, 1698 nt, Artificial Sequence; identical to SEQ ID NO: 167853
  derived and/or modified CDS sequence (opt4) from hemagglutinin__InfluenzaA__AHG96683

SEQ ID NO: 171113 - RNA, 1701 nt, Artificial Sequence; identical to SEQ ID NO: 171085
  derived and/or modified CDS sequence (opt4) from hemagglutinin__InfluenzaA__AHG96695

SEQ ID NO: 171114 - RNA, 1701 nt, Artificial Sequence; identical to SEQ ID NO: 171085
  derived and/or modified CDS sequence (opt4) from hemagglutinin__InfluenzaA__AHG96707

SEQ ID NO: 171115 - RNA, 1701 nt, Artificial Sequence; identical to SEQ ID NO: 171085
  derived and/or modified CDS sequence (opt4) from hemagglutinin__InfluenzaA__AHG96719

SEQ ID NO: 171116 - RNA, 1701 nt, Artificial Sequence; identical to SEQ ID NO: 171085
  derived and/or modified CDS sequence (opt4) from hemagglutinin__InfluenzaA__AHG96731

SEQ ID NO: 171117 - RNA, 1701 nt, Artificial Sequence; identical to SEQ ID NO: 171085
  derived and/or modified CDS sequence (opt4) from hemagglutinin__InfluenzaA__AHG96743

SEQ ID NO: 171118 - RNA, 1701 nt, Artificial Sequence; identical to SEQ ID NO: 171085
  derived and/or modified CDS sequence (opt4) from hemagglutinin__InfluenzaA__AHG96755

SEQ ID NO: 171119 - RNA, 1701 nt, Artificial Sequence; identical to SEQ ID NO: 171085
  derived and/or modified CDS sequence (opt4) from hemagglutinin__InfluenzaA__AHG96767

SEQ ID NO: 171120 - RNA, 1701 nt, Artificial Sequence; identical to SEQ ID NO: 171085
  derived and/or modified CDS sequence (opt4) from hemagglutinin__InfluenzaA__AHG96779

SEQ ID NO: 171121 - RNA, 1701 nt, Artificial Sequence
  derived and/or modified CDS sequence (opt4) from hemagglutinin__InfluenzaA__AHG96791
augaagaccaucaucgcccugagcuacauccugugccugguguucgcccagaagcugcccggcaacgacaacagcaccgccacccugugccugggccaccacgccgugcccaacggcaccaucgugaagaccaucaccaacgaccagaucgaggugaccaacgccaccgagcuggugcagagcagcagcaccggcggcaucugcgacagcccccaccagauccuggacggcgagaacugcacccugaucgacgcccugcugggcgacccccagugcgacggcuuccagaacaagaagugggaccuguucguggagagaagcaaggccuacagcaacugcuaccccuacgacgugcccgacuacgccagccugagaagccugguggccagcagcggcacccuggaguucaacgacgagagcuucaacuggaccggcgugacccagaacggcaccagcagcagcugcaagagaagaagcaacaacagcuucuucagcagacugaacuggcugacccagcugaaguucaaguaccccgcccugaacgugaccaugcccaacaacgagaaguucgacaagcuguacaucuggggcgugcaccaccccgugaccgacaacgaccagaucuuccuguacgcccaggccagcggcagaaucaccgugagcaccaagagaagccagcagaccgugauccccaacaucggcagcagacccagaaucagaaacauccccagcagaaucagcaucuacuggaccaucgugaagcccggcgacauccugcugaucaacagcaccggcaaccugaucgcccccagaggcuacuucaagaucagaagcggcaagagcagcaucaugagaagcgacgcccccaucggcaagugcaacagcgagugcaucacccccaacggcagcauccccaacgacaagcccuuccagaacgugaacagaaucaccuacggcgccugccccagauacgugaagcagaacacccugaagcuggccaccggcaugagaaacgugcccgagaagcagaccagaggcaucuucggcgccaucgccggcuucaucgagaacggcugggagggcaugguggacggcugguacggcuucagacaccagaacagcgagggcaucggccaggccgccgaccugaagagcacccaggccgccaucaaccagaucaacggcaagcugaacagacugaucggcaagaccaacgagaaguuccaccagaucgagaaggaguucagcgagguggagagaagaauccaggaccuggagaaguacguggaggacaccaagaucgaccuguggagcuacaacgccgagcugcugguggcccuggagaaccagcacaccaucgaccugaccgacagcgagaugaacaagcuguucgagagaaccaagaagcagcugagagagaacgccgaggacaugggcaacggcugcuucaagaucuaccacaagugcgacaacgccugcaucggcagcaucagaaacggcaccuacgaccacgacguguacagagacgaggcccugaacaacagauuccagaucaagggcguggagcugaagagcggcuacaaggacuggauccuguggaucagcuucgccaucagcugcuuccugcugugcguggcccugcugggcuucaucaugugggccugccagaagggcaacaucagaugcaacaucugcaucuga

SEQ ID NO: 171122 - RNA, 1701 nt, Artificial Sequence; identical to SEQ ID NO: 171085
  derived and/or modified CDS sequence (opt4) from hemagglutinin__InfluenzaA__AHG96803

SEQ ID NO: 171123 - RNA, 1701 nt, Artificial Sequence; identical to SEQ ID NO: 171085
  derived and/or modified CDS sequence (opt4) from hemagglutinin__InfluenzaA__AHG96815

SEQ ID NO: 171124 - RNA, 1701 nt, Artificial Sequence; identical to SEQ ID NO: 171085
  derived and/or modified CDS sequence (opt4) from hemagglutinin__InfluenzaA__AHG96827

SEQ ID NO: 171125 - RNA, 1701 nt, Artificial Sequence; identical to SEQ ID NO: 171085
  derived and/or modified CDS sequence (opt4) from hemagglutinin__InfluenzaA__AHG96839

SEQ ID NO: 171126 - RNA, 1701 nt, Artificial Sequence; identical to SEQ ID NO: 171085
  derived and/or modified CDS sequence (opt4) from hemagglutinin__InfluenzaA__AHG96851

SEQ ID NO: 171127 - RNA, 1701 nt, Artificial Sequence; identical to SEQ ID NO: 171085
  derived and/or modified CDS sequence (opt4) from hemagglutinin__InfluenzaA__AHG96863

SEQ ID NO: 171128 - RNA, 1701 nt, Artificial Sequence; identical to SEQ ID NO: 171085
  derived and/or modified CDS sequence (opt4) from hemagglutinin__InfluenzaA__AHG96875

SEQ ID NO: 171129 - RNA, 1701 nt, Artificial Sequence; identical to SEQ ID NO: 171085
  derived and/or modified CDS sequence (opt4) from hemagglutinin__InfluenzaA__AHG96887

SEQ ID NO: 171130 - RNA, 1701 nt, Artificial Sequence; identical to SEQ ID NO: 171085
  derived and/or modified CDS sequence (opt4) from hemagglutinin__InfluenzaA__AHG96899

SEQ ID NO: 171131 - RNA, 1701 nt, Artificial Sequence; identical to SEQ ID NO: 171085
  derived and/or modified CDS sequence (opt4) from hemagglutinin__InfluenzaA__AHG96911

SEQ ID NO: 171132 - RNA, 1701 nt, Artificial Sequence; identical to SEQ ID NO: 171085
  derived and/or modified CDS sequence (opt4) from hemagglutinin__InfluenzaA__AHG96923

SEQ ID NO: 171133 - RNA, 1701 nt, Artificial Sequence; identical to SEQ ID NO: 171085
  derived and/or modified CDS sequence (opt4) from hemagglutinin__InfluenzaA__AHG96935

SEQ ID NO: 171134 - RNA, 1701 nt, Artificial Sequence; identical to SEQ ID NO: 171085
  derived and/or modified CDS sequence (opt4) from hemagglutinin__InfluenzaA__AHG96947

SEQ ID NO: 171135 - RNA, 1701 nt, Artificial Sequence; identical to SEQ ID NO: 171085
  derived and/or modified CDS sequence (opt4) from hemagglutinin__InfluenzaA__AHG96959

SEQ ID NO: 171136 - RNA, 1701 nt, Artificial Sequence; identical to SEQ ID NO: 171085
  derived and/or modified CDS sequence (opt4) from hemagglutinin__InfluenzaA__AHG96971

SEQ ID NO: 171137 - RNA, 1701 nt, Artificial Sequence; identical to SEQ ID NO: 171085
  derived and/or modified CDS sequence (opt4) from hemagglutinin__InfluenzaA__AHG96983

SEQ ID NO: 171138 - RNA, 1701 nt, Artificial Sequence; identical to SEQ ID NO: 171085
  derived and/or modified CDS sequence (opt4) from hemagglutinin__InfluenzaA__AHG96995

SEQ ID NO: 171139 - RNA, 1701 nt, Artificial Sequence; identical to SEQ ID NO: 171085
  derived and/or modified CDS sequence (opt4) from hemagglutinin__InfluenzaA__AHG97007

SEQ ID NO: 171140 - RNA, 1701 nt, Artificial Sequence; identical to SEQ ID NO: 171085
  derived and/or modified CDS sequence (opt4) from hemagglutinin__InfluenzaA__AHG97019

SEQ ID NO: 171141 - RNA, 1701 nt, Artificial Sequence; identical to SEQ ID NO: 171085
  derived and/or modified CDS sequence (opt4) from hemagglutinin__InfluenzaA__AHG97031

SEQ ID NO: 171142 - RNA, 1701 nt, Artificial Sequence; identical to SEQ ID NO: 171085
  derived and/or modified CDS sequence (opt4) from hemagglutinin__InfluenzaA__AHG97043

SEQ ID NO: 171143 - RNA, 1701 nt, Artificial Sequence
  derived and/or modified CDS sequence (opt4) from hemagglutinin__InfluenzaA__AHH00866
augaagaccaucaucgcccugagcuacauccugugccuggccuucgcccagaagcugcccggcaacgacaacagcaccgccacccugugccugggccaccacgccgugcccaacggcacccuggugaagaccaucaccaacgaccagaucgaggugaccaacgccaccgagcuggugcagagcagcagcaccggcagaaucugcgacagcccccaccagauccuggacggcgagaacugcacccugaucgacgcccugcugggcgacccccacugcgacggcuuccagaacaaggagugggaccuguucguggagagaagcaaggccuacagcaacugcuaccccuacgacgugcccgacuacgccagccugagaagccugguggccagcagcggcacccuggaguucaacaacgagagcuucaacuggaccggcguggcccagaacggcaccagcagcgccugcaagagaagaagcaucaagagcuucuucagcagacugaacuggcugcaccagcuggagaacagauaccccgcccugaacgugaccaugcccaacaacgacaaguucgacaagcuguacaucuggggcgugcaccaccccagcaccgacagcgaccagaucagcguguacgcccaggccagcggcagagugaccgugagcaccaagagaagccagcagaccgugauccccaacaucggcagcagacccugggugagaggcaucagcagcagaaucagcaucuacuggaccaucgugaaccccggcgacauccugcugaucaacagcaccggcaaccugaucgcccccagaggcuacuucaagaucagaagcggcaagagcagcaucaugagaagcgacgcccccaucggcaagugcaacagcgagugcaucacccccaacggcagcauccccaacgacaagcccuuccagaacgugaacagaaucaccuacggcgccugccccagauacgugaagcagaacacccugaagcuggccaccggcaugagaaacgugcccgagaagcagaccagaggcaucuucggcgccaucgccggcuucaucgagaacggcugggagggcaugauggacggcugguacggcuucagacaccagaacagcgagggcaccggccaggccgccgaccugaagagcacccaggccgccaucaaccagaucaacggcaagcugaacaagcugaucgagaagaccaacgagaaguuccaccagaucgagaaggaguucagcgagguggagggcagaauccaggaccuggagaaguacguggaggacaccaagaucgaccuguggagcuacaacgccgagcugcugguggcccuggagaaccagcacaccaucgaccugaccgacagcgagaugaacaagcuguucgagagaaccagaaagcagcugagagagaacgccgaggacaugggcaacggcugcuucaagaucuaccacaagugcgacaacgccugcaucggcagcaucagaaacggcaccuacgaccacgacguguacagagacgaggcccugaacaacagauuccagaucaagggcguggagcugaagagcggcuacaaggacuggauccuguggaucagcuucgccaucagcugcuuccugcugugcguggugcugcugggcuucaucaugugggccugccagaagggcaacaucagaugcaacaucugcaucuga

SEQ ID NO: 171144 - RNA, 1701 nt, Artificial Sequence
  derived and/or modified CDS sequence (opt4) from hemagglutinin__InfluenzaA__AHH00870
augaagaccaucaucgcccugagcuacauccugugccuggccuucgcccagaagcugcccggcaacgacaacagcaccgccacccugugccugggccaccacgccgugcccaacggcacccuggugaagaccaucaccaacgaccagaucgaggugaccaacgccaccgagcuggugcagagcagcagcaccggcagaaucugcgacagcccccaccagauccuggacggcgagaacugcacccugaucgacgcccugcugggcgacccccacugcgacggcuuccagaacaaggagugggaccuguucguggagagaagcaaggccuacagcaacugcuaccccuacgacgugcccgacuacgccagccugagaagccugguggccagcagcggcacccuggaguucaacaacgagagcuucaacuggaccggcguggcccagaacggcaccagcagcgccugcaagagaagaagcaucaagagcuucuucagcagacugaacuggcugcaccagcuggagaacagauaccccgcccugaacgugaccaugcccaacaacgacaaguucgacaagcuguacaucuggggcgugcaccaccccagcaccgacagcgaccagaucagcguguacgcccaggccagcggcagagugaccgugagcaccaagagaagccagcagaccgugauccccaacaucggcagcagacccugggugagaggcaucagcagcagaaucagcaucuacuggaccaucgugaagcccggcgacauccugcugaucaacagcaccggcaaccugaucgcccccagaggcuacuucaagaucagaagcggcaagagcagcaucaugagaagcgacgcccccaucggcaagugcaacagcgagugcaucacccccaacggcagcauccccaacgacaagcccuuccagaacgugaacagaaucaccuacggcgccugccccagauacgugaagcagaacacccugaagcuggccaccggcaugagaaacgugcccgagaagcagaccagaggcaucuucggcgccaucgccggcuucaucgagaacggcugggagggcaugauggacggcugguacggcuucagacaccagaacagcgagggcaccggccaggccgccgaccugaagagcacccaggccgccaucaaccagaucaacggcaagcugaacaagcugaucgagaagaccaacgagaaguuccaccagaucgagaaggaguucagcgagguggagggcagaauccaggaccuggagaaguacguggaggacaccaagaucgaccuguggagcuacaacgccgagcugcugguggcccuggagaaccagcacaccaucgaccugaccgacagcgagaugaacaagcuguucgagagaaccagaaagcagcugagagagaacgccgaggacaugggcaacggcugcuucaagaucuaccacaagugcgacaacgccugcaucggcagcaucagaaacggcaccuacgaccacgacguguacagagacgaggcccugaacaacagauuccagaucaagggcguggagcugaagagcggcuacaaggacuggauccuguggaucagcuucgccaucagcugcuuccugcugugcguggugcugcugggcuucaucaugugggccugccagaagggcaacaucagaugcaacaucugcaucuga

SEQ ID NO: 171145 - RNA, 1701 nt, Artificial Sequence
  derived and/or modified CDS sequence (opt4) from hemagglutinin__InfluenzaA__AHJ57430
augaaggccauccugguggugcugcuguacaccuucgccaccgccaacgccgacacccugugcaucggcuaccacgccaacaacagcaccgacaccguggacaccgugcuggagaagaacgugaccgugacccacagcgugaaccugcuggaggacaagcacaacggcaagcugugcagacugagaggcguggccccccugcaccugggcaagugcaacaucgccggcuggauccugggcaaccccgagugcgagagccugagcaccgccagcagcuggagcuacaucguggagaccagcagcagcgacaacggcaccugcuaccccggcgacuucaucaacuacgaggagcugagagagcagcugagcagcgugagcagcuucgagagauucgagaucagccccaagaccagcagcuggcccaaccacgacagcaacaagggcgugagagccgccugcccccacgccggcgccaagagcuucuacaagaaccugaucuggcuggugaagaagggcaacagcuaccccaagcugagcaagagcuacaucaacgacaagggcaaggaggugcuggugcuguggggcauccaccaccccagcaccagcgccgaccagcagagccuguaccagaacgccgacgccuacguguucgugggcaccagcagauacagcaagaaguucaagcccgagaucgccaucagacccaaggugagaggccaggagggcagaaugaacuacuacuggacccugguggagcccggcgacaagaucaccuucgaggccaccggcaaccugguggugcccagauacgccuucgccauggagagaaacgccgccagcggcaucaucaucagcgacacccccgugcacgacugcaacaccaccugccagacccccaagggcgccgugaacaccagccugcccuuccagaacauccaccccaucaccaucggcaagugccccaaguacgugaagagcaccaagcugagacuggccaccggccugagaaacauccccagcauccagagcagaggccuguucggcgccaucgccggcuucaucgagggcggcuggaccggcaugguggacggcugguacggcuaccaccaccagaacgagcagggcagcggcuacgccgccgaccugaagagcacccagaacgccaucgacgagaucaccaacaaggugaacagcgugaucgagaagaugaacacccaguucaccgccgugggcaaggaguucaaccaccuggagaagagaaucgagaaccugaacaagaagguggacgacggcuuccuggacaucuggaccuacaacgccgagcugcuggugcugcuggagaacgagagaacccuggacuaccacgacagcaacgugaagaaccuguacgagaaggugagaagccagcugaagaacaacgccaaggagaucggcaacggcugcuucgaguucuaccacaagugcaacaacaccugcauggagagcgugaagaacggcaccuacgacuaccccaaguacagcgaggaggccaagcugaacagagagaagaucgacggcgugaagcuggagagcaccagaaucuaccagauccuggccaucuacagcaccguggccagcagccuggugcugguggugagccugggcgccaucagcuucuggaugugcagcaacggcagccugcagugcagaaucugcaucuga

SEQ ID NO: 171146 - RNA, 1701 nt, Artificial Sequence
  derived and/or modified CDS sequence (opt4) from hemagglutinin__InfluenzaA__AHJ57431
augaaggccauccugguggugcugcuguacaccuucgccaccgccaacgccgacacccugugcaucggcuaccacgccaacaacagcaccgacaccguggacaccgugcuggagaagaacgugaccgugacccacagcgugaaccugcuggaggacaagcacaacggcaagcugugcaagcugagaggcguggccccccugcaccugggcaagugcaacaucgccggcuggauccugggcaaccccgagugcgagagccugagcaccgccagcagcuggagcuacaucguggagaccagcagcagcgacaacggcaccugcuaccccggcgacuucaucgacuacgaggagcugagagagcagcugagcagcgugagcagcuucgagagauucgagaucuuccccaagaccagcagcuggcccaaccacgacagcaacaagggcgugagagccgccugcccccacgccggcgccaagagcuucuacaagaaccugaucuggcuggugaagaagggcaacagcuaccccaagcugagccagagcuacaucaacgacaagggcaaggaggugcuggugcuguggggcauccaccaccccagcaccagcgccgaccagcagagccuguaccagaacgccgacgccuacguguucgugggcaccagcagauacagcaagaaguucaagcccgagaucgccaucagacccaaggugagagaccaggagggcagaaugaacuacuacuggacccugguggagcccggcgacaagaucaccuucgaggccaccggcaaccugguggugcccagauacgccuucgccauggagagaaacgccggcagcggcaucaucaucagcgacacccccgugcacgacugcaacaccaccugccagacccccaagggcgccaucaacaccagccugcccuuccagaacauccaccccaucaccaucggcaagugccccaaguacgugaagagcaccaagcugagacuggccaccggccugagaaacauccccagcauccagagcagaggccuguucggcgccaucgccggcuucaucgagggcggcuggaccggcaugguggacggcugguacggcuaccaccaccagaacgagcagggcagcggcuacgccgccgaccugaagagcacccagaacgccaucgacaagaucaccaacaaggugaacagcgugaucgagaagaugaacacccaguucaccgccgugggcaaggaguucaaccaccuggagaagagaaucgagaaccugaacaagaagguggacgacggcuuccuggacaucuggaccuacaacgccgagcugcuggugcugcuggagaacgagagaacccuggacuaccacgacagcaacgugaagaaccuguacgagaaggugagaaaccagcugaagaacaacgccaaggagaucggcaacggcugcuucgaguucuaccacaagugcgacaacaccugcauggagagcgugaagaacggcaccuacgacuaccccaaguacagcgaggaggccaagcugaacagagagaagaucgacggcgugaagcuggagagcaccagaaucuaccagauccuggccaucuacagcaccguggccagcagccuggugcugguggugagccugggcgccaucagcuucuggaugugcagcaacggcagccugcagugcagaaucugcaucuga

SEQ ID NO: 171147 - RNA, 1701 nt, Artificial Sequence
  derived and/or modified CDS sequence (opt4) from hemagglutinin__InfluenzaA__AHJ57432
augaaggccauccugguggugcugcuguacaccuucgccaccgccaacgccgacacccugugcaucggcuaccacgccaacaacagcaccgacaccguggacaccgugcuggagaagaacgugaccgugacccacagcgugaaccugcuggaggacaagcacaacggcaagcugugcaagcugagaggcguggccccccugcaccugggcaagugcaacaucgccggcuggauccugggcaaccccgagugcgagagccugagcaccgccagcagcuggagcuacaucguggagaccagcagcagcgacaacggcaccugcuaccccggcgacuucaucgacuacgaggagcugagagagcagcugagcagcgugagcagcuucgagagauucgagaucuuccccaagaccagcagcuggcccaaccacgacagcaacaagggcgugaccgccgccugcccccacgccggcgccaagagcuucuacaagaaccugaucuggcuggugaagaagggcaacagcuaccccaagcugagcaagagcuacaucaacgacaagggcaaggaggugcuggugcuguggggcauccaccaccccagcaccaccgccgaccagcagagccuguaccagaacgccgacgccuacguguucgugggcaccagcagauacagcaagaaguucaagccccagaucgccaucagacccaaggugagagaccaggagggcagaaugaacuacuacuggacccugguggagcccggcgacaagaucaccuucgaggccaccggcaaccugguggugcccagauacgccuucgcccuggagagaaacgccggcagcggcaucaucaucagcgacacccccgugcacgacugcaacaccaccugccagacccccaagggcgccaucaacaccagccugcccuuccagaacauccaccccaucaccaucggcaagugccccaaguacgugaagagcaccaagcugagacuggccaccggccugagaaacgugcccagcauccagagcagaggccuguucggcgccaucgccggcuucaucgagggcggcuggaccggcaugguggagggcugguacggcuaccaccaccagaacgagcagggcagcggcuacgccgccgaccugaagagcacccagaacgccaucgacaagaucaccaacaaggugaacagcgugaucgagaagaugaacacccaguucaccgccgugggcaaggaguucaaccaccuggagaagagaaucgagaaccugaacaagaagguggacgacggcuuccuggacaucuggaccuacaacgccgagcugcuggugcugcuggagaacgagagaacccuggacuaccacgacagcaacgugaagaaccuguacgagaaggugagaaaccagcugaagaacaacgccaaggagaucggcaacggcugcuucgaguucuaccacaagugcgacaacaccugcauggagagcgugaagaacggcaccuacgacuaccccaaguacagcgaggaggccaagcugaacagagagaagaucgacggcgugaagcuggagagcaccagaaucuaccagauccuggccaucuacagcaccguggccagcagccuggugcugguggugagccugggcgccaucagcuucuggaugugcagcaacggcagccugcagugcagaaucugcaucuga

SEQ ID NO: 171148 - RNA, 1701 nt, Artificial Sequence
  derived and/or modified CDS sequence (opt4) from hemagglutinin__InfluenzaA__AHJ57433
augaaggccauccugguggugcugcuguacaccuucgccaccgccaacgccgacacccugugcaucggcuaccacgccaacaacagcaccgacaccguggacaccgugcuggagaagaacgugaccgugacccacagcgugaaccugcuggaggacaagcacaacggcaagcugugcaagcugagaggcguggccccccugcaccugggcaagugcaacaucgccggcuggauccugggcaaccccgagugcgagagccugagcaccgccagcagcuggagcuacaucguggagaccagcagcagcgacaacggcaccugcuaccccggcgacuucaucaacuacgaggagcugagagagcagcugagcagcgugagcagcuucgagagauucgagaucuuccccaagaccagcagcuggcccaaccacgacagcaacaagggcgugaccgccgccugcccccacgccggcgccaagagcuucuacaagaaccugaucuggcuggugaaggagggcaacagcuaccccaagcugagcaagagcuacaucaacgacaagggcaaggaggugcuggugcuguggggcauccaccaccccagcaccaccgccgaccagcagagccuguaccagaacgccgacgccuacguguucgugggcaccagcagauacagcaagaaguucaagcccgagaucgccaucagacccaaggugagagaccaggagggcagaaugaacuacuacuggacccugaucgagcccggcgacaagaucaccuucgaggccaccggcaaccugguggugcccagauacgccuucgccauggagagaaacgccggcagcggcaucaucaucagcgacacccccgugcacgacugcaacaccaccugccagacccccgagggcgccaucaacaccagccugcccuuccagaacauccaccccaucaccaucggcaagugccccaaguacgugaagagcaccaagcugagacuggccaccggccugagaaacgugcccagcauccagagcagaggccuguucggcgccaucgccggcuucaucgagggcggcuggaccggcaugguggacggcugguacggcuaccaccaccagaacgagcagggcagcggcuacgccgccgaccugaagagcacccagaacgccaucgacaagaucaccaacaaggugaacagcgugaucgagaagaugaacacccaguucaccgccgugggcaaggaguucaaccaccuggagaagagaaucgagaaccugaacaagaagguggacgacggcuuccuggacaucuggaccuacaacgccgagcugcuggugcugcuggagaacgagagaacccuggacuaccacgacagcaacgugaagaaccuguacgagaaggugagaaaccagcugaagaacaacgccaaggagaucggcaacggcugcuucgaguucuaccacaagugcgacaacaccugcauggagagcgugaagaacggcaccuacgacuaccccaaguacagcgaggaggccaagcugaacagagagaagaucgacggcgugaagcuggagagcaccagaaucuaccagauccuggccaucuacagcaccguggccagcagccuggugcugguggugagccugggcgccaucagcuucuggaugugcagcaacggcagccugcagugcagaaucugcaucuga

SEQ ID NO: 171149 - RNA, 1701 nt, Artificial Sequence
  derived and/or modified CDS sequence (opt4) from hemagglutinin__InfluenzaA__AHJ57434
augaaggccauccugguggugcugcuguacaccuucgccaccgccaacgccgacacccugugcaucggcuaccacgccaacaacagcaccgacaccguggacaccgugcuggagaagaacgugaccgugacccacagcgugaacccccuggaggacaagcacaacggcaagcugugcaagcugagaggcguggccccccugcaccugggcaagugcaacaucgccggcuggauccugggcaaccccgagugcgagagccugagcaccgccagcagcuggagcuacaucguggagaccagcagcagcgacaacggcaccugcuaccccggcgacuucaucgacuacgaggagcugagagagcagcugagcagcgugagcagcuucgagagauucgagaucuuccccaagaccagcagcuggcccaaccacgacagcaacaagggcgugaccgccgccugcccccacgccggcgccaagagcuucuacaagaaccugaucuggcuggugaaggagggcaacagcuaccccaagcugagcaagagcuacaucaacgacaagggcaaggaggugcuggugcuguggggcauccaccaccccagcaccaccgccgaccagcagagccuguaccagaacgccgacgccuacguguucgugggcaccagcagauacagcaagaaguucaagcccgagaucgccaucagacccaaggugagagaccaggagggcagaaugaacuacuacuggacccugguggagcccggcgacaagaucaccuucgaggccaccggcaaccugguggugcccagauacgccuucgccauggagagaaacgccggcagcggcaucaucaucagcgacacccccgugcacgacugcaacaccaccugccagacccccgagggcgccaucaacaccagccugcccuuccagaacauccaccccaucaccaucggcaagugccccaaguacgugaagagcaccaagcugagacuggccaccggccugagaaacgugcccagcauccagagcagaggccuguucggcgccaucgccggcuucaucgagggcggcuggaccggcaugguggacggcugguacggcuaccaccaccagaacgagcagggcagcggcuacgccgccgaccugaagagcacccagaacgccaucgacaagaucaccaacaaggugaacagcgugaucgagaagaugaacacccaguucaccgccgugggcaaggaguucaaccaccuggagaagagaaucgagaaccugaacaagaagguggacgacggcuuccuggacaucuggaccuacaacgccgagcugcuggugcugcuggagaacgagagaacccuggacuaccacgacagcaacgugaagaaccuguacgagaaggugagaaaccagcugaagaacaacgccaaggagaucggcaacggcugcuucgaguucuaccacaagugcgacaacaccugcauggagagcgugaagaacggcaccuacgacuaccccaaguacagcgaggaggccaagcugaacagagagaagaucgacggcgugaagcuggagagcaccagaaucuaccagauccuggccaucuacagcaccguggccagcagccuggugcugguggugagccugggcgccaucagcuucuggaugugcagcaacggcagccugcagugcagaaucugcaucuga

SEQ ID NO: 171150 - RNA, 1701 nt, Artificial Sequence
  derived and/or modified CDS sequence (opt4) from hemagglutinin__InfluenzaA__AHJ57435
augaaggccauccugguggugcugcuguacaccuucgccaccgccaacgccgacacccugugcaucggcuaccacgccaacaacagcaccgacaccguggacaccgugcuggagaagaacgugaccgugacccacagcgugaaccugcuggaggacaagcacaacggcaagcugugcaagcugagaggcguggccccccugcaccugggcaagugcaacaucgccggcuggauccugggcaaccccgagugcgagagccugagcaccgccagcagcuggagcuacaucguggagaccagcagcagcgacaacggcaccugcuaccccggcgacuucaucaacuacgaggagcugagagagcagcugagcagcgugagcagcuucgagagauucgagaucuuccccaagaccagcagcuggcccaaccacgacagcaacagaggcgugaccgccgccugcccccacgccggcgccaagagcuucuacaagaaccugaucuggcuggugaagaagggcaacagcuaccccaagcugagccagagcuacaucaacgacaagggcaaggaggugcuggugcuguggggcauccaccaccccagcaccaccgccgaccagcagagccuguaccagaacgccgacgccuacguguucgugggcaccagcagauacagcaagaaguucaagcccgagaucgccaucagacccaaggugagagaccaggagggcagaaugaacuacuacuggacccugguggagcccggcgacaagaucaccuucgaggccaccggcaaccugguggugcccagauacgccuucgccauggagagaaacgccggcagcggcaucaucaucagcgacacccccgugcacgacugcaacaccaccugccagacccccgagggcgccaucaacaccagccugcccuuccagaacauccaccccaucaccaucggcaagugccccaaguacgugaagagcaccaagcugagacuggccaccggccugagaaacgugcccagcauccagagcagaggccuguucggcgccaucgccggcuucaucgagggcggcuggaccggcaugguggacggcugguacggcuaccaccaccagaacgagcagggcagcggcuacgccgccgaccugaagagcacccagaacgccaucgacaagaucaccaacaaggugaacagcgugaucgagaagaugaacacccaguucaccgccgugggcaaggaguucaaccaccuggagaagagaaucgagaaccugaacaagaagguggacgacggcuuccuggacaucuggaccuacaacgccgagcugcuggugcugcuggagaacgagagaacccuggacuaccacgacagcaacgugaagaaccuguacgagaaggugagaaaccagcugaagaacaacgccaaggagaucggcaacggcugcuucgaguucuaccacaagugcgacaacaccugcauggagagcgugaagaacggcaccuacgacuaccccaaguacagcgaggaggccaagcugaacagagagaagaucgacggcgugaagcuggagagcaccagaaucuaccagauccuggccaucuacagcaccguggccagcagccuggugcugguggugagccugggcgccaucagcuucuggaugugcagcaacggcagccugcagugcagaaucugcaucuga

SEQ ID NO: 171151 - RNA, 1701 nt, Artificial Sequence
  derived and/or modified CDS sequence (opt4) from hemagglutinin__InfluenzaA__AHJ57436
augaagaccaucaucgcccugagcuacauccugugccugguguucgcccagaagcugcccggcaacgacaacagcaccgccacccugugccugggccaccacgccgugcccaacggcaccaucgugaagaccaucaccaacgaccagaucgaggugaccaacgccaccgagcuggugcagagcagcagcaccggcgagaucugcgacagcccccaccagauccuggacggcgagaacugcacccugaucgacgcccugcugggcgacccccagugcgacggcuuccagaacaagaagugggaccuguucguggagagaagcaaggccuacagcaacugcuaccccuacgacgugcccgacuacgccagccugagaagccugguggccagcagcggcacccuggaguucaacaacgagagcuucaacuggaccggcgugacccagaacggcaccagcagcgccugcaucagaagaagcaacagcagcuucuucagcagacugaacuggcugacccaccugaacuucaaguaccccgcccugaacgugaccauccccaacaacgagcaguucgacaagcuguacaucuggggcgugcaccaccccggcaccgacaaggaccagaucuuccuguacgcccaggccagcggcagaaucaccgugagcaccaagagaagccagcagaccgugauccccaacaucggcagcagacccagagugagaaacauccccagcagaaucagcaucuacuggaccaucgugaagcccggcgacauccugcugaucaacagcaccggcaaccugaucgcccccagaggcuacuucaagaucagaagcggcaagagcagcaucaugagaagcgacgcccccaucggcaagugcaacagcgagugcaucacccccaacggcagcauccccaacgacaagcccuuccagaacgugaacagaaucaccuacggcgccugccccagauacgugaagcagaacacccugaagcuggccaccggcaugagaaacgugcccgagaagcagaccagaggcaucuucggcgccaucgccggcuucaucgagaacggcugggagggcaugguggacggcugguacggcuucagacaccagaacagcgagggcagaggccaggccgccgaccugaagagcacccaggccgccaucgaccagaucaacggcaagcugaacagacugaucggcaagaccaacgagaaguuccaccagaucgagaaggaguucagcgagguggagggcagaauccaggaccuggagaaguacguggaggacaccaagaucgaccuguggagcuacaacgccgagcugcugguggcccuggagaaccagcacaccaucgaccugaccgacagcgagcugaacaagcuguucgagaagaccaagaagcagcugagagagaacgccgaggacaugggcaacggcugcuucaagaucuaccacaagugcgacaacgccugcaucggcagcaucagaaacggcaccuacgaccacgacguguacagagacgaggcccugaacaacagauuccagaucaagggcguggagcugaagagcggcuacaaggacuggauccuguggaucagcuucgccaucagcugcuuccugcugugcguggcccugcugggcuucaucaugugggccugccagaagggcaacaucagaugcaacaucugcaucuga

SEQ ID NO: 171152 - RNA, 1701 nt, Artificial Sequence
  derived and/or modified CDS sequence (opt4) from hemagglutinin__InfluenzaA__AHJ57437
augaagaccaucaucgcccugagcuacauccugugccugguguucgcccagaagcugcccggcaacgacaacagcaccgccacccugugccugggccaccacgccgugcccaacggcaccaucgugaagaccaucaccaacgaccagaucgaggugaccaacgccaccgagcuggugcagaacagcagcaccggcgagaucugcgacagcccccaccagauccuggacggcgagaacugcacccugaucgacgcccugcugggcgacccccagugcgacggcuuccagaacaagaagugggaccuguucguggagagaagcaaggccuacagcaacugcuaccccuacgacgugcccgacuacgccagccugagaagccugguggccagcagcggcacccuggaguucaacaacgagagcuucaacuggaccggcgugacccagaacggcaccagcagcgccugcaucagaagaagcaacagcagcuucuucagcagacugaacuggcugacccaccugaacuucaaguaccccgcccugaacgugaccaugcccaacaacgagcaguucgacaagcuguacaucuggggcgugcaccaccccggcaccgacaaggaccagaucuuccuguacgcccagagcagcggcagaaucaccgugagcaccaagagaagccagcagaccgugauccccaacaucggcagcagacccagagugagaaacauccccagcagaaucagcaucuacuggaccaucgugaagcccggcgacauccugcugaucaacagcaccggcaaccugaucgcccccagaggcuacuucaagaucagaagcggcaagagcagcaucaugagaagcgacgcccccaucggcaagugcaacagcgagugcaucacccccaacggcagcauccccaacgacaagcccuuccagaacgugaacagaaucaccuacggcgccugccccagauacgugaagcagagcacccugaagcuggccaccggcaugagaaacgugcccgagaagcagaccagaggcaucuucggcgccaucgccggcuucaucgagaacggcugggagggcaugguggacggcugguacggcuucagacaccagaacagcgagggcagaggccaggccgccgaccugaagagcacccaggccgccaucgaccagaucaacggcaagcugaacagacugaucggcaagaccaacgagaaguuccaccagaucgagaaggaguucagcgagguggagggcagaauccaggaccuggagaaguacguggaggacaccaagaucgaccuguggagcuacaacgccgagcugcugguggcccuggagaaccagcacaccaucgaccugaccgacagcgagaugaacaagcuguucgagaagaccaagaagcagcugaaggagaacgccgaggacaugggcaacggcugcuucaagaucuaccacaagugcgacaacgccugcaucggcagcaucagaaacggcaccuacgaccacgacguguacagagacgaggcccugaacaacagauuccagaucaagggcguggagcugaagagcggcuacaaggacuggauccuguggaucagcuucgccaucagcugcuuccugcugugcguggcccugcugggcuucaucaugugggccugccagaagggcaacaucagaugcaacaucugcaucuga

SEQ ID NO: 171153 - RNA, 1701 nt, Artificial Sequence
  derived and/or modified CDS sequence (opt4) from hemagglutinin__InfluenzaA__AHJ57438
augaagaccaucaucgcccugagcuacauccugugccugguguucgcccagaagcugcccggcaacgacaacagcaccgccacccugugccugggccaccacgccgugcccaacggcaccaucgugaagaccaucaccaacgaccagaucgaggugaccaacgccaccgagcuggugcagaacagcagcaccggcgagaucugcgacagcccccaccagauccuggacggcgagaacugcacccugaucgacgcccugcugggcgacccccagugcgacggcuuccagaacaagaagugggaccuguucguggagagaagcaaggccuacagcaacugcuaccccuacgacgugcccgacuacgccagccugagaagccugguggccagcagcggcacccuggaguucaacaacgagagcuucaacuggaccggcgugacccagaacggcaccagcagcgccugcaucagaagaagcaacagcagcuucuucagcagacugaaguggcugacccaccugaacuucaaguaccccgcccugaacgugaccaugcccaacaacgagcaguucgacaagcuguacaucuggggcgugcaccaccccggcaccgacaaggaccagaucuuccuguacgcccaggccagcggcagaaucaccgugagcaccaagagaagccagcaggccgugauccccaacaucggcagcagacccagaaucagaaacauccccagcagaaucagcaucuacuggaccaucgugaagcccggcgacauccugcugaucaacagcaccggcaaccugaucgcccccagaggcuacuucaagaucagaagcggcaagagcagcaucaugagaagcgacgcccccaucggcaagugcaacagcgagugcaucacccccaacggcagcauccccaacgacaagcccuuccagaacgugaacagaaucaccuacggcgacugccccagauacgugaagcagagcacccugaagcuggccaccggcaugagaaacgugcccgagaagcagaccagaggcaucuucggcgccaucgccggcuucaucgagaacggcugggagggcaugguggacggcugguacggcuucagacaccagaacagcgagggcagaggccaggccgccgaccugaagagcacccaggccgccaucgaccagaucaacggcaagcugaacagacugaucggcaagaccaacgagaaguuccaccagaucgagaaggaguucagcgagguggagggcagaauccaggaccuggagaaguacguggaggacaccaagaucgaccuguggagcuacaacgccgagcugcugguggcccuggagaaccagcacaccaucgaccugaccgacagcgagaugaacaagcuguucgagaagaccaagaagcagcugagagagaacgccgaggacaugggcaacggcugcuucaagaucuaccacaagugcgacaacgccugcaccggcagcaucagaaacggcaccuacgaccacgacguguacagagacgaggcccugaacaacagauuccagaucaagggcguggaggugaagagcggcuacaaggacuggauccuguggaucagcuucgccaucagcugcuuccugcugugcguggcccugcugggcuucaucaugugggccugccagaagggcaacaucagaugcaacaucugcaucuga

SEQ ID NO: 171154 - RNA, 1701 nt, Artificial Sequence
  derived and/or modified CDS sequence (opt4) from hemagglutinin__InfluenzaA__AHJ57651
augaucgccuucaucgugaucgccauccuggccgccaccggcaagagcgacaagaucugcaucggcuaccacgccaacaacagcaccaccaagguggacaccauccuggagaagaacgugaccgugacccacagcguggagcugcuggagaaccagaaggaggagagauucugcaagaucagcaacaaggccccccuggaccugagagacugcacccuggagggcuggauccugggcaaccccagaugcggcauccugcuggccgaccagagcuggagcuacaucguggagagacccaacgccagaaacggcaucugcuaccccggcacccugaacgagguggaggagcugaaggcccugaucggcagcggcgagagaguggagagauucgagauguuccccaagagcaccugggccggcguggacaccgacagcggcgugagcagcgccugcccccugggcaacggccccagcuucuacagaaaccugcuguggaucaucaagcugaagagcagcgaguaccccgugaucagaggcaccuucaacaacaccggcgacaagagcauccuguacuucuggggcgugcaccacccccccgugaccaccgagcaggaggcccuguacggcagcggcgacagauacgugagaaugggcaccgagagcaugaacuucgccagaagccccgagaucgccgccagacccgccgugaacggccagagaggcagaaucgacuacuucuggagcauccugaagcccggcgagacccugaacguggagagcaacggcaaccugaucgcccccugguacgccuacagauucgugaacaaggacagcaagggcgccaucuucagaagcacccugcccaucgagaacugcgacgccaccugccagaccaccgagggcgugaucagaaccaacaagaccuuccagaacgugagcccccuguggaucggcgagugccccaaguacgugaagagcaagagccugagacuggccaccggccugagaaacgugccccagaucgagaccagaggccuguucggcgccaucgccggcuucaucgagggcggcuggaccggcaugaucgacggcugguacggcuaccaccacgagaacagccagggcagcggcuacgccgccgacagagagagcacccagaaggccaucgacggcaucaccaacaaggugaacagcaucaucgacaagaugaacacccaguucgaggccgugggccacgaguucagcaaccuggagagaagaaucgacaaccugaacaagagaauggaggacggcuuccuggacguguggaccuacaacgccgagcugcuggugcugcuggagaacgagagaacccuggacaugcacgacgccaacgugaagauccuguacgagaaggugagaagccagcugagagacaacgccaaggaccugggcaacggcugcuucgaguucuggcacaagugcgacaacgagugcaucgagagcgugaagaacggcaccuacaacuaccccaaguaccagagcgagagcagacugaacagacagaccaucgagagcgugaagcuggagaaccugggcguguaccagauccuggccaucuacagcaccgugagcagcagccuggugcuggugggccugauccuggccaugggccuguggaugugcagcaacggcagcaugcagugcagaaucugcaucuga

SEQ ID NO: 171155 - RNA, 1701 nt, Artificial Sequence
  derived and/or modified CDS sequence (opt4) from hemagglutinin__InfluenzaA__AHJ57663
augaucgccuucaucgugaucgccacccugguggccaccggcaagagcgacaagaucugcaucggcuaccacgccaacaacagcaccaccaagguggacaccauccuggagaagaacgugaccgugacccacagcguggagcugcuggagaaccagaaggaggagagauucugcaagaucagcaacaaggccccccuggaccugagagacugcacccuggagggcuggauccugggcaaccccagaugcggcauccugcuggccgaccagagcuggagcuacaucguggagagacccaacgccagaaacggcaucugcuaccccggcacccugaacgaggccgaggagcugaaggcccugaucggcagcggcgagagaguggagagauucgagauguuccccaagagcaccuggaccggcguggacaccgagagcggcgugagcagcgccugcccccugggcaacggccccagcuucuacagaaaccugcuguggaucaucaagcugaagagcagcgaguaccccgugaucagaggcaccuucaacaacaccggcgacaagagcauccuguacuucuggggcgugcaccacccccccgugaccaccgagcagaacgcccuguacggcagcggcgacagauacgugagaaugggcaccgagagcaugaacuucgccagaagccccgagaucgccgccagacccgccgugaacggccagagaggcagaaucgacuacuucuggagcauccugaagcccggcgagacccugaacguggagagcaacggcaaccugaucgcccccugguacgccuacagauucgugaacaaggacagcaagggcgccaucuucagaagcaaccugcccaucgagaacugcgacgccaccugccagaccaccgagggcgugaucagaaccaacaagaccuuccagaacgugagcccccuguggaucggcgagugccccaaguacgugaagagcaagagccugagacuggccaccggccugagaaacgugccccagaucgagaccagaggccuguucggcgccaucgccggcuucaucgagggcggcuggaccggcaugaucgacggcugguacggcuaccaccacgagaacagccagggcagcggcuacgccgccgacaaggagagcacccagaaggccaucgacggcaucaccaacaaggugaacagcaucaucgacaagaugaacacccaguucgaggccgugggccacgaguucagcaaccuggagagaagaaucgacaaccugaacaagagaauggaggacggcuuccuggacguguggaccuacaacgccgagcugcuggugcugcuggagaacgagagaacccuggaccugcacgacgccaacgugaagaaccugcacgagagagugaagagccagcugagagacaacgccaacgaccugggcaacggcugcuucgaguucuggcacaagugcgacaacgagugcauggagagcgugaagaacggcaccuacaacuaccccaaguaccaggccgagagcagacugaacaagcagaagaucgagagcgugaagcuggaggaguucggcguguaccagauccuggccaucuacagcaccgugagcagcagccuggugcuggugggccugaucauggccaugggccuguggaugugccccaacggcagcaugcagugcagaaucugcaucuga

SEQ ID NO: 171156 - RNA, 1701 nt, Artificial Sequence
  derived and/or modified CDS sequence (opt4) from hemagglutinin__InfluenzaA__AHJ57674
augaucgccuucaucgugaucgccauccuggugaccaccggcaagagcgacaagaucugcaucggcuaccacgccaacaacagcaccaccaagguggacaccauccuggagaagaacgugaccgugacccacagcguggagcugcuggagaaccagaaggaggagagauucugcaagaucagcaacaaggccccccuggaccugagagacugcacccuggagggcuggauccugggcaaccccagaugcggcauccugcuggccgaccagagcuggagcuacaucguggagagacccaacgccagaaacggcaucugcuaccccggcacccugaacgagguggaggagcugaaggcccugaucggcagcggcgagagaguggagagauucgagauguuccccaagagcaccugggccggcguggacaccaacagcggcgugagcagcgccugcccccugggcgagggccccagcuucuacagaaaccugcuguggaucaucaagcacaccaccagcggcuaccccgugaucaagggcaccuacagaaacaccggcgacaagagcgugcuguacuucuggggcgugcaccacccccccgacaccaccgagcagaacgugcuguacggcagcggcaacagauacgugagaaugggcaccgagagcaugaacuucgccagaagccccgagaucgccgccagacccgccgugaacggccagagaggcagaaucgacuacuucuggagcauccugaagcccggcgagacccugaacguggagagcaacggcaaccugaucgcccccugguacgccuacagauucgugaacaaggacagcaagggcgccaucuucagaagcaaccugcccaucgagaacugcgacgccaccugccagaccaccgagggcgugaucagaaccaacaagaccuuccagaacgugagcccccuguggaucggcgagugccccaaguacgugaagagcaagagccugagacuggccaccggccugagaaacgugccccagaucgagaccagaggccuguucggcgccaucgccggcuucaucgagggcggcuggaccggcaugaucgacggcugguacggcuaccaccacgagaacagccagggcagcggcuacgccgccgacagagagagcacccagaaggccaucgacggcaucaccaacaaggugaacagcaucaucgacaagaugaacacccaguucgaggccgugggccacgaguucagcaaccuggagagaagaaucgacaaccugaacaagagaauggaggacggcuuccuggacguguggaccuacaacgccgagcugcuggugcugcuggagaacgagagaacccuggaccugcacgacgccaacgugaagaaccugcacgagagagugagaagccagcugagagacaacgccaacgaccugggcaacggcugcuucgaguucuggcacaagugcgacaacgagugcauggagagcgugaagaacggcaccuacaacuaccccaaguaccaggccgagagcagacugaacagacagaagaucgagagcgugaagcuggaggaguucggcguguaccagauccuggccaucuacagcaccgugagcagcagccuggugcuggugggccugaucauggccaugggccuguggaugugcagcaacggcagcaugcagugcagaaucugcaucuga

SEQ ID NO: 171157 - RNA, 1701 nt, Artificial Sequence
  derived and/or modified CDS sequence (opt4) from hemagglutinin__InfluenzaA__AHJ57686
augaucgccuucaucgugaucgccauccuggccgccaccggcaagagcgacaagaucugcaucggcuaccacgccaacaacagcaccaccaagguggacaccauccuggagaagaacgugaccgugacccacagcguggagcugcuggagaaccagaaggagggcagauucugcaagaucagcaacaaggccccccuggaccugagagacugcacccuggagggcuggauccugggcaaccccagaugcggcauccugcuggccgaccagagcuggagcuacaucguggagagacccaacgccagaaacggcaucugcuaccccggcauccugaacgaggccgaggagcugaaggcccugaucggcagcggcgagagaguggagagauucgagauguuccccaagagcaccugggccggcguggacaccaacagcggcgugagcagcgccugcccccugggcaacggccccagcuucuacagaaaccugcuguggaucaucaagcugaagagcagcgccuaccccgugaucagaggcaccuucaacaacaccggcgacaagagcauccuguacuucuggggcgugcaccacccccccguggccaccgagcaggaggcccuguacggcagcggcaacagauacgugagaaugggcaccgagagcaugaacuucgccagaaaccccgagaucgccgccagacccgccgugaacggccagagaggcagaaucgacuacuucuggagcauccugaagcccggcgagacccugaacguggagagcaacggcaaccugaucgcccccugguacgccuacagauucgugaacaaggacagcaagggcgccaucuucagaagcaaccugcccaucgagaacugcgaggccaccugccagaccaccgagggcgugaucagaaccaacaagaccuuccagaacgugagcccccuguggaucggcgagugccccaaguacgugaagagcaagagccugagacuggccaccggccugagaaacgugccccagaucgagaccagaggccuguucggcgccaucgccggcuucaucgagggcggcuggaccggcaugaucgacggcugguacggcuaccaccacgagaacagccagggcagcggcuacgccgccgacagagagagcacccagaaggccaucgacggcaucaccaacaaggugaacagcaucaucgacaagaugaacacccaguucgaggccgugggccacgaguucagcaaccuggagagaagaaucgacaaccugaacaagagaauggaggacggcuuccuggacguguggaccuacaacgccgagcugcuggugcugcuggagaacgagagaacccuggaccugcacgacgccaacgugaagaaccugcacgagaaggugagaagccagcugagagacaacgccaacgaccugggcaacggcugcuucgaguucuggcacaagugcgacaacgagugcauggagagcgugaagaacggcaccuacgacuaccccaaguaccaggccgagagcagacugaacagacagaagaucgagagcgugaagcuggagaacuucgacguguaccagauccuggccaucuacagcaccgugagcagcagccuggugcuggugggccugaucauggccaugggccuguggaugugcagcaacggcagcaugcagugcagaaucugcaucuga

SEQ ID NO: 171158 - RNA, 1701 nt, Artificial Sequence
  derived and/or modified CDS sequence (opt4) from hemagglutinin__InfluenzaA__AHJ57697
augaucgccuucaucgugaucgccauccuggccgccaccggcaagagcgacaagaucugcaucggcuaccacgccaacaacagcaccaccaagguggacaccauccuggagaagaacgugaccgugacccacagcguggagcugcuggagaaccagaaggaggagagauucugcaagaucagcaacaaggccccccuggaccugagagacugcacccuggagggcuggauccugggcaaccccagaugcggcauccugcuggccgaccagagcuggagcuacaucguggagagacccaacgccagaaacggcaucugcuaccccggcacccugaacgagguggaggagcugaaggcccugaucggcagcggcgagagaguggagagauucgagauguuccccaagagcaccugggccggcguggacaccaacagcggcgugagcagcgccugcccccugggcaacggccccagcuucuacagaaaccugcuguggaucaucaagcugaagagcagcgaguaccccgugaucagaggcaccuucaacaacaccggcgacaagagcauccuguacuucuggggcgugcaccacccccccgugaccaccgagcaggaggcccuguacggcagcggcgacagauacgugagaaugggcaccgagagcaugaacuucgccagaagccccgagaucgccgccagacccgccgugaacggccagagaggcagaaucgacuacuucuggagcauccugaagcccggcgagacccugaacguggagagcaacggcaaccugaucgcccccugguacgccuacagauucgugaacaaggacagcaagggcgccaucuucagaagcaaccugcccaucgagaacugcgacgccaccugccagaccaccgagggcgugaucagaaccaacaagaccuuccagaacgugagcccccuguggaucggcgagugccccaaguacgugaagagcaagagccugagacuggccaccggccugagaaacgugccccagaucgagaccagaggccuguucggcgccaucgccggcuucaucgagggcggcuggaccggcaugaucgacggcugguacggcuaccaccacgagaacagccagggcagcggcuacgccgccgacagagagagcacccagaaggccaucgacggcaucaccaacaaggugaacagcaucaucgacaagaugaacacccaguucgaggccgugggccacgaguucagcaaccuggagagaagaaucgacaaccugaacaagagaauggaggacggcuuccuggacguguggaccuacaacgccgagcugcuggugcugcuggagaacgagagaacccuggaccugcacgacgccaacgugaagaaccugcacgagaaggugaagagccagcugagagacaacgccaacgaccugggcaacggcugcuucgaguucuggcacaagugcgacaacgagugcauggagagcgugaagaacggcaccuacgacuaccccaaguaccaggccgagagcagacugaacagacagaagaucgagagcgugaagcuggagaacuucgacguguaccagauccuggccaucuacagcaccgugagcagcagccuggugcuggugggccugaucauggccaugggccuguggaugugcagcaacggcagcaugcagugcagaaucugcaucuga

SEQ ID NO: 171159 - RNA, 1701 nt, Artificial Sequence
  derived and/or modified CDS sequence (opt4) from hemagglutinin__InfluenzaA__AHJ57707
augaucgccuucaucgugaucgccauccuggugaccaccggcaagagcgacaagaucugcgugggcuaccacgccaacaacagcaccaccaagguggacaccauccuggagaagaacgugaccgugacccacagcguggagcugcuggagaaccagaaggaggagagauucugcaagaucagcaacaaggccccccuggaccugagagacugcacccuggagggcuggauccugggcaaccccagaugcggcauccugcuggccgaccagagcuggagcuacaucguggagagacccaacgccagaaacggcaucugcuaccccggcacccugaacgagguggaggagcugaaggcccugaucggcagcggcgagagaguggagagauucgagauguuccccaagagcaccuggaccggcguggacaccaacagcggcgugagcagcgccugcccccugggcgagggccccagcuucuacagaaaccugcuguggaucaucaagcacaccaccagcggcuaccccgugaucaagggcaccuacagaaacaccggcgacaagagcgugcuguacuucuggggcgugcaccacccccccgacaccaccgagcagaacgugcuguacggcagcggcaacagauacgugagaaugggcaccgagagcaugaacuucgccagaagccccgagaucgccgccagacccgccgugaacggccagagaggcagaaucgacuacuucuggagcauccugaagcccggcgagacccugaacguggagagcaacggcaaccugaucgcccccugguacgccuacagauucgugaacaaggacagcaagggcgccaucuucagaagcaaccugcccaucgagaacugcgacgccaccugccagaccaccgagggcgugaucagaaccaacaagaccuuccagaacgugagcccccuguggaucggcgagugccccaaguacgugaagagcaagagccugagacuggccaccggccugagaaacgugccccagaucgagaccagaggccuguucggcgccaucgccggcuucaucgagggcggcuggaccggcaugaucgacggcugguacggcuaccaccacgagaacagccagggcagcggcuacgccgccgacagagagagcacccagaaggccaucgacggcaucaccaacaaggugaacagcaucaucgacaagaugaacacccaguucgaggccgugggccacgaguucagcaaccuggagagaagaaucgacaaccugaacaagagaauggaggacggcuuccuggacguguggaccuacaacgccgagcugcuggugcugcuggagaacgagagaacccuggaccugcacgacgccaacgugaagaaccugcacgagagagugagaagccagcugagagacaacgccaacgaccugggcaacggcugcuucgaguucuggcacaagugcgacaacgagugcauggagagcgugaagaacggcaccuacaacuaccccaaguaccaggccgagagcagacugaacaagcagaagaucgagagcgugaagcuggaggaguucggcguguaccagauccuggccaucuacagcaccgugagcagcagccuggugcuggugggccugaucauggccaugggccuguggaugugcagcaacggcagcaugcagugcagaaucugcaucuga

SEQ ID NO: 171160 - RNA, 1701 nt, Artificial Sequence
  derived and/or modified CDS sequence (opt4) from hemagglutinin__InfluenzaA__AHJ57719
augaucgccuucaucgugaucgccauccuggccgccaccggcaagagcgacaagaucugcaucggcuaccacgccaacaacagcaccaccaagguggacaccauccuggagaagaacgugaccgugacccacagcguggagcugcuggagaaccagaaggaggagagauucugcaagaucagcaacaaggccccccuggaccugagagacugcacccuggagggcuggauccugggcaaccccagaugcggcauccugcugagcgaccagagcuggagcuacaucguggagagacccaacgccagaaacggcaucugcuaccccggcauccugaacgaggccgaggagcugaaggcccugaucggcagcggcgagagaguggagagauucgagauguuccccaagagcaccugggccggcguggacaccaacagcggcgugagcagcgccugcccccugggcaacggccccagcuucuucagaaaccugcuguggaucaucaagcugaagagcagcaccuaccccgugaucagaggcaccuucaacaacaccggcgacaagagcauccuguacuucuggggcgugcaccaccccagcgugaccaccgagcaggaggcccuguacggcagcggcaacagauacgugagaaugggcaccgagagcaugaacuucgccagaagccccgagaucgccgccagacccgccgugaacggccagagaggcagaaucgacuacuucuggagcauccugaagcccggcgagacccugaacguggagagcaacggcaaccugaucgcccccugguacgccuacagauucgugaacaaggacagcaagggcgccaucuucagaagcaaccugcccaucgagaacugcgacgccaccugccagaccaucgagggcgugaucagaaccaacaagaccuuccagaacgugagcccccuguggaucggcgagugccccaaguacgugaagagcaagagccugagacuggccaccggccugagaaacgugccccagaucgagaccagaggccuguucggcgccaucgccggcuucaucgagggcggcuggaccggcaugaucgacggcugguacggcuaccaccacgagaacagccagggcagcggcuacgccgacgacaaggagagcacccagaaggccaucgacggcaucaccaacaaggugaacagcaucaucgacaagaugaacacccaguucgaggccgugggccacgaguucagcaaccuggagagaagaaucgacaaccugaacaagagaauggaggacggcuuccuggacguguggaccuacaacgccgagcugcuggugcugcuggagaacgagagaacccuggaccugcacgacgccaacgugaagaaccugcacgagaaggugagaagccagcugagagacaacgccaacgaccugggcaacggcugcuucgaguucuggcacaagugcgacaacgagugcauggagagcgugaagaacggcaccuacgacuaccccaaguaccaggccgagagcagacugaacagacagaagaucgagagcgugaagcuggagaacuucgacguguaccagauccuggccaucuacagcaccgugagcagcagccuggugcuggugggccugaucauggccaugggccuguggaugugcagcaacggcagcaugcagugcagaaucugcaucuga

SEQ ID NO: 171161 - RNA, 1701 nt, Artificial Sequence
  derived and/or modified CDS sequence (opt4) from hemagglutinin__InfluenzaA__AHJ57731
augaucgccuucaucgugaucgccauccuggccgccaccggcaagagcgacaagaucugcaucggcuaccacgccaacaacagcaccaccaagguggacaccauccuggagaagaacgugaccgugacccacagcguggagcugcuggagaaccagaaggaggagagauucugcaagaucagcaacaaggccccccuggaccugagagacugcacccuggagggcuggauccugggcaaccccagaugcggcauccugcuggccgaccagagcuggagcuacaucguggagagacccaacgccagaaacggcaucugcuaccccggcauccugaacgaggccgaggagcugaaggcccugaucggcagcggcgagagaguggagagauucgagauguuccccaagagcaccugggccggcguggacaccgacagcggcgugagcagcgccugcccccugggcaacggccccagcuucuacagaaaccugcuguggaucaucaagcugaagagcagcgaguaccccgugaucagaggcaccuucaacaacaccggcgacaagagcauccuguacuucuggggcgugcaccacccccccgugaccaccgagcaggaggcccuguacggcagcggcaacagauacgugagaaugggcaccgagagcaugaacuucgccagaagccccgagaucgccgccagacccgccgugaacggccagagaggcagaaucgacuacuucuggagcauccugaagcccggcgagacccugaacguggagagcaacggcaaccugaucgcccccugguacgccuacagauucgugaacaaggacagcaagggcgccaucuucagaagcaaccugcccaucgagaacugcgacgccaccugccagaccaccgagggcgugaucagaaccaacaagaccuuccagaacgugagcccccuguggaucggcgagugccccaaguacgugaagagcaagagccugagacuggccaccggccugagaaacgugccccagaucgagaccagaggccuguucggcgccaucgccggcuucaucgagggcggcuggaccggcaugaucgacggcugguacggcuaccaccacgagaacagccagggcagcggcuacgccgccgacagagagagcacccagaaggccaucgacggcaucaccaacaaggugaacagcaucaucgacaagaugaacacccaguucgaggccgugggccacgaguucagcaaccuggagagaagaaucgacaaccugaacaagagaauggaggacggcuuccuggacguguggaccuacaacgccgagcugcuggugcugcuggagaacgagagaacccuggaccugcacgacgccaacgugaagaaccugcacgagaaggugagaagccagcugagagacaacgccaacgaccugggcaacggcugcuucgaguucuggcacaagugcgacaacgagugcauggagagcgugaagaacggcaccuacgacuaccccaaguaccagaccgagagcagacugaacagacagaagaucgagagcgugaagcuggagaacuucgacguguaccagauccuggccaucuacagcaccgugagcagcagccuggugcuggugggccugaucauggccaugggccuguggaugugcagcaacggcagcaugcagugcagaaucugcaucuga

SEQ ID NO: 171162 - RNA, 1701 nt, Artificial Sequence
  derived and/or modified CDS sequence (opt4) from hemagglutinin__InfluenzaA__AHJ57743
augaucgccuucaucgugaucgccauccugguggccaccggcaagagcgacaagaucugcaucggcuaccacgccaacaacagcaccaccaagguggacaccauccuggagaagaacgugaccgugacccacagcguggagcugcuggagaaccagaaggaggagagauucugcaagaucagcaacaaggccccccuggaccugagagacugcaccaucgagggcuggauccugggcaaccccagaugcggcauccugcuggccgaccagagcuggagcuacaucguggagagacccgacgccagaaacggcaucugcuaccccggcacccugaacgaggccgaggagcugaaggcccugaucggcagcggcgagaagguggagagauucgagauguuccccaagagcaccugggccggcguggacaccagcagcggcgugagcagcgccugcccccugggcaacggccccagcuucuacagaaaccugcuguggaucaucaagcugaagagcagcgaguaccccgugaucagaggcaccuucaacaacaccggcgacaagagcgugcuguacuucuggggcgugcaccacccccccgugaccaccgagcagaacgcccuguacggcagcggcaacagauacgugagaaugggcaccgagagcaugaacuucgccagaagccccgagaucgccgccagacccgccgugaacggccagagaggcagaaucgacuacuucuggagcauccugaagcccggcgagacccugaacguggagagcaacggcaaccugaucgcccccugguacgccuacagauucgugaacaaggacagcaagggcgccaucuucagaagcaaccugcccaucgagaacugcgacgccaccugccagaccaucgagggcgugaucagaaccaacaagaccuuccagaacgugagcccccuguggaucggcgagugccccaaguacgugaagagcaagagccugagacuggccaccggccugagaaacgugccccagaucgagaccagaggccuguucggcgccaucgccggcuucaucgagggcggcuggaccggcaugaucgacggcugguacggcuaccaccacgagaacagccagggcagcggcuacgccgccgacagagagagcacccagaaggccaucgacggcaucaccaacaaggugaacagcaucaucgacaagaugaacacccaguucgaggccgccggccacgaguucagcaaccuggagagaagaaucgacaaccugaacaagagaauggaggacggcuuccuggacguguggaccuacaacgccgagcugcuggugcugcuggagaacgagagaacccuggaccugcacgacgccaacgugaagaaccugcacgagaaggugaagagccagcugagagacaacgccaacgaccugggcaacggcugcuucgaguucuggcacaagugcgacaacgagugcauggagagcgugaagaacggcaccuacgacuaccccaaguaccagaaggagagcagacugaacagacagaagaucgagagcgugaagcuggagaacuucgacguguaccagauccuggccaucuacagcaccgugagcagcagccuggugcuggugggccugaucauggccaugggccuguggaugugcagcaacggcagcaugcagugcagaaucugcaucuga

SEQ ID NO: 171163 - RNA, 1701 nt, Artificial Sequence
  derived and/or modified CDS sequence (opt4) from hemagglutinin__InfluenzaA__AHJ57755
augaucgccuucaucgugaucgccauccugguggccaccggcaagagcgacaagaucugcaucggcuaccacgccaacaacagcaccaccaagguggacaccauccuggagaagaacgugaccgugacccacagcguggagcugcuggagaaccagaaggaggagagauucugcaagaucagcaacaaggccccccuggaccugagagacugcaccaucgagggcuggauccugggcaaccccagaugcgacauccugcuggccgaccagagcuggagcuacaucguggagagacccaacgccagaaacggcaucugcuaccccggcacccugaacgaggccgaggagcugaaggcccugaucggcagcggcgagggcguggagagauucgagauguuccccaagagcaccugggugggcguggacaccagcagcggcgugagcagcgccugcccccugggcaacggccccagcuucuacagaaaccugcuguggaucaucaagcugaagagcagcgaguaccccgugaucagaggcaccuucaacaacaccggcgacaagagcgugcuguacuucuggggcgugcaccacccccccgugaccaccgagcagaacgcccuguacggcagcggcaacagauacgugagaaugggcaccgagagcaugaacuucgccagaagccccgagaucgccgccagacccgccgugaacggccagagaggcagaaucgacuacuucuggagcauccugaagcccggcgagacccugaacguggagagcaacggcaaccugaucgcccccugguacgccuacagauucgugaacaaggacaacaagggcgccaucuucagaagcaaccugcccaucgagaacugcgacgccaccugccagaccaccgagggcgugaucagaaccaacaagaccuuccagaacgugagcccccuguggaucggcgagugccccaaguacgugaagagcaagagccugagacuggccaccggccugagaaacgugccccagaucgagaccagaggccuguucggcgccaucgccggcuucaucgagggcggcuggaccggcaugaucgacggcugguacggcuaccaccacgagaacagccagggcagcggcuacgccgccgacagagagagcacccagaaggccaucgacggcaucaccaacaaggugaacagcaucaucgacaagaugaacacccaguucgaggccgccggccacgaguucagcaaccuggagagaagaaucgacaaccugaacaagagaauggaggacggcuuccuggacguguggaccuacaacgccgagcugcuggugcugcuggagaacgagagaacccuggaccugcacgacgccaacgugaagaaccugcacgagaaggugaagagccagcugagagacaacgccaacgaccugggcaacggcugcuucgaguucuggcacaagugcgacaacgagugcauggagagcgugaagaacggcaccuacgacuaccccaaguaccagaaggagagcagacugaacagacagaagaucgagagcgugaagcuggagaacuucgacguguaccagauccuggccaucuacagcaccgugagcagcagccuggugguggugggccugaucauggccaugggccuguggaugugcagcaacggcagcaugcagugcagaaucugcaucuga

SEQ ID NO: 171164 - RNA, 1701 nt, Artificial Sequence
  derived and/or modified CDS sequence (opt4) from hemagglutinin__InfluenzaA__AHJ57767
augaucgccuucaucgugaucgccauccuggccgccaccggcaagagcgacaagaucugcaucggcuaccacgccaacaacagcaccaccaagguggacaccauccuggagaagaacgugaccgugacccacagcguggagcugcuggagaaccagaaggaggagagauucugcaagaucagcaacaaggccccccuggaccugagagacugcacccuggagggcuggauccugggcaaccccagaugcggcauccugcuggccgaccagagcuggagcuacaucguggagagacccaacgccagaaacggcaucugcuaccccggcacccugaacgagguggaggagcugaaggcccugaucggcagcggcgagagaguggagagauucgagauguuccccaagagcaccugggccggcguggacaccaacagcggcgugagcagcgccugcccccugggcaacggccccagcuucuacagaaaccugcuguggaucaucaagcugaagagcagcgaguaccccgugaucagaggcaccuucaacaacaccggcgacaagagcauccuguacuucuggggcgugcaccacccccccgugaccaccgagcaggaggcccuguacggcagcggcgacagauacgugagaaugggcaccgagagcaugaacuucgccagaagccccgagaucgccgccagacccgccgugaacggccagagaggcagaaucgacuacuucuggagcauccugaagcccggcgagacccugaacguggagagcaacggcaaccugaucgcccccugguacgccuacagauucgugaacaaggacagcaagggcgccaucuucagaagcaaccugcccaucgagaacugcgacgccaccugccagaccaccgagggcgugaucagaaccaacaagaccuuccagaacgugagcccccuguggaucggcgagugccccaaguacgugaagagcaagagccugagacuggccaccggccugagaaacgugccccagaucgagaccagaggccuguucggcgccaucgccggcuucaucgagggcggcuggaccggcaugaucgacggcugguacggcuaccaccacgagagcagccagggcagcggcuacgccgccgacaaggagagcacccagaaggccaucgacggcaucaccaacaaggugaacagcaucaucgacaagaugaacacccaguucgaggccgugggccacgaguucagcaaccuggagagaagaaucgacaaccugaacaagagaauggaggacggcuuccuggacguguggaccuacaacgccgagcugcuggugcugcuggagaacgagagaacccuggaccugcacgacgccaacgugaagaaccugcacgagaaggugagaagccagcugagagacaacgccaacgaccugggcaacggcugcuucgaguucuggcacaagugcaacaacgagugcauggagagcgugaagaacggcaccuacgacuaccccaaguaccagaaggagagcagacugaacagacagaagaucgagagcgugaagcuggagaacuucgacguguaccagauccuggccaucuacagcaccgugagcagcagccuggugcuggugggccugauccuggccaugggccuguggaugugcagcaacggcagcaugcagugcagaaucugcaucuga

SEQ ID NO: 171165 - RNA, 1701 nt, Artificial Sequence
  derived and/or modified CDS sequence (opt4) from hemagglutinin__InfluenzaA__AHJ57779
augaucgccaucaucaucaucgccauccugguggccaccggcaagagcgacaagaucugcaucggcuaccacgccaacaacagcaccaccaagguggacaccauccuggagaagaacgugaccgugacccacagcguggagcugcuggaggaccagaaggaggagagauucugcaagaucagcaacaaggccccccuggaccugagagacugcaccaucgagggcuggauccugggcaaccccagaugcggcauccugcuggccgaccagagcuggagcuacaucguggagagacccaacgccagaaacggcaucugcuaccccggcacccugaacgaggccgaggagcugaaggcccugaucggcagcggcgagggcguggagagauucgagauguuccccaagagcaccugggccggcguggacaccaacagcggcgugagcagcgccugcccccugggcaacggccccagcuucuacagaaaccugcuguggaucaucaagcugaagagcagcgaguaccccgugaucagaggcaccuucaacaacaccggcgacaagagcgugcuguacuucuggggcgugcaccacccccccgugaccaccgagcagaacgcccuguacggcagcggcaacagauacgugagaaugggcaccgagagcaugaacuucgccagaagccccgagaucgccgccagacccgccgugaacggccagagaggcagaaucgacuacuucuggagcauccugaagcccggcgagacccugaacguggagagcaacggcaaccugaucgcccccugguacgccuacagauucgugaacaaggacagcaagggcgccaucuucagaagcaaccugcccaucgagaacugcgacgccaccugccagaccaccgagggcgugaucagaaccaacaagaccuuccagaacgugagcccccuguggaucggcgagugccccaaguacgugaagagcaagagccugagacuggccaccggccugagaaacgugccccagaucgagaccagaggccuguucggcgccaucgccggcuucaucgagggcggcuggaccggcaugaucgacggcugguacggcuaccaccacgagaacagccagggcagcggcuacgccgccgacagagagagcacccagaaggccaucgacggcaucaccaacaaggugaacagcaucaucgacaagaugaacacccaguucgaggccgccggccacgaguucagcaaccuggagagaagaaucgacaaccugaacaagagaauggaggacggcuuccuggacguguggaccuacaacgccgagcugcuggugcugcuggagaacgagagaacccuggaccugcacgacgccaacgugaagaaccugcacgagaaggugaagagccagcugagagacaacgccaacgaccugggcaacggcugcuucgaguucuggcacaagugcgacaacgagugcauggagagcgugaagaacggcaccuacgacuaccccaaguaccagaaggagagcagacugaacagacagaagaucgagagcgugaagcuggagaacuucgacguguaccagauccuggccaucuacagcaccgugagcagcagccuggugcuggugggccugaucauggccaugggccuguggaugugcagcaacggcagcaugcagugcaugaucugcaucuga

SEQ ID NO: 171166 - RNA, 1701 nt, Artificial Sequence
  derived and/or modified CDS sequence (opt4) from hemagglutinin__InfluenzaA__AHJ57791
augaucgccaucaucaucaucgccauccuggugaccaccggcaagagcgacaagaucugcaucggcuaccacgccaacaacagcaccaccaagguggacaccauccuggagaagaacgugaccgugacccacagcguggagcugcuggagaacaagaaggaggagagauucugcaagaucagcaacaaggccccccuggaccugagagacugcacccuggagggcuggauccugggcaaccccagaugcggcauccugcuggccgaccagagcuggagcuacaucguggagagacccaacgccagaaacggcaucugcuaccccggcacccugaacgaggugaaggagcugaaggcccugaucggcagcggcgagagagugaagagauucgagauguuccccaagagcaccugggccggcguggacaccaacagcggcgugagcagcagcugcccccugggcaacggccccagcuucuacagaaaccugcuguggaucaucaagcacaccaccagcggcuaccccgugaucaagggcaccuacaccaacaccggcgacaagagcgugcuguacuucuggggcauccaccacccccccgacaccaccgagcagaacgugcuguacggcagcggcaacagauacgugagaaugggcaccgagagcaugaacuucgccagaagccccgagaucgccgccagacccgccgugaacggccagagaggcagaaucgacuacuucuggagcauccugaagcccggcgagacccugaacguggagagcaacggcaaccugaucgcccccugguacgccuacagauucgugaacaaggacagcaagggcgccaucuucagaagcaaccugcccaucgaggacugcgacgccaccugccagaccaccgagggcgugaucagaaccaacaagaccuuccagaacgugagcccccuguggaucggcgagugccccaaguacgugaagagcaagagccugagacuggccaccggccugagaaacgugccccagaucgagaccagaggccuguucggcgccaucgccggcuucaucgagggcggcuggaccggcaugaucgacggcugguacggcuaccaccacgagaacagccagggcagcggcuacgccgccgacagagagagcacccagaaggccaucgacggcaucaccaacaaggugaacagcaucaucgacaagaugaacacccaguucgaggccgugggccacgaguucagcaaccuggagagaagaaucgacacccugaacaagagaauggaggacggcuuccuggacguguggaccuacaacgccgagcugcuggugcugcuggagaacgagagaacccuggaccugcacgacgccaacgugaagaaccugcacgagagagugaagagccagcugagagacaacgccaacgaccugggcaacggcugcuucgaguucuggcacaagugcgacaacgagugcauggagagcgugaagaacggcaccuacaacuaccccaaguaccaggccgagagcagacugaacaagcagaagaucgagagcgugaagcuggaggaguucggcguguaccagauccuggccaucuacagcaccgugagcagcagccuggugcuggugggccugaucauggccauggugcuguggaugugcagcaacggcagcaugcagugcagagugugcaucuga

SEQ ID NO: 171167 - RNA, 1701 nt, Artificial Sequence
  derived and/or modified CDS sequence (opt4) from hemagglutinin__InfluenzaA__AHJ57815
augaucgccuucaucaucaucaccauccuggugaccaccggcaagagcgacaagaucugcaucggcuaccacgccaacaacagcaccaccaagguggacaccauccuggagaagaacgugaccgugacccacagcguggagcugcuggagaaccagaaggaggagagauucugcagaaucagcaacaaggccccccuggaccugaaggagugcacccuggagggcuggauccugggcaacccccagugcgaccugcugcugggcgaccagagcuggagcuacaucguggagagacccaacgccagaaacggcaucugcuaccccggcacccugaacgagguggaggagcugagagcccugaucggcagcggcgagggcguggagagauucgagauguuccccaagagcaccugggccggcguggacaccaacagaggcgugaccagcagcugccccuucggcagcggcagcagcuucuacagaaaccugcuguggaucgugaagcacaccaccagcagcuaccccgugaucaagggcaccuucagaaacaccggcgacaagagcgugcuguacuucuggggcgugcaccaccccuucgacaccaacgagcagaacgugcuguacggcagcggcaacagauacgugagaaugggcaccgagagcaugaacuucgccagaggccccgagguggccgccagacccguggugaacggccagagaggcagaaucgacuacuucuggagcauccugaagcccggcgagacccugaacaucgagagcaacggcaaccugaucgcccccugguacgccuacagauucgugaacaaggacagcaagggcgccaucuucagaagcaaccugcccaucgaggacugcgacgccaccugccagaccaucgagggcgugaucagaaccaacaagaccuuccagaacgugagcccccuguggaucggcgagugccccaaguacgugaagagcgagagccugagacuggccaccggccugagaaacgugccccagaucgagaccagaggccuguucggcgccaucgccggcuucaucgagggcggcuggaccggcaugaucgacggcugguacggcuaccaccacgagaacagccagggcagcggcuacgccgccgacagagagagcacccagaaggccaucgacggcaucaccaccaaggugaacagcaucaucgacaagaugaacacccaguucgaggccgugggccacgaguucagcaaccuggagagaagaaucgacaaccugaacaagagacuggaggacggcuuccuggacguguggaccuacaacgccgagcugcuggugcugcuggagaacgagagaacccuggaccugcacgacgccaacgugaagaaccugcacgagagagugagaagccagcugagagacaacgccaacgaccugggcaacggcugcuucgaguucuggcacaagugcgacaacgagugcauggagagcgugaagaacggcaccuacaacuaccccaaguaccaggccgagagcagacugaacaagcagagaaucgagagcgugaagcuggagaacuucgacguguaccagauccuggccaucuacagcaccgugagcagcagccuggugcuggugggccugauccuggccaugggccuguggaugugcagcaacggcagcaugcagugcagaaucugcaucuga

SEQ ID NO: 171168 - RNA, 1701 nt, Artificial Sequence
  derived and/or modified CDS sequence (opt4) from hemagglutinin__InfluenzaA__AHJ57827
augaucgccuucaucgugaucgccauccugguggccaccggcaagagcgacaagaucugcaucggcuaccacgccaacaacagcaccaccaagguggacaccauccuggagaagaacgugaccgugacccacagcguggagcugcuggagaaccagaaggaggagagauucugcaagaucagcaacaaggccccccuggaccugagagacugcaccaucgagggcuggauccugggcaaccccagaugcggcauccugcuggccgaccagagcuggagcuacaucguggagagacccaacgccagaaacggcaucugcuaccccggcacccugaacgagguggaggagcugaaggcccugaucggcagcggcgagagaguggagagauucgagauguuccccaagagcaccugggccggcguggacaccaacagcggcgugagcagcgccugcccccugggcaacggccccagcuucuacagaaaccugcuguggaucaucaagaccaagagcagcgaguaccccgugaucaagggcaccuucaacaacaccggcgacaagagcgugcuguacuucuggggcgugcaccacccccccagcagaaacgagcagaacgugcuguacggcagcggcgacagauacgugagaaugggcaccgagagcaugaacuucgccagaagccccgagaucgccgccagacccgccgugaacggccagagaggcagaaucgacuacuucuggagcauccugaagcccggcgagacccugaacguggagagcaacggcaaccugaucgcccccugguacgccuacagauucgugaacaaggacagcagaggcgccaucuucagaagcaaccugcccaucgagaacugcgacgccaccugccagaccgccgagggcgugaucagaaccaacaagaccuuccagaacgugagcccccuguggaucggcgagugccccaaguacgugaagagcaagagccugagacuggccaccggccugagaaacgugccccagaucgagaccagaggccuguucggcgccaucgccggcuucaucgagggcggcuggaccggcaugaucgacggcugguacggcuaccaccacgagaacagccagggcagcggcuacgccgccgacagagagagcacccagaaggccaucgacggcaucaccaacaaggugaacagcaucaucgacaagaugaacacccaguucgaggccgugggccacgaguucagcaaccuggagagaagaaucgacaaccugaacaagagaauggaggacggcuuccuggacguguggaccuacaacgccgagcugcuggugcugcuggagaacgagagaacccuggaccugcacgacgccaacgugaagaaccugcacgagagagugaagagccagcugagagacaacgccaacgaccugggcaacggcugcuucgaguucuggcacaagugcgacaacgagugcauggagagcgugaagaacggcaccuacgacuaccccaaguaccagaaggagagcagacugaacagacagaagaucgagagcgugaagcuggagaacuucgacguguaccagauccuggccaucuacagcaccgugagcagcagccuggugcuggugggccugaucauggccaugggccuguggaugugcagcaacggcagcaugcagugcagaaucugcaucuga

SEQ ID NO: 171169 - RNA, 1701 nt, Artificial Sequence
  derived and/or modified CDS sequence (opt4) from hemagglutinin__InfluenzaA__AHJ57850
augaucgccuucaucgugaucgccauccuggccaccaccggcaagagcgacaagaucugcaucggcuaccacgccaacaacagcaccaccaagguggacaccauccuggagaagaacgugaccgugacccacagcguggagcugcuggagaaccagaaggaggagagauucugcaagaucagcaacaaggccccccuggaccugagagacugcacccuggagggcuggauccugggcaaccccagaugcggcauccugcuggccgaccagagcuggagcuacaucguggagagacccaacgccagaaacggcaucugcuaccccggcauccugaacgaggccgaggagcugaaggcccugaucggcagcggcgagagaguggagagauucgagauguuccccaagagcaccugggccggcguggacaccgacagcggcgugagcagcgccugcccccugggcaacggccccagcuucuacagaaaccugcuguggaucaucaagcugaagagcagcgaguaccccgugaucagaggcaccuucaacaacaccggcgacaagagcauccuguacuucuggggcgugcaccacccccccgugaccaccgagcaggaggcccuguacggcagcggcaacagauacgugagaaugggcaccgagagcaugaacuucgccagaacccccgagaucgccgccagacccgccgugaacggccagagaggcagaaucgacuacuucuggagcauccugaagcccggcgagacccugaacguggagagcaacggcaaccugaucgcccccugguacgccuacagauucgugaacaaggacagcaagggcgccaucuucagaagcaaccugcccaucgagaacugcgacgccaccugccagaccaccgagggcgugaucagaaccaacaagaccuuccagaacgugagcccccuguggaucggcgagugccccaaguacgugaagagcaagagccugagacuggccaccggccugagaaacgugccccagaucgagaccagaggccuguucggcgccaucgccggcuucaucgagggcggcuggaccggcaugaucgacggcugguacggcuaccaccacgagaacagccagggcagcggcuacgccgccgacagagagagcacccagaaggccaucgacggcaucaccaacaaggugaacagcaucaucgacaagaugaacacccaguucgaggccgugggccacgaguucagcaaccuggagagaagaaucgacaaccugaacaagagaauggaggacggcuuccuggacguguggaccuacaacgccgagcugcuggugcugcuggagaacgagagaacccuggaccugcacgacgccaacgugaagaaccugcacgagaaggugagaagccagcugagagacaacgccaacgaccugggcaacggcugcuucgaguucuggcacaagugcgacaacgagugcauggagagcgugaagaacggcaccuacgacuaccccaaguaccaggccgagagcagacugaacagacagaagaucgagagcgugaagcuggagaacuucgacguguaccagauccuggccaucuacagcaccgugagcagcagccuggugcuggugggccugaucauggccaugggccuguggaugugcagcaacggcagcaugcagugcagaaucugcaucuga

SEQ ID NO: 171170 - RNA, 1701 nt, Artificial Sequence
  derived and/or modified CDS sequence (opt4) from hemagglutinin__InfluenzaA__AHJ57862
augaucgccuucaucgugaucgccauccuggccgccaccggcaagagcgacaagaucugcaucggcuaccacgccaacaacagcaccaccaagguggacaccauccuggagaagaacgugaccgugacccacagcguggagcugcuggagaaccagaaggaggagagauucugcaagaucagcaacaaggccccccuggaccugagagacugcacccuggagggcuggauccugggcaaccccagaugcggcauccugcuggccgaccagagcuggagcuacaucguggagagacccaacgccagaaacggcaucugcuaccccggcauccugaacgaggccgaggagcugaaggcccugaucggcagcggcgagagaguggagagauucgagauguuccccaagagcaccugggccggcguggacaccaacagcggcgugagcagcgccugcccccugggcaacggccccagcuucuacagaaaccugcuguggaucaucaagcugaagagcagcgaguaccccgugaucagaggcaccuucaacaacaccggcgacaagagcauccuguacuucuggggcgugcaccacccccccgugaccaccgagcaggaggcccuguacggcagcggcaacagauacgugagaaugggcaccgagagcaugaacuucgccagaagccccgagaucgccgccagacccgccgugaacggccagagaggcagaaucgacuacuucuggagcauccugaagcccggcgagacccugaacguggagagcaacggcaaccugaucgcccccugguacgccuacagauucgugaacaaggacagcaagggcgccaucuucagaagcaaccugcccaucgagaacugcgacgccaccugccagaccaccgagggcgugaucagaaccaacaagaccuuccagaacgugagcccccuguggaucggcgagugccccaaguacgugaagagcaagagccugagacuggccaccggccugagaaacgugccccagaucgagaccagaggccuguucggcgccaucgccggcuucaucgagggcggcuggaccggcaugaucgacggcugguacggcuaccaccacgagaacagccagggcagcggcuacgccgccgacagagagagcacccagaaggccaucgacggcaucaccaacaaggugaacagcaucaucgacaagaugaacacccaguucgaggccgugggccacgaguucagcaaccuggagagaagaaucgacaaccugaacaagagaauggaggacggcuuccuggacguguggaccuacaacgccgagcugcuggugcugcuggagaacgagagaacccuggaccugcacgacgccaacgugaagaaccugcacgagaaggugagaagccagcugagagacaacgccaacgaccugggcaacggcugcuucgaguucuggcacaagugcgacaacgagugcauggagagcgugaagaacggcaccuacgacuaccccaaguaccaggccgagagcagacugaacagacagaagaucgagagcgugaagcuggagaacuucgacguguaccagauccuggccaucuacagcaccgugagcagcagccuggugcuggugggccugaucauggccaugggccuguggaugugcagcaacggcagcaugcagugcagaaucugcaucuga

SEQ ID NO: 171171 - RNA, 1701 nt, Artificial Sequence
  derived and/or modified CDS sequence (opt4) from hemagglutinin__InfluenzaA__AHJ57873
augaucgccuucaucgugaucgccacccugguggccaccggcaagagcgacaagaucugcaugggcuaccacgccaacaacagcaccaccaagguggacaccauccuggagaagaacgugaccgugacccacagcguggagcugcuggagaaccagaaggaggagagauucugcaagaucagcaacaaggccccccuggaccugagagacugcacccuggagggcuggauccugggcaaccccagaugcggcauccugcuggccgaccagagcuggagcuacaucguggagagacccaacgccagaaacggcaucugcuaccccggcacccugaacgaggccgaggagcugaaggcccugaucggcagcggcgagagaguggagagauucgagauguuccccaagagcaccuggaccggcguggacaccgagagcggcgugagcagcgccugcccccugggcaacggccccagcuucuacagaaaccugcuguggaucaucaagcugaagagcagcgaguaccccgugaucagaggcaccuucaacaacaccggcgacaagagcauccuguacuucuggggcgugcaccacccccccgugaccaccgagcagaacgcccuguacggcagcggcgacagauacgugagaaugggcaccgagagcaugaacuucgccagaagccccgagaucgccgccagacccgccgugaacggccagagaggcagaaucgacuacuucuggagcauccugacccccggcgagacccugaacguggagagcaacggcaaccugaucgcccccugguacgccuacagauucgugaacaaggacagcaagggcgccaucuucagaagcaaccugcccaucgagaacugcgacgccaccugccagaccaccgagggcgugaucagaaccaacaagaccuuccagaacgugagcccccuguggaucggcgagugccccaaguacgugaagagcaagagccugagacuggccaccggccugagaaacgugccccagaucgagaccagaggccuguucggcgccaucgccggcuucaucgagggcggcuggaccggcaugaucgacggcugguacggcuaccaccacgagaacagccagggcagcggcuacgccgccgacaaggagagcacccagaaggccaucgacggcaucaccaacaaggugaacagcaucaucgacaagaugaacacccaguucgaggccgugggccacgaguucagcaaccuggagagaagaaucgacaaccugaacaagagaauggaggacggcuuccuggacguguggaccuacaacgccgagcugcuggugcugcuggagaacgagagaacccuggaccugcacgacgccaacgugaagaaccugcacgagaaggugagaagccagcugagagacaacgccaacgaccugggcaacggcugcuucgaguucuggcacaagugcgacaacgagugcauggagagcgugaagaacggcaccuacgacuaccccaaguaccagaaggagagcagacugaacagacagaagaucgagagcgugaagcuggagaacuucgacguguaccagauccuggccaucuacagcaccgugagcagcagccuggugcuggugggccugauccuggccaugggccuguggaugugcagcaacggcagcaugcacugcagaaucugcaucuga

SEQ ID NO: 171172 - RNA, 1701 nt, Artificial Sequence
  derived and/or modified CDS sequence (opt4) from hemagglutinin__InfluenzaA__AHJ57885
augaucgccuucaucgugauggccauccuggccgccaccggcaagagcgacaagaucugcaucggcuaccacgccaacaacagcaccaccaagguggacaccauccuggagaagaacgugaccgugacccacagcguggagcugcuggagaaccagaaggaggagagauucugcaagaucagcaacaaggccccccuggaccugagagacugcacccuggagggcuggauccugggcaaccccagaugcggcauccugcuggccgaccagagcuggagcuacaucguggagagacccaacgccagaaacggcaucugcuaccccggcauccugaacgaggccgaggagcugaaggcccugaucggcagcggcgagagaguggagagauucgagauguuccccaagagcaccugggccggcguggacaccgacagcggcgugagcagcgccugcccccugggcaacggccccagcuucuacagaaaccugcuguggaucaucaagagaaagagcagcgccuaccccgugaucagaggcaccuucaacaacaccggcgacaagagcauccuguacuucuggggcgugcaccacccccccgugaccaccgagcaggaggcccuguacggcagcggcaacagauacgugagaaugggcaccgagagcaugaacuucgccagaaaccccgagaucgccgccagacccgccgugaacggccagagaggcagaaucgacuacuucuggagcauccugaagcccggcgagacccugaacaucgagagcaacggcaaccugaucgcccccugguacgccuacagauucgugaacaaggacagcaagggcgccaucuucagaagcaaccugcccaucgaggacugcgacgccagcugccagaccaccgagggcgugaucagaaccaacaagaccuuccagaacgugagcccccuguggaucggcgagugccccaaguacgugaagagcaagagccugagacuggccaccggccugagaaacgugccccagaucgagaccagaggccuguucggcgccaucgccggcuucaucgagggcggcuggaccggcaugaucgacggcugguacggcuaccaccacgagaacagccagggcagcggcuacgccgccgacagagagagcacccagaaggccaucgacggcaucaccaacaaggugaacagcaucaucgacaagaugaacacccaguucgaggccgugggccacgaguucagcaaccuggagagaagaaucgacaaccuggacaagagaauggaggacggcuuccuggacguguggaccuacaacgccgagcugcuggugcugcuggagaacgagagaacccuggaccugcacgacgccaacgugaagaaccugcacgagaaggugagaagccagcugagagacaacgccaacgaccugggcaacggcugcuucgaguucuggcacaagugcgacaacgagugcauggagagcgugaagaacggcaccuacgacuaccccaaguaccaggccgagagcagacugaacagacagaagaucgagagcgugaagcuggagaacuucgacguguaccagauccuggccaucuacagcaccgugagcagcagccuggugcuggugggccugaucauggccaugggccuguggaugugcagcaacggcagcaugcagugcagaaucugcaucuga

SEQ ID NO: 171173 - RNA, 1701 nt, Artificial Sequence
  derived and/or modified CDS sequence (opt4) from hemagglutinin__InfluenzaA__AHJ57897
augaucgccuucaucgugaucgccauccuggccgccaccggcaagagcgacaagaucugcaucggcuaccacgccaacaacagcaccaccaagguggacaccauccuggagaagaacgugaccgugacccacagcguggagcugcuggagaaccagaaggaggagagauucugcaagaucagcaacaaggccccccuggaccugagagacugcacccuggagggcuggauccugggcaaccccagaugcggcauccugcuggccgaccagagcuggagcuacaucguggagagacccaacgccagaaacggcaucugcuaccccggcauccugaacgaggccgaggagcugaaggcccugaucggcagcggcgagagaguggagagauucgagauguuccccaagagcaccugggccggcguggacaccgacagcggcgugagcagcgccugcccccugggcaacggccccagcuucuacagaaaccugcuguggaucaucaagagaaagagcagcgccuaccccgugaucagaggcaccuucaacaacaccggcgacaagagcauccuguacuucuggggcgugcaccacccccccgugaccaccgagcaggaggcccuguacggcagcggcaacagauacgugagaaugggcaccgagagcaugaacuucgccagaaaccccgagaucgccgccagacccgccgugaacggccagagaggcagaaucgacuacuucuggagcauccugaagcccggcgagacccugaacaucgagagcaacggcaaccugaucgcccccugguacgccuacagauucgugaacaaggacagcaagggcgccaucuucagaagcaaccugcccaucgaggacugcgacgccagcugccagaccaccgagggcgugaucagaaccaacaagaccuuccagaacgugagcccccuguggaucggcgagugccccaaguacgugaagagcaagagccugagacuggccaccggccugagaaacgugccccagaucgagaccagaggccuguucggcgccaucgccggcuucaucgagggcggcuggaccggcaugaucgacggcugguacggcuaccaccacgagaacagccagggcagcggcuacgccgccgacagagagagcacccagaaggccaucgacggcaucaccaacaaggugaacagcaucaucgacaagaugaacacccaguucgaggccgugggccacgaguucagcaaccuggagagaagaaucgacaaccugaacaagagaauggaggacggcuuccuggacguguggaccuacaacgccgagcugcuggugcugcuggagaacgagagaacccuggaccugcacgacgccaacgugaagaaccugcacgagaaggugagaagccagcugagagacaacgccaacgaccugggcaacggcugcuucgaguucuggcacaagugcgacaacgagugcauggagagcgugaagaacggcaccuacgacuaccccaaguaccaggccgagagcagacugaacagacagaagaucgagagcgugaagcuggagaacuucgacguguaccagauccuggccaucuacagcaccgugagcagcagccuggugcuggugggccugaucauggccaugggccuguggaugugcagcaacggcagcaugcagugcagaaucugcaucuga

SEQ ID NO: 171174 - RNA, 1701 nt, Artificial Sequence
  derived and/or modified CDS sequence (opt4) from hemagglutinin__InfluenzaA__AHJ57908
augaucgccuucaucgugaucgccauccugguggccaccggcaagagcgacaagaucugcaucggcuaccacgccaacaacagcaccaccaagguggacaccauccuggagaagaacgugaccgugacccacagcguggagcugcuggagaaccagaaggaggagagauucugcaagaucagcaacaaggccccccuggaccugagagacugcaccguggagggcuggauccugggcaaccccagaugcggcauccugaucgccgaccagagcuggagcuacaucguggagagacccaacgccagaaacggcaucugcuaccccggcacccugaacgaggccgaggagcugaaggcccugaucggcagcggcgagggcguggagagauucgagauguuccccaagagcaccugggccggcguggacaccagcagcggcgugagcagcgccugcccccugggcaacggccccagcuucuacagaaaccugcuguggaucaucaagcugaagagcagcgaguaccccgugaucagaggcaccuucaacaacaccggcgacaagagcgugcuguacuucuggggcgugcaccacccccccgugaccaccgagcaggacgcccuguacggcagcggcaacagauacgugagaaugggcaccgagagcaugaacuucgccagaagccccgagaucgccgccagacccgccgugaacggccagagaggcagaaucgacuacuucuggagcgugcugaagcccggcgagacccugaacguggagagcaacggcaaccugaucgcccccugguacgccuacagauucgugaacaaggacaacaagggcgccaucuucagaagcaaccugcccaucgagaacugcgacgccaccugccagaccaccgagggcgugaucagaaccaacaagaccuuccagaacgugagcccccuguggaucggcgagugccccaaguacgugaagagcaagagccugagacuggccaccggccugagaaacgugccccagaucgagaccagaggccuguucggcgccaucgccggcuucaucgagggcggcuggaccggcaugaucgacggcugguacggcuaccaccacgagaacagccagggcagcggcuacgccgccgacagagagagcacccagaaggccaucgacggcaucaccaacaaggugaacagcaucaucgacaagaugaacacccaguucgaggccgccggccacgaguucagcaaccuggagagaagaaucgacaaccugaacaagagaauggaggacggcuuccuggacguguggaccuacaacgccgagcugcuggugcugcuggagaacgagagaacccuggaccugcacgacgccaacgugaagaaccugcacgagaaggugaagagccagcugagagacaacgccaacgaccugggcaacggcugcuucgaguucuggcacaagugcgacaacgagugcauggagagcgugaagaacggcaccuacgacuaccccaaguaccagaaggagagcagacugaacagacagagaaucgagagcgugaagcuggagaacuucgacguguaccagauccuggccaucuacagcaccgugagcagcagccuggugguggugggccugaucauggccaugggccuguggaugugcagcaacggcagcaugcagugcaugaucugcaucuga

SEQ ID NO: 171175 - RNA, 1701 nt, Artificial Sequence
  derived and/or modified CDS sequence (opt4) from hemagglutinin__InfluenzaA__AHJ57920
augaucgccaucaucaucaucgccauccugguggccaccggcaagagcgacaagaucugcaucggcuaccacgccaacaacagcaccaccaagguggacaccauccuggagaagaacgugaccgugacccacagcguggagcugcuggagaaccagaaggaggagagauucugcaagaucagcaacaaggccccccuggaccugagagacugcaccaucgagggcuggauccugggcaaccccuggugcggcauccugcuggccgaccagagcuggagcuacaucguggagagacccaacgccagaaacggcaucugcuaccccggcacccugaacgagguggaggagcugaaggcccugaucggcagcggcgagagaguggagagauucgagauguuccccaagagcaccugggccggcguggacaccaacagcggcgugagcagcgccugcccccugggcaacggccccagcuucuacagaaaccugcuguggaucaucaagaccaagagcagcgaguaccccgugaucaagggcaccuucaacaacaccggcgacaagagcgugcuguacuucuggggcgugcaccacccccccagcagaaacgagcagaacgugcuguacggcagcggcgacagauacgugagaaugggcaccgagagcaugaacuucgccagaagccccgagaucgccgccagacccgccgugaacggccagagaggcagaaucgacuacuucuggagcauccugaagcccggcgagacccugaacguggagagcaacggcaaccugaucgcccccugguacgccuacagauucgugaacaaggacagcagaggcgccaucuucagaagcaaccugcccaucgagaacugcgacgccaccugccagaccgccgagggcgugaucagaaccaacaagaccuuccagaacgugagcccccuguggaucggcgagugccccaaguacgugaagagcaagagccugagacuggccaccggccugagaaacgugccccagaucgagaccagaggccuguucggcgccaucgccggcuucaucgagggcggcuggaccggcaugaucgacggcugguacggcuaccaccacgagaacagccagggcagcggcuacgccgccgacagagagagcacccagaaggccaccgacggcaucaccaacaaggugaacagcaucaucgacaagaugaacacccaguucgaggccgugggccacgaguucagcaaccuggagagaagaaucgacaaccugaacaagagaauggaggacggcuuccuggacguguggaccuacaacgccgagcugcuggugcugcuggagaacgagagaacccuggaccugcacgacgccaacgugaagaaccugcacgagagagugaagagccagcugagagacaacgccaacgaccugggcaacggcugcuucgaguucuggcacaagugcgacaacgagugcauggagagcgugaagaacgacaccuacgacuaccccaaguaccagaaggagagcagacugaacagacagaagaucgagagcgugagacuggagaacuucgacguguaccagauccuggccaucuacagcaccgugagcagcagccuggugcuggugggccugaucauggccaugggccuguggaugugcagcaacggcagcaugcagugcagaaucugcaucuga

SEQ ID NO: 171176 - RNA, 1701 nt, Artificial Sequence
  derived and/or modified CDS sequence (opt4) from hemagglutinin__InfluenzaA__AHJ57932
augaucgcccugaucaucaucaccauccuggugaccaccggcaagagcgacaagaucugcaucggcuaccacgccaacaacagcaccaccaagguggacaccauccuggagaagaacgugaccgugacccacagcguggagcugcuggagaaccagaaggaggagagauucugcagaaucagcaacaaggccccccuggaccugaaggagugcacccuggagggcuggauccugggcaacccccagugcgaccugcugcugggcgaccagagcuggagcuacaucguggagagacccaacgccagaaacggcaucugcuaccccggcacccugaacgagguggaggagcugagagcccugaucggcagcggcgagggcguggagagauucgagauguuccccaagagcaccugggccggcguggacaccaacagaggcgugaccagcagcugccccuucggcagcggcagcagcuucuacagaaaccugcuguggaucgugaagcacaccaccagcagcuaccccgugaucaagggcaccuucagaaacaccggcgacaagagcgugcuguacuucuggggcgugcaccaccccuucgacaccaacgagcagaacgugcuguacggcagcggcaacagauacgugagaaugggcaccgagagcaugaacuucgccagaggccccgagguggccgccagacccguggugaacggccagagaggcagaaucgacuacuucuggagcauccugaagcccggcgagacccugaacaucgagagcaacggcaaccugaucgcccccugguacgccuacagauucgugaacaaggacagcaagggcgccaucuucagaagcaaccugcccaucgaggacugcgacgccaccugccagaccaucgagggcgugaucagaaccaacaagaccuuccagaacgugagcccccuguggaucggcgagugccccaaguacgugaagagcgagagccugagacuggccaccggccugagaaacgugccccagaucgagaccagaggccuguucggcgccaucgccggcuucaucgagggcggcuggaccggcaugaucgacggcugguacggcuaccaccacgagaacagccagggcagcggcuacgccgccgacagagagagcacccagaaggccaucgacggcaucaccaccaaggugaacagcaucaucgacaagaugaacacccaguucgaggccgugggccacgaguucagcaaccuggagagaagaaucgacaaccugaacaagagacuggaggacggcuuccuggacguguggaccuacaacgccgagcugcuggugcugcuggagaacgagagaacccuggaccugcacgacgccaacgugaagaaccugcacgagagagugagaagccagcugagagacaacgccaacgaccugggcaacggcugcuucgaguucuggcacaagugcgacaacgagugcauggagagcgugagaaacggcaccuacaacuaccccaaguaccaggccgagagcagacugaacaagcagagaaucgagagcgugaagcuggagaacuucgacguguaccagauccuggccaucuacagcaccgugagcagcagccuggugcuggugggccugauccuggccaugggccuguggaugugcagcaacggcagcaugcagugcagaaucugcaucuga

SEQ ID NO: 171177 - RNA, 1701 nt, Artificial Sequence
  derived and/or modified CDS sequence (opt4) from hemagglutinin__InfluenzaA__AHJ57943
augaucgccuucaucgugaucgccacccugguggccaccggcaagagcgacaagaucugcaucggcuaccacgccaacaacagcaccaccaagguggacaccauccuggagaagaacgugaccgugacccacagcguggagcugcuggagaaccagaaggaggagagauucugcaagaucagcaacaaggccccccuggaccugagagacugcacccuggagggcuggauccugggcaaccccagaugcggcauccugcuggccgaccagagcuggagcuacaucguggagagacccaacgccagaaacggcaucugcuaccccggcacccugaacgaggccgaggagcugaaggcccugaucggcagcggcgagagaguggagagauucgagauguuccccaagagcaccuggaccggcguggacaccgagagcggcgugagcagcgccugcccccugggcaacggccccagcuucuacagaaaccugcuguggaucaucaagcugaagagcagcgaguaccccgugaucagaggcaccuucaacaacaccggcgacaagagcauccuguacuucuggggcgugcaccacccccccgugaccaccgagcagaacgcccuguacggcagcggcgacagauacgugagaaugggcaccgagagcaugaacuucgccagaagccccgagaucgccgccagacccgccgugaacggccagagaggcagaaucgacuacuucuggagcauccugaagcccggcgagacccugaacguggagagcaacggcaaccugaucgcccccugguacgccuacagauucgugaacaaggacagcaagggcgccaucuucagaagcaaccugcccaucgagaacugcgacgccaccugccagaccaccgagggcgugaucagaaccaacaagaccuuccagaacgugagcccccuguggaucggcgagugccccaaguacgugaagagcaagagccugagacuggccaccggccugagaaacgugccccagaucgagaccagaggccuguucggcgccaucgccggcuucaucgagggcggcuggaccggcaugaucgacggcugguacggcuaccaccacgagaacagccagggcagcggcuacgccgccgacaaggagagcacccagaaggccaucgacggcaucaccaacaaggugaacagcaucaucgacaagaugaacacccaguucgagaccgugggccacgaguucagcaaccuggagagaagaaucgacaaccugaacaagagaauggaggacggcuuccuggacguguggaccuacaacgccgagcugcuggugcugcuggagaacgagagaacccuggaccugcacgacgccaacgugaagaaccugcacgagaaggugagaagccagcugagagacaacgccaacgaccugggcaacggcugcuucgaguucuggcacaagugcaacaacgagugcauggagagcgugaagaacggcaccuacgacuaccccaaguaccagaaggagagcagacugaacagacagaagaucgagagcgugaagcuggagaacuucgacguguaccagauccuggccaucuacagcaccgugagcagcagccuggugcuggugggccugauccuggccaugggccuguggaugugcagcaacggcagcaugcagugcagaaucugcaucuga

SEQ ID NO: 171178 - RNA, 1701 nt, Artificial Sequence
  derived and/or modified CDS sequence (opt4) from hemagglutinin__InfluenzaA__AHJ57954
augaucgccuucaucgugaucgccauccuggccgccaccggcaagagcgacaagaucugcaucggcuaccacgccaacaacagcaccaccaagguggacaccauccuggagaagaacgugaccgugacccacagcguggagcugcuggagaaccagaaggaggagagauucugcaagaucagcaacaaggccccccuggaccugagagacugcacccuggagggcuggauccugggcaaccccagaugcggcauccugcuggccgaccagagcuggagcuacaucguggagagacccaacgccagaaacggcaucugcuaccccggcauccugaacgaggccgaggagcugaaggcccugaucggcagcggcgagagaguggagagauucgagauguuccccaagagcaccugggccggcguggacaccaacagcggcgugagcagcgccugcccccugggcaacggccccagcuucuacagaaaccugcuguggaucaucaagcagaagagcagcgccuaccccgugaucagaggcaccuucaacaacaccggcgacaagagcauccuguacuucuggggcgugcaccacccccccgugaccaccgagcaggaggcccuguacggcagcggcaacagauacgugagaaugggcaccgagagcaugaacuucgccagaaaccccgagaucgccgccagacccgccgugaacggccagagaggcagaaucgacuacuucuggagcauccugaagcccggcgagacccugaacguggagagcaacggcaaccugaucgcccccugguacgccuacagauucgugaacaaggacagcaagggcgccaucuucagaagcaaccugcccaucgagaacugcgacgccaccugccagaccaccgagggcgugaucagaaccaacaagaccuuccagaacgugagcccccuguggaucggcgagugccccaaguacgugaagagcaagagccugagacuggccaccggccugagaaacgugccccagaucgagaccagaggccuguucggcgccaucgccggcuucaucgagggcggcuggaccggcaugaucgacggcugguacggcuaccaccacgagaacagccagggcagcggcuacgccgccgacagagagagcacccagaaggccaucgacggcaucaccaacaaggugaacagcaucaucgacaagaugaacacccaguucgaggccgugggccacgaguucagcaaccuggagagaagaaucgacaaccugaacaagagaauggaggacggcuuccuggacguguggaccuacaacgccgagcugcuggugcugcuggagaacgagagaacccuggaccugcacgacgccaacgugaagaaccugcacgagaaggugagaagccagcugagagacaacgccaacgaccugggcaacggcugcuucgaguucuggcacaagugcgacaacgagugcauggagagcgugaagaacggcaccuacgacuaccccaaguaccaggccgagagcagacugaacagacagaagaucgagagcgugaagcuggagaacuucgacguguaccagauccuggccaucuacagcaccgugagcagcagccuggugcuggugggccugaucauggccaugggccuguggaugugcagcaacggcagcaugcagugcagaaucugcaucuga

SEQ ID NO: 171179 - RNA, 1701 nt, Artificial Sequence
  derived and/or modified CDS sequence (opt4) from hemagglutinin__InfluenzaA__AHJ57965
augaucgccuucaucaucaucaccauccuggugaccaccggcaagagcgacaagaucugcaucggcuaccacgccaacaacagcaccaccaagguggacaccauccuggagaagaacgugaccgugacccacagcguggagcugcuggagaaccagaaggaggagagauucugcaagaucagcaacaaggccccccuggaccugaaggagugcacccuggagggcuggauccugggcaacccccagugcgaccugcugcugggcgaccagagcuggagcuacaucguggagagacccaacgccagaaacggcaucugcuaccccggcacccugaacgagguggaggagcugaaggcccugaucggcagcggcgagagaguggagagauucgagauguuccccaagagcaccugggccggcguggacaccaacagcggcgugaccagcagcugcagcuucggcagcggcagcagcuucuacagaaaccugcuguggaucaucaagcacaccaccagcagcuaccccgugaucaagggcaccuucagaaacaccggcgacaagagcgugcuguacuucuggggcgugcaccaccccaucgacaccaccgagcagaacgugcuguacggcagcggcaacagauacgugagaaugggcaccgagagcaugaacuucgccagaagccccgagaucgccgccagacccguggugaacggccagagaggcagaaucgacuacuucuggagcauccugaagcccggcgagacccugaacaucgagagcaacggcaaccugaucgcccccugguacgccuacagauucgugaacaaggacagcaagggcgccaucuucagaagcaaccugcccaucgagaacugcgacgccaccugccagaccaucgagggcgugaucagaaccaacaagaccuuccagaacgugagcccccuguggaucggcgagugccccaaguacgugaagagcgagagccugagacuggccaccggccugagaaacgugccccagaucgagaccagaggccuguucggcgccaucgccggcuucaucgagggcggcuggaccggcaugaucgacggcugguacggcuaccaccacgagaacagccagggcagcggcuacgccgccgacagagagagcacccagagagccaucgacggcaucaccaccaaggugaacagcaucaucgacaagaugaacacccaguucgaggccgugggccacgaguucagcaaccuggagagaagaaucgacaaccugaacaagagaauggaggacggcuuccuggacguguggaccuacaacgccgagcugcuggugcugcuggagaacgagagaacccuggaccugcacgacgccaacgugaagaaccugcacgagagagugagaagccagcugagagacaacgccaacgacggcggcaacggcugcuucgaguucuggcacaagugcgacaacgagugcauggagagcgugaagaacggcaccuacgacuaccccaaguaccaggccgagagcagaagcaacagacagagaaucgagagcgugaagcuggagaacuucgacguguaccagauccuggccaucuacagcaccgugagcagcagccugguggugguguggcugauccuggccaugggccuguggaugugcgccaacggcagcaugcagugcagaaucugcaucuga

SEQ ID NO: 171180 - RNA, 1701 nt, Artificial Sequence
  derived and/or modified CDS sequence (opt4) from hemagglutinin__InfluenzaA__AHJ57977
augaucgccuucaucgugaucgccauccuggccgccaccggcaagagcgacaagaucugcaucggcuaccacgccaacaacagcaccaccaagguggacaccauccuggagaagaacgugaccgugacccacagcguggagcugcuggagaaccagaaggaggagagauucugcaagaucagcaacaaggccccccuggaccugagagacugcaccaucgagggcuggauccugggcaaccccagaugcggcauccugcuggccgaccagagcuggagcuacaucguggagagacccaacgccagaaacggcaucugcuaccccggcacccugaacgagguggaggagcugaaggcccugaucggcagcggcgagagaguggagagauucgagauguuccccaagagcaccugggccggcguggacaccaacagcggcgugagcagcgccugcccccugggcaacggccccagcuucuacagaaaccugcuguggaucaucaagcugaagagcagcgaguaccccgugaucagaggcaccuucaacaacaccggcgacaagagcauccuguacuucuggggcgugcaccacccccccgugaccaccgagcaggaggcccuguacggcagcggcgacagauacgugagaaugggcaccgagagcaugaacuucgccagaagccccgagaucgccgccagacccgccgugaacggccagagaggcagaaucgacuacuucuggagcauccugaagcccggcgagacccugaacguggagagcaacggcaaccugaucgcccccugguacgccuacagauucgugaacaaggacagcaagggcgccaucuucagaagcaaccugcccaucgagaacugcgacgccaccugccagaccaccgagggcgugaucagaaccaacaagaccuuccagaacgugagcccccuguggaucggcgagugccccaaguacgugaagagcaagagccugagacuggccaccggccugagaaacgugccccagaucgagaccagaggccuguucggcgccaucgccggcuucaucgagggcggcuggaccggcaugaucgacggcugguacggcuaccaccacgagaacagccagggcagcggcuacgccgccgacaaggagagcacccagaaggccaucgacggcaucaccaacaaggugaacagcaucaucgacaagaugaacacccaguucgaggccgugggccacgaguucagcaaccuggagagaagaaucgacaaccugaacaagagaauggaggacggcuuccuggacguguggaccuacaacgccgagcugcuggugcugcuggagaacgagagaacccuggaccugcacgacgccaacgugaagaaccugcacgagaaggugagaagccagcugagagacaacgccaacgaccugggcaacggcugcuucgaguucuggcacaagugcaacaacgagugcauggagagcgugaagaacggcaccuacgacuaccccaaguaccagaaggagagcagacugaacagacagaagaucgagagcgugaagcuggagaacuucgacguguaccagauccuggccaucuacagcaccgugagcagcagccuggugcuggugggccugauccuggccaugggccuguggaugugcagcaacggcagcaugcagugcagaaucugcaucuga

SEQ ID NO: 171181 - RNA, 1701 nt, Artificial Sequence
  derived and/or modified CDS sequence (opt4) from hemagglutinin__InfluenzaA__AHJ57989
augaucgccuucaucgugaucgccauccuggugaccaccggcaagagcgacaagaucugcaucggcuaccacgccaacaacagcaccaccaagguggacaccauccuggagaagaacgugaccgugacccacagcguggagcugcuggagaaccagaaggaggagagauucugcaagaucagcaacaaggccccccuggaccugagagacugcacccuggagggcuggauccugggcaaccccagaugcggcauccugcuggccgaccagagcuggagcuacaucguggagagacccaacgccagaaacggcaucugcuaccccggcacccugaacgagguggaggagcugaaggcccugaucggcagcggcgagagaguggagagauucgagauguuccccaagagcaccugggccagaguggacaccgacagaggcgugagcagcgccugcccccugggcaacggccccagcuucuacagaaaccugcuguggaucgugaagcacaccaccagcgaguaccccgugaucaagggcaccuacaccaacaccggcgacaagagcgugcuguacuucuggggcgugcaccacccccccgacaccaccgagcagaacgugcuguacggcagcggcaacagauacgugagaaugggcaccgagagcaugaacuucgccagaagccccgagaucgccgccagacccgccgugaacggccagagaggcagaaucgacuacuucuggagcauccugaagcccggcgagacccugaacguggagagcaacggcaaccugaucgcccccugguacgccuacagauucgugaacaaggacagcaagggcgccaucuucagaagcaaccugcccaucgagaacugcgacgccaccugccagaccaccgagggcgugaucagaaccaacaagaccuuccagaacgugagccccauguggaucggcgagugccccaaguacgugaagagcaagagccugagacuggccaccggccugagaaacgugccccagaucgagaccagaggccuguucggcgccaucgccggcuucaucgagggcggcuggaccggcaugaucgacggcugguacggcuaccaccacgagaacagccagggcagcggcuacgccgccgacagagagagcacccagaaggccaucgacggcaucaccaacaaggugaacagcaucaucgacaagaugaacacccaguucgaggccgugggccacgaguucagcaaccuggagagaagaaucgacaaccugaacaagagaauggaggacggcuuccuggacguguggaccuacaacgccgagcugcuggugcugcuggagaacgagagaacccuggaccugcacgacagcaacgugaagaaccugcacgagagagugaagagccagcugagagacaacgccaacgaccugggcaacggcugcuucgaguucuggcacaagugcgacaacgagugcauggagagcgugaagaacggcaccuacaacuaccccaaguaccaggccgagagcagacugaacagacagaagaucgagagcgugaagcuggaggaguucggcguguaccagauccuggccaucuacagcaccgugagcagcagccuggugcuggugggccugaucauggccaugggccuguggaugugcagcaacggcagcaugcagugcagaaucugcaucuga

SEQ ID NO: 171182 - RNA, 1701 nt, Artificial Sequence
  derived and/or modified CDS sequence (opt4) from hemagglutinin__InfluenzaA__AHJ58001
augaucgccuucaucgugaucgccauccuggccgccaccggcaagagcgacaagaucugcaucggcuaccacgccaacaacagcaccaccaagguggacaccauccuggagaagaacgugaccgugacccacagcguggagcugcuggagaaccagaaggaggagagauucugcaagaucagcaacaaggccccccuggaccugagagacugcacccuggagggcuggauccugggcaaccccagaugcggcauccugcuggccgaccagagcuggagcuacaucguggagagacccaacgccagaaacggcaucugcuaccccggcauccugaacgaggccgaggagcugaaggcccugaucggcagcggcgagagaguggagagauucgagauguuccccaagagcaccugggccggcguggacaccgacagcggcgugagcagcgccugcccccugggcaacggccccagcuucuacagaaaccugcuguggaucaucaagcugaagagcagcgaguaccccgugaucagaggcaccuucaacaacaccggcgacaagagcauccuguacuucuggggcgugcaccacccccccgugaccaccgagcaggaggcccuguacggcagcggcaacagauacgugagaaugggcaccgagagcaugaacuucgccagaagccccgagaucgccgccagacccgccgugaacggccagagaggcagaaucgacuacuucuggagcauccugaagcccggcgagacccugaacguggagagcaacggcaaccugaucgcccccugguacgccuacagauucgugaacaaggacagcaagggcgccaucuucagaagcaaccugcccaucgagaacugcgacgccaccugccagaccaccgagggcgugaucagaaccaacaagaccuuccagaacgugagccccauguggaucggcgagugccccaaguacgugaagagcaagagccugagacuggccaccggccugagaaacgugccccagaucgagaccagaggccuguucggcgccaucgccggcuucaucgagggcggcuggaccggcaugaucgacggcugguacggcuaccaccacgagaacagccagggcagcggcuacgccgccgacagagagagcacccagaaggccaucgacggcaucaccaacaaggugaacagcaucaucgacaagaugaacacccaguucgaggccgugggccacgaguucagcaaccuggagagaagaaucgacaaccugaacaagagaauggaggacggcuuccuggacguguggaccuacaacgccgagcugcuggugcugcuggagaacgagagaacccuggaccugcacgacgccaacgugaagaaccugcacgagaaggugagaagccagcugagagacaacgccaacgaccugggcaacggcugcuucgaguucuggcacaagugcgacaacgagugcauggagagcgugaagaacggcaccuacgacuaccccaaguaccagaccgagagcagacugaacagacagaagaucgagagcgugaagcuggagaacuucgacguguaccagauccuggccaucuacagcaccgugagcagcagccuggugcuggugggccugaucauggccaugggccuguggaugugcagcaacggcagcaugcagugcagaaucugcaucuga

SEQ ID NO: 171183 - RNA, 1701 nt, Artificial Sequence
  derived and/or modified CDS sequence (opt4) from hemagglutinin__InfluenzaA__AHJ58013
augaucgccuucaucgugaucgccauccuggugaccaccggcaagagcgacaagaucugcaucggcuaccacgccaacaacagcaccaccaagguggacaccauccuggagaagaacgugaccgugacccacagcguggagcugcuggagaaccagaaggaggagagauucugcaagaucagcagcaaggccccccuggaccugagagacugcagccuggagggcuggauccugggcaaccccagaugcggcauccugcuggccgaccagagcuggagcuacaucguggagagacccaacgccagaaacggcaucugcuaccccggcacccugaacgagguggaggagcugaaggcccugaucggcagcggcgagagaguggagagauucgagauguuccccaagagcaccugggccggcguggacaccaacagcggcgugagcagcgccugcccccugggcgagggccccagcuucuacagaaaccugcuguggaucaucaagagaaccaccagcgaguaccccgugaucaagggcaccuacagaaacaccggcgacaagagcgugcuguacuucuggggcgugcaccacccccccgacaccaccgagcagaacgugcuguacggcagcggcaacagauacgugagaaugggcaccgagagcaugaacuucgccagaagccccgagaucgccgccagacccgccgugaacggccagagaggcagaaucgacuacuucuggagcauccugaagcccggcgagacccuggacguggagagcaacggcaaccugaucgcccccugguacgccuacagauucgugaacaaggagagcaagggcgccaucuucagaagcaaccugcccaucgagaacugcgacgccaccugccagaccaccgagggcgugaucagaaccaacaagaccuuccagaacgugagcccccuguggaucggcgagugccccaaguacgugaagagcaagagccugagacuggccaccggccugagaaacgugccccagaucgagaccagaggccuguucggcgccaucgccggcuucaucgagggcggcuggaccggcaugaucgacggcugguacggcuaccaccacgagaacagccagggcagcggcuacgccgccgacaaggagagcacccagaaggccaucgacggcaucaccaacaaggugaacagcaucaucgacaagaugaacacccaguucgaggccgugggccacgaguucagcacccuggagagaagaaucgacaaccugaacaagagaauggaggacggcuuccuggacguguggaccuacaacgccgagcugcuggugcugcuggagaacgagagaacccuggaccugcacgacgccaacgugaagaaccugcacgagagagugagaagccagcugagagacaacgccaacgaccugggcaacggcugcuucgaguucuggcacaagugcgacaacgagugcauggagagcgugaagaacggcaccuacaacuaccccaaguaccaggccgagagcagacugaacaagcagaagaucgagagcgugaagcuggaggaguucggcguguaccagauccuggccaucuacagcaccgugagcagcagccuggugcuggugggccugaucauggccaugggccuguggaugugcagcaacggcagcaugcagugcagaaucugcaucuga

SEQ ID NO: 171184 - RNA, 1701 nt, Artificial Sequence
  derived and/or modified CDS sequence (opt4) from hemagglutinin__InfluenzaA__AHJ58025
augaucgccuucaucgugaucgccauccuggugaccaccggcgagagcgacaagaucugcaucggcuaccacgccaacaacagcaccaccaagguggacaccauccuggagaagaacgugaccgugacccacagcguggagcugcuggagaaccagaaggaggagagauucugcaagaucagcaacaaggccccccuggaccugagagacugcaccaucgagggcuggauccugggcaaccccagaugcggcauccugcuggccgaccagagcuggagcuacaucguggagagacccaacgccagaaacggcaucugcuaccccggcacccugaacgaggccgaggagcugaaggcccugaucggcagcggcgagggcguggagagauucgagauguuccccaagagcaccugggccggcguggacaccaacagcggcgugagcagcgccugcccccugggcaacggccccagcuucuacagaaaccugcuguggaucaucaagcugaagagcagcgaguaccccgugaucagaggcaccuucaacaacaccggcgacaagagcgugcuguacuucuggggcgugcaccacccccccgugaccaccgagcagaacgaccuguacggcagcggcaacagauacgugagaaugggcaccgagagcaugaacuucgccagaaaccccgagaucgcccugagacccgccgugaacggccagagaggcagaaucgacuacuucuggagcauccugaagcccggcgagacccugaacguggagagcaacggcaaccugaucgcccccugguacgccuacagauucgugaacaaggacagcaagggcgccaucuucagaagcagccugcccaucgagaacugcgacgccaccugccagaccgccgagggcgugaucagaaccaacaagaccuuccagaacgugagcccccuguggaucggcgagugccccaaguacgugaagagcaagagccugagacuggccaccggccugagaaacgugccccagaucgagaccagaggccuguucggcgccaucgccggcuucaucgagggcggcuggaccggcaugguggacggcugguacggcuaccaccacgagaacagccagggcagcggcuacgccgccgacagagagagcacccagaaggccaucgacggcaucaccaacaaggugaacagcaucaucgacaagaugaacacccaguucgaggccguggaccacgaguucagcaaccuggagagaagaaucgacaaccugaacaagagaauggaggacggcuuccuggacguguggaccuacaacgccgagcugcuggugcugcuggagaacgagagaacccuggaccugcacgacgccaacgugaagaaccugcacgagaaggugaagagccagcugagagacaacgccaacgaccugggcaacggcugcuucgaguucuggcacaagugcgacaacgagugcauggagagcgugaagaacggcaccuacaacuaccccaaguaccagaaggagagcagacugaacagacagaagaucgagagcgugaagcuggagaacuucgacguguaccagauccuggccaucuacagcaccgugagcagcagccuggugcuggugggccugaucauggccaugggccuguggaugugcagcaacggcagcaugcagugcagaaucugcaucuga

SEQ ID NO: 171185 - RNA, 1701 nt, Artificial Sequence
  derived and/or modified CDS sequence (opt4) from hemagglutinin__InfluenzaA__AHJ58037
augaucgccuucaucaucaucaccauccuggugaccaccggcgagagcgacaagaucugcaucggcuaccacgccaacaacagcaccaccaagguggacaccauccuggagaagaacgugaccgugacccacagcguggagcugcuggagaaccagaaggaggagagauucugcaagaucagcaacaaggccccccuggaccugaaggagugcacccuggagggcuggauccugggcaacccccagugcgaccugcugcugggcgaccagagcuggagcuacaucguggagagacccaacgccagaaacggcaucugcuaccccggcacccugaacgagguggaggagcugaaggcccugaucggcagcggcgagagaguggagagauucgagauguuccccaagagcaccugggccggcguggacaccaacagcggcgugaccagaagcugccccuucggcagcggcagcagcuucuacagaaaccugcuguggaucaucaagcacaccaccagcagcuaccccgugaucaagggcaccuucagaaacaccggcgacaagagcgugcuguacuucuggggcgugcaccaccccaucgacaccaccgagcagaacgugcuguacggcagcggcaacagauacgugagaaugggcaccgagagcaugaacuucgccagaagccccgagaucgccgccagacccguggugaacggccagagaggcagaaucgacuacuucuggagcauccugaagcccggcgagacccugaacaucgagagcaacggcaaccugaucgcccccugguacgccuacagauucgugaacaaggacagcaagggcgccaucuucagaagcaaccugcccaucgagaacugcgacgccaccugccagaccaucgagggcgugaucagaaccaacaagaccuuccagaacgugagcccccuguggaucggcgagugccccaaguacgugaagagcgagagccugagacuggccaccggccugagaaacgugccccagaucgagaccagaggccuguucggcgccaucgccggcuucaucgagggcggcuggaccggcaugaucgacggcugguacggcuaccaccacgagaacagccagggcagcggcuacgccgccgacagagagagcacccagagagccaucgacggcaucaccaccaaggugaacagcaucaucgacaagaugaacacccaguucgaggccgugggccacgaguucagcaaccuggagagaagaaucgacaaccugaacaagagaauggaggacggcuuccuggacguguggaccuacaacgccgagcugcuggugcugcuggagaacgagagaacccuggaccugcacgacgccaacgugaagaaccugcacgagagagugaagagccagcugagagacaacgccaacgaccugggcaacggcugcuucgaguucuggcacaagugcgacaacgagugcauggagagcgugaagaacggcaccuacgacuaccccaaguaccaggccgagagcagacugaacaagcagagaaucgagagcgugaagcuggagaacuucgacguguaccagauccuggccaucuacagcaccgugagcagcagccuggugcuggugggccugaucauggccaucggccuguggaugugcagcaacggcagcaugcagugcagaaucugcaucuga

SEQ ID NO: 171186 - RNA, 1701 nt, Artificial Sequence
  derived and/or modified CDS sequence (opt4) from hemagglutinin__InfluenzaA__AHJ58049
augaucgccuucaucgugaucgccauccuggccgccaccggcaagagcgacaagaucugcaucggcuaccacgccaacaacagcaccaccaagguggacaccauccuggagaagaacgugaccgugacccacagcguggagcugcuggagaaccagaaggaggagagauucugcaagaucagcaacaaggccccccuggaccugagagacugcacccuggagggcuggauccugggcaaccccagaugcggcauccugcuggccgaccagagcuggagcuacaucguggagagacccaacgccagaaacggcaucugcuaccccggcauccugaacgaggccgaggagcugaaggcccugaucggcagcggcgagagaguggagagauucgagauguuccccaagagcaccugggccggcguggacaccgacagcggcgugagcagcgccugcccccugggcaacggccccagcuucuacagaaaccugcuguggaucaucaagcugaagagcagcgaguaccccgugaucagaggcaccuucaacaacaccggcgacaagagcauccuguacuucuggggcgugcaccacccccccgugaccaccgagcaggaggcccuguacggcagcggcaacagauacgugagaaugggcaccgagagcaugaacuucgccagaacccccgagaucgccgccagacccgccgugaacggccagagaggcagaaucgacuacuucuggagcauccugaagcccggcgagacccugaacguggagagcaacggcaaccugaucgcccccugguacgccuacagauucgugaacaaggacagcaagggcgccaucuucagaagcaaccugcccaucgagaacugcgacgccaccugccagaccaccgagggcgugaucagaaccaacaagaccuuccagaacgugagcccccuguggaucggcgagugccccaaguacgugaagagcaagagccugagacuggccaccggccugagaaacgugccccagaucgagaccagaggccuguucggcgccaucgccggcuucaucgagggcggcuggaccggcaugaucgacggcugguacggcuaccaccacgagaacagccagggcagcggcuacgccgccgacagagagagcacccagaaggccaucgacggcaucaccaacaaggugaacagcaucaucgacaagaugaacacccaguucgaggccgugggccacgaguucagcaaccuggagagaagaaucgacaaccugaacaagagaauggaggacggcuuccuggacguguggaccuacaacgccgagcugcuggugcugcuggagaacgagagaacccuggaccugcacgacgccaacgugaagaaccugcacgagaaggugagaagccagcugagagacaacgccaacgaccugggcaacggcugcuucgaguucuggcacaagugcgacaacgagugcauggagagcgugaagaacggcaccuacgacuaccccaaguaccaggccgagagcagacugaacagacagaagaucgagagcgugaagcuggagaacuucgacguguaccagauccuggccaucuacagcaccgugagcagcagccuggugcuggugggccugaucauggccaugggccuguggaugugcagcaacggcagcaugcagugcagaaucugcaucuga

SEQ ID NO: 171187 - RNA, 1701 nt, Artificial Sequence
  derived and/or modified CDS sequence (opt4) from hemagglutinin__InfluenzaA__AHJ58061
augaucgccuucaucgugaucgccacccugguggccaccggcaagagcgacaagaucugcaucggcuaccacgccaacaacagcaccaccaagguggacaccauccuggagaagaacgugaccgugacccacagcguggagcugcuggagaaccagaaggaggagagauucugcaagaucagcaacaaggccccccuggaccugagagacugcacccuggagggcuggauccugggcaaccccagaugcggcauccugcuggccgaccagagcuggagcuacaucguggagagacccaacgccagaaacggcaucugcuaccccggcacccugaacgaggccgaggagcugaaggcccugaucggcagcggcgagagaguggagagauucgagauguuccccaagagcaccuggaccggcguggacaccgagagcggcgugagcagcgccugcccccugggcaacggccccagcuucuacagaaaccugcuguggaucaucaagcugaagagcagcgaguaccccgugaucagaggcaccuucaacaacaccggcgacaagagcauccuguacuucuggggcgugcaccacccccccgugaccaccgagcagaacgcccuguacggcagcggcgacagauacgugagaaugggcaccgagagcaugaacuucgccagaagccccgagaucgccgccagacccgccgugaacggccagagaggcagaaucgacuacuucuggagcauccugaagcccggcgagacccugaacguggagagcaacggcaaccugaucgcccccugguacgccuacagauucgugaacaaggacagcaagggcgccaucuucagaagcaaccugcccaucgagaacugcgacgccaccugccagaccaccgagggcgugaucagaaccaacaagaccuuccagaacgugagcccccuguggaucggcgagugccccaaguacgugaagagcaagagccugagacuggccaccggccugagaaacgugccccagaucgagaccagaggccuguucggcgccaucgccggcuucaucgagggcggcuggaccggcaugaucgacggcugguacggcuaccaccacgagaacagccagggcagcggcuacgccgccgacaaggagagcacccagaaggccaucgacggcaucaccaacaaggugaacagcaucaucgacaagaugaacacccaguucgaggccgugggccacgaguucagcaaccuggagagaagaaucgacaaccugaacaagagaauggaggacggcuuccuggacguguggaccuacaacgccgagcugcuggugcugcuggagaacgagagaacccuggaccugcacgacgccaacgugaagaaccugcacgagaaggugagaagccagcugagagacaacgccaacgaccugggcaacggcugcuucgaguucuggcacaagugcaacaacgagugcauggagagcgugaagaacggcaccuacgacuaccccaaguaccagaaggagagcagacugaacagacagaagaucgagagcgugaagcuggagaacuucgacguguaccagauccuggccaucuacagcaccgugagcagcagccuggugcuggugggccugauccuggccaugggccuguggaugugcagcaacggcagcaugcagugcagaaucugcaucuga

SEQ ID NO: 171188 - RNA, 1701 nt, Artificial Sequence
  derived and/or modified CDS sequence (opt4) from hemagglutinin__InfluenzaA__AHJ58084
augaucgccuucaucgugaucgccacccugguggccaccggcaagagcgacaagaucugcaucggcuaccacgccaacaacagcaccaccaagguggacaccauccuggagaagaacgugaccgugacccacagcguggagcugcuggagaaccagaaggaggagagauucugcaagaucagcaacaaggccccccuggaccugagagacugcacccuggagggcuggauccugggcaaccccagaugcggcauccugcuggccgaccagagcuggagcuacaucguggagagacccaacgccagaaacggcaucugcuaccccggcacccugaacgaggccgaggagcugaaggcccugaucggcagcggcgagagaguggagagauucgagauguuccccaagagcaccuggaccggcgugaacaccgagagcggcgugagcagcgccugcccccugggcaacggccccagcuucuacagaaaccugcuguggaucaucaagcugaagagcagcgaguaccccgugaucagaggcaccuucaacaacaccggcgacaagagcauccuguacuucuggggcgugcaccacccccccgugaccaccgagcagaacgcccuguacggcagcggcgacagauacgugagaaugggcaccgagagcaugaacuucgccagaagccccgagaucgccgccagacccgccgugaacggccagagaggcagaaucgacuacuucuggagcauccugaagcccggcgagacccugaacguggagagcaacggcaaccugaucgcccccugguacgccuacagauucgugaacaaggacagcaagggcgccaucuucagaagcaaccugcccaucgagaacugcgacgccaccugccagaccaccgagggcgugaucagaaccaacaagaccuuccagaacgugagcccccuguggaucggcgagugccccaaguacgugaagagcaagagccugagacuggccaccggccugagaaacgugccccagaucgagaccagaggccuguucggcgccaucgccggcuucaucgagggcggcuggaccggcaugaucgacggcugguacggcuaccaccacgagaacagccagggcagcggcuacgccgccgacaaggagagcacccagaaggccaucgacggcaucaccaacaaggugaacagcaucaucgacaagaugaacacccaguucgaggccgugggccacgaguucagcaaccuggagagaagaaucgacaaccugaacaagagaauggaggacggcuuccuggacguguggaccuacaacgccgagcugcuggugcugcuggagaacgagagaacccuggaccugcacgacgccaacgugaagaaccugcacgagaaggugagaagccagcugagagacaacgccaacgaccugggcaacggcugcuucgaguucuggcacaagugcaacaacgagugcauggagagcgugaagaacggcaccuacgacuaccccaaguaccagaaggagagcagacugaacagacagaagaucgagagcgugaagcuggagaacuucgacguguaccagauccuggccaucuacagcaccgugagcagcagccuggugcuggugggccugauccuggccaugggccuguggaugugcagcaacggcagcaugcagugcagaaucugcaucuga

SEQ ID NO: 171189 - RNA, 1701 nt, Artificial Sequence; identical to SEQ ID NO: 166915
  derived and/or modified CDS sequence (opt4) from hemagglutinin__InfluenzaA__AHL80708

SEQ ID NO: 171190 - RNA, 1701 nt, Artificial Sequence
  derived and/or modified CDS sequence (opt4) from hemagglutinin__InfluenzaA__AHL80718
augaaggccauccugguggugcugcuguacaccuucgccaccgccaacgccgacacccugugcaucggcuaccacgccaacaacagcaccgacaccguggacaccgugcuggagaagaacgugaccgugacccacagcgugaaccugcuggaggacaagcacaacggcaagcugugcaagcugagaggcguggccccccugcaccugggcaagugcaacaucgccggcuggauccugggcaaccccgagugcgagagccugagcaccgccagcagcuggagcuacaucguggagaccagcagcagcgacaacggcaccugcuaccccggcgacuucaucaacuacgaggagcugagagagcagcugagcagcgugagcagcuucgagagauucgagaucuuccccaagaucagcagcuggcccaaccacgacagcaacaagggcgugaccgccgccugcccccacgccggcgccaagagcuucuacaagaaccugaucuggcuggugaagaagggcaacagcuaccccaagcugagcaagagcuacaucaacgacaagggcaaggaggugcuggugcuguggggcauccaccaccccagcaccaccgccgaccagcagagccuguaccagaacgccgacgccuacguguucgugggcaccagcagauacagcaagaaguucaagcccgagaucgccaucagacccaaggugagagaccaggagggcagaaugaacuacuacuggacccugguggagcccggcgacaagaucaccuucgaggccaccggcaaccugguggugcccagauacgccuucgccauggagagaaacgccggcagcggcaucaucaucagcgacaccagcgugcacgacugcaacaccaccugccagacccccaagggcgccaucaacaccagccugcccuuccagaacauccaccccaucaccaucggcaagugccccaaguacgugaagagcaccaagcugagacuggccaccggccugagaaacgugcccagcauccagagcagaggccuguucggcgccaucgccggcuucaucgagggcggcuggaccggcaugguggacggcugguacggcuaccaccaccagaacgagcagggcagcggcuacgccgccgaccugaagagcacccagaacgccaucgacaagaucaccaacaaggugaacagcgugaucgagaagaugaacacccaguucaccgccgugggcaaggaguucaaccaccuggagaagagaaucgagaaccugaacaagaagguggacgacggcuuccuggacaucuggaccuacaacgccgagcugcuggugcugcuggagaacgagagaacccuggacuaccacgacagcaacgugaagaaccuguacgagaaggugagaagccagcugaagaacaacgccaaggagaucggcaacggcugcuucgaguucuaccacaagugcgacaacaccugcauggagagcgugaagaacggcaccuacgacuaccccaaguacagcgaggaggccaagcugaacagagaggagaucgacggcgugaagcuggagagcaccagaaucuaccagauccuggccaucuacagcaccguggccagcagccuggugcugguggugagccugggcgccaucagcuucuggaugugcagcaacggcagccugcagugcagaaucugcaucuga

SEQ ID NO: 171191 - RNA, 1710 nt, Artificial Sequence
  derived and/or modified CDS sequence (opt4) from hemagglutinin__InfluenzaA__AHL80729
augaaggccauccugguggugcugcuguacaccuucgccaccgccaacgccgacacccugugcaucggcuaccacgccaacaacagcaccgacaccguggacaccgugcuggagaagaacgugaccgugacccacagcgugaaccugcuggaggacaagcacaacggcaagcugugcaagcugagaggcguggccccccugcaccugggcgagugcaacaucgccggcuggauccugggcaaccccgagugcgagagccugagcaccgccagcagcuggagcuacaucguggagaccagcagcagcgacaacggcaccugcuaccccggcgacuucaucgacuacgaggagcugagagagcagcugagcagcgugagcagcuucgagagauucgagaucuuccccaagaccagcagcuggcccaaccacgacagcaacaagggcgugaccgccgccugcccccacgccggcgccaagagcuucuacaagaaccugaucuggcuggugaagaagggcaacagcuaccccaagcugagcaagagcuacaucaacgacaagggcaaggaggugcuggugcuguggggcauccaccaccccagcaccagcgccgaccagcagagccuguaccagaacgccgacgccuacguguucgugggcaccagcagauacagcaagaaguucaagcccgagaucgccaucagacccaaggugagagaccaggagggcagaaugaacuacuacuggacccugguggagcccggcgacaagaucaccuucgaggccaccggcaaccugguggugcccagauacgccuucgccauggagagaaacgccggcagcggcaucaucaucagcgacacccccgugcacgacugcaacaccaccugccagacccccaagggcgccaucaacaccagccugaccagccugcccuuccagaacgugcaccccaucaccaucggcaagugccccaaguacgugaagagcaccaagcugagacuggccaccggccugagaaacgugcccagcauccagagcagaggccuguucggcgccaucgccggcuucaucgagggcggcuggaccggcaugguggacggcugguacggcuaccaccaccagaacgagcagggcagcggcuacgccgccgaccugaagagcacccagaacgccaucgacgagaucaccaacaaggugaacagcgugaucgagaagaugaacacccaguucaccgccgugggcaaggaguucaaccaccuggagaagagaaucgagaaccugaacaagaagguggacgacggcuuccuggacaucuggaccuacaacgccgagcugcuggugcugcuggagaacgagagaacccuggacuaccacgacagcaacgugaagaaccuguacgagaaggugagaagccagcugaagaacaacgccaaggagaucggcaacggcugcuucgaguucuaccacaagugcgacaacaccugcauggagagcgugaagaacggcaccuacgacuaccccaaguacagcgaggaggccaagcugaacagagaggagaucgacggcgugaagcuggagagcaccagaaucuaccagauccuggccaucuacagcaccguggccagcagccuggugcugguggugagccugggcgccaucagcuucuggaugugcagcaacggcagccugcagugcagaaucugcaucuga

SEQ ID NO: 171192 - RNA, 1701 nt, Artificial Sequence
  derived and/or modified CDS sequence (opt4) from hemagglutinin__InfluenzaA__AHL80740
augaaggccauccugguggugcugcuguacaccuucgccaccgccaacgccgacacccugugcaucggcuaccacgccaacaacagcaccgacaccguggacaccgugcuggagaagaacgugaccgugacccacagcgugaaccugcuggaggacaagcacaacggcaagcugugcaagcugagaggcguggccccccugcaccugggcaagugcaacaucgccggcuggauccugggcaaccccgagugcgagcugcugagcaccgccagcagcuggagcuacaucguggagaccagcagcagcgacaacggcaccugcuaccccggcgacuucaucaacuacgaggagcugagagagcagcugagcagcgugagcagcuucgagagauucgagaucuuccccaagaccagcagcuggcccaaccacgacagcaacaagggcgugaccgccgccugcccccacgccggcgccaagagcuucuacaagaaccugaucuggcuggugaagaagggcaacagcuaccccaagcugagcaagagcuacaucaacgacaagggcaaggaggugcuggugcuguggggcgugcaccaccccagcaccagcgccgaccagcagagccuguaccagaacgccgacgccuacguguucgugggcaccagcagauacagcaagaaguucaagcccgagaucgccaucagacccaaggugagagaccaggagggcagaaugaacuacuacuggacccugguggagcccggcgacaagaucaccuucgaggccaccggcaaccugguggugcccagauacgccuucgccauggagagaaacgccggcagcggcaucaucaucagcgacacccccgugcacgacugcaacaccaccugccagacccccaagggcgccaucaacaccagccugcccuuccagaacauccaccccaucaccaucggcaagugccccaaguacgugaagagcaccaagcugagacuggccaccggccugagaaacgugcccagcauccagagcagaggccuguucggcgccaucgccggcuucaucgagggcggcuggaccggcaugguggacggcugguacggcuaccaccaccagaacgagcagggcagcggcuacgccgccgaccugaagagcacccagaacgccaucgacaagaucaccaacaaggugaacagcgugaucgagaagaugaacacccaguucaccgccgugggcaaggaguucaaccaccuggagaagagaaucgagaaccugaacaagaagguggacgacggcuuccuggacaucuggaccuacaacgccgagcugcuggugcugcuggagaacgagagaacccuggacuaccacgacagcaacgugaagaaccuguacgagaaggugagaagccagcugaagaacaacgccaaggagaucggcaacggcugcuucgaguucuaccacaagugcgacaacaccugcauggagagcgugaagaacggcaccuacgacuaccccaaguacagcgaggaggccaagcugaacagagagaagaucgacggcgugaagcuggagagcaccagaaucuaccagauccuggccaucuacagcaccguggccagcagccuggugcugguggugagccugggcgccaucagcuucuggaugugcagcaacggcagccugcagugcagaaucugcaucuga

SEQ ID NO: 171193 - RNA, 1701 nt, Artificial Sequence
  derived and/or modified CDS sequence (opt4) from hemagglutinin__InfluenzaA__AHL80751
augaaggccauccugguggugcugcuguacaccuucgccaccgccaacgccgacacccugugcaucggcuaccacgccaacaacagcaccgacaccguggacaccauccuggagaagaacgugaccgugacccacagcgugaaccugcuggaggacaagcacaacggcaagcugugcaagcugagaggcguggccccccugcaccugggcaagugcaacaucgccggcuggauccugggcaaccccgagugcgagagccugagcaccgccagcagcuggagcuacaucguggagaccagcagcagcgacaacggcaccugcuaccccggcgacuucaucgacuacgaggagcugagagagcagcugagcagcgugagcagcuucgagagauucgagaucuuccccaagaccagcagcuggcccaaccacgacagcaacaagggcgugaccgccgccugcccccacgccggcgccaagagcuucuacaagaaccugaucuggcuggugaagaagggcaacagcuaccccaagcugagcaagagcuacaucaacgacaagggcaaggagauccuggugcuguggggcauccaccaccccagcaccagcgccgaccagcagagccuguaccagaacgccgacgccuacguguucgugggcaccagcagauacagcaagaaguucaagcccgagaucgccaucagacccaaggugagagaccaggagggcagaaugaacuacuacuggacccugguggagcccggcgacaagaucaccuucgaggccaccggcaaccugguggugcccagauacgccuucgccauggagaagaacgccggcagcggcaucaucaucagcgacacccccgugcacgacugcaacaccaccugccagacccccaagggcgccaucaacaccagccugcccuuccagaacauccaccccaucaccaucggcaagugccccaaguacgugaagagcaccaagcugagacuggccaccggccugagaaacgugcccagcauccagagcagaggccuguucggcgccaucgccggcuucaucgagggcggcuggaccggcaugguggacggcugguacggcuaccaccaccagaacgagcagggcagcggcuacgccgccgaccugaagagcacccagaacgccaucgacgagaucaccaacaaggugaacagcgugaucgagaagaugaacacccaguucaccgccgugggcaaggaguucaaccaccuggagaagagaaucgagaaccugaacaagaagguggacgacggcuuccuggacaucuggaccuacaacgccgagcugcuggugcugcuggagaacgagagaacccuggacuaccacgacagcaacgugaagaaccuguacgagaaggugagaagccagcugaagaacaacgccaaggaggugggcaacggcugcuucgaguucuaccacaagugcgacaacaccugcauggagagcgugaagaacggcaccuacgacuaccccaaguacagcgaggaggccaagcugaacagagaggagaucgacggcgugaagcuggagagcaccagaaucuaccagauccuggccaucuacagcaccguggccagcagccuggugcugguggugagccugggcgccaucagcuucuggaugugcagcaacggcagccugcagugcagaaucugcaucuga

SEQ ID NO: 171194 - RNA, 1701 nt, Artificial Sequence
  derived and/or modified CDS sequence (opt4) from hemagglutinin__InfluenzaA__AHL80762
augaaggccauccugguggugcugcuguacaccuucgccaccgccaacgccgacacccugugcaucggcuaccacgccaacaacagcaccgacaccguggacaccgugcuggagaagaacgugaccgugacccacagcgugaaccugcuggaggacaagcacaacggcaagcugugcaagcugagaggcguggccccccugcaccugggcaagugcaacaucgccggcuggauccugggcaaccccgagugcgagagccugagcaccgccagcagcuggagcuacaucguggagaccagcagcagcgacaacggcaccugcuaccccggcgacuucaucaacuacgaggagcugagagagcagcugagcagcgugagcagcuucgagagauucgagaucuuccccaagaccagcagcuggcccaaccacgacagcaacaagggcgugaccgccgccugcccccacgccggcgccaagagcuucuacaagaaccugaucuggcuggugaagaagggcaacagcuaccccaagcugagcaagagcuacaucaacgacaagggcaaggaggugcuggugcuguggggcauccaccaccccagcaccagcgccgaccagcagagccuguaccagaacgccgacgccuacguguucgugggcaccagcagauacagcaagaaguucaagcccgagaucgccaucagacccaaggugagagaccaggagggcagaaugaacuacuacuggauccugguggagcccggcgacaagaucaccuucgaggccaccggcaaccugguggugcccagauacgccuucgccauggagagaaacgccggcagcggcaucaucaucagcgacacccccgugcacgacugcaacaccaccugccagacccccaagggcgccaucaacaccagccugcccuuccagaacauccaccccaucaccaucggcaagugccccaaguacgugaagagcaccaagcugagacuggccaccggccugagaaacgugcccagcauccagagcagaggccuguucggcgccaucgccggcuucaucgagggcggcuggaccggcaugguggacggcugguacggcuaccaccaccagaacgagcagggcagcggcuacgccgccgaccugaagagcacccagaacgccaucgacaagaucaccaacaaggugaacagcgugaucgagaagaugaacacccaguucaccgccgugggcaaggaguucaaccaccuggagaagagaaucgagaaccugaacaagaagguggacgacggcuuccuggacaucuggaccuacaacgccgagcugcuggugcugcuggagaacgagagaacccuggacuaccacgacagcaacgugaagaaccuguacgagaaggugagaagccagcugaaggacaacgccaaggagaucggcaacggcugcuucgaguucuaccacaagugcgacaacaccugcauggagagcgugaagaacggcaccuacgacuaccccaaguacagcgaggaggccaagcugaacagagaggagaucgacggcgugaagcuggagagcaccagaaucuaccagauccuggccaucuacagcaccguggccagcagccuggugcugguggugagccugggcgccaucagcuucuggaugugcagcaacggcagccugcagugcagaaucugcaucuga

SEQ ID NO: 171195 - RNA, 1701 nt, Artificial Sequence
  derived and/or modified CDS sequence (opt4) from hemagglutinin__InfluenzaA__AHL80784
augaaggccauccugguggugcugcuguacaccuucgccaccgccaacgccgacacccugugcaucggcuaccacgccaacaacagcaccgacaccguggacaccgugcuggagaagaacgugaccgugacccacagcgugaaccugcuggaggacaagcacaacggcaagcugugcaagcugagaggcguggccccccugcaccugggcaagugcaacaucgccggcuggauccugggcaaccccgagugcgagagccugagcaccgccagcagcuggagcuacaucguggagaccagcagcagcgacaacggcaccugcuaccccggcgacuucaucgacuacgaggagcugagagagcagcugagcagcgugagcagcuucgagagauucgagaucuuccccaagaccagcagcuggcccaaccacgacagcaacaagggcaucaccgccgccugcccccacgccggcgccaagagcuucuacaagaaccugaucuggcuggugaagaagggcaacagcuaccccaagcugagcaagagcuacaucaacgacaagggcaaggaggugcuggugcuguggggcauccaccaccccagcaccagcgccgaccagcagagccuguaccagaacgccgacgccuacguguucgugggcaccagcagauacagcaagaaguucaagcccgagaucgccaucagacccaaggugagagaccaggagggcagaaugaacuacuacuggacccugguggagcccggcgacaagaucaccuucgaggccaccggcaaccugguggugcccagauacgccuucgccauggagagaaacgccggcagcggcaucaucaucagcgacacccccgugcacgacugcaacaccaccugccagacccccaagggcgccaucaacaccagccugcccuuccagaacauccaccccaucaccaucggcaagugccccaaguacgugaagagcaccaagcugagacuggccaccggccugagaaacgugcccagcauccagagcagaggccuguucggcgccaucgccggcuucaucgagggcggcuggaccggcaugguggacggcugguacggcuaccaccaccagaacgagcagggcagcggcuacgccgccgaccugaagagcacccagaacgccaucgacaagaucaccaacaaggugaacagcgugaucgagaagaugaacacccaguucaccgccgugggcaaggaguucaaccaccuggagaagagaaucgagaaccugaacaagaagguggacgacggcuuccuggacaucuggaccuacaacgccgagcugcuggugcugcuggagaacgagagaacccuggacuaccacgacagcaacgugaagaaccuguacgagaaggugagaagccagcugaagaacaacgccaaggagaucggcaacggcugcuucgaguucuaccacaagugcgacaacaccugcauggagagcgugaagaacggcaccuacgacuaccccaaguacagcgaggaggccaagcugaacagagaggagaucgacggcgugaagcuggagagcaccagaaucuaccagauccuggccaucuacagcaccguggccagcagccuggugcugguggugagccugggcgccaucagcuucuggaugugcagcaacggcagccugcagugcagaaucugcaucuga

SEQ ID NO: 171196 - RNA, 1701 nt, Artificial Sequence; identical to SEQ ID NO: 163893
  derived and/or modified CDS sequence (opt4) from hemagglutinin__InfluenzaA__AHL80795

SEQ ID NO: 171197 - RNA, 1701 nt, Artificial Sequence
  derived and/or modified CDS sequence (opt4) from hemagglutinin__InfluenzaA__AHL80817
augaaggccauccugguggugcugcuguacaccuucgccaccgccaacgccgacacccugugcaucggcuaccacgccaacaacagcaccgacaccguggacaccgugcuggagaagaacgugaccgugacccacagcgugaaccugcuggaggacaagcacaacggcaagcugugcaagcugagaggcguggccccccugcaccugggcaacugcaacaucgccggcuggauccugggcaaccccgagugcgagagccugagcaccgccagcagcuggagcuacaucguggaggccagcagcagcgacaacggcaccugcuaccccggcgacuucaucgacuacgaggagcugagagagcagcugagcagcgugagcagcuucgagagauucgagaucuuccccaagaccagcagcuggcccaaccacgacagcaacaagggcgugaccgccgccugcccccacgccggcgccaagagcuucuacaagaaccugaucuggcuggugaagaagggcaacagcuaccccaagcugagcaagagcuacaucaacgacaagggcaaggaggugcuggugcuguggggcauccaccaccccagcaccagcgccgaccagcagagccuguaccagaacgccgacgccuacguguucgugggcaccagcagauacagcaagaaguucaagcccgagaucgccaucagacccaaggugagagaccaggagggcagaaugaacuacuacuggacccugguggagcccggcgacaagaucaccuucgaggccaccggcaaccugguggugcccagauacgccuucgccauggagagaaacgccggcagcggcaucaucaucagcgacacccccgugcacgacugcaacaccaccugccagacccccaagggcgccaucaacaccagccugcccuuccagaacauccaccccaucaccaucggcaagugccccaaguacgugaagagcaccaagcugagacuggccaccggccugagaaacgugcccagcauccagagcagaggccuguucggcgccaucgccggcuucaucgagggcggcuggaccggcaugguggacggcugguacggcuaccaccaccagaacgagcagggcagcggcuacgccgccgaccugaagagcacccagaacgccaucgacaagaucaccaacaaggugaacagcgugaucgagaagaugaacacccaguucaccgccgugggcaaggaguucaaccaccuggagaagagaaucgagaaccugaacaagaagguggacgacggcuuccuggacaucuggaccuacaacgccgagcugcuggugcugcuggagaacgagagaacccuggacuaccacgacagcaacgugaagaaccuguacgagaaggugagaagccagcugaagaacaacgccaaggagaucggcaacggcugcuucgaguucuaccacaagugcgacaacaccugcauggagagcgugaagaacggcaccuacgacuaccccaaguacagcgaggaggccaagcugaacagagaggagaucgacggcgugaagcuggagagcaccagaaucuaccagauccuggccaucuacagcaccguggccagcagccuggugcugguggugagccugggcgccaucagcuucuggaugugcagcaacggcagccugcagugcagaaucugcaucuga

SEQ ID NO: 171198 - RNA, 1701 nt, Artificial Sequence; identical to SEQ ID NO: 171197
  derived and/or modified CDS sequence (opt4) from hemagglutinin__InfluenzaA__AHL80828

SEQ ID NO: 171199 - RNA, 1701 nt, Artificial Sequence
  derived and/or modified CDS sequence (opt4) from hemagglutinin__InfluenzaA__AHL80839
augaaggccauccugguggugcugcuguacaccuucgccaccgccaacgccgacacccugugcaucggcuaccacgccaacaacagcaccgacaccguggacaccgugcuggagaagaacgugaccgugacccacagcgugaaccugcuggaggacaagcacaacggcaagcugugcaagcugagaggcguggccccccugcaccugggcaagugcaacaucgccggcuggauccugggcaaccccgagugcgagagccugagcaccgccagcagcuggagcuacaucguggagaccagcagcagcgacaacggcaccugcuaccccggcgacuucaucgacuacgaggagcugagagagcagcugagcagcgugagcagcuucgagagauucgagaucuuccccaagaccagcagcuggcccaaccacgacagcaacaagggcaucaccgccgccugcccccacgccggcgccaagagcuucuacaagaaccugaucuggcuggugaagaagggcaacagcuaccccaagcugagcagaagcuacaucaacgacaagggcaaggaggugcuggugcuguggggcauccaccaccccagcaccagcgccgaccagcagagccuguaccagaacgccgacgccuacguguucgugggcaccagcagauacagcaagaaguucaagcccgagaucgccaucagacccaaggugagagaccaggagggcagaaugaacuacuacuggacccugguggagcccggcgacaagaucaccuucgaggccaccggcaaccugguggugcccagauacgccuucgccauggagagaaacgccggcagcggcaucaucaucagcgacacccccgugcacgacugcaacaccaccugccagacccccaagggcgccaucaacaccagccugcccuuccagaacauccaccccaucaccaucggcaagugccccaaguacgugaagagcaccaagcugagacuggccaccggccugagaaacgugcccagcauccagagcagaggccuguucggcgccaucgccggcuucaucgagggcggcuggaccggcaugguggacggcugguacggcuaccaccaccagaacgagcagggcagcggcuacgccgccgaccugaagagcacccagaacgccaucgacaagaucaccaacaaggugaacagcgugaucgagaagaugaacacccaguucaccgccgugggcaaggaguucaaccaccuggagaagagaaucgagaaccugaacaagaagguggacgacggcuuccuggacaucuggaccuacaacgccgagcugcuggugcugcuggagaacgagagaacccuggacuaccacgacagcaacgugaagaaccuguacgagaaggugagaagccagcugaagaacaacgccaaggagaucggcaacggcugcuucgaguucuaccacaagugcgacaacaccugcauggagagcgugaagaacggcaccuacgacuaccccaaguacagcgaggaggccaagcugaacagagaggagaucgacggcgugaagcuggagagcaccagaaucuaccagauccuggccaucuacagcaccguggccagcagccuggugcugguggugagccugggcgccaucagcuucuggaugugcagcaacggcagccugcagugcagaaucugcaucuga

SEQ ID NO: 171200 - RNA, 1701 nt, Artificial Sequence
  derived and/or modified CDS sequence (opt4) from hemagglutinin__InfluenzaA__AHL80861
augaaggccauccugguggugcugcuguacaccuucgccaccgccaacgccgacacccugugcaucggcuaccacgccaacaacagcaccgacaccguggacaccgugcuggagaagaacgugaccgugacccacagcgugaaccugcuggaggacaagcacaacggcaagcugugcaagcugagaggcguggccccccugcaccugggcaagugcaacaucgccggcuggauccugggcaaccccgagugcgagagccugagcaccgccagcagcuggagcuacaucguggagaccagcagcagcgacaacggcaccugcuaccccggcgacuucaucgacuacgaggagcugagagagcagcugagcagcgugagcagcuucgagagauucgagaucuuccccaagaccagcagcuggcccaaccacgacagcaacaagggcgugaccgccgccugcccccacgccggcgccaagagcuucuacaagaaccugaucuggcuggugaagaagggcaacagcuaccccaagcugagcaagagcuacaucaacgacaagggcaaggaggugcuggugcuguggggcauccaccaccccagcaccagcgccgaccagcagagccuguaccagaacgccgacgccuacguguucgugggcaccagcagauacagcaagaaguucaagcccgagaucgccaucagacccaaggugagagaccaggagggcagaaugaacuacuacuggacccugguggagcccggcgacaagaucaccuucgaggccaccggcaaccugguggugcccagauacgccuucgccauggagagaaacgccggcagcggcaucaucaucagcgacacccccgugcacgacugcaacaccaccugccagacccccaagggcgccaucaacaccagccugcccuuccagaacauccaccccaucaccaucggcaagugccccaaguacgugaagagcaccaagcugagacuggccaccggccugagaaacgugcccagcauccagagcagaggccuguucggcgccaucgccggcuucaucgagggcggcuggaccggcaugguggacggcugguacggcuaccaccaccagaacgagcagggcagcggcuacgccgccgaccugaagagcacccagaacgccaucgacaagaucaccaacaaggugaacagcgugaucgagaagaugaacacccaguucaccgccgugggcaaggaguucaaccaccuggagaagagaaucggcaaccugaacaagaagguggacgacggcuuccuggacaucuggaccuacaacgccgagcugcuggugcugcuggagaacgagagaacccuggacuaccacgacagcaacgugaagaaccuguacgagaaggugagaagccagcugaagaacaacgccaaggagaucggcaacggcugcuucgaguucuaccacaagugcgacaacaccugcauggagagcgugaagaacggcaccuacgacuaccccaaguacagcgaggaggccaagcugaacagagaggagaucgacggcgugaagcuggagagcaccagaaucuaccagauccuggccaucuacagcaccguggccagcagccuggugcugguggugagccugggcgccaucagcuucuggaugugcagcaacggcagccugcagugcagaaucugcaucuga

SEQ ID NO: 171201 - RNA, 1701 nt, Artificial Sequence
  derived and/or modified CDS sequence (opt4) from hemagglutinin__InfluenzaA__AHL80872
augaaggccauccugguggugcugcuguacaccuucgccaccgccaacgccgacacccugugcaucggcuaccacgccaacaacagcaccgacaccguggacaccgugcuggagaagaacgugaccgugacccacagcgugaaccugcuggaggacaagcacaacggcaagcugugcaagcugagaggcguggccccccugcaccugggcaagugcaacaucgccggcuggauccugggcaaccccgagugcgagagccugagcaccgccagcagcuggagcuacaucguggagaccagcagcagcgacaacggcaccugcuaccccggcgacuucaucgacuacgaggagcugagagagcagcugagcagcgugagcagcuucgagagauucgagaucuuccccaagaccagcagcuggcccaaccacgacagcaacaagggcgugaccgccgccugcccccacgccggcgccaagagcuucuacaagaaccugaucuggcuggugaagaagggcaacagcuaccccaagcugagcaagagcuacaucaacgacaagggcaaggaggugcuggugcuguggggcauccaccaccccagcaccaacgccgaccagcagagccuguaccagaacgccgacgccuacguguucgugggcaccagcagauacagcaagaaguucaagcccgagaucgccaucagacccaaggugagagaccaggagggcagaaugaacuacuacuggacccugguggagcccggcgacaagaucaccuucgaggccaccggcaaccugguggugcccagauacgccuucgccauggagagaaacgccggcagcggcaucaucaucagcgacacccccgugcacgacugcaacaccaccugccagacccccaagggcgccaucaacaccagccugcccuuccagaacauccaccccaucaccaucggcaagugccccaaguacgugaagagcaccaagcugagacuggccaccggccugagaaacgugcccagcauccagagcagaggccuguucggcgccaucgccggcuucaucgagggcggcuggaccggcaugguggacggcugguacggcuaccaccaccagaacgagcagggcagcggcuacgccgccgaccugaagagcacccagaacgccaucgacaagaucaccaacaaggugaacagcgugaucgagaagaugaacacccaguucaccgccgugggcaaggaguucaaccaccuggagaagagaaucgagaaccugaacaagaagguggacgacggcuuccuggacaucuggaccuacaacgccgagcugcuggugcugcuggagaacgagagaacccuggacuaccacgacagcaacgugaagaaccuguacgagaaggugagaagccagcugaagaacaacgccaaggagaucggcaacggcugcuucgaguucuaccacaagugcgacaacaccugcauggagagcgugaagaacggcaccuacgacuaccccaaguacagcgaggaggccaagcugaacagagaggagaucgacggcgugaagcuggagagcaccagaaucuaccagauccuggccaucuacagcaccguggccagcagccuggugcugguggugagccugggcgccaucagcuucuggaugugcagcaacggcagccugcagugcagaaucugcaucuga

SEQ ID NO: 171202 - RNA, 1701 nt, Artificial Sequence; identical to SEQ ID NO: 163893
  derived and/or modified CDS sequence (opt4) from hemagglutinin__InfluenzaA__AHL80883

SEQ ID NO: 171203 - RNA, 1701 nt, Artificial Sequence; identical to SEQ ID NO: 163893
  derived and/or modified CDS sequence (opt4) from hemagglutinin__InfluenzaA__AHL80894

SEQ ID NO: 171204 - RNA, 1701 nt, Artificial Sequence; identical to SEQ ID NO: 163893
  derived and/or modified CDS sequence (opt4) from hemagglutinin__InfluenzaA__AHL80905

SEQ ID NO: 171205 - RNA, 1701 nt, Artificial Sequence; identical to SEQ ID NO: 166514
  derived and/or modified CDS sequence (opt4) from hemagglutinin__InfluenzaA__AHL80916

SEQ ID NO: 171206 - RNA, 1701 nt, Artificial Sequence; identical to SEQ ID NO: 166915
  derived and/or modified CDS sequence (opt4) from hemagglutinin__InfluenzaA__AHL80927

SEQ ID NO: 171207 - RNA, 1701 nt, Artificial Sequence; identical to SEQ ID NO: 166915
  derived and/or modified CDS sequence (opt4) from hemagglutinin__InfluenzaA__AHL80946

SEQ ID NO: 171208 - RNA, 1701 nt, Artificial Sequence
  derived and/or modified CDS sequence (opt4) from hemagglutinin__InfluenzaA__AHL80958
augaaggccauccugguggugcugcuguacaccuucgccaccgccaacgccgacacccugugcaucggcuaccacgccaacaacagcaccgacaccguggacaccgugcuggagaagaacgugaccgugacccacagcgugaaccugcuggaggacaagcacaacggcaagcugugcaagcugagaggcguggccccccugcaccugggcaagugcaacaucgccggcuggauccugggcaaccccgagugcgagagccugagcaccgccagcagcuggagcuacaucguggagaccagcagcagcgacaacggcaccugcuaccccggcgacuucaucaacuacgaggagcugagagagcagcugagcagcgugagcagcuucgagagauucgagaucuuccccaagaucagcagcuggcccaaccacgacagcaacaagggcgugaccgccgccugcccccacgccggcgccaagagcuucuacaagaaccugaucuggcuggugaagaagggcaacagcuaccccaagcugagcaagagcuacaucaacgacaagggcaaggaggugcuggugcuguggggcauccaccaccccagcaccaccgccgaccagcagagccuguaccagaacgccgacgccuacguguucgugggcaccagcagauacagcaagaaguucaagcccgagaucgccaucagacccaaggugagagaccaggagggcagaaugaacuacuacuggacccugguggagcccggcgacaagaucaccuucgaggccaccggcaaccugguggugcccagauacgccuucgccauggagagaaacgccggcagcggcaucaucaucagcgacaccagcgugcacgacugcaacaccaccugccagacccccaagggcgccaucaacaccagccugcccuuccagaacauccaccccaucaccaucggcaagugccccaaguacgugaagagcaccaagcugagacuggccaccggccugagaaacgugcccagcauccagagcagaggccuguucggcgccaucgccggcuucaucgagggcggcuggaccggcaugguggacggcugguacggcuaccaccaccagaacgagcagggcagcggcuacgccgccgaccugaagagcacccagaacgccaucgacaagaucaccaacaaggugaacagcgugaucgagaagaugaacacccaguucaccgccgugggcaaggaguucaaccaccuggagaagagaaucgagaaccugaacaagaagguggacgacggcuuccuggacaucuggaccuacaacgccgagcugcuggugcugcuggagaacgagagaacccuggacuaccacgacagcaacgugaagaaccuguacgagaaggugagaaaccagcugaagaacaacgccaaggagaucggcaacggcugcuucgaguucuaccacaagugcgacaacaccugcauggagagcgugaagaacggcaccuacgacuaccccaaguacagcgaggaggccaagcugaacagagaggagaucgacggcgugaagcuggagagcaccagaaucuaccagauccuggccaucuacagcaccguggccagcagccuggugcugguggugagccugggcgccaucagcuucuggaugugcagcaacggcagccugcagugcagaaucugcaucuga

SEQ ID NO: 171209 - RNA, 1701 nt, Artificial Sequence
  derived and/or modified CDS sequence (opt4) from hemagglutinin__InfluenzaA__AHL81001
augaagaccaucaucgcccugagcuacauccugugccugaucuucgcccagaagcugcccggcaacgacaacagcaccgccacccugugccugggccaccacgccgugcccaacggcaccaucgugaagaccaucaccaacgaccagaucgaggugaccaacgccaccgagcuggugcagagcagcagcaccggcgagaucugcaacagcccccaccagauccuggacggcgagaacugcacccugaucgacgcccugcugggcgacccccagugcgacggcuuccagaacaagaagugggaccuguucguggagagaagcaaggcccacagcaacugcuaccccuacgacgugcccgacuacgccagccugagaagccugguggccagcagcggcacccuggaguucaacaacgagagcuucaacuggaccggcgugacccagaacggcaccagcagcgccugcaucagaagaagcaacaacagcuucuucagcagacugaacuggcugacccaccugaacuucaaguaccccgcccugaacgugaccaugcccaacaacgagcaguucgacaagcuguacaucuggggcgugcaccaccccggcaccgacaaggaccagaucuuccuguacgcccaggccgccggcagaaucaccgugagcaccaagagaagccagcaggccgugauccccaacaucggcagcagacccagagugagaaacauccccagcagagugagcaucuacuggaccaucgugaagcccggcgacauccugcugaucaacagcaccggcaaccugaucgcccccagaggcuacuucaagaucagaagcggcaagagcagcaucaugagaagcgacgcccccaucggcaagugcaacagcgccugcaucacccccaacggcagcauccccaacgacaagcccuuccagaacgugaacagaaucaccuacggcgccugccccagauacgugaagcagaacacccugaagcuggccaccggcaugagaaacgugcccgagaagcagaccagaggcaucuucggcgccaucgccggcuucaucgagaacggcugggagggcaugguggacggcugguacggcuucagacaccagaacagcgagggcagaggccaggccgccgaccugaagagcacccaggccgccaucgaccagaucaacggcaagcugaacagacugaucggcaagaccaacgagaaguuccaccagaucgagaaggaguucagcgagguggagggcagaauccaggaccuggagaaguacguggaggacaccaagaucgaccuguggagcuacaacgccgagcugcugguggcccuggagaaccagcacaccaucgaccugaccgacagcgagaugaacaagcuguucgagaagaccaagaagcagcugagagagaacgccgaggacaugggcaacggcugcuucaagaucuaccacaagugcgacaacgccugcaucggcagcaucagaaacggcaccuacgaccacgacguguacagagacgaggcccugaacaacagauuccagaucaagggcguggagcugaagagcggcuacaaggacuggauccuguggaucagcuucgccaucagcugcuuccugcugugcguggcccugcugggcuucaucaugugggccugccagaagggcaacaucagaugcaacaucugcaucuga

SEQ ID NO: 171210 - RNA, 1701 nt, Artificial Sequence; identical to SEQ ID NO: 166915
  derived and/or modified CDS sequence (opt4) from hemagglutinin__InfluenzaA__AHL81013

SEQ ID NO: 171211 - RNA, 1701 nt, Artificial Sequence; identical to SEQ ID NO: 166915
  derived and/or modified CDS sequence (opt4) from hemagglutinin__InfluenzaA__AHL81025

SEQ ID NO: 171212 - RNA, 1701 nt, Artificial Sequence; identical to SEQ ID NO: 166915
  derived and/or modified CDS sequence (opt4) from hemagglutinin__InfluenzaA__AHL81037

SEQ ID NO: 171213 - RNA, 1701 nt, Artificial Sequence; identical to SEQ ID NO: 166915
  derived and/or modified CDS sequence (opt4) from hemagglutinin__InfluenzaA__AHL81049

SEQ ID NO: 171214 - RNA, 1701 nt, Artificial Sequence; identical to SEQ ID NO: 171208
  derived and/or modified CDS sequence (opt4) from hemagglutinin__InfluenzaA__AHL81061

SEQ ID NO: 171215 - RNA, 1701 nt, Artificial Sequence; identical to SEQ ID NO: 171208
  derived and/or modified CDS sequence (opt4) from hemagglutinin__InfluenzaA__AHL81072

SEQ ID NO: 171216 - RNA, 1701 nt, Artificial Sequence; identical to SEQ ID NO: 168421
  derived and/or modified CDS sequence (opt4) from hemagglutinin__InfluenzaA__AHL81083

SEQ ID NO: 171217 - RNA, 1701 nt, Artificial Sequence; identical to SEQ ID NO: 166915
  derived and/or modified CDS sequence (opt4) from hemagglutinin__InfluenzaA__AHL81095

SEQ ID NO: 171218 - RNA, 1701 nt, Artificial Sequence
  derived and/or modified CDS sequence (opt4) from hemagglutinin__InfluenzaA__AHL81118
augaaggccauccugguggugcugcuguacaccuucgccaccgccaacgccgacacccugugcaucggcuaccacgccaacaacagcaccgacaccguggacaccgugcuggagaagaacgugaccgugacccacagcgugaaccugcuggaggacaagcacaacggcaagcugugcaagcugagaggcguggccccccugcaccugggcaagugcaacaucgccggcuggauccugggcaaccccgagugcgagagccugagcaccgccagcagcuggagcuacaucguggagaccagcagcagcgacaacggcaccugcuaccccggcgacuucaucaacuacgaggagcugagagagcagcugagcagcgugagcagcuucgagagauucgagaucuuccccaagaccaacagcuggcccaaccacgacagcaacaagggcgugaccgccgccugcccccacgccggcgccaagagcuucuacaagaaccugaucuggcuggugaagaagggcaacagcuaccccaagcugagcaagagcuacaucaacgacaagggcaaggaggugcuggugcuguggggcauccaccaccccagcaccaccgccgaccagcagagccuguaccagaacgccgacgccuacguguucgugggcaccagcagauacagcaagaaguucaagcccgagaucgccaucagacccaaggugagagaccaggagggcagaaugaacuacuacuggacccugguggagcccggcgacaagaucaccuucgaggccaccggcaaccugguggugcccagauacgccuucgccauggagagaaacgccggcagcggcaucaucaucagcgacacccccgugcacgacugcaacaccaccugccagacccccaagggcgccaucaacaccagccugcccuuccagaacauccaccccaucaccaucggcaagugccccaaguacgugaagagcaccaagcugagacuggccaccggccugagaaacgugcccagcauccagagcagaggccuguucggcgccaucgccggcuucaucgagggcggcuggaccggcaugguggacggcugguacggcuaccaccaccagaacgagcagggcagcggcuacgccgccgaccugaagagcacccagaacgccaucgacaagaucaccaacaaggugaacagcgugaucgagaagaugaacacccaguucaccgccgugggcaaggaguucaaccaccuggagaagagaaucgagaaccugaacaagaagguggacgacggcuuccuggacaucuggaccuacaacgccgagcugcuggugcugcuggagaacgagagaacccuggacuaccacgacagcaacgugaagaaccuguacgagaaggugagaaaccagcugaagaacaacgccaaggagaucggcaacggcugcuucgaguucuaccacaagugcgacaacaccugcauggagagcgugaagaacggcaccuacgacuaccccaaguacagcgaggaggccaagcugaacagagaggagaucgacggcgugaagcuggagagcaccagaaucuaccagauccuggccaucuacagcaccguggccagcagccuggugcugguggugagccugggcgccaucagcuucuggaugugcagcaacggcagccugcagugcagaaucugcaucuga

SEQ ID NO: 171219 - RNA, 1701 nt, Artificial Sequence; identical to SEQ ID NO: 166915
  derived and/or modified CDS sequence (opt4) from hemagglutinin__InfluenzaA__AHL81129

SEQ ID NO: 171220 - RNA, 1701 nt, Artificial Sequence; identical to SEQ ID NO: 166915
  derived and/or modified CDS sequence (opt4) from hemagglutinin__InfluenzaA__AHL81141

SEQ ID NO: 171221 - RNA, 1701 nt, Artificial Sequence; identical to SEQ ID NO: 166915
  derived and/or modified CDS sequence (opt4) from hemagglutinin__InfluenzaA__AHL81153

SEQ ID NO: 171222 - RNA, 1701 nt, Artificial Sequence
  derived and/or modified CDS sequence (opt4) from hemagglutinin__InfluenzaA__AHL81165
augaagaccaucaucgcccugagcuacauccugugccugguguucgcccagaagcugcccggcaacgacaacagcaccgccacccugugccugggccaccacgccgugcccaacggcaccaucgugaagaccaucaccaacgaccagaucgaggugaccaacgccaccgagcuggugcagagcagcagcgccggcgagaucugcgacagcccccaccagauccuggacggcgagaacugcacccugaucgacgcccugcugggcgacccccagugcgacggcuuccagaacaagaagugggaccuguucguggagagaagcagagccuacagcaacugcuaccccuacgacgugcccgacuacgccagccugagaagccugguggccagcagcggcacccuggaguucaacaacgagagcuucaacuggaccggcgugacccagaacggcaccagcagcgccugcaucagaagaagcaacaacagcuucuucagcagacugaacuggcugacccaccugaacuucaaguaccccgcccugaacgugaccaugcccaacaacgagcaguucgacaagcuguacaucuggggcgugcaccaccccggcaccgacaaggaccagaucuuccuguacgcccaggccagcggcagaaucaccgugagcaccaagagaagccagcaggccgugauccccaacaucggcagcagacccagagugagaaacauccccagcagaaucagcaucuacuggaccaucgugaagcccggcgacauccugcugaucaacagcaccggcaaccugaucgcccccagaggcuacuucaagaucagaagcggcaagagcagcaucaugagaagcgacgcccccaucggcaagugcaacagcgagugcaucacccccaacggcagcauccccaacgacaagcccuuccagaacgugaacagaaucaccuacggcgccugccccagauacgugaagcagagcacccugaagcuggccaccggcaugagaaacgugcccgagaagcagaccagaggcaucuucggcgccaucgccggcuucaucgagaacggcugggagggcaugauggacggcugguacggcuucagacaccagaacagcgagggcagaggccaggccgccgaccugaagagcacccaggccgccaucgaccagaucaacggcaagcugaacagacugaucggcaagaccaacgagaaguuccaccagaucgagaaggaguucagcgagguggagggcagaauccaggaccuggagaaguacguggaggacaccaagaucgaccuguggagcuacaacgccgagcugcugguggcccuggagaaccagcacaccaucgaccugaccgacagcgagaugaacaagcuguucgagaagaccaagaagcagcugagagagaacgccgaggacaugggcaacggcugcuucaagaucuaccacaagugcgacaacgccugcaucggcagcaucagaaacggcaccuacgaccacgacguguacagagacgaggcccugaacaacagauuccagaucaagggcguggagcugaagagcggcuacaaggacuggauccuguggaucagcuucgccaucagcugcuuccugcugugcguggcccugcugggcuucaucaugugggccugccagaagggcaacaucagaugcaacaucugcaucuga

SEQ ID NO: 171223 - RNA, 1701 nt, Artificial Sequence; identical to SEQ ID NO: 171222
  derived and/or modified CDS sequence (opt4) from hemagglutinin__InfluenzaA__AHL81177

SEQ ID NO: 171224 - RNA, 1701 nt, Artificial Sequence; identical to SEQ ID NO: 171209
  derived and/or modified CDS sequence (opt4) from hemagglutinin__InfluenzaA__AHL81189

SEQ ID NO: 171225 - RNA, 1701 nt, Artificial Sequence
  derived and/or modified CDS sequence (opt4) from hemagglutinin__InfluenzaA__AHL81212
augaagaccaucaucgcccugagcuacauccugugccugguguucgcccagaagcugcccggcaacgacaacagcaccgccacccugugccugggccaccacgccgugcccaacggcaccaucgugaagaccaucaccaacgaccagaucgaggugaccaacgccaccgagcuggugcagagcagcagcaccggcgagaucugcaacagcccccaccagauccuggacggcgagaacugcacccugaucgacgcccugcugggcgacccccagugcgacggcuuccagaacaagaagugggaccuguucguggagagaagcaaggcccacagcaacugcuaccccuacgacgugcccgacuacgccagccugagaagccugguggccagcagcggcacccuggaguucaagaacgagagcuucaacuggaccggcgugacccagaacggcaccagcagcgccugcaucagaagaagcaacaacagcuucuucagcagacugaacuggcugacccaccugaacuucaaguaccccgcccugaacgugaccaugcccaacaacgagcaguucgacaagcuguacaucuggggcgugcaccaccccggcaccgacaaggaccagaucuuccuguacgcccaggccgccggcagaaucaccgugagcaccaagagaagccagcaggccgugauccccaacaucggcagcagacccagagugagaaacauccccagcagagugagcaucuacuggaccaucgugaagcccggcgacauccugcugaucaacagcaccggcaaccugaucgcccccagaggcuacuucaagaucagaagcggcaagagcagcaucaugagaagcgacgcccccaucggcaagugcaacagcgccugcaucacccccaacggcagcauccccaacgacaagcccuuccagaacgugaacagaaucaccuacggcgccugccccagauacgugaagcagaacacccugaagcuggccaccggcaugagaaacgugcccgagaagcagaccagaggcaucuucggcgccaucgccggcuucaucgagaacggcugggagggcaugguggacggcugguacggcuucagacaccagaacagcgagggcagaggccaggccgccgaccugaagagcacccaggccgccaucgaccagaucaacggcaagcugaacagacugaucggcaagaccaacgagaaguuccaccagaucgagaaggaguucagcgagguggagggcagaauccaggaccuggagaaguacguggaggacaccaagaucgaccuguggagcuacaacgccgagcugcugguggcccuggagaaccagcacaccaucgaccugaccgacagcgagaugaacaagcuguucgagaagaccaagaagcagcugagagagaacgccgaggacaugggcaacggcugcuucaagaucuaccacaagugcgacaacgccugcaucggcagcaucagaaacggcaccuacgaccacgacguguacagagacgaggcccugaacaacagauuccagaucaagggcguggagcugaagagcggcuacaaggacuggauccuguggaucagcuucgccaucagcugcuuccugcugugcguggcccugcugggcuucaucaugugggccugccagaagggcaacaucagaugcaacaucugcaucuga

SEQ ID NO: 171226 - RNA, 1701 nt, Artificial Sequence
  derived and/or modified CDS sequence (opt4) from hemagglutinin__InfluenzaA__AHL81224
augaaggccauccugguggugcugcuguacaccuucgccaccgccaacgccgacacccugugcaucggcuaccacgccaacaacagcaccgacaccguggacaccgugcuggagaagaacgugaccgugacccacagcgugaaccugcuggaggacaagcacaacggcaagcugugcaagcugagaggcguggccccccugcaccugggcaagugcaacaucgccggcuggauccugggcaaccccgagugcgagagccugagcaccgccagcagcuggagcuacaucguggagaccagcagcagcgacaacggcaccugcuaccccggcgacuucaucgacuacgaggagcugagagagcagcugagcagcgugagcagcuucgagagauucgagaucuuccccaagaccagcagcuggcccaaccacgacagcaacaagggcgugaccgccgccugcccccacgccggcgccaagggcuucuacaagaaccugaucuggcuggugaagaagggcaacagcuaccccaagcugagcaagagcuacaucaacgacaagggcaaggaggugcuggugcuguggggcauccaccaccccagcaccaccgccgaccagcagagccuguaccagaacgccgacaccuacguguucgugggcaccagcagauacagcaagaaguucaagcccgagaucgccaucagacccaaggugagagaccaggagggcagaaugaacuacuacuggacccugguggagcccggcgacaagaucaccuucgaggccaccggcaaccugguggugcccagauacgccuucgccauggagagaaccgccggcagcggcaucaucaucagcgacacccccgugcacgacugcaacaccaccugccagacccccaagggcgccaucaacaccagccugcccuuccagaacauccaccccaucaccaucggcaagugccccaaguacgugaagagcaccaagcugagacuggccaccggccugagaaacgugcccagcauccagagcagaggccuguucggcgccaucgccggcuucaucgagggcggcuggaccggcaugguggacggcugguacggcuaccaccaccagaacgagcagggcagcggcuacgccgccgaccugaagagcacccagaacgccaucgacaagaucaccaacaaggugaacagcgugaucgagaagaugaacacccaguucaccgccgugggcaaggaguucaaccaccuggagaagagaaucgagaaccugaacaagaagguggacgacggcuuccuggacaucuggaccuacaacgccgagcugcuggugcugcuggagaacgagagaacccuggacuaccacgacagcaacgugaagaaccuguacgagaaggugagaaaccagcugaagaacaacgccaaggagaucggcaacggcugcuucgaguucuaccacaagugcgacaacaccugcauggagagcgugaagaacggcaccuacgacuaccccaaguacagcgaggaggccaagcugaacagagaggagaucgacggcgugaagcuggagagcaccagaaucuaccagauccuggccaucuacagcaccguggccagcagccuggugcugguggugagccugggcgccaucagcuucuggaugugcagcaacggcagccugcagugcagaaucugcaucuga

SEQ ID NO: 171227 - RNA, 1701 nt, Artificial Sequence; identical to SEQ ID NO: 166915
  derived and/or modified CDS sequence (opt4) from hemagglutinin__InfluenzaA__AHL81235

SEQ ID NO: 171228 - RNA, 1701 nt, Artificial Sequence; identical to SEQ ID NO: 166915
  derived and/or modified CDS sequence (opt4) from hemagglutinin__InfluenzaA__AHL81247

SEQ ID NO: 171229 - RNA, 1701 nt, Artificial Sequence; identical to SEQ ID NO: 166915
  derived and/or modified CDS sequence (opt4) from hemagglutinin__InfluenzaA__AHL81259

SEQ ID NO: 171230 - RNA, 1701 nt, Artificial Sequence; identical to SEQ ID NO: 166915
  derived and/or modified CDS sequence (opt4) from hemagglutinin__InfluenzaA__AHL81271

SEQ ID NO: 171231 - RNA, 1701 nt, Artificial Sequence; identical to SEQ ID NO: 166915
  derived and/or modified CDS sequence (opt4) from hemagglutinin__InfluenzaA__AHL81283

SEQ ID NO: 171232 - RNA, 1701 nt, Artificial Sequence; identical to SEQ ID NO: 166915
  derived and/or modified CDS sequence (opt4) from hemagglutinin__InfluenzaA__AHL81295

SEQ ID NO: 171233 - RNA, 1701 nt, Artificial Sequence; identical to SEQ ID NO: 171208
  derived and/or modified CDS sequence (opt4) from hemagglutinin__InfluenzaA__AHL81307

SEQ ID NO: 171234 - RNA, 1701 nt, Artificial Sequence; identical to SEQ ID NO: 166927
  derived and/or modified CDS sequence (opt4) from hemagglutinin__InfluenzaA__AHL81329

SEQ ID NO: 171235 - RNA, 1701 nt, Artificial Sequence
  derived and/or modified CDS sequence (opt4) from hemagglutinin__InfluenzaA__AHL81340
augaagaccaucaucgcccugagcuacauccugugccugguguucgcccagaagcugcccggcaacgacaacagcaccgccacccugugccugggccaccacgccgugcccaacggcaccaucgugaagaccaucaccaacgaccagaucgaggugaccaacgccaccgagcuggugcagagcagcagcaccggcgagaucugcgacagcccccaccagauccuggacggcaagaacugcacccugaucgacgcccugcugggcgacccccagugcgacggcuuccagaacaagaagugggaccuguucguggagagaagcaaggccuacagcaacugcuaccccuacgacgugcccgacuacgccagccugagaagccugguggccagcagcggcacccuggaguucaacaacgagagcuucaacuggaccggcgugacccaggacggcaccagcagcgccugcaucagaggcagcaagaacagcuucuucagcagacugaacuggcugacccaccugaacuucaaguaccccgcccugaacgugaccaugcccaacaacgagcaguucgacaagcuguacaucuggggcgugcaccaccccggcaccgacaaggaccagaucuuccuguacgcccaggccagcggcagaaucaccgugagcaccaagagaagccagcaggccgccauccccaacaucggcagcagacccagagugagaaacauccccagcagaaucagcaucuacuggaccaucgugaagcccggcgacauccugcugaucaacagcaccggcaaccugaucgcccccagaggcuacuucaagaucagaagcggcaagagcagcaucaugagaagcgacgcccccaucggcaagugcaacagcgagugcaucacccccaacggcagcauccccaacgacaagcccuuccagaacgugaacagaaucaccuacggcgccugccccagauacgugaagcagaacacccugaagcuggccaccggcaugagaaacgugcccgagaagcagaccagaggcaucuucggcgccaucgccggcuucaucgagaacggcugggagggcaugguggacggcugguacggcuucagacaccagaacagcgagggcagaggccaggccgccgaccugaagagcacccaggccgccaucgaccagaucaacggcaagcugaacagacugaucggcaagaccaacgagaaguuccaccagaucgagaaggaguucagcgagguggagggcagaauccaggaccuggagaaguacguggaggacaccaagaucgaccuguggagcuacaacgccgagcugcugguggcccuggagaaccagcacaccaucgaccugaccgacagcgagaugaacaagcuguucgagaagaccaagaagcagcugagagagaacgccgaggacaugggcaacggcugcuucaagaucuaccacaagugcgacaacgccugcaucggcagcaucagaaacggcaccuacaaccacgacguguacagagacgaggcccugaacaagagauuccagaucaagggcaucgagcugaagagcggcuacaaggacuggauccuguggaucagcuucgccaucagcugcuuccugcugugcguggcccugcugggcuucaucaugugggccugccagaagggcaacaucagaugcaacaucugcaucuga

SEQ ID NO: 171236 - RNA, 1701 nt, Artificial Sequence; identical to SEQ ID NO: 166915
  derived and/or modified CDS sequence (opt4) from hemagglutinin__InfluenzaA__AHL81352

SEQ ID NO: 171237 - RNA, 1701 nt, Artificial Sequence
  derived and/or modified CDS sequence (opt4) from hemagglutinin__InfluenzaA__AHL81364
augaaggccauccugguggugcugcuguacaccuucgccaccgccaacgccgacacccugugcaucggcuaccacgccaacaacagcaccgacaccguggacaccgugcuggagaagaacgugaccgugacccacagcgugaaccugcuggaggacaagcacaacggcaagcugugcaagcugagaggcguggccccccugcaccugggcaagugcaacaucgccggcuggauccugggcaaccccgagugcgagagccugagcaccgccagcagcuggagcuacaucguggagaccagcagcagcgacaacggcgccugcuaccccggcgacuucaucaacuacgaggagcugagagagcagcugagcagcgugagcagcuucgagagauucgagaucuuccccaagaccaacagcuggcccaaccacgacagcaacaagggcgugaccgccgccugcccccacgccggcgccaagagcuucuacaagaaccugaucuggcuggugaagaagggcaacagcuaccccaagcugagcaagagcuacaucaacgacaagggcaaggaggugcuggugcuguggggcauccaccaccccagcaccaccgccgaccagcagagccuguaccagaacgccgacgccuacguguucgugggcaccagcagauacagcaagaaguucaagcccgagaucgccaucagacccaaggugagagaccaggagggcagaaugaacuacuacuggacccugguggagcccggcgacaagaucaccuucgaggccaccggcaaccugguggugcccagauacgccuucgccauggagagaaacgccggcagcggcaucaucaucagcgacacccccgugcacgacugcaacaccaccugccagacccccaagggcgccaucaacaccagccugcccuuccagaacauccaccccaucaccaucggcaagugccccaaguacgugaagagcaccaagcugagacuggccaccggccugagaaacgugcccagcauccagagcagaggccuguucggcgccaucgccggcuucaucgagggcggcuggaccggcaugguggacggcugguacggcuaccaccaccagaacgagcagggcagcggcuacgccgccgaccugaagagcacccagaacgccaucgacaagaucaccaacaaggugaacagcgugaucgagaagaugaacacccaguucaccgccgugggcaaggaguucaaccaccuggagaagagaaucgagaaccugaacaagaagguggacgacggcuuccuggacaucuggaccuacaacgccgagcugcuggugcugcuggagaacgagagaacccuggacuaccacgacagcaacgugaagaaccuguacgagaaggugagaaaccagcugaagaacaacgccaaggagaucggcaacggcugcuucgaguucuaccacaagugcgacaacaccugcauggagagcgugaagaacggcaccuacgacuaccccaaguacagcgaggaggccaagcugaacagagaggagaucgacggcgugaagcuggagagcaccagaaucuaccagauccuggccaucuacagcaccguggccagcagccuggugcugguggugagccugggcgccaucagcuucuggaugugcagcaacggcagccugcagugcagaaucugcaucuga

SEQ ID NO: 171238 - RNA, 1701 nt, Artificial Sequence
  derived and/or modified CDS sequence (opt4) from hemagglutinin__InfluenzaA__AHL81386
augaaggccauccugguggugcugcuguacaccuucgccaccgccaacgccgacacccugugcaucggcuaccacgccaacaacagcaccgacaccguggacaccgugcuggagaagaacgugaccgugacccacagcgugaaccugcuggaggacaagcacaacggcaagcugugcaagcugagaggcguggccccccugcaccugggcaagugcaacaucgccggcuggauccugggcaaccccgagugcgagagccugagcaccgccagcagcuggagcuacaucguggagaccagcagcagcgacaacggcaccugcuaccccggcgacuucaucaacuacgaggagcugagagagcagcugagcagcgugagcagcuucgagagauucgagaucuuccccaagaccaacagcuggcccaaccacgacagcaacaagggcgugaccgccgccugcccccacgccggcgugaagagcuucuacaagaaccugaucuggcuggugaagaagggcaacagcuaccccaagcugagcaagagcuacaucaacgacaagggcaaggaggugcuggugcuguggggcauccaccaccccagcaccaccgccgaccagcagagccuguaccagaacgccgacgccuacguguucgugggcaccagcagauacagcaagaaguucaagcccgagaucgccaucagacccaaggugagagaccaggagggcagaaugaacuacuacuggacccugguggagcccggcgacaagaucaccuucgaggccaccggcaaccugguggugcccagauacgccuucgccauggagagaaacgccggcagcggcaucaucaucagcgacacccccgugcacgacugcaacaccaccugccagacccccaagggcgccaucaacaccagccugcccuuccagaacauccaccccaucaccaucggcaagugccccaaguacgugaagagcaccaagcugagacuggccaccggccugagaaacgugcccagcauccagagcagaggccuguucggcgccaucgccggcuucaucgagggcggcuggaccggcaugguggacggcugguacggcuaccaccaccagaacgagcagggcagcggcuacgccgccgaccugaagagcacccagaacgccaucgacaagaucaccaacaaggugaacagcgugaucgagaagaugaacacccaguucaccgccgugggcaaggaguucaaccaccuggagaagagaaucgagaaccugaacaagaagguggacgacggcuuccuggacaucuggaccuacaacgccgagcugcuggugcugcuggagaacgagagaacccuggacuaccacgacagcaacgugaagaaccuguacgagaaggugagaaaccagcugaagaacaacgccaaggagaucggcaacggcugcuucgaguucuaccacaagugcgacaacaccugcauggagagcgugaagaacggcaccuacgacuaccccaaguacagcgaggaggccaagcugaacagagaggagaucgacggcgugaagcuggagagcaccagaaucuaccagauccuggccaucuacagcaccguggccagcagccuggugcugguggugagccugggcgccaucagcuucuggaugugcagcaacggcagccugcagugcagaaucugcaucuga

SEQ ID NO: 171239 - RNA, 1701 nt, Artificial Sequence; identical to SEQ ID NO: 166915
  derived and/or modified CDS sequence (opt4) from hemagglutinin__InfluenzaA__AHL81397

SEQ ID NO: 171240 - RNA, 1701 nt, Artificial Sequence; identical to SEQ ID NO: 171225
  derived and/or modified CDS sequence (opt4) from hemagglutinin__InfluenzaA__AHL81409

SEQ ID NO: 171241 - RNA, 1701 nt, Artificial Sequence; identical to SEQ ID NO: 171195
  derived and/or modified CDS sequence (opt4) from hemagglutinin__InfluenzaA__AHL81419

SEQ ID NO: 171242 - RNA, 1701 nt, Artificial Sequence; identical to SEQ ID NO: 163893
  derived and/or modified CDS sequence (opt4) from hemagglutinin__InfluenzaA__AHL81430

SEQ ID NO: 171243 - RNA, 1701 nt, Artificial Sequence; identical to SEQ ID NO: 160690
  derived and/or modified CDS sequence (opt4) from hemagglutinin__InfluenzaA__AHL88951

SEQ ID NO: 171244 - RNA, 1701 nt, Artificial Sequence; identical to SEQ ID NO: 160690
  derived and/or modified CDS sequence (opt4) from hemagglutinin__InfluenzaA__AHL89030

SEQ ID NO: 171245 - RNA, 1701 nt, Artificial Sequence
  derived and/or modified CDS sequence (opt4) from hemagglutinin__InfluenzaA__AHL89042
augaagaccaucaucgcccugagcuacauccugugccugguguucgcccagaagcugcccggcaacgacaacagcaccgccacccugugccugggccaccacgccgugcccaacggcaccaucgugaagaccaucaccaacgaccagaucgaggugaccaacgccaccgagcuggugcagagcagcagcaccggcgagaucugcgacagcccccaccagauccuggacggcgagaacugcacccugaucgacgcccugcugggcgacccccagugcgacggcuuccagaacaagaagugggaccuguucguggagagaagcaaggccuacagcaacugcuaccccuacgacgugcccgacuacgccagccugagaagccugguggccagcagcggcacccuggaguucaacaacgagaacuucaacuggaccggcgugacccagaacggcaccagcagcgccugcaagagaagaagcaacaacagcuucuucagcagacugaacuggcugacccaccugaaguucaaguaccccgcccugaacgugaccaugcccaacaacgagaaguucgacaagcuguacaucuggggcgugcaccaccccggcaccgacaacgaccagaucuuccuguacgcccaggccagcggcagaaucaccgugagcaccaagagaagccagcagaccgugauccccaacaucggcagcagacccagagugagaaacauccccagcagaaucagcaucuacuggaccaucgugaagcccggcgacauccugcugaucaacagcaccggcaaccugaucgcccccagaggcuacuucaagaucagaagcggcaagagcagcaucaugagaagcgacgcccccaucggcaagugcaacagcgagugcaucacccccaacggcagcauccccaacgacaagcccuuccagaacgugaacagaaucaccuacggcgccugccccagauacgugaagcagaacacccugaagcuggccaccggcaugagaaacgugcccgagaagcagaccagaggcaucuucggcgccaucgccggcuucaucgagaacggcugggagggcaugguggacggcugguacggcuucagacaccagaacagcgagggcaucggccaggccgccgaccugaagagcacccaggccgccaucaaccagaucaacggcaagcugaacagacugaucggcaagaccaacgagaaguuccaccagaucgagaaggaguucagcgagguggagggcagaauccaggaccuggagaaguacguggaggacaccaagaucgaccuguggagcuacaacgccgagcugcugguggcccuggagaaccagcacaccaucgaccugaccgacagcgagaugaacaagcuguucgagagaaccaagaagcagcugagagagaacgccgaggacaugggcaacggcugcuucaagaucuaccacaagugcgacaacgccugcaucggcagcaucagaaacggcaccuacgaccacgacguguacagagacgaggcccugaacaacagauuccagaucaagggcguggagcugaagagcggcuacaaggacuggauccuguggaucagcuucgccaucagcugcuuccugcugugcguggcccuggugggcuucaucaugugggccugccagaagggcaacaucagaugcaacaucugcaucuga

SEQ ID NO: 171246 - RNA, 1701 nt, Artificial Sequence
  derived and/or modified CDS sequence (opt4) from hemagglutinin__InfluenzaA__AHL89054
augaagaccaucaucgcccugagcuacauccugugccugguguucgcccagaagcugcccggcaacgacaacagcaccgccacccugugccugggccaccacgccgugcccaacggcaccaucgugaagaccaucaccaacgaccagaucgaggugaccaacgccaccgagcuggugcagagcagcagcaccggcggcaucugcgacagcccccaccagauccuggacggcgagaacugcacccugaucgacgcccugcugggcgacccccagugcgacggcuuccagaacaagaagugggaccuguucguggagagaagcaaggccuacagcaacugcuaccccuacgacgugcccgacuacgccagccugagaagccugguggccagcagcggcacccuggaguucaacaacgagagcuucaacuggaccggcgugacccagaacggcaccagcagcgccugcaagagaagaagcaacaacagcuucuucagcagacugaacuggcugacccaccugaaguucaaguaccccgcccugaacgugaccaugcccaacaacgagaaguucgacaagcuguacaucuggggcgugcaccaccccggcaccgacaacgaccagaucuuccuguacgcccaggccagcggcagaaucaccgugagcaccaagagaagccagcagaccgugauccccaacaucggcagcagacccagagugagaaacauccccagcagaaucagcaucuacuggaccaucgugaagcccggcgacauccugcugaucaacagcaccggcaaccugaucgcccccagaggcuacuucaagaucagaagcggcaagagcagcaucaugagaagcgacgcccccaucggcaagugcaacagcgagugcaucacccccaacggcagcauccccaacgacaagcccuuccagaacgugaacagaaucaccuacggcgccugccccagauacgugaagcagaacacccugaagcuggccaccggcaugagaaacgugcccgagaagcagaccagaggcaucuucggcgccaucgccggcuucaucgagaacggcugggagggcaugguggacggcugguacggcuucagacaccagaacagcgagggcaucggccaggccgccgaccugaagagcacccaggccgccaucaaccagaucaacggcaagcugaacagacugaucggcaagaccaacgagaaguuccaccagaucgagaaggaguucagcgagguggagggcagaauccaggaccuggagaaguacguggaggacaccaagaucgaccuguggagcuacaacgccgagcugcugguggcccuggagaaccagcacaccaucgaccugaccgacagcgagaugaacaagcuguucgagagaaccaagaagcagcugagagagaacgccgaggacaugggcaacggcugcuucaagaucuaccacaagugcgacaacgccugcaucggcagcaucagaaacggcaccuacgaccacgacguguacagagacgaggcccugaacaacagauuccagaucaagggcguggagcugaagagcggcuacaaggacuggauccuguggaucagcuucgccaugagcugcuuccugcugugcguggcccugcugggcuucaucaugugggccugccagaagggcaacaucagaugcaacaucugcaucuga

SEQ ID NO: 171247 - RNA, 1701 nt, Artificial Sequence; identical to SEQ ID NO: 161641
  derived and/or modified CDS sequence (opt4) from hemagglutinin__InfluenzaA__AHL89066

SEQ ID NO: 171248 - RNA, 1701 nt, Artificial Sequence
  derived and/or modified CDS sequence (opt4) from hemagglutinin__InfluenzaA__AHL89078
augaagaccaucaucgcccugagcuacauccugugccugguguucgcccagaagcugcccggcgacgacaacagcaccgccacccugugccugggccaccacgccgugcccaacggcaccguggugaagaccaucaccaacgaccagaucgaggugaccaacgccaccgagcuggugcagagcagcagcaccggcggcaucugcgacagcccccaccagauccuggacggcgagaacugcacccugaucgacgcccugcugggcgacccccagugcgacggcuuccagaacaagaagugggaccuguucguggagagaagcaaggccuacagcaacugcuaccccuacgacgugcccgacuacgccagccugagaagccugguggccagcagcggcacccuggaguucaacaacgagagcuucaacuggaccggcgugacccagaacggcaccagcagcgccugcaagagaagaagcaacaacagcuucuucagcagacugaacuggcugacccaccugaaguucaaguaccccgcccugaacgugaccaugcccaacaacgagaaguucgacaagcuguacaucuggggcgugcaccaccccggcaccgacaacgaccagaucuuccuguacgcccaggccagcggcagaaucaccgugagcaccaagagaagccagcagaccgugauccccaacaucggcagcagacccagagugagaaacauccccagcagaaucagcaucuacuggaccaucgugaagcccggcgacauccugcugaucaacagcaccggcaaccugaucgcccccagaggcuacuucaagaucagaagcggcaagagcagcaucaugagaagcgacgcccccaucggcaagugcaacagcgagugcaucacccccaacggcagcauccccaacgacaagcccuuccagaacgugaacagaaucaccuacggcgccugccccagauacgugaagcagaacacccugaagcuggccaccggcaugagaaacgugcccgagaagcagaccagaggcaucuucggcgccaucgccggcuucaucgagaacggcugggagggcaugguggacggcugguacggcuucagacaccagaacagcgagggcaucggccaggccgccgaccugaagagcacccaggccgccaucaaccagaucaacggcaagcugaacagacugaucggcaagaccaacgagaaguuccaccagaucgagaaggaguucagcgagguggagggcagaauccaggaccuggagaaguacguggaggacaccaagaucgaccuguggagcuacaacgccgagcugcugguggcccuggagaaccagcacaccaucgaccugaccgacagcgagaugaacaagcuguucgagagaaccaagaagcagcugagagagaacgccgaggacaugggcaacggcugcuucaagaucuaccacaagugcgacaacgccugcaucggcagcaucagaaacggcaccuacgaccacgacguguacagagacgaggcccugaacaacagauuccagaucaagggcguggagcugaagagcggcuacaaggacuggauccuguggaucagcuucgccaucagcugcuuccugcugugcguggcccugcugggcuucaucaugugggccugccagaagggcaacaucagaugcaacaucugcaucuga

SEQ ID NO: 171249 - RNA, 1701 nt, Artificial Sequence
  derived and/or modified CDS sequence (opt4) from hemagglutinin__InfluenzaA__AHL89090
augaagaccaucaucgcccugagcuacauccugugccugguguucgcccagaagcugcccggcaacgacaacagcaccgccacccugugccugggccaccacgccgugcccaacggcaccaucgugaagaccaucaccaacgaccagaucgaggugaccaacgccaccgagcuggugcagagcagcagcaccggcggcaucugcgacagccccuaccagauccuggacggcgagaacugcacccugaucgacgcccugcugggcgacccccagugcgacggcuuccagaacaagaagugggaccuguucguggagagaagcaaggccuacagcaacugcuaccccuacgacgugcccgacuacgccagccugagaagccugguggccagcagcggcacccuggaguucaacaacgagagcuucaacuggaccggcgugacccagaacggcaccagcagcgccugcaagagaagaagcaacaacagcuucuucagcagacugaacuggcugacccaccugaaguucaaguaccccgcccugaacgugaccaugcccaacaacgagaaguucgacaagcuguacaucuggggcgugcaccaccccggcaccgacaacgaccagaucuuccuguacgcccaggccagcggcagaaucaccgugagcaccaagagaagccagcagaccgugauccccaacaucggcagcagacccagagugagaaacauccccagcagaaucagcaucuacuggaccaucgugaagcccggcgacauccugcugaucaacagcaccggcaaccugaucgcccccagaggcuacuucaagaucagaagcggcaagagcagcaucaugagaagcgacgcccccaucggcaagugcaacagcgagugcaucacccccaacggcagcauccccaacgacaagcccuuccagaacgugaacagaaucaccuacggcgccugccccagauacgugaagcagaacacccugaagcuggccaccggcaugagaaacgugcccgagaagcagaccagaggcaucuucggcgccaucgccggcuucaucgagaacggcugggagggcaugguggacggcugguacggcuucagacaccagaacagcgagggcaucggccaggccgccgaccugaagagcacccaggccgccaucaaccagaucaacggcaagcugaacagacugaucggcaagaccaacgagaaguuccaccagaucgagaaggaguucagcgagguggagggcagaauccaggaccuggagaaguacguggaggacaccaagaucgaccuguggagcuacaacgccgagcugcugguggcccuggagaaccagcacaccaucgaccugaccgacagcgagaugaacaagcuguucgagagaaccaagaagcagcugagagagaacgccgaggacaugggcaacggcugcuucaagaucuaccacaagugcgacaacgccugcaucggcagcaucagaaacggcaccuacgaccacgacguguacagagacgaggcccugaacaacagauuccagaucaagggcguggagcugaagagcggcuacaaggacuggauccuguggaucagcuucgccaucagcugcuuccugcugugcguggcccugcugggcuucaucaugugggccugccagaagggcaacaucagaugcaacaucugcaucuga

SEQ ID NO: 171250 - RNA, 1701 nt, Artificial Sequence; identical to SEQ ID NO: 160690
  derived and/or modified CDS sequence (opt4) from hemagglutinin__InfluenzaA__AHL89102

SEQ ID NO: 171251 - RNA, 1701 nt, Artificial Sequence; identical to SEQ ID NO: 160690
  derived and/or modified CDS sequence (opt4) from hemagglutinin__InfluenzaA__AHL89114

SEQ ID NO: 171252 - RNA, 1701 nt, Artificial Sequence
  derived and/or modified CDS sequence (opt4) from hemagglutinin__InfluenzaA__AHL89126
augaagaccaucaucgcccugagcuacauccugugccugguguucgcccagaagcugcccggcaacgacaacagcaccgccacccugugccugggccaccacgccgugcccaacggcaccaucgugaagaccaucaccaacgaccagaucgaggugaccaacgccaccgagcuggugcagagcagcagcaccggcggcaucugcgacagcccccaccagauccuggacggcgagaacugcacccugaucgacgcccugcugggcgacccccagugcgacggcuuccagaacaagaagugggaccuguucguggagagaagcaaggccuacagcaacugcuaccccuacgacgugcccgacuacgccagccugagaagccugguggccagcagcggcacccuggaguucaacaacgagaacuucaacuggaccggcgugacccagaacggcaccagcagcgccugcaagagaagaagcaacaacagcuucuucagcagacugaacuggcugacccaccugaaguucaaguaccccgcccugaacgugaccaugcccaacaacgagaaguucgacaagcuguacaucuggggcgugcaccaccccggcaccgacaacgaccagaucuuccuguacgcccaggccagcggcagaaucaccgugagcaccaagagaagccagcagaccgugauccccaacaucggcagcagacccagagugagaaacauccccagcagaaucagcaucuacuggaccaucgugaagcccggcgacauccugcugaucaacagcaccggcaaccugaucgcccccagaggcuacuucaagaucagaagcggcaagagcagcaucaugagaagcgacgcccccaucggcaagugcaacagcgagugcaucacccccaacggcagcauccccaacgacaagcccuuccagaacgugaacagaaucaccuacggcgccugccccagauacgugaagcagaacacccugaagcuggccaccggcaugagaaacgugcccgagaagcagaccagaggcaucuucggcgccaucgccggcuucaucgagaacggcugggagggcaugguggacggcugguacggcuucagacaccagaacagcgagggcaucggccaggccgccgaccugaagagcacccaggccgccaucaaccagaucaacggcaagcugaacagacugaucggcaagaccaacgagaaguuccaccagaucgagaaggaguucagcgagguggagggcagaauccaggaccuggagaaguacguggaggacaccaagaucgaccuguggagcuacaacgccgagcugcugguggcccuggagaaccagcacaccaucgaccugaccgacagcgagaugaacaagcuguucgagagaaccaagaagcagcugagagagaacgccgaggacaugggcaacggcugcuucaagaucuaccacaagugcgacaacgccugcaucggcagcaucagaaacggcaccuacgaccacgacguguacagagacgaggcccugaacaacagauuccagaucaagggcguggagcugaagagcggcuacaaggacuggauccuguggaucagcuucgccaucagcugcuuccugcugugcguggcccugcugggcuucaucaugugggccugccagaagggcaacaucagaugcaacaucugcaucuga

SEQ ID NO: 171253 - RNA, 1701 nt, Artificial Sequence
  derived and/or modified CDS sequence (opt4) from hemagglutinin__InfluenzaA__AHL89138
augaagaccaucaucgcccugagcuacauccugugccugguguucgcccagaagcugcccggcaacgacaacagcaccgccacccugugccugggccaccacgccgugcccaacggcaccaucgugaagaccaucaccaacgaccagaucgaggugaccaacgccaccgagcuggugcagagcagcagcaccggcgagaucugcgacagcccccaccagauccuggacggcgagaacugcacccugaucgacgcccugcugggcgacccccagugcgacggcuuccagaacaagaagugggaccuguucguggagagaagcaaggccuacagcaacugcuaccccuacgacgugcccgacuacgccagccugagaagccugguggccagcagcggcacccuggaguucaacaacgagagcuucaacuggaccggcgugacccagaacggcaccagcagcgccugcaagagaagaagcaacaacagcuucuucagcagacugaacuggcugacccaccugaaguucaaguaccccgcccugaacgugaccaugcccaacaacgagaaguucgacaagcuguacaucuggggcgugcaccaccccggcaccgacaacgaccagaucuuccuguacgcccagagcagcggcagaaucaccgugagcaccaagagaagccagcagaccgugauccccaacaucggcagcagacccagagugagaaacauccccagcagaaucagcaucuacuggaccaucgugaagcccggcgacauccugcugaucaacagcaccggcaaccugaucgcccccagaggcuacuucaagaucagaagcggcaagagcagcaucaugagaagcgacgcccccaucggcaagugcaacagcgagugcaucacccccaacggcagcauccccaacgacaagcccuuccagaacgugaacagaaucaccuacggcgccugccccagauacgugaagcagaacacccugaagcuggccaccggcaugagaaacgugcccgagaagcagaccagaggcaucuucggcgccaucgccggcuucaucgagaacggcugggagggcaugguggacggcugguacggcuucagacaccagaacagcgagggcaucggccaggccgccgaccugaagagcacccaggccgccaucaaccagaucaacggcaagcugaacagacugaucggcaagaccaacgagaaguuccaccagaucgagaaggaguucagcgagguggagggcagaauccaggaccuggagaaguacguggaggacaccaagaucgaccuguggagcuacaacgccgagcugcugguggcccuggagaaccagcacaccaucgaccugaccgacagcgagaugaacaagcuguucgagagaaccaagaagcagcugagagagaacgccgaggacaugggcaacggcugcuucaagaucuaccacaagugcgacaacgccugcaucggcagcaucagaaacggcaccuacgaccacgacguguacagagacgaggcccugaacaacagauuccagaucaagggcguggagcugaagagcggcuacaaggacuggauccuguggaucagcuucgccaucagcugcuuccugcugugcguggcccugcugggcuucaucaugugggccugccagaagggcaacaucagaugcaacaucugcaucuga

SEQ ID NO: 171254 - RNA, 1701 nt, Artificial Sequence
  derived and/or modified CDS sequence (opt4) from hemagglutinin__InfluenzaA__AHL89150
augaagaccaucaucgcccugagcuacauccugugccugguguucgcccagaagcugcccggcaacgacaacagcaccgccacccugugccugggccaccacgccgugcccaacggcaccaucgugaagaccaucaccaacgaccagaucgaggugaccaacgccaccgagcuggugcagagcagcagcaccggcggcaucugcgacagcccccaccagauccuggacggcgagaacugcacccugaucgacgcccugcugggcgacccccagugcgacggcuuccagaacaagaagugggaccuguucguggagagaagcaaggccuacagcaacugcuaccccuacgacgugcccgacuacgccagccugagaagccugguggccagcagcggcacccuggaguucaacaacgagagcuucaacuggaccggcgugacccagaacggcaccagcagcgccugcaagagaagaagcaacaacagcuucuucagcagacugaacuggcugacccaccugaaguucaaguaccccgcccugaacgugaccaugcccaacaacgagaaguucgacaagcuguacaucuggggcgugcaccaccccggcaccgacaacgaccagaucuuccuguacgcccaggccagcggcagaaucaccgugagcaccaagagaagccagcagaccgugauccccaacaucggcagcagacccagagugagaaacauccccagcagaaucagcaucuacuggaccaucgugaagcccggcgacauccugcugaucaacagcaccggcaaccugaucgcccccagaggcuacuucaagaucagaagcggcaagagcagcaucaugagaagcgacgcccccaucggcaagugcaacagcgagugcaucacccccaacggcagcauccccaacgacaagcccuuccagaacgugaacagaaucaccuacggcgccugccccagauacgugaagcagaacacccugaagcuggccaccggcaugagaaacgugcccgagaagcagaccagaggcaucuucggcgccaucgccggcuucaucgagaacggcugggagggcaugguggacggcugguacggcuucagacaccagaacagcgagggcaucggccaggccgccgaccugaagagcacccaggccgccaucaaccagaucaacggcaagcugaacagacugaucggcaagaccaacgagaaguuccaccagaucgagaaggaguucagcgagguggagggcagaauccaggaccuggagaaguacguggaggacaccaagaucgaccuguggagcuacaacgccgagcugcugguggcccuggagaaccagcacaccaucgaccugaccgacagcgagaugaacaagcuguucgagagaaccaagaagcagcugagagagaacgccgaggacaugggcaacggcugcuucaagaucuaccacaagugcgacaacgccugcaucggcagcaucagaaacggcaccuacgaccacgacguguacagagacgaggcccugaacaacagauuccagaucaagggcguggagcugaagagcggcuacaaggacuggauccuguggaucagcuucgccaucagcugcuuccugcugugcguggcccugcugguguucaucaugugggccugccagaagggcaacaucagaugcaacaucugcaucuga

SEQ ID NO: 171255 - RNA, 1701 nt, Artificial Sequence
  derived and/or modified CDS sequence (opt4) from hemagglutinin__InfluenzaA__AHL89162
augaagaccaucaucgcccugagcuacauccugugccugguguucgcccagaagcugcccggcaacgacaacagcaccgccacccugugccugggccaccacgccgugcccaacggcaccaucgugaagaccaucaccaacgaccagaucgaggugaccaacgccaccgagcuggugcagagcagcagcaccggcggcaucugcgacagcccccaccagauccuggacggcgagaacugcacccugaucgacgcccugcugggcgacccccagugcgacggcuuccagaacaagaagugggaccuguucguggagagaagcaaggccuacagcaacugcuaccccuacgacgugcccgacuacgccagccugagaagccugguggccagcagcggcacccuggaguucaacaacgagagcuucaacuggaccggcgugacccagaacggcaccagcagcgccugcaagagaagaagcaacaacagcuucuucagcagacugaacuggcugacccaccugaaguucaaguaccccgcccugaacgugaccaugcccaacaacgagaaguucgacaagcuguacaucuggggcgugcaccaccccggcaccgacaacgaccagaucuuccuguacgcccaggccagcggcagaaucaccgugagcaccaagagaagccagcagaccgugauccccaacaucggcagcagacccagagugagaaacauccccagcagaaucagcaucuacuggaccaucgugaagcccggcgacauccugcugaucaacagcaccggcaaccugaucgcccccagaggcuacuucaagaucagaagcggcaagagcagcaucaugagaagcgacgcccccaucggcaagugcaacagcgagugcaucacccccaacggcagcauccccaacgacaagcccuuccagaacgugaacagaaucaccuacggcgccugccccagauacgugaagcagaacacccugaagcuggccaccggcaugagaaacgugcccgagaagcagaccagaggcaucuucggcgccaucgccggcuucaucgagaacggcugggagggcaugguggacggcugguacggcuucagacaccagaacagcgagggcaccggccaggccgccgaccugaagagcacccaggccgccaccaaccagaucaacggcaagcugaacagacugaucggcaagaccaacgagaaguuccaccagaucgagaaggaguucagcgagguggagggcagaauccaggaccuggagaaguacguggaggacaccaagaucgaccuguggagcuacaacgccgagcugcugguggcccuggagaaccagcacaccaucgaccugaccgacagcgagaugaacaagcuguucgagagaaccaagaagcagcugagagagaacgccgaggacaugggcaacggcugcuucaagaucuaccacaagugcgacaacgccugcaucggcagcaucagaaacggcaccuacgaccacgacguguacagagacgaggcccugaacaacagauuccagaucaagggcguggagcugaagagcggcuacaaggacuggauccuguggaucagcuucgccaucagcugcuuccugcugugcguggcccugcugggcuucaucaugugggccugccagaagggcaacaucagaugcaacaucugcaucuga

SEQ ID NO: 171256 - RNA, 1701 nt, Artificial Sequence
  derived and/or modified CDS sequence (opt4) from hemagglutinin__InfluenzaA__AHL89174
augaagaccaucaucgcccugagcuacacccugugccugguguucgcccagaagcugcccggcaacgacaacagcaccgccacccugugccugggccaccacgccgugcccaacggcaccaucgugaagaccaucaccaacgaccagaucgaggugaccaacgccaccgagcuggugcagagcagcagcaccggcggcaucugcgacagcccccaccagauccuggacggcgagaacugcacccugaucgacgcccugcugggcgacccccagugcgacggcuuccagaacaagaagugggaccuguucguggagagaagcaaggccuacagcaacugcuaccccuacgacgugcccgacuacgccagccugagaagccugguggccagcagcggcacccuggaguucaacaacgagagcuucaacuggaccggcgugacccagaacggcaccagcagcgccugcaagagaagaagcaacaacagcuucuucagcagacugaacuggcugacccaccugaaguucaaguaccccgcccugaacgugaccaugcccaacaacgagaaguucgacaagcuguacaucuggggcgugcaccaccccggcaccgacaacgaccagaucuuccuguacgcccaggccagcggcagaaucaccgugagcaccaagagaagccagcagaccgugauccccaacaucggcagcagacccagagugagaaacauccccagcagaaucagcaucuacuggaccaucgugaagcccggcgacauccugcugaucaacagcaccggcaaccugaucgcccccagaggcuacuucaagaucagaagcggcaagagcagcaucaugagaagcgacgcccccaucggcaagugcaacagcgagugcaucacccccaacggcagcauccccaacgacaagcccuuccagaacgugaacagaaucaccuacggcgccugccccagauacgugaagcagaacacccugaagcuggccaccggcaugagaaacgugcccgagaagcagaccagaggcaucuucggcgccaucgccggcuucaucgagaacggcugggagggcaugguggacggcugguacggcuucagacaccagaacagcgagggcaucggccaggccgccgaccugaagagcacccaggccgccaucaaccagaucaacggcaagcugaacagacugaucggcaagaccaacgagaaguuccaccagaucgagaaggaguucagcgagguggagggcagaauccaggaccuggagaaguacguggaggacaccaagaucgaccuguggagcuacaacgccgagcugcugguggcccuggagaaccagcacaccaucgaccugaccgacagcgagaugaacaagcuguucgagagaaccaagaagcagcugagagagaacgccgaggacaugggcaacggcugcuucaagaucuaccacaagugcgacaacgccugcaucggcagcaucagaaacggcaccuacgaccacgacguguacagagacgaggcccugaacaacagauuccagaucaagggcguggagcugaagagcggcuacaaggacuggauccuguggaucagcuucgccaucagcugcuuccugcugugcguggcccugcugggcuucaucaugugggccugccagaagggcaacaucagaugcaacaucugcaucuga

SEQ ID NO: 171257 - RNA, 1701 nt, Artificial Sequence
  derived and/or modified CDS sequence (opt4) from hemagglutinin__InfluenzaA__AHL89210
augaagaccaucaucgcccugagcuacauccugugccugguguucgcccagaagcugcccggcaacgacaacagcaccgccacccugugccugggccaccacgccgugcccaacggcaccaucgugaagaccaucaccaacgaccagaucgaggugaccaacgccaccgagcuggugcagagcagcagcaccggcgagaucugcgacagcccccaccagauccuggacggcgagaacugcacccugaucgacgcccugcugggcgacccccagugcgacggcuuccagaacaagaagugggaccuguucguggagagaagcaaggccuacagcaacugcuaccccuacgacgugcccgacuacgccagccugagaagccugguggccagcagcggcacccuggaguucaacaacgagagcuucaacuggaccggcgugacccagaacggcaccagcagcgccugcaagagaagaagcaacaacagcuucuucagcagacugaacuggcugacccaccugaaguucaaguaccccgcccugaacgugaccaugcccaacaacgagaaguucgacaagcuguacaucuggggcgugcaccaccccggcaccgacaacgaccagaucuuccuguacgcccaggccagcggcagaaucaccgugagcaccaagagaagccagcagaccgugauccccaacaucggcagcagacccagagugagaaacauccccagcagaaucagcaucuacuggaccaucgugaagcccggcgacauccugcugaucaacagcaccggcaaccugaucgcccccagaggcuacuucaagaucagaagcggcaagagcagcaucaugagaagcgacgcccccaucggcaagugcaacagcgagugcaucacccccaacggcagcauccccaacgacaagcccuuccagaacgugaacagaaucaccuacggcgccugccccagauacgugaagcagaacacccugaagcuggccaccggcaugagaaacgugcccgagaagcagaccagaggcaucuucggcgccaucgccggcuucaucgagaacggcugggagggcaugguggacggcugguacggcuucagacaccagaacagcgagggcaucggccaggccgccgaccugaagagcacccaggccgccaucaaccagaucaacggcaagcugaacagacugaucggcaagaccaacgagaaguuccaccagaucgagaaggaguucagcgagguggagggcagaauccaggaccuggagaaguacguggaggacaccaagaucgaccuguggagcuacaacgccgagcugcugguggcccuggagaaccagcacaccaucgaccugaccgacagcgagaugaacaagcuguucgagagaaccaagaagcagcugagagagaacgccgaggacaugggcaacggcugcuucaagaucuaccacaagugcgacaacgccugcaucggcagcaucagaaacggcaccuacgaccacgacguguacagagacgaggcccugaacaacagauuccagaucaagggcguggagcugaagagcggcuacaaggacuggauccuguggaucagcuucgccaucagcugcuuccugcugugcguggcccugcugggcuucaucaugugggccugccagaagggcaacaucagaugcaacaucugcaucuga

SEQ ID NO: 171258 - RNA, 1701 nt, Artificial Sequence; identical to SEQ ID NO: 171257
  derived and/or modified CDS sequence (opt4) from hemagglutinin__InfluenzaA__AHL89222

SEQ ID NO: 171259 - RNA, 1701 nt, Artificial Sequence
  derived and/or modified CDS sequence (opt4) from hemagglutinin__InfluenzaA__AHL89234
augaagaccaucaucgcccugagcuacauccugugccugguguucgcccagaagcugcccggcaacgacaacagcaccgccacccugugccugggccaccacgccgugcccaacggcaccaucgugaagaccaucaccaacgaccagaucgaggugaccaacgccaccgagcuggugcagagcagcagcaccggcgagaucugcgacagcccccaccagauccuggacggcgagaacugcacccugaucgacgcccugcugggcgacccccagugcgacggcuuccagaacaagaagugggaccuguucguggagagaagcaaggccuacagcaacugcuaccccuacgacgugcccgacuacgccagccugagaagccugguggccagcagcggcacccuggaguucaacaacgagagcuucaacuggaccggcgugacccagaacggcaccagcagcgccugcaagagaagaagcaacaacagcuucuucagcagacugaacuggcugacccaccugaaguucaaguaccccgcccugaacgugaccaugcccaacaacgagaaguucgacaagcuguacaucuggggcgugcaccaccccggcaccgacaacgaccagaucuuccuguacgcccaggccagcggcagaaucaccgugagcaccaagagaagccagcagaccgugauccccaacaucggcagcagacccagagugagaaacauccccagcagaaucagcaucuacuggaccaucgugaagcccggcgacauccugcugaucaacagcaccggcaaccugaucgcccccagaggcuacuucaagaucagaagcggcaagagcagcaucaugagaagcgacgcccccaucggcaagugcaacagcgagugcaucacccccaacggcagcauccccaacgacaagcccuuccagaacgugaacagaaucaccuacggcgccugccccagauacgugaagcagaacacccugaagcuggccaccggcaugagaaacgugcccgagaagcagaccagaggcaucuucggcgccaucgccggcuucaucgagaacggcugggagggcaugguggacggcugguacggcuucagacaccagaacagcgagggcaugggccaggccgccgaccugaagagcacccaggccgccaucaaccagaucaacggcaagcugaacagacugaucggcaagaccaacgagaaguuccaccagaucgagaaggaguucagcgagguggagggcagaauccaggaccuggagaaguacguggaggacaccaagaucgaccuguggagcuacaacgccgagcugcugguggcccuggagaaccagcacaccaucgaccugaccgacagcgagaugaacaagcuguucgagagaaccaagaagcagcugagagagaacgccgaggacaugggcaacggcugcuucaagaucuaccacaagugcgacaacgccugcaucggcagcaucagaaacggcaccuacgaccacgacguguacagagacgaggcccugaacaacagauuccagaucaagggcguggagcugaagagcggcuacaaggacuggauccuguggaucagcuucgccaucagcugcuuccugcugugcguggcccugcugggcuucaucaugugggccugccagaagggcaacaucagaugcaacaucugcaucuga

SEQ ID NO: 171260 - RNA, 1701 nt, Artificial Sequence
  derived and/or modified CDS sequence (opt4) from hemagglutinin__InfluenzaA__AHL89246
augaagaccaucaucgcccugagcuacauccugugccugguguucgcccagaagcugcccggcaacgacaacagcaccgccacccugugccugggccaccacgccgugcccaacggcaccaucgugaagaccaucaccaacgaccagaucgaggugaccaacgccaccgagcuggugcagagcagcagcaccggcgagaucugcgacagcccccaccagauccuggacggcgagaacugcacccugaucgacgcccugcugggcgacccccagugcgacggcuuccagaacaagaagugggaccuguucguggagagaagcaaggccuacagcaacugcuaccccuacgacgugcccgacuacgccagccugagaagccugguggccagcagcggcacccuggaguucaacaacgagagcuucaacuggaccggcgugacccagaacggcaccagcagcgccugcaagagaagaagcaacaacagcuucuucagcagacugaacuggcugacccaccugaaguucaaguaccccgcccugaacgugaccaugcccaacaacgagaaguucgacaagcuguacaucuggggcgugcaccaccccggcaccgacaacgaccagaucuuccuguacgcccaggccagcggcagaaucaccgugagcaccaagagaagccagcagaccgugauccccaacaucggcagcagacccagagugagaaacauccccagcagaaucagcaucuacuggaccaucgugaagcccggcgacauccugcugaucaacagcaccggcaaccugaucgcccccagaggcuacuucaagaucagaagcggcaagagcagcaucaugagaagcgacgcccccaucggcaagugcaacagcgagugcaucacccccaacggcagcauccccaacgacaagcccuuccagaacgugaacagaaucaccuacggcgccugccccagauacgugaagcagaacacccugaagcuggccaccggcaugagaaacgugcccgagaagcagaccagaggcaucuucggcgccaucgccggcuucaucgagaacggcugggagggcaugguggacggcugguacggcuucagacaccagaacagcgagggcaucggccaggccgccgaccugaagagcacccaggccgccaucaaccagaucaacggcaagcugaacagacugaucggcaagaccaacgagaaguuccaccagaucgagaaggaguucagcgagguggagggcagaauccaggaccuggagaaguacguggaggacaccaagaucgaccuguggagcuacaacgccgagcugcugguggcccuggagaaccagcacaccaucgaccugaccgacagcgagaugaacaagcuguucgagagaaccaagaagcagcugagagagaacgccgaggacaugggcaacggcugcuucaagaucuaccacaagugcggcaacgccugcaucggcagcaucagaaacggcaccuacgaccacgacguguacagagacgaggcccugaacaacagauuccagaucaagggcguggagcugaagagcggcuacaaggacuggauccuguggaucagcuucgccaucagcugcuuccugcugugcguggcccugcugggcuucaucaugugggccugccagaagggcaacaucagaugcaacaucugcaucuga

SEQ ID NO: 171261 - RNA, 1701 nt, Artificial Sequence
  derived and/or modified CDS sequence (opt4) from hemagglutinin__InfluenzaA__AHL89258
augaagaccaucaucgcccugagcuacauccugugccugguguucgcccagaagcugcccggcaacgacaacagcaccgccacccugugccugggccaccacgccgugcccaacggcaccaucgugaagaccaucaccaacgaccagaucgaggugaccaacgccaccgagcuggugcagagcagcagcaccggcgagaucugcgacagcccccaccagauccuggacggcgagaacugcacccugaucgacgcccugcugggcgacccccagugcgacggcuuccagaacaagaagugggaccuguucguggagagaagcaaggccuacagcaacugcuaccccuacgacgugcccgacuacgccagccugagaagccugguggccagcagcggcacccuggaguucaacaacgagagcuucaacuggaccggcgugacccagaacggcaccagcagcgccugcaagagaagaagcaacaacagcuucuucagcagacugaacuggcugacccaccugaaguucaaguaccaggcccugaacgugaccaugcccaacaacgagaaguucgacaagcuguacaucuggggcgugcaccaccccggcaccgacaacgaccagaucuuccuguacgcccaggccagcggcagaaucaccgugagcaccaagagaagccagcagaccgugauccccaacaucggcagcagacccagagugagaaacauccccagcagaaucagcaucuacuggaccaucgugaagcccggcgacauccugcugaucaacagcaccggcaaccugaucgcccccagaggcuacuucaagaucagaagcggcaagagcagcaucaugagaagcgacgcccccaucggcaagugcaacagcgagugcaucacccccaacggcagcauccccaacgacaagcccuuccagaacgugaacagaaucaccuacggcgccugccccagauacgugaagcagaacacccugaagcuggccaccggcaugagaaacgugcccgagaagcagaccagaggcaucuucggcgccaucgccggcuucaucgagaacggcugggagggcaugguggacggcugguacggcuucagacaccagaacagcgagggcaucggccaggccgccgaccugaagagcacccaggccgccaucaaccagaucaacggcaagcugaacagacugaucggcaagaccaacgagaaguuccaccagaucgagaaggaguucagcgagguggagggcagaauccaggaccuggagaaguacguggaggacaccaagaucgaccuguggagcuacaacgccgagcugcugguggcccuggagaaccagcacaccaucgaccugaccgacagcgagaugaacaagcuguucgagagaaccaagaagcagcugagagagaacgccgaggacaugggcaacggcugcuucaagaucuaccacaagugcgacaacgccugcaucggcagcaucagaaacggcaccuacgaccacgacguguacagagacgaggcccugaacaacagauuccagaucaagggcguggagcugaagagcggcuacaaggacuggauccuguggaucagcuucgccaucagcugcuuccugcugugcguggugcugcugggcuucaucaugugggccugccagaagggcaacaucagaugcaacaucugcaucuga

SEQ ID NO: 171262 - RNA, 1701 nt, Artificial Sequence; identical to SEQ ID NO: 171257
  derived and/or modified CDS sequence (opt4) from hemagglutinin__InfluenzaA__AHL89270

SEQ ID NO: 171263 - RNA, 1701 nt, Artificial Sequence; identical to SEQ ID NO: 171257
  derived and/or modified CDS sequence (opt4) from hemagglutinin__InfluenzaA__AHL89282

SEQ ID NO: 171264 - RNA, 1701 nt, Artificial Sequence; identical to SEQ ID NO: 171257
  derived and/or modified CDS sequence (opt4) from hemagglutinin__InfluenzaA__AHL89294

SEQ ID NO: 171265 - RNA, 1701 nt, Artificial Sequence; identical to SEQ ID NO: 171257
  derived and/or modified CDS sequence (opt4) from hemagglutinin__InfluenzaA__AHL89306

SEQ ID NO: 171266 - RNA, 1701 nt, Artificial Sequence; identical to SEQ ID NO: 161641
  derived and/or modified CDS sequence (opt4) from hemagglutinin__InfluenzaA__AHL89318

SEQ ID NO: 171267 - RNA, 1701 nt, Artificial Sequence
  derived and/or modified CDS sequence (opt4) from hemagglutinin__InfluenzaA__AHL89330
augaagaccaucaucgcccugagcuacauccugugccugguguucgcccagaagcugcccggcaacgacaacagcaccgccacccugugccugggccaccacgccgugcccaacggcaccaucgugaagaccaucaccaacgaccagaucgaggugaccaacgccaccgagcuggugcagagcagcagcaccggcgagaucugcgacagcccccaccagauccuggacggcaagaacugcacccugaucgacgcccugcugggcgacccccagugcgacggcuuccagaacaagaagugggaccuguucguggagagaagcaaggccuacagcaacugcuaccccuacgacgugcccgacuacgccagccugagaagccugguggccagcagcggcacccuggaguucaacaacgagagcuucaacuggaccggcgugacccagaacggcaccagcagcgccugcaagagaagaagcaacaacagcuucuucagcagacugaacuggcugacccaccugaaguucaaguaccccgcccugaacgugaccaugcccaacaacgagaaguucgacaagcuguacaucuggggcgugcaccaccccggcaccgacaacgaccagaucuuccuguacgcccaggccagcggcagaaucaccgugagcaccaagagaagccagcagaccgugauccccaacaucggcagcagacccagagugagaaacauccccagcagaaucagcaucuacuggaccaucgugaagcccggcgacauccugcugaucaacagcaccggcaaccugaucgcccccagaggcuacuucaagaucagaagcggcaagagcagcaucaugagaagcgacgcccccaucggcaagugcaacagcgagugcaucacccccaacggcagcauccccaacgacaagcccuuccagaacgugaacagaaucaccuacggcgccugccccagauacgugaagcagaacacccugaagcuggccaccggcaugagaaacgugcccgagaagcagaccagaggcaucuucggcgccaucgccggcuucaucgagaacggcugggagggcaugguggacggcugguacggcuucagacaccagaacagcgagggcaucggccaggccgccgaccugaagagcacccaggccgccaucaaccagaucaacggcaagcugaacagacugaucggcaagaccaacgagaaguuccaccagaucgagaaggaguucagcgagguggagggcagaauccaggaccuggagaaguacguggaggacaccaagaucgaccuguggagcuacaacgccgagcugcugguggcccuggagaaccagcacaccaucgaccugaccgacagcgagaugaacaagcuguucgagagaaccaagaagcagcugagagagaacgccgaggacaugggcaacggcugcuucaagaucuaccacaagugcgacaacgccugcaucggcagcaucagaaacggcaccuacgaccacgacguguacagagacgaggcccugaacaacagauuccagaucaagggcguggagcugaagagcggcuacaaggacuggauccuguggaucagcuucgccaucagcugcuuccugcugugcguggcccugcugggcuucaucaugugggccugccagaagggcaacaucagaugcaacaucugcaucuga

SEQ ID NO: 171268 - RNA, 1701 nt, Artificial Sequence; identical to SEQ ID NO: 160690
  derived and/or modified CDS sequence (opt4) from hemagglutinin__InfluenzaA__AHL89342

SEQ ID NO: 171269 - RNA, 1701 nt, Artificial Sequence; identical to SEQ ID NO: 161621
  derived and/or modified CDS sequence (opt4) from hemagglutinin__InfluenzaA__AHL89354

SEQ ID NO: 171270 - RNA, 1701 nt, Artificial Sequence
  derived and/or modified CDS sequence (opt4) from hemagglutinin__InfluenzaA__AHL89366
augaagaccaucaucgcccugagcuacauccugugccugguguucgcccagaagcugcccggcaacgacaacagcaccgccacccugugccugggccaccacgccgugcccaacggcaccaucgugaagaccaucaccaacgaccagaucgaggugaccaacgccaccgagcuggugcagagcagcagcaccggcgagaucugcgacagcccccaccagauccuggacggcgagaacugcacccugaucgacgcccugcugggcgacccccagugcgacggcuuccagaacaagaagugggaccuguucguggagagaagcaaggccuacagcaacugcuaccccuacgacgugcccgacuacgccagccugagaagccugguggccagcagcggcacccuggaguucaacaacgagagcuucaacuggaccggcgugacccagaacggcaccagcagcgccugcaagagaagaagcaacaacagcuucuucagcagacugaacuggcugacccaccugaaguucaaguaccccgcccugaacgugaccaugcccaacaacgagaaguucgacaagcuguacaucuggggcgugcaccaccccggcaccgacaacgaccagaucuuccuguacgcccaggccagcggcagaaucaccgugagcaccaagagaagccagcagaccgugauccccaacaucggcagcagacccagagugagaaacauccccagcagaaucagcaucuacuggaccaucgugaagcccggcgacauccugcugaucaacagcaccggcaaccugaucgcccccagaggcuacuucaagaucagaagcggcaagagcagcaucaugaagagcgacgcccccaucggcaagugcaacagcgagugcaucacccccaacggcagcauccccaacgacaagcccuuccagaacgugaacagaaucaccuacggcgccugccccagauacgugaagcagaacacccugaagcuggccaccggcaugagaaacgugcccgagaagcagaccagaggcaucuucggcgccaucgccggcuucaucgagaacggcugggagggcaugguggacggcugguacggcuucagacaccagaacagcgagggcaucggccaggccgccgaccugaagagcacccaggccgccaucaaccagaucaacggcaagcugaacagacugaucggcaagaccaacgagaaguuccaccagaucgagaaggaguucagcgagguggagggcagaauccaggaccuggagaaguacguggaggacaccaagaucgaccuguggagcuacaacgccgagcugcugguggcccuggagaaccagcacaccaucgaccugaccgacagcgagaugaacaagcuguucgagagaaccaagaagcagcugagagagaacgccgaggacaugggcaacggcugcuucaagaucuaccacaagugcgacaacgccugcaucggcagcaucagaaacggcaccuacgaccacgacguguacagagacgaggcccugaacaacagauuccagaucaagggcaucgagcugaagagcggcuacaaggacuggauccuguggaucagcuucgccaucagcugcuuccugcugugcguggugcugcugggcuucaucaugugggccugccagaagggcaacaucagaugcaacaucugcaucuga

SEQ ID NO: 171271 - RNA, 1701 nt, Artificial Sequence; identical to SEQ ID NO: 171257
  derived and/or modified CDS sequence (opt4) from hemagglutinin__InfluenzaA__AHL89378

SEQ ID NO: 171272 - RNA, 1701 nt, Artificial Sequence; identical to SEQ ID NO: 161888
  derived and/or modified CDS sequence (opt4) from hemagglutinin__InfluenzaA__AHL89390

SEQ ID NO: 171273 - RNA, 1701 nt, Artificial Sequence; identical to SEQ ID NO: 171257
  derived and/or modified CDS sequence (opt4) from hemagglutinin__InfluenzaA__AHL89402

SEQ ID NO: 171274 - RNA, 1701 nt, Artificial Sequence; identical to SEQ ID NO: 161641
  derived and/or modified CDS sequence (opt4) from hemagglutinin__InfluenzaA__AHL89414

SEQ ID NO: 171275 - RNA, 1701 nt, Artificial Sequence
  derived and/or modified CDS sequence (opt4) from hemagglutinin__InfluenzaA__AHL89426
augaagaccaucaucgcccugagcuacauccugugccugguguucgcccagaagcugcccggcaacgacaacagcaccgccacccugugccugggccaccacgccgugcccaacggcaccaucgugaagaccaucaccaacgaccagaucgaggugaccaacgccaccgagcuggugcagagcagcagcaccggcgagaucugcgacagcccccaccagauccuggacggcgagaacugcacccugaucgacgcccugcugggcgacccccagugcgacggcuuccagaacaagaagugggaccuguucguggagagaagcaaggccuacagcaacugcuaccccuacgacgugcccgacuacgccagccugagaagccugguggccagcagcggcacccuggaguucaacaacgagagcuucaacuggaccggcgugacccagaacggcaccagcagcgccugcaagagaagaagcaacaacagcuucuucagcagacugaacuggcugacccaccugaaguucaaguaccccgcccugaacgugaccaugcccaacaacgagaaguucgacaagcuguacaucuggggcgugcaccaccccggcaccgacaacgaccagaucuuccuguacgcccaggccagcggcagaaucaccgugagcaccaagagaagccagcagaccgugauccccaacaucggcagcagacccagagugagaaacauccccagcagaaucagcaucuacuggaccaucgugaagcccggcgacauccuguucaucaacagcaccggcaaccugaucgcccccagaggcuacuucaagaucagaagcggcaagagcagcaucaugagaagcgacgcccccaucggcaagugcaacagcgagugcaucacccccaacggcagcauccccaacgacaagcccuuccagaacgugaacagaaucaccuacggcgccugccccagauacgugaagcagaacacccugaagcuggccaccggcaugagaaacgugcccgagaagcagaccagaggcaucuucggcgccaucgccggcuucaucgagaacggcugggagggcaugguggacggcugguacggcuucagacaccagaacagcgagggcaucggccaggccgccgaccugaagagcacccaggccgccaucaaccagaucaacggcaagcugaacagacugaucggcaagaccaacgagaaguuccaccagaucgagaaggaguucagcgagguggagggcagaauccaggaccuggagaaguacguggaggacaccaagaucgaccuguggagcuacaacgccgagcugcugguggcccuggagaaccagcacaccaucgaccugaccgacagcgagaugaacaagcuguucgagagaaccaagaagcagcugagagagaacgccgaggacaugggcaacggcugcuucaagaucuaccacaagugcgacaacgccugcaucggcagcaucagaaacggcaccuacgaccacgacguguacagagacgaggcccugaacaacagauuccagaucaagggcguggagcugaagagcggcuacaaggacuggauccuguggaucagcuucgccaucagcugcuuccugcugugcguggugcugcugggcuucaucaugugggccugccagaagggcaacaucagaugcaacaucugcaucuga

SEQ ID NO: 171276 - RNA, 1701 nt, Artificial Sequence; identical to SEQ ID NO: 171257
  derived and/or modified CDS sequence (opt4) from hemagglutinin__InfluenzaA__AHL89438

SEQ ID NO: 171277 - RNA, 1701 nt, Artificial Sequence; identical to SEQ ID NO: 171257
  derived and/or modified CDS sequence (opt4) from hemagglutinin__InfluenzaA__AHL89450

SEQ ID NO: 171278 - RNA, 1701 nt, Artificial Sequence; identical to SEQ ID NO: 171257
  derived and/or modified CDS sequence (opt4) from hemagglutinin__InfluenzaA__AHL89462

SEQ ID NO: 171279 - RNA, 1701 nt, Artificial Sequence; identical to SEQ ID NO: 171257
  derived and/or modified CDS sequence (opt4) from hemagglutinin__InfluenzaA__AHL89474

SEQ ID NO: 171280 - RNA, 1701 nt, Artificial Sequence; identical to SEQ ID NO: 161888
  derived and/or modified CDS sequence (opt4) from hemagglutinin__InfluenzaA__AHL89486

SEQ ID NO: 171281 - RNA, 1701 nt, Artificial Sequence; identical to SEQ ID NO: 161641
  derived and/or modified CDS sequence (opt4) from hemagglutinin__InfluenzaA__AHL89498

SEQ ID NO: 171282 - RNA, 1701 nt, Artificial Sequence; identical to SEQ ID NO: 161641
  derived and/or modified CDS sequence (opt4) from hemagglutinin__InfluenzaA__AHL89510

SEQ ID NO: 171283 - RNA, 1701 nt, Artificial Sequence; identical to SEQ ID NO: 161641
  derived and/or modified CDS sequence (opt4) from hemagglutinin__InfluenzaA__AHL89522

SEQ ID NO: 171284 - RNA, 1701 nt, Artificial Sequence
  derived and/or modified CDS sequence (opt4) from hemagglutinin__InfluenzaA__AHL89534
augaagaccaucaucgcccugagcuacauccugugccugguguucgcccagaagcugcccggcaacgacaacagcaccgccacccugugccugggccaccacgccgugcccaacggcaccaucgugaagaccaucaccaacgaccagaucgaggugaccaacgccaccgagcuggugcagagcagcagcaccggcgagaucugcgacagcccccaccagauccuggacggcgagaacugcacccugaucgacgcccugcugggcgacccccagugcgacggcuuccagaacaagaagugggaccuguucguggagagaagcaaggccuacagcaacugcuaccccuacgacgugcccgacuacgccagccugagaagccugguggccagcagcggcacccuggaguucaacaacgagagcuucaacuggaccggcgugacccagaacggcaccagcagcgccugcaagagaagaagcaacaacagcuucuucagcagacugaacuggcugacccaccugaaguucaaguaccccgcccugaacgugaccaugcccaacaacgagaaguucgacaagcuguacaucuggggcgugcaccaccccggcaccgacaacgaccagaucuuccuguacgcccaggccagcggcagaaucaccgugagcaccaagagaagccagcagaccgugauccccaacaucggcagcagacccagagugagaaacauccccagcagaaucagcaucuacuggaccaucgugaagcccggcgacauccugcugaucaacagcaccggcaaccugaucgcccccagaggcuacuucaagaucagaagcggcaagagcagcaucaugagaagcgacgcccccaucggcaagugcaacagcgagugcaucacccccaacggcagcauccccaacgacaagcccuuccagaacgugaacagaaucaccuacggcgccugccccagauacgugaagcagaacacccugaagcuggccaccggcaugagaaacgugcccgagaagcagaccagaggcaucuucggcgccaucgccggcuucaucgagaacggcugggagggcaugguggacggcugguacggcuucagacaccagaacagcgagggcaucggccaggccgccgaccugaagagcacccaggccgccaucaaccagaucaacggcaagcugaacagacugaucggcaagaccaacgagaaguuccaccagaucgagaaggaguucagcgagguggagggcagaauccaggaccuggagaaguacguggaggacaccaagaucgaccuguggagcuacaacgccgagcugcugguggcccuggagaaccagcacaccaucgaccugaccgacagcgagaugaacaagcuguucgagagaaccaagaagcagcugagagagaacgccgaggacaugggcaacggcugcuucaagaucuaccacaagugcgacaacgccugcaucggcagcaucagaaacggcaccuacgaccacgacguguacagagacgaggcccugaacaacagauuccagaucaagggcaucgagcugaagagcggcuacaaggacuggauccuguggaucagcuucgccaucagcugcuuccugcugugcguggugcugcugggcuucaucaugugggccugccagaagggcaacaucagaugcaacaucugcaucuga

SEQ ID NO: 171285 - RNA, 1698 nt, Artificial Sequence
  derived and/or modified CDS sequence (opt4) from hemagglutinin__InfluenzaA__AHL89546
augaaggugaagcugcuggugcugcugugcaccuucaccgccaccuacgccgacaccaucugcaucggcuaccacgccaacaacagcaccgacaccguggacaccgugcuggagaagaacgugaccgugacccacagcgugaaccugcuggaggacagccacaacggcaagcugugccugcugaagggcaucgccccccugcagcugggcaacugcagcguggccggcuggauccugggcaaccccgagugcgagcugcugaucagcaaggagagcuggagcuacaucguggagacccccaaccccgagaacggcaccugcuaccccggcuacuucgccgacuacgaggagcugagagagcagcugagcagcgugagcagcuucgagagauucgagaucuuccccaaggagagcagcuggcccaaccacaccgugaccggcgugagcgccagcugcagccacaacggcaagagcagcuucuacagaaaccugcuguggcugaccggcaagaacggccuguaccccaaccugagcaagagcuacgccaacaacaaggagaaggaggugcuggugcuguggggcgugcaccacccccccaacaucggcgaccagagagcccuguaccacaccgagagcgccuacgugagcguggugagcagccacuacagcagaagauucacccccgagaucgccaagagacccaaggugagagaccaggagggcagaaucaacuacuacuggacccugcuggagcccggcgacaccaucaucuucgaggccaacggcaaccugaucgcccccagauucgccuucgcccugagcagaggcuucggcagcggcaucaucaccagcaacgcccccauggacgagugcgacgccaagugccagaccccccagggcgccaucaacagcagccugcccuuccagaacgugcaccccgugaccaucggcgagugccccaaguacgugagaagcgccaagcugagaauggugaccggccugagaaacauccccagcauccagagcagaggccuguucggcgccaucgccggcuucaucgagggcggcuggaccggcaugguggacggcugguacggcuaccaccaccagaacgagcagggcagcggcuacgccgccgaccagaagagcacccagaacgccaucaacggcaucaccaacaaggugaacagcgugaucgagaagaugaacacccaguucaccgccgugggcaaggaguucaacaagcuggagagaagaauggagaaccugaacaagaagguggacgacggcuuccuggacaucuggaccuacaacgccgagcugcuggugcugcuggagaacgagagaacccuggacuuccacgacagcaacgugaagaaccuguacgagaaggugaagagccagcugaagaacaacgccaaggagaucggcaacggcugcuucgaguucuaccacaagugcaacgacgagugcauggagagcgugaagaacggcaccuacgacuaccccaaguacagcgaggagagcaagcugaacagagagagaaucgacggcgugaagcuggagagcaugggcguguaccagauccuggccaucuacagcaccguggccagcagccuggugcugcuggugagccugggcgccaucagcuucuggaugugcagcaacggcagccugcagugcagaaucugcaucuga

SEQ ID NO: 171286 - RNA, 1698 nt, Artificial Sequence; identical to SEQ ID NO: 161974
  derived and/or modified CDS sequence (opt4) from hemagglutinin__InfluenzaA__AHL89558

SEQ ID NO: 171287 - RNA, 1698 nt, Artificial Sequence; identical to SEQ ID NO: 161974
  derived and/or modified CDS sequence (opt4) from hemagglutinin__InfluenzaA__AHL89570

SEQ ID NO: 171288 - RNA, 1698 nt, Artificial Sequence; identical to SEQ ID NO: 161990
  derived and/or modified CDS sequence (opt4) from hemagglutinin__InfluenzaA__AHL89582

SEQ ID NO: 171289 - RNA, 1698 nt, Artificial Sequence; identical to SEQ ID NO: 161990
  derived and/or modified CDS sequence (opt4) from hemagglutinin__InfluenzaA__AHL89594

SEQ ID NO: 171290 - RNA, 1698 nt, Artificial Sequence; identical to SEQ ID NO: 161990
  derived and/or modified CDS sequence (opt4) from hemagglutinin__InfluenzaA__AHL89606

SEQ ID NO: 171291 - RNA, 1698 nt, Artificial Sequence; identical to SEQ ID NO: 161974
  derived and/or modified CDS sequence (opt4) from hemagglutinin__InfluenzaA__AHL89618

SEQ ID NO: 171292 - RNA, 1698 nt, Artificial Sequence; identical to SEQ ID NO: 161990
  derived and/or modified CDS sequence (opt4) from hemagglutinin__InfluenzaA__AHL89630

SEQ ID NO: 171293 - RNA, 1698 nt, Artificial Sequence
  derived and/or modified CDS sequence (opt4) from hemagglutinin__InfluenzaA__AHL89642
augaaggugaagcugcuggugcugcugugcaccuucaccgccaccuacgccgacaccaucugcaucggcuaccacgccaacaacagcaccgacaccguggacaccgugcuggagaagaacgugaccgugacccacagcgugaaccugcuggaggacaaccacaacggcaagcugugccugcugaagggcaucgccccccugcagcugggcaacugcagcguggccggcuggauccugggcaaccccgagugcgagcugcugaucagcaaggagagcuggagcuacaucguggagacccccaaccccgagaacggcaccugcuaccccggcuacuucgccgacuacgaggagcugagagagcagcugagcagcgugagcagcuucgagagauucgagaucuuccccaaggagagcagcuggcccaaccacaccgugaccggcgugagcgccagcugcagccacaacggcaagagcagcuucuacagaaaccugcuguggcugaccggcaagaacggccuguaccccaaccugagcaagagcuacgccaacaacaaggagaaggaggugcuggugcuguggggcgugcaccacccccccaacaucggcgaccagagagcccuguaccacaccgagaacgccuacgugagcguggugagcagccacuacagcagaagauucacccccgagaucgccaagagacccaaggugagagaccaggagggcagaaucaacuacuacuggacccugcuggagcccggcgacaccaucaucuucgaggccaacggcaaccugaucgcccccagauucgccuucgcccugagcagaggcuucggcagcggcaucaucaccagcaacgcccccaugggcgagugcgacgccaagugccagaccccccagggcgccaucaacagcagccugcccuuccagaacgugcaccccgugaccaucggcgagugccccaaguacgugagaagcgccaagcugagaauggugaccggccugagaaacauccccagcauccagagcagaggccuguucggcgccaucgccggcuucaucgagggcggcuggaccggcaugguggacggcugguacggcuaccaccaccagaacgagcagggcagcggcuacgccgccgaccagaagagcacccagaacgccaucaacggcaucaccaacaaggugaacagcgugaucgagaagaugaacacccaguucaccgccgugggcaaggaguucaacaagcuggagagaagaauggagaaccugaacaagaagguggacgacggcuuccuggacaucuggaccuacaacgccgagcugcuggugcugcuggagaacgagagaacccuggacuuccacgacagcaacgugaagaaccuguacgagaaggugaagagccagcugaagaacaacgccaaggagaucggcaacggcugcuucgaguucuaccacaagugcaacgacgagugcauggagagcgugaagaacggcaccuacgacuaccccaaguacagcgaggagagcaagcugaacagagagaagaucgacggcgugaagcuggagagcaugggcguguaccagauccuggccaucuacagcaccguggccagcagccuggugcugcuggugagccugggcgccaucagcuucuggaugugcagcaacggcagccugcagugcagaaucugcaucuga

SEQ ID NO: 171294 - RNA, 1698 nt, Artificial Sequence; identical to SEQ ID NO: 162005
  derived and/or modified CDS sequence (opt4) from hemagglutinin__InfluenzaA__AHL89654

SEQ ID NO: 171295 - RNA, 1698 nt, Artificial Sequence
  derived and/or modified CDS sequence (opt4) from hemagglutinin__InfluenzaA__AHL89666
augaaggugaagcugcuggugcugcugugcaccuucaccgccaccuacgccgacaccaucugcaucggcuaccacgccaacaacagcaccgacaccguggacaccgugcuggagaagaacgugaccgugacccacagcgugaaccugcuggaggacaaccacaacggcaagcugugccugcugaagggcaucgccccccugcagcugggcaacugcagcguggccggcuggauccugggcaaccccgagugcgagcugcugaucagcaaggagagcuggagcuacaucguggagacccccaaccccgagaacggcaccugcuaccccggcuacuucgccgacuacgaggagcugagagagcagcugagcagcgugagcagcuucgagagauucgagaucuuccccaaggagagcagcuggcccaaccacaccgugaccggcgugagcgccagcugcagccacaacggcaagagcagcuucuacagaaaccugcuguggcugaccggcaagaacggccuguaccccaaccugagcaagagcuacgccaacaacaaggagaaggaggugcuggugcuguggggcgugcaccacccccccaacaucggcgaccagagagcccuguaccacaccgagaacgccuacgugagcguggugagcagccacuacagcagaagauucacccccgagaucgccaagagacccaaggugagagaccaggagggcagaaucaacuacuacuggacccugcuggagcccggcgacaccaucaucuucgaggccaacggcaaccugaucgcccccagauucgccuucgcccugagcagaggcuucggcagcggcaucaucaccagcaacgcccccaugggcgagugcgacgccaagugccagaccccccagggcgccaucaacagcagccugcccuuccagaacgugcaccccgugaccaucggcgagugccccaaguacgugagaagcgccaagcugagaauggugaccggccugagaaacauccccagcauccagagcagaggccuguucggcgccaucgccggcuucaucgagggcggcuggaccggcaugguggacggcugguacggcuaccaccaccagaacgagcagggcagcggcuacgccgccgaccagaagagcacccagaacgccaucaacggcaucaccaacaaggugaacagcgugaucgagaagaugaacacccaguucaccgccgugggcaaggaguucaacaagcuggagagaagaauggagaaccugaacaagaagguggacgacggcuuccuggacaucuggaccuacaacgccgagcugcuggugcugcuggagaacgagagaacccuggacuuccacgacagcaacgugaagaaccuguacgagaaggugaagagccagcugaagaacaacgccgaggagaucggcaacggcugcuucgaguucuaccacaagugcaacgacgagugcauggagagcgugaagaacggcaccuacgacuaccccaaguacagcgaggagagcaagcugaacagagagaagaucgacggcgugaagcuggagagcaugggcguguaccagauccuggccaucuacagcaccguggccagcagccuggugcugcuggugagccugggcgccaucagcuucuggaugugcagcaacggcagccugcagugcagaaucugcaucuga

SEQ ID NO: 171296 - RNA, 1698 nt, Artificial Sequence
  derived and/or modified CDS sequence (opt4) from hemagglutinin__InfluenzaA__AHL89678
augaaggugaagcugcuggugcugcugugcaccuucaccgccaccuacgccgacaccaucugcaucggcuaccacgccaacaacagcaccgacaccguggacaccgugcuggagaagaacgugaccgugacccacagcgugaaccugcuggaggacagccacaacggcaagcugugccugcugaagggcaucgccccccugcagcugggcaacugcagcguggccggcuggauccugggcaaccccgagugcgagcugcugaucagcaaggagagcuggagcuacaucguggagacccccaaccccgagaacggcaccugcuaccccggcuacuucgccgacuacgaggagcugagagagcagcugagcagcgugagcagcuucgagagauucgagaucuuccccaaggagagcagcuggcccaaccacaccgugaccggcgugagcgccagcugcagccacaacggcaagagcagcuucuacagaaaccugcuguggcugaccggcaagaacggccuguaccccaaccugagcaagagcuacgccaacaacaaggagaaggaggugcuggugcuguggggcgugcaccacccccccaacaucggcgaccagagagcccuguaccacaccgagaacgccuacgugagcguggugagcagccacuacagcagaagauucacccccgagaucgccaagagacccaaggugagagaccaggagggcagaaucaacuacuacuggacccugcuggagcccggcgacaccaucaucuucgaggccaacggcaaccugaucgcccccagauucgccuucgcccugagcagaggcuucggcagcggcaucaucaccagcaacgcccccaugggcgagugcgacgccaagugccagaccccccagggcgccaucaacagcagccugcccuuccagaacgugcaccccgugaccaucggcgagugccccaaguacgugagaagcgccaagcugagaauggugaccggccugagaaacauccccagcauccagagcagaggccuguucggcgccaucgccggcuucaucgagggcggcuggaccggcaugguggacggcugguacggcuaccaccaccagaacgagcagggcagcggcuacgccgccgaccagaagagcacccagaacgccaucaacggcaucaccaacaaggugaacagcgugaucgagaagaugaacacccaguucaccgccgugggcaaggaguucaacaagcuggagagaagaauggagaaccugaacaagaagguggacgacggcuuccuggacaucuggaccuacaacgccgagcugcuggugcugcuggagaacgagagaacccuggacuuccacgacagcaacgugaagaaccuguacgagaaggugaagagccagcugaagaacaacgccaaggagaucggcaacggcugcuucgaguucuaccacaagugcaacgacgagugcauggagagcgugaagaacggcaccuacgacuaccccaaguacagcgaggagagcaagcugaacagaaagaagaucgacggcgugaagcuggagagcaugggcguguaccagauccuggccaucuacagcaccguggccagcagccuggugcugcuggugagccugggcgccaucagcuucuggaugugcagcaacggcagccugcagugcagaaucugcaucuga

SEQ ID NO: 171297 - RNA, 1698 nt, Artificial Sequence
  derived and/or modified CDS sequence (opt4) from hemagglutinin__InfluenzaA__AHL89690
augaaggugaagcugcuggugcugcugugcaccuucaccgccaccuacgccgacaccaucugcaucggcuaccacgccaacaacagcaccgacaccguggacaccgugcuggagaagaacgugaccgugacccacagcgugaaccugcuggaggacagccacaacggcaagcugugccugcugaagggcaucgccccccugcagcugggcaacugcagcguggccggcuggauccugggcaaccccgagugcgagcugcugaucagcaaggagagcuggagcuacaucguggagaagcccgaccccgagaacggcaccugcuaccccggccacuucgccgacuacgaggagcugagagagcagcugagcagcgugagcagcuucgagagauucgagaucuuccccaaggagagcagcuggcccaaccacaccgugaccggcgugagcgccagcugcagccacaacggcaagagcagcuucuacaagaaccugcuguggcugaccggcaagaacggccuguaccccaaccugagcaagagcuacgccaacaacaaggagaaggaggugcuggugcuguggggcgugcaccacccccccaacaucggcgaccagaaggcccuguaccacaccgagaacgccuacgugagcguggugagcagccacuacagcagaaaguucacccccgagaucgccaagagacccaaggugagagaccaggagggcagaaucaacuacuacuggacccugcuggagcccggcgacaccaucaucuucgaggccaacggcaaccugaucgcccccagauacgccuucgcccugagcagaggcuucggcagcggcaucaucaacagcaacgcccccauggacaagugcgacgccaagugccagaccccccagggcgccaucaacagcagccugcccuuccagaacgugcaccccgugaccaucggcgagugccccaaguacgugagaagcgccaagcugagaauggugaccggccugagaaacauccccagcauccagagcagaggccuguucggcgccaucgccggcuucaucgagggcggcuggaccggcaugguggacggcugguacggcuaccaccaccagaacgagcagggcagcggcuacgccgccgaccagaagagcacccagaacgccaucaacggcaucaccaacaaggugaacagcgugaucgagaagaugaacacccaguucaccgccgugggcaaggaguucaacaagcuggagagaagaauggagaaccugaacaagaagguggacgacggcuucaucgacaucuggaccuacaacgccgagcugcuggugcugcuggagaacgagagaacccuggacuuccacgacagcaacgugaagaaccuguacgagaaggugaagagccagcugaagaacaacgccaaggagaucggcaacggcugcuucgaguucuaccacaagugcaacgacgagugcauggagagcgugaagaacggcaccuacgacuaccccaaguacagcgaggagagcaagcugaacagagagaagaucgacggcgugaagcuggagagcaugggcguguaccagauccuggccaucuacagcaccguggccagcagccuggugcugcuggugagccugggcgccaucagcuucuggaugugcagcaacggcagccugcagugcagaaucugcaucuga

SEQ ID NO: 171298 - RNA, 1698 nt, Artificial Sequence; identical to SEQ ID NO: 162005
  derived and/or modified CDS sequence (opt4) from hemagglutinin__InfluenzaA__AHL89702

SEQ ID NO: 171299 - RNA, 1698 nt, Artificial Sequence; identical to SEQ ID NO: 161974
  derived and/or modified CDS sequence (opt4) from hemagglutinin__InfluenzaA__AHL89714

SEQ ID NO: 171300 - RNA, 1698 nt, Artificial Sequence
  derived and/or modified CDS sequence (opt4) from hemagglutinin__InfluenzaA__AHL89726
augaaggugaagcugcuggugcugcugugcaccuucaccgccaccuacgccgacaccaucugcaucggcuaccacgccaacaacagcaccgacaccguggacaccgugcuggagaagaacgugaccgugacccacagcgugaaccugcuggaggacagccacaacggcaagcugugccugcugaagggcaucgccccccugcagcugggcaacugcagcguggccggcuggauccugggcaaccccgagugcgagcugcugaucagcaaggagagcuggagcuacaucguggagacccccaaccccgagaacggcaccugcuaccccggcuacuucgccgacuacgaggagcugagagagcagcugagcagcgugagcagcuucgagagauucgagaucuuccccaaggagagcagcuggcccaaccacaccgugaccggcgugagcgccagcugcagccacaacggcaagagcagcuucuacagaaaccugcuguggcugaccggcaagaacggccuguaccccaaccugagcaagagcuacgccaacaacaaggagaaggaggugcuggugcuguggggcgugcaccacccccccaacaucggcgaccagaaggcccuguaccacaccgagaacgccuacgugagcguggugagcagccacuacagcagaagauucacccccgagaucgccaagagacccaaggugagagaccaggagggcagaaucaacuacuacuggacccugcuggagcccggcgacaccaucaucuucgaggccaacggcaaccugaucgcccccagauucgccuucgcccugagcagaggcuucggcagcggcaucaucaccagcaacgcccccauggacgagugcgacgccaagugccagaccccccagggcgccaucaacagcagccugcccuuccagaacgugcaccccgugaccaucggcgagugccccaaguacgugagaagcaccaagcugagaauggugaccggccugagaaacauccccagcauccagagcagaggccuguucggcgccaucgccggcuucaucgagggcggcuggaccggcaugguggacggcugguacggcuaccaccaccagaacgagcagggcagcggcuacgccgccgaccagaagagcacccagaacgccaucaacggcaucaccaacaaggugaacagcgugaucgagaagaugaacacccaguucaccgccgugggcaaggaguucaacaagcuggagagaagaauggagaaccugaacaagaagguggacgacggcuuccuggacaucuggaccuacaacgccgagcugcuggugcugcuggagaacgagagaacccuggacuuccacgacagcaacgugaagaaccuguacgagaaggugaagagccagcugaagaacaacgccaaggagaucggcaacggcugcuucgaguucuaccacaagugcaacgacgagugcauggagagcgugaagaacggcaccuacgacuaccccaaguacagcgaggagagcaagcugaacagagagaagaucgacggcgugaagcuggagagcaugggcguguaccagauccuggccaucuacagcaccguggccagcagccuggugcugcuggugagccugggcgccaucagcuucuggaugugcagcaacggcagccugcagugcagaaucugcaucuga

SEQ ID NO: 171301 - RNA, 1698 nt, Artificial Sequence
  derived and/or modified CDS sequence (opt4) from hemagglutinin__InfluenzaA__AHL89750
augaaggugaagcugcuggugcugcugugcaccuucaccgccaccuacgccgacaccaucugcaucggcuaccacgccaacaacagcaccgacaccguggacaccgugcuggagaagaacgugaccgugacccacagcgugaaccugcuggaggacagccacaacggcaagcugugccugcugaagggcaucgccccccugcagcugggcaacugcagcguggccggcuggauccugggcaaccccgagugcgagcugcugaucagcaaggagagcuggagcuacaucguggagacccccaaccccgagaacggcaccugcuaccccggcuacuucgccgacuacgaggagcugagagagcagcugagcagcgugagcagcuucgagagauucgagaucuuccccaaggagagcagcuggcccaaccacaccgugaccggcgugagcgccagcugcagccacaacggcaagagcagcuucuacagaaaccugcuguggcugaccggcaagaacggccuguaccccaaccugagcaagagcuacgccaacaacaaggagaaggaggugcuggugcuguggggcgugcaccacccccccaacaucggcgaccagagagcccuguaccacaccgagaacgccuacgugagcguggugagcagccacuacagcagaagauucacccccgagaucgccaagagacccaaggugagagaccaggagggcagaaucaacuacuacuggacccugcuggagcccggcgacaccaucaucuucgaggccaacggcaaccugaucgcccccagauucgccuucgcccugagcagaggcuucggcagcggcaucaucaccagcaacgcccccauggacggcugcgacgccaagugccagaccccccagggcgccaucaacagcagccugcccuuccagaacgugcaccccgugaccaucggcgagugccccaaguacgugagaagcaccaagcugagaauggugaccggccugagaaacauccccagcauccagagcagaggccuguucggcgccaucgccggcuucaucgagggcggcuggaccggcaugguggacggcugguacggcuaccaccaccagaacgagcagggcagcggcuacgccgccgaccagaagagcacccagaacgccaucaacggcaucaccaacaaggugaacagcgugaucgagaagaugaacacccaguucaccgccgugggcaaggaguucaacaagcuggagagaagaauggagaaccugaacaagaagguggacgacggcuuccuggacaucuggaccuacaacgccgagcugcuggugcugcuggagaacgagagaacccuggacuuccacgacagcaacgugaagaaccuguacgagaaggugaagagccagcugaagaacaacgccaaggagaucggcaacggcugcuucgaguucuaccacaagugcaacgacgagugcauggagagcgugaagaacggcaccuacgacuaccccaaguacagcgaggagagcaagcugaacagagagaagaucgacggcgugaagcuggagagcaugggcguguaccagauccuggccaucuacagcaccguggccagcagccuggugcugcuggugagccugggcgccaucagcuucuggaugugcagcaacggcagccugcagugcagaaucugcaucuga

SEQ ID NO: 171302 - RNA, 1698 nt, Artificial Sequence; identical to SEQ ID NO: 161970
  derived and/or modified CDS sequence (opt4) from hemagglutinin__InfluenzaA__AHL89762

SEQ ID NO: 171303 - RNA, 1698 nt, Artificial Sequence; identical to SEQ ID NO: 162016
  derived and/or modified CDS sequence (opt4) from hemagglutinin__InfluenzaA__AHL89774

SEQ ID NO: 171304 - RNA, 1698 nt, Artificial Sequence; identical to SEQ ID NO: 162005
  derived and/or modified CDS sequence (opt4) from hemagglutinin__InfluenzaA__AHL89786

SEQ ID NO: 171305 - RNA, 1698 nt, Artificial Sequence
  derived and/or modified CDS sequence (opt4) from hemagglutinin__InfluenzaA__AHL89798
augaaggugaagcugcuggugcugcugugcaccuucaccgccaccuacgccgacaccaucugcaucggcuaccacgccaacaacagcaccgacaccguggacaccgugcuggagaagaacgugaccgugacccacagcgugaaccugcuggaggacagacacaacggcaagcugugccugcugaagggcaucgccccccugcagcugggcaacugcagcguggccggcuggauccugggcaaccccgagugcgagcugcugaucagcaaggagagcuggagcuacaucguggagacccccaaccccgagaacggcaccugcuaccccggcuacuucgccgacuacgaggagcugagagagcagcugagcagcgugagcagcuucgagagauucgagaucuuccccaaggagagcagcuggcccaaccacaccgugaccggcgugagcgccagcugcagccacaacggcaagagcagcuucuacagaaaccugcuguggcugaccggcaagaacggccuguaccccaaccugagcagaagcuacgccaacaacaaggagaaggaggugcuggugcuguggggcgugcaccacccccccagcaucggcgaccagagagcccuguaccacaccgagaacgccuacgugagcguggugagcagccacuacagcagaagauucacccccgagaucgccaagagacccaaggugagagaccaggagggcagaaucaacuacuacuggacccugcuggagcccggcgacaccaucaucuucgaggccaacggcaaccugaucgcccccagauucgccuucgcccugagcagaggcuucggcagcggcaucaucaccagcaacgcccccauggacgagugcgacgccaagugccagaccccccagggcgccaucaacagcagccugcccuuccagaacgugcaccccgugaccaucggcgagugccccaaguacgugagaagcgccaagcugagaauggugaccggccugagaaacauccccagcauccagagcagaggccuguucggcgccaucgccggcuucaucgagggcggcuggaccggcaugguggacggcugguacggcuaccaccaccagaacgagcagggcagcggcuacgccgccgaccagaagagcacccagaacgccaucaacggcaucaccaacaaggugaacagcgugaucgagaagaugaacacccaguucaccgccgugggcaaggaguucaacaagcuggagagaagaauggagaaccugaacaagaagguggacgacggcuuccuggacaucuggaccuacaacgccgagcugcuggugcugcuggagaacgagagaacccuggacuuccacgacagcaacgugaagaaccuguacgagaaggugaagagccagcugaagaacaacgccaaggagaucggcaacggcugcuucgaguucuaccacaagugcaacgacgagugcauggagagcgugaagaacggcaccuacgacuaccccaaguacagcgaggagagcaagcugaacagagagaagaucgacggcgugaagcuggagagcaugggcguguaccagauccuggccaucuacagcaccguggccagcagccuggugcugcuggugagccugggcgccaucagcuucuggaugugcagcaacggcagccugcagugcagaaucugcaucuga

SEQ ID NO: 171306 - RNA, 1698 nt, Artificial Sequence
  derived and/or modified CDS sequence (opt4) from hemagglutinin__InfluenzaA__AHL89810
augaaggugaagcugcuggugcugcugugcaccuucaccgccaccuacgccgacaccaucugcaucggcuaccacgccaacaacagcaccgacaccguggacaccgugcuggagaagaacgugaccgugacccacagcgugaaccugcuggaggacagccacaacggcaagcugugccugcugaagggcaucgccccccugcagcugggcaacugcagcguggccggcuggauccugggcaaccccgagugcgagcugcugaucagcaaggagagcuggagcuacaucguggagacccccaaccccgagaacggcaccugcuaccccggcuacuucgccgacuacgaggagcugagagagcagcugagcagcgugagcagcuucgagagauucgagaucuuccccaaggagagcagcuggcccaaccacaccgugaccggcgugagcgccagcugcagccacaacggcaagagcagcuucuacagaaaccugcuguggcugaccggcaagaacggccuguaccccaaccugagcaagagcuacgccaacaacaaggagaaggaggugcuggugcuguggggcgugcaccacccccccaacaucggcgaccagagagcccuguaccacaccgagaacgccuacgugagcguggugagcagccacuacagcagaagauucacccccgagaucgccaagagacccaaggugagagaccaggagggcagaaucaacuacuacuggacccugcuggagcccggcgacaccaucaucuucgaggccaacggcaaccugaucgcccccagauucgccuucgcccugagcagaggcuucggcagcggcaucaucaccagcaacgcccccaugggcgagugcgacgccgagugccagaccccccagggcgccaucaacagcagccugcccuuccagaacgugcaccccgugaccaucggcgagugccccaaguacgugagaagcgccaagcugagaauggugaccggccugagaaacauccccagcauccagagcagaggccuguucggcgccaucgccggcuucaucgagggcggcuggaccggcaugguggacggcugguacggcuaccaccaccagaacgagcagggcagcggcuacgccgccgaccagaagagcacccagaacgccaucaacggcaucaccaacaaggugaacagcgugaucgagaagaugaacacccaguucaccgccgugggcaaggaguucaacaagcuggagagaagaauggagaaccugaacaagaagguggacgacggcuuccuggacaucuggaccuacaacgccgagcugcuggugcugcuggagaacgagagaacccuggacuuccacgacagcaacgugaagaaccuguacgagaaggugaagagccagcugaagaacaacgccaaggagaucggcaacggcugcuucgaguucuaccacaagugcaacgacgagugcauggagagcgugaagaacggcaccuacgacuaccccaaguacagcgaggagagcaagcugaacagagagaagaucgacggcgugaagcuggagagcaugggcguguaccagauccuggccaucuacagcaccguggccagcagccuggugcugcuggugagccugggcgccaucagcuucuggaugugcagcaacggcagccugcagugcagaaucugcaucuga

SEQ ID NO: 171307 - RNA, 1698 nt, Artificial Sequence
  derived and/or modified CDS sequence (opt4) from hemagglutinin__InfluenzaA__AHL89822
augaaggugaagcugcuggugcugcugugcaccuucaccgccaccuacgccgacaccaucugcaucggcuaccacgccaacaacagcaccgacaccguggacaccgugcuggagaagaacgugaccgugacccacagcgugaaccugcuggaggacagacacaacggcaagcugugccugcugaagggcaucgccccccugcagcugggcaacugcagcguggccggcuggauccugggcaaccccgagugcgagcugcugaucagcaaggagagcuggagcuacaucguggagacccccaaccccgagaacggcaccugcuaccccggcuacuucgccgacuacgaggagcugagagagcagcugagcagcgugagcagcuucgagagauucgagaucuuccccaaggagagcagcuggcccaaccacaccgugaccggcgugagcgccagcugcagccacaacggcaagagcagcuucuacagaaaccugcuguggcugaccggcaagaacggccuguaccccaaccugagcaagagcuacgccaacaacaaggagaaggaggugcuggugcuguggggcgugcaccacccccccaacaucggcgaccagagagcccuguaccacaccgagaacgccuacgugagcguggugagcagccacuacagcagaagauucacccccgagaucgccaagagacccaaggugagagaccaggagggcagaaucaacuacuacuggacccugcuggagcccggcgacaccaucaucuucgaggccaacggcaaccugaucgcccccagauucgccuucgcccugagcagaggcuucggcagcggcaucaucaccagcaacgcccccauggacgagugcgacgccaagugccagaccccccagggcgccaucaacagcagccugcccuuccagaacgugcaccccgugaccaucggcgagugccccaaguacgugagaagcgccaagcugagaauggugaccggccugagaaacauccccagcauccagagcagaggccuguucggcgccaucgccggcuucaucgagggcggcuggaccggcaugguggacggcugguacggcuaccaccaccagaacgagcagggcagcggcuacgccgccgaccagaagagcacccagaacgccaucaacggcaucaccaacaaggugaacagcgugaucgagaagaugaacacccaguucaccgccgugggcaaggaguucaacaagcuggagagaagaauggagaaccugaacaagaagguggacgacggcuuccuggacaucuggaccuacaacgccgagcugcuggugcugcuggagaacgagagaacccuggacuuccacgacagcaacgugaagaaccuguacgagaaggugaagagccagcugaagaacaacgccaaggagaucggcaacggcugcuucgaguucuaccacaagugcaacgacgagugcauggagagcgugaagaacggcaccuacgacuaccccaaguacagcgaggagagcaagcugaacagagagaagaucgacggcgugaagcuggagagcaugggcguguaccagauccuggccaucuacagcaccguggccagcagccuggugcugcuggugagccugggcgccaucagcuucuggaugugcagcaacggcagccugcagugcagaaucugcaucuga

SEQ ID NO: 171308 - RNA, 1698 nt, Artificial Sequence
  derived and/or modified CDS sequence (opt4) from hemagglutinin__InfluenzaA__AHL89834
augaaggugaagcugcuggugcugcugugcaccuucaccgccaccuacgccgacaccaucugcaucggcuaccacgccaacaacagcaccgacaccguggacaccgugcuggagaagaacgugaccgugacccacagcgugaaccugcuggaggacagccacaacggcaagcugugccugcugaagggcaucgccccccugcagcugggcaacugcagcguggccggcuggauccugggcaaccccgagugcgagcugcugaucagcaaggagagcuggagcuacaucguggagacccccaaccccgagaacggcaccugcuaccccggcaacuucgccgacuacgaggagcugagagagcagcugagcagcgugagcagcuucgagagauucgagaucuuccccaaggagagcagcuggcccaaccacaccgugaccggcgugagcgccagcugcagccacaacggcaagagcagcuucuacagaaaccugcuguggcugaccggcaagaacggccuguaccccaaccugagcaagagcuacgccaacaacaaggagaaggaggugcuggugcuguggggcgugcaccacccccccaacaucggcgaccagagagcccuguaccacaccgagaacgccuacgugagcguggugagcagccacuacagcagaagauucacccccgagaucgccaagagacccaaggugagagaccaggagggcagaaucaacuacuacuggacccugcuggagcccggcgacaccaucaucuucgaggccaacggcaaccugaucgcccccagauucgccuucgcccugagcagaggcuucggcagcggcaucaucaccagcaacgcccccauggacgagugcgacgccaagugccagaccccccagggcgccaucaacagcagccugcccuuccagaacgugcaccccgugaccaucggcgagugccccaaguacgugagaagcgccaagcugagaauggugaccggccugagaaacauccccagcauccagagcagaggccuguucggcgccaucgccggcuucaucgagggcggcuggaccggcaugguggacggcugguacggcuaccaccaccagaacgagcagggcagcggcuacgccgccgaccagaagagcacccagaacgccaucaacggcaucaccaacaaggugaacagcgugaucgagaagaugaacacccaguucaccgccgugggcaaggaguucaacaagcuggagagaagaauggagaaccugaacaagaagguggacgacggcuuccuggacaucuggaccuacaacgccgagcugcuggugcugcuggagaacgagagaacccuggacuuccacgacagcaacgugaagaaccuguacgagaaggugaagagccagcugaagaacaacgccaaggagaucggcgacggcugcuucgaguucuaccacaagugcaacgacgagugcauggagagcgugaagaacggcaccuacgacuaccccaaguacagcgaggagagcaagcugaacagagagaagaucgacggcgugaagcuggagagcaugggcguguaccagauccuggccaucuacagcaccguggccagcagccuggugcugcuggugagccugggcgccaucagcuucuggaugugcagcaacggcagccugcagugcagaaucugcaucuga

SEQ ID NO: 171309 - RNA, 1698 nt, Artificial Sequence; identical to SEQ ID NO: 162016
  derived and/or modified CDS sequence (opt4) from hemagglutinin__InfluenzaA__AHL89846

SEQ ID NO: 171310 - RNA, 1701 nt, Artificial Sequence; identical to SEQ ID NO: 161988
  derived and/or modified CDS sequence (opt4) from hemagglutinin__InfluenzaA__AHL89858

SEQ ID NO: 171311 - RNA, 1701 nt, Artificial Sequence; identical to SEQ ID NO: 161988
  derived and/or modified CDS sequence (opt4) from hemagglutinin__InfluenzaA__AHL89870

SEQ ID NO: 171312 - RNA, 1701 nt, Artificial Sequence
  derived and/or modified CDS sequence (opt4) from hemagglutinin__InfluenzaA__AHL89882
augaagaccaucaucgcccugagcuacauccugugccugguguucgcccagaagcugcccggcaacgacaacagcaccgccacccugugccugggccaccacgccgugcccaacggcaccaucgugaagaccaucaccaacgaccagaucgaggugaccaacgccaccgagcuggugcagagcagcagcaccggcggcaucugcgacagcccccaccagauccuggacggcgagaacugcacccugaucgacgcccugcugggcgacccccagugcgacggcuuccagaacaagaagugggaccuguucguggagagaagcaaggccuacagcaacugcuaccccuacgacgugcccgacuacgccagccugagaagccugguggccagcagcggcacccuggaguucaacaacgagagcuucaacuggaccggcgugacccagaacggcaccagcagcgccugcaagagaggcagcgacaacagcuucuucagcagacugaacuggcugacccaccugaaguucaaguaccccgcccugaacgugaccaugcccaacaacgagaaguucgacaagcuguacaucuggggcgugcaccaccccggcaccgacaacgaccagaucuuccuguacgcccaggccagcggcagaaucaccgugagcaccaagagaagccagcagaccgugauccccaacaucggcagcagacccagagugagaaacauccccagcagaaucagcaucuacuggaccaucgugaagcccggcgacauccugcugaucaacagcaccggcaaccugaucgcccccagaggcuacuucaagaucagaagcggcaagagcagcaucaugagaagcgacgcccccaucggcaagugcaacagcgagugcaucacccccaacggcagcauccccaacgacaagcccuuccagaacgugaacagaaucaccuacggcgccugccccagauacgugaagcagaacacccugaagcuggccaccggcaugagaaacgugcccgagaagcagaccagaggcaucuucggcgccaucgccggcuucaucgagaacggcugggagggcaugguggacggcugguacggcuucagacaccagaacagcgagggcaucggccaggccgccgaccugaagagcacccaggccgccaucaaccagaucaacggcaagcugaacagacugaucggcaagaccaacgagaaguuccaccagaucgagaaggaguucagcgagguggagggcagaauccaggaccuggagaaguacguggaggacaccaagaucgaccuguggagcuacaacgccgagcugcugguggcccuggagaaccagcacaccaucgaccugaccgacagcgagaugaacaagcuguucgagagaaccaagaagcagcugagagagaacgccgaggacaugggcaacggcugcuucaagaucuaccacaagugcgacaacgccugcaucggcagcaucagaaacggcaccuacgaccacgacguguacagagacgaggcccugaacaacagauuccagaucaagggcguggagcugaagagcggcuacaaggacuggauccuguggaucagcuucgccaucagcugcuuccugcugugcguggcccugcugggcuucaucaugugggccugccagaagggcaacaucagaugcaacaucugcaucuga

SEQ ID NO: 171313 - RNA, 1701 nt, Artificial Sequence; identical to SEQ ID NO: 161988
  derived and/or modified CDS sequence (opt4) from hemagglutinin__InfluenzaA__AHL89894

SEQ ID NO: 171314 - RNA, 1701 nt, Artificial Sequence
  derived and/or modified CDS sequence (opt4) from hemagglutinin__InfluenzaA__AHL89906
augaagaccaucaucgcccugagcuacauccugugccugguguacgcccagaagcugcccggcaucgacaacagcaccgccacccugugccugggccaccacgccgugcccaacggcaccaucgugaagaccaucaccaacgaccagaucgaggugaccaacgccaccgagcuggugcagagcagcagcaccggcgagaucugcgacagcccccaccagauccuggacggcgagaacugcacccugaucgacgcccugcugggcgacccccagugcgacggcuuccagaacaagaagugggaccuguucguggagagaagcaaggccuacagcaacugcuaccccuacgacgugcccgacuacgccagccugagaagccugguggccagcagcggcacccuggaguucaacaacgagagcuucaacugggccggcgugacccagaacggcaccagcagcgccugcaagagaggcagcaacaacagcuucuucagcagacugaacuggcugacccacagcaaguucaaguaccccgcccugaacgugaccaugcccaacaacgaggaguucgacaagcuguacaucuggggcgugcaccaccccggcaccgacaacgaccagaucuuccuguacgcccaggccagcggcagaaucaccgugagcaccaagagaagccagcagaccgugauccccaacaucggcagcagacccagagugagaaacauccccagcagaaucagcaucuacuggaccaucgugaagcccggcgacauccugcugaucaacagcaccggcaaccugaucgcccccagaggcuacuucaagaucagaagcggcaagagcagcaucaugagaagcgacgcccccaucggcaagugcaacagcgagugcaucacccccaacggcagcauccccaacgacaagcccuuccagaacgugaacagaaucaccuacggcgccugccccagauacgugagacagaacacccugaagcuggccaccggcaugagaaacgugcccgagaagcagaccagaggcaucuucggcgccaucgccggcuucaucgagaacggcugggagggcaugguggacggcugguacggcuucagacaccagaacagcgagggcaucggccaggccgccgaccugaagagcacccaggccgccaucgaccagaucaacggcaagcugaacagacugaucggcaagaccaacgagaaguuccaccagaucgagaaggaguucagcgagguggagggcagaauccaggaccuggagaaguacguggaggacaccaagaucgaccuguggagcuacaacgccgagcugcugguggcccuggagaaccagcacaccaucgaccugaccgacagcgagaugaacaagcuguucgagaagaccaagaagcagcugagagagaacgccgaggacaugggcaacggcugcuucaagaucuaccacaagugcgacaacgccugcaucggcagcaucagaaacggcaccuacgaccacgacguguacagagacgaggcccugaacaacagauuccagaucaagggcguggagcugaagagcggcuacaaggacuggauccuguggaucagcuucgccaucagcugcuuccugcugugcguggcccugcugggcuucaucaugugggccugccagaagggcaacaucagaugcaacaucugcaucuga

SEQ ID NO: 171315 - RNA, 1701 nt, Artificial Sequence
  derived and/or modified CDS sequence (opt4) from hemagglutinin__InfluenzaA__AHL89918
augaagaccaucaucgcccugagcuacauccugugccugguguucgcccagaagcugcccggcaacgacaacagcaccgccacccugugccugggccaccacgccgugcccaacggcaccaucgugaagaccaucaccaacgaccagaucgaggugaccaacgccaccgagcuggugcagagcagcagcaccggcgagaucugcgacagcccccaccagauccuggacggcgagaacugcacccugaucgacgcccugcugggcgacccccagugcgacggcuuccagaacaagaagugggaccuguucguggagagaagcaaggccuacagcaacugcuaccccuacgacgugcccgacuacgccagccugagaagccugguggccagcagcggcacccuggaguucaacaacgagagcuucaacuggaccggcgugacccagaacggcaccagcagcgccugcaucagaagaagcaacaacagcuucuucagcagacugaacuggcugacccaccugaaguucaaguaccccgcccugaacgugaccaugcccaacaacgagaaguucgacaagcuguacaucuggggcgugcaccaccccggcaccgacaacgaccagaccuuccuguacgcccaggccagcggcagaaucaccgugagcaccaagagaagccagcagaccgugauccccaacaucggcagcagacccagagugagaaacauccccagcagaaucagcaucuacuggaccaucgugaagcccggcgacauccugcugaucaacagcaccggcaaccugaucgcccccagaggcuacuucaagauccagagcggcaagagcagcaucaugagaagcgacgcccccaucggcaagugcaacagcgagugcaucacccccaacggcagcauccccaacgacaagcccuuccagaacgugaacagaaucaccuacggcgccugccccagauacgugaagcagaacacccugaagcuggccaccggcaugagaaacgugcccgagaagcagaccagaggcaucuucggcgccaucgccggcuucaucgagaacggcugggagggcaugguggacggcugguacggcuucagacaccagaacagcgagggcaucggccaggccgccgaccugaagagcacccaggccgccaucgaccagaucaacggcaagcugaacagacugaucggcaagaccaacgagaaguuccaccagaucgagaaggaguucagcgagguggagggcagaauccaggaccuggagaaguacguggaggacaccaagaucgaccuguggagcuacaacgccgagcugcugguggcccuggagaaccagcacaccaucgaccugaccgacagcgagaugaacaagcuguucgagaagaccaagaagcagcugagagagaacgccgaggacaugggcaacggcugcuucaagaucuaccacaagugcgacaacgccugcaucggcagcaucagaaacggcaccuacgaccacgacguguacagagacgaggcccugaacaacagauuccagaucaagggcguggagcugaagagcggcuacaaggacuggauccuguggaucagcuucgccaucagcugcuuccugcugugcguggcccugcugggcuucaucaugugggccugccagaagggcaacaucagaugcaacaucugcaucuga

SEQ ID NO: 171316 - RNA, 1701 nt, Artificial Sequence
  derived and/or modified CDS sequence (opt4) from hemagglutinin__InfluenzaA__AHL89930
augaagaccaucaucgcccugagcuacauccugugccugguguucgcccagaagcugcccggcaucgacaacagcaccgccacccugugccugggccaccacgccgugcccaacggcaccaucgugaagaccaucaccaacgaccagaucgaggugaccaacgccaccgagcuggugcagagcagcagcaccggcggcaucugcgacagcccccaccagauccuggacggcgagaacugcacccugaucgacgcccugcugggcgacccccagugcgacggcuuccagaacaagaagugggaccuguucguggagagaagcaaggccuacagcaacugcuaccccuacgacgugcccgacuacgccagccugagaagccugguggccagcagcggcacccuggaguucaacaacgagagcuucaacugggccggcgugacccagaacggcaccagcagcgccugcaagagaggcagcaacaacagcuucuucagcagacugaacuggcugacccacagcaaguucaaguaccccgcccugaacgugaccaugcccaacaacgaggaguucgacaagcuguacaucuggggcgugcaccaccccggcaccgacaacgaccagaucuuccuguacgcccaggccagcggcagaaucaccgugagcaccaagagaagccagcagaccgugauccccaacaucggcagcagacccagagugagaaacauccccagcagaaucagcaucuacuggaccaucgugaagcccggcgacauccugcugaucaacagcaccggcaaccugaucgcccccagaggcuacuucaagaucagaagcggcaagagcagcaucaugagaagcgacgcccccaucagcaagugcaacagcgagugcaucacccccaacggcagcauccccaacgacaagcccuuccagaacgugaacagaaucaccuacggcgccugccccagauacgugaagcagaacacccugaagcuggccaccggcaugagaaacgugcccgagaagcagaccagaggcaucuucggcgccaucgccggcuucaucgagaacggcugggagggcaugguggacggcugguacggcuucagacaccagaacagcgagggcaugggccaggccgccgaccugaagagcacccaggccgccaucgaccagaucaacggcaagcugaacagacugaucggcaagaccaacgagaaguuccaccagaucgagaaggaguucagcgagguggagggcagaauccaggaccuggagaaguacguggaggacaccaagaucgaccuguggagcuacaacgccgagcugcugguggcccuggagaaccagcacaccaucgaccugaccgacagcgagaugaacaagcuguucgagaagaccaagaagcagcugagagagaacgccgaggacaugggcaacggcugcuucaagaucuaccacaagugcgacaacgccugcaucggcagcaucagaaacggcaccuacgaccacgacguguacagagacgaggcccugaacaacagauuccagaucaagggcguggagcugaagagcggcuacaaggacuggauccuguggaucagcuucgccaucagcugcuuccugcugugcguggcccugcugggcuucaucaugugggccugccagaagggcaacaucagaugcaacaucugcaucuga

SEQ ID NO: 171317 - RNA, 1701 nt, Artificial Sequence; identical to SEQ ID NO: 161975
  derived and/or modified CDS sequence (opt4) from hemagglutinin__InfluenzaA__AHL89942

SEQ ID NO: 171318 - RNA, 1701 nt, Artificial Sequence
  derived and/or modified CDS sequence (opt4) from hemagglutinin__InfluenzaA__AHL89954
augaagaccaucaucgcccugagcuacauccugugccugguguucgcccagaagcugcccggcaacgacaacagcaccgccacccugugccugggccaccacgccgugcccaacggcaccaucgugaagaccaucaccaacgaccagaucgaggugaccaacgccaccgagcuggugcagagcagcagcaccggcgagaucugcgacagcccccaccagauccuggacggcgagaacugcacccugaucgacgcccugcugggcgacccccagugcgacggcuuccagaacaagaagugggaccuguucguggagagaagcaaggccuacagcaacugcuaccccuacgacgugcccgaccacgccagccugagaagccugguggccagcagcggcacccuggaguucaacaacgagagcuucaacuggaccggcgugacccagaacggcaccagcagcgccugcaucagaagaagcaacaacagcuucuucagcagacugaacuggcugacccaccugaaguucaaguaccccgcccugaacgugaccaugcccaacaacgagaaguucgacaagcuguacaucuggggcgugcaccaccccggcaccgacaacgaccagaucuuccuguacgcccaggccagcggcagaaucaccgugagcaccaagagaagccagcagaccgugauccccaacaucggcagcagacccagagugagaaacauccccagcagaaucagcaucuacuggaccaucgugaagcccggcgacauccugcugaucaacagcaccggcaaccugaucgcccccagaggcuacuucaagaucagaagcggcaagagcagcaucaugagaagcgacgcccccaucggcaagugcaacagcgagugcaucacccccaacggcagcauccccaacgacaagcccuuccagaacgugaacagaaucaccuacggcgccugccccagauacgugaagcagaacacccugaagcuggccaccggcaugagaaacgugcccgagaagcagaccagaggcaucuucggcgccaucgccggcuucaucgagaacggcugggagggcaugguggacggcugguacggcuucagacaccagaacagcgagggcaucggccaggccgccgaccugaagagcacccaggccgccaucgaccagaucaacggcaagcugaacagacugaucggcaagaccaacgagaaguuccaccagaucgagaaggaguucagcgagguggagggcagaauccaggaccuggagaaguacguggaggacaccaagaucgaccuguggagcuacaacgccgagcugcugguggcccuggagaaccagcacaccaucgaccugaccgacagcgagaugaacaagcuguucgagaagaccaagaagcagcugagagagaacgccgaggacaugggcaacggcugcuucaagaucuaccacaagugcgacaacgccugcaucggcagcaucagaaacggcaccuacgaccacgacguguacagagacgaggcccugaacaacagauuccagaucaagggcguggagcugaagagcggcuacaaggacuggauccuguggaucagcuucgccaucagcugcuuccugcugugcguggcccugcugggcuucaucaugugggccugccagaagggcaacaucagaugcaacaucugcaucuga

SEQ ID NO: 171319 - RNA, 1701 nt, Artificial Sequence; identical to SEQ ID NO: 161988
  derived and/or modified CDS sequence (opt4) from hemagglutinin__InfluenzaA__AHL89966

SEQ ID NO: 171320 - RNA, 1701 nt, Artificial Sequence; identical to SEQ ID NO: 161988
  derived and/or modified CDS sequence (opt4) from hemagglutinin__InfluenzaA__AHL89978

SEQ ID NO: 171321 - RNA, 1701 nt, Artificial Sequence; identical to SEQ ID NO: 162047
  derived and/or modified CDS sequence (opt4) from hemagglutinin__InfluenzaA__AHL89990

SEQ ID NO: 171322 - RNA, 1701 nt, Artificial Sequence
  derived and/or modified CDS sequence (opt4) from hemagglutinin__InfluenzaA__AHL90002
augaagaccaucaucgcccugagcuacauccugugccugguguucgcccagaagcugcccggcaucgacaacagcaccgccacccugugccugggccaccacgccgugcccaacggcaccaucgugaagaccaucaccaacgaccagaucgaggugaccaacgccaccgagcuggugcagagcagcagcaccggcggcaucugcgacagcccccaccagauccuggacggcgagaacugcacccugaucgacgcccugcugggcgacccccagugcgacggcuuccagaacaagaagugggaccuguucguggagagaagcaaggccuacagcaacugcuaccccuacgacgugcccgacuacgccagccugagaagccugguggccagcagcggcacccuggaguucaacaacgagagcuucaacugggccggcgugacccagaacggcaccagcagcgccugcaagagaggcagcaacaacagcuucuucagcagacugaacuggcugacccacagcaaguucaaguaccccgcccugaacgugaccaugcccaacaacgaggaguucgacaagcuguacaucuggggcgugcaccaccccggcaccgacaacgaccagaucuuccuguacgcccaggccagcggcagaaucaccgugagcaccaagagaagccagcagaccgugauccccaacaucggcagcagacccagagugagaaacauccccagcagaaucagcaucuacuggaccaucgugaagcccggcgacauccugcugaucaacagcaccggcaaccugaucgcccccagaggcuacuucaagaucagaagcggcaagagcagcaucaugagaagcgacgcccccaucggcaagugcaacagcgagugcaucacccccaacggcagcauccccaacgacaagcccuuccagaacgugaacagaaucaccuacggcgccugccccagauacgugaagcagaacacccugaagcuggccaccggcaugagaaacgugcccgagaagcagaccagaggcaucuucggcgccaucgccggcuucaucgagaacggcugggagggcaugguggacggcugguacggcuucagacaccagaacagcgagggcaugggccaggccgccgaccugaagagcacccaggccgccaucgaccagaucaacggcaagcugaacagacugaucggcaagaccaacgagaaguuccaccagaucgagaaggaguucagcgagguggagggcagaauccaggaccuggagaaguacguggaggacaccaagaucgaccuguggagcuacaacgccgagcugcugguggcccuggagaaccagcacaccaucgaccugaccgacagcgagaugaacaagcuguucgagaagaccaagaagcagcugagagagaacgccgaggacaugggcaacggcugcuucaagaucuaccacaagugcgacaacgccugcaucggcagcaucagaaacggcaccuacgaccacgacguguacagagacgaggcccugaacaacagauuccagaucaagggcguggagcugaagagcggcuacaaggacuggauccuguggaucagcuucgccaucagcugcuuccugcugugcguggcccugcugggcuucaucaugugggccugccagaagggcaacaucagaugcaacaucugcaucuga

SEQ ID NO: 171323 - RNA, 1701 nt, Artificial Sequence
  derived and/or modified CDS sequence (opt4) from hemagglutinin__InfluenzaA__AHL90014
augaagaccaucaucgcccugagcuacauccugugccugguguucgcccagaagcugcccggcaacgacaacagcaccgccacccugugccugggccaccacgccgugcccaacggcaccaucgugaagaccaucaccaacgaccagguggaggugaccaacgccaccgagcuggugcagagcagcagcaccggcgagaucugcgacagcccccaccagauccuggacggcgagaacugcacccugaucgacgcccugcugggcgacccccagugcgacggcuuccagaacaagaagugggaccuguucguggagagaagcaaggccuacagcaacugcuaccccuacgacgugcccgacuacgccagccugagaagccugguggccagcagcggcacccuggaguucaacaacgagagcuucaacuggaccggcgugacccagaacggcaccagcagcgccugcaucagaagaagcaacaacagcuucuucagcagacugaacuggcugacccaccugaaguucaaguaccccgcccugaacgugaccaugcccaacaacgagaaguucgacaagcuguacaucuggggcgugcaccaccccggcaccgacaacgaccagaucuuccuguacgcccaggccagcggcagaaucaccgugagcaccaagagaagccagcagaccgugauccccaacaucggcagcagacccagagugagaaacauccccagcagaaucagcaucuacuggaccaucgugaagcccggcgacauccugcugaucaacagcaccggcaaccugaucgcccccagaggcuacuucaagaucagaagcggcaagagcagcaucaugagaagcgacgcccccaucggcaagugcaacagcgagugcaucacccccaacggcagcauccccaacgacaagcccuuccagaacgugaacagaaucaccuacggcgccugccccagauacgugaagcagaacacccugaagcuggccaccggcaugagaaacgugcccgagaagcagaccagaggcaucuucggcgccaucgccggcuucaucgagaacggcugggagggcaugguggacggcugguacggcuucagacaccagaacagcgagggcaucggccaggccgccgaccugaagagcacccaggccgccaucgaccagaucaacggcaagcugaacagacugaucggcaagaccaacgagaaguuccaccagaucgagaaggaguucagcgagguggagggcagaauccaggaccuggagaaguacguggaggacaccaagaucgaccuguggagcuacaacgccgagcugcugguggcccuggagaaccagcacaccaucgaccugaccgacagcgagaugaacaagcuguucgagaagaccaagaagcagcugagagagaacgccgaggacaugggcaacggcugcuucaagaucuaccacaagugcgacaacgccugcaucggcagcaucagaaacggcaccuacgaccacgacguguacagagacgaggcccugaacaacagauuccagaucaagggcguggagcugaagagcggcuacaaggacuggauccuguggaucagcuucgccaucagcugcuuccugcugugcguggcccugcugggcuucaucaugugggccugccagaagggcaacaucagaugcaacaucugcaucuga

SEQ ID NO: 171324 - RNA, 1701 nt, Artificial Sequence; identical to SEQ ID NO: 171323
  derived and/or modified CDS sequence (opt4) from hemagglutinin__InfluenzaA__AHL90026

SEQ ID NO: 171325 - RNA, 1701 nt, Artificial Sequence
  derived and/or modified CDS sequence (opt4) from hemagglutinin__InfluenzaA__AHL90050
augaagaccaucaucgcccugagcuacauccugugccugguguucgcccagaagcugcccggcaacgacaacagcaccgccacccugugccugggccaccacgccgugcccaacggcaccaucgugaagaccaucaccaacgaccagaucgaggugaccaacgccaccgagcuggugcagagcagcagcaccggcgagaucugcgacagcccccaccagauccuggacggcgagaacugcacccugaucgacgcccugcugggcgacccccagugcgacggcuuccagaacaagaagugggaccuguucguggagagaagcaaggccuacagcaacugcuaccccuacgacgugcccgacuacgccagccugagaagccugguggccagcagcggcacccuggaguucaacaacgagagcuucaacuggaccggcgugacccagaacggcaccagcagcgccugcaucagaagaagcaacaacagcuucuucagcagacugaacuggcugacccaccugaaguucaaguaccccgcccugaacgugaccaugcccaacaacgagaaguucgacaagcuguacaucuggggcgugcaccaccccggcaccgacaacgaccagaucuuccuguacgcccaggccagcggcagaaucaccgugagcaccaagagaagccagcagaccgugauccccaacaucggcagcagacccagagugagaaacauccccagcagaaucagcaucuacuggaccaucgugaagcccggcgacauccugcugaucaacagcaccggcaaccugaucgcccccagaggcuacuucaagaucagaagcggcaagagcagcaucaugagaagcgacgcccccaucggcaagugcaacagcgagugcaucacccccaacggcagcauccccaacgacaagcccuuccagaacgugaacagaaucaccuacggcgccugccccagauacgugaagcagaacacccugaagcuggccaccggcaugagaaacgugcccgagaagcagaccagaggcaucuucggcgccaucgccggcuucaucgagaacggcugggagggcaugguggacggcugguacggcuucagacaccagaacagcgagggcaucggccaggccgccgaccugaagagcacccaggccgccaucgaccagaucaacggcaagcugaacagacugaucggcaagaccaacgagaaguuccaccagaucgagaaggaguucagcgagguggagggcagaauccaggaccuggagaaguacguggaggacaccaagaucgaccuguggagcuacaacgccgagcugcugguggcccuggagaaccagcacaccaucgaccugaccgacgccgagaugaacaagcuguucgagaagaccaagaagcagcugagagagaacgccgaggacaugggcaacggcugcuucaagaucuaccacaagugcgacaacgccugcaucggcagcaucagaaacggcaccuacgaccacgacguguacagagacgaggcccugaacaacagauuccagaucaagggcguggagcugaagagcggcuacaaggacuggauccuguggaucagcuucgccaucagcugcuuccugcugugcguggcccugcugggcuucaucaugugggccugccagaagggcaacaucagaugcaacaucugcaucuga

SEQ ID NO: 171326 - RNA, 1701 nt, Artificial Sequence
  derived and/or modified CDS sequence (opt4) from hemagglutinin__InfluenzaA__AHL90062
augaagaccaucaucgcccugagcuacauccugugccugguguucgcccagaagcugcccgagaacgacaacagcaccgccacccugugccugggccaccacgccgugcccaacggcaccaucgugaagaccaucaccaacgaccagaucgaggugaccaacgccaccgagcuggugcagagcagcagcaccggcgagaucugcgacagcccccaccagauccuggacggcgagaacugcacccugaucgacgcccugcugggcgacccccagugcgacggcuuccagaacaagaagugggaccuguucguggagagaagcaaggccuacagcaacugcuaccccuacgacgugcccgacuacgccagccugagaagccugguggccagcagcggcacccuggaguucaacaacgagagcuucaacuggaccggcgugacccagaacggcaccagcagcgccugcaucagaagaagcaacaacagcuucuucagcagacugaacuggcugacccaccugaaguucaaguaccccgcccugaacgugaccaugcccaacaacgagaaguucgacaagcuguacaucuggggcgugcaccaccccggcaccgacaacgaccagaucuuccuguacgcccaggccagcggcagaaucaccgugagcaccaagagaagccagcagaccgugauccccaacaucggcagcagacccagagugagaaacauccccagcagaaucagcaucuacuggaccaucgugaagcccggcgacauccugcugaucaacagcaccggcaaccugaucgcccccagaggcuacuucaagaucagaagcggcaagagcagcaucaugagaagcgacgcccccaucggcaagugcaacagcgagugcaucacccccaacggcagcauccccaacuacaagcccuuccagaacgugaacagaaucaccuacggcgccugccccagauacgugaagcagaacacccugaagcuggccaccggcaugagaaacgugcccgagaagcagaccagaggcaucuucggcgccaucgccggcuucaucgagaacggcugggagggcaugguggacggcugguacggcuucagacaccagaacagcgagggcaucggccaggccgccgaccugaagagcacccaggccgccaucgaccagaucaacggcaagcugaacagacugaucggcaagaccaacgagaaguuccaccagaucgagaaggaguucagcgagguggagggcagaauccaggaccuggagaaguacguggaggacaccaagaucgaccuguggagcuacaacgccgagcugcugguggcccuggagaaccagcacaccaucgaccugaccgacagcgagaugaacaagcuguucgagaagaccaagaagcagcugagagagaacgccgaggacaugggcaacggcugcuucaagaucuaccacaagugcgacaacgccugcaucggcagcaucagaaacggcaccuacgaccacgacguguacagagacgaggcccugaacaacagauuccagaucaagggcguggagcugaagagcggcuacaaggacuggauccuguggaucagcuucgccaucagcugcuuccugcugugcguggcccugcugggcuucaucaugugggccugccagaagggcaacaucagaugcaacaucugcaucuga

SEQ ID NO: 171327 - RNA, 1701 nt, Artificial Sequence; identical to SEQ ID NO: 161988
  derived and/or modified CDS sequence (opt4) from hemagglutinin__InfluenzaA__AHL90074

SEQ ID NO: 171328 - RNA, 1701 nt, Artificial Sequence
  derived and/or modified CDS sequence (opt4) from hemagglutinin__InfluenzaA__AHL90086
augaagaccaucaucgcccugagcuacauccugugccugguguucgcccagaagcugcccggcaacgacaacagcaccgccacccugugccugggccaccacgccgugcccaacggcaccaucgugaagaccaucaccaacgaccagaucgaggugaccaacgccaccgagcuggugcagagcagcagcaccggcgagaucugcgacagcccccaccagauccuggacggcgagaacugcacccugaucgacgcccugcugggcgacccccagugcgacggcuuccagaacaagaagugggaccuguucguggagagaagcaaggccuacagcaacugcuaccccuacgacgugcccgacuacgccagccugagaagccugguggccagcagcggcacccuggaguucaacaacgagagcuucaacuggaccggcgugacccagaacggcaccagcagcgccugcaucagaagauacaacaacagcuucuucagcagacugaacuggcugacccaccugaaguucaaguaccccgcccugaacgugaccaugcccaacaacgagaaguucgacaagcuguacaucuggggcgugcaccaccccggcaccgacaacgaccagaucuuccuguacgcccaggccagcggcagaaucaccgugagcaccaagagaagccagcagaccgugauccccaacaucggcagcagacccagagugagaaacauccccagcagaaucagcaucuacuggaccaucgugaagcccggcgacauccugcugaucaacagcaccggcaaccugaucgcccccagaggcuacuucaagaucagaagcggcaagagcagcaucaugagaagcgacgcccccaucggcaagugcaacagcgagugcaucacccccaacggcagcauccccaacgacaagcccuuccagaacgugaacagaaucaccuacggcgccugccccagauacgugaagcagaacacccugaagcuggccaccggcaugagaaacgugcccgagaagcagaccagaggcaucuucggcgccaucgccggcuucaucgagaacggcugggagggcaugguggacggcugguacggcuucagacaccagaacagcgagggcaucggccaggccgccgaccugaagagcacccaggccgccaucgaccagaucaacggcaagcugaacagacugaucggcaagaccaacgagaaguuccaccagaucgagaaggaguucagcgagguggagggcagaauccaggaccuggagaaguacguggaggacaccaagaucgaccuguggagcuacaacgccgagcugcugguggcccuggagaaccagcacaccaucgaccugaccgacagcgagaugaacaagcuguucgagaagaccaagaagcagcugagagagaacgccgaggacaugggcaacggcugcuucaagaucuaccacaagugcgacaacgccugcaucggcagcaucagaaacggcaccuacgaccacgacguguacagagacgaggcccugaacaacagauuccagaucaagggcguggagcugaagagcggcuacaaggacuggauccuguggaucagcuucgccaucagcugcuuccugcugugcguggcccugcugggcuucaucaugugggccugccagaagggcaacaucagaugcaacaucugcaucuga

SEQ ID NO: 171329 - RNA, 1701 nt, Artificial Sequence
  derived and/or modified CDS sequence (opt4) from hemagglutinin__InfluenzaA__AHL90098
augaagaccaucaucgcccugagcuacauccugugccugguguucgcccagaagcugcccggcaacgacaacagcaccgccacccugugccugggccaccacgccgugcccaacggcaccaucgugaagaccaucaccaacgaccagaucgaggugaccaacgccaccgagcuggugcagagcagcagcaccggcggcaucugcgacagcccccaccagauccuggacggcgagaacugcacccugaucgacgcccugcugggcgacccccagugcgacggcuuccagaacaagaagugggaccuguucguggagagaagcaaggccuacagcaacugcuaccccuacgacgugcccgacuacgccagccugagaagccugguggccagcagcggcacccuggaguucaacaacgagagcuucaacuggaccggcgugacccagaacggcaccagcagcgccugcaagagaggcagcgacaacagcuucuucagcagacugaacuggcugacccaccugaaguucaaguaccccgcccugaacgugaccaugcccaacaacgagaaguucgacaagcuguacaucuggggcgugcaccaccccggcaccgacaacgaccagaucuuccuguacgcccaggccagcggcagaaucaccgugagcaccaagagaagccagcagaccgugauccccaacaucggcagcagacccagagugagaaacauccccagcagaaucagcaucuacuggaccaucgugaagcccggcgacauccugcugaucaacagcaccggcaaccugaucgcccccagaggcuacuucaagaucagaagcggcaagagcagcaucaugagaagcgacgcccccaucgacaagugcaacagcgagugcaucacccccaacggcagcauccccaacgacaagcccuuccagaacgugaacagaaucaccuacggcgccugccccagauacgugaagcagaacacccugaagcuggccaccggcaugagaaacgugcccgagaagcagaccagaggcaucuucggcgccaucgccggcuucaucgagaacggcugggagggcaugguggacggcugguacggcuucagacaccagaacagcgagggcaucggccaggccgccgaccugaagagcacccaggccgccaucaaccagaucaacggcaagcugaacagacugaucggcaagaccaacgagaaguuccaccagaucgagaaggaguucagcgagguggagggcagaauccaggaccuggagaaguacguggaggacaccaagaucgaccuguggagcuacaacgccgagcugcugguggcccuggagaaccagcacaccaucgaccugaccgacagcgagaugaacaagcuguucgagagaaccaagaagcagcugagagagaacgccgaggacaugggcaacggcugcuucaagaucuaccacaagugcgacaacgccugcaucggcagcaucagaaacggcaccuacgaccacgacguguacagagacgaggcccugaacaacagauuccagaucaagggcguggagcugaagagcggcuacaaggacuggauccuguggaucagcuucgccaucagcugcuuccugcugugcguggcccugcugggcuucaucaugugggccugccagaagggcaacaucagaugcaacaucugcaucuga

SEQ ID NO: 171330 - RNA, 1701 nt, Artificial Sequence
  derived and/or modified CDS sequence (opt4) from hemagglutinin__InfluenzaA__AHL90110
augaagaccaucaucgcccugagcuacauccugugccugguguucgcccagaagcugcccggcaacgacaacagcaccgccacccugugccugggccaccacgccgugcccaacggcaccaucgugaagaccaucaccaacgaccagaucgaggugaccaacgccaccgagcuggugcagagcagcagcaccggcgagaucugcgacagcccccaccagauccuggacggcgagaacugcacccugaucgacgcccugcugggcgacccccagugcgacggcuuccagaacaagaagugggaccuguucguggagagaagcaaggccuacagcaacugcuaccccuacgacgugcccgacuacgccagccugagaagccugguggccagcagcggcacccuggaguucaacaacgagagcuucaacuggaccggcgugacccagaacggcaccagcagcgccugcaucagaagaagcaacaacagcuucuucagcagacugaacuggcugacccaccugaaguucaaguaccccgcccugaacgugaccaugcccaacaacgagaaguucgacaagcuguacaucuggggcgugcaccaccccggcaccgacaacgaccagaucuuccuguacgcccaggccagcggcagaaucaccgugagcaccaagagaagccagcagaccgugauccccaacaucggcagcagacccagagugagaaacauccccagcagaaucagcaucuacuggaccaucgugaagcccggcgacauccugcugaucaacagcaccggcaaccugaucgcccccagaggcuacuucaagauccagagcggcaagagcagcgugaugagaagcgacgcccccaucggcaagugcaacagcgagugcaucacccccaacggcagcauccccaacgacaagcccuuccagaacgugaacagaaucaccuacggcgccugccccagauacgugaagcagaacacccugaagcuggccaccggcaugagaaacgugcccgagaagcagaccagaggcaucuucggcgccaucgccggcuucaucgagaacggcugggagggcaugguggacggcugguacggcuucagacaccagaacagcgagggcaucggccaggccgccgaccugaagagcacccaggccgccaucgaccagaucaacggcaagcugaacagacugaucggcaagaccaacgagaaguuccaccagaucgagaaggaguucagcgagguggagggcagaauccaggaccuggagaaguacguggaggacaccaagaucgaccuguggagcuacaacgccgagcugcugguggcccuggagaaccagcacaccaucgaccugaccgacagcgagaugaacaagcuguucgagaagaccaagaagcagcugagagagaacgccgaggacaugggcaacggcugcuucaagaucuaccacaagugcgacaacgccugcaucggcagcaucagaaacggcaccuacgaccacgacguguacagagacgaggcccugaacaacagauuccagaucaagggcguggagcugaagagcggcuacaaggacuggauccuguggaucagcuucgccaucagcugcuuccugcugugcguggcccugcugggcuucaucaugugggccugccagaagggcaacaucagaugcaacaucugcaucuga

SEQ ID NO: 171331 - RNA, 1698 nt, Artificial Sequence; identical to SEQ ID NO: 164155
  derived and/or modified CDS sequence (opt4) from hemagglutinin__InfluenzaA__AHL90122

SEQ ID NO: 171332 - RNA, 1698 nt, Artificial Sequence; identical to SEQ ID NO: 162548
  derived and/or modified CDS sequence (opt4) from hemagglutinin__InfluenzaA__AHL90133

SEQ ID NO: 171333 - RNA, 1698 nt, Artificial Sequence; identical to SEQ ID NO: 164155
  derived and/or modified CDS sequence (opt4) from hemagglutinin__InfluenzaA__AHL90145

SEQ ID NO: 171334 - RNA, 1698 nt, Artificial Sequence
  derived and/or modified CDS sequence (opt4) from hemagglutinin__InfluenzaA__AHL90157
augaaggugaagcugcuggugcugcugugcaccuucaccgccaccuacgccgacaccaucugcaucggcuaccacgccaacaacagcaccgacaccguggacaccgugcuggagaagaacgugaccgugacccacagcgugaaccugcuggagaacagccacaacggcaagcugugccugcugaagggcaucgccccccugcagcugggcaacugcagcguggccggcuggauccugggcaaccccgagugcgagcugcugaucagcaaggagagcuggagcuacaucguggagaagcccaaccccgagaacggcaccugcuaccccggccacuucgccgacuacgaggagcugagagagcagcugagcagcgugagcagcuucgagagauucgagaucuuccccaaggagagcagcuggcccaaccacaccgugaccggcgugagcgccagcugcagccacaacggcgagagcagcuucuacagaaaccugcuguggcugaccggcaagaacggccuguaccccaaccugagcaagagcuacgccaacaacaaggagaaggaggugcuggugcuguggggcgugcaccacccccccaacaucggcgaccagaaggcccuguaccacaccgagaacgccuacgugagcguggugagcagccacuacagcagaaaguucacccccgagaucgccaagagacccaaggugagagaccaggagggcagaaucaacuacuacuggacccugcuggagcccggcgacaccaucaucuucgaggccaacggcaaccugaucgcccccagauacgccuucgcccugagcagaggcuucggcagcggcaucaucaacagcaacgcccccauggacaagugcgacgccaagugccagaccccccagggcgccaucaacagcagccugcccuuccagaacgugcaccccgugaccaucggcgagugccccaaguacgugagaagcgccaagcugagaauggugaccggccugagaaacauccccagcauccagagcagaggccuguucggcgccaucgccggcuucaucgagggcggcuggaccggcaugguggacggcugguacggcuaccaccaccagaacgagcagggcagcggcuacgccgccgaccagaagagcacccagaacgccaucaacggcaucaccaacaaggugaacagcgugaucgagaagaugaacacccaguucaccgccgugggcaaggaguucaacaagcuggagagaagaauggagaaccugaacaagaagguggacgacggcuucaucgacaucuggaccuacaacgccgagcugcuggugcugcuggagaacgagagaacccuggacuuccacgacagcaacgugaagaaccuguacgagaaggugaagauccagcugaagaacaacgccaaggagaucggcaacggcugcuucgaguucuaccacaagugcaacgacgagugcauggagagcgugaagaacggcaccuacgacuaccccaaguacagcgaggagagcaagcugaacagagagaagaucgacggcgugaagcuggagagcaugggcguguaccagauccuggccaucuacagcaccaucgccagcagccuggugcugcuggugagccugggcgccaucagcuucuggaugugcagcaacggcagccugcagugcagaaucugcaucuga

SEQ ID NO: 171335 - RNA, 1698 nt, Artificial Sequence; identical to SEQ ID NO: 164155
  derived and/or modified CDS sequence (opt4) from hemagglutinin__InfluenzaA__AHL90169

SEQ ID NO: 171336 - RNA, 1698 nt, Artificial Sequence
  derived and/or modified CDS sequence (opt4) from hemagglutinin__InfluenzaA__AHL90181
augaaggugaagcugcuggugcugcugugcaccuucgccgccaccuacgccgacaccaucugcaucggcuaccacgccaacaacagcaccgacaccguggacaccgugcuggagaagaacgugaccgugacccacagcgugaaccugcuggagaacagccacaacggcaagcugugccugcugaagggcaucgccccccugcagcugggcaacugcagcguggccggcuggauccugggcaaccccgagugcgagcugcugaucagcaaggagagcuggagcuacaucguggagaagcccaaccccaagaacggcaccugcuaccccggccacuucgccgacuacgaggagcugagagagcagcugagcagcgugagcagcuucgagagauucgagaucuuccccaaggagagcagcuggcccaaccacaccgugaccggcgugagcgccagcugcagccacaacggcgagagcagcuucuacagaaaccugcuguggcugaccggcaagaacggccuguaccccaaccugagcaagagcuacgccaacaacaaggagaaggaggugcuggugcuguggggcgugcaccacccccccaacaucggcgaccagaaggcccuguaccacaccgagaacgccuacgugagcguggugagcagccacuacagcagaaaguucacccccgagaucgccaagagacccaaggugagagaccaggagggcagaaucaacuacuacuggacccugcuggagcccggcgacaccaucaucuucgaggccaacggcaaccugaucgcccccagauacgccuucgcccugagcagaggcuucggcagcggcaucaucaacagcaacgcccccauggacaagugcgacgccaagugccagaccccccagggcgccaucaacagcagccugcccuuccagaacgugcaccccgugaccaucggcgagugccccaaguacgugagaagcgccaagcugagaauggugaccggccugagaaacauccccagcauccagagcagaggccuguucggcgccaucgccggcuucaucgagggcggcuggaccggcaugguggacggcugguacggcuaccaccaccagaacgagcagggcagcggcuacgccgccgaccagaagagcacccagaacgccaucaacggcaucaccaacaaggugaacagcgugaucgagaagaugaacacccaguucaccgccgugggcaaggaguucaacaagcuggagagaagaauggagaaccugaacaagaagguggacgacggcuucaucgacaucuggaccuacaacgccgagcugcuggugcugcuggagaacgagagaacccuggacuuccacgacagcaacgugaagaaccuguacgagaaggugaagagccagcugaagaacaacgccaaggagaucggcaacggcugcuucgaguucuaccacaagugcaacgacgagugcauggagagcgugaagaacggcaccuacgacuaccccaaguacagcgaggagagcaagcugaacagagagaagaucgacggcgugaagcuggagagcaugggcguguaccagauccuggccaucuacagcaccguggccagcagccuggugcugcuggugagccugggcgccaucagcuucuggaugugcagcaacggcagccugcagugcagaaucugcaucuga

SEQ ID NO: 171337 - RNA, 1698 nt, Artificial Sequence; identical to SEQ ID NO: 163230
  derived and/or modified CDS sequence (opt4) from hemagglutinin__InfluenzaA__AHL90217

SEQ ID NO: 171338 - RNA, 1698 nt, Artificial Sequence; identical to SEQ ID NO: 163230
  derived and/or modified CDS sequence (opt4) from hemagglutinin__InfluenzaA__AHL90229

SEQ ID NO: 171339 - RNA, 1698 nt, Artificial Sequence
  derived and/or modified CDS sequence (opt4) from hemagglutinin__InfluenzaA__AHL90241
augaaggugaagcugcuggugcugcugugcaccuucaccgccaccuacgccgacaccaucugcaucggcuaccacgccaacaacagcaccgacaccguggacaccgugcuggagaagaacgugaccgugacccacagcgugaaccugcuggagaacagccacaacggcaagcugugccugcugaagggcaucgccccccugcagcugggcaacugcagcguggccggcuggauccugggcaaccccgagugcgagcugcugauccccaaggagagcuggagcuacaucguggagaagcccaaccccgagaacggcaccugcuaccccggccacuucgccgacuacgaggagcugagagagcagcugagcagcgugagcagcuucgagagauucgagaucuuccccaaggagagcagcuggcccaaccacaccgugaccggcgugagcgccagcugcagccacaacggcgagagcagcuucuacagaaaccugcuguggcugaccggcaagaacggccuguaccccaaccugagcaagagcuacgccaacaacaaggagaaggaggugcuggugcuguggggcgugcaccacccccccaacaucggcgaccagaaggcccuguaccacaccgagaacgccuacgugagcguggugagcagccacuacagcagaaaguucacccccgagaucgccaagagacccaaggugagagaccaggagggcagaaucaacuacuacuggacccugcuggagcccggcgacaccaucaucuucgaggccaacggcaaccugaucgcccccagauacgccuucgcccugagcagaggcuucggcagcggcaucaucaacagcaacgcccccauggacaagugcgacgccaagugccagaccccccagggcgccaucaacagcagccugcccuuccagaacgugcaccccgugaccaucggcgagugccccaaguacgugagaagcgccaagcugagaauggugaccggccugagaaacauccccagcauccagagcagaggccuguucggcgccaucgccggcuucaucgagggcggcuggaccggcaugguggacggcugguacggcuaccaccaccagaacgagcagggcagcggcuacgccgccgaccagaagagcacccagaacgccaucaacggcaucaccaacaaggugaacagcgugaucgagaagaugaacacccaguucaccgccgugggcaaggaguucaacaagcuggagagaagaauggagaaccugaacaagaagguggacgacggcuucaucgacaucuggaccuacaacgccgagcugcuggugcugcuggagaacgagagaacccuggacuuccacgacagcaacgugaagaaccuguacgagaaggugaagagccagcugaagaacaacgccaaggagaucggcaacggcugcuucgaguucuaccacaagugcaacgacgagugcauggagagcgugaagaacggcaccuacgacuaccccaaguacagcgaggagagcaagcugaacagagagaagaucgacggcgugaagcuggagagcaugggcguguaccagauccuggccaucuacagcaccguggccagcagccuggugcugcuggugagccugggcgccaucagcuucuggaugugcagcaacggcagccugcagugcagaaucugcaucuga

SEQ ID NO: 171340 - RNA, 1698 nt, Artificial Sequence
  derived and/or modified CDS sequence (opt4) from hemagglutinin__InfluenzaA__AHL90253
augaaggugaagcugcuggugcugcugugcaccuucaccgccaccuacgccgacaccaucugcaucggcuaccacgccaacaacagcaccgacaccguggacaccgugcuggagaagaacgugaccgugacccacagcgugaaccugcuggagaacagccacaacggcaagcugugccugcugaagggcaucgccccccugcagcugggcaacugcagcguggccggcuggauccugggcaaccccgagugcgagcugcugaucagcaaggagagcuggagcuacaucguggagaagcccaaccccgagaacggcaccugcuaccccggccacuucgccgacuacgaggagcugagagagcagcugagcagcgugagcagcuucgagagauucgagaucuuccccaagggcagcagcuggcccaaccacaccgugaccggcgugagcgccagcugcagccacaacggcgagagcagcuucuacagaaaccugcuguggcugaccggcaagaacggccuguaccccaaccugagcaagagcuacgccaacaacaaggagaaggaggugcuggugcuguggggcgugcaccacccccccaacaucggcgaccagaagacccuguaccacaccgagaacgccuacgugagcguggugagcagccacuacagcagaaaguucacccccgagaucgccaagagacccaaggugagagaccaggagggcagaaucaacuacuacuggacccugcuggagcccggcgacaccaucaucuucgaggccaacggcaaccugaucgcccccagauacgccuucgcccugagcagaggcuucggcagcggcaucaucaacagcaacgcccccauggacaagugcgacgccaagugccagaccccccagggcgccaucaacagcagccugcccuuccagaacgugcaccccgugaccaucggcgagugccccaaguacgugagaagcgccaagcugagaauggugaccggccugagaaacauccccagcauccagagcagaggccuguucggcgccaucgccggcuucaucgagggcggcuggaccggcaugguggacggcugguacggcuaccaccaccagaacgagcagggcagcggcuacgccgccgaccagaagagcacccagaacgccaucaacggcaucaccaacaaggugaacagcgugaucgagaagaugaacacccaguucaccgccgugggcaaggaguucaacaagcuggagagaagaauggagaaccugaacaagaagguggacgacggcuucaucgacaucuggaccuacaacgccgagcugcuggugcugcuggagaacgagagaacccuggacuuccacgacagcaacgugaagaaccuguacgagaaggugaagagccagcugaagaacaacgccaaggagaucggcaacggcugcuucgaguucuaccacaagugcaacgacgagugcauggagagcgugaagaacggcaccuacgacuaccccaaguacagcgaggugagcaagcugaacagagagaagaucgacggcgugaagcuggagagcaugggcguguaccagauccuggccaucuacagcaccguggccagcagccuggugcugcuggugagccugggcgccaucagcuucuggaugugcagcaacggcagccugcagugcagaaucugcaucuga

SEQ ID NO: 171341 - RNA, 1698 nt, Artificial Sequence; identical to SEQ ID NO: 162548
  derived and/or modified CDS sequence (opt4) from hemagglutinin__InfluenzaA__AHL90265

SEQ ID NO: 171342 - RNA, 1698 nt, Artificial Sequence
  derived and/or modified CDS sequence (opt4) from hemagglutinin__InfluenzaA__AHL90277
augaaggugaagcugcuggugcugcugugcaccuucaccgccaccuacgccgacaccaucugcaucggcuaccacgccaacaacagcaccgacaccguggacaccgugcuggagaagaacgugaccgugacccacagcgugaaccugcuggagaacagccacaacggcaagcugugccugcugaagggcaucgccccccugcagcugggcaacugcagcguggccggcuggauccugggcaaccccgagugcgagcugcugaucagcaaggagagcuggagcuacaucguggagaagcccaaccccgagaacggcaccugcuaccccggccacuucgccgacuacgaggagcugagagagcagcugagcagcgugagcagcuucgagagauucgagaucuuccccaaggagagcagcuggcccaaccacaccgugaccggcgugagcgccagcugcagccacaacggcgagagcagcuucuacagaaaccugcuguggcugaccggcaagaacggccuguaccccaaccugagcaagagcuacgccaacaacaaggagaaggaggugcuggugcuguggggcgugcaccacccccccaacaucguggaccagaagacccuguaccacaccgagaacgccuacgugagcguggugagcagccacuacagcagaaaguucacccccgagaucgccaagagacccaaggugagagaccaggagggcagaaucaacuacuacuggacccugcuggagcccggcgacaccaucaucuucgaggccaacggcaaccugaucgcccccagauacgccuucgcccugagcagaggcuucggcagcggcaucaucaacagcaacgcccccauggacaagugcgacgccaagugccagaccccccagggcgccaucaacagcagccugcccuuccagaacgugcaccccgugaccaucggcgagugccccaaguacgugagaagcgccaagcugagaauggugaccggccugagaaacauccccagcauccagagcagaggccuguucggcgccaucgccggcuucaucgagggcggcuggaccggcaugguggacggcugguacggcuaccaccaccagaacgagcagggcagcggcuacgccgccgaccagaagagcacccagaacgccaucaacggcaucaccaacaaggugaacagcgugaucgagaagaugaacacccaguucaccgccgugggcaaggaguucaacaagcuggagagaagaauggagaaccugaacaagaagguggacgacggcuucaucgacaucuggaccuacaacgccgagcugcuggugcugcuggagaacgagagaacccuggacuuccacgacagcaacgugaagaaccuguacgagaaggugaagagccagcugaagaacaacgccaaggagaucggcaacggcugcuucgaguucuaccacaagugcaacgacgagugcauggagagcgugaagaacggcaccuacgacuaccccaaguacagcgaggagagcaagcugaacagagagaagaucgacggcgugaagcuggagagcaugggcguguaccagauccuggccaucuacagcaccguggccagcagccuggugcugcuggugagccugggcgccaucagcuucuggaugugcagcaacggcagccugcagugcagaaucugcaucuga

SEQ ID NO: 171343 - RNA, 1698 nt, Artificial Sequence
  derived and/or modified CDS sequence (opt4) from hemagglutinin__InfluenzaA__AHL90289
augaaggugaagcugcuggugcugcugugcaccuucaccgccaccuacgccgacaccaucugcaucggcuaccacgccaacaacagcaccgacaccguggacaccgugcuggagaagaacgugaccgugacccacagcgugaaccugcuggagaacagccacaacggcaagcugugccugcugaagggcaucgccccccugcagcugggcaacugcagcguggccggcuggauccugggcaaccccgagugcgagcugcugaucagcaaggagagcuggagcuacaucguggagaagcccaaccccgagaacggcaccugcuaccccggccacuucgccgacuacgaggagcugagagagcagcugagcagcgugagcagcuucgagagauucgagaucuuccccaaggagagcagcuggcccaaccacaccgugaccggcgugagcgccagcugcagccacaacggcgagagcagcuucuacagaaaccugcuguggcugaccggcaagaacggccuguaccccaaccugagcaagagcuacgccaacaacaaggagaaggaggugcuggugcuguggggcgugcaccacccccccaacaucggcgaccagaaggcccuguaccacaccgagaacgccuacgugagcguggugagcagccacuacagcagaaaguucacccccgagaucgccaagagacccaaggugagagaccaggagggcagaaucaacuacuacuggacccugcuggagcccagagacaccaucaucuucgaggccaacggcaaccugaucgcccccagauacgccuucgcccugagcagaggcuucggcagcggcaucaucaacagcaacgcccccauggacaagugcgacgccaagugccagaccccccagggcgccaucaacagcagccugcccuuccagaacgugcaccccgugaccaucggcgagugccccaaguacgugagaagcgccaagcugagaauggugaccggccugagaaacauccccagcauccagagcagaggccuguucggcgccaucgccggcuucaucgagggcggcuggaccggcaugguggacggcugguacggcuaccaccaccagaacgagcagggcagcggcuacgccgccgaccagaagagcacccagaacgccaucaacggcaucaccaacaaggugaacagcgugaucgagaagaugaacacccaguucaccgccgugggcaaggaguucaacaagcuggagagaagaauggagaaccugaacaagaagguggacgacggcuucaucgacaucuggaccuacaacgccgagcugcuggugcugcuggagaacgagagaacccuggacuuccacgacagcaacgugaagaaccuguacgagaaggugaagagccagcugaagaacaacgccaaggagaucggcaacggcugcuucgaguucuaccacaagugcaacgacgagugcauggagagcgugaagaacggcaccuacgacuaccccaaguacagcgaggagagcaagcugaacagagagaagaucgacggcgugaagcuggagagcaugggcguguaccagauccuggccaucuacagcaccguggccagcagccuggugcugcuggugagccugggcgccaucagcuucuggaugugcagcaacggcagccugcagugcagaaucugcaucuga

SEQ ID NO: 171344 - RNA, 1698 nt, Artificial Sequence; identical to SEQ ID NO: 171343
  derived and/or modified CDS sequence (opt4) from hemagglutinin__InfluenzaA__AHL90301

SEQ ID NO: 171345 - RNA, 1698 nt, Artificial Sequence
  derived and/or modified CDS sequence (opt4) from hemagglutinin__InfluenzaA__AHL90325
augaaggugaagcugcuggugcugcugugcaccuucaccgccaccuacgccgacaccaucugcaucggcuaccacgccaacaacagcaccgacaccguggacaccgugcuggagaagaacgugaccgugacccacagcgugaaccugcuggagaacagccacaacggcaagcugugccugcugaagggcaucgccccccugcagcugggcaacugcagcguggccggcuggauccugggcaaccccgagugcgagcugcugaucagcaaggagagcuggagcuacaucguggagaagcccaaccccgagaacggcaccugcuaccccggccacuucgccgacuacgaggagcugagagagcagcugagcagcgugagcagcuucgagagauucgagaucuuccccaaggagagcagcuggcccaaccacaccgugaccggcgugagcgccagcugcagccacaacggcgagagcagcuucuacagaaaccugcuguggcugaccggcaagaacggccuguaccccaaccugagcaagagcuacgccaacaacaaggagaaggaggugcuggugcuguggggcgugcaccacccccccaacaucggcgaccagaaggcccuguaccacaccgagaacgccuacgugagcguggugagcagccacuacagcagaaaguucacccccgagaucgccaagagacccaaggugagagaccaggagggcagaaucaacuacuacuggacccugcuggagcccggcgacaccaucaucuucgaggccaacggcaaccugaucgcccccagauacgccuucgcccugagcagaggcuucggcagcggcaucaucaacagcaacgcccccauggacaagugcgacgccaagugccagaccccccagggcgccaucaacagcagccugcccuuccagaacgugcaccccgugaccaucggcgagugccccaaguacgugagaagcgccaagcugagaauggugaccggccugagaaacauccccagcauccagagcagaggccuguucggcgccaucgccggcuucaucgagggcggcuggaccggcaugguggacggcugguacggcuaccaccaccagaacgagcagggcagcggcuacgccgccgaccagaagagcacccagaacgccaucaacggcaucaccaacaaggugaacagcgugaucgagaagaugaacacccaguucaccgccgugggcaaggaguucaacaagcuggagagaagaauggagaaccugaacaagaagguggacgacggcuucaucgacaucuggaccuacaacgccgagcugcuggugcugcuggagaacgagagaacccuggacuuccacgacagcaacgugaagaaccuguacgagaaggugaagagccagcugaagaacaacgccaaggagaugggcaacggcugcuucgaguucuaccacaagugcaacgacgagugcauggagagcgugaagaacggcaccuacgacuaccccaaguacagcgaggagagcaagcugaacagagagaagaucgacggcgugaagcuggagagcaugggcguguaccagauccuggccaucuacagcaccguggccagcagccuggugcugcuggugagccugggcgccaucagcuucuggaugugcagcaacggcagccugcagugcagaaucugcaucuga

SEQ ID NO: 171346 - RNA, 1698 nt, Artificial Sequence; identical to SEQ ID NO: 171345
  derived and/or modified CDS sequence (opt4) from hemagglutinin__InfluenzaA__AHL90337

SEQ ID NO: 171347 - RNA, 1698 nt, Artificial Sequence; identical to SEQ ID NO: 162548
  derived and/or modified CDS sequence (opt4) from hemagglutinin__InfluenzaA__AHL90349

SEQ ID NO: 171348 - RNA, 1698 nt, Artificial Sequence; identical to SEQ ID NO: 162548
  derived and/or modified CDS sequence (opt4) from hemagglutinin__InfluenzaA__AHL90361

SEQ ID NO: 171349 - RNA, 1698 nt, Artificial Sequence; identical to SEQ ID NO: 171342
  derived and/or modified CDS sequence (opt4) from hemagglutinin__InfluenzaA__AHL90373

SEQ ID NO: 171350 - RNA, 1701 nt, Artificial Sequence
  derived and/or modified CDS sequence (opt4) from hemagglutinin__InfluenzaA__AHL90385
augaagaccaucaucgcccugagcuacauccagugccugguguucgcccagaaguuccccggcaacgacaacagcaccgccacccugugccugggccaccacgccgugcccaacggcaccaucgugaagaccaucaccaacgaccagaucgaggugaccaacgccaccgagcuggugcagagcagcagcaccggcgagaucugcgacagcccccaccagauccuggacggcgagaacugcacccugaucgacgcccugcugggcgacccccagugcgacggcuuccagaacaagaacugggaccuguucguggagagaagcaaggccuacagcaacugcuaccccuacgacgugcccgacuacgccagccugagaagccugguggccagcagcggcacccuggaguucaacaacgagagcuucaacuggaccggcgugacccagaacggcaccagcagcgccugcaucagaagaagcaacaacagcuucuucagcagacugaacuggcugacccacagcaaguucaaguaccccgcccugaacgugaccaugcccaacaacgagaacuucgacaagcuguacaucuggggcgugcaccaccccggcaccgacaacgaccagaucuuccuguacgcccaggccagcggcagaaucaccgugagcaccaagagaagccagcagaccgugauccccaacaucggcagcagacccagagugagaaacauccccagcagaaucagcaucuacuggaccaucgugaagcccggcgacauccugcugaucaacagcaccggcaaccugaucgcccccagaggcuacuucaagaucagaagcggcaagagcagcaucaugagaagcgacgcccccaucggcaagugcaacagcgagugcaucacccccaacggcagcauccccaacgacaagcccuuccagaacgugaacagaaucaccuacggcgccugccccagauacgugaagcagaacacccugaagcuggccaccggcaugagaaacgugcccgagaagcagaccagaggcaucuucggcgccaucgccggcuucaucgagaacggcugggagggcaugguggacggcugguacggcuucagacaccagaacagcgagggcaucggccaggccgccgaccugaagagcacccaggccgccaucgaccagaucaacggcaagcugaacagacugaucggcagaaccaacgagaaguuccaccagaucgagaaggaguucagcgagguggagggcagaauccaggaccuggagaaguacguggaggacaccaagaucgaccuguggagcuacaacgccgagcugcugguggcccuggagaaccagcacaccaucgaccugaccgacagcgagaugaacaagcuguucgagaagaccaagaagcagcugagagagaacgccgaggacaugggcaacggcugcuucaagaucuaccacaagugcgacaacgccugcaucggcagcaucagaaacggcaccuacgaccacgacguguacagagacgaggcccugaacaacagauuccagaucaagggcguggagcugaagagcggcuacaaggacuggauccuguggaucagcuucgccaucagcugcuuccugcugugcaucgcccugcugggcuucaucaugugggccugccagaagggcaacaucagaugcaacaucugcaucuga

SEQ ID NO: 171351 - RNA, 1701 nt, Artificial Sequence
  derived and/or modified CDS sequence (opt4) from hemagglutinin__InfluenzaA__AHL90397
augaagaccaucaucgcccugagcuacauccugugccugguguucgcccagaagcugcccggcaacgacaacagcaccgccacccugugccugggccaccacgccgugcccaacggcaccaucgugaagaccaucaccaacgaccagaucgaggugaccaacgccaccgagcuggugcagagcagcagcaccggcgagaucugcgacagcccccaccagauccuggacggcgagaacugcacccugaucgacgcccugcugggcgacccccagugcgacggcuuccagaacaagaagugggaccuguucguggagagaagcaaggccuacagcaacugcuaccccuacgacgugcccgacuacgccagccugagaagccugguggccagcagcggcacccuggaguucaacaacgagagcuucaacuggaccggcgugacccagaacggcaccagcagcgccugcaucagaagaagcaacaacagcuucuucagcagacugaacuggcugacccaccugaaguucaaguaccccgcccugaacgugaccaugcccaacaacgagcaguucgacaagcuguacaucuggggcgugcaccaccccggcaccgacaacgaccagaucuuccuguacgcccaggccagcggcagaaucaccgugagcaccaagagaagccagcagaccgugauccccaacaucggcagcagacccagagugagaaacauccccagcagaaucagcaucuacuggaccaucgugaagcccggcgacauccugcugaucaacagcaccggcaaccugaucgcccccagaggcuacuucaagaucagaagcggcaagagcagcaucaugagaagcgacgcccccaucggcaagugcagcagcgagugcaucacccccaacggcagcauccccaacgacaagcccuuccagaacgugaacagaaucaccuacggcgccugccccagauacgugaagcagaacacccugaagcuggccaccggcaugagaaacgugcccgagaagcagaccagaggcaucuucggcgccaucgccggcuucaucgagaacggcugggagggcaugguggacggcugguacggcuucagacaccagaacagcgagggcagaggccaggccgccgaccugaagagcacccaggccgccaucgaccagaucaacggcaagcugaacagacugaucggcaagaccaacgagaaguuccaccagaucgagaaggaguucagcgagguggagggcagaauccaggaccuggagaaguacguggaggacaccaagaucgaccuguggagcuacaacgccgagcugcugguggcccuggagaaccagcacaccaucgaccugaccgacagcgagaugaacaagcuguucgagaagaccaagaagcagcugagagagaacgccgaggacaugggcaacggcugcuucaagaucuaccacaagugcgacaacgccugcaucggcagcaucagaaacggcaccuacgaccacgacguguacagagacgaggcccugaacaacagauuccagaucaagggcguggagcugaagagcggcuacaaggacuggauccuguggaucagcuucgccaucagcugcuuccugcugugcguggcccugcugggcuucaucaugugggccugccagaagggcaacaucagaugcaacaucugcaucuga

SEQ ID NO: 171352 - RNA, 1701 nt, Artificial Sequence; identical to SEQ ID NO: 162494
  derived and/or modified CDS sequence (opt4) from hemagglutinin__InfluenzaA__AHL90410

SEQ ID NO: 171353 - RNA, 1701 nt, Artificial Sequence
  derived and/or modified CDS sequence (opt4) from hemagglutinin__InfluenzaA__AHL90422
augaagaccaucaucgcccugagcuacauccugugccugguguucgcccagaagcugcccggcaacgacaacagcaccgccacccugugccugggccaccacgccgugcccaacggcaccaucgugaagaccaucaccaacgaccagaucgaggugaccaacgccaccgagcuggugcagagcagcagcaccggcgagaucugcgacagcccccaccagauccuggacggcgagaacugcacccugaucgacgcccugcugggcgacccccagugcgacggcuuccagaacaagaagugggaccuguucguggagagaagcaaggccuacagcaacugcuaccccuacgacgugcccgacuacgccagccugagaagccugguggccagcagcggcacccuggaguucaacaacgagagcuucaacuggaccggcgugacccagaacggcaccagcagcgccugcaucagaagaagcaacaacagcuucuucagcagacugaacuggcugacccacagcaaguucaaguaccccgcccugaacgugaccaugcccaacaacgaggaguucgacaagcuguacaucuggggcgugcaccaccccggcaccgacaacgaccagaucuuccuguacgcccaggccagcggcagaaucaccgugagcaccaagagaagccagcagaccgugauccccaacaucggcagcagacccagagugagaaacauccccagcagaaucagcaucuacuggaccaucgugaagcccggcgacauccugcugaucaacagcaccggcaaccugaucgcccccagaggcuacuucaagaucagaagcggcaagagcagcaucaugagaagcgacgcccccaucggcaagugcaacagcgagugcaucacccccaacggcagcauccccaacgacaagcccuuccagaacgugaacagaaucaccuacggcgccugccccagauacgugaagcagaacacccugaagcuggccaccggcaugagaaacgugcccgagaagcagaccagaggcaucuucggcgccaucgccggcuucaucgagaacggcugggagggcaugguggacggcugguacggcuucagacaccagaacagcgagggcaucggccaggccgccgaccugaagagcacccaggccgccaucgaccagaucaacggcaagcugaacagacugaucggcaagaccaacgagaaguuccaccagaucgagaaggaguucagcgagguggagggcagaauccaggaccuggagaaguacguggaggacaccaagaucgaccuguggagcuacaacgccgagcugcugguggcccuggagaaccagcacaccaucgaccugaccgacagcgagaugagcaagcuguucgagaagaccaagaagcagcugagagagaacgccgaggacaugggcaacggcugcuucaagaucuaccacaagugcgacaacaccugcaucggcagcaucagaaacggcaccuacgaccacaacguguacagagacgaggcccugaacaacagauuccagaucaagggcguggagcugaagagcggcuacaaggacuggauccuguggaucagcuucgccaucagcugcuuccugcugugcguggcccugcugggcuucaucaugugggccugccagaagggcaacaucagaugcaacaucugcaucuga

SEQ ID NO: 171354 - RNA, 1701 nt, Artificial Sequence; identical to SEQ ID NO: 162494
  derived and/or modified CDS sequence (opt4) from hemagglutinin__InfluenzaA__AHL90434

SEQ ID NO: 171355 - RNA, 1701 nt, Artificial Sequence; identical to SEQ ID NO: 162494
  derived and/or modified CDS sequence (opt4) from hemagglutinin__InfluenzaA__AHL90446

SEQ ID NO: 171356 - RNA, 1701 nt, Artificial Sequence
  derived and/or modified CDS sequence (opt4) from hemagglutinin__InfluenzaA__AHL90458
augaagaccaucaucgcccugagcuacauccugugccugguguucgcccagaagcugcccggcaacgacaacagcaccgccacccugugccugggccaccacgccgugcccaacggcaccaucgugaagaccaucaccaacgaccagaucgaggugaccaacgccaccgagcuggugcagagcagcagcaccggcgagaucugcgacagcccccaccagauccuggacggcgagaacugcgcccugaucgacgcccugcugggcgacccccagugcgacggcuuccagaacaagaagugggaccuguucguggagagaagcaaggccuacagcaacugcuaccccuacgacgugcccgacuacgccagccugagaagccugguggccagcagcggcacccuggaguucaacaacgagagcuucaacuggaccggcgugacccagaacggcaccagcagcgccugcaucagaagaagcaacaacagcuucuucagcagacugaacuggcugacccaccugaaguucaaguaccccgcccugaacgugaccaugcccaacaacgagcaguucgacaagcuguacaucuggggcgugcaccaccccggcaccgacaacgaccagaucuuccuguacgcccaggccagcggcagaaucaccgugagcaccaagagaagccagcagaccgugauccccaacaucggcagcagacccagagugagaaacauccccagcagaaucagcaucuacuggaccaucgugaagcccggcgacauccugcugaucaacagcaccggcaaccugaucgcccccagaggcuacuucaagaucagaagcggcaagagcagcaucaugagaagcgacgcccccaucggcaagugcaacagcgagugcaucacccccaacggcagcauccccaacgacaagcccuuccagaacgugaacagaaucaccuacggcgccugccccagauacgugaagcagaacacccugaagcuggccaccggcaugagaaacgugcccgagaagcagaccagaggcaucuucggcgccaucgccggcuucaucgagaacggcugggagggcaugguggacggcugguacggcuucagacaccagaacagcgagggcagaggccaggccgccgaccugaagagcacccaggccgccaucgaccagaucaacggcaagcugaacagacugaucggcaagaccaacgagaaguuccaccagaucgagaaggaguucagcgagguggagggcagaauccaggaccuggagaaguacguggaggacaccaagaucgaccuguggagcuacaacgccgagcugcugguggcccuggagaaccagcacaccaucgaccugaccgacagcgagaugaacaagcuguucgagaagaccaagaagcagcugagagagaacgccgaggacaugggcaacggcugcuucaagaucuaccacaagugcgacaacgccugcaucggcagcaucagaaacggcaccuacgaccacgacguguacagagacgaggcccugaacaacagauuccagaucaagggcguggagcugaagagcggcuacaaggacuggauccuguggaucagcuucgccaucagcugcuuccugcugugcguggcccugcugggcuucaucaugugggccugccagaagggcaacaucagaugcaacaucugcaucuga

SEQ ID NO: 171357 - RNA, 1701 nt, Artificial Sequence; identical to SEQ ID NO: 162494
  derived and/or modified CDS sequence (opt4) from hemagglutinin__InfluenzaA__AHL90470

SEQ ID NO: 171358 - RNA, 1701 nt, Artificial Sequence; identical to SEQ ID NO: 162494
  derived and/or modified CDS sequence (opt4) from hemagglutinin__InfluenzaA__AHL90482

SEQ ID NO: 171359 - RNA, 1701 nt, Artificial Sequence; identical to SEQ ID NO: 162597
  derived and/or modified CDS sequence (opt4) from hemagglutinin__InfluenzaA__AHL90494

SEQ ID NO: 171360 - RNA, 1701 nt, Artificial Sequence; identical to SEQ ID NO: 162597
  derived and/or modified CDS sequence (opt4) from hemagglutinin__InfluenzaA__AHL90506

SEQ ID NO: 171361 - RNA, 1701 nt, Artificial Sequence
  derived and/or modified CDS sequence (opt4) from hemagglutinin__InfluenzaA__AHL90518
augaagaccaucaucgcccugagcuacauccugugccugguguucgcccagaagcugcccggcaacgacaacagcaccgccacccugugccugggccaccacgccgugcccaacggcaccaucgugaagaccaucaccaacgaccagaucgaggugaccaacgccaccgagcuggugcagagcagcagcaccggcgagaucugcgacagcccccaccagauccuggacggcgagaacugcacccugaucgacgcccugcugggcgacccccagugcgacggcuuccagaacaagaagugggaccuguucguggagagaagcaaggccuacagcaacugcuaccccuacgacgugcccgacuacgccagccugagaagccugguggccagcagcggcacccuggaguucaagaacgagagcuucaacuggaccggcgugacccagaacggcaccagcagcgccugcaucagaagaagcaacaacagcuucuucagcagacugaacuggcugacccaccugaaguucaaguaccccgcccugaacgugaccaugcccaacaaggagaaguucgacaagcuguacaucuggggcgugcaccaccccggcaccgacaacgaccagaucuuccuguacgcccaggccagcggcagaaucaccgugagcaccaagagaagccagcagaccgugauccccaacaucggcagcagacccagagugagaaacauccccagcagaaucagcaucuacuggaccaucgugaagcccggcgacauccugcugaucaacagcaccggcaaccugaucgcccccagaggcuacuucaagaucagaagcggcaagagcagcaucaugagaagcgacgcccccaucggcaagugcaacagcgagugcaucacccccaacggcagcauccccaacgacaagcccuuccagaacgugaacagaaucaccuacggcgccugccccagauacgugaagcagaacacccugaagcuggccaccggcaugagaaacgugcccgagaagcagaccagaggcaucuucggcgccaucgccggcuucaucgagaacggcugggagggcaugguggacggcugguacggcuucagacaccagaacagcgagggcaccggccaggccgccgaccugaagagcacccaggccgccaucgaccagaucaacggcaagcugaacagacugaucggcaagaccaacgagaaguuccaccagaucgagaaggaguucagcgagguggagggcagaauccaggaccuggagaaguacguggaggacaccaagaucgaccuguggagcuacaacgccgagcugcugguggcccuggagaaccagcacaccaucgaccugaccgacagcgagaugaacaagcuguucgagaagaccaagaagcagcugagagagaacgccgaggacaugggcaacggcugcuucaagaucuaccacaagugcgacaacgccugcaucggcagcaucagaaacggcaccuacgaccacgacguguacagagacgaggcccugaacaacagauuccagaucaagggcguggagcugaagagcggcuacaaggacuggauccuguggaucagcuucgccaucagcugcuuccugcugugcguggcccugcugggcuucaucaugugggccugccagaagggcaacaucagaugcaacaucugcaucuga

SEQ ID NO: 171362 - RNA, 1701 nt, Artificial Sequence; identical to SEQ ID NO: 163273
  derived and/or modified CDS sequence (opt4) from hemagglutinin__InfluenzaA__AHL90530

SEQ ID NO: 171363 - RNA, 1701 nt, Artificial Sequence; identical to SEQ ID NO: 162494
  derived and/or modified CDS sequence (opt4) from hemagglutinin__InfluenzaA__AHL90542

SEQ ID NO: 171364 - RNA, 1701 nt, Artificial Sequence; identical to SEQ ID NO: 162494
  derived and/or modified CDS sequence (opt4) from hemagglutinin__InfluenzaA__AHL90554

SEQ ID NO: 171365 - RNA, 1701 nt, Artificial Sequence; identical to SEQ ID NO: 162494
  derived and/or modified CDS sequence (opt4) from hemagglutinin__InfluenzaA__AHL90566

SEQ ID NO: 171366 - RNA, 1701 nt, Artificial Sequence; identical to SEQ ID NO: 162494
  derived and/or modified CDS sequence (opt4) from hemagglutinin__InfluenzaA__AHL90578

SEQ ID NO: 171367 - RNA, 1701 nt, Artificial Sequence; identical to SEQ ID NO: 162597
  derived and/or modified CDS sequence (opt4) from hemagglutinin__InfluenzaA__AHL90590

SEQ ID NO: 171368 - RNA, 1701 nt, Artificial Sequence; identical to SEQ ID NO: 162494
  derived and/or modified CDS sequence (opt4) from hemagglutinin__InfluenzaA__AHL90602

SEQ ID NO: 171369 - RNA, 1701 nt, Artificial Sequence; identical to SEQ ID NO: 162494
  derived and/or modified CDS sequence (opt4) from hemagglutinin__InfluenzaA__AHL90614

SEQ ID NO: 171370 - RNA, 1701 nt, Artificial Sequence
  derived and/or modified CDS sequence (opt4) from hemagglutinin__InfluenzaA__AHL90638
augaagaccaucaucgcccugagcuacauccugugccugguguucgcccagaagcugcccggcaacgacaacagcaccgccacccugugccugggccaccacgccgugcccaacggcaccaucgugaagaccaucaccaacgaccagaucgaggugaccaacgccaccgagcuggugcagagcagcagcaccggcgagaucugcgacagcccccaccagauccuggacggcgagaacugcacccugaucgacgcccugcugggcgacccccagugcgacggcuuccagaacaagaagugggaccuguucguggagagaagcaaggccuacagcaacugcuaccccuacgacgugcccgacuacgccagccugagaagccugguggccagcagcggcacccuggaguucaacaacgagagcuucaacuggaccggcgugacccagaacggcaccagcagcgccugcaucagaagaagcaacaacagcuucuucagcagacugaacuggcugacccaccugaaguucaaguaccccgcccugaacgugaccaugcccaacaacgagcaguucgacaagcuguacaucuggggcgugcaccaccccggcaccgacaacgaccagaucuuccuguacgcccaggccagcggcagaaucaccgugagcaccaagagaagccagcagaccgugauccccaacaucggcagcagacccagagugagaaacauccccagcagaaucagcaucuacuggaccaucgugaagcccggcgacauccugcugaucaacagcaccggcaaccugaucgcccccagaggcuacuucaagaucagaagcagaaagagcagcaucaugagaagcgacgcccccaucggcaagugcaacagcgagugcaucacccccaacggcagcauccccaacgacaagcccuuccagaacgugaacagaaucaccuacggcgccugccccagauacgugaagcagaacacccugaagcuggccaccggcaugagaaacgugcccgagaagcagaccagaggcaucuucggcgccaucgccggcuucaucgagaacggcugggagggcaugguggacggcugguacggcuucagacaccagaacagcgagggcagaggccaggccgccgaccugaagagcacccaggccgccaucgaccagaucaacggcaagcugaacagacugaucggcaagaccaacgagaaguuccaccagaucgagaaggaguucagcgagguggagggcagaauccaggaccuggagaaguacguggaggacaccaagaucgaccuguggagcuacaacgccgagcugcugguggcccuggagaaccagcacaccaucgaccugaccgacagcgagaugaacaagcuguucgagaagaccaagaagcagcugagagagaacgccgaggacaugggcaacggcugcuucaagaucuaccacaagugcgacaacgccugcaucggcagcaucagaaacggcaccuacgaccacgacguguacagagacgaggcccugaacaacagauuccagaucaagggcguggagcugaagagcggcuacaaggacuggauccuguggaucagcuucgccaucagcugcuuccugcugugcguggcccugcugggcuucaucaugugggccugccagaagggcaacaucagaugcaacaucugcaucuga

SEQ ID NO: 171371 - RNA, 1701 nt, Artificial Sequence
  derived and/or modified CDS sequence (opt4) from hemagglutinin__InfluenzaA__AHL90650
augaagaccaucaucgcccugagcuacauccugugccugguguucgcccagaagcugcccggcaacgacaacagcaccgccacccugugccugggccaccacgccgugcccaacggcaccaucgugaagaccaucaccaacgaccagaucgaggugaccaacgccaccgagcuggugcagagcagcagcaccggcgagaucugcgacagcccccaccagauccuggacggcgagaacugcacccugaucgacgcccugcugggcgacccccagugcgacggcuuccagaacaagaagugggaccuguucguggagagaagcaaggccuacagcaacugcuaccccuacgacgugcccgacuacgccagccugagaagccugguggccagcagcggcacccuggaguucaacaacgagagcuucaacuggaccggcgugacccagaacggcaccagcagcgccugcaucagaagaagcaacaacagcuucuucagcagacugaacuggcugacccaccugaaguucaaguaccccgcccugaacgugaccaugcccaacaacgagcaguucgacaagcuguacaucuggggcgugcaccaccccggcaccgacaacgaccagaccuuccuguacgcccaggccagcggcagaaucaccgugagcaccaagagaagccagcagaccgugauccccaacaucggcagcagacccagagugagaaacauccccagcagaaucagcaucuacuggaccaucgugaagcccggcgacauccugcugaucaacagcaccggcaaccugaucgcccccagaggcuacuucaagaucagaagcggcaagagcagcaucaugagaagcgacgcccccaucggcaagugcaacagcgagugcaucacccccaacggcagcauccccaacgacaagcccuuccagaacgugaacagaaucaccuacggcgccugccccagauacgugaagcagaacacccugaagcuggccaccggcaugagaaacgugcccgagaagcagaccagaggcaucuucggcgccaucgccggcuucaucgagaacggcugggagggcaugguggacggcugguacggcuucagacaccagaacagcgagggcagaggccaggccgccgaccugaagagcacccaggccgccaucgaccagaucaacggcaagcugaacagacugaucggcaagaccaacgagaaguuccaccagaucgagaaggaguucagcgagguggagggcagaauccaggaccuggagaaguacguggaggacaccaagaucgaccuguggagcuacaacgccgagcugcugguggcccuggagaaccagcacaccaucgaccugaccgacagcgagaugaacaagcuguucgagaagaccaagaagcagcugagagagaacgccgaggacaugggcaacggcugcuucaagaucuaccacaagugcgacaacgccugcaucggcagcaucagaaacggcaccuacgaccacgacguguacagagacgaggcccugaacaacagauuccagaucaagggcguggagcugaagagcggcuacaaggacuggauccuguggaucagcuucgccaucagcugcuuccugcugugcguggcccugcugggcuucaucaugugggccugccagaagggcaacaucagaugcaacaucugcaucuga

SEQ ID NO: 171372 - RNA, 1701 nt, Artificial Sequence; identical to SEQ ID NO: 162494
  derived and/or modified CDS sequence (opt4) from hemagglutinin__InfluenzaA__AHL90662

SEQ ID NO: 171373 - RNA, 1701 nt, Artificial Sequence
  derived and/or modified CDS sequence (opt4) from hemagglutinin__InfluenzaA__AHL90674
augaagaccaucaucgcccugagcuacauccugugccugguguucgcccagaagcugcccggcaacgacaacagcaccgccacccugugccugggccaccacgccgugcccaacggcaccaucgugaagaccaucaccaacgaccagaucgaggugaccaacgccaccgagcuggugcagagcagcagcaccggcgagaucugcgacagcccccaccagauccuggacggcgagaacugcacccugaucgacgcccugcugggcgacccccagugcgacggcuuccagaacaagaagugggaccuguucguggagagaagcaaggccuacagcaacugcuaccccuacgacgugcccgacuacgccagccugagaagccugguggccagcagcggcacccuggaguucaacaacgagagcuucaacuggaccggcgugacccagaacggcaccagcagcgccugcaucagaagaagcaacaacagcuucuucagcagacugaacuggcugacccaccugaaguucaaguaccccgcccugaacgugaccaugcccaacaacgagaaguucgacaagcuguacaucuggggcgugcaccaccccggcaccgacaacgaccagaucuuccuguacgcccaggccagcggcagaaucaccgugagcaccaagagaagccagcagaccgugauccccaacaucggcagcagacccagagugagaaacauccccagcagaaucagcaucuacuggaccaucgugaagcccggcgacauccugcugaucaacagcaccggcaaccugaucgcccccagaggcuacuucaagaucagaagcggcaagagcagcaucaugagaagcgacgcccccaucggcaagugcaacagcgagugcaucacccccaacggcagcauccccaacgacaagcccuuccagaacgugaacagaaucaccuacggcgccugccccagauacgugaagcagaacacccugaagcuggccaccggcaugagaaacgugcccgagaagcagaccagaggcaucuucggcgccaucgccggcuucaucgagaacggcugggagggcaugguggacggcugguacggcuucagacaccagaacagcgagggcaucggccaggccgccgaccugaagagcacccaggccgccaucgaccagaucaacggcaagcugaacagacugaucggcaagaccaacgagaaguuccaccagaucgagaaggaguucagcgagguggagggcagaauccaggaccuggagaaguacguggaggacaccaagaucgaccuguggagcuacaacgccgagcugcugguggcccuggagaaccagcacaccaucgaccugaccgacagcgagaugaacaagcuguucgagaagaccaagaagcagcugagagagaacgccgaggacaugggcaacggcugcuucaagaucuaccacaagugcgacaacgugugcaucggcagcaucagaaacggcaccuacgaccacgacguguacagagacgaggcccugaacaacagauuccagaucaagggcguggagcugaagagcggcuacaaggacuggauccuguggaucagcuucgccaucagcugcuuccugcugugcguggcccugcugggcuucaucaugugggccugccagaagggcaacaucagaugcaacaucugcaucuga

SEQ ID NO: 171374 - RNA, 1701 nt, Artificial Sequence
  derived and/or modified CDS sequence (opt4) from hemagglutinin__InfluenzaA__AHL90686
augaagaccaucaucgcccugagcuacauccugugccugguguucgcccagaagcugcccggcaacgacaacagcaccgccacccugugccugggccaccacgccgugcccaacggcaccaucgugaagaccaucaccaacgaccagaucgaggugaccaacgccaccgagcuggugcagagcagcagcaccggcgagaucugcgacagcccccaccagauccuggacggcgagaacugcacccugaucgacgcccugcugggcgacccccagugcgacggcuuccagaacaagaagugggaccuguucguggagagaagcaaggccuacagcaacugcuaccccuacgacgugcccgacuacgccagccugagaagccugguggccagcagcggcacccuggaguucaacaacgagagcuucaacuggaccggcgugacccagaacggcaccagcagcgccugcaucagaagaagcaacaacagcuucuucagcagacugaacuggcugacccaccugaaguucaaguaccccgcccugaacgugaccaugcccaacaacgagcaguucgacaagcuguacaucuggggcgugcaccaccccggcaccgacaacgaccagaucuuccuguacgcccaggccagcggcagaaucaccgugagcaccaagagaagccagcagaccgugauccccaacaucggcagcagacccagagugagaaacauccccagcagaaucagcaucuacuggaccaucgugaagcccggcgacauccugcugaucaacagcaccggcaaccugaucgcccccagaggcuacuucaagaucagaagcggcaagagcagcaucaugagaagcgacgcccccaucggcaagugcaacagcgagugcaucacccccaacggcagcauccccaacgacaagcccuuccagaacgugaacagaaucaccuacggcgccugccccagauacgugaagcagaacacccugaagcuggccaccggcaugagaaacgugcccgagaagcagaccagaggcaucuucggcgccaucgccggcuucaucgagaacggcugggagggcaugguggacggcugguacggcuucagacaccagaacagcgagggcagaggccaggccgccgaccugaagagcacccaggccgccaucgaccagaucaacggcaagcugaacagacugaucggcaagaccaacgagaaguuccaccagaucgagaaggaguucagcgagguggagggcagaauccaggaccuggagaaguacguggaggacaccaagaucgaccuguggagcuacaacgccgagcugcugguggccauggagaaccagcacaccaucgaccugaccgacagcgagaugaacaagcuguucgagaagaccaagaagcagcugagagagaacgccgaggacaugggcaacggcugcuucaagaucuaccacaagugcgacaacgccugcaucggcagcaucagaaacggcaccuacgaccacgacguguacagagacgaggcccugaacaacagauuccagaucaagggcguggagcugaagagcggcuacaaggacuggauccuguggaucagcuucgccaucagcugcuuccugcugugcguggcccugcugggcuucaucaugugggccugccagaagggcaacaucagaugcaacaucugcaucuga

SEQ ID NO: 171375 - RNA, 1701 nt, Artificial Sequence; identical to SEQ ID NO: 162494
  derived and/or modified CDS sequence (opt4) from hemagglutinin__InfluenzaA__AHL90698

SEQ ID NO: 171376 - RNA, 1701 nt, Artificial Sequence; identical to SEQ ID NO: 162494
  derived and/or modified CDS sequence (opt4) from hemagglutinin__InfluenzaA__AHL90710

SEQ ID NO: 171377 - RNA, 1698 nt, Artificial Sequence; identical to SEQ ID NO: 166032
  derived and/or modified CDS sequence (opt4) from hemagglutinin__InfluenzaA__AHL90722

SEQ ID NO: 171378 - RNA, 1698 nt, Artificial Sequence
  derived and/or modified CDS sequence (opt4) from hemagglutinin__InfluenzaA__AHL90746
augaaggugaagcugcuggugcugcugugcaccuucaccgccaccuacgccgacaccaucugcaucggcuaccacgccaacaacagcaccgacaccguggacaccgugcuggagaagaacgugaccgugacccacagcgugaaccugcuggagaacagccacaacggcaagcugugccugcugaagggcaucgccccccugcagcugggcaacugcagcguggccggcuggauccugggcaaccccgagugcgagcugcugaucagcaaggagagcuggagcuacaucguggagaagcccaaccccgagaacggcaccugcuaccccggccacuucgccgacuacgaggagcugagagagcagcugagcagcgugagcagcuucaagagauucgagaucuuccccaaggagagcagcuggcccaaccacaccgugaccggcgugagcgccagcugcagccacaacggcgagagcagcuucuacagaaaccugcuguggcugaccggcaagaacggccuguaccccaaccugagcaagagcuacgccaacaacaaggagaaggaggugcuggugcuguggggcgugcaccacccccccaacaucguggaccagaagacccuguacagaaccgagaacgccuacgugagcguggugagcagccacuacagcagaaaguucacccccgagaucgccaagagacccaaggugagagaccaggagggcagaaucaacuacuacuggacccugcuggagcccggcgacaccaucaucuucgaggccaacggcaaccugaucgcccccagauacgccuucgcccugagcagaggcuucggcagcggcaucaucaacagcaacgcccccaugggcaagugcgacgccaagugccagaccccccagggcgccaucaacagcagccugcccuuccagaacgugcaccccgugaccaucggcgagugccccaaguacgugagaagcgccaagcugagaauggugaccggccugagaaacauccccagcauccagagcagaggccuguucggcgccaucgccggcuucaucgagggcggcuggaccggcaugguggacggcugguacggcuaccaccaccagaacgagcagggcagcggcuacgccgccgaccagaagagcacccagaacgccaucaacggcaucaccaacaaggugaacagcgugaucgagaagaugaacacccaguucaccgccgugggcaaggaguucaacaagcuggagagaagaauggagaaccugaacaagaagguggacgacggcuucaucgacaucuggaccuacaacgccgagcugcuggugcugcuggagaacgagagaacccuggacuuccacgacagcaacgugaagaaccuguacgagaaggugaagagccagcugaagaacaacgccaaggagaucggcaacggcugcuucgaguucuaccacaagugcaacgacgagugcauggagagcgugaagaacggcaccuacgacuaccccaaguacagcgaggagagcaagcugaacagagagaagaucgacggcgugaagcuggagagcaugggcguguaccagauccuggccaucuacagcaccguggccagcagccuggugcugcuggugagccugggcgccaucagcuucuggaugugcagcaacggcagccugcagugcagaaucugcaucuga

SEQ ID NO: 171379 - RNA, 1698 nt, Artificial Sequence; identical to SEQ ID NO: 163191
  derived and/or modified CDS sequence (opt4) from hemagglutinin__InfluenzaA__AHL90758

SEQ ID NO: 171380 - RNA, 1698 nt, Artificial Sequence
  derived and/or modified CDS sequence (opt4) from hemagglutinin__InfluenzaA__AHL90770
augaaggugaagcugcuggugcugcugugcaccuucaccgccaccuacgccgacaccaucugcaucggcuaccacgccaacaacagcaccgacaccguggacaccgugcuggagaagaacgugaccgugacccacagcgugaaccugcuggagaacagccacaacggcaagcugugccugcugaagggcaucgccccccugcagcugggcaacugcagcguggccggcuggauccugggcaaccccgagugcgagcugcugaucagcaaggagagcuggagcuacaucguggagaagcccaaccccgagaacggcaccugcuaccccggccacuucgccgacuacgaggagcugagagagcagcugagcagcgugagcagcuucgagagauucgagaucuuccccaaggacagcagcuggcccaaccacaccgugaccggcgugagcgccagcugcagccacaacggcgagagcagcuucuacagaaaccugcuguggcugaccggcaagaacggccuguaccccaaccugagcaagagcuacgccaacaacaaggagaaggaggugcuggugcuguggggcgugcaccacccccccagcaucaacgaccagaagacccuguaccacaccgagaacgccuacgugagcguggugagcagccaccacagcagaaaguucacccccgagaucgccaagagacccaaggugagagaccaggagggcagaaucaacuacuacuggacccugcuggagcccggcgacaccaucaucuucgaggccaacggcaaccugaucgcccccagauacgccuucgcccugagcagaggcuucggcagcggcaucaucaacagcaacgcccccauggacaagugcgacgccaagugccagaccccccagggcgccaucaacagcagccugcccuuccagaacgugcaccccgugaccaucggcgagugccccaaguacgugagaagcgccaagcugagaauggugaccggccugagaaacauccccagcauccagagcagaggccuguucggcgccaucgccggcuucaucgagggcggcuggaccggcaugguggacggcugguacggcuaccaccaccagaacgagcagggcagcggcuacgccgccgaccagaagagcacccagaacgccaucaacggcaucaccaacaaggugaacagcgugaucgagaagaugaacacccaguucaccgccgugggcaaggaguucaacaagcuggagagaagaauggagaaccugaacaagaagguggacgacggcuucaucgacaucuggaccuacaacgccgagcugcuggugcugcuggagaacgagagaacccuggacuuccacgacagcaacgugaagaaccuguacgagaaggugaagagccagcugaagaacaacgccaaggagaucggcaacggcugcuucgaguucuaccacaagugcaacgacgagugcauggagagcgugaagaacggcaccuacgacuaccccaaguacagcgaggagagcaagcugaacagagagaagaucgacggcgugaagcuggagagcaugggcguguaccagauccugaccaucuacagcaccguggccagcagccuggugcugcuggugagccugggcgccaucagcuucuggaugugcagcaacggcagccugcagugcagaaucugcaucuga

SEQ ID NO: 171381 - RNA, 1698 nt, Artificial Sequence; identical to SEQ ID NO: 163676
  derived and/or modified CDS sequence (opt4) from hemagglutinin__InfluenzaA__AHL90782

SEQ ID NO: 171382 - RNA, 1698 nt, Artificial Sequence
  derived and/or modified CDS sequence (opt4) from hemagglutinin__InfluenzaA__AHL90794
augaaggugaagcugcuggugcugcugugcaccuucaccgccaccuacgccgacaccaucugcaucggcuaccacgccaacaacagcaccgacaccguggacaccgugcuggagaagaacgugaccgugacccacagcgugaaccugcuggagaacagccacaacggcaagcugugccugcugaagggcaucgccccccugcagcugggcaacugcagcguggccggcuggauccugggcaaccccgagugcgagcugcugaucagcaaggagagcuggagcuacaucguggagaagcccaaccccgagaacggcaccugcuaccccggccacuucgccgacuacgaggagcugagagagcagcugagcagcgugagcagcuucgagagauucgagaucuuccccaaggagagcagcuggcccaaccacaccgugaccggcgugagcgccagcugcagccacaacggcgagagcagcuucuacagaaaccugcuguggcugaccggcaagaacggccuguaccccaaccugagcaagagcuacgccaacaacaaggagaaggaggugcuggugcuguggggcgugcaccacccccccaacaucggcgaccagaacacccuguaccacaccgagaacgccuacgugagcguggugagcagccacuacagcagaaaguucacccccgagaucgccaagagacccaaggugagagaccaggagggcagaaucaacuacuacuggacccugcuggagcccggcgacaccaucaucuucgaggccaacggcaaccugaucgcccccagauacgccuucgcccugagcagaggcuucggcagcggcaucaucaacagcaacgcccccauggacaagugcgacgccaagugccagaccccccagggcgccaucaacagcagccugcccuuccagaacgugcaccccgugaccaucggcgagugccccaaguacgugagaagcgccaagcugagaauggugaccggccugagaaacauccccagcauccagagcagaggccuguucggcgccaucgccggcuucaucgagggcggcuggaccggcaugguggacggcugguacggcuaccaccaccagaacgagcagggcagcggcuacgccgccgaccagaagagcacccagaacgccaucaacggcaucaccaacaaggugaacagcgugaucgagaagaugaacacccaguucaccgccgugggcaaggaguucaacaagcuggagagaagaauggagaaccugaacaagaagguggacgacggcuucaucgacaucuggaccuacaacgccgagcugcuggugcugcuggagaacgagagaacccuggacuuccacgacagcaacgugaagaaccuguacgagaaggugaagagccagcugaagaacaacgccaaggagaucggcaacggcugcuucgaguucuaccacaagugcaacgacgagugcauggagagcgugaagaacggcaccuacgacuaccccaaguacagcgaggagagcaagcugaacagagagaagaucgacggcgugaagcuggagagcaugggcguguaccagauccuggccaucuacagcaccguggccagcagccuggugcugcuggugagccugggcgccaucagcuucuggaugugcagcaacggcagccugcagugcagaaucugcaucuga

SEQ ID NO: 171383 - RNA, 1698 nt, Artificial Sequence
  derived and/or modified CDS sequence (opt4) from hemagglutinin__InfluenzaA__AHL90806
augaaggugaagcugcuggugcugcugugcaccuucaccgccaccuacgccgacaccaucugcaucggcuaccacgccaacaacagcaccgacaccguggacaccgugcuggagaagaacgugaccgugacccacagcgugaaccugcuggagaacagccacaacggcaagcugugccugcugaagggcaucgccccccugcagcugggcaacugcagcguggccggcuggauccugggcaaccccgagugcgagcugcugaucagcaaggagagcuggagcuacaucguggagaagcccaaccccgagaacggcaccugcuaccccggccacuucgccgacuacgaggagcugagagagcagcugagcagcgugagcagcuucgagagauucgagaucuuccccaaggagagcagcuggcccaaccacaccgugaccggcgugagcgccagcugcagccacaacggcgagagcagcuucuacagaaaccugcuguggcugaccggcaagaacggccuguaccccaaccugagcaagagcuacgccaacaacaaggagaaggaggugcuggugcuguggggcgugcaccacccccccaacaucguggaccagaagacccuguacagaaccgagaacgccuacgugagcguggugagcagccacuacagcagaaaguucacccccgagaucgccaagagacccaaggugagagaccaggagggcagaaucaacuacuacuggacccugcuggagcccggcgacaccaucaucuucgaggccaacggcaaccugaucgcccccagauacgccuucgcccugagcagaggcuucggcagcggcaucaucaacagcaacgcccccauggacaagugcgacgccaagugccagaccccccagggcgccaucaacagcagccugcccuuccagaacgugcaccccgugaccaucggcgagugccccaaguacgugagaagcgccaagcugagaauggugaccggccugagaaacauccccagcauccagagcagaggccuguucggcgccaucgccggcuucaucgagggcggcuggaccggcaugguggacggcugguacggcuaccaccaccagaacgagcagggcagcggcuacgccgccgaccagaagagcacccagaacgccaucaacggcaucaccaacaaggugaacagcgugaucgagaagaugaacacccaguucaccgccgugggcaaggaguucaacaagcuggagagaagaauggagaaccugaacaagaagguggacgacggcuucaucgacaucuggaccuacaacgccgagcugcuggugcugcuggagaacgagagaacccuggacuuccacgacagcaacgugaagaaccuguacgagaaggugaagagccagcugaagaacaacgccaaggagaucggcaacggcugcuucgaguucuaccacaagugcaacgacgagugcauggagagcgugaagaacggcaccuacgacuaccccaaguacagcgaggagagcaagcugaacagagagaagaucgacggcgugaagcuggagagcaugggcguguaccagauccuggccaucuacagcaccguggccagcagccuggugcugcugaucagccugggcgccaucagcuucuggaugugcagcaacggcagccugcagugcagaaucugcaucuga

SEQ ID NO: 171384 - RNA, 1698 nt, Artificial Sequence; identical to SEQ ID NO: 166032
  derived and/or modified CDS sequence (opt4) from hemagglutinin__InfluenzaA__AHL90818

SEQ ID NO: 171385 - RNA, 1698 nt, Artificial Sequence; identical to SEQ ID NO: 166032
  derived and/or modified CDS sequence (opt4) from hemagglutinin__InfluenzaA__AHL90830

SEQ ID NO: 171386 - RNA, 1698 nt, Artificial Sequence; identical to SEQ ID NO: 163191
  derived and/or modified CDS sequence (opt4) from hemagglutinin__InfluenzaA__AHL90842

SEQ ID NO: 171387 - RNA, 1698 nt, Artificial Sequence; identical to SEQ ID NO: 165573
  derived and/or modified CDS sequence (opt4) from hemagglutinin__InfluenzaA__AHL90854

SEQ ID NO: 171388 - RNA, 1698 nt, Artificial Sequence; identical to SEQ ID NO: 163191
  derived and/or modified CDS sequence (opt4) from hemagglutinin__InfluenzaA__AHL90866

SEQ ID NO: 171389 - RNA, 1698 nt, Artificial Sequence; identical to SEQ ID NO: 165573
  derived and/or modified CDS sequence (opt4) from hemagglutinin__InfluenzaA__AHL90878

SEQ ID NO: 171390 - RNA, 1698 nt, Artificial Sequence; identical to SEQ ID NO: 166032
  derived and/or modified CDS sequence (opt4) from hemagglutinin__InfluenzaA__AHL90890

SEQ ID NO: 171391 - RNA, 1698 nt, Artificial Sequence; identical to SEQ ID NO: 165573
  derived and/or modified CDS sequence (opt4) from hemagglutinin__InfluenzaA__AHL90902

SEQ ID NO: 171392 - RNA, 1698 nt, Artificial Sequence; identical to SEQ ID NO: 163191
  derived and/or modified CDS sequence (opt4) from hemagglutinin__InfluenzaA__AHL90914

SEQ ID NO: 171393 - RNA, 1698 nt, Artificial Sequence; identical to SEQ ID NO: 165573
  derived and/or modified CDS sequence (opt4) from hemagglutinin__InfluenzaA__AHL90938

SEQ ID NO: 171394 - RNA, 1698 nt, Artificial Sequence; identical to SEQ ID NO: 165573
  derived and/or modified CDS sequence (opt4) from hemagglutinin__InfluenzaA__AHL90950

SEQ ID NO: 171395 - RNA, 1698 nt, Artificial Sequence; identical to SEQ ID NO: 165573
  derived and/or modified CDS sequence (opt4) from hemagglutinin__InfluenzaA__AHL90962

SEQ ID NO: 171396 - RNA, 1698 nt, Artificial Sequence
  derived and/or modified CDS sequence (opt4) from hemagglutinin__InfluenzaA__AHL90974
augaaggugaagcugcuggugcugcugugcaccuucaccgccaccuacgccgacaccaucugcaucggcuaccacgccaacaacagcaccgacaccguggacaccgugcuggagaagaacgugaccgugacccacagcgugaaccugcuggagaacagccacaacggcaagcugugccugcugaagggcaucgccccccugcagcugggcaacugcagcguggccggcuggauccugggcaaccccgagugcgagcugcugaucagcaaggagagcuggagcuacaucguggagaagcccaaccccgagaacggcaccugcuaccccggccacuucgccgacuacgaggagcugagagagcagcugagcagcgugagcagcuucgagagauucgagaucuuccccaaggagagcagcuggcccaaccacaccgugaccggcgugagcgccagcugcagccacaacggcgagagcagcuucuacagaaaccugcuguggcugaccggcaagaacggccuguaccccaaccugagcaagagcuacgccaacaacaaggagaaggaggugcuggugcuguggggcgugcaccacccccccagcaucagcgaccagaagacccuguaccacaccgagaacgccuacgugagcguggugagcagccacuacagcagaaaguucacccccgagguggccaagagacccaaggugagagaccaggagggcagaaucaacuacuacuggacccugcuggagcccggcgacaccaucaucuucgaggccaacggcaaccugaucgcccccagauacgccuucgcccugagcagaggcuucggcagcggcaucaucaacagcaacgcccccauggacaagugcgacgccaagugccagaccccccagggcgccaucaacagcagccugcccuuccagaacgugcaccccgugaccaucggcgagugccccaaguacgugagaagcgccaagcugagaauggugaccggccugagaaacauccccagcauccagagcagaggccuguucggcgccaucgccggcuucaucgagggcggcuggaccggcaugguggacggcugguacggcuaccaccaccagaacgagcagggcagcggcuacgccgccgaccagaagagcacccagaacgccaucaacggcaucaccaacaaggugaacagcgugaucgagaagaugaacacccaguucaccgccgugggcaaggaguucaacaagcuggagagaagaauggagaaccugaacaagaagguggacgacggcuucaucgacaucuggaccuacaacgccgagcugcuggugcugcuggagaacgagagaacccuggacuuccacgacagcaacgugaagaaccuguacgagaaggugaagggccagcugaagaacaacgccaaggagaucggcaacggcugcuucgaguucuaccacaagugcaacgacgagugcauggagagcgugaagaacggcaccuacgacuaccccaaguacagcgaggagagcaagcugaacagagagaagaucgacggcgugaagcuggagagcaugggcguguaccagauccuggccaucuacagcaccguggccagcagccuggugcugcuggugagccugggcgccaucagcuucuggaugugcagcaacggcagccugcagugcagaaucugcaucuga

SEQ ID NO: 171397 - RNA, 1698 nt, Artificial Sequence
  derived and/or modified CDS sequence (opt4) from hemagglutinin__InfluenzaA__AHL90986
augaaggugaagcugcuggugcugcugugcaccuucaccgccaccuacgccgacaccaucugcaucggcuaccacgccaacaacagcaccgacaccguggacaccgugcuggagaagaacgugaccgugacccacagcgugaaccugcuggagaacagccacaacggcaagcugugccugcugaagggcaucgccccccugcagcugggcaacugcagcguggccggcuggauccugggcaaccccgagugcgagcugcugaucagcaaggagagcuggagcuacaucguggagaagcccaaccccgagaacggcaccugcuaccccggccacuucgccgacuacgaggagcugagagagcagcugagcagcgugagcagcuucgagagauucgagaucuuccccaaggagagcagcuggcccaaccacaccgugaccggcgugagcgccagcugcagccacaacggcgagagcagcuucuacagaaaccugcuguggcugaccgugaagaacggccuguaccccaaccugagcaagagcuacgccaacaacaaggagaaggaggugcuggugcuguggggcgugcaccacccccccaacaucguggaccagaagacccuguacagaaccgagaacgccuacgugagcguggugagcagccacuacagcagaaaguucacccccgagaucgccaagagacccaaggugagagaccaggagggcagaaucaacuacuacuggacccugcuggagcccggcgacaccaucaucuucgaggccaacggcaaccugaucgcccccagauacgccuucgcccugagcaagggcuucggcagcggcaucaucaacagcaacgcccccauggacaagugcgacgccaagugccagacccccagaggcgccaucaacagcagccugcccuuccagaacgugcaccccgugaccaucggcgagugccccaaguacgugagaagcgccaagcugagaauggugaccggccugagaaacauccccagcauccagagcagaggccuguucggcgccaucgccggcuucaucgagggcggcuggaccggcaugguggacggcugguacggcuaccaccaccagaacgagcagggcagcggcuacgccgccgaccagaagagcacccagaacgccaucaacggcaucaccaacaaggugaacagcgugaucgagaagaugaacacccaguucaccgccgugggcaaggaguucaacaagcuggagagaagaauggagaaccugaacaagaagguggacgacggcuucaucgacaucuggaccuacaacgccgagcugcuggugcugcuggagaacgagagaacccuggacuuccacgacagcaacgugaagaaccuguacgagaaggugaagagccagcugaagaacaacgccaaggagaucggcaacggcugcuucgaguucuaccacaagugcaacgacgagugcauggagagcgugaagaacggcaccuacgacuaccccaaguacagcgaggagagcaagcugaacagagagaagaucgacggcgugaagcuggagagcaugggcguguaccagauccuggccaucuacagcaccguggccagcagccuggugcugcuggugagccugggcgccaucagcuucuggaugugcagcaacggcagccugcagugcagaaucugcaucuga

SEQ ID NO: 171398 - RNA, 1698 nt, Artificial Sequence
  derived and/or modified CDS sequence (opt4) from hemagglutinin__InfluenzaA__AHL91010
augaaggugaagcugcuggugcugcugugcaccuucaccgccaccuacgccgacaccaucugcaucggcuaccacgccaacaacagcaccgacaccguggacaccgugcuggagaagaacgugaccgugacccacagcgugaaccugcuggagaacagccacaacggcaagcugugccugcugaagggcaucgccccccugcagcugggcaacugcagcguggccggcuggauccugggcaaccccgagugcgagcugcugaucagcaaggagagcuggagcuacaucguggagaagcccaaccccgagaacggcaccugcuaccccggccacuucgccgacuacgaggagcugagagagcagcugagcagcgugagcagcuucgagagauucgagaucuuccccaaggacagcagcuggcccaaccacaccgugaccggcgugagcgccagcugcagccacaacggcgagagcagcuucuacagaaaccugcuguggcugaccggcaagaacggccuguaccccaaccugagcaagagcuacgccaacaacaaggagaaggaggugcuggugcuguggggcgugcaccacccccccagcaucaacgaccagaagacccuguaccacaccgagaacgccuacgugagcguggugagcagccacuacagcagaaaguucacccccgagaucgccaagagacccaaggugagagaccaggagggcagaaucaacuacuacuggacccugcuggagcccggcgacaccaucaucuucgaggccaacggcaaccugaucgcccccagauacgccuucgcccugagcagaggcuucggcagcggcaucaucaacagcaacgcccccauggacaagugcgacgccaagugccagaccccccagggcgccaucaacagcagccugcccuuccagaacgugcaccccgugaccaucggcgagugccccaaguacgugagaagcgccaagcugagaauggugaccggccugagaaacauccccagcauccagagcagaggccuguucggcgccaucgccggcuucaucgagggcggcuggaccggcaugguggacggcugguacggcuaccaccaccagaacgagcagggcagcggcuacgccgccgaccagaagagcacccagaacgccaucaacggcaucaccaacaaggugaacagcgugaucgagaagaugaacacccaguucaccgccgugggcaaggaguucaacaagcuggagagaagaauggagaaccugaacaagaagguggacgacggcuucaucgacaucuggaccuacaacgccgagcugcuggugcugcuggagaacgagagaacccuggacuuccacgacagcaacgugaagaaccuguacgagaaggugaagagccagcugaagaacaacgccaaggagaucggcaacggcugcuucgaguucuaccacaagugcaacgacgagugcauggagagcgugaagaacggcaccuacgacuaccccaaguacagcgaggagagcaagcugaacagagagaagaucgacggcgugaagcuggagagcaugggcguguaccagauccugaccaucuacagcaccguggccagcagccuggugcugcuggugagccugggcgccaucagcuucuggaugugcagcaacggcagccugcagugcagaaucugcaucuga

SEQ ID NO: 171399 - RNA, 1698 nt, Artificial Sequence
  derived and/or modified CDS sequence (opt4) from hemagglutinin__InfluenzaA__AHL91022
augaaggugaagcugcuggugcugcugugcaccuucaccgccaccuacgccgacaccaucugcaucggcuaccacgccaacaacagcaccgacaccguggacaccgugcuggagaagaacgugaccgugacccacagcgugaaccugcuggagaacagccacaacggcaagcugugccugcugaagggcaucgccccccugcagcugggcaacugcagcguggccggcuggauccugggcaaccccgagugcgagcugcugaucagcaaggagagcuggagcuacaucguggagaagcccaaccccgagaacggcaccugcuaccccggccacuucgccgacuacgaggagcugagagagcagcugagcagcgugagcagcuucgagagauucgagaucuuccccaaggacagcagcuggcccaaccacaccgugaccggcgugagcgccagcugcagccacaacggcgagaacagcuucuacagaaaccugcuguggcugaccggcaagaacggccuguaccccaaccugagcaagagcuacgccaacaacaaggagaaggaggugcuggugcuguggggcgugcaccacccccccagcaucaacgaccagaagacccuguaccacaccgagaacgccuacgugagcguggugagcagccacuacagcagaaaguucacccccgagaucgccaagagacccaaggugagagaccaggagggcagaaucaacuacuacuggacccugcuggagcccggcgacaccaucaucuucgaggccaacggcaaccugaucgcccccagauacgccuucgcccugagcagaggcuucggcagcggcaucaucaacagcaacgcccccauggacaagugcgacgccaagugccagaccccccagggcgccaucaacagcagccugcccuuccagaacgugcaccccgugaccaucggcgagugccccaaguacgugagaagcgccaagcugagaauggugaccggccugagaaacauccccagcauccagagcagaggccuguucggcgccaucgccggcuucaucgagggcggcuggaccggcaugguggacggcugguacggcuaccaccaccagaacgagcagggcagcggcuacgccgccgaccagaagagcacccagaacgccaucaacggcaucaccaacaaggugaacagcgugaucgagaagaugaacacccaguucaccgccgugggcaaggaguucaacaagcuggagagaagaauggagaaccugaacaagaagguggacgacggcuucaucgacaucuggaccuacaacgccgagcugcuggugcugcuggagaacgagagaacccuggacuuccacgacagcaacgugaagaaccuguacgagaaggugaagagccagcugaagaacaacgccaaggagaucggcaacggcugcuucgaguucuaccacaagugcaacgacgagugcauggagagcgugaagaacggcaccuacgacuaccccaaguacagcgaggagagcaagcugaacagagagaagaucgacggcgugaagcuggagagcaugggcguguaccagauccugaccaucuacagcaccguggccagcagccuggugcugcuggugagccugggcgccaucagcuucuggaugugcagcaacggcagccugcagugcagaaucugcaucuga

SEQ ID NO: 171400 - RNA, 1701 nt, Artificial Sequence; identical to SEQ ID NO: 162494
  derived and/or modified CDS sequence (opt4) from hemagglutinin__InfluenzaA__AHL91034

SEQ ID NO: 171401 - RNA, 1701 nt, Artificial Sequence; identical to SEQ ID NO: 165560
  derived and/or modified CDS sequence (opt4) from hemagglutinin__InfluenzaA__AHL91046

SEQ ID NO: 171402 - RNA, 1701 nt, Artificial Sequence; identical to SEQ ID NO: 171374
  derived and/or modified CDS sequence (opt4) from hemagglutinin__InfluenzaA__AHL91058

SEQ ID NO: 171403 - RNA, 1701 nt, Artificial Sequence
  derived and/or modified CDS sequence (opt4) from hemagglutinin__InfluenzaA__AHL91070
augaagaccaucaucgcccugagcuacauccugugccugguguucgcccagaagcugcccggcaacgacaacagcauggccacccugugccugggccaccacgccgugcccaacggcaccaucgugaagaccaucaccaacgaccagaucgaggugaccaacgccaccgagcuggugcagagcagcagcaccggcgagaucugcgacagcccccaccagauccuggacggcgagaacugcacccugaucgacgcccugcugggcgacccccagugcgacggcuuccagaacaagaagugggaccuguucguggagagaagcaaggccuacagcaacugcuaccccuacgacgugcccgacuacgccagccugagaagccugguggccagcagcggcacccuggaguucaacaacgagagcuucaacuggaccggcgugacccagaacggcaccagcagcgccugcaugagaagaagcaacaacagcuucuucagcagacugaacuggcugacccaccugaaguucaaguaccccgcccugaacgugaccaugcccaacaacgagcaguucgacaagcuguacaucuggggcgugcaccaccccggcaccgacaacgaccagaucuuccuguacgcccaggccagcggcagaaucaccgugagcaccaagagaagccagcagaccgugauccccaacaucggcagcagacccagagugagaaacauccccagcagaaucagcaucuacuggaccaucgugaagcccggcgacauccugcugaucaacagcaccggcaaccugaucgcccccagaggcuacuucaagaucagaagcggcaagagcagcaucaugagaagcgacgcccccaucggcaagugcaacagcgagugcaucacccccaacggcagcauccccaacgacaagcccuuccagaacgugaacagaaucaccuacggcgccugccccagauacgugaagcagaacacccugaagcuggccaccggcaugagaaacgugcccgagaagcagaccagaggcaucuucggcgccaucgccggcuucaucgagaacggcugggagggcaugguggacggcugguacggcuucagacaccagaacagcgagggcagaggccaggccgccgaccugaagagcacccaggccgccaucgaccagaucaacggcaagcugaacagacugaucggcaagaccaacgagaaguuccaccagaucgagaaggaguucagcgagguggagggcagaauccaggaccuggagaaguacguggaggacaccaagaucgaccuguggagcuacaacgccgagcugcugguggcccuggagaaccagcacaccaucgaccugaccgacagcgagaugaacaagcuguucgagaagaccaagaagcagcugagagagaacgccgaggacaugggcaacggcugcuucaagaucuaccacaagugcgacaacgccugcaucggcagcaucagaaacggcaccuacgaccacgacguguacagagacgaggcccugaacaacagauuccagaucaagggcguggagcugaagagcggcuacaaggacuggauccuguggaucagcuucgccaucagcugcuuccugcugugcguggcccugcugggcuucaucaugugggccugccagaagggcaacaucagaugcaacaucugcaucuga

SEQ ID NO: 171404 - RNA, 1701 nt, Artificial Sequence
  derived and/or modified CDS sequence (opt4) from hemagglutinin__InfluenzaA__AHL91082
augaagaccaucaucgcccugagcuacauccugugccugguguucgcccagaagcugcccggcaacgacaacagcaccgccacccugugccugggccaccacgccgugcccaacggcaccaucgugaagaccaucaccaacgaccagaucgaggugaccaacgccaccgagcuggugcagagcagcagcaccggcgagaucugcgacagcccccaccagauccuggacggcgagaacugcacccugaucgacgcccugcugggcgacccccagugcgacggcuuccagaacaagaagugggaccuguucguggagagaagcaaggccuacagcaacugcuaccccuacgacgugcccgacuacgccagccugagaagccugguggccagcagcggcacccuggaguucaacaacgagagcuucaacuggaccggcgugacccagaacggcaccagcagcgccugcaucagaagaagcaacaacagcuucuucagcagacugaacuggcugacccaccugaaguucaaguaccccgcccugaacgugaccaugcccaacaacgagcaguucgacaagcuguacaucuggggcgugcaccaccccggcaccgacaacgaccagaucuuccuguacgcccaggccagcggcagaaucaccgugagcaccaagagaagccagcagaccgugauccccaacaucggcagcagacccagagugagaaacauccccagcagaaucagcaucuacuggaccaucgugaagcccggcgacauccugcugaucaacagcaccggcaaccugaucgcccccagaggcuacuucaagaucagaagcggcaagagcagcaucaugagaagcgacgcccccaucggcaagugcaacagcgagugcaucacccccaacggcagcauccccaacgacaagcccuuccagaacgugaacagaaucaccuacggcgccugccccaucuacgugaagcagaacacccugaagcuggccaccggcaugagaaacgugcccgagaagcagaccagaggcaucuucggcgccaucgccggcuucaucgagaacggcugggagggcaugguggacggcugguacggcuucagacaccagaacagcgagggcagaggccaggccgccgaccugaagagcacccaggccgccaucgaccagaucaacggcaagcugaacagacugaucggcaagaccaacgagaaguuccaccagaucgagaaggaguucagcgagguggagggcagaauccaggaccuggagaaguacguggaggacaccaagaucgaccuguggagcuacaacgccgagcugcugguggcccuggagaaccagcacaccaucgaccugaccgacagcgagaugaacaagcuguucgagaagaccaagaagcagcugagagagaacgccgaggacaugggcaacggcugcuucaagaucuaccacaagugcgacaacgccugcaucggcagcaucagaaacggcaccuacgaccacgacguguacagagacgaggcccugaacaacagauuccagaucaagggcguggagcugaagagcggcuacaaggacuggauccuguggaucagcuucgccaucagcugcuuccugcugugcguggcccugcugggcuucaucaugugggccugccagaagggcaacaucagaugcaacaucugcaucuga

SEQ ID NO: 171405 - RNA, 1701 nt, Artificial Sequence; identical to SEQ ID NO: 165479
  derived and/or modified CDS sequence (opt4) from hemagglutinin__InfluenzaA__AHL91094

SEQ ID NO: 171406 - RNA, 1701 nt, Artificial Sequence
  derived and/or modified CDS sequence (opt4) from hemagglutinin__InfluenzaA__AHL91106
augaagaccaucaucgcccugagcuacauccugugccugguguucgcccagaagcugcccggcaacgacaacagcaccgccacccugugccugggccaccacgccgugcccaacggcaccaucgugaagaccaucaccaacgaccagaucgaggugaccaacgccaccgagcuggugcagagcagcagcaagggcgagaucugcgacagcccccaccagauccuggacggcgagaacugcacccugaucgacgcccugcugggcgacccccagugcgacggcuuccagaacaagaagugggaccuguucguggagagaagcaaggccuacagcaacugcuaccccuacgacgugcccgacuacgccagccugagaagccugguggccagcagcggcacccuggaguucaacaacgagagcuucaacuggaccggcgugacccagaacggcaccagcagcgccugcaucagaagaagcaacaacagcuucuucagcagacugaacuggcugacccaccugaaguucaaguaccccgcccugaacgugaccaugcccaacaacgagcaguucgacaagcuguacaucuggggcgugcaccaccccggcaccgacaacgaccagaucuuccuguacgcccaggccagcggcagaaucaccgugagcaccaagagaagccagcagaccgugauccccaacaucggcagcagacccagagugagaaacauccccagcagaaucagcaucuacuggaccaucgugaagcccggcgacauccugcugaucaacagcaccggcaaccugaucgcccccagaggcuacuucaagaucagaagcggcaagagcagcaucaugagaagcgacgcccccaucggcaagugcaacagcgagugcaucacccccaacggcagcauccccaacgacaagcccuuccagaacgugaacagaaucaccuacggcgccugccccagauacgugaagcagaacacccugaagcuggccaccggcaugagaaacgugcccgagaagcagaccagaggcaucuucggcgccaucgccggcuucaucgagaacggcugggagggcaugguggacggcugguacggcuucagacaccagaacagcgagggcagaggccaggccgccgaccugaagagcacccaggccgccaucgaccagaucaacggcaagcugaacagacugaucggcaagaccaacgagaaguuccaccagaucgagaaggaguucagcgagguggagggcagaauccaggaccuggagaaguacguggaggacaccaagaucgaccuguggagcuacaacgccgagcugcugguggcccuggagaaccagcacaccaucgaccugaccgacagcgagaugaacaagcuguucgagaagaccaagaagcagcugagagagaacgccgaggacaugggcaacggcugcuucaagaucuaccacaagugcgacaacgccugcaucggcagcaucagaaacggcaccuacgaccacgacguguacagagacgaggcccugaacaacagauuccagaucaagggcguggagcugaagagcggcuacaaggacuggauccuguggaucagcuucgccaucagcugcuuccugcugugcguggcccugcugggcuucaucaugugggccugccagaagggcaacaucagaugcaacaucugcaucuga

SEQ ID NO: 171407 - RNA, 1701 nt, Artificial Sequence
  derived and/or modified CDS sequence (opt4) from hemagglutinin__InfluenzaA__AHL91118
augaagaccaucaucgcccugagcuacauccugugccugguguucgcccagaagcugcccggcaacgacaacagcaccgccacccugugccugggccaccacgccgugcccaacggcaccaucgugaagaccaucaccaacgaccagaucgaggugaccaacgccaccgagcuggugcagagcagcagcaccggcgagaucugcgacagcccccaccagauccuggacggcgagaacugcacccugaucgacgcccugcugggcgacccccagugcgacggcuuccagaacaagaagugggaccuguucguggagagaagcaaggccuacagcaacugcuaccccuacgacgugcccgacuacgccagccugagaagccugguggccagcagcggcacccuggaguucaacaacgagagcuucaacuggaccggcgugacccagaacggcaccagcagcgccugcaucagaagaagcaacaacagcuucuucagcaagcugaacuggcugacccaccugaaguucaaguaccccgcccugaacgugaccaugcccaacaacgagcaguucgacaagcuguacaucuggggcgugcaccaccccggcaccgacaacgaccagaucuuccuguacgcccaggccagcggcagaaucaccgugagcaccaagagaagccagcagaccgugauccccaacaucggcagcagacccagagugagaaacauccccagcagaaucagcaucuacuggaccaucgugaagcccggcgacauccugcugaucaacagcaccggcaaccugaucgcccccagaggcuacuucaagaucagaagcggcaagagcagcaucaugagaagcgacgcccccaucggcaagugcaacagcgagugcaucacccccaacggcagcauccccaacgacaagcccuuccagaacgugaacagaaucaccuacggcgccugccccagauacgugaagcagaacacccugaagcuggccaccggcaugagaaacgugcccgagaagcagaccagaggcaucuucggcgccaucgccggcuucaucgagaacggcugggagggcaugguggacggcugguacggcuucagacaccagaacagcgagggcagaggccaggccgccgaccugaagagcacccaggccgccaucgaccagaucaacggcaagcugaacagacugaucggcaagaccaacgagaaguuccaccagaucgagaaggaguucagcgagguggagggcagaauccaggaccuggagaaguacguggaggacaccaagaucgaccuguggagcuacaacgccgagcugcuggugacccuggagaaccagcacaccaucgaccugaccgacagcgagaugaacaagcuguucgagaagaccaagaagcagcugagagagaacgccgaggacaugggcaacggcugcuucaagaucuaccacaagugcgacaacgccugcaucggcagcaucagaaacggcaccuacgaccacgacguguacagagacgaggcccugaacaacagauuccagaucaagggcguggagcugaagagcggcuacaaggacuggauccuguggaucagcuucgccaucagcugcuuccugcugugcguggcccugcugggcuucaucaugugggccugccagaagggcaacaucagaugcaacaucugcaucuga

SEQ ID NO: 171408 - RNA, 1701 nt, Artificial Sequence
  derived and/or modified CDS sequence (opt4) from hemagglutinin__InfluenzaA__AHL91130
augaagaccaucaucgcccugagcuacauccugugccugguguucgcccagaagcugcccggcaacgacaacagcaccgccacccugugccugggccaccacgccgugcccaacggcaccaucgugaagaccaucaccaacgaccagaucgaggugaccaacgccaccgagcuggugcagagcagcagcaccggcgagaucugcgacagcccccaccagauccuggacggcgagaacugcacccugaucgacgcccugcugggcgacccccagugcgacggcuuccagaacaagaagugggaccuguucguggagagaagcaaggccuacagcaacugcuaccccuacgacgugcccgacuacgccagccugagaagccugaucgccagcagcggcacccuggaguucaacaacgagagcuucaacuggaccggcgugacccagaacggcaccagcagcgccugcaucagaagaagcaacaacagcuucuucagcagacugaacuggcugacccaccugaaguucaaguaccccgcccugaacgugaccaugcccaacaacgagcaguucgacaagcuguacaucuggggcgugcaccaccccggcaccgacaacgaccagaucuuccuguacgcccaggccagcggcagaaucaccgugagcaccaagagaagccagcagaccgugauccccaacaucggcagcagacccagagugagaaacauccccagcagaaucagcaucuacuggaccaucgugaagcccggcgacauccugcugaucaacagcaccggcaaccugaucgcccccagaggcuacuucaagaucagaagcggcaagagcagcaucaugagaagcgacgcccccaucggcaagugcaacagcgagugcaucacccccaacggcagcauccccaacgacaagcccuuccagaacgugaacagaaucaccuacggcgccugccccagauacgugaagcagaacacccugaagcuggccaccggcaugagaaacgugcccgagaagcagaccagaggcaucuucggcgccaucgccggcuucaucgagaacggcugggagggcaugguggacggcugguacggcuucagacaccagaacagcgagggcagaggccaggccgccgaccugaagagcacccaggccgccaucgaccagaucaacggcaagcugaacagacugaucggcaagaccaacgagaaguuccaccagaucgagaaggaguucagcgagguggagggcagaauccaggaccuggagaaguacguggaggacaccaagaucgaccuguggagcuacaacgccgagcugcugguggcccuggagaaccagcacaccaucgaccugaccgacagcgagaugaacaagcuguucgagaagaccaagaagcagcugagagagaacgccgaggacaugggcaacggcugcuucaagaucuaccacaagugcgacaacgccugcaucggcagcaucagaaacggcaccuacgaccacaacguguacagagacgaggcccugaacaacagauuccagaucaagggcguggagcugaagagcggcuacaaggacuggauccuguggaucagcuucgccaucagcugcuuccugcugugcguggcccugcugggcuucaucaugugggccugccagaagggcaacaucagaugcaacaucugcaucuga

SEQ ID NO: 171409 - RNA, 1701 nt, Artificial Sequence; identical to SEQ ID NO: 162494
  derived and/or modified CDS sequence (opt4) from hemagglutinin__InfluenzaA__AHL91142

SEQ ID NO: 171410 - RNA, 1701 nt, Artificial Sequence; identical to SEQ ID NO: 162494
  derived and/or modified CDS sequence (opt4) from hemagglutinin__InfluenzaA__AHL91154

SEQ ID NO: 171411 - RNA, 1701 nt, Artificial Sequence; identical to SEQ ID NO: 160690
  derived and/or modified CDS sequence (opt4) from hemagglutinin__InfluenzaA__AHL91166

SEQ ID NO: 171412 - RNA, 1701 nt, Artificial Sequence; identical to SEQ ID NO: 170527
  derived and/or modified CDS sequence (opt4) from hemagglutinin__InfluenzaA__AHL94984

SEQ ID NO: 171413 - RNA, 1701 nt, Artificial Sequence; identical to SEQ ID NO: 170527
  derived and/or modified CDS sequence (opt4) from hemagglutinin__InfluenzaA__AHL94996

SEQ ID NO: 171414 - RNA, 1701 nt, Artificial Sequence; identical to SEQ ID NO: 169895
  derived and/or modified CDS sequence (opt4) from hemagglutinin__InfluenzaA__AHL95008

SEQ ID NO: 171415 - RNA, 1701 nt, Artificial Sequence; identical to SEQ ID NO: 170057
  derived and/or modified CDS sequence (opt4) from hemagglutinin__InfluenzaA__AHL95020

SEQ ID NO: 171416 - RNA, 1701 nt, Artificial Sequence; identical to SEQ ID NO: 170054
  derived and/or modified CDS sequence (opt4) from hemagglutinin__InfluenzaA__AHL95032

SEQ ID NO: 171417 - RNA, 1701 nt, Artificial Sequence; identical to SEQ ID NO: 169928
  derived and/or modified CDS sequence (opt4) from hemagglutinin__InfluenzaA__AHL95044

SEQ ID NO: 171418 - RNA, 1701 nt, Artificial Sequence; identical to SEQ ID NO: 169918
  derived and/or modified CDS sequence (opt4) from hemagglutinin__InfluenzaA__AHL95056

SEQ ID NO: 171419 - RNA, 1701 nt, Artificial Sequence; identical to SEQ ID NO: 170057
  derived and/or modified CDS sequence (opt4) from hemagglutinin__InfluenzaA__AHL95068

SEQ ID NO: 171420 - RNA, 1701 nt, Artificial Sequence; identical to SEQ ID NO: 170605
  derived and/or modified CDS sequence (opt4) from hemagglutinin__InfluenzaA__AHL95080

SEQ ID NO: 171421 - RNA, 1701 nt, Artificial Sequence; identical to SEQ ID NO: 169928
  derived and/or modified CDS sequence (opt4) from hemagglutinin__InfluenzaA__AHL95092

SEQ ID NO: 171422 - RNA, 1701 nt, Artificial Sequence
  derived and/or modified CDS sequence (opt4) from hemagglutinin__InfluenzaA__AHL95104
augaagaccaucaucgcccugagcuacauccugugccugguguucgcccagaagcugcccggcaacgacaacagcaccgccacccugugccugggccaccacgccgugcccaacggcaccaucgugaagaccaucaccaacgacagaaucgaggugaccaacgccaccgagcuggugcagaacagcagcaucggcgagaucugcgacagcccccaccagauccuggacggcgagaacugcacccugaucgacgcccugcugggcgacccccagugcgacggcuuccagaacaagaagugggaccuguucguggagagaagcaaggccuacagcaacugcuaccccuacgacgugcccgacuacgccagccugagaagccugguggccagcagcggcacccuggaguucaacaacgagagcuucaacugggccggcgugacccagaacggcaccagcagcgccugcaugagaggcagcaacagcagcuucuucagcagacugaacuggcugacccaccugaacuucaaguaccccgcccugaacgugaccaugcccaacaacgagcaguucgacaagcuguacaucuggggcgugcaccaccccggcaccgacaaggaccagaucuuccuguacgcccagagcagcggcagaaucaccgugagcaccaagagaagccagcaggccgugauccccaacaucggcagcagacccagaaucagaaacauccccagcagaaucagcaucuacuggaccaucgugaagcccggcgacauccugcugaucaacagcaccggcaaccugaucgcccccagaggcuacuucaagaucagaagcggcaagagcagcaucaugagaagcgacgcccccaucggcaagugcaagagcgagugcaucacccccaacggcagcauccccaacgacaagcccuuccagaacgugaacagaaucaccuacggcgccugccccagauacgugaagcagagcacccugaagcuggccaccggcaugagaaacgugcccgagaagcagaccagaggcaucuucggcgccaucgccggcuucaucgagaacggcugggagggcaugauggacggcugguacggcuucagacaccagaacagcgagggcagaggccaggccgccgaccugaagagcacccaggccgccaucgaccagaucaacggcaagcugaacagacugaucggcaagaccaacgagaaguuccaccagaucgagaaggaguucagcgagguggagggcagaauccaggaccuggagaaguacguggaggacaccaagaucgaccuguggagcuacaacgccgagcugcugguggcccuggagaaccagcacaccaucgaccugaccgacagcgagaugaacaagcuguucgagaagaccaagaagcagcugagagagaacgccgaggacaugggcaacggcugcuucaagaucuaccacaagugcgacaacgccugcaucggcagcaucagaaacggcaccuacgaccacgacguguacagagacgaggcccugaacaacagauuccagaucaagggcguggagcugaagagcggcuacaaggacuggauccuguggaucagcuucgccaucagcugcuuccugcugugcguggcccugcugggcuucaucaugugggccugccagaagggcaacaucagaugcaacaucugcaucuga

SEQ ID NO: 171423 - RNA, 1701 nt, Artificial Sequence
  derived and/or modified CDS sequence (opt4) from hemagglutinin__InfluenzaA__AHL95116
augaagaccaucaucgcccugagcuacauccugugccugguguucgcccaggagcugcccggcaacgacgacagcaccgccacccugugccugggccacuacgccgugcccaacggcaccaucgugaagaccaucaccaacgaccagaucgaggugaccaacgccaccgagcuggugcagagcagcagcaccggcgagaucugcaacagcccccaccagauccuggacggcgagaacugcacccugaucgacgcccugcugggcgacccccagugcgacggcuuccagaacaagaagugggaccuguucguggagagaagcaaggcccacagcaacugcuaccccuacgacgugcccgacuacgccagccugagaagccugguggccagcagcggcacccuggaguucaacaacgagagcuucaacuggaccggcgugacccagaacggcaccagcagcgccugcaucagaagaagcaacaacagcuucuucagcagacugaacuggcugacccaccugaacuucaaguaccccgcccugaacgugaccaugcccaacaacgagcaguucgacaagcuguacaucuggggcgugcaccaccccggcaccgacaaggaccagaucuuccuguacgccaaggccagcggcagaaucaccgugagcaccaagagaagccagcaggccgugauccccaacaucggcagcagacccagagugagaaacauccccagcagagugagcaucuacuggaccaucgugaagcccggcgacauccugcugaucaacagcaccggcaaccugaucgcccccagaggcuacuucaagaucagaagcggcaagagcagcaucaugagaagcgacgcccccaucggcaagugcaacagcgccugcaucacccccaacggcagcauccccaacgacaagcccuuccagaacgugaacagaaucaccuacggcgccugccccagauacgugaagcagaacacccugaagcuggccaccggcaugagaaacgugcccgagaagcagaccagaggcaucuucggcgccaucgccggcuucaucgagaacggcugggagggcaugguggacggcugguacggcuucagacaccagaacagcgagggcagaggccaggccgccgaccugaagagcacccaggccgccaucgaccagaucaacggcaagcugaacagacugaucggcaagaccaacgagaaguuccaccagaucgagaaggaguucagcgagguggagggcagaauccaggaccuggagaaguacguggaggacaccaagaucgaccuguggagcuacaacgccgagcugcugguggcccuggagaaccagcacaccaucgaccugaccgacagcgagaugaacaagcuguucgagaagaccaagaagcagcugagagagaacgccgaggacaugggcaacggcugcuucaagaucuaccacaagugcgacaacgccugcaucggcagcaucagaaacggcaccuacgaccacgacguguacagagacgaggcccugaacaacagauuccagaucaagggcguggagcugaagagcggcuacaaggacuggauccuguggaucagcuucgccaucagcugcuuccugcugugcguggcccugcugggcuucaucaugugggccugccagaagggcaacaucagaugcaacaucugcaucuga

SEQ ID NO: 171424 - RNA, 1701 nt, Artificial Sequence; identical to SEQ ID NO: 169895
  derived and/or modified CDS sequence (opt4) from hemagglutinin__InfluenzaA__AHL95128

SEQ ID NO: 171425 - RNA, 1701 nt, Artificial Sequence; identical to SEQ ID NO: 169918
  derived and/or modified CDS sequence (opt4) from hemagglutinin__InfluenzaA__AHL95140

SEQ ID NO: 171426 - RNA, 1701 nt, Artificial Sequence; identical to SEQ ID NO: 169928
  derived and/or modified CDS sequence (opt4) from hemagglutinin__InfluenzaA__AHL95152

SEQ ID NO: 171427 - RNA, 1701 nt, Artificial Sequence; identical to SEQ ID NO: 169895
  derived and/or modified CDS sequence (opt4) from hemagglutinin__InfluenzaA__AHL95164

SEQ ID NO: 171428 - RNA, 1701 nt, Artificial Sequence; identical to SEQ ID NO: 169928
  derived and/or modified CDS sequence (opt4) from hemagglutinin__InfluenzaA__AHL95176

SEQ ID NO: 171429 - RNA, 1701 nt, Artificial Sequence; identical to SEQ ID NO: 169928
  derived and/or modified CDS sequence (opt4) from hemagglutinin__InfluenzaA__AHL95188

SEQ ID NO: 171430 - RNA, 1701 nt, Artificial Sequence; identical to SEQ ID NO: 170054
  derived and/or modified CDS sequence (opt4) from hemagglutinin__InfluenzaA__AHL95200

SEQ ID NO: 171431 - RNA, 1701 nt, Artificial Sequence; identical to SEQ ID NO: 169928
  derived and/or modified CDS sequence (opt4) from hemagglutinin__InfluenzaA__AHL95212

SEQ ID NO: 171432 - RNA, 1701 nt, Artificial Sequence; identical to SEQ ID NO: 169918
  derived and/or modified CDS sequence (opt4) from hemagglutinin__InfluenzaA__AHL95224

SEQ ID NO: 171433 - RNA, 1701 nt, Artificial Sequence; identical to SEQ ID NO: 169918
  derived and/or modified CDS sequence (opt4) from hemagglutinin__InfluenzaA__AHL95236

SEQ ID NO: 171434 - RNA, 1701 nt, Artificial Sequence; identical to SEQ ID NO: 169943
  derived and/or modified CDS sequence (opt4) from hemagglutinin__InfluenzaA__AHL95248

SEQ ID NO: 171435 - RNA, 1701 nt, Artificial Sequence
  derived and/or modified CDS sequence (opt4) from hemagglutinin__InfluenzaA__AHL95260
augaagaccaucaucgcccugagcuacauccugugccugguguucgcccagaagcugcccggcaacgacaacagcaccgccacccugugccugggccaccacgccgugcccaacggcaccaucgugaagaccaucaccaacgacagaaucgaggugaccaacgccaccgagcuggugcagaacagcagcaucagcgagaucugcgacagcccccaccagauccuggacggcgagaacugcacccugaucgacgcccugcugggcgacccccagugcgacggcuuccagaacaagaagugggaccuguucguggagagaagcaaggccuacagcaacugcuaccccuacgacgugcccgacuacgccagccugagaagccugguggccagcagcggcacccuggaguucaacaacgagagcuucaacugggccggcgugacccagaacggcaccagcagcgccugcaucagaggcagcaacagcagcuucuucagcagacugaacuggcugacccaccugaacuucaaguaccccgcccugaacgugaccaugcccaacaacgagcaguucgacaagcuguacaucuggggcgugcaccaccccggcaccgacaaggaccagaucuuccuguacgcccagagcagcggcagaaucaccgugagcaccaagagaagccagcaggccgugauccccaacaucggcagcagacccagaaucagaaacauccccagcagaaucagcaucuacuggaccaucgugaagcccggcgacauccugcugaucaacagcaccggcaaccugaucgcccccagaggcuacuucaagaucagaagcggcaagagcagcaucaugagaagcgacgcccccaucggcaagugcaagagcgagugcaucacccccaacggcagcauccccaacgacaagcccuuccagaacgugaacagaaucaccuacggcgccugccccagauacgugaagcagagcacccugaagcuggccaccggcaugagaaacgugcccgagaagcagaccagaggcaucuucggcgccaucgccggcuucaucgagaacggcugggagggcaugguggacggcugguacggcuucagacaccagaacagcgagggcagaggccaggccgccgaccugaagagcacccaggccgccaucgaccagaucaacggcaagcugaacagacugaucggcaagaccaacgagaaguuccaccagaucgagaaggaguucagcgagguggagggcagaauccaggaccuggagaaguacguggaggacaccaagaucgaccuguggagcuacaacgccgagcugcugguggcccuggagaaccagcacaccaucgaccugaccgacagcgagaugaacaagcuguucgagaagaccaagaagcagcugagagagaacgccgaggacaugggcaacggcugcuucaagaucuaccacaagugcgacaacgccugcaucggcagcaucagaaacggcaccuacgaccacgacguguacagagacgaggcccugaacaacagauuccagaucaagggcguggagcugaagagcggcuacaaggacuggauccuguggaucagcuucgccaucagcugcuuccugcugugcguggcccugcugggcuucaucaugugggccugccagaagggcaacaucagaugcaacaucugcaucuga

SEQ ID NO: 171436 - RNA, 1701 nt, Artificial Sequence; identical to SEQ ID NO: 169928
  derived and/or modified CDS sequence (opt4) from hemagglutinin__InfluenzaA__AHL95272

SEQ ID NO: 171437 - RNA, 1701 nt, Artificial Sequence; identical to SEQ ID NO: 170054
  derived and/or modified CDS sequence (opt4) from hemagglutinin__InfluenzaA__AHL95284

SEQ ID NO: 171438 - RNA, 1701 nt, Artificial Sequence
  derived and/or modified CDS sequence (opt4) from hemagglutinin__InfluenzaA__AHL95296
augaaggccauccugguggugcugcuguacaccuucgccaccgccaacgccgacacccugugcaucggcuaccacgccaacaacagcaccgacaccguggacaccgugcuggagaagaacgugaccgugacccacagcgugaaccugcuggaggacaagcacaacggcaagcugugcaagcugagaggcguggccccccugcaccugggcaagugcaacaucgccggcuggauccugggcaaccccgagugcgagagccugagcaccgccagcagcuggagcuacaucguggagaccagcagcagcgacaacggcaccugcuaccccggcgacuucaucaacuacgaggagcugagagagcagcugagcagcgugagcagcuucgagagauucgagauguuccccaagaccagcagcuggcccaaccacgacagcaacaagggcgugaccgccgccugcccccacgccggcgccaagagcuucuacaagaaccugaucuggcuggugaagaagggcaacagcuaccccaagcugagcaagagcuacaucaacgacaagggcaaggaggugcuggugcuguggggcauccaccaccccagcaccaccgccgaccagcagagccuguaccagaacgccgacgccuacguguucgugggcaccagcaaguacagcaagaaguucaagcccgagaucgccaucagacccaaggugagagaccaggagggcagaaugaacuacuacuggacccugaucgagcccggcgacaagaucaccuucgaggccaccggcaaccugguggugcccagauacgccuucgccauggagagaaacgccggcagcggcaucaucaucagcgacacccccgugcacgacugcaacaccaccugccagacccccgagggcgccaucaacaccagccugcccuuccagaacauccaccccaucaccaucggcaagugccccaaguacgugaagagcaccaagcugagacuggccaccggccugagaaacgugcccagcauccagagcagaggccuguucggcgccaucgccggcuucaucgagggcggcuggaccggcaugguggacggcugguacggcuaccaccaccagaacgagcagggcagcggcuacgccgccgaccugaagagcacccagaacgccaucgacaagaucaccaacaaggugaacagcgugaucgagaagaugaacacccaguucaccgccgugggcaaggaguucaaccaccuggagaagagaaucgagaaccugaacaagaagguggacgacggcuuccuggacaucuggaccuacaacgccgagcugcuggugcugcuggagaacgagagaacccuggacuaccacgacagcaacgugaagaaccuguacgagaaggugagaaaccagcugaaggacaacgccaaggagaucggcaacggcugcuucgaguucuaccacaagugcgacaacaccugcauggagagcgugaagaacggcaccuacgacuaccccaaguacagcgaggaggccaagcugaacagagagaagaucgacggcgugaagcuggagagcaccagaaucuaccagauccuggccaucuacagcaccguggccagcagccuggugcugguggugagccugggcgccaucagcuucuggaugugcagcaacggcagccugcagugcagaaucugcaucuga

SEQ ID NO: 171439 - RNA, 1701 nt, Artificial Sequence; identical to SEQ ID NO: 169895
  derived and/or modified CDS sequence (opt4) from hemagglutinin__InfluenzaA__AHL95307

SEQ ID NO: 171440 - RNA, 1701 nt, Artificial Sequence; identical to SEQ ID NO: 169918
  derived and/or modified CDS sequence (opt4) from hemagglutinin__InfluenzaA__AHL95319

SEQ ID NO: 171441 - RNA, 1701 nt, Artificial Sequence
  derived and/or modified CDS sequence (opt4) from hemagglutinin__InfluenzaA__AHL95331
augaagaccaucaucgcccugagcuacauccugugccugguguucgcccagaagcugcccggcgacgacaacagcaccgccacccugugccugggccaccacgccgugcccaacggcaccaucgugaagaccaucaccaacgacagaaucgaggugaccaacgccaccgagcuggugcagaacagcagcaucggcgagaucugcgacagcccccaccagauccuggacggcgagaacugcacccugaucgacgcccugcugggcgacccccagugcgacggcuuccagaacaagaagugggaccuguucguggagagaagcaaggccuacagcaacugcuaccccuacgacgugcccgacuacgccagccugagaagccugguggccagcagcggcacccuggaguucaacaacgagagcuucaacugggccggcgugacccagaacggcaccagcagcgccugcaucagaggcagcaacagcagcuucuucagcagacugaacuggcugacccaccugaacuucaaguaccccgcccugaacgugaccaugcccaacaacgagcaguucgacaagcuguacaucuggggcgugcaccaccccggcaccgacaaggaccagaucuuccuguacgcccagagcagcggcagaaucaccgugagcaccaagagaagccagcaggccgugauccccaacaucggcagcagacccagaaucagaaacauccccagcagaaucagcaucuacuggaccaucgugaagcccggcgacauccugcugaucaacagcaccggcaaccugaucgcccccagaggcuacuucaagaucagaagcggcaagagcagcaucaugagaagcgacgcccccaucggcaagugcaagagcgagugcaucacccccaacggcagcauccccaacgacaagcccuuccagaacgugaacagaaucaccuacggcgccugccccagauacgugaagcagagcacccugaagcuggccaccggcaugagaaacgugcccgagaagcagaccagaggcaucuucggcgccaucgccggcuucaucgagaacggcugggagggcaugguggacggcugguacggcuucagacaccagaacagcgagggcagaggccaggccgccgaccugaagagcacccaggccgccaucgaccagaucaacggcaagcugaacagacugaucggcaagaccaacgagaaguuccaccagaucgagaaggaguucagcgagguggagggcagaauccaggaccuggagaaguacguggaggacaccaagaucgaccuguggagcuacaacgccgagcugcugguggcccuggagaaccagcacaccaucgaccugaccgacagcgagaugaacaagcuguucgagaagaccaagaagcagcugagagagaacgccgaggacaugggcaacggcugcuucaagaucuaccacaagugcgacaacgccugcaucggcagcaucagaaacggcaccuacgaccacgacguguacagagacgaggcccugaacaacagauuccagaucaagggcguggagcugaagagcggcuacaaggacuggauccuguggaucagcuucgccaucagcugcuuccugcugugcguggcccugcugggcuucaucaugugggccugccagaagggcaacaucagaugcaacaucugcaucuga

SEQ ID NO: 171442 - RNA, 1701 nt, Artificial Sequence
  derived and/or modified CDS sequence (opt4) from hemagglutinin__InfluenzaA__AHL95343
augaagaccaucaucgcccugagcuacauccugugccugguguucgcccagaagcugcccggcaacgacaacagcaccgccacccugugccugggccaccacgccgugcccaacggcaccaucgugaagaccaucaccaacgacagaaucgaggugaccaacgccaccgagcuggugcagaacagcagcaucggcgagaucugcgacagcccccaccagauccuggacggcgagaacugcacccugaucgacgcccugcugggcgacccccagugcgacggcuuccagaacaagaagugggaccuguucguggagagaagcaaggccuacagcaacugcuaccccuacgacgugcccgacuacgccagccugagaagccugguggccagcagcggcacccuggaguucaacaacgagagcuucaacugggccggcgugacccagaacggcaccagcagcgccugcaucagaggcagcaacagcagcuucuucagcagacugaacuggcugacccaccugaacuucaaguaccccgcccugaacgugaccaugcccaacaacgagcaguucgacaagcuguacaucuggggcgugcaccaccccggcaccgacaaggaccagaucuuccuguacgcccagagcagcggcagaaucaccgugagcaccaagagaagccagcaggccgugauccccaacaucggcagcagacccagaaucagaaacauccccagcagaaucagcaucuacuggaccaucgugaagcccggcgacauccugcugaucaacagcaccggcaaccugaucgcccccagaggcuacuucaagaucagaagcggcaagagcagcaucaugagaagcgacgcccccaucggcaagugcaagagcgagugcaucacccccaacggcagcauccccaacgacaagcccuuccagaacgugaacagaaucaccuacggcgccugccccagauacgugaagcagagcacccugaagcuggccaccggcaugagaaacgugcccgagaagcagaccagaggcaucuucggcgccaucgccggcuucaucgagaacggcugggagggcaugguggacggcugguacggcuucagacaccagaacagcgagggcagaggccaggccgccgaccugaagagcacccaggccgccaucgaccagaucaacggcaagcugaacagacugaucggcaagaccaacgagaaguuccaccagaucgagaaggaguucagcgagguggagggcagaauccaggaccuggagaaguacguggaggacaccaagaucgaccuguggagcuacaacgccgagcugcugguggcccuggagaaccagcacaccaucgaccugaccgacagcgagaugaacaagcuguucgagaagaccaagaagcagcugagagagaacgccgaggacaugggcaacggcugcuucaagaucuaccacaagugcgacaacgccugcaucggcagcaucagaaacggcaccuacgaccacgacguguacagagacgaggcccugaacaacagauuccagaucagaggcguggagcugaagagcggcuacaaggacuggauccuguggaucagcuucgccaucagcugcuuccugcugugcguggcccugcugggcuucaucaugugggccugccagaagggcaacaucagaugcaacaucugcaucuga

SEQ ID NO: 171443 - RNA, 1701 nt, Artificial Sequence; identical to SEQ ID NO: 169918
  derived and/or modified CDS sequence (opt4) from hemagglutinin__InfluenzaA__AHL95432

SEQ ID NO: 171444 - RNA, 1701 nt, Artificial Sequence; identical to SEQ ID NO: 170054
  derived and/or modified CDS sequence (opt4) from hemagglutinin__InfluenzaA__AHL95444

SEQ ID NO: 171445 - RNA, 1701 nt, Artificial Sequence; identical to SEQ ID NO: 169918
  derived and/or modified CDS sequence (opt4) from hemagglutinin__InfluenzaA__AHL95457

SEQ ID NO: 171446 - RNA, 1701 nt, Artificial Sequence
  derived and/or modified CDS sequence (opt4) from hemagglutinin__InfluenzaA__AHL95470
augaagaccaucaucgcccugagcuacauccugugccugguguucgcccagaagcugcccggcaacgacaacagcaccgccacccugugccugggccaccacgccgugcccaacggcaccaucgugaagaccaucaccaacgaccagaucgaggugaccaacgccaccgagcuggugcagagcagcagcaccggcgagaucugcaacagcccccaccagauccuggacggcgagaacugcacccugaucgacgcccugcugggcgacccccagugcgacggcuuccagaacaagaagugggaccuguucguggagagaagcaaggccuacagcaacugcuaccccuacgacgugcccgacuacgccagccugagaagccugguggccagcagcggcacccuggaguucaacaacgagagcuucaacuggaccggcgugaagcagaacggcaccagcagcgccugcaucagaagaagcaacagcagcuucuucagcagacugaacuggcugacccaccugaacuucaaguaccccgcccugaacgugaccaugcccaacaacgagcaguucgacaagcuguacaucuggggcgugcaccaccccggcaccgacaaggaccagaucuuccuguacgcccagagcagcggcagaaucaccgugagcaccaagagaagccagcaggccgugauccccaacaucggcagcagacccagaaucagaaacauccccagcagaaucagcaucuacuggaccaucgugagacccggcgacauccugcugaucaacagcaccggcaaccugaucgcccccagaggcuacuucaagaucagaagcggcaagagcagcaucaugagaagcgacgcccccaucggcaagugcaacagcgagugcaucacccccaacggcagcauccccaacgacaagcccuuccagaacgugaacagaaucaccuacggcgccugccccagauacgugaagcagagcacccugaagcuggccaccggcaugagaaacgugcccgagaagcagaccagaggcaucuucggcgccaucgccggcuucaucgagaacggcugggagggcaugguggacggcugguacggcuucagacaccagaacagcgagggcagaggccaggccgccgaccugaagagcacccaggccgccaucgaccagaucaacggcaagcugaacagacugaucggcaagaccaacgagaaguuccaccagaucgagaaggaguucagcgagguggagggcagaauccaggaccuggagaaguacguggaggacaccaagaucgaccuguggagcuacaacgccgagcugcugguggcccuggagaaccagcacaccaucgaccugaccgacagcgagaugaacaagcuguucgagaagaccaagaagcagcugagagagaacgccgaggacaugggcaacggcugcuucaagaucuaccacaagugcgacaacgccugcaucggcagcaucagaaacggcaccuacaaccacgacguguacagagacgaggcccugaacaacagauuccagaucaagggcguggagcugaagagcggcuacaaggacuggauccuguggaucagcuucgccaucagcugcuuccugcugugcguggcccugcugggcuucaucaugugggccugccagaagggcaacaucagaugcaacaucugcaucuga

SEQ ID NO: 171447 - RNA, 1701 nt, Artificial Sequence; identical to SEQ ID NO: 170054
  derived and/or modified CDS sequence (opt4) from hemagglutinin__InfluenzaA__AHL95482

SEQ ID NO: 171448 - RNA, 1701 nt, Artificial Sequence; identical to SEQ ID NO: 170054
  derived and/or modified CDS sequence (opt4) from hemagglutinin__InfluenzaA__AHL95494

SEQ ID NO: 171449 - RNA, 1701 nt, Artificial Sequence
  derived and/or modified CDS sequence (opt4) from hemagglutinin__InfluenzaA__AHL95506
augaagaccaucaucgcccugagcuacauccugugccugguguucgcccagaagcugcccggcaacgacaacagcaccgccacccugugccugggccaccacgccgugcccaacggcaccaucgugagaaccaucaccaacgacagaaucgaggugaccaacgccaccgagcuggugcagaacagcagcaucggcgagaucugcgacagcccccaccagauccuggacggcgagaacugcacccugaucgacgcccugcugggcgacccccagugcgacggcuuccagaacaagaagugggaccuguucguggagagaagcaaggccuacagcaacugcuaccccuacgacgugcccgacuacgccagccugagaagccugguggccagcagcggcacccuggaguucaacaacgagagcuucaacugggccggcgugacccagaacggcaccagcagcgccugcaucagaggcagcaacagcagcuucuucagcagacugaacuggcugacccaccugaacuucaaguaccccgcccugaacgugaccaugcccaacaacgagcaguucgacaagcuguacaucuggggcgugcaccaccccggcaccgacaaggaccagaucuuccuguacgcccagagcagcggcagaaucaccgugagcaccaagagaagccagcaggccgugauccccaacaucggcagcagacccagaaucagaaacauccccagcagaaucagcaucuacuggaccaucgugaagcccggcgacauccugcugaucaacagcaccggcaaccugaucgcccccagaggcuacuucaagaucagaagcggcaagagcagcaucaugagaagcgacgcccccaucggcaagugcaagagcgagugcaucacccccaacggcagcauccccaacgacaagcccuuccagaacgugaacagaaucaccuacggcgccugccccagauacgugaagcagagcacccugaagcuggccaccggcaugagaaacgugcccgagaagcagaccagaggcaucuucggcgccaucgccggcuucaucgagaacggcugggagggcaugguggacggcugguacggcuucagacaccagaacagcgagggcagaggccaggccgccgaccugaagagcacccaggccgccaucgaccagaucaacggcaagcugaacagacugaucggcaagaccaacgagaaguuccaccagaucgagaaggaguucagcgagguggagggcagaauccaggaccuggagaaguacguggaggacaccaagaucgaccuguggagcuacaacgccgagcugcugguggcccuggagaaccagcacaccaucgaccugaccgacagcgagaugaacaagcuguucgagaagaccaagaagcagcugagagagaacgccgaggacaugggcaacggcugcuucaagaucuaccacaagugcgacaacgccugcaucggcagcaucagaaacggcaccuacgaccacgacguguacagagacgaggcccugaacaacagauuccagaucaagggcguggagcugaagagcggcuacaaggacuggauccuguggaucagcuucgccaucagcugcuuccugcugugcguggcccugcugggcuucaucaugugggccugccagaagggcaacaucagaugcaacaucugcaucuga

SEQ ID NO: 171450 - RNA, 1701 nt, Artificial Sequence
  derived and/or modified CDS sequence (opt4) from hemagglutinin__InfluenzaA__AHL95518
augaagaccaucaucgcccugagcuacauccugugccugguguucgcccagaagcugcccggcaacgacaacagcaccgccacccugugccugggccaccacgccgugcccaacggcaccaucgugaagaccaucaccaacgacagaaucgaggugaccaacgccaccgagcuggugcagaacagcagcaucggcgagaucugcgacagcccccaccagauccuggacggcgagaacugcacccugaucgacgcccugcugggcgacccccagugcgacggcuuccagaacaagaagugggaccuguucguggagagaagcaaggccuacagcaacugcuaccccuacgacgugcccgacuacgccagccugagaagccugguggccagcagcggcacccuggaguucaacaacgagagcuucaacugggccggcgugacccagaacggcaccagcagcgccugcaucagaggcagcaacagcagcuucuucagcagacugaacuggcugacccaccugaacuucaaguaccccgcccugaacgugaccaugcccaacaacgagcaguucgacaagcuguacaucuggggcgugcaccaccccggcaccgacaaggaccagaucuuccuguacgcccagagcagcggcagaaucaccgugagcaccaagagaagccagcaggccgugauccccaacaucggcagcagacccagaaucagaaacgugcccagcagaaucagcaucuacuggaccaucgugaagcccggcgacauccugcugaucaacagcaccggcaaccugaucgcccccagaggcuacuucaagaucagaagcggcaagagcagcaucaugagaagcgacgcccccaucggcaagugcaagagcgagugcaucacccccaacggcagcauccccaacgacaagcccuuccagaacgugaacagaaucaccuacggcgccugccccagauacgugaagcagagcacccugaagcuggccaccggcaugagaaacgugcccgagaagcagaccagaggcaucuucggcgccaucgccggcuucaucgagaacggcugggagggcaugauggacggcugguacggcuucagacaccagaacagcgagggcagaggccaggccgccgaccugaagagcacccaggccgccaucgaccagaucaacggcaagcugaacagacugaucggcaagaccaacgagaaguuccaccagaucgagaaggaguucagcgagguggagggcagaauccaggaccuggagaaguacguggaggacaccaagaucgaccuguggagcuacaacgccgagcugcugguggcccuggagaaccagcacaccaucgaccugaccgacagcgagaugaacaagcuguucgagaagaccaagaagcagcugagagagaacgccgaggacaugggcaacggcugcuucaagaucuaccacaagugcgacaacgccugcaucggcagcaucagaaacggcaccuacgaccacgacguguacagagacgaggcccugaacaacagauuccagaucaagggcguggagcugaagagcggcuacaaggacuggauccuguggaucagcuucgccaucagcugcuuccugcugugcguggcccugcugggcuucaucaugugggccugccagaagggcaacaucagaugcaacaucugcaucuga

SEQ ID NO: 171451 - RNA, 1701 nt, Artificial Sequence; identical to SEQ ID NO: 169928
  derived and/or modified CDS sequence (opt4) from hemagglutinin__InfluenzaA__AHL95530

SEQ ID NO: 171452 - RNA, 1701 nt, Artificial Sequence; identical to SEQ ID NO: 169928
  derived and/or modified CDS sequence (opt4) from hemagglutinin__InfluenzaA__AHL95542

SEQ ID NO: 171453 - RNA, 1701 nt, Artificial Sequence
  derived and/or modified CDS sequence (opt4) from hemagglutinin__InfluenzaA__AHL95554
augaagaccaucaucgcccugagcuacauccugugccugguguucgcccagaagcugcccggcaacgacaacagcauggccacccugugccugggccaccacgccgugcccaacggcaccaucgugaagaccaucaccaacgacagaaucgaggugaccaacgccaccgagcuggugcagaacagcagcaucggcgagaucugcgacagcccccaccagauccuggacggcgagaacugcacccugaucgacgcccugcugggcgacccccagugcgacggcuuccagaacaagaagugggaccuguucguggagagaagcaaggccuacagcaacugcuaccccuacgacgugcccgacuacgccagccugagaagccugguggccagcagcggcacccuggaguucaacaacgagagcuucaacuggaccggcgugacccagaacggcaccagcagcgccugcaucagaagaagcaacagcagcuucuucagcagacugaacuggcugacccaccugaacuucaaguaccccgcccugaacgugaccaugcccaacaacgagcaguucgacaagcuguacaucuggggcgugcaccaccccggcaccgacaaggaccagaucuuccuguacgcccagagcagcggcagaaucaccgugagcaccaagagaagccagcaggccgugauccccaacaucggcagcagacccagaaucagaaacauccccagcagaaucagcaucuacuggaccaucgugaagcccggcgacauccugcugaucaacagcaccggcaaccugaucgcccccagaggcuacuucaagaucagaagcggcaagagcagcaucaugagaagcgacgcccccaucggcaagugcaagagcgagugcaucacccccaacggcagcauccccaacgacaagcccuuccagaacgugaacagaaucaccuacggcgccugccccagauacgugaagcagagcacccugaagcuggccaccggcaugagaaacgugcccgagaagcagaccagaggcaucuucggcgccaucgccggcuucaucgagaacggcugggagggcaugguggacggcugguacggcuucagacaccagaacagcgagggcagaggccaggccgccgaccugaagagcacccaggccgccaucgaccagaucaacggcaagcugaacagacugaucggcaagaccaacgagaaguuccaccagaucgagaaggaguucagcgagguggagggcagaauccaggaccuggagaaguacguggaggacaccaagaucgaccuguggagcuacaacgccgagcugcugguggcccuggagaaccagcacaccaucgaccugaccgacagcgagaugaacaagcuguucgagaagaccaagaagcagcugagagagaacgccgaggacaugggcaacggcugcuucaagaucuaccacaagugcgacaacgccugcaucggcagcaucagaaacggcaccuacgaccacaacguguacagagacgaggcccugaacaacagauuccagaucaagggcguggagcugaagagcggcuacaaggacuggauccuguggaucagcuucgccaucagcugcuuccugcugugcguggcccugcugggcuucaucaugugggccugccagaagggcaacaucagaugcaacaucugcaucuga

SEQ ID NO: 171454 - RNA, 1701 nt, Artificial Sequence
  derived and/or modified CDS sequence (opt4) from hemagglutinin__InfluenzaA__AHL95566
augaagaccaucaucgcccugagcuacauccugugccugguguucgcccagaagcugcccggcaacgacaacagcaccgccacccugugccugggccaccacgccgugcccaacggcaccaucgugaagaccaucaccaacgacagaaucgaggugaccaacgccaccgagcuggugcagaacagcagcaucggcgagaucugcgacagcccccaccagauccuggacggcgagaacugcacccugaucgacgcccugcugggcgacccccagugcgacggcuuccagaacaagaagugggaccuguucguggagagaagcaaggccuacagcaacugcuaccccuacgacgugcccgacuacgccagccugagaagccugguggccagcagcggcacccuggaguucaacaacgagagcuucaacugggccggcgugacccagaacggcaccagcagcgccugcaucagaggcagcaacagcagcuucuucagcagacugaacuggcugacccaccugaacuucaaguaccccgcccugaacgugaccaugcccaacaacgagcaguucgacaagcuguacaucuggggcgugcaccaccccggcaccgacaaggaccagaucuuccuguacgccagaagcagcggcagaaucaccgugagcaccaagagaagccagcaggccgugauccccaacaucggcagcagacccagaaucagaaacauccccagcagaaucagcaucuacuggaccaucgugaagcccggcgacauccugcugaucaacagcaccggcaaccugaucgcccccagaggcuacuucaagaucagaagcggcaagagcagcaucaugagaagcgacgcccccaucggcaagugcaagagcgagugcaucacccccaacggcagcauccccaacgacaagcccuuccagaacgugaacagaaucaccuacggcgccugccccagauacgugaagcagagcacccugaagcuggccaccggcaugagaaacgugcccgagaagcagaccagaggcaucuucggcgccaucgccggcuucaucgagaacggcugggagggcaugguggacggcugguacggcuucagacaccagaacagcgagggcagaggccaggccgccgaccugaagagcacccaggccgccaucgaccagaucaacggcaagcugaacagacugaucggcaagaccaacgagaaguuccaccagaucgagaaggaguucagcgagguggagggcagaauccaggaccuggagaaguacguggaggacaccaagaucgaccuguggagcuacaacgccgagcugcugguggcccuggagaaccagcacaccaucgaccugaccgacagcgagaugaacaagcuguucgagaagaccaagaagcagcugagagagaacgccgaggacaugggcaacggcugcuucaagaucuaccacaagugcgacaacgccugcaucggcagcaucagaaacggcaccuacgaccacgacguguacagagacgaggcccugaacaacagauuccagaucaagggcguggagcugaagagcggcuacaaggacuggauccuguggaucagcuucgccaucagcugcuuccugcugugcguggcccugcugggcuucaucaugugggccugccagaagggcaacaucagaugcaacaucugcaucuga

SEQ ID NO: 171455 - RNA, 1701 nt, Artificial Sequence
  derived and/or modified CDS sequence (opt4) from hemagglutinin__InfluenzaA__AHL95578
augaagaccaucaucgcccugagcuacauccugugccugguguucgcccagaagcugcccggcaacgacgacagcaccgccacccugugccugggccaccacgccgugcccaacggcaccaucgugaagaccaucaccaacgacagaaucgaggugaccaacgccaccgagcuggugcagaacagcagcaucggcgagaucugcgacagcccccaccagauccuggacggcgagaacugcacccugaucgacgcccugcugggcgacccccagugcgacggcuuccagaacaagaagugggaccuguucguggagagaagcaaggccuacagcaacugcuaccccuacgacgugcccgacuacgccagccugagaagccugguggccagcagcggcacccuggaguucaacaacgagagcuucaacugggccggcgugacccagaacggcaccagcagcgccugcaucagaggcagcaacagcagcuucuucagcagacugaacuggcugacccaccugaacuucaaguaccccgcccugaacgugaccaugcccaacaacgagcaguucgacaagcuguacaucuggggcgugcaccaccccggcaccgacaaggaccagaucuuccuguacgcccagagcagcggcagaaucaccgugagcaccaagagaagccagcaggccgugauccccaacaucggcagcagacccagaaucagaaacauccccagcagaaucagcaucuacuggaccaucgugaagcccggcgacauccugcugaucaacagcaccggcaaccugaucgcccccagaggcuacuucaagaucagaagcggcaagagcagcaucaugagaagcgacgcccccaucggcaagugcaagagcgagugcaucacccccaacggcagcauccccaacgacaagcccuuccagaacgugaacagaaucaccuacggcgccugccccagauacgugaagcagagcacccugaagcuggccaccggcaugagaaacgugcccgagaagcagaccagaggcaucuucggcgccaucgccggcuucaucgagaacggcugggagggcaugauggacggcugguacggcuucagacaccagaacagcgagggcagaggccaggccgccgaccugaagagcacccaggccgccaucgaccagaucaacggcaagcugaacagacugaucggcaagaccaacgagaaguuccaccagaucgagaaggaguucagcgagguggagggcagaauccaggaccuggagaaguacguggaggacaccaagaucgaccuguggagcuacaacgccgagcugcugguggcccuggagaaccagcacaccaucgaccugaccgacagcgagaugaacaagcuguucgagaagaccaagaagcagcugagagagaacgccgaggacaugggcaacggcugcuucaagaucuaccacaagugcgacaacgccugcaucggcagcaucagaaacggcaccuacgaccacgacguguacagagacgaggcccugaacaacagauuccagaucaagggcguggagcugaagagcggcuacaaggacuggauccuguggaucagcuucgccaucagcugcuuccugcugugcguggcccugcugggcuucaucaugugggccugccagaagggcaacaucagaugcaacaucugcaucuga

SEQ ID NO: 171456 - RNA, 1701 nt, Artificial Sequence
  derived and/or modified CDS sequence (opt4) from hemagglutinin__InfluenzaA__AHL95590
augaagaccaucaucgcccugagcuacauccugugccugguguucgcccagaagcugcccggcaacgacaacagcaccgccacccugugccugggccaccacgccgugcccaacggcaccaucgugaagaccaucaccaacgacagaaucgaggugaccaacgccaccgagcuggugcagaacagcagcaucggcgagaucugcgacagcccccaccagauccuggacggcgagaacugcacccugaucgacgcccugcugggcgacccccagugcgacggcuuccagaacaagaagugggaccuguucguggagagaagcaaggccuacagcaacugcuaccccuacgacgugcccgacuacgccagccugagaagccugguggccagcagcggcacccuggaguucaacaacgagagcuucaacuggaccggcgugacccagaacggcaccagcagcagcugcaucagaagaagcaacagcagcuucuucagcagacugaacuggcugacccaccugaacuucaaguaccccgcccugaacgugaccaugcccaacaacgagcaguucgacaagcuguacaucuggggcgugcaccaccccggcaccgacaaggaccagaucuuccuguacgcccagagcagcggcagaaucaccgugagcaccaagagaagccagcaggccgugauccccaacaucggcagcagacccagaaucagaaacauccccagcagaaucagcaucuacuggaccaucgugaagcccggcgacauccugcugaucaacagcaccggcaaccugaucgcccccagaggcuacuucaagaucagaagcggcaagagcagcaucaugagaagcgacgcccccaucggcaagugcaagagcgagugcaucacccccaacggcagcauccccaacgacaagcccuuccagaacgugaacagaaucaccuacggcgccugccccagauacgugaagcagagcacccugaagcuggccaccggcaugagaaacgugcccgagaagcagaccagaggcaucuucggcgccaucgccggcuucaucgagaacggcugggagggcaugguggacggcugguacggcuucagacaccagaacagcgagggcagaggccaggccgccgaccugaagagcacccaggccgccaucgaccagaucaacggcaagcugaacagacugaucggcaagaccaacgagaaguuccaccagaucgagaaggaguucagcgagguggagggcagaauccaggaccuggagaaguacguggaggacaccaagaucgaccuguggagcuacaacgccgagcugcugguggcccuggagaaccagcacaccaucgaccugaccgacagcgagaugaacaagcuguucgagaagaccaagaagcagcugagagagaacgccgaggacaugggcaacggcugcuucaagaucuaccacaagugcgacaacgccugcaucggcagcaucagaaacggcaccuacgaccacaacguguacagagacgaggcccugaacaacagauuccagaucaagggcguggagcugaagagcggcuacaaggacuggauccuguggaucagcuucgccaucagcugcuuccugcugugcguggcccugcugggcuucaucaugugggccugccagaagggcaacaucagaugcaacaucugcaucuga

SEQ ID NO: 171457 - RNA, 1701 nt, Artificial Sequence; identical to SEQ ID NO: 169928
  derived and/or modified CDS sequence (opt4) from hemagglutinin__InfluenzaA__AHL95602

SEQ ID NO: 171458 - RNA, 1701 nt, Artificial Sequence; identical to SEQ ID NO: 169928
  derived and/or modified CDS sequence (opt4) from hemagglutinin__InfluenzaA__AHL95614

SEQ ID NO: 171459 - RNA, 1701 nt, Artificial Sequence
  derived and/or modified CDS sequence (opt4) from hemagglutinin__InfluenzaA__AHL95626
augaagaccaucaucgcccugagcuacgugcugugccugguguucgcccagaagcugcccggcaacgacaacagcaccgccacccugugccugggccaccacgccgugcccaacggcaccaucgugaagaccaucaccaacgacagaaucgaggugaccaacgccaccgagcuggugcagaacagcagcaucggcgagaucugcgacagcccccaccagauccuggacggcgagaacugcacccugaucgacgcccugcugggcgacccccagugcgacggcuuccagaacaagaagugggaccuguucguggagagaagcaaggccuacagcaacugcuaccccuacgacgugcccgacuacgccagccugagaagccugguggccagcagcggcacccuggaguucaacaacgagagcuucaacugggccggcgugacccagaacggcaccagcagcgccugcaucagaggcagcaacagcagcuucuucagcagacugaacuggcugacccaccugaacuucaaguaccccgcccugaacgugaccaugcccaacaacgagcaguucgacaagcuguacaucuggggcgugcaccaccccggcaccgacaaggaccagaucuuccuguacgcccagagcagcggcagaaucaccgugagcaccaagagaagccagcaggccgugauccccaacaucggcagcagacccagaaucagaaacauccccagcagaaucagcaucuacuggaccaucgugaagcccggcgacauccugcugaucaacagcaccggcaaccugaucgcccccagaggcuacuucaagaucagaagcggcaagagcagcaucaugagaagcgacgcccccaucggcaagugcaagagcgagugcaucacccccaacggcagcauccccaacgacaagcccuuccagaacgugaacagaaucaccuacggcgccugccccagauacgugaagcagagcacccugaagcuggccaccggcaugagaaacgugcccgagaagcagaccagaggcaucuucggcgccaucgccggcuucaucgagaacggcugggagggcaugguggacggcugguacggcuucagacaccagaacagcgagggcagaggccaggccgccgaccugaagagcacccaggccgccaucgaccagaucaacggcaagcugaacagacugaucggcaagaccaacgagaaguuccaccagaucgagaaggaguucagcgagguggagggcagaauccaggaccuggagaaguacguggaggacaccaagaucgaccuguggagcuacaacgccgagcugcugguggcccuggagaaccagcacaccaucgaccugaccgacagcgagaugaacaagcuguucgagaagaccaagaagcagcugagagagaacgccgaggacaugggcaacggcugcuucaagaucuaccacaagugcgacaacgccugcaucggcagcaucagaaacggcaccuacgaccacgacguguacagagacgaggcccugaacaacagauuccagaucaagggcguggagcugaagagcggcuacaaggacuggauccuguggaucagcuucgccaucagcugcuuccugcugugcguggcccugcugggcuucaucaugugggccugccagaagggcaacaucagaugcaacaucugcaucuga

SEQ ID NO: 171460 - RNA, 1701 nt, Artificial Sequence; identical to SEQ ID NO: 169928
  derived and/or modified CDS sequence (opt4) from hemagglutinin__InfluenzaA__AHL95638

SEQ ID NO: 171461 - RNA, 1701 nt, Artificial Sequence; identical to SEQ ID NO: 169928
  derived and/or modified CDS sequence (opt4) from hemagglutinin__InfluenzaA__AHL95650

SEQ ID NO: 171462 - RNA, 1701 nt, Artificial Sequence
  derived and/or modified CDS sequence (opt4) from hemagglutinin__InfluenzaA__AHL95662
augaagaccaucaucgcccugagcuacauccugugccugguguucgcccagaagcugcccggcaacgacaacagcaccgccacccugugccugggccaccacgccgugcccaacggcaccaucgugaagaccaucaccaacgacagaaucgaggugaccaacgccaccgagcuggugcagaacagcagcaucggcgagaucugcgacagcccccaccagauccuggacggcgagaacugcacccugaucgacgcccugcugggcgacccccagugcgacggcuuccagaacaagaagugggaccuguucguggagagaagcaaggccuacagcaacugcuaccccuacgacgugcccgacuacgccagccugagaagccugguggccagcagcggcacccuggaguucaacaacgagagcuucaacugggccggcgugacccagaacggcaccagcagcgccugcaucagaggcagcaacagcagcuucuucagcagacugaacuggcugacccaccugaacuucaaguaccccgcccugaacgugaccaugcccaacaacgagcaguucgacaagcuguacaucuggggcgugcaccaccccggcaccgacaaggaccagaucuuccuguacgcccagagcagcggcagaaucaccgugagcaccaagagaagccagcaggccgugauccccaacaucggcagcagacccagaaucagaaacauccccagcagaaucagcaucuacuggaccaucgugaagcccggcgacauccugcugaucaacagcaccggcaaccugaucgcccccagaggcuacuucaagaucagaagcggcaagagcagcaucaugagaagcgacgcccccaucggcaagugcaagagcgagugcaucacccccaacggcagcauccccaacgacaagcccuuccagaacgugaacagaaucaccuacggcgccugccccagauacgugaagcagagcacccugaagcuggccaccggcaugagaaacgugcccgagaagcagaccagaggcaucuucggcgccaucgccggcuucaucgagaacggcugggagggcaugauggacggcugguacggcuucagacaccagaacagcgagggcagaggccaggccgccgaccugaagagcacccaggccgccaucgaccagaucaacggcaagcugaacagacugaucggcaagaccaacgagaaguuccaccagaucgagaaggaguucagcgagguggagggcagaauccaggaccuggagaaguacguggaggacaccaagaucgaccuguggagcuacaacgccgagcugcuggugacccuggagaaccagcacaccaucgaccugaccgacagcgagaugaacaagcuguucgagaagaccaagaagcagcugagagagaacgccgaggacaugggcaacggcugcuucaagaucuaccacaagugcgacaacgccugcaucggcagcaucagaaacggcaccuacgaccacgacguguacagagacgaggcccugaacaacagauuccagaucaagggcguggagcugaagagcggcuacaaggacuggauccuguggaucagcuucgccaucagcugcuuccugcugugcguggcccugcugggcuucaucaugugggccugccagaagggcaacaucagaugcaacaucugcaucuga

SEQ ID NO: 171463 - RNA, 1701 nt, Artificial Sequence; identical to SEQ ID NO: 170054
  derived and/or modified CDS sequence (opt4) from hemagglutinin__InfluenzaA__AHL95686

SEQ ID NO: 171464 - RNA, 1701 nt, Artificial Sequence; identical to SEQ ID NO: 170054
  derived and/or modified CDS sequence (opt4) from hemagglutinin__InfluenzaA__AHL95698

SEQ ID NO: 171465 - RNA, 1701 nt, Artificial Sequence; identical to SEQ ID NO: 169928
  derived and/or modified CDS sequence (opt4) from hemagglutinin__InfluenzaA__AHL95710

SEQ ID NO: 171466 - RNA, 1701 nt, Artificial Sequence; identical to SEQ ID NO: 171442
  derived and/or modified CDS sequence (opt4) from hemagglutinin__InfluenzaA__AHL95722

SEQ ID NO: 171467 - RNA, 1701 nt, Artificial Sequence; identical to SEQ ID NO: 169918
  derived and/or modified CDS sequence (opt4) from hemagglutinin__InfluenzaA__AHL95734

SEQ ID NO: 171468 - RNA, 1701 nt, Artificial Sequence; identical to SEQ ID NO: 169918
  derived and/or modified CDS sequence (opt4) from hemagglutinin__InfluenzaA__AHL95746

SEQ ID NO: 171469 - RNA, 1701 nt, Artificial Sequence; identical to SEQ ID NO: 170057
  derived and/or modified CDS sequence (opt4) from hemagglutinin__InfluenzaA__AHL95758

SEQ ID NO: 171470 - RNA, 1701 nt, Artificial Sequence; identical to SEQ ID NO: 169928
  derived and/or modified CDS sequence (opt4) from hemagglutinin__InfluenzaA__AHL95770

SEQ ID NO: 171471 - RNA, 1701 nt, Artificial Sequence
  derived and/or modified CDS sequence (opt4) from hemagglutinin__InfluenzaA__AHL95782
augaagaccaucaucgcccugagcuacauccugugccugguguucgcccagaagcugcccggcaacgacaacagcaccgccacccugugccugggccaccacgccgugcccaacggcaccaucgugaagaccaucaccaacgacagaaucgaggugaccaacgccaccgagcuggugcagaacagcagcaucggcgagaucugcaacagcccccaccagauccuggacggcgagaacugcacccugaucgacgcccugcugggcgacccccagugcgacggcuuccagaacaagaagugggaccuguucguggagagaagcaaggccuacagcaacugcuaccccuacgacgugcccgacuacgccagccugagaagccugguggccagcagcggcacccuggaguucaacaacgagagcuucaacuggaccggcgugacccagaacggcaccagcagcgccugcaucagaagaagcaacagcagcuucuucagcagacugaacuggcugacccaccugaacuucaaguaccccgcccugaacgugaccaugcccaacaacgagcaguucgacaagcuguacaucuggggcgugcaccaccccggcaccgacaaggaccagaucuuccuguacgcccagagcagcggcagaaucaccgugagcaccaagagaagccagcaggccgugauccccaacaucggcagcagacccagaaucagaaacauccccagcagaaucagcaucuacuggaccaucgugaagcccggcgacauccugcugaucaacagcaccggcaaccugaucgcccccagaggcuacuucaagaucagaagcggcaagagcagcaucaugagaagcgacgcccccaucggcaagugcaagagcgagugcaucacccccaacggcagcauccccaacgacaagcccuuccagaacgugaacagaaucaccuacggcgccugccccagauacgugaagcagagcacccugaagcuggccaccggcaugagaaacgugcccgagaagcagaccagaggcaucuucggcgccaucgccggcuucaucgagaacggcugggagggcaugguggacggcugguacggcuucagacaccagaacagcgagggcagaggccaggccgccgaccugaagagcacccaggccgccaucgaccagaucaacggcaagcugaacagacugaucggcaagaccaacgagaaguuccaccagaucgagaaggaguucagcgagguggagggcagaauccaggaccuggagaaguacguggaggacaccaagaucgaccuguggagcuacaacgccgagcugcugguggcccuggagaaccagcacaccaucgaccugaccgacagcgagaugaacaagcuguucgagaagaccaagaagcagcugagagagaacgccgaggacaugggcaacggcugcuucaagaucuaccacaagugcgacaacgccugcaucggcagcaucagaaacggcaccuacgaccacgacguguacagagacgaggcccugaacaacagauuccagaucaagggcguggagcugaagagcggcuacaaggacuggauccuguggaucagcuucgccaucagcugcuuccugcugugcguggcccugcugggcuucaucaugugggccugccagaagggcaacaucagaugcaacaucugcaucuga

SEQ ID NO: 171472 - RNA, 1701 nt, Artificial Sequence
  derived and/or modified CDS sequence (opt4) from hemagglutinin__InfluenzaA__AHL95794
augaagaccaucaucgcccugagcuacauccugugccugguguucgcccagaagcugcccggcaacgacaacagcaccgccacccugugccugggccaccacgccgugcccaacggcaccaucgugaagaccaucaccaacgacagaaucgaggugaccaacgccaccgagcuggugcagaacagcagcaucggcgagaucugcgacagcccccaccagauccuggacggcgagaacugcacccugaucgacgcccugcugggcgacccccagugcgacggcuuccagaacaagaagugggaccuguucguggagagaaacaaggccuacagcaacugcuaccccuacgacgugcccgacuacgccagccugagaagccugguggccagcagcggcacccuggaguucaacaacgagagcuucaacugggccggcgugacccagaacggcaccagcagcgccugcaucagaggcagcaacagcagcuucuucagcagacugaacuggcugacccaccugaacuucaaguaccccgcccugaacgugaccaugcccaacaacgagcaguucgacaagcuguacaucuggggcgugcaccaccccggcaccgacaaggaccagaucuuccuguacgcccagagcagcggcagaaucaccgugagcaccaagagaagccagcaggccgugauccccaacaucggcagcagacccagaaucagaaacauccccagcagaaucagcaucuacuggaccaucgugaagcccggcgacauccugcugaucaacagcaccggcaaccugaucgcccccagaggcuacuucaagaucagaagcggcaagagcagcaucaugagaagcgacgcccccaucggcaagugcaagagcgagugcaucacccccaacggcagcauccccaacgacaagcccuuccagaacgugaacagaaucaccuacggcgccugccccagauacgugaagcagagcacccugaagcuggccaccggcaugagaaacgugcccgagaagcagaccagaggcaucuucggcgccaucgccggcuucaucgagaacggcugggagggcaugguggacggcugguacggcuucagacaccagaacagcgagggcagaggccaggccgccgaccugaagagcacccaggccgccaucgaccagaucaacggcaagcugaacagacugaucggcaagaccaacgagaaguuccaccagaucgagaaggaguucagcgagguggagggcagaauccaggaccuggagaaguacguggaggacaccaagaucgaccuguggagcuacaacgccgagcugcugguggcccuggagaaccagcacaccaucgaccugaccgacagcgagaugaacaagcuguucgagaagaccaagaagcagcugagagagaacgccgaggacaugggcaacggcugcuucaagaucuaccacaagugcgacaacgccugcaucggcagcaucagaaacggcaccuacgaccacgacguguacagagacgaggcccugaacaacagauuccagaucaagggcguggagcugaagagcggcuacaaggacuggauccuguggaucagcuucgccaucagcugcuuccugcugugcguggcccugcugggcuucaucaugugggccugccagaagggcaacaucagaugcaacaucugcaucuga

SEQ ID NO: 171473 - RNA, 1701 nt, Artificial Sequence
  derived and/or modified CDS sequence (opt4) from hemagglutinin__InfluenzaA__AHL95806
augaagaccaucaucgcccugagcuacauccugugccugguguucgcccagaagcugcccggcaacgacaacagcaccgccacccugugccugggccaccacgccgugcccaacggcaccaucgugaagaccaucaccaacgacagaaucgaggugaccaacgccaccgagcuggugcagaacagcagcaucggcgagaucugcgacagcccccaccagauccuggacggcgagaacugcacccugaucgacgcccugcugggcgacccccagugcgacggcuuccagaacaagaagugggaccuguucguggagagaagcaaggccuacagcaacugcuaccccuacgacgugcccgacuacgccagccugagaagccugguggccagcagcggcacccuggaguucaacaacgagagcuucaacugggccggcgugacccagaacggcaccagcagcgccugcaucagaggcagcaacagcagcuucuucagcagacugaacuggcugacccaccugaacuucaaguaccccgcccugaacgugaccaugcccaacaacgagcaguucgacaagcuguacaucuggggcgugcaccaccccggcaccgacaaggaccagaucuuccuguacgcccagagcagcggcagaaucaccgugagcaccaagagaagccagcaggccgugauccccaacaucggcagcagacccagaaucagaaacauccccagcagaaucagcaucuacuggaccaucgugaagcccggcgacauccugcugaucaacagcaccggcaaccugaucgcccccagaggcuacuucaagaucagaagcggcaagagcagcaucaugagaagcgacgcccccaucggcaagugcaagagcgagugcaucacccccaacggcagcauccccaacgacaagcccuuccagaacgugaacagaaucaccuacggcgccugccccagauacgugaagcagagcacccugaagcuggccaccggcaugagaaacgugcccgagaagcagaccagaggcaucuucggcgccaucgccggcuucaucgagaacggcugggagggcaugguggacggcugguacggcuucagacaccagaacagcgagggcagaggccaggccgccgaccugaagagcacccaggccgccaucgaccagaucaacggcaagcugaacagacugaucggcaagaccaacgagaaguuccaccagaucgagaaggaguucagcgagguggagggcagaauccaggaccuggagaaguacguggaggacaccaagaucgaccuguggagcuacaacgccgagcugcugguggcccuggagaaccagcacaccaucgaccugaccgacagcgagaugaacaagcuguucgagaagaccaagaagcagcugagagagaacgccgaggacaugggcaacggcugcuucaagaucuaccacaagugcgacaacgccugcaucggcagcaucagaaacggcaccuacgaccacgacguguacagagacgaggcccugaacaacagauuccagaucaagggcguggagcugaagagcggcuacaaggacuggauccuguggaucagcuucgccaucagcugcuuccugcugugcguggcccugcugggcagcaucaugugggccugccagaagggcaacaucagaugcaacaucugcaucuga

SEQ ID NO: 171474 - RNA, 1701 nt, Artificial Sequence; identical to SEQ ID NO: 170054
  derived and/or modified CDS sequence (opt4) from hemagglutinin__InfluenzaA__AHL95818

SEQ ID NO: 171475 - RNA, 1701 nt, Artificial Sequence; identical to SEQ ID NO: 169918
  derived and/or modified CDS sequence (opt4) from hemagglutinin__InfluenzaA__AHL95830

SEQ ID NO: 171476 - RNA, 1701 nt, Artificial Sequence; identical to SEQ ID NO: 170054
  derived and/or modified CDS sequence (opt4) from hemagglutinin__InfluenzaA__AHL95842

SEQ ID NO: 171477 - RNA, 1701 nt, Artificial Sequence; identical to SEQ ID NO: 169918
  derived and/or modified CDS sequence (opt4) from hemagglutinin__InfluenzaA__AHL95854

SEQ ID NO: 171478 - RNA, 1701 nt, Artificial Sequence; identical to SEQ ID NO: 169928
  derived and/or modified CDS sequence (opt4) from hemagglutinin__InfluenzaA__AHL95866

SEQ ID NO: 171479 - RNA, 1701 nt, Artificial Sequence
  derived and/or modified CDS sequence (opt4) from hemagglutinin__InfluenzaA__AHL95878
augaaggccauccuggugaucaugcuguacaccuucgccaccgccaacgccgacacccugugcaucggcuaccacgccaacaacagcaccgacaccguggacaccgugcuggagaagaacgugaccgugacccacagcgugaaccugcuggaggacaagcacaacggcaagcugugcaagcugagaggcgugagcccccugcaccugggcaagugcaacaucgccggcuggauccugggcaaccccgagugcgagagccugagcaccgccagcagcuggagcuacaucguggagaccagcggcagcgacaacggcaccugcuaccccggcgacuucaucgacuacgaggagcugagagagcagcugagcagcgugagcagcuucgagagauucgagaucuuccccaagaccagcagcuggcccaaccacgacagcaacaagggcgugaccgccgccugcccccacgccggcgccaagggcuucuacaagaaccugaucuggcuggugaagaagggcaacagcuaccccaagcugagcaucagcuacaucaacgacaagggcaaggaggugcuggugcuguggggcauccaccaccccagcaccaccgccgaccagcagagccuguaccagaacgccgacaccuacguguucgugggcaccagcagauacagcaagaaguucaagcccgagaucgccaucagacccaaggugagagaccaggagggcagaaugaacuacuacuggacccugguggagcccggcgacaagaucaccuucgaggccaccggcaaccugguggugcccagauacgccuucgccauggagagaaacgccggcagcggcaucaucaucagcgacacccccgugcacgacugcaacaccaccugccagacccccaagggcgccaucaacaccagccugcccuuccagaacauccaccccaucaccaucggcaagugccccaaguacgugaagagcaccaagcugagacuggccaccggccugagaaacgugcccagcauccagagcagaggccuguucggcgccaucgccggcuucaucgagggcggcuggaccggcaugguggacggcugguacggcuaccaccaccagaacgagcagggcagcggcuacgccgccgaccugaagagcacccagaacgccaucgacaagaucaccaacaaggugaacagcgugaucgagaagaugaacacccaguucaccgccgugggcaaggaguucaaccaccuggagaagagaaucgagaaccugaacaagaagguggacgacggcuuccuggacaucuggaccuacaacgccgagcugcuggugcugcuggagaacgagagaacccuggacuaccacgacagcaacgugaagaaccuguacgagaaggugagaaaccagcugaagaacaacgccaaggagaucggcaacggcugcuucgaguucuaccacaagugcgacaacaccugcauggagagcgugaagaacggcaccuacgacuaccccaaguacagcgaggaggccaagcugaacagagaggagaucgacggcgugaagcuggagagcaccagaaucuaccagauccuggccaucuacagcaccgccgccagcagccuggugcugguggugagccugggcgccaucagcuucuggaugugcagcaacggcagccugcagugcagaaucugcaucuga

SEQ ID NO: 171480 - RNA, 1701 nt, Artificial Sequence; identical to SEQ ID NO: 169928
  derived and/or modified CDS sequence (opt4) from hemagglutinin__InfluenzaA__AHL95889

SEQ ID NO: 171481 - RNA, 1701 nt, Artificial Sequence; identical to SEQ ID NO: 170054
  derived and/or modified CDS sequence (opt4) from hemagglutinin__InfluenzaA__AHL95901

SEQ ID NO: 171482 - RNA, 1701 nt, Artificial Sequence; identical to SEQ ID NO: 170054
  derived and/or modified CDS sequence (opt4) from hemagglutinin__InfluenzaA__AHL95913

SEQ ID NO: 171483 - RNA, 1701 nt, Artificial Sequence
  derived and/or modified CDS sequence (opt4) from hemagglutinin__InfluenzaA__AHL95937
augaagaccaucaucgcccugagcuacauccugugccugguguucgcccagaagcugcccggcaacgacaacagcaccgccacccugugccugggccaccacgccgugcccaacggcaccaucgugaagaccaucaccaacgacagaaucgaggugaccaacgccaccgagcuggugcagaacagcagcaucggcgagaucugcgacagcccccaccagauccuggacggcgagaacugcacccugaucgacgcccugcugggcgacccccagugcgacggcuuccagaacaagaagugggaccuguucguggagagaagcaaggccuacagcaacugcuaccccuacgacgugcccgacuacgccagccugagaagccugguggccagcagcggcacccuggaguucaacaacgagagcuucaacugggccggcgugacccagaacggcaccagcagcgccugcaucagaggcagcaacagcagcuucuucagcagacugaacuggcugacccaccugaacuucaaguaccccgcccugaacgugaccaugcccaacaacgagcaguucgacaagcuguacaucuggggcgugcaccaccccggcaccgacaaggaccagaucuuccuguacgcccagagcagcggcagaaucaccgugagcaccaagagaagccagcaggccgugauccccaacaucggcagcagacccagaaucagaaacauccccagcagaaucagcaucuacuggaccaucgugaagcccggcgacauccugcugaucaacagcaccggcaaccugaucgcccccagaggcuacuucaagaucagaagcggcaagagcagcaucaugagaagcgacgcccccaucggcaagugcaagagcgagugcaucacccccaacggcagcauccccaacgacaagcccuuccagaacgugaacagaaucaccuacggcgccugccccagauacgugaagcagagcacccugaagcuggccaccggcaugagaaacgugcccgagaagcagaccagaggcaucuucggcgccaucgccggcuucaucgagaacggcugggagggcaugguggacggcugguacggcuucagacaccagaacagcgagggcagaggccaggccgccgaccugaagagcacccaggccgccaucgaccagaucaacggcaagcugaacagacugaucggcaagaccaacgagaaguuccaccagaucgagaaggaguucagcgagguggagggcagaauccaggaccuggagaaguacguggaggacaccaagaccgaccuguggagcuacaacgccgagcugcugguggcccuggagaaccagcacaccaucgaccugaccgacagcgagaugaacaagcuguucgagaagaccaagaagcagcugagagagaacgccgaggacaugggcaacggcugcuucaagaucuaccacaagugcgacaacgccugcaucggcagcaucagaaacggcaccuacgaccacgacguguacagagacgaggcccugaacaacagauuccagaucaagggcguggagcugaagagcggcuacaaggacuggauccuguggaucagcuucgccaucagcugcuuccugcugugcguggcccugcugggcuucaucaugugggccugccagaagggcaacaucagaugcaacaucugcaucuga

SEQ ID NO: 171484 - RNA, 1701 nt, Artificial Sequence
  derived and/or modified CDS sequence (opt4) from hemagglutinin__InfluenzaA__AHL95949
augaagaccaucaucgcccugagcuacauccugugccugguguucgcccagaagcugcccggcaacgacaacagcaccgccacccugugccugggccaccacgccgugcccaacggcaccaucgugaagaccaucaccaacgacagaaucgaggugaccaacgccaccgagcuggugcagaacagcagcaucggcgagaucugcgacagcccccaccagauccuggacggcgagaacugcacccugaucgacgcccugcugggcgacccccagugcgacggcuuccagaacaagaagugggaccuguucguggagagaagcaaggccuacagcaacugcuaccccuacgacgugcccgacuacgccagccugagaagccugguggccagcagcggcacccuggaguucaacaacgagagcuucaacuggaccggcgugacccagaacggcaccagcagcgccugcaucagaagaagcaacaacagcuucuucagcagacugaacuggcugacccacagcaacuucaaguaccccgcccugaacaugaccaugcccaacaacgagcaguucgacaagcuguacaucuggggcgugcaccaccccggcaccgacaaggaccagaucuuccuguacgcccagagcagcggcagaaucaccgugagcaccaagagaagccagcaggccgugauccccaacaucggcagcagacccagaaucagaaacauccccagcagaaucagcaucuacuggaccaucgugaagcccggcgacauccugcugaucaacagcaccggcaaccugaucgcccccagaggcuacuucaagaucagaagcggcaagagcagcaucaugagaagcgacgcccccaucggcaagugcaagagcgagugcaucacccccaacggcagcauccccaacgacaagcccuuccagaacgugaacagaaucaccuacggcgccugccccagauacgugaagcagagcacccugaagcuggccaccggcaugagaaacgugcccgagaagcagaccagaggcaucuucggcgccaucgccggcuucaucgagaacggcugggagggcaugauggacggcugguacggcuucagacaccagaacagcgagggcagaggccaggccgccgaccugaagagcacccaggccgccaucgaccagaucaacggcaagcugaacagacugaucggcaagaccaacgagaaguuccaccagaucgagaaggaguucagcgagguggagggcagaauccaggaccuggagaaguacguggaggacaccaagaucgaccuguggagcuacaacgccgagcugcugguggcccuggagaaccagcacaccaucgaccugaccgacagcgagaugaacaagcuguucgagaagaccaagaagcagcugagagagaacgccgaggacaugggcaacggcugcuucaagaucuaccacaagugcgacaacgccugcaucggcagcaucagaaacggcaccuacgaccacgacguguacagagacgaggcccugaacaacagauuccagaucaagggcguggagcugaagagcggcuacaaggacuggauccuguggaucagcuucgccaucagcugcuuccugcugugcguggcccugcugggcuucaucaugugggccugccagaagggcaacaucagaugcaacaucugcaucuga

SEQ ID NO: 171485 - RNA, 1701 nt, Artificial Sequence; identical to SEQ ID NO: 169928
  derived and/or modified CDS sequence (opt4) from hemagglutinin__InfluenzaA__AHL95961

SEQ ID NO: 171486 - RNA, 1701 nt, Artificial Sequence; identical to SEQ ID NO: 169928
  derived and/or modified CDS sequence (opt4) from hemagglutinin__InfluenzaA__AHL95973

SEQ ID NO: 171487 - RNA, 1701 nt, Artificial Sequence; identical to SEQ ID NO: 169928
  derived and/or modified CDS sequence (opt4) from hemagglutinin__InfluenzaA__AHL95985

SEQ ID NO: 171488 - RNA, 1701 nt, Artificial Sequence
  derived and/or modified CDS sequence (opt4) from hemagglutinin__InfluenzaA__AHL95997
augaagaccaucaucgcccugagcuacauccugugccugguguucgcccagaagcugcccggcaacgacaacagcaccgccacccugugccugggccaccacgccgugcccaacggcaccaucgugaagaccaucaccaacgacagaaucgaggugaccaacgccaccgagcuggugcagaacagcagcaucggcgagaucugcgacagcccccaccagauccuggacggcgagaacugcacccugaucgacgcccugcugggcgacccccagugcgacggcuuccagaacaagaagugggaccuguucguggagagaagcaaggccuacagcaacugcuaccccuacgacgugcccgacuacgccagccugagaagccugguggccagcagcggcacccuggaguucaacaacgagagcuucaacugggccggcgugacccagaacggcaccagcagcagcugcaucagaggcagcaagagcagcuucuucagcagacugaacuggcugacccaccugaacuucaaguaccccgcccugaacgugaccaugcccaacaacgagcaguucgacaagcuguacaucuggggcgugcaccaccccggcaccgacaaggaccagaucuuccuguacgcccagagcagcggcagaaucaccgugagcaccaagagaagccagcaggccgugauccccaacaucggcagcagacccagaaucagaaacauccccagcagaaucagcaucuacuggaccaucgugaagcccggcgacauccugcugaucaacagcaccggcaaccugaucgcccccagaggcuacuucaagaucagaagcggcaagagcagcaucaugagaagcgacgcccccaucggcaagugcaagagcgagugcaucacccccaacggcagcauccccaacgacaagcccuuccagaacgugaacagaaucaccuacggcgccugccccagauacgugaagcagagcacccugaagcuggccaccggcaugagaaacgugcccgagaagcagaccagaggcaucuucggcgccaucgccggcuucaucgagaacggcugggagggcaugauggacggcugguacggcuucagacaccagaacagcgagggcagaggccaggccgccgaccugaagagcacccaggccgccaucgaccagaucaacggcaagcugaacagacugaucggcaagaccaacgagaaguuccaccagaucgagaaggaguucagcgagguggagggcagaauccaggaccuggagaaguacguggaggacaccaagaucgaccuguggagcuacaacgccgagcugcugguggcccuggagaaccagcacaccaucgaccugaccgacagcgagaugaacaagcuguucgagaagaccaagaagcagcugagagagaacgccgaggacaugggcaacggcugcuucaagaucuaccacaagugcgacaacgccugcaucggcagcaucagaaacggcaccuacgaccacgacguguacagagacgaggcccugaacaacagauuccagaucaagggcguggagcugaagagcggcuacaaggacuggauccuguggaucagcuucgccaucagcugcuuccugcugugcguggcccugcugggcuucaucaugugggccugccagaagggcaacaucagaugcaacaucugcaucuga

SEQ ID NO: 171489 - RNA, 1701 nt, Artificial Sequence
  derived and/or modified CDS sequence (opt4) from hemagglutinin__InfluenzaA__AHL96021
augaagaccaucaucgcccugagcuacauccugugccugguguucgcccagaagcugcccggcaacgacaacagcaccgccacccugugccugggccaccacgccgugcccaacggcaccaucgugaagaccaucaccaacgacagaaucgaggugaccaacgccaccgagcuggugcagaacagcagcaucggcgagaucugcgacagcccccaccagauccuggacggcgagaacugcacccugaucgacgcccugcugggcgacccccagugcgacggcuuccagaacaagaagugggaccuguucguggagagaagcaaggccuacagcaacugcuaccccuacgacgugcccgacuacgccagccugagaagccugguggccagcagcggcacccuggaguucaacaacgagagcuucaacugggccggcgugacccagaacggcaccagcagcgccugcaucagaggcagcaagagcagcuucuucagcagacugaacuggcugacccaccugaacuucaaguaccccgcccugaacgugaccaugcccaacaacgagcaguucgacaagcuguacaucuggggcgugcaccaccccggcaccgacaaggaccagaucuuccuguacgcccagagcagcggcagaaucaccgugagcaccaagagaagccagcaggccgugauccccaacaucggcagcagacccagaaucagaaacauccccagcagaaucagcaucuacuggaccaucgugaagcccggcgacauccugcugaucaacagcaccggcaaccugaucgcccccagaggcuacuucaagaucagaagcggcaagagcagcaucaugagaagcgacgcccccaucggcaagugcaagagcgagugcaucacccccaacggcagcauccccaacgacaagcccuuccagaacgugaacagaaucaccuacggcgccugccccagauacgugaagcagagcacccugaagcuggccaccggcaugagaaacgugcccgagaagcagaccagaggcaucuucggcgccaucgccggcuucaucgagaacggcugggagggcaugauggacggcugguacggcuucagacaccagaacagcgagggcagaggccaggccgccgaccugaagagcacccaggccgccaucgaccagaucaacggcaagcugaacagacugaucggcaagaccaacgagaaguuccaccagaucgagaaggaguucagcgagguggagggcagaauccaggaccuggagaaguacguggaggacaccaagaucgaccuguggagcuacaacgccgagcugcugguggcccuggagaaccagcacaccaucgaccugaccgacagcgagaugaacaagcuguucgagaagaccaagaagcagcugagagagaacgccgaggacaugggcaacggcugcuucaagaucuaccacaagugcgacaacgccugcaucggcagcaucagaaacggcaccuacgaccacgacguguacagagacgaggcccugaacaacagauuccagaucaagggcguggagcugaagagcggcuacaaggacuggauccuguggaucagcuucgccaucagcugcuuccugcugugcguggcccugcugggcuucaucaugugggccugccagaagggcaacaucagaugcaacaucugcaucuga

SEQ ID NO: 171490 - RNA, 1701 nt, Artificial Sequence; identical to SEQ ID NO: 169928
  derived and/or modified CDS sequence (opt4) from hemagglutinin__InfluenzaA__AHL96033

SEQ ID NO: 171491 - RNA, 1701 nt, Artificial Sequence; identical to SEQ ID NO: 170183
  derived and/or modified CDS sequence (opt4) from hemagglutinin__InfluenzaA__AHL96045

SEQ ID NO: 171492 - RNA, 1701 nt, Artificial Sequence; identical to SEQ ID NO: 170054
  derived and/or modified CDS sequence (opt4) from hemagglutinin__InfluenzaA__AHL96056

SEQ ID NO: 171493 - RNA, 1701 nt, Artificial Sequence; identical to SEQ ID NO: 169918
  derived and/or modified CDS sequence (opt4) from hemagglutinin__InfluenzaA__AHL96068

SEQ ID NO: 171494 - RNA, 1701 nt, Artificial Sequence; identical to SEQ ID NO: 169928
  derived and/or modified CDS sequence (opt4) from hemagglutinin__InfluenzaA__AHL96080

SEQ ID NO: 171495 - RNA, 1701 nt, Artificial Sequence
  derived and/or modified CDS sequence (opt4) from hemagglutinin__InfluenzaA__AHL96092
augaagaccaucaucgcccugagcuacauccugugccugguguucgcccagaagcugcccggcaacgacaacagcaccgccacccugugccugggccaccacgccgugcccaacggcaccaucgugaagaccaucaccaacgacagaaucgaggugaccaacgccaccgagcuggugcagaacagcagcaucggcgagaucugcgacagcccccaccagauccuggacggcgagaacugcacccugaucgacgcccugcugggcgacccccagugcgacggcuuccagaacaagaagugggaccuguucaucgagagaagcaaggccuacagcaacugcuaccccuacgacgugcccgacuacgccagccugagaagccugguggccagcagcggcacccuggaguucaacaacgagagcuucaacugggccggcgugacccagaacggcaccagcagcgccugcaucagaggcagcaacagcagcuucuucagcagacugaacuggcugacccaccugaacuucaaguaccccgcccugaacgugaccaugcccaacaacgagcaguucgacaagcuguacaucuggggcgugcaccaccccggcaccgacaaggaccagaucuuccuguacgcccagagcagcggcagaaucaccgugagcaccaagagaagccagcaggccgugauccccaacaucggcagcagacccagaaucagaaacauccccagcagaaucagcaucuacuggaccaucgugaagcccggcgacauccugcugaucaacagcaccggcaaccugaucgcccccagaggcuacuucaagaucagaagcggcaagagcagcaucaugagaagcgacgcccccaucggcaagugcaagagcgagugcaucacccccaacggcagcauccccaacgacaagcccuuccagaacgugaacagaaucaccuacggcgccugccccagauacgugaagcagagcacccugaagcuggccaccggcaugagaaacgugcccgagaagcagaccagaggcaucuucggcgccaucgccggcuucaucgagaacggcugggagggcaugguggacggcugguacggcuucagacaccagaacagcgagggcagaggccaggccgccgaccugaagagcacccaggccgccaucgaccagaucaacggcaagcugaacagacugaucggcaagaccaacgagaaguuccaccagaucgagaaggaguucagcgagguggagggcagaauccaggaccuggagaaguacguggaggacaccaagaucgaccuguggagcuacaacgccgagcugcugguggcccuggagaaccagcacaccaucgaccugaccgacagcgagaugaacaagcuguucgagaagaccaagaagcagcugagagagaacgccgaggacaugggcaacggcugcuucaagaucuaccacaagugcgacaacgccugcaucggcagcaucagaaacggcaccuacgaccacgacguguacagagacgaggcccugaacaacagauuccagaucaagggcguggagcugaagagcggcuacaaggacuggauccuguggaucagcuucgccaucagcugcuuccugcugugcguggcccugcugggcuucaucaugugggccugccagaagggcaacaucagaugcaacaucugcaucuga

SEQ ID NO: 171496 - RNA, 1701 nt, Artificial Sequence
  derived and/or modified CDS sequence (opt4) from hemagglutinin__InfluenzaA__AHL96104
augaagaccaucaucgcccugagcuacauccugugccugguguucgcccagaagcugcccggcaacgacaacagcaccgccacccugugccugggccaccacgccgugcccaacggcaccaucgugaagaccaucaccaacgacagaaucgaggugaccaacgccaccgagcuggugcagaacagcagcaucggcgagaucugcgacagcccccaccagauccuggacggcgagaacugcacccugaucgacgcccugcugggcgacccccagugcgacggcuuccagaacaagaagugggaccuguucguggagagaagcaaggccuacagcaacugcuaccccuacgacgugcccgacuacgccagccugagaagccugguggccagcagcggcacccuggaguucaacaacgagagcuucaacuggaccggcgugacccagaacggcaccagcagcgccugcaucagaagaagcaacagcagcuucuucagcagacugaacuggcugacccaccugaacuucaaguaccccgcccugaacgugaccaugcccaacaacgagcaguucgacaagcuguacaucuggggcgugcaccaccccggcaccgacaaggaccagaucuuccuguacgcccagagcagcggcagaaucaccgugagcaccaagagaagccagcaggccgugauccccaacaucggcagcagacccagaaucagaaacauccccagcagaaucagcaucuacuggaccaucgugaagcccggcgacauccugcugaucaacagcaccggcaaccugaucgcccccagaggcuacuucaagaucagaagcggcaagagcagcaucaugagaagcgacgcccccaucggcaagugcaagagcgagugcaucacccccaacggcagcauccccaacgacaagcccuuccagaacgugaacagaaucaccuacggcgccugccccagauacgugaagcagagcacccugaagcuggccaccggcaugagaaacgugcccgagagacagaccagaggcaucuucggcgccaucgccggcuucaucgagaacggcugggagggcaugguggacggcugguacggcuucagacaccagaacagcgagggcagaggccaggccgccgaccugaagagcacccaggccgccaucgaccagaucaacggcaagcugaacagacugaucggcaagaccaacgagaaguuccaccagaucgagaaggaguucagcgagguggagggcagaauccaggaccuggagaaguacguggaggacaccaagaucgaccuguggagcuacaacgccgagcugcugguggcccuggagaaccagcacaccaucgaccugaccgacagcgagaugaacaagcuguucgagaagaccaagaagcagcugagagagaacgccgaggacaugggcaacggcugcuucaagaucuaccacaagugcgacaacgccugcaucggcagcaucagaaacggcaccuacgaccacaacguguacagagacgaggcccugaacaacagauuccagaucaagggcguggagcugaagagcggcuacaaggacuggauccuguggaucagcuucgccaucagcugcuuccugcugugcguggcccugcugggcuucaucaugugggccugccagaagggcaacaucagaugcaacaucugcaucuga

SEQ ID NO: 171497 - RNA, 1701 nt, Artificial Sequence; identical to SEQ ID NO: 170542
  derived and/or modified CDS sequence (opt4) from hemagglutinin__InfluenzaA__AHL96116

SEQ ID NO: 171498 - RNA, 1701 nt, Artificial Sequence; identical to SEQ ID NO: 169918
  derived and/or modified CDS sequence (opt4) from hemagglutinin__InfluenzaA__AHL96128

SEQ ID NO: 171499 - RNA, 1701 nt, Artificial Sequence; identical to SEQ ID NO: 170054
  derived and/or modified CDS sequence (opt4) from hemagglutinin__InfluenzaA__AHL96152

SEQ ID NO: 171500 - RNA, 1701 nt, Artificial Sequence
  derived and/or modified CDS sequence (opt4) from hemagglutinin__InfluenzaA__AHL96164
augaagaccaucaucgcccugagcuacauccugugccugguguucgcccagaagcugcccggcaacgacaacagcaccgccacccugugccugggccaccacgccgugcccaacggcaccaucgugaagaccaucaccaacgacagaaucgaggugaccaacgccaccgagcuggugcagaacagcagcaucggcgagaucugcgacagcccccaccagauccuggacggcgagaacugcacccugaucgacgcccugcugggcgacccccagugcgacggcuuccagaacaagaagugggaccuguucguggagagaagcaaggccuacagcaacugcuaccccuacgacgugcccgacuacgccagccugagaagccugguggccagcagcggcacccuggaguucaacaacgagagcuucaacugggccggcgugacccagaacggcaccagcagcgccugcaucagaggcagcaacagcagcuucuucagcagacugaacuggcugacccaccugaacuucaaguaccccgcccugaacgugaccaugcccaacaacgagcaguucgacaagcuguacaucuggggcgugcaccaccccggcaccgacaaggaccagaucuuccuguacgcccagagcagcggcagaaucaccgugagcaccaagagaagccagcaggccgugauccccaacaucggcagcagacccagaaucagaaacauccccagcagaaucagcaucuacuggaccaucgugaagcccggcgacauccugcugaucaacagcaccggcaaccugaucgcccccagaggcuacuucaagaucagaagcggcaagagcagcaucaugagaagcgacgcccccaucggcaagugcaagagcgagugcaucacccccaacggcagcauccccaacgacaagcccuuccagaacgugaacagaaucaccuacggcgccugccccagauacgugaagcagagcacccugaagcuggccaccggcaugagaaacgugcccgagaagcagaccagaggcaucuucggcgccaucgccggcuucaucgagaacggcugggagggcaugguggacggcugguacggcuucagacaccagaacagcgagggcagaggccaggccgccgaccugaagagcacccaggccgccaucgaccagaucaacggcaagcugaacagacugaucggcaagaccaacgagaaguuccaccagaucgagaaggaguucagcgagguggagggcagaauccaggaccuggagaaguacguggaggacaccaagaucgaccuguggagcuacaacgccgagcugcugguggcccuggagaaccagcacaccaucgaccugaccgacagcgagaugaacaagcuguucgagaagaccaagaagcagcugagagagaacgccgaggacaugggcaacggcugcuucaagaucuaccacaagugcgacaacgccugcaucggcagcaucagaaacggcaccuacgaccacgacguguacagagacgaggcccugaacaacagauuccagaucaagggcguggagcugaagagcggcuacaagaacuggauccuguggaucagcuucgccaucagcugcuuccugcugugcguggcccugcugggcuucaucaugugggccugccagaagggcaacaucagaugcaacaucugcaucuga

SEQ ID NO: 171501 - RNA, 1701 nt, Artificial Sequence; identical to SEQ ID NO: 170054
  derived and/or modified CDS sequence (opt4) from hemagglutinin__InfluenzaA__AHL96176

SEQ ID NO: 171502 - RNA, 1701 nt, Artificial Sequence; identical to SEQ ID NO: 170054
  derived and/or modified CDS sequence (opt4) from hemagglutinin__InfluenzaA__AHL96188

SEQ ID NO: 171503 - RNA, 1701 nt, Artificial Sequence
  derived and/or modified CDS sequence (opt4) from hemagglutinin__InfluenzaA__AHL96200
augaagaccaucaucgcccugagcuacauccugugccugguguucgcccagaagcugcccggcaacgacaacagcaccgccacccugugccugggccaccacgccgugcccaacggcaccaucgugaagaccaucaccaacgacagaaucgaggugaccaacgccaccgagcuggugcagaacagcagcaucggcgagaucugcgacagcccccaccaggugcuggacggcgagaacugcacccugaucgacgcccugcugggcgacccccagugcgacggcuuccagaacaagaagugggaccuguucguggagagaagcaaggccuacagcaacugcuaccccuacgacgugcccgacuacgccagccugagaagccugguggccagcagcggcacccuggaguucaacaacgagagcuucaacugggccggcgugacccagaacggcaccagcagcgccugcaucagaggcagcaacagcagcuucuucagcagacugaacuggcugacccaccugaacuucaaguaccccgcccugaacgugaccaugcccaacaacgagcaguucgacaagcuguacaucuggggcgugcaccaccccggcaccgacaaggaccagaucuuccuguacgcccagagcagcggcagaaucaccgugagcaccaagagaagccagcaggccgugauccccaacaucggcagcagacccagaaucagaaacauccccagcagaaucagcaucuacuggaccaucgugaagcccggcgacauccugcugaucaacagcaccggcaaccugaucgcccccagaggcuacuucaagaucagaagcggcaagagcagcaucaugagaagcgacgcccccaucggcaagugcaagagcgagugcaucacccccaacggcagcauccccaacgacaagcccuuccagaacgugaacagaaucaccuacggcgccugccccagauacgugaagcagagcacccugaagcuggccaccggcaugagaaacgugcccgagaagcagaccagaggcaucuucggcgccaucgccggcuucaucgagaacggcugggagggcaugguggacggcugguacggcuucagacaccagaacagcgagggcagaggccaggccgccgaccugaagagcacccaggccgccaucgaccagaucaacggcaagcugaacagacugaucggcaagaccaacgagaaguuccaccagaucgagaaggaguucagcgagguggagggcagaauccaggaccuggagaaguacguggaggacaccaagaucgaccuguggagcuacaacgccgagcugcugguggcccuggagaaccagcacaccaucgaccugaccgacagcgagaugaacaagcuguucgagaagaccaagaagcagcugagagagaacgccgaggacaugggcaacggcugcuucaagaucuaccacaagugcgacaacgccugcaucggcagcaucagaaacggcaccuacgaccacgacguguacagagacgaggcccugaacaacagauuccagaucaagggcguggagcugaagagcggcuacaaggacuggauccuguggaucagcuucgccaucagcugcuuccugcugugcguggcccugcugggcuucaucaugugggccugccagaagggcaacaucagaugcaacaucugcaucuga

SEQ ID NO: 171504 - RNA, 1701 nt, Artificial Sequence; identical to SEQ ID NO: 169918
  derived and/or modified CDS sequence (opt4) from hemagglutinin__InfluenzaA__AHL96212

SEQ ID NO: 171505 - RNA, 1701 nt, Artificial Sequence; identical to SEQ ID NO: 170527
  derived and/or modified CDS sequence (opt4) from hemagglutinin__InfluenzaA__AHL96224

SEQ ID NO: 171506 - RNA, 1701 nt, Artificial Sequence
  derived and/or modified CDS sequence (opt4) from hemagglutinin__InfluenzaA__AHL96236
augaagaccaucaucgcccugagcuacauccugugccugguguucgcccagaagcugcccggcaacgacaacagcaccgccacccugugccugggccaccacgccgugcccaacggcaccaucgugaagaccaucaccaacgacagaaucgaggugaccaacgccaccgagcuggugcagaacagcagcaugggcgagaucugcgacagcccccaccagauccuggacggcgagaacugcacccugaucgacgcccugcugggcgacccccagugcgacggcuuccagaacaagaagugggaccuguucguggagagaagcaaggccuacagcaacugcuaccccuacgacgugcccgacuacgccagccugagaagccugguggccagcagcggcacccuggaguucaacaacgagagcuucaacuggaccggcgugacccagaacggcaccagcagcgccugcaucagaagaagcaacagcagcuucuucagcagacugaacuggcugacccaccugaacuucaaguaccccgcccugaacgugaccaugcccaacaacgagcaguucgacaagcuguacaucuggggcgugcaccaccccggcaccgacaaggaccagaucuuccuguacgcccagagcagcggcagaaucaccgugagcaccaagagaagccagcaggccgugauccccaacaucggcagcagacccagaaucagaaacauccccagcagaaucagcaucuacuggaccaucgugaagcccggcgacauccugcugaucaacagcaccggcaaccugaucgcccccagaggcuacuucaagaucagaagcggcaagagcagcaucaugagaagcgacgcccccaucggcaagugcaagagcgagugcaucacccccaacggcagcauccccaacgacaagcccuuccagaacgugaacagaaucaccuacggcgccugccccagauacgugaagcagagcacccugaagcuggccaccggcaugagaaacgugcccgagaagcagaccagaggcaucuucggcgccaucgccggcuucaucgagaacggcugggagggcaugguggacggcugguacggcuucagacaccagaacagcgagggcagaggccaggccgccgaccugaagagcacccaggccgccaucgaccagaucaacggcaagcugaacagacugaucggcaagaccaacgagaaguuccaccagaucgagaaggaguucagcgagguggagggcagaauccaggaccuggagaaguacguggaggacaccaagaucgaccuguggagcuacaacgccgagcugcugguggcccuggagaaccagcacaccaucgaccugaccgacagcgagaugaacaagcuguucgagaagaccaagaagcagcugagagagaacgccgaggacaugggcaacggcugcuucaagaucuaccacaagugcgacaacgccugcaucgagagcaucagaaacggcaccuacgaccacgacguguacagagacgaggcccugaacaacagauuccagaucaagggcguggagcugaagagcggcuacaagaacuggauccuguggaucagcuucgccaucagcugcuuccugcugugcguggcccugcugggcuucaucaugugggccugccagaagggcaacaucagaugcaacaucugcaucuga

SEQ ID NO: 171507 - RNA, 1701 nt, Artificial Sequence
  derived and/or modified CDS sequence (opt4) from hemagglutinin__InfluenzaA__AHL96248
augaagaccaucaucgcccugggcuacauccugugccugguguucgcccagaagcugcccggcaacgacaacagcaccgccacccugugccugggccaccacgccgugcccaacggcaccaucgugaagaccaucaccaacgacagaaucgaggugaccaacgccaccgagcuggugcagaacagcagcaucggcgagaucugcgacagcccccaccagauccuggacggcgagaacugcacccugaucgacgcccugcugggcgacccccagugcgacggcuuccagaacaagaagugggaccuguucaucgagagaagcaaggccuacagcaacugcuaccccuacgacgugcccgacuacgccagccugagaagccugguggccagcagcggcacccuggaguucaacaacgagagcuucaacuggaccggcgugacccagaacggcaccagcagcgccugcaucagaagaagcaacagcagcuucuucagcagacugaacuggcugacccaccugaacuucaaguaccccgcccugaacgugaccaugcccaacaacgagcaguucgacaagcuguacaucuggggcgugcaccaccccggcaccgacaaggaccagaucuuccuguacgcccagagcagcggcagaaucaccgugagcaccaagagaagccagcaggccgugauccccaacaucggcagcagacccagaaucagaaacauccccagcagaaucagcaucuacuggaccaucgugaagcccggcgacauccugcugaucaacagcaccggcaaccugaucgcccccagaggcuacuucaagaucagaagcggcaagagcagcaucaugagaagcgacgcccccaucggcaagugcaagagcgagugcaucacccccaacggcagcauccccaacgacaagcccuuccagaacgugaacagaaucaccuacggcgccugccccagauacgugaagcagagcacccugaagcuggccaccggcaugagaaacgugcccgagaagcagaccagaggcaucuucggcgccaucgccggcuucaucgagaacggcugggagggcaugguggacggcugguacggcuucagacaccagaacagcgagggcagaggccaggccgccgaccugaagagcacccaggccgccaucgaccagaucaacggcaagcugaacagacugaucggcaagaccaacgagaaguuccaccagaucgagaaggaguucagcgagguggagggcagaauccaggaccuggagaaguacguggaggacaccaagaucgaccuguggagcuacaacgccgagcugcugguggcccuggagaaccagcacaccaucgaccugaccgacagcgagaugaacaagcuguucgagaagaccaagaagcagcugagagagaacgccgaggacaugggcaacggcugcuucaagaucuaccacaagugcgacaacgccugcaucggcagcaucagaaacggcaccuacgaccacgacguguacagagacgaggcccugaacaacagauuccagaucaagggcguggagcugaagagcggcuacaaggacuggauccuguggaucagcuucgccaucagcugcuuccugcugugcguggcccugcugggcuucaucaugugggccugccagaagggcaacaucagaugcaacaucugcaucuga

SEQ ID NO: 171508 - RNA, 1701 nt, Artificial Sequence; identical to SEQ ID NO: 170054
  derived and/or modified CDS sequence (opt4) from hemagglutinin__InfluenzaA__AHL96260

SEQ ID NO: 171509 - RNA, 1701 nt, Artificial Sequence; identical to SEQ ID NO: 169918
  derived and/or modified CDS sequence (opt4) from hemagglutinin__InfluenzaA__AHL96274

SEQ ID NO: 171510 - RNA, 1701 nt, Artificial Sequence; identical to SEQ ID NO: 170054
  derived and/or modified CDS sequence (opt4) from hemagglutinin__InfluenzaA__AHL96304

SEQ ID NO: 171511 - RNA, 1701 nt, Artificial Sequence; identical to SEQ ID NO: 169895
  derived and/or modified CDS sequence (opt4) from hemagglutinin__InfluenzaA__AHL96318

SEQ ID NO: 171512 - RNA, 1701 nt, Artificial Sequence; identical to SEQ ID NO: 170054
  derived and/or modified CDS sequence (opt4) from hemagglutinin__InfluenzaA__AHL96330

SEQ ID NO: 171513 - RNA, 1701 nt, Artificial Sequence; identical to SEQ ID NO: 170057
  derived and/or modified CDS sequence (opt4) from hemagglutinin__InfluenzaA__AHL96342

SEQ ID NO: 171514 - RNA, 1701 nt, Artificial Sequence
  derived and/or modified CDS sequence (opt4) from hemagglutinin__InfluenzaA__AHL96354
augaagaccaucaucgcccugagcuacauccugugccugguguucgcccagaagcugcccggcaacgacaacagcaccgccacccugugccugggccaccacgccgugcccaacggcaccaucgugaagaccaucaccaacgacagaaucgaggugaccaacgccaccgagcuggugcagaacagcagcaucggcgagaucugcgacagcccccaccagauccuggacggcgagaacugcacccugaucgacgcccugcugggcgacccccagugcgacggcuuccagaacaagaagugggaccuguucguggagagaagcaaggccuacagcaacugcuaccccuacgacgugcccgacuacgccagccugagaagccugguggccagcagcggcacccuggaguucaacaacgagagcuucaacugggccggcgugacccagaacggcaccagcagcgccugcaucagaggcagcaacagcagcuucuucagcagacugaacuggcugacccaccugaacuucaaguaccccgcccugaacgugaccaugcccaacaacgagcaguucgacaagcuguacaucuggggcgugcaccaccccggcaccgacaaggaccagaucuuccuguacgcccagagcagcggcagaaucaccgugagcaccaagagaagccagcaggccgugauccccaacaucggcagcagacccagaaucagaaacauccccagcagaaucagcaucuacuggaccaucgugaagcccggcgacauccugcugaucaacagcaccggcaaccugaucgcccccagaggcuacuucaagaucagaagcggcaagagcagcaucaugagaagcgacgcccccaucggcaagugcaagagcgagugcaucacccccaacggcagcauccccaacgacaagcccuuccagaacgugaacagaaucaccuacggcgccugccccagauacgugaagcagagcacccugaagcuggccaccggcaugagaaacgugcccgagaagcagaccagaggcaucuucggcgccaucgccggcuucaucgagaacggcugggagggcaugguggacggcugguacggcuucagacaccugaacagcgagggcagaggccaggccgccgaccugaagagcacccaggccgccaucgaccagaucaacggcaagcugaacagacugaucggcaagaccaacgagaaguuccaccagaucgagaaggaguucagcgagguggagggcagaauccaggaccuggagaaguacguggaggacaccaagaucgaccuguggagcuacaacgccgagcugcugguggcccuggagaaccagcacaccaucgaccugaccgacagcgagaugaacaagcuguucgagaagaccaagaagcagcugagagagaacgccgaggacaugggcaacggcugcuucaagaucuaccacaagugcgacaacgccugcaucggcagcaucagaaacggcaccuacgaccacgacguguacagagacgaggcccugaacaacagauuccagaucaagggcguggagcugaagagcggcuacaaggacuggauccuguggaucagcuucgccaucagcugcuuccugcugugcguggcccugcugggcuucaucaugugggccugccagaagggcaacaucagaugcaacaucugcaucuga

SEQ ID NO: 171515 - RNA, 1701 nt, Artificial Sequence
  derived and/or modified CDS sequence (opt4) from hemagglutinin__InfluenzaA__AHL96366
augaagaccaucaucgcccugagcuacauccugugccugguguucgcccagaagcugcccgagaacgacaacagcaccgccacccugugccugggccaccacgccgugcccaacggcaccaucgugaagaccaucaccaacgacagaaucgaggugaccaacgccaccgagcuggugcagaacagcagcaucggcgagaucugcgacagcccccaccagauccuggacggcgagaacugcacccugaucgacgcccugcugggcgacccccagugcgacggcuuccagaacaagaagugggaccuguucguggagagaagcaaggccuacagcaacugcuaccccuacgacgugcccgacuacgccagccugagaagccugguggccagcagcggcacccuggaguucaacaacgagagcuucaacugggccggcgugacccagaacggcaccagcagcgccugcaucagaggcagcaacagcagcuucuucagcagacugaacuggcugacccaccugaacuucaaguaccccgcccugaacgugaccaugcccaacaacgagcaguucgacaagcuguacaucuggggcgugcaccaccccggcaccgacaaggaccagaucuuccuguacgcccagagcagcggcagaaucaccgugagcaccaagagaagccagcaggccgugauccccaacaucggcagcagacccagaaucagaaacauccccagcagaaucagcaucuacuggaccaucgugaagcccggcgacauccugcugaucaacagcaccggcaaccugaucgcccccagaggcuacuucaagaucagaagcggcaagagcagcaucaugagaagcgacgcccccaucggcaagugcaagagcgagugcaucacccccaacggcagcauccccaacgacaagcccuuccagaacgugaacagaaucaccuacggcgccugccccagauacgugaagcagagcacccugaagcuggccaccggcaugagaaacgugcccgagaagcagaccagaggcaucuucggcgccaucgccggcuucaucgagaacggcugggagggcaugguggacggcugguacggcuucagacaccagaacagcgagggcagaggccaggccgccgaccugaagagcacccaggccgccaucgaccagaucaacggcaagcugaacagacugaucggcaagaccaacgagaaguuccaccagaucgagaaggaguucagcgagguggagggcagaauccaggaccuggagaaguacguggaggacaccaagaucgaccuguggagcuacaacgccgagcugcugguggcccuggagaaccagcacaccaucgaccugaccgacagcgagaugaacaagcuguucgagaagaccaagaagcagcugagagagaacgccgaggacaugggcaacggcugcuucaagaucuaccacaagugcgacaacgccugcaucggcagcaucagaaacggcaccuacgaccacgacguguacagagacgaggcccugaacaacagauuccagaucaagggcguggagcugaagagcggcuacaaggacuggauccuguggaucagcuucgccaucagcugcuuccugcugugcguggcccugcugggcuucaucaugugggccugccagaagggcaacaucagaugcaacaucugcaucuga

SEQ ID NO: 171516 - RNA, 1701 nt, Artificial Sequence; identical to SEQ ID NO: 169928
  derived and/or modified CDS sequence (opt4) from hemagglutinin__InfluenzaA__AHL96378

SEQ ID NO: 171517 - RNA, 1701 nt, Artificial Sequence; identical to SEQ ID NO: 169918
  derived and/or modified CDS sequence (opt4) from hemagglutinin__InfluenzaA__AHL96390

SEQ ID NO: 171518 - RNA, 1701 nt, Artificial Sequence
  derived and/or modified CDS sequence (opt4) from hemagglutinin__InfluenzaA__AHL96402
augaagaccaucaucgcccugagcuacauccugugccugguguucgcccagaagauccccggcaacgacaacagcaccgccacccugugccugggccaccacgccgugcccaacggcaccaucgugaagaccaucaccaacgacagaaucgaggugaccaacgccaccgagcuggugcagaacagcagcaucggcgagaucugcgacagcccccaccagauccuggacggcgagaacugcacccugaucgacgcccugcugggcgacccccagugcgacggcuuccagaacaagaagugggaccuguucguggagagaagcaaggccuacagcaacugcuaccccuacgacgugcccgacuacgccagccugagaagccugguggccagcagcggcacccuggaguucaacaacgagagcuucaacuggaccggcgugacccagaacggcaccagcagcgccugcaucagaggcagcaacagcagcuucuucagcagacugaacuggcugacccaccugaacuucaaguaccccgcccugaacgugaccaugcccaacaacgagcaguucgacaagcuguacaucuggggcgugcaccaccccggcaccgacaaggaccagaucuuccuguacgcccagagcagcggcagaaucaccgugagcaccaagagaagccagcaggccgugauccccaacaucggcagcagacccagaaucagaaacauccccagcagaaucagcaucuacuggaccaucgugaagcccggcgacauccugcugaucaacagcaccggcaaccugaucgcccccagaggcuacuucaagaucagaagcggcaagagcagcaucaugagaagcgacgcccccaucggcaagugcaagagcgagugcaucacccccaacggcagcauccccaacgacaagcccuuccagaacgugaacagaaucaccuacggcgccugccccagauacgugaagcagagcacccugaagcuggccaccggcaugagaaacgugcccgagaagcagaccagaggcaucuucggcgccaucgccggcuucaucgagaacggcugggagggcaugguggacggcugguacggcuucagacaccagaacagcgagggcagaggccaggccgccgaccugaagagcacccaggccgccaucgaccagaucaacggcaagcugaacagacugaucggcaagaccaacaagaaguuccaccagaucgagaaggaguucagcgagguggagggcagaauccaggaccuggagaaguacguggaggacaccaagaucgaccuguggagcuacaacgccgagcugcugguggcccuggagaaccagcacaccaucgaccugaccgacagcgagaugaacaagcuguucgagaagaccaagaagcagcugagagagaacgccgaggacaugggcaacggcugcuucaagaucuaccacaagugcgacaacgccugcaucggcagcaucagaaacggcaccuacgaccacgacguguacagagacgaggcccugaacaacagauuccagaucaagggcguggagcugaagagcggcuacaaggacuggauccuguggaucagcuucgccaucagcugcuuccugcugugcguggcccugcugggcuucaucaugugggccugccagaagggcaacaucagaugcaacaucugcaucuga

SEQ ID NO: 171519 - RNA, 1701 nt, Artificial Sequence; identical to SEQ ID NO: 169928
  derived and/or modified CDS sequence (opt4) from hemagglutinin__InfluenzaA__AHL96414

SEQ ID NO: 171520 - RNA, 1701 nt, Artificial Sequence; identical to SEQ ID NO: 170054
  derived and/or modified CDS sequence (opt4) from hemagglutinin__InfluenzaA__AHL96426

SEQ ID NO: 171521 - RNA, 1701 nt, Artificial Sequence
  derived and/or modified CDS sequence (opt4) from hemagglutinin__InfluenzaA__AHL96438
augaagaccaucaucgcccugagcuacauccugugccugguguucgcccaggagcugcccggcaacgacgacagcaccgccacccugugccugggccaccacgccgugcccaacggcaccaucgugaagaccaucaccaacgaccagaucgaggugaccaacgccaccgagcuggugcagagcagcagcaccggcgagaucugcaacagcccccaccagauccuggacggcgagaacugcacccugaucgacgcccugcugggcgacccccagugcgacggcuuccagaacaagaagugggaccuguucguggagagaagcaaggcccacagcaacugcuaccccuacgacgugcccgacuacgccagccugagaagccugguggccagcagcggcacccuggaguucaacaacgagagcuucaacuggaccggcgugacccagaacggcaccagcagcgccugcaucagaagaagcaacaacagcuucuucagcagacugaacuggcugacccaccugaacuucaaguaccccgcccugaacgugaccaugcccaacaacgagcaguucgacaagcuguacaucuggggcgugcaccaccccggcaccgacaaggaccagaucuuccuguacgcccaggccagcggcagaaucaccgugagcaccaagagaagccagcaggccgugauccccaacaucggcagcagacccagagugagaaacauccccagcagagugagcaucuacuggaccaucgugaagcccggcgacauccugcugaucaacagcaccggcaaccugaucgcccccagaggcuacuucaagaucagaagcggcaagagcagcaucaugagaagcgacgcccccaucggcaagugcagcagcgccugcaucacccccaacggcagcauccccaacgacaagcccuuccagaacgugaacagaaucaccuacggcgccugccccagauacgugaagcagaacacccugaagcuggccaccggcaugagaaacgugcccgagaagcagaccagaggcaucuucggcgccaucgccggcuucaucgagaacggcugggagggcaugguggacggcugguacggcuucagacaccagaacagcgagggcagaggccaggccgccgaccugaagagcacccaggccgccaucgaccagaucaacggcaagcugaacagacugaucggcaagaccaacgagaaguuccaccagaucgagaaggaguucagcgagguggagggcagaauccaggaccuggagaaguacguggaggacaccaagaucgaccuguggagcuacaacgccgagcugcugguggcccuggagaaccagcacaccaucgaccugaccgacagcgagaugaacaagcuguucgagaagaccaagaagcagcugagagagaacgccgaggacaugggcaacggcugcuucaagaucuaccacaagugcgacaacgccugcaucggcagcaucagaaacggcaccuacgaccacgacguguacagagacgaggcccugaacaacagauuccagaucaagggcguggagcugaagagcggcuacaaggacuggauccuguggaucagcuucgccaucagcugcuuccugcugugcguggcccugcugggcuucaucaugugggccugccagaagggcaacaucagaugcaacaucugcaucuga

SEQ ID NO: 171522 - RNA, 1701 nt, Artificial Sequence; identical to SEQ ID NO: 169928
  derived and/or modified CDS sequence (opt4) from hemagglutinin__InfluenzaA__AHL96450

SEQ ID NO: 171523 - RNA, 1701 nt, Artificial Sequence; identical to SEQ ID NO: 170054
  derived and/or modified CDS sequence (opt4) from hemagglutinin__InfluenzaA__AHL96462

SEQ ID NO: 171524 - RNA, 1701 nt, Artificial Sequence
  derived and/or modified CDS sequence (opt4) from hemagglutinin__InfluenzaA__AHL96474
augaaggccauccugguggugaugcuguacaccuucgccaccgccaacgccgacacccugugcaucggcuaccacgccaacaacagcaccgacaccguggacaccgugcuggagaagaacgugaccgugacccacagcgugaaccugcuggaggacaagcacaacggcaagcugugcaagcugagaggcgugagcccccugcaccugggcaagugcaacaucgccggcuggauccugggcaaccccgagugcgagagccugagcaccgccagcagcuggagcuacaucguggagaccagcggcagcgacaacggcaccugcuaccccggcgacuucaucgacuacgaggagcugagagagcagcugagcagcgugagcagcuucgagagauucgagaucuuccccaagaccagcagcuggcccaaccacgacagcaacaagggcgugaccgccgccugcccccacgccggcgccaagggcuucuacaagaaccugaucuggcuggugaagaagggcaacagcuaccccaagcugagcaucagcuacaucaacgacaagggcaaggaggugcuggugcuguggggcauccaccaccccagcaccaccgccgaccagcagagccuguaccagaacgccgacaccuacguguucgugggcaccagcagauacagcaagaaguucaagcccgagaucgccaucagacccaaggugagagaccaggagggcagaaugaacuacuacuggacccugguggagcccggcgacaagaucaccuucgaggccaccggcaaccugguggugcccagauacgccuucgccauggagagaaacgccggcagcggcaucaucaucagcgacacccccgugcacgacugcaacaccaccugccagacccccaagggcgccaucaacaccagccugcccuuccagaacauccaccccaucaccaucggcaagugccccaaguacgugaagagcaccaagcugagacuggccaccggccugagaaacgugcccagcauccagagcagaggccuguucggcgccaucgccggcuucaucgagggcggcuggaccggcaugguggacggcugguacggcuaccaccaccagaacgagcagggcagcggcuacgccgccgaccugaagagcacccagaacgccaucgacaagaucaccaacaaggugaacagcgugaucgagaagaugaacacccaguucaccgccgugggcaaggaguucaaccaccuggagaagagaaucgagaaccugaacaagaagguggacgacggcuuccuggacaucuggaccuacaacgccgagcugcuggugcugcuggagaacgagagaacccuggacuaccacgacagcaacgugaagaaccuguacgagaaggugagaaaccagcugaagaacaacgccaaggagaucggcaacggcugcuucgaguucuaccacaagugcgacaacaccugcauggagagcgugaagaacggcaccuacgacuaccccaaguacagcgaggaggccaagcugaacagagaggagaucgacggcgugaagcuggagagcaccagaaucuaccagauccuggccaucuacagcaccgccgccagcagccuggugcugguggugagccugggcgccaucagcuucuggaugugcagcaacggcagccugcagugcagaaucugcaucuga

SEQ ID NO: 171525 - RNA, 1701 nt, Artificial Sequence
  derived and/or modified CDS sequence (opt4) from hemagglutinin__InfluenzaA__AHL96485
augaagaccaucaucgcccugagcuacauccugugccugguguucgcccagaagcugcccggcaacgacaacagcaccgccacccugugccugggccaccacgccgugcccaacggcaccaucgugaagaccaucaccaacgacagaaucgaggugaccaacgccaccgagcuggugcagaacagcagcaucggcgagaucugcgacagcccccaccagauccuggacggcgagaacugcacccugaucgacgcccugcugggcgacccccagugcgacggcuuccagaacaagaagugggaccuguucguggagagaagcaaggccuacagcaacugcuaccccuacgacgugcccgacuacgccagccugagaagccugguggccagcagcggcacccuggaguucaacaacgagagcuucaacuggaccggcgugacccagaacggcaccagcagcgccugcaucagaagaagcaacagcagcuucuucagcagacugaacuggcugacccaccugaacuucaaguaccccgcccugaacgugaccaugcccaacaacgagcaguucgacaagcuguacaucuggggcgugcaccaccccggcaccgacaaggaccagaucuuccuguacgcccagagcagcggcagaaucaccgugagcaccaagagaagccagcaggccgugauccccaacaucggcagcagacccagaaucagaaacauccccagcagaaucagcaucuacuggaccaucgugaagcccggcgacauccugcugaucaacagcaccggcaaccugaucgcccccagaggcuacuucaagaucagaagcggcaagagcagcaucaugaagagcgacgcccccaucggcaagugcaagagcgagugcaucacccccaacggcagcauccccaacgacaagcccuuccagaacgugaacagaaucaccuacggcgccugccccagauacgugaagcagagcacccugaagcuggccaccggcaugagaaacgugcccgagaagcagaccagaggcaucuucggcgccaucgccggcuucaucgagaacggcugggagggcaugguggacggcugguacggcuucagacaccagaacagcgagggcagaggccaggccgccgaccugaagagcacccaggccgccaucgaccagaucaacggcaagcugaacagacugaucggcaagaccaacgagaaguuccaccagaucgagaaggaguucagcgagguggagggcagaauccaggaccuggagaaguacguggaggacaccaagaucgaccuguggagcuacaacgccgagcugcugguggcccuggagaaccagcacaccaucgaccugaccgacagcgagaugaacaagcuguucgagaagaccaagaagcagcugagagagaacgccgaggacaugggcaacggcugcuucaagaucuaccacaagugcgacaacgccugcaucggcagcaucagaaacggcaccuacgaccacaacguguacagagacgaggcccugaacaacagauuccagaucaagggcguggagcugaagagcggcuacaaggacuggauccuguggaucagcuucgccaucagcugcuuccugcugugcguggcccugcugggcuucaucaugugggccugccagaagggcaacaucagaugcaacaucugcaucuga

SEQ ID NO: 171526 - RNA, 1701 nt, Artificial Sequence; identical to SEQ ID NO: 170054
  derived and/or modified CDS sequence (opt4) from hemagglutinin__InfluenzaA__AHL96497

SEQ ID NO: 171527 - RNA, 1701 nt, Artificial Sequence; identical to SEQ ID NO: 169928
  derived and/or modified CDS sequence (opt4) from hemagglutinin__InfluenzaA__AHL96509

SEQ ID NO: 171528 - RNA, 1701 nt, Artificial Sequence; identical to SEQ ID NO: 169895
  derived and/or modified CDS sequence (opt4) from hemagglutinin__InfluenzaA__AHL96521

SEQ ID NO: 171529 - RNA, 1701 nt, Artificial Sequence; identical to SEQ ID NO: 170054
  derived and/or modified CDS sequence (opt4) from hemagglutinin__InfluenzaA__AHL96533

SEQ ID NO: 171530 - RNA, 1701 nt, Artificial Sequence; identical to SEQ ID NO: 169918
  derived and/or modified CDS sequence (opt4) from hemagglutinin__InfluenzaA__AHL96545

SEQ ID NO: 171531 - RNA, 1701 nt, Artificial Sequence
  derived and/or modified CDS sequence (opt4) from hemagglutinin__InfluenzaA__AHL96569
augaagaccaucaucgcccugagcuacauccugugccugguguucgcccagaagcugcccggcaacgacaacagcaccgccacccugugccugggccaccacgccgugcccaacggcaccaucgugaagaccaucaccaacgacagaaucgaggugaccaacgccaccgagcuggugcagaacagcagcaucggcgagaucugcgacagcccccaccagauccuggacggcgagaacugcacccugaucgacgcccugcugggcgacccccagugcgacggcuuccagaacaagaagugggaccuguucguggagagaagcaaggccuacagcaacugcuaccccuacgacgugcccgacuacgccagccugagaagccugguggccagcagcggcacccuggaguucaacaacgagagcuucaacuggaccggcgugacccagaacggcaccagcagcgccugcaucagaagaagcaacagcagcuucuucagcagacugaacuggcugacccaccugaacuucaaguaccccgcccugaacgugaccaugcccaacaacgagcaguucgacaagcuguacaucuggggcgugcaccaccccggcaccgacaaggaccagaucuuccuguacgcccagagcagcggcagagugaccgugagcaccaagagaagccagcaggccgugauccccaacaucggcagcagacccagaaucagaaacauccccagcagaaucagcaucuacuggaccaucgugaagcccggcgacauccugcugaucaacagcaccggcaaccugaucgcccccagaggcuacuucaagaucagaagcggcaagagcagcaucaugagaagcgacgcccccaucggcaagugcaagagcgagugcaucacccccaacggcagcauccccaacgacaagcccuuccagaacgugaacagaaucaccuacggcgccugccccagauacgugaagcagagcacccugaagcuggccaccggcaugagaaacgugcccgagaagcagaccagaggcaucuucggcgccaucgccggcuucaucgagaacggcugggagggcaugguggacggcugguacggcuucagacaccagaacagcgagggcagaggccaggccgccgaccugaagagcacccaggccgccaucgaccagaucaacggcaagcugaacagacugaucggcaagaccaacgagaaguuccaccagaucgagaaggaguucagcgagguggagggcagaauccaggaccuggagaaguacguggaggacaccaagaucgaccuguggagcuacaacgccgagcugcugguggcccuggagaaccagcacaccaucgaccugaccgacagcgagaugaacaagcuguucgagaagaccaagaagcagcugagagagaacgccgaggacaugggcaacggcugcuucaagaucuaccacaagugcgacaacgccugcaucggcagcaucagaaacggcaccuacgaccacgacguguacagagacgaggcccugaacaacagauuccagaucaagggcguggagcugaagagcggcuacaaggacuggauccuguggaucagcuucgccaucagcugcuuccugcugugcguggcccugcugggcuucaucaugugggccugccagaagggcaacaucagaugcaacaucugcaucuga

SEQ ID NO: 171532 - RNA, 1701 nt, Artificial Sequence; identical to SEQ ID NO: 171524
  derived and/or modified CDS sequence (opt4) from hemagglutinin__InfluenzaA__AHL96581

SEQ ID NO: 171533 - RNA, 1701 nt, Artificial Sequence
  derived and/or modified CDS sequence (opt4) from hemagglutinin__InfluenzaA__AHL96592
augaagaccaucaucgcccugggcuacauccugugccugguguucgcccagaagauccccggcaacgacaacagcaccgccacccugugccugggccaccacgccgugcccaacggcaccaucgugaagaccaucaccaacgacagaaucgaggugaccaacgccaccgagcuggugcagaacagcagcaucggcgagaucugcgacagcccccaccagauccuggacggcgagaacugcacccugaucgacgcccugcugggcgacccccagugcgacggcuuccagaacaagaagugggaccuguucaucgagagaagcaaggccuacagcaacugcuaccccuacgacgugcccgacuacgccagccugagaagccugguggccagcagcggcacccuggaguucaacaacgagagcuucaacuggaccggcgugacccagaacggcaccagcagcgccugcaucagaagaagcaacagcagcuucuucagcagacugaacuggcugacccaccugaacuucaaguaccccgcccugaacgugaccaugcccaacaacgagcaguucgacaagcuguacaucuggggcgugcaccaccccggcaccgacaaggaccagaucuuccuguacgcccagagcagcggcagaaucaccgugagcaccaagagaagccagcaggccgugauccccaacaucggcagcagacccagaaucagaaacauccccagcagaaucagcaucuacuggaccaucgugaagcccggcgacauccugcugaucaacagcaccggcaaccugaucgcccccagaggcuacuucaagaucagaagcggcaagagcagcaucaugagaagcgacgcccccaucggcaagugcaagagcgagugcaucacccccaacggcagcauccccaacgacaagcccuuccagaacgugaacagaaucaccuacggcgccugccccagauacgugaagcagagcacccugaagcuggccaccggcaugagaaacgugcccgagaagcagaccagaggcaucuucggcgccaucgccggcuucaucgagaacggcugggagggcaugguggacggcugguacggcuucagacaccagaacagcgagggcagaggccaggccgccgaccugaagagcacccaggccgccaucgaccagaucaacggcaagcugaacagacugaucggcaagaccaacgagaaguuccaccagaucgagaaggaguucagcgagguggagggcagaauccaggaccuggagaaguacguggaggacaccaagaucgaccuguggagcuacaacgccgagcugcugguggcccuggagaaccagcacaccaucgaccugaccgacagcgagaugaacaagcuguucgagaagaccaagaagcagcugagagagaacgccgaggacaugggcaacggcugcuucaagaucuaccacaagugcgacaacgccugcaucggcagcaucagaaacggcaccuacgaccacgacguguacagagacgaggcccugaacaacagauuccagaucaagggcguggagcugaagagcggcuacaaggacuggauccuguggaucagcuucgccaucagcugcuuccugcugugcguggcccugcugggcuucaucaugugggccugccagaagggcaacaucagaugcaacaucugcaucuga

SEQ ID NO: 171534 - RNA, 1701 nt, Artificial Sequence; identical to SEQ ID NO: 170054
  derived and/or modified CDS sequence (opt4) from hemagglutinin__InfluenzaA__AHL96604

SEQ ID NO: 171535 - RNA, 1701 nt, Artificial Sequence; identical to SEQ ID NO: 170054
  derived and/or modified CDS sequence (opt4) from hemagglutinin__InfluenzaA__AHL96616

SEQ ID NO: 171536 - RNA, 1701 nt, Artificial Sequence
  derived and/or modified CDS sequence (opt4) from hemagglutinin__InfluenzaA__AHL96628
augaagaccaucaucgcccugagcuacauccugugccugguguucgcccagaagcugcccggcaacgacaacagcaccgccacccugugccugggccaccacgccgugcccaacggcaccaucgugaagaccaucaccaacgacagaaucgaggugaccaacgccaccgagcuggugcagaacagcagcaucggcgagaucugcgacagcccccaccagauccuggacggcgagaacugcacccugaucgacgcccugcugggcgacccccagugcgacggcuuccagaacaagaagugggaccuguucguggagagaagcaaggccuacagcaacugcuaccccuacgacgugcccgacuacgccagccugagaagccugguggccagcagcggcacccuggaguucaacaacgagagcuucaacuggaccggcgugacccagaacggcaccagcagcgccugcaucagaagaagcaacagcagcuucuucagcagacugaacuggcugacccaccugaacuucaaguaccccgcccugaacgugaccaugcccaacaacgagcaguucgacaagcuguacaucuggggcgugcaccaccccggcaccgacaaggaccagaucuuccuguacgcccagagcagcggcagaaucaccgugagcaccaagagaagccagcaggccgugauccccaacaucggcagcagacccagaaucagaaacauccccagcagaaucagcaucuacuggaccaucgugaagcccggcgacauccugcugaucaacagcaccggcaaccugaucgcccccagaggcuacuucaagaucagaagcggcaagagcagcaucaugagaagcgacgcccccaucggcaagugcaagagcgagugcaucacccccaacggcagcauccccaacgacaagcccuuccagaacgugaacagaaucaccuacggcgccugccccagauacgugaagcagagcacccugaagcuggccaccggcaugagaaacgugcccgagaagcagaccagaggcaucuucggcgccaucgccggcuucaucgagaacggcuggggcggcaugguggacggcugguacggcuucagacaccagaacagcgagggcagaggccaggccgccgaccugaagagcacccaggccgccaucgaccagaucaacggcaagcugaacagacugaucggcaagaccaacgagaaguuccaccagaucgagaaggaguucagcgagguggagggcagaauccaggaccuggagaaguacguggaggacaccaagaucgaccuguggagcuacaacgccgagcugcugguggcccuggagaaccagcacaccaucgaccugaccgacagcgagaugaacaagcuguucgagaagaccaagaagcagcugagagagaacgccgaggacaugggcaacggcugcuucaagaucuaccacaagugcgacaacgccugcaucggcagcaucagaaacggcaccuacgaccacaacguguacagagacgaggcccugaacaacagauuccagaucaagggcguggagcugaagagcggcuacaaggacuggauccuguggaucagcuucgccaucagcugcuuccugcugugcguggcccugcugggcuucaucaugugggccugccagaagggcaacaucagaugcaacaucugcaucuga

SEQ ID NO: 171537 - RNA, 1701 nt, Artificial Sequence; identical to SEQ ID NO: 171525
  derived and/or modified CDS sequence (opt4) from hemagglutinin__InfluenzaA__AHL96640

SEQ ID NO: 171538 - RNA, 1701 nt, Artificial Sequence
  derived and/or modified CDS sequence (opt4) from hemagglutinin__InfluenzaA__AHL96652
augaagaccaucaucgcccugagcuacauccugugccugguguucgcccagaagcugcccggcaacgacaacagcaccgccacccugugccugggccaccacgccgugcccaacggcaccaucgugaagaccaucaccaacgacagaaucgaggugaccaacgccaccgagcuggugcaggacagcagcaucggcgagaucugcgacagcccccaccagauccuggacggcgagaacugcacccugaucgacgcccugcugggcgacccccagugcgacggcuuccagaacaagaagugggaccuguucguggagagaagcaaggccuacagcaacugcuaccccuacgacgugcccgacuacgccagccugagaagccugguggccagcagcggcacccuggaguucaacaacgagagcuucaacugggccggcgugacccagaacggcaccagcagcgccugcaucagaggcagcaacagcagcuucuucagcagacugaacuggcugacccaccugaacuucaaguaccccgcccugaacgugaccaugcccaacaacgagcaguucgacaagcuguacaucuggggcgugcaccaccccggcaccgacaaggaccagaucuuccuguacgcccagagcagcggcagaaucaccgugagcaccaagagaagccagcaggccgugauccccaacaucggcagcagacccagaaucagaaacauccccagcagaaucagcaucuacuggaccaucgugaagcccggcgacauccugcugaucaacagcaccggcaaccugaucgcccccagaggcuacuucaagaucagaagcggcaagagcagcaucaugagaagcgacgcccccaucggcaagugcaagagcgagugcaucacccccaacggcagcauccccaacgacaagcccuuccagaacgugaacagaaucaccuacggcgccugccccagauacgugaagcagagcacccugaagcuggccaccggcaugagaaacgugcccgagaagcagaccagaggcaucuucggcgccaucgccggcuucaucgagaacggcugggagggcaugguggacggcugguacggcuucagacaccagaacagcgagggcagaggccaggccgccgaccugaagagcacccaggccgccaucgaccagaucaacggcaagcugaacagacugaucggcaagaccaacgagaaguuccaccagaucgagaaggaguucagcgagguggagggcagaauccaggaccuggagaaguacguggaggacaccaagaucgaccuguggagcuacaacgccgagcugcugguggcccuggagaaccagcacaccaucgaccugaccgacagcgagaugaacaagcuguucgagaagaccaagaagcagcugagagagaacgccgaggacaugggcaacggcugcuucaagaucuaccacaagugcgacaacgccugcaucggcagcaucagaaacggcaccuacgaccacgacguguacagagacgaggcccugaacaacagauuccagaucaagggcguggagcugaagagcggcuacaaggacuggauccuguggaucagcuucgccaucagcugcuuccugcugugcguggcccugcugggcuucaucaugugggccugccagaagggcaacaucagaugcaacaucugcaucuga

SEQ ID NO: 171539 - RNA, 1701 nt, Artificial Sequence; identical to SEQ ID NO: 170527
  derived and/or modified CDS sequence (opt4) from hemagglutinin__InfluenzaA__AHL96664

SEQ ID NO: 171540 - RNA, 1701 nt, Artificial Sequence
  derived and/or modified CDS sequence (opt4) from hemagglutinin__InfluenzaA__AHL96676
augaagaccaucaucgcccugagcuacauccugugccugguguucgcccagaagcugcccggcaacgacaacagcaccgccacccugugccugggccaccacgccgugcccaacggcaccaucgugaagaccaucaccaacgacagaaucgaggugaccaacgccaccgagcuggugcagaacagcagcaucggcgagaucugcgacagcccccaccagauccuggacggcgagaacugcacccugaucgacgcccugcugggcgacccccagugcgacggcuuccagaacaagaagugggaccuguucguggagagaagcaaggccuacagcaacugcuaccccuacgacgugcccgacuacgccagccugagaagccugguggccagcagcggcacccuggaguucaacaacgagagcuucaacuggaccggcgugacccagaacggcaccagcagcgccugcaucagaagaagcaacagcagcuucuucagcagacugaacuggcugacccaccugaacuucaaguaccccgcccugaacgugaccaugcccaacaacgagcaguucgacaagcuguacaucuggggcgugcaccaccccggcaccgacaaggaccagaucuuccuguacgcccagagcagcggcagaaucaccgugagcaccaagagaagccagcaggccgugauccccaacaucggcagcagacccagaaucagaaacauccccagcagaaucagcaucuacuggaccaucgugaagcccggcgacauccugcugaucaacagcaccggcaaccugaucgcccccagaggcuacuucaagaucagaagcggcaagagcagcaucaugagaagcgacgcccccaucggcaagugcaagagcgagugcaucacccccaacggcagcauccccaucgacaagcccuuccagaacgugaacagaaucaccuacggcgccugccccagauacgugaagcagagcacccugaagcuggccaccggcaugagaaacgugcccgagaagcagaccagaggcaucuucggcgccaucgccggcuucaucgagaacggcugggagggcaugguggacggcugguacggcuucagacaccagaacagcgagggcagaggccaggccgccgaccugaagagcacccaggccgccaucgaccagaucaacggcaagcugaacagacugaucggcaagaccaacgagaaguuccaccagaucgagaaggaguucagcgagguggagggcagaauccaggaccuggagaaguacguggaggacaccaagaucgaccuguggagcuacaacgccgagcugcugguggcccuggagaaccagcacaccaucgaccugaccgacagcgagaugaacaagcuguucgagaagaccaagaagcagcugagagagaacgccgaggacaugggcaacggcugcuucaagaucuaccacaagugcgacaacgccugcaucggcagcaucagaaacggcaccuacgaccacgacguguacagagacgaggcccugaacaacagauuccagaucaagggcguggagcugaagagcggcuacaaggacuggauccuguggaucagcuucgccaucagcugcuuccugcugugcguggcccugcugggcuucaucaugugggccugccagaagggcaacaucagaugcaacaucugcaucuga

SEQ ID NO: 171541 - RNA, 1701 nt, Artificial Sequence; identical to SEQ ID NO: 170054
  derived and/or modified CDS sequence (opt4) from hemagglutinin__InfluenzaA__AHL96688

SEQ ID NO: 171542 - RNA, 1701 nt, Artificial Sequence; identical to SEQ ID NO: 170054
  derived and/or modified CDS sequence (opt4) from hemagglutinin__InfluenzaA__AHL96700

SEQ ID NO: 171543 - RNA, 1701 nt, Artificial Sequence; identical to SEQ ID NO: 170054
  derived and/or modified CDS sequence (opt4) from hemagglutinin__InfluenzaA__AHL96712

SEQ ID NO: 171544 - RNA, 1701 nt, Artificial Sequence; identical to SEQ ID NO: 169928
  derived and/or modified CDS sequence (opt4) from hemagglutinin__InfluenzaA__AHL96724

SEQ ID NO: 171545 - RNA, 1701 nt, Artificial Sequence; identical to SEQ ID NO: 169918
  derived and/or modified CDS sequence (opt4) from hemagglutinin__InfluenzaA__AHL96748

SEQ ID NO: 171546 - RNA, 1701 nt, Artificial Sequence; identical to SEQ ID NO: 169928
  derived and/or modified CDS sequence (opt4) from hemagglutinin__InfluenzaA__AHL96784

SEQ ID NO: 171547 - RNA, 1701 nt, Artificial Sequence
  derived and/or modified CDS sequence (opt4) from hemagglutinin__InfluenzaA__AHL96796
augaagaccaucaucgcccugagcuacauccugugccugguguucgcccagaagcugcccggcaacgacaacagcaccgccacccugugccugggccaccacgccgugcccaacggcaccaucgugaagaccaucaccaacgacagaaucgaggugaccaacgccaccgagcuggugcagaacagcagcaucggcgagaucugcgacagcccccaccagauccuggacggcgagaacugcacccugaucgacgcccugcugggcgacccccagugcgacggcuuccagaacaagaagugggaccuguucaucgagagaagcaaggccuacagcaacugcuaccccuacgacgugcccgacuacgccagccugagaagccugguggccagcagcggcacccuggaguucaacaacgagagcuucaacuggaccggcgugacccagaacggcaccagcagcgccugcaucagaagaagcaacagcagcuucuucagcagacugaacuggcugacccaccugaacuucaaguaccccgcccugaacgugaccaugcccaacaacgagcaguucgacaagcuguacaucuggggcgugcaccaccccggcaccgacaaggaccagaucuuccuguacgcccagagcagcggcagaaucaccgugagcaccaagagaagccagcaggccgugauccccaacaucggcagcagacccagaaucagaaacauccccagcagaaucagcaucuacuggaccaucgugaagcccggcgacauccugcugaucaacagcaccggcaaccugaucgcccccagaggcuacuucaagaucagaagcggcaagagcagcaucaugagaagcgacgcccccaucggcaagugcaagagcgagugcaucacccccaacggcagcauccccaacgacaagcccuuccagaacgugaacagaaucaccuacggcgccugccccagauacgugaagcagagcacccugaagcuggccaccggcaugagaaacgugcccgagaagcagaccagaggcaucuucggcgccaucgccggcuucaucgagaacggcugggagggcaugguggacggcugguacggcuucagacaccagaacagcgagggcagaggccaggccgccgaccugaagagcacccaggccgccaucgaccagaucaacggcaagcugaacagacugaucggcaagaccaacgagaaguuccaccagaucgagaaggaguucagcgagguggagggcagaauccaggaccuggagaaguacguggaggacaccaagaucgaccuguggagcuacaacgccgagcugcugguggcccuggagaaccagcacaccaucgaccugaccgacagcgagaugaacaagcuguucgagaagaccaagaagcagcugagagagaacgccgaggacaugggcaacggcugcuucaagaucuaccacaagugcgacaacgccugcaucggcagcaucagaaacggcaccuacgaccacgacguguacagagacgaggcccugaacaacagauuccagaucaagggcguggagcugaagagcggcuacaaggacuggauccuguggaucagcuucgccaucagcugcuuccugcugugcguggcccugcugggcuucaucaugugggccugccagaagggcaacaucagaugcaacaucugcaucuga

SEQ ID NO: 171548 - RNA, 1701 nt, Artificial Sequence; identical to SEQ ID NO: 169918
  derived and/or modified CDS sequence (opt4) from hemagglutinin__InfluenzaA__AHL96808

SEQ ID NO: 171549 - RNA, 1701 nt, Artificial Sequence; identical to SEQ ID NO: 169918
  derived and/or modified CDS sequence (opt4) from hemagglutinin__InfluenzaA__AHL96820

SEQ ID NO: 171550 - RNA, 1701 nt, Artificial Sequence; identical to SEQ ID NO: 169928
  derived and/or modified CDS sequence (opt4) from hemagglutinin__InfluenzaA__AHL96832

SEQ ID NO: 171551 - RNA, 1701 nt, Artificial Sequence; identical to SEQ ID NO: 169928
  derived and/or modified CDS sequence (opt4) from hemagglutinin__InfluenzaA__AHL96844

SEQ ID NO: 171552 - RNA, 1701 nt, Artificial Sequence; identical to SEQ ID NO: 169928
  derived and/or modified CDS sequence (opt4) from hemagglutinin__InfluenzaA__AHL96856

SEQ ID NO: 171553 - RNA, 1701 nt, Artificial Sequence
  derived and/or modified CDS sequence (opt4) from hemagglutinin__InfluenzaA__AHL96868
augaagaccaucaucgcccugagcuacauccugugccugguguucgcccagaagcugcccggcaacgacaacagcaccgccacccugugccugggccaccacgccgugcccaacggcaccaucgugaagaccaucaccaacgacagaaucgaggugaccaacgccaccgagcuggugcagaacagcagcaucggcgagaucugcgacagcccccaccagauccuggacggcggcaacugcacccugaucgacgcccugcugggcgacccccagugcgacggcuuccagaacaagaagugggaccuguucguggagagaagcaaggccuacagcaacugcuaccccuacgacgugcccgacuacgccagccugagaagccugguggccagcagcggcacccuggaguucaacaacgagagcuucaacuggaccggcgugacccagaacggcaccagcagcgccugcaucagaagaagcaacagcagcuucuucagcagacugaacuggcugacccaccugaacuucaaguaccccgcccugaacgugaccaugcccaacaacgagcaguucgacaagcuguacaucuggggcgugcaccaccccggcaccgacaaggaccagaucuuccuguacgcccagagcagcggcagaaucaccgugagcaccaagagaagccagcaggccguggugcccaacaucggcagcagacccagaaucagaaacauccccagcagaaucagcaucuacuggaccaucgugaagcccggcgacauccugcugaucaacagcaccggcaaccugaucgcccccagaggcuacuucaagaucagaagcggcaagagcagcaucaugagaagcgacgcccccaucggcaagugcaagagcgagugcaucacccccaacggcagcauccccaacgacaagcccuuccagaacgugaacagaaucaccuacggcgccugccccagauacgugaagcagagcacccugaagcuggccaccggcaugagaaacgugcccgagaagcagaccagaggcaucuucggcgccaucgccggcuucaucgagaacggcugggagggcaugauggacggcugguacggcuucagacaccagaacagcgagggcagaggccaggccgccgaccugaagagcacccaggccgccaucgaccagaucaacggcaagcugaacagacugaucggcaagaccaacgagaaguuccaccagaucgagaaggaguucagcgagguggagggcagaauccaggaccuggagaaguacguggaggacaccaagaucgaccuguggagcuacaacgccgagcugcugguggcccuggagaaccagcacaccaucgaccugaccgacagcgagaugaacaagcuguucgagaagaccaagaagcagcugagagagaacgccgaggacaugggcaacggcugcuucaagaucuaccacaagugcgacaacgccugcaucggcagcaucagaaacggcaccuacgaccacgacguguacagagacgaggcccugaacaacagauuccagaucaagggcguggagcugaagagcggcuacaaggacuggauccuguggaucagcuucgccaugagcugcuuccugcugugcguggcccugcugggcuucaucaugugggccugccagaagggcaacaucagaugcaacaucugcaucuga

SEQ ID NO: 171554 - RNA, 1701 nt, Artificial Sequence; identical to SEQ ID NO: 169918
  derived and/or modified CDS sequence (opt4) from hemagglutinin__InfluenzaA__AHL96880

SEQ ID NO: 171555 - RNA, 1701 nt, Artificial Sequence
  derived and/or modified CDS sequence (opt4) from hemagglutinin__InfluenzaA__AHL96892
augaagaccaucaucgcccugagcuacauccugugccugguguucgcccagaagcugcccggcaacgacaacagcaccgccacccugugccugggccaccacgccgugcccaacggcaccaucgugaagaccaucaccaacgacagaaucgaggugaccaacgccaccgagcuggugcagaacagcagcaucggcgagaucugcgacagcccccaccagauccuggacggcgagaacugcacccugaucgacgcccugcugggcgacccccagugcgacggcuuccagaacaagaagugggaccuguucguggagagaagcaaggccuacagcaacugcuaccccuacgacgugcccgacuacgccagccugagaagccugguggccagcagcggcacccuggaguucaacaacgagagcuucaacugggccggcgugacccagaacggcaccagcagcgccugcaucagaggcagcaacagcagcuucuucagcagacugaacuggcugacccaccugaacuucaaguaccccgcccugaacgugaccaugcccaacaacgagcaguucgacaagcuguacaucuggggcgugcaccaccccggcaccgacaaggaccagaucuuccuguacgcccagagcagcggcagaaucaccgugagcaccaagagaagccagcaggccgugauccccaacaucggcagcagacccagaaucagaaacauccccagcagaaucagcaucuacuggaccaucgugaagcccggcgacauccugcugaucaacagcaccggcaaccugaucgcccccagaggcuacuucaagaucagaagcggcaagagcagcaucaugagaagcgacgcccccaucggcaagugcaagagcgagugcaucacccccaacggcagcauccccaacgacaagcccuuccagaacgugaacagaaucaccuacggcgccugccccagauacgugaagcagagcacccugaagcuggccaccggcaugagaaacgugcccgagaagcagaccagaggcaucuucggcgccaucgccggcuucaucgagaacggcugggagggcaugguggacggcugguacggcuucagacaccagaacagcgagggcagaggccaggccgccgaccugaagagcacccaggccgccaucgaccagaucaacggcaagcugaacagacugaucggcaagaccaacgagaaguuccaccagaucgagaaggaguucagcgagguggagggcagagugcaggaccuggagaaguacguggaggacaccaagaucgaccuguggagcuacaacgccgagcugcugguggcccuggagaaccagcacaccaucgaccugaccgacagcgagaugaacaagcuguucgagaagaccaagaagcagcugagagagaacgccgaggacaugggcaacggcugcuucaagaucuaccacaagugcgacaacgccugcaucggcagcaucagaaacggcaccuacgaccacgacguguacagagacgaggcccugaacaacagauuccagaucaagggcguggagcugaagagcggcuacaaggacuggauccuguggaucagcuucgccaucagcugcuuccugcugugcguggcccugcugggcuucaucaugugggccugccagaagggcaacaucagaugcaacaucugcaucuga

SEQ ID NO: 171556 - RNA, 1701 nt, Artificial Sequence
  derived and/or modified CDS sequence (opt4) from hemagglutinin__InfluenzaA__AHL96904
augaagaccaucaucgcccugagcuacauccugugccugguguucgcccagaagcugcccggcaacgacaacagcaccgccacccugugccugggccaccacgccgugcccaacggcaugaucgugaagaccaucaccaacgacagaaucgaggugaccaacgccaccgagcuggugcagaacagcagcaucggcgagaucugcgacagcccccaccagauccuggacggcgagaacugcacccugaucgacgcccugcugggcgacccccagugcgacggcuuccagaacaagaagugggaccuguucguggagagaagcaaggccuacagcaacugcuaccccuacgacgugcccgacuacgccagccugagaagccugguggccagcagcggcacccuggaguucaacaacgagagcuucaacuggaccggcgugacccagaacggcaccagcagcgccugcaucagaagaagcaacagcagcuucuucagcagacugaacuggcugacccaccugaacuucaaguaccccgcccugaacgugaccaugcccaacaacgagcaguucgacaagcuguacaucuggggcgugcaccaccccggcaccgacaaggaccagaucuuccuguacgcccagagcagcggcagaaucaccgugagcaccaagagaagccagcaggccguggugcccaacaucggcagcagacccagaaucagaaacauccccagcagaaucagcaucuacuggaccaucgugaagcccggcgacauccugcugaucaacagcaccggcaaccugaucgcccccagaggcuacuucaagaucagaagcggcaagagcagcaucaugagaagcgacgcccccaucggcaagugcaagagcgagugcaucacccccaacggcagcauccccaacgacaagcccuuccagaacgugaacagaaucaccuacggcgccugccccagauacgugaagcagagcacccugaagcuggccaccggcaugagaaacgugcccgagaagcagaccagaggcaucuucggcgccaucgccggcuucaucgagaacggcugggagggcaugguggacggcugguacggcuucagacaccagaacagcgagggcagaggccaggccgccgaccugaagagcacccaggccgccaucgaccagaucaacggcaagcugaacagacugaucggcaagaccaacgagaaguuccaccagaucgagaaggaguucagcgagguggagggcagaauccaggaccuggagaaguacguggaggacaccaagaucgaccuguggagcuacaacgccgagcugcugguggcccuggagaaccagcacaccaucgaccugaccgacagcgagaugaacaagcuguucgagaagaccaagaagcagcugagagagaacgccgaggacaugggcaacggcugcuucaagaucuaccacaagugcgacaacgccugcaucggcagcaucagaaacggcaccuacgaccacgacguguacagagacgaggcccugaacaacagauuccagaucaagggcguggagcugaagagcggcuacaaggacuggauccuguggaucagcuucgccaugagcugcuuccugcugugcguggcccugcugggcagcaucaugugggccugccagaagggcaacaucagaugcaacaucugcaucuga

SEQ ID NO: 171557 - RNA, 1701 nt, Artificial Sequence; identical to SEQ ID NO: 169918
  derived and/or modified CDS sequence (opt4) from hemagglutinin__InfluenzaA__AHL96916

SEQ ID NO: 171558 - RNA, 1701 nt, Artificial Sequence; identical to SEQ ID NO: 169918
  derived and/or modified CDS sequence (opt4) from hemagglutinin__InfluenzaA__AHL96928

SEQ ID NO: 171559 - RNA, 1701 nt, Artificial Sequence; identical to SEQ ID NO: 169918
  derived and/or modified CDS sequence (opt4) from hemagglutinin__InfluenzaA__AHL96940

SEQ ID NO: 171560 - RNA, 1701 nt, Artificial Sequence; identical to SEQ ID NO: 169928
  derived and/or modified CDS sequence (opt4) from hemagglutinin__InfluenzaA__AHL96952

SEQ ID NO: 171561 - RNA, 1701 nt, Artificial Sequence; identical to SEQ ID NO: 169928
  derived and/or modified CDS sequence (opt4) from hemagglutinin__InfluenzaA__AHL96964

SEQ ID NO: 171562 - RNA, 1701 nt, Artificial Sequence; identical to SEQ ID NO: 170086
  derived and/or modified CDS sequence (opt4) from hemagglutinin__InfluenzaA__AHL96976

SEQ ID NO: 171563 - RNA, 1701 nt, Artificial Sequence
  derived and/or modified CDS sequence (opt4) from hemagglutinin__InfluenzaA__AHL96988
augaagaccaucaucgcccugagcuacauccugugccugguguucgcccagaagcugcccggcaacgacaacagcaccgccacccugugccugggccaccacgccgugcccaacggcaccaucgugaagaccaucaccaacgacagaaucgaggugaccaacgccaccgagcuggugcagaacagcagcaucggcgagaucugcgacagcccccaccagauccuggacggcgagaacugcacccugaucgacgcccugcugggcgacccccagugcgacggcuuccagaacaagaagugggaccuguucguggagagaagcaaggccuacagcaacugcuaccccuacgacgugcccgacuacgccagccugagaagccugguggccagcagcggcacccuggaguucaacaacgagagcuucaacuggaccggcgugacccagaacggcaccagcagcgccugcaucagaagaagcaacagcagcuucuucagcagacugaacuggcugacccaccugaacuucaaguaccccgcccugaacgugaccaugcccaacaacgagcaguucgacaagcuguacaucuggggcgugcaccaccccggcaccgacaaggaccagaucuuccuguacgcccagagcagcggcagaaucaccgugagcaccaagagaagccagcaggccgugauccccaacaucggcagcagacccagaaucagaaacauccccagcagaaucagcaucuacuggaccaucgugagacccggcgacauccugcugaucaacagcaccggcaaccugaucgcccccagaggcuacuucaagaucagaagcggcaagagcagcaucaugagaagcgacgcccccaucggcaagugcaagagcgagugcaucacccccaacggcagcauccccaacgacaagcccuuccagaacgugaacagaaucaccuacggcgccugccccagauacgugaagcagagcacccugaagcuggccaccggcaugagaaacgugcccgagaagcagaccagaggcaucuucggcgccaucgccggcuucaucgagaacggcugggagggcaugguggacggcugguacggcuucagacaccagaacagcgagggcagaggccaggccgccgaccugaagagcacccaggccgccaucgaccagaucaacggcaagcugaacagacugaucggcaagaccaacgagaaguuccaccagaucgagaaggaguucagcgagguggagggcagaauccaggaccuggagaaguacguggaggacaccaagaucgaccuguggagcuacaacgccgagcugcugguggcccuggagaaccagcacaccaucgaccugaccgacagcgagaugaacaagcuguucgagaagaccaagaagcagcugagagagaacgccgaggacaugggcaacggcugcuucaagaucuaccacaagugcgacaacgccugcaucggcagcaucagaaacggcaccuacgaccacaacguguacagagacgaggcccugaacaacagauuccagaucaagggcguggagcugaagagcggcuacaaggacuggauccuguggaucagcuucgccaucagcugcuuccugcugugcguggcccugcugggcuucaucaugugggccugccagaagggcaacaucagaugcaacaucugcaucuga

SEQ ID NO: 171564 - RNA, 1701 nt, Artificial Sequence; identical to SEQ ID NO: 169928
  derived and/or modified CDS sequence (opt4) from hemagglutinin__InfluenzaA__AHL97000

SEQ ID NO: 171565 - RNA, 1701 nt, Artificial Sequence; identical to SEQ ID NO: 170054
  derived and/or modified CDS sequence (opt4) from hemagglutinin__InfluenzaA__AHL97012

SEQ ID NO: 171566 - RNA, 1701 nt, Artificial Sequence
  derived and/or modified CDS sequence (opt4) from hemagglutinin__InfluenzaA__AHL97024
augaagaccaucaucgcccugagcuacauccugugccugguguucgcccagaagcugcccggcaacgacaacagcaccgccacccugugccugggccaccacgccgugcccaacggcaccaucgugaagaccaucaugaacgacagaaucgaggugaccaacgccaccgagcuggugcagaacagcagcaucggcgagaucugcgacagcccccaccagauccuggacggcgagaacugcacccugaucgacgcccugcugggcgacccccagugcgacggcuuccagaacaagaagugggaccuguucguggagagaagcaaggccuacagcaacugcuaccccuacgacgugcccgacuacgccagccugagaagccugguggccagcagcggcacccuggaguucaacaacgagagcuucaacugggccggcgugacccagaacggcaccagcagcgccugcaucagaggcagcaacagcagcuucuucagcagacugaacuggcugacccaccugaacuucaaguaccccgcccugaacgugaccaugcccaacaacgagcaguucgacaagcuguacaucuggggcgugcaccaccccggcaccgacaaggaccagaucuuccuguacgcccagagcagcggcagaaucaccgugagcaccaagagaagccagcaggccgugauccccaacaucggcagcagacccagaaucagaaacauccccagcagaaucagcaucuacuggaccaucgugaagcccggcgacauccugcugaucaacagcaccggcaaccugaucgcccccagaggcuacuucaagaucagaagcggcaagagcagcaucaugagaagcgacgcccccaucggcaagugcaagagcgagugcaucacccccaacggcagcauccccaacgacaagcccuuccagaacgugaacagaaucaccuacggcgccugccccagauacgugaagcagagcacccugaagcuggccaccggcaugagaaacgugcccgagaagcagaccagaggcaucuucggcgccaucgccggcuucaucgagaacggcugggagggcaugauggacggcugguacggcuucagacaccagaacagcgagggcagaggccaggccgccgaccugaagagcacccaggccgccaucgaccagaucaacggcaagcugaacagacugaucggcaagaccaacgagaaguuccaccagaucgagaaggaguucagcgagguggagggcagaauccaggaccuggagaaguacguggaggacaccaagaucgaccuguggagcuacaacgccgagcugcugguggcccuggagaaccagcacaccaucgaccugaccgacagcgagaugaacaagcuguucgagaagaccaagaagcagcugagagagaacgccgaggacaugggcaacggcugcuucaagaucuaccacaagugcgacaacgccugcaucggcagcaucagaaacggcaccuacgaccacgacguguacagagacgaggcccugaacaacagauuccagaucaagggcguggagcugaagagcggcuacaaggacuggauccuguggaucagcuucgccaucagcugcuuccugcugugcguggcccugcugggcuucaucaugugggccugccagaagggcaacaucagaugcaacaucugcaucuga

SEQ ID NO: 171567 - RNA, 1701 nt, Artificial Sequence
  derived and/or modified CDS sequence (opt4) from hemagglutinin__InfluenzaA__AHL97036
augaagaccaucaucgcccugagcuacauccugugccugguguucgcccagaagcugcccggcaacgacaacagcaccgccacccugugccugggccaccacgccgugcccaacggcaccaucgugaagaccaucaccaacgacagaaucgaggugaccaacgccaccgagcuggugcagaacagcagcaucggcgagaucugcgacagcccccaccagauccuggacggcgagaacugcacccugaucgacgcccugcugggcgacccccagugcgacggcuuccagaacaagaagugggaccuguucguggagagaagcaaggccuacagcaacugcuaccccuacgacgugcccgacuacgccagccugagaagccugguggccagcagcggcacccuggaguucaacaacgagagcuucaacuggaccggcgugacccagaacggcaccagcagcgccugcaucagaagaagcaacagcagcuucuucagcagacugaacuggcugacccaccugaacuucaaguaccccgcccugaacgugaccaugcccaacaacgagcaguucgacaagcuguacaucuggggcgugcaccaccccggcaccgacaaggaccagaucuuccuguacgcccagagcagcggcagaaucaccgugagcaccaagagaagccagcaggccgugauccccaacaucggcagcagacccagaaucagaaacauccccagcagaaucagcaucuacuggaccaucgugaagcccggcgacauccugcugaucaacagcaccggcaaccugaucgcccccagaggcuacuucaagaucagaagcggcaagagcagcaucaugagaagcgacgcccccaucggcaagugcaagagcgagugcaucacccccaacggcagcauccccaacgacaagcccuuccagaacgugaacagaaucaccuacggcgccugccccagauacgugaagcagagcacccugaagcuggccaccggcaugagaaacgugcccgagaagcagaccagaggcaucuucggcgccaucgccggcuucaucgagaacggcugggagggcaugguggacggcugguacggcuucagacaccagaacagcgagggcagaggccaggccgccgaccugaagagcacccaggccgccaucgaccagaucaacggcaagcugaacagacugaucggcaagaccaacgagaaguuccaccagaucgagaaggaguucagcgagguggagggcagaauccaggaccuggagaaguacguggaggacaccaagaucgaccuguggagcuacaacgccgagcugcugguggcccuggagaaccagcacaccaucgaccugaccgacagcgagaugaacaagcuguucgagaagaccaagaagcagcugagagagaacgccgaggacaugggcaacggcugcuucaagaucuaccacaagugcgacaacaccugcaucggcagcaucagaaacggcaccuacgaccacgacguguacagagacgaggcccugaacaacagauuccagaucaagggcguggagcugaagagcggcuacaaggacuggauccuguggaucagcuucgccaucagcugcuuccugcugugcguggcccugcugggcuucaucaugugggccugccagaagggcaacaucagaugcaacaucugcaucuga

SEQ ID NO: 171568 - RNA, 1701 nt, Artificial Sequence; identical to SEQ ID NO: 169943
  derived and/or modified CDS sequence (opt4) from hemagglutinin__InfluenzaA__AHL97048

SEQ ID NO: 171569 - RNA, 1701 nt, Artificial Sequence
  derived and/or modified CDS sequence (opt4) from hemagglutinin__InfluenzaA__AHL97060
augaagaccaucaucgcccugagcuacauccugugccugguguucgcccagaagauccccggcaacgacaacagcaccgccacccugugccugggccaccacgccgugcccaacggcaccaucgugaagaccaucaccaacgacagaaucgaggugaccaacgccaccgagcuggugcagaacagcagcaucggcgagaucugcgacagcccccaccagauccuggacggcgagaacugcacccugaucgacgcccugcugggcgacccccagugcgacggcuuccagaacaagaagugggaccuguucguggagagaagcaaggccuacagcaacugcuaccccuacgacgugcccgacuacgccagccugagaagccugguggccagcagcggcacccuggaguucaacaacgagagcuucaacuggaccggcgugacccagaacggcaccagcagcgccugcaucagaagaagcaacagcagcuucuucagcagacugaacuggcugacccaccugaacuucaaguaccccgcccugaacgugaccaugcccaacaacgagcaguucgacaagcuguacaucuggggcgugcaccaccccggcaccgacaaggaccagaucuuccuguacgcccagagcagcggcagaaucaccgugagcaccaagagaagccagcaggccgugauccccaacaucggcagcagacccagaaucagaaacauccccagcagaaucagcaucuacuggaccaucgugaagcccggcgacauccugcugaucaacagcaccggcaaccugaucgcccccagaggcuacuucaagaucagaagcggcaagagcagcaucaugagaagcgacgcccccaucggcaagugcaagagcgagugcaucacccccaacggcagcauccccaacgacaagcccuuccagaacgugaacagaaucaccuacggcgccugccccagauacgugaagcagagcacccugaagcuggccaccggcaugagaaacgugcccgagaagcagaccagaggcaucuucggcgccaucgccggcuucaucgagaacggcugggagggcaugguggacggcugguacggcuucagacaccagaacagcgagggcagaggccaggccgccgaccugaagagcacccaggccgccaucgaccagaucaacggcaagcugaacagacugaucggcaagaccaacgagaaguuccaccagaucgagaaggaguucagcgagguggagggcagaauccaggaccuggagaaguacguggaggacaccaagaucgaccuguggagcuacaacgccgagcugcugguggcccuggagaaccagcacaccaucgaccugaccgacagcgagaugaacaagcuguucgagaagaccaagaagcagcugagagagaacgccgaggacaugggcaacggcugcuucaagaucuaccacaagugcgacaacgccugcaucggcagcaucagaaacggcaccuacgagcacgacguguacagagacgaggcccugaacaacagauuccagaucaagggcguggagcugaagagcggcuacaaggacuggauccuguggaucagcuucgccaucagcugcuuccugcugugcguggcccugcugggcuucaucaugugggccugccagaagggcaacaucagaugcaacaucugcaucuga

SEQ ID NO: 171570 - RNA, 1701 nt, Artificial Sequence; identical to SEQ ID NO: 170054
  derived and/or modified CDS sequence (opt4) from hemagglutinin__InfluenzaA__AHL97072

SEQ ID NO: 171571 - RNA, 1701 nt, Artificial Sequence; identical to SEQ ID NO: 170054
  derived and/or modified CDS sequence (opt4) from hemagglutinin__InfluenzaA__AHL97084

SEQ ID NO: 171572 - RNA, 1701 nt, Artificial Sequence; identical to SEQ ID NO: 169895
  derived and/or modified CDS sequence (opt4) from hemagglutinin__InfluenzaA__AHL97096

SEQ ID NO: 171573 - RNA, 1701 nt, Artificial Sequence; identical to SEQ ID NO: 170057
  derived and/or modified CDS sequence (opt4) from hemagglutinin__InfluenzaA__AHL97108

SEQ ID NO: 171574 - RNA, 1701 nt, Artificial Sequence
  derived and/or modified CDS sequence (opt4) from hemagglutinin__InfluenzaA__AHL97120
augaagaccaucaucgcccugagcuacauccugugccugguguucgcccagaagcugcccggcaacgacaacagcaccgccacccugugccugggccaccacgccgugcccaacggcaccaucgugaagaccaucaccaacgacagaaucgaggugaccaacgccaccgagcuggugcagaacagcagcaucggcgagaucugcgacagcccccaccagauccuggacggcgagaacugcacccugaucgacgcccugcugggcgacccccagugcgacggcuuccagaacaagaagugggaccuguucguggagagaagcaaggccuacagcaacugcuaccccuacgacgugcccgacuacgccagccugagaagccugguggccagcagcggcacccuggaguucaacaacgagagcuucaacugggccggcgugacccagaacggcaccagcagcgccugcaucagaggcagcaacagcagcuucuucagcagacugaacuggcugacccaccugaacuucaaguaccccgcccugaacgugaccaugcccaacaacgagcaguucgacaagcuguacaucuggggcgugcaccaccccggcaccgacaaggaccagaucuuccuguacgcccagagcagcggcagaaucaccgugagcaccaagagaagccagcaggccgugauccccaacaucggcagcagacccagaaucagaaacauccccagcagaaucagcaucuacuggaccaucgugaagcccggcgacauccugcugaucaacagcaccggcaaccugaucgcccccagaggcuacuucaagaucagaagcggcaagagcagcaucaugagaagcgacgcccccaucggcaagugcaagagcgagugcaucacccccaacggcagcauccccaacgacaagcccuuccagaacgugaacagagugaccuacggcgccugccccagauacgugaagcagagcacccugaagcuggccaccggcaugagaaacgugcccgagaagcagaccagaggcaucuucggcgccaucgccggcuucaucgagaacggcugggagggcaugguggacggcugguacggcuucagacaccagaacagcgagggcagaggccaggccgccgaccugaagagcacccaggccgccaucgaccagaucaacggcaagcugaacagacugaucggcaagaccaacgagaaguuccaccagaucgagaaggaguucagcgagguggagggcagaauccaggaccuggagaaguacguggaggacaccaagaucgaccuguggagcuacaacgccgagcugcugguggcccuggagaaccagcacaccaucgaccugaccgacagcgagaugaacaagcuguucgagaagaccaagaagcagcugagagagaacgccgaggacaugggcaacggcugcuucaagaucuaccacaagugcgacaacgccugcaucggcagcaucaucaacggcaccuacgaccacgacguguacagagacgaggcccugaacaacagauuccagaucaagggcguggagcugaagagcggcuacaaggacuggauccuguggaucagcuucgccaucagcugcuuccugcugugcguggcccugcugggcuucaucaugugggccugccagaagggcaacaucagaugcaacaucugcaucuga

SEQ ID NO: 171575 - RNA, 1701 nt, Artificial Sequence
  derived and/or modified CDS sequence (opt4) from hemagglutinin__InfluenzaA__AHL97132
augaagaccaucaucgcccugagcuacauccugugccugguguucgcccagaagcugcccggcaacgacaacagcaccgccacccugugccugggccaccacgccgugcccaacggcaccaucgugaagaccaucaccaacgaccagaucgaggugaccaacgccaccgagcuggugcagaacagcagcaucggcgagaucugcgacagcccccaccagauccuggacggcgagaacugcacccugaucgacgcccugcugggcgacccccagugcgacggcuuccagaacaagaagugggaccuguucguggagagaagcaaggccuacagcaacugcuaccccuacgacgugcccgacuacgccagccugagaagccugguggccagcagcggcacccuggaguucaacaacgagagcuucaacugggccggcgugacccagaacggcaccagcagcgccugcaucagaggcagcaacagcagcuucuucagcagacugaacuggcugacccaccugaacuucaaguaccccgcccugaacgugaccaugcccaacaacgagcaguucgacaagcuguacaucuggggcgugcaccaccccggcaccgacaaggaccagaucuuccuguacgcccagagcagcggcagaaucaccgugagcaccaagagaagccagcaggccgugauccccaacaucggcagcagacccagaaucagaaacauccccagcagaaucagcaucuacuggaccaucgugaagcccggcgacauccugcugaucaacagcaccggcaaccugaucgcccccagaggcuacuucaagaucagaagcggcaagagcagcaucaugagaagcgacgcccccaucggcaagugcaagagcgagugcaucacccccaacggcagcauccccaacgacaagcccuuccagaacgugaacagaaucaccuacggcgccugccccagauacgugaagcagagcacccugaagcuggccaccggcaugagaaacgugcccggcaagcagaccagaggcaucuucggcgccaucgccggcuucaucgagaacggcugggagggcaugguggacggcugguacggcuucagacaccagaacagcgagggcagaggccaggccgccgaccugaagagcacccaggccgccaucgaccagaucaacggcaagcugaacagacugaucggcaagaccaacgagaaguuccaccagaucgagaaggaguucagcgagguggagggcagaauccaggaccuggagaaguacguggaggacaccaagaucgaccuguggagcuacaacgccgagcugcugguggcccuggagaaccagcacaccaucgaccugaccgacagcgagaugaacaagcuguucgagaagaccaagaagcagcugagagagaacgccgaggacaugggcaacggcugcuucaagaucuaccacaagugcgacaacgccugcaucggcagcaucagaaacggcaccuacgaccacgacguguacagagacgaggcccugaacaacagauuccagaucaagggcguggagcugaagagcggcuacaaggacuggauccuguggaucagcuucgccaucagcugcuuccugcugugcguggcccugcugggcuucaucaugugggccugccagaagggcaacaucagaugcaacaucugcaucuga

SEQ ID NO: 171576 - RNA, 1701 nt, Artificial Sequence; identical to SEQ ID NO: 170054
  derived and/or modified CDS sequence (opt4) from hemagglutinin__InfluenzaA__AHL97144

SEQ ID NO: 171577 - RNA, 1701 nt, Artificial Sequence; identical to SEQ ID NO: 170054
  derived and/or modified CDS sequence (opt4) from hemagglutinin__InfluenzaA__AHL97156

SEQ ID NO: 171578 - RNA, 1701 nt, Artificial Sequence; identical to SEQ ID NO: 170054
  derived and/or modified CDS sequence (opt4) from hemagglutinin__InfluenzaA__AHL97168

SEQ ID NO: 171579 - RNA, 1701 nt, Artificial Sequence; identical to SEQ ID NO: 169928
  derived and/or modified CDS sequence (opt4) from hemagglutinin__InfluenzaA__AHL97180

SEQ ID NO: 171580 - RNA, 1701 nt, Artificial Sequence; identical to SEQ ID NO: 170054
  derived and/or modified CDS sequence (opt4) from hemagglutinin__InfluenzaA__AHL97192

SEQ ID NO: 171581 - RNA, 1701 nt, Artificial Sequence; identical to SEQ ID NO: 170054
  derived and/or modified CDS sequence (opt4) from hemagglutinin__InfluenzaA__AHL97204

SEQ ID NO: 171582 - RNA, 1701 nt, Artificial Sequence; identical to SEQ ID NO: 170054
  derived and/or modified CDS sequence (opt4) from hemagglutinin__InfluenzaA__AHL97216

SEQ ID NO: 171583 - RNA, 1701 nt, Artificial Sequence
  derived and/or modified CDS sequence (opt4) from hemagglutinin__InfluenzaA__AHL97228
augaagaccaucaucgcccugagcuacauccugugccugguguucgcccagaagcugcccggcaacgacaacagcaccgccacccugugccugggccaccacgccgugcccaacggcaccguggugaagaccaucaccaacgacagaaucgaggugaccaacgccaccgagcuggugcagaacagcagcaucggcgagaucugcgacagcccccaccagauccuggacggcgagaacugcacccugaucgacgcccugcugggcgacccccagugcgacggcuuccagaacaagaagugggaccuguucguggagagaagcaaggccuacagcaacugcuaccccuacgacgugcccgacuacgccagccugagaagccugguggccagcagcggcacccuggaguucaacaacgagagcuucaacuggaccggcgugacccagaacggcaccagcagcgccugcaucagaagaagcaacaacagcuucuucagcagacugaacuggcugacccaccugaacuucaaguaccccgcccugaacgugaccaugcccaacaacgagcaguucgacaagcuguacaucuggggcgugcaccaccccggcaccgacaaggaccagaucuuccuguacgcccagagcagcggcagaaucaccgugagcaccaagagaagccagcaggccgugauccccaacaucggcagcagacccagaaucagaaacauccccagcagaaucagcaucuacuggaccaucgugaagcccggcgacauccugcugaucaacagcaccggcaaccugaucgcccccagaggcuacuucaagaucagaagcggcaagagcagcaucaugagaagcgacgcccccaucggcaagugcaagagcgagugcaucacccccaacggcagcauccccaacgacaagcccuuccagaacgugaacagaaucaccuacggcgccugccccagauacgugaagcagagcacccugaagcuggccaccggcaugagaaacgugcccgagaagcagaccagaggcaucuucggcgccaucgccggcuucaucgagaacggcugggagggcaugguggacggcugguacggcuucagacaccagaacagcgagggcagaggccaggccgccgaccugaagagcacccaggccgccaucgaccagaucaacggcaagcugaacagacugaucggcaagaccaacgagaaguuccaccagaucgagaaggaguucagcgagguggagggcagaauccaggaccuggagaaguacguggaggacaccaagaucgaccuguggagcuacaacgccgagcugcugguggcccuggagaaccagcacaccaucgaccugaccgacagcgagaugaacaagcuguucgagaagaccaagaagcagcugagagagaacgccgaggacaugggcaacggcugcuucaagaucuaccacaagugcgacaacgccugcaucggcagcaucagaaacggcaccuacgaccacgacguguacagagacgaggcccugaacaacagauuccagaucaagggcguggagcugaagagcggcuacaaggacuggauccuguggaucagcuucgccaucagcugcuuccugcugugcguggugcugcugggcuucaucaugugggccugccagaagggcaacaucagaugcaacaucugcaucuga

SEQ ID NO: 171584 - RNA, 1701 nt, Artificial Sequence; identical to SEQ ID NO: 170054
  derived and/or modified CDS sequence (opt4) from hemagglutinin__InfluenzaA__AHL97240

SEQ ID NO: 171585 - RNA, 1701 nt, Artificial Sequence
  derived and/or modified CDS sequence (opt4) from hemagglutinin__InfluenzaA__AHL97252
augaagaccaucaucgcccugagcuacauccugugccugguguucgcccaggagcugcccggcaacgacgacagcaccgccacccugugccugggccaccacgccgugcccaacggcaccaucgugaagaccaucaccaacgaccagaucgaggugaccaacgccaccgagcuggugcagagcagcagcaccggcgagaucugcaacagcccccaccagauccuggacggcgagaacugcacccugaucgacgcccugcugggcgacccccagugcgacggcuuccagaacaagaagugggaccuguucguggagagaagcaaggcccacagcaacugcuaccccuacgacgugcccgacuacgccagccugagaagccugguggccagcagcggcacccuggaguucaacaacgagaacuucaacuggaccggcgugacccagaacggcaccagcagcgccugcaucagaagaagcaacaacagcuucuucagcagacugaacuggcugacccaccugaacuucaaguaccccgcccugaacgugaccaugcccaacaacgagcaguucgacaagcuguacaucuggggcgugcaccaccccggcaccgacaaggaccagaucuuccuguacgcccaggccagcggcagaaucaccgugagcaccaagagaagccagcaggccgugauccccaacaucggcagcagacccagagugagaaacauccccagcagagugagcaucuacuggaccaucgugaagcccggcgacauccugcugaucaacagcaccggcaaccugaucgcccccagaggcuacuucaagaucagaagcggcaagagcagcaucaugagaagcgacgcccccaucggcaagugcaacagcgccugcaucacccccaacggcagcauccccaacgacaagcccuuccagaacgugaacagaaucaccuacggcgccugccccagauacgugaagcagaacacccugaagcuggccaccggcaugagaaacgugcccgagaagcagaccagaggcaucuucggcgccaucgccggcuucaucgagaacggcugggagggcaugguggacggcugguacggcuucagacaccagaacagcgagggcagaggccaggccgccgaccugaagagcacccaggccgccaucgaccagaucaacggcaagcugaacagacugaucggcaagaccaacgagaaguuccaccagaucgagaaggaguucagcgagguggagggcagaauccaggaccuggagaaguacguggaggacaccaagaucgaccuguggagcuacaacgccgagcugcugguggcccuggagaaccagcacaccaucgaccugaccgacagcgagaugaacaagcuguucgagaagaccaagaagcagcugagagagaacgccgaggacaugggcaacggcugcuucaagaucuaccacaagugcgacaacgccugcaucggcagcaucagaaacggcaccuacgaccacgacguguacagagacgaggcccugaacaacagauuccagaucaagggcguggagcugaagagcggcuacaaggacuggauccuguggaucagcuucgccaucagcugcuuccugcugugcguggcccugcugggcuucaucaugugggccugccagaagggcaacaucagaugcaacaucugcaucuga

SEQ ID NO: 171586 - RNA, 1701 nt, Artificial Sequence; identical to SEQ ID NO: 169918
  derived and/or modified CDS sequence (opt4) from hemagglutinin__InfluenzaA__AHL97264

SEQ ID NO: 171587 - RNA, 1701 nt, Artificial Sequence; identical to SEQ ID NO: 170054
  derived and/or modified CDS sequence (opt4) from hemagglutinin__InfluenzaA__AHL97276

SEQ ID NO: 171588 - RNA, 1701 nt, Artificial Sequence
  derived and/or modified CDS sequence (opt4) from hemagglutinin__InfluenzaA__AHL97288
augaagaccaucaucgcccugagcuacauccugugccugguguucgcccagaagcugcccggcaacgacaacagcaccgccacccugugccugggccaccacgccgugcccaacggcaccaucgugaagaccaucaccaacgacagaaucgaggugaccaacgccaccgagcuggugcagaacagcagcaucggcgagaucugcaacagcccccaccagauccuggacggcgagaacugcacccugaucgacgcccugcugggcgacccccagugcgacggcuuccagaacaagaagugggaccuguucguggagagaagcaaggccuacagcaacugcuaccccuacgacgugcccgacuacgccagccugagaagccugguggccagcagcggcacccuggaguucaacaacgagagcuucaacuggaccggcgugacccagaacggcaccagcagcgccugcaucagaagaagcaacagcagcuucuucagcagacugaacuggcugacccaccugaacuucaaguaccccgcccugaacgugaccaugcccaacaacgagcaguucgacaagcuguacaucuggggcgugcaccaccccggcaccgacaaggaccagaucuuccuguacgcccagagcagcggcagaaucaccgugagcaccaagagaagccagcaggccgugauccccaacaucggcagcagacccagaaucagaaacauccccagcagaaucagcaucuacuggaccaucgugaagcccggcgacauccugcugaucaacagcaccggcaaccugaucgcccccagaggcuacuucaagaucagaagcggcaagagcagcaucaugagaagcgacgcccccaucggcaagugcaagagcgagugcaucacccccaacggcagcauccccaacgacaagcccuuccagaacgugaacagaaucaccuacggcgccugccccagauacgugaagcagagcacccugaagcuggccaccggcaugagaaacgugcccgagaagcagaccagaggcaucuucggcgccaucgccggcuucaucgagaacggcugggagggcaugguggacggcugguacggcuucagacaccagaacagcgagggcagaggccaggccgccgaccugaagagcacccaggccgccaucgaccagaucaacggcaagcugaacagacugaucggcaagaccaacgagaaguuccaccagaucgagaaggaguucagcgagguggagggcagaauccaggaccuggagaaguacguggaggacaccaagaucgaccuguggagcuacaacgccgagcugcugguggcccuggagaaccagcacaccaucgaccugaccgacagcgagaugaacaagcuguucgagaagaucaagaagcagcugagagagaacgccgaggacaugggcaacggcugcuucaagaucuaccacaagugcgacaacgccugcaucggcagcaucagaaacggcaccuacgaccacaacguguacagagacgaggcccugaacaacagauuccagaucaagggcguggagcugaagagcggcuacaaggacuggauccuguggaucagcuucgccaucagcugcuuccugcugugcguggcccugcugggcuucaucaugugggccugccagaagggcaacaucagaugcaacaucugcaucuga

SEQ ID NO: 171589 - RNA, 1701 nt, Artificial Sequence; identical to SEQ ID NO: 169928
  derived and/or modified CDS sequence (opt4) from hemagglutinin__InfluenzaA__AHL97300

SEQ ID NO: 171590 - RNA, 1701 nt, Artificial Sequence; identical to SEQ ID NO: 170054
  derived and/or modified CDS sequence (opt4) from hemagglutinin__InfluenzaA__AHL97312

SEQ ID NO: 171591 - RNA, 1701 nt, Artificial Sequence; identical to SEQ ID NO: 170054
  derived and/or modified CDS sequence (opt4) from hemagglutinin__InfluenzaA__AHL97336

SEQ ID NO: 171592 - RNA, 1701 nt, Artificial Sequence; identical to SEQ ID NO: 170054
  derived and/or modified CDS sequence (opt4) from hemagglutinin__InfluenzaA__AHL97348

SEQ ID NO: 171593 - RNA, 1701 nt, Artificial Sequence
  derived and/or modified CDS sequence (opt4) from hemagglutinin__InfluenzaA__AHL97372
augaagaccaucaucgcccugagcuacauccugugccugguguucgcccagaagcugcccggcaacgacaacagcaccgccacccugugccugggccaccacgccgugcccaacggcaccaucgugaagaccaucaccaacgacagaaucgaggugaccaacgccaccgagcuggugcagaacagcagcaucggcgagaucugcgacagcccccaccagauccuggacggcgagaacugcacccugaucgacgcccugcugggcgacccccagugcgacggcuuccagaacaagaagugggaccuguucguggagagaagcaacgccuacagcaacugcuaccccuacgacgugcccgacuacgccagccugagaagccugguggccagcagcggcacccuggaguucaacaacgagagcuucaacugggccggcgugacccagaacggcaccagcagcgccugcaucagaggcagcaacagcagcuucuucagcagacugaacuggcugacccaccugaacuucaaguaccccgcccugaacgugaccaugcccaacaacgagcaguucgacaagcuguacaucuggggcgugcaccaccccggcaccgacaaggaccagaucuuccuguacgcccagagcagcggcagaaucaccgugagcaccaagagaagccagcaggccgugauccccaacaucggcagcagacccagaaucagaaacauccccagcagaaucagcaucuacuggaccaucgugaagcccggcgacauccugcugaucaacagcaccggcaaccugaucgcccccagaggcuacuucaagaucagaagcggcaagagcagcaucaugagaagcgacgcccccaucggcaagugcaagagcgagugcaucacccccaacggcagcauccccaacgacaagcccuuccagaacgugaacagaaucaccuacggcgccugccccagauacgugaagcagagcacccugaagcuggccaccggcaugagaaacgugcccgagaagcagaccagaggcaucuucggcgccaucgccggcuucaucgagaacggcugggagggcaugguggacggcugguacggcuucagacaccagaacagcgagggcagaggccaggccgccgaccugaagagcacccaggccgccaucgaccagaucaacggcaagcugaacagacugaucggcaagaccaacgagaaguuccaccagaucgagaaggaguucagcgagguggagggcagaauccaggaccuggagaaguacguggaggacaccaagaucgaccuguggagcuacaacgccgagcugcugguggcccuggagaaccagcacaccaucgaccugaccgacagcgagaugaacaagcuguucgagaagaccaagaagcagcugagagagaacgccgaggacaugggcaacggcugcuucaagaucuaccacaagugcgacaacgccugcaucggcagcaucagaaacggcaccuacgaccacgacguguacagagacgaggcccugaacaacagauuccagaucaagggcguggagcugaagagcggcuacaaggacuggauccuguggaucagcuucgccaucagcugcuuccugcugugcguggcccugcugggcuucaucaugugggccugccagaagggcaacaucagaugcaacaucugcaucuga

SEQ ID NO: 171594 - RNA, 1701 nt, Artificial Sequence; identical to SEQ ID NO: 170054
  derived and/or modified CDS sequence (opt4) from hemagglutinin__InfluenzaA__AHL97384

SEQ ID NO: 171595 - RNA, 1701 nt, Artificial Sequence; identical to SEQ ID NO: 169918
  derived and/or modified CDS sequence (opt4) from hemagglutinin__InfluenzaA__AHL97396

SEQ ID NO: 171596 - RNA, 1701 nt, Artificial Sequence; identical to SEQ ID NO: 169895
  derived and/or modified CDS sequence (opt4) from hemagglutinin__InfluenzaA__AHL97408

SEQ ID NO: 171597 - RNA, 1701 nt, Artificial Sequence; identical to SEQ ID NO: 171566
  derived and/or modified CDS sequence (opt4) from hemagglutinin__InfluenzaA__AHL97420

SEQ ID NO: 171598 - RNA, 1701 nt, Artificial Sequence
  derived and/or modified CDS sequence (opt4) from hemagglutinin__InfluenzaA__AHL97444
augaagaccaucaucgcccugagcuacauccugugccugguguucgcccagaagcugcccggcaacgacaacagcaccgccacccugugccugggccaccacgccgugcccaacggcaccaucgugaagaccaucaccaacgacagaaucgaggugaccaacgccaccgagcuggugcagaacagcagcaucggcgagaucugcgacagcccccaccagauccuggacggcgagaacugcacccugaucgacgcccugcugggcgacccccagugcgacggcuuccagaacaagaagugggaccuguucguggagagaagcaaggccuacagcaacugcuaccccuacgacgugcccgacuacgccagccugagaagccugguggccagcagcggcacccuggaguucaacaacgagagcuucaacugggccggcgugacccagaacggcaccagcagcgccugcaucagaggcagcaacagcagcuucuucagcagacugaacuggcugacccaccugaacuucaaguaccccgcccugaacgugaccaugcccaacaacgagcaguucgacaagcuguacaucuggggcgugcaccaccccggcaccgacaaggaccagaucuuccuguacgcccagagcagcggcagaaucaccgugagcaccaagagaagccagcaggccgugauccccaacaucggcagcagacccagaaucagaaacauccccagcagaaucagcaucuacuggaccaucgugaagcccggcgacauccugcugaucaacagcaccggcaaccugaucgcccccagaggcuacuucaagaucagaagcggcaagagcagcaucaugagaagcgacgcccccaucggcaagugcaagagcgagugcaucacccccaacggcagcauccccaacgacaagcccuuccagaacgugaacagaaucaccuacggcaccugccccagauacgugaagcagagcacccugaagcuggccaccggcaugagaaacgugcccgagaagcagaccagaggcaucuucggcgccaucgccggcuucaucgagaacggcugggagggcaugguggacggcugguacggcuucagacaccagaacagcgagggcagaggccaggccgccgaccugaagagcacccaggccgccaucgaccagaucaacggcaagcugaacagacugaucggcaagaccaacgagaaguuccaccagaucgagaaggaguucagcgagguggagggcagaauccaggaccuggagaaguacguggaggacaccaagaucgaccuguggagcuacaacgccgagcugcugguggcccuggagaaccagcacaccaucgaccugaccgacagcgagaugaacaagcuguucgagaagaccaagaagcagcugagagagaacgccgaggacaugggcaacggcugcuucaagaucuaccacaagugcgacaacgccugcaucggcagcaucagaaacggcaccuacgaccacgacguguacagagacgaggcccugaacaacagauuccagaucaagggcguggagcugaagagcggcuacaaggacuggauccuguggaucagcuucgccaucagcugcuuccugcugugcguggcccugcugggcuucaucaugugggccugccagaagggcaacaucagaugcaacaucugcaucuga

SEQ ID NO: 171599 - RNA, 1701 nt, Artificial Sequence; identical to SEQ ID NO: 169928
  derived and/or modified CDS sequence (opt4) from hemagglutinin__InfluenzaA__AHL97456

SEQ ID NO: 171600 - RNA, 1701 nt, Artificial Sequence
  derived and/or modified CDS sequence (opt4) from hemagglutinin__InfluenzaA__AHL97468
augaagaccaucaucgcccugagcuacauccugugccugguguucgcccagaagcugcccggcaacgacaacagcaccgccacccugugccugggccaccacgccgugcccaacggcaccaucgugaagaccaucaccaacgacagaaucgaggugaccaacgccaccgagcuggugcagaacagcagcaucggcgagaucugcgacagcccccaccagauccuggacggcgagaacugcacccugaucgacgcccugcugggcgacccccagugcgacggcuuccagaacaagaagugggaccuguucguggagagaagcaaggccuacagcaacugcuaccccuacgacgugcccgacuacgccagccugagaagccugguggccagcagcggcacccuggaguucaacaacgagagcuucaacuggaccggcgugacccagaacggcaccagcagcgccugcaucagaagaagcaacagcagcuucuucagcagacugaacuggcugacccaccugaacuucaaguaccccgcccugaacgugaccaugcccaacaacgagcaguucgacaagcuguacaucuggggcgugcaccaccccggcaccgacaaggaccagaucuuccuguacgcccagagcagcggcagaaucaccgugagcaccaagagaagccagcaggccgugauccccaacaucggcagcagacccagaaucagaaacauccccagcagaaucagcaucuacuggaccaucgugaagcccggcgacauccugcugaucaacagcaccggcaaccugaucgcccccagaggcuacuucaagaucagaagcggcaagagcagcaucaugagaagcgacgcccccaucggcaagugcaagagcgagugcaucacccccaacggcagcauccccaacgacaagcccuuccagaacgugaacagaaucaccuacggcgccugccccagauacgugaagcagagcacccugaagcuggccaccggcaugagaaacgugcccgagaagcagaccagaggcaucuucggcgccaucgccggcuucaucgagaacggcugggagggcaugauggacggcugguacggcuucagacaccagaacagcgagggcagaggccaggccgccgaccugaagagcacccaggccgccaucgaccagaucaacggcaagcugaacagacugaucggcaagaccaacgagaaguuccaccagaucgagaaggaguucagcgagguggagggcagaauccaggaccuggagaaguacguggaggacaccaagaucgaccuguggagcuacaacgccgagcugcugguggcccuggagaaccagcacaccaucgaccugaccgacagcgagaugaacaagcuguucgagaagaccaagaagcagcugagagagaacgccgaggacaugggcaacggcugcuucaagaucuaccacaagugcgacaacgccugcaucggcagcaucagaaacggcaccuacgaccacaacguguacagagacgaggcccugaacaacagauuccagaucaagggcguggagcugaagagcggcuacaaggacuggauccuguggaucagcuucgccaucagcugcuuccugcugugcguggcccugcugggcuucaucaugugggccugccagaagggcaacaucagaugcaacaucugcaucuga

SEQ ID NO: 171601 - RNA, 1701 nt, Artificial Sequence; identical to SEQ ID NO: 170054
  derived and/or modified CDS sequence (opt4) from hemagglutinin__InfluenzaA__AHL97480

SEQ ID NO: 171602 - RNA, 1701 nt, Artificial Sequence; identical to SEQ ID NO: 170054
  derived and/or modified CDS sequence (opt4) from hemagglutinin__InfluenzaA__AHL97493

SEQ ID NO: 171603 - RNA, 1701 nt, Artificial Sequence; identical to SEQ ID NO: 171566
  derived and/or modified CDS sequence (opt4) from hemagglutinin__InfluenzaA__AHL97505

SEQ ID NO: 171604 - RNA, 1701 nt, Artificial Sequence
  derived and/or modified CDS sequence (opt4) from hemagglutinin__InfluenzaA__AHL97517
augaagaccaucaucgcccugagcuacauccugugccugguguucgcccagaagcugcccggcaacgacaacagcaccgccacccugugccugggccaccacgccgugcccaacggcaccaucgugaagaccaucaccaacgacagaaucgaggugaccaacgccaccgagcuggugcagaacagcagcaucggcgagaucugcgacagcccccaccagauccuggacggcgagaacugcacccugaucgacgcccugcugggcgacccccagugcgacggcuuccagaacaagaagugggaccuguucguggagagaagcaaggccuacagcaacugcuaccccuacgacgugcccgacuacgccagccugagaagccugguggccagcagcggcacccuggaguucaacaacgagagcuucaacuggaccggcgugacccagaacggcaccagcagcgccugcaucagaagaagcaacagcagcuucuucagcagacugaacuggcugacccaccugaacuucaaguaccccgcccugaacgugaccaugcccaacaacgagcaguucgacaagcuguacaucuggggcgugcaccaccccggcaccgacaaggaccagaucuuccuguacgcccagagcagcggcagaaucaccgugagcacccagagaagccagcaggccgugauccccaacaucggcagcagacccagaaucagaaacauccccagcagaaucagcaucuacuggaccaucgugaagcccggcgacauccugcugaucaacagcaccggcaaccugaucgcccccagaggcuacuucaagaucagaagcggcaagagcagcaucaugagaagcgacgcccccaucggcaagugcaagagcgagugcaucacccccaacggcagcauccccaacgacaagcccuuccagaacgugaacagaaucaccuacggcgccugccccagauacgugaagcagagcacccugaagcuggccaccggcaugagaaacgugcccgagaagcagaccagaggcaucuucggcgccaucgccggcuucaucgagaacggcugggagggcaugguggacggcugguacggcuucagacaccagaacagcgagggcagaggccaggccgccgaccugaagagcacccaggccgccaucgaccagaucaacggcaagcugaacagacugaucggcaagaccaacgagaaguuccaccagaucgagaaggaguucagcgagguggagggcagaauccaggaccuggagaaguacguggaggacaccaagaucgaccuguggagcuacaacgccgagcugcugguggcccuggagaaccagcacaccaucgaccugaccgacagcgagaugaacaagcuguucgagaagaccaagaagcagcugagagagaacgccgaggacaugggcaacggcugcuucaagaucuaccacaagugcgacaacgccugcaucggcagcaucagaaacggcaccuacgaccacaacguguacagagacgaggcccugaacaacagauuccagaucaagggcguggagcugaagagcggcuacaaggacuggauccuguggaucagcuucgccaucagcugcuuccugcugugcguggcccugcugggcuucaucaugugggccugccagaagggcaacaucagaugcaacaucugcaucuga

SEQ ID NO: 171605 - RNA, 1701 nt, Artificial Sequence; identical to SEQ ID NO: 169943
  derived and/or modified CDS sequence (opt4) from hemagglutinin__InfluenzaA__AHL97529

SEQ ID NO: 171606 - RNA, 1701 nt, Artificial Sequence; identical to SEQ ID NO: 169928
  derived and/or modified CDS sequence (opt4) from hemagglutinin__InfluenzaA__AHL97541

SEQ ID NO: 171607 - RNA, 1701 nt, Artificial Sequence; identical to SEQ ID NO: 170054
  derived and/or modified CDS sequence (opt4) from hemagglutinin__InfluenzaA__AHL97553

SEQ ID NO: 171608 - RNA, 1701 nt, Artificial Sequence; identical to SEQ ID NO: 169895
  derived and/or modified CDS sequence (opt4) from hemagglutinin__InfluenzaA__AHL97565

SEQ ID NO: 171609 - RNA, 1701 nt, Artificial Sequence
  derived and/or modified CDS sequence (opt4) from hemagglutinin__InfluenzaA__AHL97577
augaagaccaucaucgcccugagcuacauccugugccugguguucgcccagaagauccccggcaacgacaacagcaccgccacccugugccugggccaccacgccgugcccaacggcaccaucgugaagaccaucaccaacgacagaaucgaggugaccaacgccaccgagcuggugcagaacagcagcaucggcgagaucugcgacagcccccaccagauccuggacggcgagaacugcacccugaucgacgcccugcugggcgacccccagugcgacggcuuccagaacaagaagugggaccuguucguggagagaagcaaggccuacagcaacugcuaccccuacgacgugcccgacuacgccagccugagaagccugguggccagcagcggcacccuggaguucaacaacgagagcuucaacuggaccggcgugacccagaacggcaccagcagcgccugcaucagaggcagcaacagcagcuucuucagcagacugaacuggcugacccaccugaacuucaaguaccccgcccugaacgugaccaugcccaacaacgagcaguucgacaagcuguacaucuggggcgugcaccaccccggcaccgacaaggaccagaucuuccuguacgcccagagcagcggcagaaucaccgugagcaccaagagaagccagcaggccgugauccccaacaucggcagcagacccagaaucagaaacauccccagcagaaucagcaucuacuggaccaucgugaagcccggcgacauccugcugaucaacagcaccggcaaccugaucgcccccagaggcuacuucaagaucagaagcggcaagagcagcaucaugagaagcgacgcccccaucggcaagugcaagagcgagugcaucacccccaacggcagcauccccaacgacaagcccuuccagaacgugaacagaaucaccuacggcgccugccccagauacgugaagcagagcacccugaagcuggccaccggcaugagaaacgugcccgagaagcagaccagaggcaucuucggcgccaucgccggcuucaucgagaacggcugggagggcaugguggacggcugguacggcuucagacaccagaacagcgagggcagaggccaggccgccgaccugaagagcacccaggccgccaucgaccagaucaacggcaagcugaacagacugaucggcaagaccaacgagaaguuccaccagaucgagaaggaguucagcgagguggagggcagaauccaggaccuggagaaguacguggaggacaccaagaucgaccuguggagcuacaacgccgagcugcugguggcccuggagaaccagcacaccaucgaccugaccgacagcgagaugaacaagcuguucgagagaaccaagaagcagcugagagagaacgccgaggacaugggcaacggcugcuucaagaucuaccacaagugcgacaacgccugcaucggcagcaucagaaacggcaccuacgaccacgacguguacagagacgaggcccugaacaacagauuccagaucaagggcguggagcugaagcccggcuacaaggacuggauccuguggaucagcuucgccaucagcugcuuccugcugugcguggcccugcugggcuucaucaugugggccugccagaagggcaacaucagaugcaacaucugcaucuga

SEQ ID NO: 171610 - RNA, 1701 nt, Artificial Sequence; identical to SEQ ID NO: 170083
  derived and/or modified CDS sequence (opt4) from hemagglutinin__InfluenzaA__AHL97589

SEQ ID NO: 171611 - RNA, 1701 nt, Artificial Sequence; identical to SEQ ID NO: 170054
  derived and/or modified CDS sequence (opt4) from hemagglutinin__InfluenzaA__AHL97601

SEQ ID NO: 171612 - RNA, 1701 nt, Artificial Sequence; identical to SEQ ID NO: 169918
  derived and/or modified CDS sequence (opt4) from hemagglutinin__InfluenzaA__AHL97613

SEQ ID NO: 171613 - RNA, 1701 nt, Artificial Sequence; identical to SEQ ID NO: 171600
  derived and/or modified CDS sequence (opt4) from hemagglutinin__InfluenzaA__AHL97625

SEQ ID NO: 171614 - RNA, 1701 nt, Artificial Sequence; identical to SEQ ID NO: 169928
  derived and/or modified CDS sequence (opt4) from hemagglutinin__InfluenzaA__AHL97637

SEQ ID NO: 171615 - RNA, 1701 nt, Artificial Sequence
  derived and/or modified CDS sequence (opt4) from hemagglutinin__InfluenzaA__AHL97661
augaagaccaucaucgcccugggcuacauccugugccugguguucgcccagaagcugcccggcaacgacaacagcaccgccacccugugccugggccaccacgccgugcccaacggcaccaucgugaagaccaucaccaacgacagaaucgaggugaccaacgccaccgagcuggugcagaacagcagcaucggcgagaucugcgacagcccccaccagauccuggacggcgagaacugcacccugaucgacgcccugcugggcgacccccagugcgacggcuuccagaacaagaagugggaccuguucguggagagaagcaaggccuacagcaacugcuaccccuacgacgugcccgacuacgccagccugagaagccugguggccagcagcggcacccuggaguucaacaacgagagcuucaacuggaccggcgugacccagaacggcaccagcagcgccugcaucagaagaagcaacagcagcuucuucagcagacugaacuggcugacccaccugaacuucaaguaccccgcccugaacgugaccaugcccaacaacgagcaguucgacaagcuguacaucuggggcgugcaccaccccggcaccgacaaggaccagaucuuccuguacgcccagagcagcggcagaaucaccgugagcaccaagagaagccagcaggccgugauccccaacaucggcagcagacccagaaucagaaacauccccagcagaaucagcaucuacuggaccaucgugaagcccggcgacauccugcugaucaacagcaccggcaaccugaucgcccccagaggcuacuucaagaucagaagcggcaagagcagcaucaugagaagcgacgcccccaucggcaagugcaagagcgagugcaucacccccaacggcagcauccccaacgacaagcccuuccagaacgugaacagaaucaccuacggcgccugccccagauacgugaagcagagcacccugaagcuggccaccggcaugagaaacgugcccgagaagcagaccagaggcaucuucggcgccaucgccggcuucaucgagaacggcugggagggcaugguggacggcugguacggcuucagacaccagaacagcgagggcagaggccaggccgccgaccugaagagcacccaggccgccaucgaccagaucaacggcaagcugaacagacugaucggcaagaccaacgagaaguuccaccagaucgagaaggaguucagcgagguggagggcagaauccaggaccuggagaaguacguggaggacaccaagaucgaccuguggagcuacaacgccgagcugcugguggcccuggagaaccagcacaccaucgaccugaccgacagcgagaugaacaagcuguucgagaagaccaagaagcagcugagagagaacgccgaggacaugggcaacggcugcuucaagaucuaccacaagugcgacaacgccugcaucggcagcaucagaaacggcaccuacgaccacaacguguacagagacgaggcccugaacaacagauuccagaucaagggcguggagcugaagagcggcuacaaggacuggauccuguggaucagcuucgccaucagcugcuuccugcugugcguggcccugcugggcuucaucaugugggccugccagaagggcaacaucagaugcaacaucugcaucuga

SEQ ID NO: 171616 - RNA, 1701 nt, Artificial Sequence
  derived and/or modified CDS sequence (opt4) from hemagglutinin__InfluenzaA__AHL97673
augaagaccaccaucgcccugagcuacauccugugccugguguucgcccaggagcugcccggcaacgacgacagcaccgccacccugugccugggccaccacgccgugcccaacggcaccaucgugaagaccaucaccaacgaccagaucgaggugaccaacgccaccgagcuggugcagagcagcagcaccggcgagaucugcaacagcccccaccagauccuggacggcgagaacugcacccugaucgacgcccugcugggcgacccccagugcgacggcuuccagaacaagaagugggaccuguucguggagagaagcaaggcccacagcaacugcuaccccuacgacgugcccgacuacgccagccugagaagccugguggccagcagcggcacccuggaguucaacaacgagagcuucaacuggaccggcgugacccagaacggcaccagcagcgccugcaucagaagaagcaacaacagcuucuucagcagacugaacuggcugacccaccugaacuucaaguaccccgcccugaacgugaccaugcccaacaacgagcaguucgacaagcuguacaucuggggcgugcaccaccccggcaccgacaaggaccagaucuuccuguacgcccaggccagcggcagaaucaccgugagcaccaagagaagccagcaggccgugauccccaacaucggcagcagacccagagugagaaacauccccagcagagugagcaucuacuggaccaucgugaagcccggcgacauccugcugaucaacagcaccggcaaccugaucgcccccagaggcuacuucaagaucagaagcggcaagagcagcaucaugagaagcgacgcccccaucggcaagugcaacagcgccugcaucacccccaacggcagcauccccaacgacaagcccuuccagaacgugaacagaaucaccuacggcgccugccccagauacgugaagcagaacacccugaagcuggccaccggcaugagaaacgugcccgagaagcagaccagaggcaucuucggcgccaucgccggcuucaucgagaacggcugggagggcaugguggacggcugguacggcuucagacaccagaacagcgagggcagaggccaggccgccgaccugaagagcacccaggccgccaucgaccagaucaacggcaagcugaacagacugaucggcaagaccaacgagaaguuccaccagaucgagaaggaguucagcgagguggagggcagaauccaggaccuggagaaguacguggaggacaccaagaucgaccuguggagcuacaacgccgagcugcugguggcccuggagaaccagcacaccaucgaccugaccgacagcgagaugaacaagcuguucgagaagaccaagaagcagcugagagagaacgccgaggacaugggcaacggcugcuucaagaucuaccacaagugcgacaacgccugcaucggcagcaucagaaacggcaccuacgaccacgacguguacagagacgaggcccugaacaacagauuccagaucaagggcguggagcugaagagcggcuacaaggacuggauccuguggaucagcuucgccaucagcugcuuccugcugugcguggcccugcugggcuucaucaugugggccugccagaagggcaacaucagaugcaacaucugcaucuga

SEQ ID NO: 171617 - RNA, 1701 nt, Artificial Sequence; identical to SEQ ID NO: 170054
  derived and/or modified CDS sequence (opt4) from hemagglutinin__InfluenzaA__AHL97685

SEQ ID NO: 171618 - RNA, 1701 nt, Artificial Sequence
  derived and/or modified CDS sequence (opt4) from hemagglutinin__InfluenzaA__AHL97697
augaagaccaucaucgcccugagcuacauccugugccugguguucgcccagaagcugcccggcaacgacaacagcaccgccacccugugccugggccaccacgccgugcccaacggcaccaucgugaagaccaucaccaacgacagaaucgaggugaccaacgccaccgagcuggugcagaacagcagcaucggcgagaucugcgacagcccccaccagauccuggacggcgagaacugcacccugaucgacgcccugcugggcgacccccagugcgacggcuuccagaacaagaagugggaccuguucguggagagaggcaaggccuacagcaacugcuaccccuacgacgugcccgacuacgccagccugagaagccugguggccagcagcggcacccuggaguucaacaacgagagcuucaacugggccggcgugacccagaacggcaccagcagcgccugcaucagaggcagcaacagcagcuucuucagcagacugaacuggcugacccaccugaacuucaaguaccccgcccugaacgugaccaugcccaacaacgagcaguucgacaagcuguacaucuggggcgugcaccaccccggcaccgacaaggaccagaucuuccuguacgcccagagcagcggcagaaucaccgugagcaccaagagaagccagcaggccgugauccccaacaucggcagcagacccagaaucagaaacauccccagcagaaucagcaucuacuggaccaucgugaagcccggcgacauccugcugaucaacagcaccggcaaccugaucgcccccagaggcuacuucaagaucagaagcggcaagagcagcaucaugagaagcgacgcccccaucggcaagugcaagagcgagugcaucacccccaacggcagcauccccaacgacaagcccuuccagaacgugaacagaaucaccuacggcgccugccccagauacgugaagcagagcacccugaagcuggccaccggcaugagaaacgugcccgagaagcagaccagaggcaucuucggcgccaucgccggcuucaucgagaacggcugggagggcaugguggacggcugguacggcuucagacaccagaacagcgagggcagaggccaggccgccgaccugaagagcacccaggccgccaucgaccagaucaacggcaagcugaacagacugaucggcaagaccaacgagaaguuccaccagaucgagaaggaguucagcgagguggagggcagaauccaggaccuggagaaguacguggaggacaccaagaucgaccuguggagcuacaacgccgagcugcugguggcccuggagaaccagcacaccaucgaccugaccgacagcgagaugaacaagcuguucgagaagaccaagaagcagcugagagagaacgccgaggacaugggcaacggcugcuucaagaucuaccacaagugcgacaacgccugcaucggcagcaucagaaacggcaccuacgaccacgacguguacagagacgaggcccugaacaacagauuccagaucaagggcguggagcugaagagcggcuacaaggacuggauccuguggaucagcuucgccaucagcugcuuccugcugugcguggcccugcugggcuucaucaugugggccugccagaagggcaacaucagaugcaacaucugcaucuga

SEQ ID NO: 171619 - RNA, 1701 nt, Artificial Sequence; identical to SEQ ID NO: 169928
  derived and/or modified CDS sequence (opt4) from hemagglutinin__InfluenzaA__AHL97709

SEQ ID NO: 171620 - RNA, 1701 nt, Artificial Sequence; identical to SEQ ID NO: 170054
  derived and/or modified CDS sequence (opt4) from hemagglutinin__InfluenzaA__AHL97721

SEQ ID NO: 171621 - RNA, 1701 nt, Artificial Sequence; identical to SEQ ID NO: 169928
  derived and/or modified CDS sequence (opt4) from hemagglutinin__InfluenzaA__AHL97733

SEQ ID NO: 171622 - RNA, 1701 nt, Artificial Sequence; identical to SEQ ID NO: 169918
  derived and/or modified CDS sequence (opt4) from hemagglutinin__InfluenzaA__AHL97745

SEQ ID NO: 171623 - RNA, 1701 nt, Artificial Sequence; identical to SEQ ID NO: 170054
  derived and/or modified CDS sequence (opt4) from hemagglutinin__InfluenzaA__AHL97757

SEQ ID NO: 171624 - RNA, 1701 nt, Artificial Sequence; identical to SEQ ID NO: 170054
  derived and/or modified CDS sequence (opt4) from hemagglutinin__InfluenzaA__AHL97769

SEQ ID NO: 171625 - RNA, 1701 nt, Artificial Sequence
  derived and/or modified CDS sequence (opt4) from hemagglutinin__InfluenzaA__AHL97781
augaagaccaucaucgcccugagcuacauccugugccugguguucgcccaggagcugcccggcaacgacgacagcaccgccacccugugccugggccaccacgccgugcccaacggcaccaucgugaagaccaucaccaacgaccagaucgaggugaccaacgccaccgagcuggugcagagcagcagcaccggcgagaucugcaacagcccccaccagauccuggacggcgagaacugcacccugaucgacgcccugcugggcgacccccagugcgacggcuuccagaacaagaagugggaccuguucguggagagaagcaaggcccacagcaacugcuaccccuacgacgugcccgacuacgccagccugagaagccugguggccagcagcggcacccuggaguucaacaacgagagcuucaacuggaccggcgugacccagaacggcaccagcagcgccugcaucagaagaagcaacaacagcuucuucagcagacugaacuggcugacccaccugaacuucaaguaccccgcccugaacgugaccaugcccaacaacgagcaguucgacaagcuguacaucuggggcgugcaccaccccggcaccgacaaggaccagaucuuccuguacgcccaggccagcggcagaaucaccgugagcaccaagagaagccagcaggccgugauccccaacaucggcagcagacccagagugagaaacauccccagcagagugagcaucuacuggaccaucgugaagcccggcgacauccugcugaucaacagcaccggcaaccugaucgcccccagaggcuacuucaagaucagaagcggcaacagcagcaucaugagaagcgacgcccccaucggcaagugcaacagcaccugcaucacccccaacggcagcauccccaacgacaagcccuuccagaacgugaacagaaucaccuacggcgccugccccagauacgugaagcagaacacccugaagcuggccaccggcaugagaaacgugcccgagaagcagaccagaggcaucuucggcgccaucgccggcuucaucgagaacggcugggagggcaugguggacggcugguacggcuucagacaccagaacagcgagggcagaggccaggccgccgaccugaagagcacccaggccgccaucgaccagaucaacggcaagcugaacagacugaucggcaagaccaacgagaaguuccaccagaucgagaaggaguucagcgagguggagggcagaauccaggaccuggagaaguacguggaggacaccaagaucgaccuguggagcuacaacgccgagcugcugguggcccuggagaaccagcacaccaucgaccugaccgacagcgagaugaacaagcuguucgagaagaccaagaagcagcugagagagaacgccgaggacaugggcaacggcugcuucaagaucuaccacaagugcgacaacgccugcaucggcagcaucagaaacggcaccuacgaccacgacguguacagagacgaggcccugaacaacagauuccagaucaagggcguggagcugaagagcggcuacaaggacuggauccuguggaucagcuucgccaucagcugcuuccugcugugcguggcccugcugggcuucaucaugugggccugccagaagggcaacaucagaugcaacaucugcaucuga

SEQ ID NO: 171626 - RNA, 1701 nt, Artificial Sequence; identical to SEQ ID NO: 170054
  derived and/or modified CDS sequence (opt4) from hemagglutinin__InfluenzaA__AHL97793

SEQ ID NO: 171627 - RNA, 1701 nt, Artificial Sequence
  derived and/or modified CDS sequence (opt4) from hemagglutinin__InfluenzaA__AHL97805
augaagaccaucaucgcccugagcuacauccugugccugguguucgcccagaagcugcccggcaacgacaacagcaccgccacccugugccugggccaccacgccgugcccaacggcaccaucgugaagaccaucaccaacgacagaaucgaggugaccaacgccaccgagcuggugcagaacagcagcaucggcgagaucugcgacagcccccaccagauccuggacggcgagaacugcacccugaucgacgcccugcugggcgacccccagugcgacggcuuccagaacaagaagugggaccuguucguggagagaagcaaggccuacagcaacugcuaccccuacgacgugcccgacuacgccagccugagaagccugguggccagcagcggcacccuggaguucaacaacgagagcuucaacugggccggcgugacccagaacggcaccagcagcgccugcaucagaggcagcaacagcagcuucuucagcagacugaacuggcugacccaccugaacuucaaguaccccgcccugaacgugaccaugcccaacaacgagcaguucgacaagcuguacaucuggggcgugcaccaccccggcaccgacaaggaccagaucuuccuguacgcccagagcagcggcagaaucaccgugagcaccaagagaagccagcaggccgugauccccaacaucggcagcagacccagaaucagaaacauccccagcagaaucagcaucuacuggaccaucgugaagcccggcgacauccugcugaucaacagcaccggcaaccugaucgcccccagaggcuacuucaagaucagaagcggcaagagcagcaucaugagaagcgacgcccccaucggcaagugcaagagcgagugcaucacccccaacggcagcauccccaacgacaagcccuuccagaacgugaacagaaucaccuacggcgccugccccagauacgugaagcagagcacccugaagcuggccaccggcaugagaaacgugcccgagaagcagaccagaggcaucuucggcgccaucgccggcuucaucgagaacggcugggagggcaugguggacggcugguacggcuucagacaccagaacuacgagggcagaggccaggccgccgaccugaagagcacccaggccgccaucgaccagaucaacggcaagcugaacagacugaucggcaagaccaacgagaaguuccaccagaucgagaaggaguucagcgagguggagggcagaauccaggaccuggagaaguacguggaggacaccaagaucgaccuguggagcuacaacgccgagcugcugguggcccuggagaaccagcacaccaucgaccugaccgacagcgagaugaacaagcuguucgagaagaccaagaagcagcugagagagaacgccgaggacaugggcaacggcugcuucaagaucuaccacaagugcgacaacgccugcaucggcagcaucagaaacggcaccuacgaccacgacguguacagagacgaggcccugaacaacagauuccagaucaagggcguggagcugaagagcggcuacaaggacuggauccuguggaucagcuucgccaucagcugcuuccugcugugcguggcccugcugggcuucaucaugugggccugccagaagggcaacaucagaugcaacaucugcaucuga

SEQ ID NO: 171628 - RNA, 1701 nt, Artificial Sequence; identical to SEQ ID NO: 169928
  derived and/or modified CDS sequence (opt4) from hemagglutinin__InfluenzaA__AHL97817

SEQ ID NO: 171629 - RNA, 1701 nt, Artificial Sequence; identical to SEQ ID NO: 171618
  derived and/or modified CDS sequence (opt4) from hemagglutinin__InfluenzaA__AHL97829

SEQ ID NO: 171630 - RNA, 1701 nt, Artificial Sequence; identical to SEQ ID NO: 170054
  derived and/or modified CDS sequence (opt4) from hemagglutinin__InfluenzaA__AHL97841

SEQ ID NO: 171631 - RNA, 1701 nt, Artificial Sequence; identical to SEQ ID NO: 170054
  derived and/or modified CDS sequence (opt4) from hemagglutinin__InfluenzaA__AHL97853

SEQ ID NO: 171632 - RNA, 1701 nt, Artificial Sequence; identical to SEQ ID NO: 170054
  derived and/or modified CDS sequence (opt4) from hemagglutinin__InfluenzaA__AHL97865

SEQ ID NO: 171633 - RNA, 1701 nt, Artificial Sequence; identical to SEQ ID NO: 170054
  derived and/or modified CDS sequence (opt4) from hemagglutinin__InfluenzaA__AHL97877

SEQ ID NO: 171634 - RNA, 1701 nt, Artificial Sequence; identical to SEQ ID NO: 169928
  derived and/or modified CDS sequence (opt4) from hemagglutinin__InfluenzaA__AHL97889

SEQ ID NO: 171635 - RNA, 1701 nt, Artificial Sequence; identical to SEQ ID NO: 169928
  derived and/or modified CDS sequence (opt4) from hemagglutinin__InfluenzaA__AHL97901

SEQ ID NO: 171636 - RNA, 1701 nt, Artificial Sequence; identical to SEQ ID NO: 169918
  derived and/or modified CDS sequence (opt4) from hemagglutinin__InfluenzaA__AHL97913

SEQ ID NO: 171637 - RNA, 1701 nt, Artificial Sequence
  derived and/or modified CDS sequence (opt4) from hemagglutinin__InfluenzaA__AHL97925
augaagaccaucaucgcccugagcuacauccugugccugguguucgcccagaagcugcccggcaacgacaacagcaccgccacccugugccugggccaccacgccgugcccaacggcaccaucgugaagaccaucaccaacgacagaaucgaggugaccaacgccaccgagcuggugcagaacagcagcaucggcgagaucugcgacagcccccaccagauccuggacggcgagaacugcacccugaucgacgcccugcugggcgacccccagugcgacggcuuccagaacaagaagugggaccuguucguggagagaagcaaggccuacagcaacugcuaccccuacgacgugcccgacuacgccagccugagaagccugguggccagcagcggcacccuggaguucaacaacgagagcuucaacuggaccggcgugacccagaacggcaccagcagcgccugcaucagaagaagcaacaacagcuucuucagcagacugaacuggcugacccacagcaacuucaaguaccccgcccugaacgugaccaugcccaacaacgagcaguucgacaagcuguacaucuggggcgugcaccaccccggcaccgacaaggaccagaucuuccuguacgcccagagcagcggcagaaucaccgugagcaccaagagaagccagcaggccgugauccccaacaucggcagcagacccagaaucagaaacauccccagcagaaucagcaucuacuggaccaucgugaagcccggcgacauccugcugaucaacagcaccggcaaccugaucgcccccagaggcuacuucaagaucagaagcggcaagagcagcaucaugagaagcgacgcccccaucggcaagugcaagagcgagugcaucacccccaacggcagcauccccaacgacaagcccuuccagaacgugaacagaaucaccuacggcgccugccccagauacgugaagcagagcacccugaagcuggccaccggcaugagaaacgugcccgagaagcagaccagaggcaucuucggcgccaucgccggcuucaucgagaacggcugggagggcaugauggacggcugguacggcuucagacaccagaacagcgagggcagaggccaggccgccgaccugaagagcacccaggccgccaucgaccagaucaacggcaagcugaacagacugaucggcaagaccaacgagaaguuccaccagaucgagaaggaguucagcgagguggagggcagaauccaggaccuggagaaguacguggaggacaccaagaucgaccuguggagcuacaacgccgagcugcugguggcccuggagaaccagcacaccaucgaccugaccgacagcgagaugaacaagcuguucgagaagaccaagaagcugcugagagagaacgccgaggacaugggcaacggcugcuucaagaucuaccacaagugcgacaacgccugcaucggcagcaucagaaacggcaccuacgaccacgacguguacagagacgaggcccugaacaacagauuccagaucaagggcguggagcugaagagcggcuacaaggacuggauccuguggaucagcuucgccaucagcugcuuccugcugugcguggcccugcugggcuucaucaugugggccugccagaagggcaacaucagaugcaacaucugcaucuga

SEQ ID NO: 171638 - RNA, 1701 nt, Artificial Sequence; identical to SEQ ID NO: 169918
  derived and/or modified CDS sequence (opt4) from hemagglutinin__InfluenzaA__AHL97937

SEQ ID NO: 171639 - RNA, 1701 nt, Artificial Sequence; identical to SEQ ID NO: 171598
  derived and/or modified CDS sequence (opt4) from hemagglutinin__InfluenzaA__AHL97949

SEQ ID NO: 171640 - RNA, 1701 nt, Artificial Sequence; identical to SEQ ID NO: 169928
  derived and/or modified CDS sequence (opt4) from hemagglutinin__InfluenzaA__AHL97961

SEQ ID NO: 171641 - RNA, 1701 nt, Artificial Sequence; identical to SEQ ID NO: 169928
  derived and/or modified CDS sequence (opt4) from hemagglutinin__InfluenzaA__AHL97973

SEQ ID NO: 171642 - RNA, 1701 nt, Artificial Sequence; identical to SEQ ID NO: 169928
  derived and/or modified CDS sequence (opt4) from hemagglutinin__InfluenzaA__AHL97985

SEQ ID NO: 171643 - RNA, 1701 nt, Artificial Sequence
  derived and/or modified CDS sequence (opt4) from hemagglutinin__InfluenzaA__AHL97997
augaagaccaucaucgcccugagcuacauccugugccugguguucgcccagaagcugcccggcaacgacaacagcaccgccacccugugccugggccaccacgccgugcccaacggcaccaucgugaagaccaucaccaacgacagaaucgaggugaccaacgccaccgagcuggugcagaacagcagcaucggcgagaucugcgacagcccccaccagauccuggacggcgagaacugcacccugaucgacgcccugcugggcgacccccagugcgacggcuuccagaacaagaagugggaccuguucguggagagaagcaaggccuacagcaacugcuaccccuacgacgugcccgacuacgccagccugagaagccugguggccagcagcggcacccuggaguucaacaacgagagcuucaacuggaccggcgugacccagaacggcaccagcagcgccugcaucagaagaagcaacagcagcuucuucagcagacugaacuggcugacccaccugaacuucaaguaccccgcccugaacgugaccaugcccaacaacgagcaguucgacaagcuguacaucuggggcgugcaccaccccggcaccgacaaggaccagaucuuccuguacgcccagagcagcggcagaaucaccgugagcaccaagagaagccagcaggccgugauccccaacaucggcagcagacccagaaucagaaacauccccagcagaaucagcaucuacuggaccaucgugaagcccggcgacauccugcugaucaacagcaccggcaaccugaucgcccccagaggcuacuucaagaucagaagcggcaagagcagcaucaugagaagcgacgcccccaucggcaagugcaagagcgagugcaucacccccaacggcagcauccccaacgacaagcccuuccagaacgugaacagaaucaccuacggcgccugccccagauacgugaagcagagcacccugaagcuggccaccggcaugagaaacgugcccgagaagcagaccagaggcaucuucggcgccaucgccggcuucaucgagaacggcugggagggcaugguggacggcugguacggcuucagacaccagaacagcgagggcagaggccaggccgccgaccugaagagcacccaggccgccaucgaccagaucaacggcaagcugaacagacugaucggcaagaccaacgagaaguuccaccagaucgagaaggaguucagcgagguggagggcagaauccaggaccuggagaaguacguggaggacaccaagaucgaccuguggagcuacaacgccgagcugcugguggcccuggagaaccagcacaccaucgaccugaccgacagcgagaugaacaagcuguucgagaagaccaagaagcagcugagagagaacgccgaggacaugggcaacggcugcuucaagaucuaccacaagugcgacaacgccugcaucggcagcaucagaaacggcaccuacgaccacgacguguacagagacgaggcccugaacaacagauuccagaucagaggcguggagcugaagagcggcuacaaggacuggauccuguggaucagcuucgccaucagcugcuuccugcugugcguggcccugcugggcuucaucaugugggccugccagaagggcaacaucagaugcaacaucugcaucuga

SEQ ID NO: 171644 - RNA, 1701 nt, Artificial Sequence; identical to SEQ ID NO: 170054
  derived and/or modified CDS sequence (opt4) from hemagglutinin__InfluenzaA__AHL98009

SEQ ID NO: 171645 - RNA, 1701 nt, Artificial Sequence
  derived and/or modified CDS sequence (opt4) from hemagglutinin__InfluenzaA__AHL98021
augaagaccaucaucgcccugagcuacauccugugccugguguucgcccagaagcugcccggcaacgacaacagcaccgccacccugugccugggccaccacgccgugcccaacggcaccaucgugaagaccaucaccaacgacagaaucgaggugaccaacgccaccgagcuggugcagaacagcagcaucggcaagaucugcgacagcccccaccagauccuggacggcgagaacugcacccugauggacgcccugcugggcgacccccagugcgacggcuuccagaacaagaagugggaccuguucguggagagaagcaaggccuacagcaacugcuaccccuacgacgugcccgacuacgccagccugagaagccugguggccagcagcggcacccuggaguucaacaacgagagcuucaacugggccggcgugacccagaacggcaccagcagcgccugcaucagaagaagcaacagcagcuucuucagcagacugaacuggcugacccaccugaacuucaaguaccccgcccugaacgugaccaugcccaacaacgagcaguucgacaagcuguacaucuggggcgugcaccaccccggcaccgacaaggaccagaucuuccuguacgcccagagcagcggcagaaucaccgugagcaccaagagaagccagcaggccgugauccccaacaucggcagcagacccagaaucagaaacauccccagcagaaucagcaucuacuggaccaucgugaagcccggcgacauccugcugaucaacagcaccggcaaccugaucgcccccagaggcuacuucaagaucagaagcggcaagagcagcaucaugagaagcgacgcccccaucggcaagugcaagagcgagugcaucacccccaacggcagcauccccaacgacaagcccuuccagaacgugaacagaaucaccuacggcgccugccccagauacgugaagcagagcacccugaagcuggccaccggcaugagaaacgugcccgagaagcagaccagaggcaucuucggcgccaucgccggcuucaucgagaacggcugggagggcaugauggacggcugguacggcuucagacaccagaacagcgagggcagaggccaggccgccgaccugaagagcacccaggccgccaucgaccagaucaacggcaagcugaacagacugaucggcaagaccaacgagaaguuccaccagaucgagaaggaguucagcgagguggagggcagaauccaggaccuggagaaguacguggaggacaccaagaucgaccuguggagcuacaacgccgagcugcugguggcccuggagaaccagcacaccaucgaccugaccgacagcgagaugaacaagcuguucgagaagaccaagaagcagcugagagagaacgccgaggacaugggcaacggcugcuucaagaucuaccacaagugcgacaacgccugcaucggcagcaucagaaacggcaccuacgaccacaacguguacagagacgaggcccugaacaacagauuccagaucaagggcguggagcugaagagcggcuacaaggacuggauccuguggaucagcuucgccaucagcugcuuccugcugugcguggcccugcugggcuucaucaugugggccugccagaagggcaacaucagaugcaacaucugcaucuga

SEQ ID NO: 171646 - RNA, 1701 nt, Artificial Sequence; identical to SEQ ID NO: 169928
  derived and/or modified CDS sequence (opt4) from hemagglutinin__InfluenzaA__AHL98033

SEQ ID NO: 171647 - RNA, 1701 nt, Artificial Sequence; identical to SEQ ID NO: 171525
  derived and/or modified CDS sequence (opt4) from hemagglutinin__InfluenzaA__AHL98045

SEQ ID NO: 171648 - RNA, 1701 nt, Artificial Sequence; identical to SEQ ID NO: 171525
  derived and/or modified CDS sequence (opt4) from hemagglutinin__InfluenzaA__AHL98057

SEQ ID NO: 171649 - RNA, 1701 nt, Artificial Sequence; identical to SEQ ID NO: 171525
  derived and/or modified CDS sequence (opt4) from hemagglutinin__InfluenzaA__AHL98069

SEQ ID NO: 171650 - RNA, 1701 nt, Artificial Sequence
  derived and/or modified CDS sequence (opt4) from hemagglutinin__InfluenzaA__AHL98081
augaagaccaucaucgcccugagcuacauccugugccugguguucgcccagaagcugcccggcaacgacaacagcaccgccacccugugccugggccaccacgccgugcccaacggcaccaucgugaagaccaucaccaacgacagaaucgaggugaccaacgccaccgagcuggugcagaacagcagcaucggcgagaucugcgacagcccccaccagauccuggacggcgagaacugcacccugaucgacgcccugcugggcgacccccagugcgacggcuuccagaacaagaagugggaccuguucguggagagaagcaaggccuacagcaacugcuaccccuacgacgugcccgacuacgccagccugagaagccugguggccagcagcggcacccuggaguucaacaacgagagcuucaacuggaccggcgugacccagaacggcaccagcagcgccugcaucagaaagagcaacagcagcuucuucagcagacugaacuggcugacccaccugaacuucaaguaccccgcccugaacgugaccaugcccaacaacgagcaguucgacaagcuguacaucuggggcgugcaccaccccggcaccgacaaggaccagaucuuccuguacgcccagagcagcggcagaaucaccgugagcacccagagaagccagcaggccgugauccccaacaucggcagcagacccagaaucagaaacauccccagcagaaucagcaucuacuggaccaucgugaagcccggcgacauccugcugaucaacagcaccggcaaccugaucgcccccagaggcuacuucaagaucagaagcggcaagagcagcaucaugagaagcgacgcccccaucggcaagugcaagagcgagugcaucacccccaacggcagcauccccaacgacaagcccuuccagaacgugaacagaaucaccuacggcgccugccccagauacgugaagcagagcacccugaagcuggccaccggcaugagaaacgugcccgagaagcagaccagaggcaucuucggcgccaucgccggcuucaucgagaacggcugggagggcaugguggacggcugguacggcuucagacaccagaacagcgagggcagaggccaggccgccgaccugaagagcacccaggccgccaucgaccagaucaacggcaagcugaacagacuggugggcaagaccaacgagaaguuccaccagaucgagaaggaguucagcgagguggagggcagaauccaggaccuggagaaguacguggaggacaccaagaucgaccuguggagcuacaacgccgagcugcugguggcccuggagaaccagcacaccaucgaccugaccgacagcgagaugaacaagcuguucgagaagaccaagaagcagcugagagagaacgccgaggacaugggcaacggcugcuucaagaucuaccacaagugcgacaacgccugcaucggcagcaucagaaacggcaccuacgaccacgacguguacagagacgaggcccugaacaacagauuccagaucaagggcguggagcugaagagcggcuacaaggacuggauccuguggaucagcuucgccaucagcugcuuccugcugugcguggcccugcugggcuucaucaugugggccugccagaagggcaacaucagaugcaacaucugcaucuga

SEQ ID NO: 171651 - RNA, 1701 nt, Artificial Sequence; identical to SEQ ID NO: 169918
  derived and/or modified CDS sequence (opt4) from hemagglutinin__InfluenzaA__AHL98093

SEQ ID NO: 171652 - RNA, 1701 nt, Artificial Sequence
  derived and/or modified CDS sequence (opt4) from hemagglutinin__InfluenzaA__AHL98105
augaaggccauccugguggugaugcuguacaccuucgccaccgccaacgccgacacccugugcaucggcuaccacgccaacaacagcaccgacaccguggacaccgugcuggagaagaacgugaccgugacccacagcgugaaccugcuggaggacaagcacaacggcaagcugugcaagcugagaggcguggccccccugcaccugggcaagugcaacaucgccggcuggauccugggcaaccccgagugcgagagccugagcaccgccagcagcuggagcuacaucguggagaccagcggcagcgacaacggcaccugcuaccccggcgacuucaucgacuacgaggagcugagagagcagcugagcagcgugagcagcuucgagagauucgagaucuuccccaagaccagcagcuggcccaaccacgacagcaacaagggcgugaccgccgccugcccccacgccggcgccaagggcuucuacaagaaccugaucuggcuggugaagaagggcaacagcuaccccaagcugagcaucagcuacaucaacgacaagggcaaggaggugcuggugcuguggggcauccaccaccccagcaccaccgccgaccagcagagccuguaccagaacgccgacaccuacguguucgugggcgccagcagauacagcaagaaguucaagcccgagaucgccaucagacccaaggugagagaccaggagggcagaaugaacuacuacuggacccugguggagcccggcgacaagaucaccuucgaggccaccggcaaccugguggugcccagauacgccuucgccauggagagaaacgccggcagcggcaucaucaucagcgacacccccgugcacgacugcaacaccaccugccagacccccaagggcgccaucaacaccagccugcccuuccagaacauccaccccaucaccaucggcaagugccccaaguacgugaagagcaccaagcugagacuggccaccggccugagaaacgugcccagcauccagagcagaggccuguucggcgccaucgccggcuucaucgagggcggcuggaccggcaugguggacggcugguacggcuaccaccaccagaacgagcagggcagcggcuacgccgccgaccugaagagcacccagaacgccaucgacaagaucaccaacaaggugaacagcgugaucgagaagaugaacacccaguucaccgccgugggcaaggaguucaaccaccuggagaagagaaucgagaaccugaacaagaagguggacgacggcuuccuggacaucuggaccuacaacgccgagcugcuggugcugcuggagaacgagagaacccuggacuaccacgacagcaacgugaagaaccuguacgagaaggugagaaaccagcugaagaacaacgccaaggagaucggcaacggcugcuucgaguucuaccacaagugcgacaacaccugcauggagagcgugaagaacggcaccuacgacuaccccaaguacagcgaggaggccaagcugaacagagaggagaucgacggcgugaagcuggagagcaccagaaucuaccagauccuggccaucuacagcaccgccgccagcagccuggugcugguggugagccugggcgccaucagcuucuggaugugcagcaacggcagccugcagugcagaaucugcaucuga

SEQ ID NO: 171653 - RNA, 1701 nt, Artificial Sequence; identical to SEQ ID NO: 169918
  derived and/or modified CDS sequence (opt4) from hemagglutinin__InfluenzaA__AHL98116

SEQ ID NO: 171654 - RNA, 1701 nt, Artificial Sequence; identical to SEQ ID NO: 169928
  derived and/or modified CDS sequence (opt4) from hemagglutinin__InfluenzaA__AHL98128

SEQ ID NO: 171655 - RNA, 1701 nt, Artificial Sequence; identical to SEQ ID NO: 169918
  derived and/or modified CDS sequence (opt4) from hemagglutinin__InfluenzaA__AHL98140

SEQ ID NO: 171656 - RNA, 1701 nt, Artificial Sequence; identical to SEQ ID NO: 169918
  derived and/or modified CDS sequence (opt4) from hemagglutinin__InfluenzaA__AHL98152

SEQ ID NO: 171657 - RNA, 1701 nt, Artificial Sequence; identical to SEQ ID NO: 169928
  derived and/or modified CDS sequence (opt4) from hemagglutinin__InfluenzaA__AHL98164

SEQ ID NO: 171658 - RNA, 1701 nt, Artificial Sequence; identical to SEQ ID NO: 169928
  derived and/or modified CDS sequence (opt4) from hemagglutinin__InfluenzaA__AHL98176

SEQ ID NO: 171659 - RNA, 1701 nt, Artificial Sequence; identical to SEQ ID NO: 169918
  derived and/or modified CDS sequence (opt4) from hemagglutinin__InfluenzaA__AHL98188

SEQ ID NO: 171660 - RNA, 1701 nt, Artificial Sequence; identical to SEQ ID NO: 170083
  derived and/or modified CDS sequence (opt4) from hemagglutinin__InfluenzaA__AHL98200

SEQ ID NO: 171661 - RNA, 1701 nt, Artificial Sequence; identical to SEQ ID NO: 169918
  derived and/or modified CDS sequence (opt4) from hemagglutinin__InfluenzaA__AHL98212

SEQ ID NO: 171662 - RNA, 1701 nt, Artificial Sequence; identical to SEQ ID NO: 169918
  derived and/or modified CDS sequence (opt4) from hemagglutinin__InfluenzaA__AHL98224

SEQ ID NO: 171663 - RNA, 1701 nt, Artificial Sequence; identical to SEQ ID NO: 170054
  derived and/or modified CDS sequence (opt4) from hemagglutinin__InfluenzaA__AHL98236

SEQ ID NO: 171664 - RNA, 1701 nt, Artificial Sequence; identical to SEQ ID NO: 169928
  derived and/or modified CDS sequence (opt4) from hemagglutinin__InfluenzaA__AHL98248

SEQ ID NO: 171665 - RNA, 1701 nt, Artificial Sequence; identical to SEQ ID NO: 169918
  derived and/or modified CDS sequence (opt4) from hemagglutinin__InfluenzaA__AHL98260

SEQ ID NO: 171666 - RNA, 1701 nt, Artificial Sequence; identical to SEQ ID NO: 169928
  derived and/or modified CDS sequence (opt4) from hemagglutinin__InfluenzaA__AHL98272

SEQ ID NO: 171667 - RNA, 1701 nt, Artificial Sequence; identical to SEQ ID NO: 171524
  derived and/or modified CDS sequence (opt4) from hemagglutinin__InfluenzaA__AHL98284

SEQ ID NO: 171668 - RNA, 1701 nt, Artificial Sequence
  derived and/or modified CDS sequence (opt4) from hemagglutinin__InfluenzaA__AHL98295
augaagaccaucaucgcccugagcuacauccugugccugguguucgcccagaagauccccggcaacgacaacagcaccgccacccugugccugggccaccacgccgugcccaacggcaccaucgugaagaccaucaccaacgacagaaucgaggugaccaacgccaccgagcuggugcagaacagcagcaucggcgagaucugcgacagcccccaccagauccuggacggcgagaacugcacccugaucgacgcccugcugggcgacccccagugcgacggcuuccagaacaagaagugggaccuguucguggagagaagcaaggccuacagcaacugcuaccccuacgacgugcccgacuacgccagccugagaagccugguggccagcagcggcacccuggaguucaacaacgagagcuucaacugggccggcgugacccagaacggcaccagcagcgccugcaucagaggcagcaacagcagcuucuucagcagacugaacuggcugacccaccugaacuucaaguaccccgcccugaacgugaccaugcccaacaacgagcaguucgacaagcuguacaucuggggcgugcaccaccccggcaccgacaaggaccagaucuuccuguacgcccagagcagcggcagaaucaccgugagcaccaagagaagccagcaggccgugauccccaacaucggcagcagacccagaaucagaaacauccccagcagaaucagcaucuacuggaccaucgugaagcccggcgacauccugcugaucaacagcaccggcaaccugaucgcccccagaggcuacuucaagaucagaagcggcaagagcagcaucaugagaagcgacgcccccaucggcaagugcaagagcgagugcaucacccccaacggcagcauccccaacgacaagcccuuccagaacgugaacagaaucaccuacggcgccugccccagauacgugaagcagagcacccugaagcuggccaccggcaugagaaacgugcccgagaagcagaccagaggcaucuucggcgccaucgccggcuucaucgagaacggcugggagggcaugauggacggcugguacggcuucagacaccagaacagcgagggcagaggccaggccgccgaccugaagagcacccaggccgccaucgaccagaucaacggcaagcugaacagacugaucggcaagaccaacgagaaguuccaccagaucgagaaggaguucagcgagguggagggcagaauccaggaccuggagaaguacguggaggacaccaagaucgaccuguggagcuacaacgccgagcugcugguggcccuggagaaccagcacaccaucgaccugaccgacagcgagaugaacaagcuguucgagaagaccaagaagcagcugagagagaacgccgaggacaugggcaacggcugcuucaagaucuaccacaagugcgacaacgccugcaucggcagcaucagaaacggcaccuacgaccacgacguguacagagacgaggcccugaacaacagauuccagaucaagggcguggagcugaagagcggcuacaaggacuggauccuguggaucagcuucgccaucagcugcuuccugcugugcguggcccugcugggcuucaucaugugggccugccagaagggcaacaucagaugcaacaucugcaucuga

SEQ ID NO: 171669 - RNA, 1701 nt, Artificial Sequence; identical to SEQ ID NO: 171566
  derived and/or modified CDS sequence (opt4) from hemagglutinin__InfluenzaA__AHL98307

SEQ ID NO: 171670 - RNA, 1701 nt, Artificial Sequence; identical to SEQ ID NO: 169928
  derived and/or modified CDS sequence (opt4) from hemagglutinin__InfluenzaA__AHL98319

SEQ ID NO: 171671 - RNA, 1701 nt, Artificial Sequence; identical to SEQ ID NO: 169928
  derived and/or modified CDS sequence (opt4) from hemagglutinin__InfluenzaA__AHL98331

SEQ ID NO: 171672 - RNA, 1701 nt, Artificial Sequence; identical to SEQ ID NO: 170054
  derived and/or modified CDS sequence (opt4) from hemagglutinin__InfluenzaA__AHL98343

SEQ ID NO: 171673 - RNA, 1701 nt, Artificial Sequence; identical to SEQ ID NO: 171566
  derived and/or modified CDS sequence (opt4) from hemagglutinin__InfluenzaA__AHL98354

SEQ ID NO: 171674 - RNA, 1701 nt, Artificial Sequence; identical to SEQ ID NO: 169918
  derived and/or modified CDS sequence (opt4) from hemagglutinin__InfluenzaA__AHL98366

SEQ ID NO: 171675 - RNA, 1701 nt, Artificial Sequence; identical to SEQ ID NO: 169918
  derived and/or modified CDS sequence (opt4) from hemagglutinin__InfluenzaA__AHL98378

SEQ ID NO: 171676 - RNA, 1701 nt, Artificial Sequence; identical to SEQ ID NO: 169918
  derived and/or modified CDS sequence (opt4) from hemagglutinin__InfluenzaA__AHL98390

SEQ ID NO: 171677 - RNA, 1701 nt, Artificial Sequence; identical to SEQ ID NO: 169918
  derived and/or modified CDS sequence (opt4) from hemagglutinin__InfluenzaA__AHL98402

SEQ ID NO: 171678 - RNA, 1701 nt, Artificial Sequence; identical to SEQ ID NO: 169928
  derived and/or modified CDS sequence (opt4) from hemagglutinin__InfluenzaA__AHL98414

SEQ ID NO: 171679 - RNA, 1701 nt, Artificial Sequence
  derived and/or modified CDS sequence (opt4) from hemagglutinin__InfluenzaA__AHL98426
augaagaccaucaucgcccugagcuacauccugugccugguguucgcccagaagcugcccggcaacgacaacagcaccgccacccugugccugggccaccacgccgugcccaacggcaccaucgugaagaccaucaccaacgacagaaucgaggugaccaacgccaccgagcuggugcagaacagcagcaucggcgagaucugcgacagcccccaccagauccuggacggcgagaacugcacccugaucgacgcccugcugggcgacccccagugcgacggcuuccagaacaagaagugggaccuguucguggagagaagcaaggccuacagcaacugcuaccccuacgacgugcccgacuacgccagccugagaagccugguggccagcagcggcacccuggaguucaacaacgagagcuucaacuggaccggcgugacccagaacggcaccagcagcgccugcaucagaagaagcaacaacagcuucuucagcagacugaacuggcugacccacagcaacuucaaguaccccgcccugaacgugaccaugcccaacaacgagcaguucgacaagcuguacaucuggggcgugcaccaccccggcaccgacaaggaccagaucuuccuguacgcccagagcagcggcagaaucaccgugagcaccaagagaagccagcaggccgugauccccaacaucggcagcagacccagaaucagaaacauccccagcagaaucagcaucuacuggaccaucgugaagcccggcgacauccugcugaucaacagcaccggcaaccugaucgcccccagaggcuacuucaagaucagaagcggcaagagcagcaucaugagaagcgacgcccccaucggcaagugcaagagcgagugcaucacccccaacggcagcauccccaacgacaagcccuuccagaacgugaacagaaucaccuacggcgccugccccagauacgugaagcagagcacccugaagcuggccaccggcaugagaaacgugcccgagaagcagaccagaggcaucuucggcgccaucgccggcuucaucgagaacggcugggagggcaugauggacggcugguacggcuucagacaccagaacagcgagggcagaggccaggccgccgaccugaagagcacccaggccgccaucgaccagaucaacggcaagcugaacagacugaucggcaagaccaacgagaaguuccaccagaucgagaaggaguucagcgagguggagggcagaauccaggaccuggagaaguacguggaggacaccaagaucgaccuguggagcuacaacgccgagcugcugguggcccuggagaaccagcacaccaucgaccugaccgacagcgagaugaacaagcuguucgagaagaccaagaagcagcugagagagaacgccgaggacaugggcaacggcugcuucaagaucuaccacaagugcgacaacgccugcaucggcagcaucagaaacggcaccuacgaccacgacguguacagagacgaggcccugaacaacagauuccaggugaagggcguggagcugaagagcggcuacaaggacuggauccuguggaucagcuucgccaucagcugcuuccugcugugcguggcccugcugggcuucaucaugugggccugccagaagggcaacaucagaugcaacaucugcaucuga

SEQ ID NO: 171680 - RNA, 1701 nt, Artificial Sequence; identical to SEQ ID NO: 170100
  derived and/or modified CDS sequence (opt4) from hemagglutinin__InfluenzaA__AHL98438

SEQ ID NO: 171681 - RNA, 1701 nt, Artificial Sequence; identical to SEQ ID NO: 170100
  derived and/or modified CDS sequence (opt4) from hemagglutinin__InfluenzaA__AHL98449

SEQ ID NO: 171682 - RNA, 1701 nt, Artificial Sequence
  derived and/or modified CDS sequence (opt4) from hemagglutinin__InfluenzaA__AHL98471
augaaggccauccugguggugcugcuguacaccuucgccaccgccaacgccgacacccugugcaucggcuaccacgccaacaacagcaccgacaccguggacaccgugcuggagaagaacgugaccgugacccacagcgugaaccugcuggaggacaagcacaacggcaagcugugcaagcugagaggcguggccccccugcaccugggcaagugcaacaucgccggcuggauccugggcaaccccgagugcgagagccugagcaccgccagcagcuggagcuacaucguggagaccagcagcagcgacaacggcaccugcuaccccggcgacuucaucaacuacgaggagcugagagagcagcugagcagcgugagcagcuucgagaaguucgagaucuuccccaagaccagcagcuggcccaaccacgacagcaacaagggcgugaccgccgccugcccccacgccggcgccaagagcuucuacaagaaccugaucuggcuggugaagaagggcaacagcuaccccaagcugagagagagcuacaucaacgacaagggcaaggaggugcuggugcuguggggcauccaccaccccagcaccaccgccgaccagcagagccuguaccagaacgccgacgccuacguguucgugggcaccagcagauacagcaagaaguucaagcccgagaucgccaucagacccaaggugagagaccaggagggcagaaugaacuacuacuggacccugaucgagcccggcgacaagaucaccuucgaggccaccggcaaccugguggugcccagauacgccuucgccauggagagaaacgccggcagcggcaucaucaucagcgacacccccgugcacgacugcaacaccaccugccagacccccgagggcgccaucaacaccagccugcccuuccagaacauccaccccaucaccaucggcaagugccccaaguacgugaagagcaccaagcugagacuggccaccggccugagaaacgugcccagcauccagagcagaggccuguucggcgccaucgccggcuucaucgagggcggcuggaccggcaugguggacggcugguacggcuaccaccaccagaacgagcagggcagcggcuacgccgccgaccugaagagcacccagaacgccaucgacaagaucaccaacaaggugaacagcgugaucgagaagaugaacacccaguucaccgccgugggcaaggaguucaaccaccuggagaagagaaucgagaaccugaacaagaagguggacgacggcuuccuggacaucuggaccuacaacgccgagcugcuggugcugcuggagaacgagagaacccuggacuaccacgacagcaacgugaagaaccuguacgagaaggugagaaaccagcugaagaacaacgccaaggagaucggcaacggcugcuucgaguucuaccacaagugcgacaacaccugcauggagagcgugaagaacggcaccuacgacuaccccaaguacagcgaggaggccaagcugaacagagagaagaucgacggcgugaagcuggagagcaccagaaucuaccagauccuggccaucuacagcaccguggccagcagccuggugcugguggugagccugggcgccaucagcuucuggaugugcagcaacggcagccugcagugcagaaucugcaucuga

SEQ ID NO: 171683 - RNA, 1701 nt, Artificial Sequence; identical to SEQ ID NO: 170054
  derived and/or modified CDS sequence (opt4) from hemagglutinin__InfluenzaA__AHL98482

SEQ ID NO: 171684 - RNA, 1701 nt, Artificial Sequence; identical to SEQ ID NO: 169895
  derived and/or modified CDS sequence (opt4) from hemagglutinin__InfluenzaA__AHL98494

SEQ ID NO: 171685 - RNA, 1701 nt, Artificial Sequence; identical to SEQ ID NO: 170054
  derived and/or modified CDS sequence (opt4) from hemagglutinin__InfluenzaA__AHL98506

SEQ ID NO: 171686 - RNA, 1701 nt, Artificial Sequence; identical to SEQ ID NO: 170054
  derived and/or modified CDS sequence (opt4) from hemagglutinin__InfluenzaA__AHL98518

SEQ ID NO: 171687 - RNA, 1701 nt, Artificial Sequence; identical to SEQ ID NO: 169895
  derived and/or modified CDS sequence (opt4) from hemagglutinin__InfluenzaA__AHL98530

SEQ ID NO: 171688 - RNA, 1701 nt, Artificial Sequence; identical to SEQ ID NO: 170054
  derived and/or modified CDS sequence (opt4) from hemagglutinin__InfluenzaA__AHL98542

SEQ ID NO: 171689 - RNA, 1701 nt, Artificial Sequence; identical to SEQ ID NO: 170054
  derived and/or modified CDS sequence (opt4) from hemagglutinin__InfluenzaA__AHL98554

SEQ ID NO: 171690 - RNA, 1701 nt, Artificial Sequence; identical to SEQ ID NO: 169928
  derived and/or modified CDS sequence (opt4) from hemagglutinin__InfluenzaA__AHL98566

SEQ ID NO: 171691 - RNA, 1701 nt, Artificial Sequence; identical to SEQ ID NO: 169928
  derived and/or modified CDS sequence (opt4) from hemagglutinin__InfluenzaA__AHL98578

SEQ ID NO: 171692 - RNA, 1701 nt, Artificial Sequence; identical to SEQ ID NO: 170054
  derived and/or modified CDS sequence (opt4) from hemagglutinin__InfluenzaA__AHL98590

SEQ ID NO: 171693 - RNA, 1701 nt, Artificial Sequence; identical to SEQ ID NO: 169918
  derived and/or modified CDS sequence (opt4) from hemagglutinin__InfluenzaA__AHL98602

SEQ ID NO: 171694 - RNA, 1701 nt, Artificial Sequence; identical to SEQ ID NO: 169895
  derived and/or modified CDS sequence (opt4) from hemagglutinin__InfluenzaA__AHL98614

SEQ ID NO: 171695 - RNA, 1701 nt, Artificial Sequence
  derived and/or modified CDS sequence (opt4) from hemagglutinin__InfluenzaA__AHL98626
augaagaccaucaucgcccugagcuacauccugugccugguguucgcccaggagcugcccggcaacgacgacagcaccgccacccugugccugggccaccacgccgugcccaacggcaccaucgugaagaccaucaccaacgaccagaucgaggugaccaacgccaccgagcuggugcagagcagcagcaccggcgagaucugcaacagcccccaccagauccuggacggcgagaacugcacccugaucgacgcccugcugggcgacccccagugcgacggcuuccagaacaagagaugggaccuguucguggagagaagcaaggcccacagcaacugcuaccccuacgacgugcccgacuacgccagccugagaagccugguggccagcagcggcacccuggaguucaacaacgagagcuucaacuggaccggcgugacccagaacggcaccagcagcgccugcaucagaagaagcaacaacagcuucuucagcagacugaacuggcugacccaccugaacuucaaguaccccgcccugaacgugaccaugcccaacaacgagcaguucgacaagcuguacaucuggggcgugcaccaccccggcaccgacaaggaccagaucuuccuguacgcccaggccagcggcagaaucaccgugagcaccaagagaagccagcaggccgugauccccaacaucggcagcagacccagagugagaaacauccccagcagagugagcaucuacuggaccaucgugaagcccggcgacauccugcugaucaacagcaccggcaaccugaucgcccccagaggcuacuucaagaucagaagcggcaagagcagcaucaugagaagcgacgcccccaucggcaagugcaacagcgccugcaucacccccaacggcagcauccccaacgacaagcccuuccagaacgugaacagaaucaccuacggcgccugccccagauacgugaagcagaacacccugaagcuggccaccggcaugagaaacgugcccgagaagcagaccagaggcaucuucggcgccaucgccggcuucaucgagaacggcugggagggcaugguggacggcugguacggcuucagacaccagaacagcgagggcagaggccaggccgccgaccugaagagcacccaggccgccaucgaccagaucaacggcaagcugaacagacugaucggcaagaccaacgagaaguuccaccagaucgagaaggaguucagcgagguggagggcagaauccaggaccuggagaaguacguggaggacaccaagaucgaccuguggagcuacaacgccgagcugcugguggcccuggagaaccagcacaccaucgaccugaccgacagcgagaugaacaagcuguucgagaagaccaagaagcagcugagagagaacgccgaggacaugggcaacggcugcuucaagaucuaccacaagugcgacaacgccugcaucggcagcaucagaaacggcaccuacgaccacgacguguacagagacgaggcccugaacaacagauuccagaucaagggcguggagcugaagagcggcuacaaggacuggauccuguggaucagcuucgccaucagcugcuuccugcugugcguggcccugcugggcuucaucaugugggccugccagaagggcaacaucagaugcaacaucugcaucuga

SEQ ID NO: 171696 - RNA, 1701 nt, Artificial Sequence; identical to SEQ ID NO: 169918
  derived and/or modified CDS sequence (opt4) from hemagglutinin__InfluenzaA__AHL98638

SEQ ID NO: 171697 - RNA, 1701 nt, Artificial Sequence; identical to SEQ ID NO: 169928
  derived and/or modified CDS sequence (opt4) from hemagglutinin__InfluenzaA__AHL98650

SEQ ID NO: 171698 - RNA, 1701 nt, Artificial Sequence
  derived and/or modified CDS sequence (opt4) from hemagglutinin__InfluenzaA__AHL98662
augaagaccaucaucgcccugagcuacauccugugccugguguucgcccagaagcugcccggcaacgacaacagcaccgccacccugugccugggccaccacgccgugcccaacggcaccauggugaagaccaucaccaacgacagaaucgaggugaccaacgccaccgagcuggugcagaacagcagcaucggcgagaucugcgacagcccccaccagauccuggacggcgagaacugcacccugaucgacgcccugcugggcgacccccagugcgacggcuuccagaacaagaagugggaccuguucguggagagaagcaaggccuacagcaacugcuaccccuacgacgugcccgacuacgccagccugagaagccugguggccagcagcggcacccuggaguucaacaacgagagcuucaacuggaccggcgugacccagaacggcaccagcagcgccugcaucagaagaagcaacaacagcuucuucagcagacugaacuggcugacccacagcaacuucaaguaccccgcccugaacgugaccaugcccaacaacgagcaguucgacaagcuguacaucuggggcgugcaccaccccggcaccgacaaggaccagaucuuccuguacgcccagagcagcggcagaaucaccgugagcaccaagagaagccagcaggccgugauccccaacaucggcagcagacccagaaucagaaacauccccagcagaaucagcaucuacuggaccaucgugaagcccggcgacauccugcugaucaacagcaccggcaaccugaucgcccccagaggcuacuucaagaucagaagcggcaagagcagcaucaugagaagcgacgcccccaucggcaagugcaagagcgagugcaucacccccaacggcagcauccccaacgacaagcccuuccagaacgugaacagaaucaccuacggcgccugccccagauacgugaagcagagcacccugaagcuggccaccggcaugagaaacgugcccgagaagcagaccagaggcaucuucggcgccaucgccggcuucaucgagaacggcugggagggcaugauggacggcugguacggcuucagacaccagaacagcgagggcagaggccaggccgccgaccugaagagcacccaggccgccaucgaccagaucaacggcaagcugaacagacugaucggcaagaccaacgagaaguuccaccagaucgagaaggaguucagcgagguggagggcagaauccaggaccuggagaaguacguggaggacaccaagaucgaccuguggagcuacaacgccgagcugcugguggcccuggagaaccagcacaccaucgaccugaccgacagcgagaugaacaagcuguucgagaagaccaagaagcagcugagagagaacgccgaggacaugggcaacggcugcuucaagaucuaccacaagugcgacaacgccugcaucggcagcaucagaaacggcaccuacgaccacgacguguacagagacgaggcccugaacaacagauuccagaucaagggcguggagcugaagagcggcuacaaggacuggauccuguggaucagcuucgccaucagcugcuuccugcugugcguggcccugcugggcuucaucaugugggccugccagaagggcaacaucagaugcaacaucugcaucuga

SEQ ID NO: 171699 - RNA, 1701 nt, Artificial Sequence; identical to SEQ ID NO: 171566
  derived and/or modified CDS sequence (opt4) from hemagglutinin__InfluenzaA__AHL98674

SEQ ID NO: 171700 - RNA, 1701 nt, Artificial Sequence; identical to SEQ ID NO: 169918
  derived and/or modified CDS sequence (opt4) from hemagglutinin__InfluenzaA__AHL98686

SEQ ID NO: 171701 - RNA, 1701 nt, Artificial Sequence; identical to SEQ ID NO: 170054
  derived and/or modified CDS sequence (opt4) from hemagglutinin__InfluenzaA__AHL98699

SEQ ID NO: 171702 - RNA, 1701 nt, Artificial Sequence; identical to SEQ ID NO: 170183
  derived and/or modified CDS sequence (opt4) from hemagglutinin__InfluenzaA__AHL98711

SEQ ID NO: 171703 - RNA, 1701 nt, Artificial Sequence; identical to SEQ ID NO: 170527
  derived and/or modified CDS sequence (opt4) from hemagglutinin__InfluenzaA__AHL98722

SEQ ID NO: 171704 - RNA, 1701 nt, Artificial Sequence; identical to SEQ ID NO: 169928
  derived and/or modified CDS sequence (opt4) from hemagglutinin__InfluenzaA__AHL98734

SEQ ID NO: 171705 - RNA, 1701 nt, Artificial Sequence; identical to SEQ ID NO: 170054
  derived and/or modified CDS sequence (opt4) from hemagglutinin__InfluenzaA__AHL98746

SEQ ID NO: 171706 - RNA, 1701 nt, Artificial Sequence; identical to SEQ ID NO: 169928
  derived and/or modified CDS sequence (opt4) from hemagglutinin__InfluenzaA__AHL98758

SEQ ID NO: 171707 - RNA, 1701 nt, Artificial Sequence; identical to SEQ ID NO: 169918
  derived and/or modified CDS sequence (opt4) from hemagglutinin__InfluenzaA__AHL98770

SEQ ID NO: 171708 - RNA, 1701 nt, Artificial Sequence; identical to SEQ ID NO: 170057
  derived and/or modified CDS sequence (opt4) from hemagglutinin__InfluenzaA__AHL98782

SEQ ID NO: 171709 - RNA, 1701 nt, Artificial Sequence
  derived and/or modified CDS sequence (opt4) from hemagglutinin__InfluenzaA__AHL98794
augaagaccaucaucgcccugagcuacauccugugccugguguucgcccagaagcugcccggcaacgacaacagcaccgccacccugugccugggccaccacgccgugcccaacggcaccaucgugaagaccaucaccaacgacagaaucgaggugaccaacgccaccgagcuggugcagaacagcagcaucggcgagaucugcgacagcccccaccagauccuggacggcgagaacugcacccugaucgacgcccugcugggcgacccccagugcgacggcuuccagaacaagaagugggaccuguucguggagagaagcaaggccuacagcaacugcuaccccuacgacgugcccgacuacgccagccugagaagccugguggccagcagcggcacccuggaguucaacaacgagagcuucaacugggccggcgugacccagaacggcaccagcagcgccugcaucagaggcagcaacagcagcuucuucagcagacugaacuggcugacccaccugaacuucaaguaccccgcccugaacgugaccaugcccaacaacgagcaguucgacaagcuguacaucuggggcgugcaccaccccggcaccgacaaggaccagaucuuccuguacgcccagagcagcggcagaaucaccgugagcaccaagagaagccagcaggccgugauccccaacaucggcagcagacccagaaucagaaacauccccagcagaaucagcaucuacuggaccaucgugaagcccggcgacauccugcugaucaacagcaccggcaaccugaucgcccccagaggcuacuucaagaucagaagcggcaagagcagcaucaugagaagcgacgcccccaucggcaagugcagaagcgagugcaucacccccaacggcagcauccccaacgacaagcccuuccagaacgugaacagaaucaccuacggcgccugccccagauacgugaagcagagcacccugaagcuggccaccggcaugagaaacgugcccgagaagcagaccagaggcaucuucggcgccaucgccggcuucaucgagaacggcugggagggcaugguggacggcugguacggcuucagacaccagaacagcgagggcagaggccaggccgccgaccugaagagcacccaggccgccaucgaccagaucaacggcaagcugaacagacugaucggcaagaccaacgagaaguuccaccagaucgagaaggaguucagcgagguggagggcagaauccaggaccuggagaaguacguggaggacaccaagaucgaccuguggagcuacaacgccgagcugcugguggcccuggagaaccagcacaccaucgaccugaccgacagcgagaugaacaagcuguucgagaagaccaagaagcagcugagagagaacgccgaggacaugggcaacggcugcuucaagaucuaccacaagugcgacaacgccugcaucggcagcaucagaaacggcaccuacgaccacgacguguacagagacgaggcccugaacaacagauuccagaucaagggcguggagcugaagagcggcuacaaggacuggauccuguggaucagcuucgccaucagcugcuuccugcugugcguggcccugcugggcuucaucaugugggccugccagaagggcaacaucagaugcaacaucugcaucuga

SEQ ID NO: 171710 - RNA, 1701 nt, Artificial Sequence
  derived and/or modified CDS sequence (opt4) from hemagglutinin__InfluenzaA__AHL98806
augaagaccaucaucgcccugagcuacauccugugccugguguucgcccagaagcugcccggcaacgacaacagcaccgccacccugugccugggccaccacgccgugcccaacggcaccaucgugaagaccaucaccaacgacagaaucgaggugaccaacgccaccgagcuggugcagaacagcagcaucggcgagaucugcgacagcccccaccagauccuggacggcgagaacugcacccugaucgacgcccugcugggcgacccccagugcgacggcuuccagaacaagaagugggaccuguucguggagagaagcaaggccuacagcaacugcuaccccuacgacgugcccgacuacgccagccugagaagccugguggccagcagcggcacccuggaguucaacaacgagagcuucaacugggccggcgugacccagaacggcaccagcagcgccugcaucagaggcagcaacagcagcuucuucagcagacugaacuggcugacccaccugaacuucaaguaccccgcccugaacgugaccaugcccaacaacgagcaguucgacaagcuguacaucuggggcgugcaccaccccggcaccgacaaggaccagaucuuccuguacgcccagagcagcggcagaaucaccgugagcaccaagagaagccagcaggccgugauccccaacaucggcagcagacccagaaucagaaacauccccagcagaaucagcaucuacuggaccaucgugaagcccggcgacauccugcugaucaacagcaccggcaaccugaucgcccccagaggcuacuucaagaucagaagcggcaagagcagcaucaugagaagcgacgcccccaucggcaagugcaagagcgagugcaucacccccaacggcagcauccccaacgacaagcccuuccagaacgugaacagaaucaccuacggcgccugccccagauacgugaagcagagcacccugaagcuggccaccggcaugagaaacgugcccgagaagcagaccagaggcaucuucggcgccaucgccggcuucaucgagaacggcugggagggcaugguggacggcugguacggcuucagacaccagaacagcgagggcagaggccaggccgccgaccugaagagcacccagaccgccaucgaccagaucaacggcaagcugaacagacugaucggcaagaccaacgagaaguuccaccagaucgagaaggaguucagcgagguggagggcagaauccaggaccuggagaaguacguggaggacaccaagaucgaccuguggagcuacaacgccgagcugcugguggcccuggagaaccagcacaccaucgaccugaccgacagcgagaugaacaagcuguucgagaagaccaagaagcagcugagagagaacgccgaggacaugggcaacggcugcuucaagaucuaccacaagugcgacaacgccugcaucggcagcaucagaaacggcaccuacgaccacgacguguacagagacgaggcccugaacaacagauuccagaucaagggcguggagcugaagagcggcuacaaggacuggauccuguggaucagcuucgccaucagcugcuuccugcugugcguggcccugcugggcuucaucaugugggccugccagaagggcaacaucagaugcaacaucugcaucuga

SEQ ID NO: 171711 - RNA, 1701 nt, Artificial Sequence; identical to SEQ ID NO: 169918
  derived and/or modified CDS sequence (opt4) from hemagglutinin__InfluenzaA__AHL98818

SEQ ID NO: 171712 - RNA, 1701 nt, Artificial Sequence; identical to SEQ ID NO: 169928
  derived and/or modified CDS sequence (opt4) from hemagglutinin__InfluenzaA__AHL98830

SEQ ID NO: 171713 - RNA, 1701 nt, Artificial Sequence; identical to SEQ ID NO: 169918
  derived and/or modified CDS sequence (opt4) from hemagglutinin__InfluenzaA__AHL98842

SEQ ID NO: 171714 - RNA, 1701 nt, Artificial Sequence; identical to SEQ ID NO: 169918
  derived and/or modified CDS sequence (opt4) from hemagglutinin__InfluenzaA__AHL98854

SEQ ID NO: 171715 - RNA, 1701 nt, Artificial Sequence
  derived and/or modified CDS sequence (opt4) from hemagglutinin__InfluenzaA__AHL98878
augaagaccaucaucgcccugagcuacauccugugccugguguucacccagaagcugcccggcaacgacaacagcaccgccacccugugccugggccaccacgccgugcccaacggcaccaucgugaagaccaucaccaacgacagaaucgaggugaccaacgccaccgagcuggugcagaacagcagcaucggcgagaucugcgacagcccccaccagauccuggacggcgagaacugcacccugaucgacgcccugcugggcgacccccagugcgacggcuuccagaacaagaagugggaccuguucguggagagaagcaaggccuacagcaacugcuaccccuacgacgugcccgacuacgccagccugagaagccugguggccagcagcggcacccuggaguucaacaacgagagcuucaacuggaccggcgugacccagaacggcaccagcagcgccugcaucagaagaagcaacagcagcuucuucagcagacugaacuggcugacccaccugaacuucaaguaccccgcccugaacgugaccaugcccaacaacgagcaguucgacaagcuguacaucuggggcgugcaccaccccggcaccgacaaggaccagaucuuccuguacgcccagagcagcggcagaaucaccgugagcaccaagagaagccagcaggccgugauccccaacaucggcagcagacccagaaucagaaacauccccagcagaaucagcaucuacuggaccaucgugaagcccggcgacauccugcugaucaacagcaccggcaaccugaucgcccccagaggcuacuucaagaucagaagcggcaagagcagcaucaugagaagcgacgcccccaucggcaagugcaagagcgagugcaucacccccaacggcagcauccccaacgacaagcccuuccagaacgugaacagaaucaccuacggcgccugccccagauacgugaagcagagcacccugaagcuggccaccggcaugagaaacgugcccgagaagcagaccagaggcaucuucggcgccaucgccggcuucaucgagaacggcugggagggcaugguggacggcugguacggcuucagacaccagaacagcgagggcagaggccaggccgccgaccugaagagcacccaggccgccaucgaccagaucaacggcaagcugaacagacugaucggcaagaccaacgagaaguuccaccagaucgagaaggaguucagcgagguggagggcagaauccaggaccuggagaaguacguggaggacaccaagaucgaccuguggagcuacaacgccgagcugcugguggcccuggagaaccagcacaccaucgaccugaccgacagcgagaugaacaagcuguucgagaagaccaagaagcagcugagagagaacgccgaggacaugggcaacggcugcuucaagaucuaccacaagugcgacaacgccugcaucggcagcaucagaaacggcaccuacgaccacaacguguacagagacgaggcccugaacaacagauuccagaucaagggcguggagcugaagagcggcuacaaggacuggauccuguggaucagcuucgccaucagcugcuuccugcugugcguggcccugcugggcuucaucaugugggccugccagaagggcaacaucagaugcaacaucugcaucuga

SEQ ID NO: 171716 - RNA, 1701 nt, Artificial Sequence
  derived and/or modified CDS sequence (opt4) from hemagglutinin__InfluenzaA__AHL98890
augaagaccaucaucgcccugagcuacauccugugccugguguucgcccagaagcugcccggcaacgacaacagcaccgccacccugugccugggccaccacgccgugcccaacggcaccaucgugaagaccaucaccaacgacagaaucgaggugaccaacgccaccgagcuggugcagaacagcagcaucggcgagaucugcgacagcccccaccagauccuggacggcgagaacugcacccugaucgacgcccugcugggcgacccccagugcgacggcuuccagaacaagaagugggaccuguucguggagagaagcaaggccuacagcaacugcuaccccuacgacgugcccgacuacgccagccugagaagccugguggccagcagcggcacccuggaguucaacaacgagagcuucaacugggccggcgugacccagaacggcaccagcagcgccugcaucagaggcagcaacagcagcuucuucagcagacugaacuggcugacccaccugaacuucaaguaccccgcccugaacgugaccaugcccaacaacgagcaguucgacaagcuguacaucuggggcgugcaccaccccggcaccgacaaggaccagaucuuccuguacgcccagagcagcggcagaaucaccgugagcaccaagagaagccagcaggccgugauccccaacaucggcagcagacccagaaucagaaacauccccagcagaaucagcaucuacuggaccaucgugaagcccggcgacauccugcugaucaacagcaccggcaaccugaucgcccccagaggcuacuucaagaucagaagcggcaagagcagcaucaugagaagcgacgcccccaucggcaagugcaagagcgagugcaucacccccaacggcagcauccccaacgacaagcccuuccagaacgugaacagaaucaccuacggcgccugccccagauacgugaagcagagcacccugaagcuggccaccggcaugagaaacgugcccgagaagcagaccagaggcaucuucggcgccaucgccggcuucaucgagaacggcugggagggcaugguggacggcugguacggcuucagacaccagaacagcgagggcagaggccaggccgccgaccugaagagcacccaggccgccaucgaccagaucaacggcaagcugaacagacugaucggcaagaccaacgagaaguuccaccagaucgagaaggaguucagcgagguggagggcagaauccaggaccuggagaaguacguggaggacaccaagaucgaccuguggagcuacaacgccgagcugcugguggcccuggagaaccagcacaccaucgaccugaccgacagcgagaugaacaagcuguucgagaagaccaagaagcagcugagagagaacgccgaggacaugggcaacggcugcuucaagaucuaccacaagugcgacaacgccugcaucggcagcaucagaaacggcaccuacgaccacgacguguacagagacgaggcccugaacaacagauuccagaucaagggcguggagcugaagagcggcuacaaggacuggauccuguggaucagcuucgccaucagcugccugcugcugugcguggcccugcugggcuucaucaugugggccugccagaagggcaacaucagaugcaacaucugcaucuga

SEQ ID NO: 171717 - RNA, 1701 nt, Artificial Sequence
  derived and/or modified CDS sequence (opt4) from hemagglutinin__InfluenzaA__AHL98902
augaagaccaucaucgcccugagcuacauccugugccugguguucgcccagaagcugcccggcaacgacaacagcaccgccacccugugccugggccaccacgccgugcccaacggcaccguggugaagaccaucaccaacgacagaaucgaggugaccaacgccaccgagcuggugcagaacagcagcaucggcgagaucugcgacagcccccaccagauccuggacggcgagaacugcacccugaucgacgcccugcugggcgacccccagugcgacggcuuccagaacaagaagugggaccuguucguggagagaagcaaggccuacagcaacugcuaccccuacgacgugcccgacuacgccagccugagaagccugguggccagcagcggcacccuggaguucaacaacgagagcuucaacugggccggcgugacccagaacggcaccagcagcgccugcaucagaggcagcaacagcagcuucuucagcagacugaacuggcugacccaccugaacuucaaguaccccgcccugaacgugaccaugcccaacaacgagcaguucgacaagcuguacaucuggggcgugcaccaccccggcaccgacaaggaccagaucuuccuguacgcccagagcagcggcagaaucaccgugagcaccaagagaagccagcaggccgugauccccaacaucggcagcagacccagaaucagaaacauccccagcagaaucagcaucuacuggaccaucgugaagcccggcgacauccugcugaucaacagcaccggcaaccugaucgcccccagaggcuacuucaagaucagaagcggcaagagcagcaucaugagaagcgacgcccccaucggcaagugcaagagcgagugcaucacccccaacggcagcauccccaacgacaagcccuuccagaacgugaacagaaucaccuacggcgccugccccagauacgugaagcagagcacccugaagcuggccaccggcaugagaaacgugcccgagaagcagaccagaggcaucuucggcgccaucgccggcuucaucgagaacggcugggagggcaugguggacggcugguacggcuucagacaccagaacagcgagggcagaggccaggccgccgaccugaagagcacccaggccgccaucgaccagaucaacggcaagcugaacagacugaucggcaagaccaacgagaaguuccaccagaucgagaaggaguucagcgagguggagggcagaauccaggaccuggagaaguacguggaggacaccaagaucgaccuguggagcuacaacgccgagcugcugguggcccuggagaaccagcacaccaucgaccugaccgacagcgagaugaacaagcuguucgagaagaccaagaagcagcugagagagaacgccgaggacaugggcaacggcugcuucaagaucuaccacaagugcgacaacgccugcaucggcagcaucagaaacggcaccuacgaccacgacguguacagagacgaggcccugaacaacagauuccagaucaagggcguggagcugaagagcggcuacaaggacuggauccuguggaucagcuucgccaucagcugcuuccugcugugcguggcccugcugggcuucaucaugugggccugccagaagggcaacaucagaugcaacaucugcaucuga

SEQ ID NO: 171718 - RNA, 1701 nt, Artificial Sequence; identical to SEQ ID NO: 169928
  derived and/or modified CDS sequence (opt4) from hemagglutinin__InfluenzaA__AHL98913

SEQ ID NO: 171719 - RNA, 1701 nt, Artificial Sequence; identical to SEQ ID NO: 169918
  derived and/or modified CDS sequence (opt4) from hemagglutinin__InfluenzaA__AHL98925

SEQ ID NO: 171720 - RNA, 1701 nt, Artificial Sequence; identical to SEQ ID NO: 170057
  derived and/or modified CDS sequence (opt4) from hemagglutinin__InfluenzaA__AHL98937

SEQ ID NO: 171721 - RNA, 1701 nt, Artificial Sequence; identical to SEQ ID NO: 170054
  derived and/or modified CDS sequence (opt4) from hemagglutinin__InfluenzaA__AHL98961

SEQ ID NO: 171722 - RNA, 1701 nt, Artificial Sequence
  derived and/or modified CDS sequence (opt4) from hemagglutinin__InfluenzaA__AHL98973
augaagaccaucaucgcccugagcuacauccugugccugguguucgcccagaagcugcccggcaacgacaacagcaccgccacccugugccugggccaccacgccgugcccaacggcaccaucgugaagaccaucaccaacgacagaaucgaggugaccaacgccaccgagcuggugcagaacagcagcaucggcgagaucugcgacagcccccaccagauccuggacggcgagaacugcacccugaucgacgcccugcugggcgacccccagugcgacggcuuccagaacaagaagugggaccuguucguggagagaagcaaggccuacagcaacugcuaccccuacgacgugcccgacuacgccagccugagaagccugguggccagcagcggcacccuggaguucaacaacgagagcuucaacuggaccggcgugacccagaacggcaccagcagcgccugcaucagaagaagcaacagcagcuucuucagcagacugaacuggcugacccaccugaacuucaaguaccccgcccugaacgugaccaugcccaacaacgagcaguucgacaagcuguacaucuggggcgugcaccaccccggcaccgacaaggaccagaucuuccuguacgcccagagcagcggcagaaucaccgugagcaccaagagaagccagcaggccguggugcccaacaucggcagcagacccagaaucagaaacauccccagcagaaucagcaucuacuggaccaucgugaagcccggcgacauccugcugaucaacagcaccggcaaccugaucgcccccagaggcuacuucaagaucagaagcggcaagagcagcaucaugagaagcgacgcccccaucggcaagugcaagagcgagugcaucacccccaacggcagcauccccaacgacaagcccuuccagaacgugaacagaaucaccuacggcgccugccccagauacgugaagcagagcacccugaagcuggccaccggcaugagaaacgugcccgagaagcagaccagaggcaucuucggcgccaucgccggcuucaucgagaacggcugggagggcaugguggacggcugguacggcuucagacaccagaacagcgagggcagaggccaggccgccgaccugaagagcacccaggccgccaucgaccagaucaacggcaagcugaacagacugaucggcaagaccaacgagaaguuccaccagaucgagaaggaguucagcgagguggagggcagaauccaggaccuggagaaguacguggaggacaccaagaucgaccuguggagcuacaacgccgagcugcugguggcccuggagaaccagcacaccaucgaccugaccgacagcgagaugaacaagcuguucgagaagaccaagaagcagcugagagagaacgccgaggacaugggcaacggcugcuucaagaucuaccacaagugcgacaacgccugcaucggcagcaucagaaacggcaccuacgaccacgacguguacagagacgaggcccugaacaacagauuccagaucaagggcguggagcugaagagcggcuacaaggacuggauccuguggaucagcuucgccaugagcugcuuccugcugugcguggcccugcugggcuucaucaugugggccugccagaagggcaacaucagaugcaacaucugcaucuga

SEQ ID NO: 171723 - RNA, 1701 nt, Artificial Sequence
  derived and/or modified CDS sequence (opt4) from hemagglutinin__InfluenzaA__AHL98985
augaagaccaucaucgcccugagcuacauccugugccugguguucgcccagaagcugcccggcaacgacaacagcaccgccacccugugccugggccaccacgccgugcccaacggcaccaucgugaagaccaucaccaacgacagaaucgaggugaccaacgccaccgagcuggugcagaacagcagcaucggcgagaucugcgacagcccccaccagauccuggacggcgagaacugcaccaucaucgacgcccugcugggcgacccccagugcgacggcuuccagaacaagaagugggaccuguucguggagagaagcaaggccuacagcaacugcuaccccuacgacgugcccgacuacgccagccugagaagccugguggccagcagcggcacccuggaguucaacaacgagagcuucaacugggccggcgugacccagaacggcaccagcagcgccugcaucagaggcagcaacagcagcuucuucagcagacugaacuggcugacccaccugaacuucaaguaccccgcccugaacgugaccaugcccaacaacgagcaguucgacaagcuguacaucuggggcgugcaccaccccggcaccgacaaggaccagaucuuccuguacgcccagagcagcggcagaaucaccgugagcaccaagagaagccagcaggccgugauccccaacaucggcagcagacccagaaucagaaacauccccagcagaaucagcaucuacuggaccaucgugaagcccggcgacauccugcugaucaacagcaccggcaaccugaucgcccccagaggcuacuucaagaucagaagcggcaagagcagcaucaugagaagcgacgcccccaucggcaagugcaagagcgagugcaucacccccaacggcagcauccccaacgacaagcccuuccagaacgugaacagaaucaccuacggcgccugccccagauacgugaagcagagcacccugaagcuggccaccggcaugagaaacgugcccgagaagcagaccagaggcaucuucggcgccaucgccggcuucaucgagaacggcugggagggcaugguggacggcugguacggcuucagacaccagaacagcgagggcagaggccaggccgccgaccugaagagcacccaggccgccaucgaccagaucaacggcaagcugaacagacugaucggcaagaccaacgagaaguuccaccagaucgagaaggaguucagcgagguggagggcagaauccaggaccuggagaaguacguggaggacaccaagaucgaccuguggagcuacaacgccgagcugcugguggcccuggagaaccagcacaccaucgaccugaccgacagcgagaugaacaagcuguucgagaagaccaagaagcagcugagagagaacgccgaggacaugggcaacggcugcuucaagaucuaccacaagugcgacaacgccugcaucggcagcaucagaaacggcaccuacgaccacgacguguacagagacgaggcccugaacaacagauuccagaucaagggcguggagcugaagagcggcuacaaggacuggauccuguggaucagcuucgccaucagcugcuuccugcugugcguggcccugcugggcuucaucaugugggccugccagaagggcaacaucagaugcaacaucugcaucuga

SEQ ID NO: 171724 - RNA, 1701 nt, Artificial Sequence; identical to SEQ ID NO: 170054
  derived and/or modified CDS sequence (opt4) from hemagglutinin__InfluenzaA__AHL98997

SEQ ID NO: 171725 - RNA, 1701 nt, Artificial Sequence; identical to SEQ ID NO: 169918
  derived and/or modified CDS sequence (opt4) from hemagglutinin__InfluenzaA__AHL99009

SEQ ID NO: 171726 - RNA, 1701 nt, Artificial Sequence; identical to SEQ ID NO: 169928
  derived and/or modified CDS sequence (opt4) from hemagglutinin__InfluenzaA__AHL99021

SEQ ID NO: 171727 - RNA, 1701 nt, Artificial Sequence
  derived and/or modified CDS sequence (opt4) from hemagglutinin__InfluenzaA__AHL99045
augaagaccaucaucgcccugagcuacauccugugccugguguucgcccagaagauccccggcaacgacaacagcaccgccacccugugccugggccaccacgccgugcccaacggcaccaucgugaagaccaucaccaacgacagaaucgaggugaccaacgccaccgagcuggugcagaacagcagcaucggcgagaucugcgacagcccccaccagauccuggacggcgagaacugcacccugaucgacgcccugcugggcgacccccagugcgacggcuuccagaacaagaagugggaccuguucguggagagaagcaaggccuacagcaacugcuaccccuacgacgugcccgacuacgccagccugagaagccugguggccagcagcggcacccuggaguucaacaacgagagcuucaacuggaccggcgugacccagaacggcaccagcagcgccugcaucagaagaagcaacagcagcuucuucagcagacugaacuggcugacccaccugaacuucaaguaccccgcccugaacgugaccaugcccaacaacgagcaguucgacaagcuguacaucuggggcgugcaccaccccggcaccgacaaggaccagaucuuccuguacgcccagagcagcggcagaaucaccgugagcaccaagagaagccagcaggccgugauccccaacaucggcagcagacccagaaucagaaacauccccagcagaaucagcaucuacuggaccaucgugaagcccggcgacauccugcugaucaacagcaccggcaaccugaucgcccccagaggcuacuucaagaucagaagcggcaagagcagcaucaugagaagcgacgcccccaucggcaagugcaagagcgagugcaucacccccaacggcagcauccccaacgacaagcccuuccagaacgugaacagaaucaccuacggccccugccccagauacgugaagcagagcacccugaagcuggccaccggcaugagaaacgugcccgagaagcagaccagaggcaucuucggcgccaucgccggcuucaucgagaacggcugggagggcaugguggacggcugguacggcuucagacaccagaacagcgagggcagaggccaggccgccgaccugaagagcacccaggccgccaucgaccagaucaacggcaagcugaacagacugaucggcaagaccaacgagaaguuccaccagaucgagaaggaguucagcgagguggagggcagaauccaggaccuggagaaguacguggaggacaccaagaucgaccuguggagcuacaacgccgagcugcugguggcccuggagaaccagcacaccaucgaccugaccgacagcgagaugaacaagcuguucgagaagaccaagaagcagcugagagagaacgccgaggacaugggcaacggcugcuucaagaucuaccacaagugcgacaacgccugcaucggcagcaucagaaacggcaccuacgaccacgacguguacagagacgaggcccugaacaacagauuccagaucaagggcguggagcugaagagcggcuacaaggacuggauccuguggaucagcuucgccaucagcugcuuccugcugugcguggcccugcugggcuucaucaugugggccugccagaagggcaacaucagaugcaacaucugcaucuga

SEQ ID NO: 171728 - RNA, 1701 nt, Artificial Sequence
  derived and/or modified CDS sequence (opt4) from hemagglutinin__InfluenzaA__AHL99057
augaagaccaucaucgcccugagcuacauccugugccugguguucgcccagaagcugcccggcaacgacaacagcaccgccacccugugccugggccaccacgccgugcccaacggcaccaucgugaagaccaucaccaacgacagaaucgaggugaccaacgccaccgagcuggugcagaacagcagcaucggcgagaucugcgacagcccccaccagaucaucgacggcgagaacugcacccugaucgacgcccugcugggcgacccccagugcgacggcuuccagaacaagaagugggaccuguucguggagagaagcaaggccuacagcaacugcuaccccuacgacgugcccgacuacgccagccugagaagccugguggccagcagcggcacccuggaguucaacaacgagagcuucaacugggccggcgugacccagaacggcaccagcagcgccugcaucagaggcagcaacagcagcuucuucagcagacugaacuggcugacccaccugaacuucaaguaccccgcccugaacgugaccaugcccaacaacgagcaguucgacaagcuguacaucuggggcgugcaccaccccggcaccgacaaggaccagaucuuccuguacgcccagagcagcggcagaaucaccgugagcaccaagagaagccagcaggccgugauccccaacaucggcagcagacccagaaucagaaacauccccagcagaaucagcaucuacuggaccaucgugaagcccggcgacauccugcugaucaacagcaccggcaaccugaucgcccccagaggcuacuucaagaucagaagcggcaagagcagcaucaugagaagcgacgcccccaucggcaagugcaagagcgagugcaucacccccaacggcagcauccccaacgacaagcccuuccagaacgugaacagaaucaccuacggcgccugccccagauacgugaagcagagcacccugaagcuggccaccggcaugagaaacgugcccgagaagcagaccagaggcaucuucggcgccaucgccggcuucaucgagaacggcugggagggcaugguggacggcugguacggcuucagacaccagaacagcgagggcagaggccaggccgccgaccugaagagcacccaggccgccaucgaccagaucaacggcaagcugaacagacugaucggcaagaccaacgagaaguuccaccagaucgagaaggaguucagcgagguggagggcagaauccaggaccuggagaaguacguggaggacaccaagaucgaccuguggagcuacaacgccgagcugcugguggcccuggagaaccagcacaccaucgaccugaccgacagcgagaugaacaagcuguucgagaagaccaagaagcagcugagagagaacgccgaggacaugggcaacggcugcuucaagaucuaccacaagugcgacaacgccugcaucggcagcaucagaaacggcaccuacgaccacgacguguacagagacgaggcccugaacaacagauuccagaucaagggcguggagcugaagagcggcuacaaggacuggauccuguggaucagcuucgccaucagcugcuuccugcugugcguggcccugcugggcuucaucaugugggccugccagaagggcaacaucagaugcaacaucugcaucuga

SEQ ID NO: 171729 - RNA, 1701 nt, Artificial Sequence
  derived and/or modified CDS sequence (opt4) from hemagglutinin__InfluenzaA__AHL99069
augaagaccaucaucgcccugagcuacauccugugccugguguucgcccagaagcugcccggcaacgacaacagcaccgccacccugugccugggccaccacgccgugcccaacggcaccaucgugaagaccaucaccaacgacagaaucgaggugaccaacgccaccgagcuggugcagaacagcagcaucggcgagaucugcgacagcccccaccagauccuggacggcgagaacugcacccugaucgacgcccugcugggcgacccccagugcgacggcuuccagaacaagaagugggaccuguucguggagagaagcaaggccuacagcaacugcuaccccuacgacgugcccgacuacgccagccugagaagccugguggccagcagcggcacccuggaguucaacaacgagagcuucaacugggccggcgugacccagaacggcaccagcagcgccugcaucagaggcagcaacagcagcuucuucagcagacugaacuggcugacccaccugaacuucaaguaccccgcccugaacgugaccaugcccaacaacgagcaguucgacaagcuguacaucuggggcgugcaccaccccggcaccgacaaggaccagaucuuccuguacgcccagagcagcggcagaaucaccgugagcaccaagagaagccagcaggccgugauccccaacaucggcagcagacccagaaucagaaacauccccagcagaaucagcaucuacuggaccaucgugaagcccggcgacacccugcugaucaacagcaccggcaaccugaucgcccccagaggcuacuucaagaucagaagcggcaagagcagcaucaugagaagcgacgcccccaucggcaagugcaagagcgagugcaucacccccaacggcagcauccccaacgacaagcccuuccagaacgugaacagaaucaccuacggcgccugccccagauacgugaagcagagcacccugaagcuggccaccggcaugagaaacgugcccgagaagcagaccagaggcaucuucggcgccaucgccggcuucaucgagaacggcugggagggcaugguggacggcugguacggcuucagacaccagaacagcgagggcagaggccaggccgccgaccugaagagcacccaggccgccaucgaccagaucaacggcaagcugaacagacugaucggcaagaccaacgagaaguuccaccagaucgagaaggaguucagcgagguggagggcagaauccaggaccuggagaaguacguggaggacaccaagaucgaccuguggagcuacaacgccgagcugcugguggcccuggagaaccagcacaccaucgaccugaccgacagcgagaugaacaagcuguucgagaagaccaagaagcagcugagagagaacgccgaggacaugggcaacggcugcuucaagaucuaccacaagugcgacaacgccugcaucggcagcaucagaaacggcaccuacgaccacaacguguacagagacgaggcccugaacaacagauuccagaucaagggcguggagcugaagagcggcuacaaggacuggauccuguggaucagcuucgccaucagcugcuuccugcugugcguggcccugcugggcuucaucaugugggccugccagaagggcaacaucagaugcaacaucugcaucuga

SEQ ID NO: 171730 - RNA, 1701 nt, Artificial Sequence
  derived and/or modified CDS sequence (opt4) from hemagglutinin__InfluenzaA__AHL99081
augaagaccaucaucgcccugagcuacauccugugccugguguucgcccagaagcugcccggcaacgacaacagcaccgccacccugugccugggccaccacgccgugcccaacggcaccaucgugaagaccaucaccaacgacagaaucgaggugaccaacgccaccgagcuggugcagaacagcagcaucggcgagaucugcgacagcccccaccagauccuggacggcgagaacugcacccugaucgacgcccugcugggcgacccccagugcgacggcuuccagaacaagaagugggaccuguucguggagagaagcaaggccuacagcaacugcuaccccuacgacgugcccgacuacgccagccugagaagccugguggccagcagcggcacccuggaguucaacaacgagagcuucaacuggaccggcgugacccagaacggcaccagcagcgccugcaucagaagaagcaacagcagcuucuucagcagacugaacuggcugacccaccugaacuucaaguaccccgcccugaacgugaccaugcccaacaacgagcaguucgacaagcuguacaucuggggcgugcaccaccccggcaccgacaaggaccagaucuuccuguacgcccagagcagcggcagaaucaccgugagcaccaagagaagccagcaggccgugauccccaacaucggcagcagacccagaaucagaaacauccccagcagaaucagcaucuacuggaccaucgugaagcccggcgacauccugcugaucaacagcaccggcaaccugaucgcccccagaggcuacuucaagaucagaagcggcaagagcagcaucaugagaagcgacgcccccaucggcaagugcaagagcgagugcaucacccccaacggcagcauccccaacgacaagcccuuccagaacgugaacagaaucaccuacggcgccugccccagauacgugaagcagggcacccugaagcuggccaccggcaugagaaacgugcccgagaagcagaccagaggcaucuucggcgccaucgccggcuucaucgagaacggcugggagggcaugguggacggcugguacggcuucagacaccagaacagcgagggcagaggccaggccgccgaccugaagagcacccaggccgccaucgaccagaucaacggcaagcugaacagacugaucggcaagaccaacgagaaguuccaccagaucgagaaggaguucagcgagguggagggcagaauccaggaccuggagaaguacguggaggacaccaagaucgaccuguggagcuacaacgccgagcugcugguggcccuggagaaccagcacaccaucgaccugaccgacagcgagaugaacaagcuguucgagaagaccaagaagcagcugagagagaacgccgaggacaugggcaacggcugcuucaagaucuaccacaagugcgacaacgccugcaucggcagcaucagaaacggcaccuacgaccacaacguguacagagacgaggcccugaacaacagauuccagaucaagggcguggagcugaagagcggcuacaaggacuggauccuguggaucagcuucgccaucagcugcuuccugcugugcguggcccugcugggcuucaucaugugggccugccagaagggcaacaucagaugcaacaucugcaucuga

SEQ ID NO: 171731 - RNA, 1701 nt, Artificial Sequence
  derived and/or modified CDS sequence (opt4) from hemagglutinin__InfluenzaA__AHL99093
augaagaccaucaucgcccugagcuacauccugugccugaucuucgcccagaagcugcccggcaacgacaacagcaccgccacccugugccugggccaccacgccgugcccaacggcaccaucgugaagaccaucaccaacgacagaaucgaggugaccaacgccaccgagcuggugcagaacagcagcaucggcgagaucugcgacagcccccaccagauccuggacggcgagaacugcacccugaucgacgcccugcugggcgacccccagugcgacggcuuccagaacaagaagugggaccuguucguggagagaagcaaggccuacagcaacugcuaccccuacgacgugcccgacuacgccagccugagaagccugguggccagcagcggcacccuggaguucaacaacgagagcuucaacuggaccggcgugacccagaacggcaccagcagcgccugcaucagaagaagcaacagcagcuucuucagcagacugaacuggcugacccaccugaacuucaaguaccccgcccugaacgugaccaugcccaacaacgagcaguucgacaagcuguacaucuggggcgugcaccaccccggcaccgacaaggaccagaucuuccuguacgcccagagcagcggcagaaucaccgugagcaccaagagaagccagcaggccgugauccccaacaucggcagcagacccagaaucagaaacauccccagcagaaucagcaucuacuggaccaucgugaagcccggcgacauccugcugaucaacagcaccggcaaccugaucgcccccagaggcuacuucaagaucagaagcggcaagagcagcaucaugagaagcgacgcccccaucggcaagugcaagagcgagugcaucacccccaacggcagcauccccaacgacaagcccuuccagaacgugaacagaaucaccuacggcgccugccccagauacgugaagcagagcacccugaagcuggccaccggcaugagaaacgugcccgagaagcagaccagaggcaucuucggcgccaucgccggcuucaucgagaacggcugggagggcaugguggacggcugguacggcuucagacaccagaacagcgagggcagaggccaggccgccgaccugaagagcacccaggccgccaucgaccagaucaacggcaagcugaacagacugaucggcaagaccaacgagaaguuccaccagaucgagaaggaguucagcgagguggagggcagaauccaggaccuggagaaguacguggaggacaccaagaucgaccuguggagcuacaacgccgagcugcugguggcccuggagaaccagcacaccaucgaccugaccgacagcgagaugaacaagcuguucgagaagaccaagaagcagcugagagagaacgccgaggacaugggcaacggcugcuucaagaucuaccacaagugcgacaacgccugcaucggcagcaucagaaacggcaccuacgaccacaacguguacagagacgaggcccugaacaacagauuccagaucaagggcguggagcugaagagcggcuacaaggacuggauccuguggaucagcuucgccaucagcugcuuccugcugugcguggcccugcugggcuucaucaugugggccugccagaagggcaacaucaagugcaacaucugcaucuga

SEQ ID NO: 171732 - RNA, 1701 nt, Artificial Sequence; identical to SEQ ID NO: 169918
  derived and/or modified CDS sequence (opt4) from hemagglutinin__InfluenzaA__AHL99117

SEQ ID NO: 171733 - RNA, 1701 nt, Artificial Sequence
  derived and/or modified CDS sequence (opt4) from hemagglutinin__InfluenzaA__AHL99129
augaagaccaucaucgcccugagcuacauccugugccugguguucgcccagaagcugcccggcaacgacaacagcaccgccacccugugccugggccaccacgccgugcccaacggcaccaucgugaagaccaucaccaacgacagaaucgaggugaccaacgccaccgagcuggugcagaacagcagcaucggcgagaucugcgacagcccccaccagauccuggacggcgagaacugcacccugaucgacgcccugcugggcgacccccagugcgacggcuuccagaacaagaagugggaccuguucguggagagaagcaaggccuacagcaacugcuaccccuacgacgugcccgacuacgccagccugagaagccugguggccagcagcggcacccuggaguucaacaacgagagcuucaacuggaccggcgugacccagaacggcaccagcagcgccugcaucagaagaagcaacagcagcuucuucagcagacugaacuggcugacccaccugaacuucaaguaccccgcccugaacgugaccaugcccaacaacgagcaguucgacaagcuguacaucuggggcgugcaccaccccggcaccgacaaggaccagaucuuccuguacgcccagagcagcggcagaaucaccgugagcaccaagagaagccagcaggccgugauccccaacaucggcagcagacccagaaucagaaacauccccagcagaaucagcaucuacuggaccaucgugaagcccggcgacauccugcugaucaacagcaccggcaaccugaucgcccccagaggcuacuucaagaucagaagcggcaagagcagcaucaugagaagcgacgcccccaucggcaagugcaagagcgagugcaucacccccaacggcagcauccccaacgacaagcccuuccagaacgugaacagaaucaccuacggcgccugccccagauacgugaagcagagcacccugaagcuggccaccggcaugagaaacgugcccgagaagcagaccagaggcaucuucggcgccaucgccggcuucaucgagaacggcugggagggcaugguggacggcugguacggcuucagacaccagaacagcgagggcagaggccaggccgccgaccugaagagcacccaggccgccaucgaccagaucaacggcaagcugaacagacugaucggcaagaccaacgagaaguuccaccagaucgagaaggaguucagcgagguggagggcagaauccaggacaucgagaaguacguggaggacaccaagaucgaccuguggagcuacaacgccgagcugcugguggcccuggagaaccagcacaccaucgaccugaccgacagcgagaugaacaagcuguucgagaagaccaagaagcagcugagagagaacgccgaggacaugggcaacggcugcuucaagaucuaccacaagugcgacaacgccugcaucggcagcaucagaaacggcaccuacgaccacaacguguacagagacgaggcccugaacaacagauuccagaucaagggcguggagcugaagagcggcuacaaggacuggauccuguggaucagcuucgccaucagcugcuuccugcugugcguggcccugcugggcuucaucaucugggccugccagaagggcaacaucagaugcaacaucugcaucuga

SEQ ID NO: 171734 - RNA, 1701 nt, Artificial Sequence
  derived and/or modified CDS sequence (opt4) from hemagglutinin__InfluenzaA__AHL99141
augaagaccaucaucgcccugagcuacauccugugccugguguucgcccagaagcugcccggcaacgacaacagcaccgccacccugugccugggccaccacgccgugcccaacggcaccaucgugaagaccaucaccaacgaccagaucgaggugaccaacgccaccgagcuggugcagaacagcagcaucggcgagaucugcgacagcccccaccagauccuggacggcgagaacugcacccugaucgacgcccugcugggcgacccccagugcgacggcuuccagaacaagaagugggaccuguucguggagagaagcaaggccuacagcaacugcuaccccuacgacgugcccgacuacgccagccugagaagccugguggccagcagcggcacccuggaguucaacaacgagagcuucaacuggaccggcgugacccagaacggcaccagcagcgccugcaucagaagaagcaacagcagcuucuucagcagacugaacuggcugacccaccuggacuucaaguaccccgcccugaacgugaccaugcccaacaacgagcaguucgacaagcuguacaucuggggcgugcaccaccccggcaccgacaaggaccagaucuuccuguacgcccagagcagcggcagaaucaccgugagcaccaagagaagccagcaggccgugauccccaacaucggcagcagacccagaaucagaaacauccccagcagaaucagcaucuacuggaccaucgugaagcccggcgacauccugcugaucaacagcaccggcaaccugaucgcccccagaggcuacuucaagaucagaagcggcaagagcagcaucaugagaagcgacgcccccaucggcaagugcaagagcgagugcaucacccccaacggcagcauccccaacgacaagcccuuccagaacgugaacagaaucaccuacggcgccugccccagauacgugaagcagagcacccugaagcuggccaccggcaugagaaacgugcccgagaagcagaccagaggcaucuucggcgccaucgccggcuucaucgagaacggcugggagggcaugguggacggcugguacggcuucagacaccagaacagcgagggcagaggccaggccgccgaccugaagagcacccaggccgccaucgaccagaucaacggcaagcugaacagacugaucggcaagaccaacgagaaguuccaccagaucgagaaggaguucagcgagguggagggcagaauccaggaccuggagaaguacguggaggacaccaagaucgaccuguggagcuacaacgccgagcugcugguggcccuggagaaccagcacaccaucgaccugaccgacagcgagaugaacaagcuguucgagaagaccaagaagcagcugagagagaacgccgaggacaugggcaacggcugcuucaagaucuaccacaagugcgacaacgccugcaucggcagcaucagaaacggcaccuacgaccacgacguguacagagacgaggcccugaacaacagauuccagaucaagggcguggagcugaagagcggcuacaaggacuggauccuguggaucagcuucgccaucagcugcuuccugcugugcguggcccugcugggcuucaucaugugggccugccagaagggcaacaucagaugcaacaucugcaucuga

SEQ ID NO: 171735 - RNA, 1701 nt, Artificial Sequence
  derived and/or modified CDS sequence (opt4) from hemagglutinin__InfluenzaA__AHL99153
augaagaccaucaucgcccugagcuacauccugugccugguguucgcccagaagcugcccggcaacgacaacagcaccgccacccugugccugggccaccacgccgugcccaacggcaccaucgugaagaccaucaccaacgacagaaucgaggugaccaacgccaccgagcuggugcagaacagcagcaucggcgagaucugcgacagcccccaccagauccuggacggcgagaacugcacccugaucgacgcccugcugggcgacccccagugcgacggcuuccagaacaagaagugggaccuguucguggagagaagcaaggccuacagcaacugcuaccccuacgacgugcccgacuacgccagccugagaagccugguggccagcagcggcacccuggaguucaacaacgagagcuucaacugggccggcgugacccagaacggcaccagcagcgccugcaucagaggcagcaacagcagcuucuucagcagacugaacuggcugacccaccugaacuucaaguaccccgcccugaacgugaccaugcccaacaacgagcaguucgacaagcuguacaucuggggcgugcaccaccccggcaccgacaaggaccagaucuuccuguacgcccagagcagcggcagaaucaccgugagcaccaagagaagccagcaggccgugacccccaacaucggcagcagacccagaaucagagacauccccagcagaaucagcaucuacuggaccaucgugaagcccggcgacauccugcugaucaacagcaccggcaaccugaucgcccccagaggcuacuucaagaucagaagcggcaagagcagcaucaugagaagcgacgcccccaucggcaagugcaagagcgagugcaucacccccaacggcagcauccccaacgacaagcccuuccagaacgugaacagaaucaccuacggcgccugccccagauacgugaagcagagcacccugaagcuggccaccggcaugagaaacgugcccgagaagcagaccagaggcaucuucggcgccaucgccggcuucaucgagaacggcugggagggcaugauggacggcugguacggcuucagacaccagaacagcgagggcagaggccaggccgccgaccugaagagcacccaggccgccaucgaccagaucaacggcaagcugaacagacugaucggcaagaccaacgagaaguuccaccagaucgagaaggaguucagcgagguggagggcagaauccaggaccuggagaaguacguggaggacaccaagaucgaccuguggagcuacaacgccgagcugcugguggcccuggagaaccagcacaccaucgaccugaccgacagcgagaugaacaagcuguucgagaagaccaagaagcagcugagagagaacgccgaggacaugggcaacggcugcuucaagaucuaccacaagugcgacaacgccugcaucggcagcaucagaaacggcaccuacgaccacgacguguacagagacgaggcccugaacaacagauuccagaucaagggcguggagcugaagagcggcuacaaggacuggauccuguggaucagcuucgccaucagcugcuuccugcugugcguggcccugcugggcuucaucaugugggccugccagaagggcaacaucagaugcaacaucugcaucuga

SEQ ID NO: 171736 - RNA, 1701 nt, Artificial Sequence; identical to SEQ ID NO: 170057
  derived and/or modified CDS sequence (opt4) from hemagglutinin__InfluenzaA__AHL99165

SEQ ID NO: 171737 - RNA, 1701 nt, Artificial Sequence; identical to SEQ ID NO: 170542
  derived and/or modified CDS sequence (opt4) from hemagglutinin__InfluenzaA__AHL99177

SEQ ID NO: 171738 - RNA, 1701 nt, Artificial Sequence; identical to SEQ ID NO: 169918
  derived and/or modified CDS sequence (opt4) from hemagglutinin__InfluenzaA__AHL99189

SEQ ID NO: 171739 - RNA, 1701 nt, Artificial Sequence; identical to SEQ ID NO: 170054
  derived and/or modified CDS sequence (opt4) from hemagglutinin__InfluenzaA__AHL99225

SEQ ID NO: 171740 - RNA, 1701 nt, Artificial Sequence; identical to SEQ ID NO: 170527
  derived and/or modified CDS sequence (opt4) from hemagglutinin__InfluenzaA__AHL99237

SEQ ID NO: 171741 - RNA, 1701 nt, Artificial Sequence; identical to SEQ ID NO: 169928
  derived and/or modified CDS sequence (opt4) from hemagglutinin__InfluenzaA__AHL99249

SEQ ID NO: 171742 - RNA, 1701 nt, Artificial Sequence; identical to SEQ ID NO: 169918
  derived and/or modified CDS sequence (opt4) from hemagglutinin__InfluenzaA__AHL99261

SEQ ID NO: 171743 - RNA, 1701 nt, Artificial Sequence; identical to SEQ ID NO: 170057
  derived and/or modified CDS sequence (opt4) from hemagglutinin__InfluenzaA__AHL99273

SEQ ID NO: 171744 - RNA, 1701 nt, Artificial Sequence
  derived and/or modified CDS sequence (opt4) from hemagglutinin__InfluenzaA__AHL99285
augaagaccaucaucgcccugagcuacauccugugccugguguucgcccagaagcugcccggcaacgacaacagcaccgccacccugugccugggccaccacgccgugcccaacggcaccaucgugaagaccaucaccaacgacagaaucgaggugaccaacgccaccgagcuggugcagaacagcagcaucggcgagaucugcgacagcccccaccagauccuggacggcgagaacugcacccugaucgacgcccugcugggcgacccccagugcgacggcuuccagaacaagaagugggaccuguucguggagagaagcaaggccuacagcaacugcuaccccuacgacgugcccgacuacgccagccugagaagccugguggccagcagcggcacccuggaguucaacaacgagagcuucaacuggaccggcgugacccagaacggcaccagcagcgccugcaucagaagaagcaacagcagcuucuucagcagacugaacuggcugacccaccugaacuucaaguaccccgcccugaacgugaccaugcccaacaacgagcaguucgacaagcuguacaucuggggcgugcaccaccccggcaccgacaaggaccagaucuuccuguacgcccagagcagcggcagaaucaccgugagcaccaagagaagccagcaggccgugauccccaacaucggcagcagacccagaaucagaaacauccccagcagaaucagcaucuacuggaccaucgugaagcccggcgacauccugcugaucaacagcaccggcaaccugaucgcccccagaggcuacuucaagauccagagcggcaagagcagcaucaugagaagcgacgcccccaucggcaagugcaagagcgagugcaucacccccaacggcagcauccccaacgacaagcccuuccagaacgugaacagaaucaccuacggcgccugccccagauacgugaagcagagcacccugaagcuggccaccggcaugagaaacgugcccgagaagcagaccagaggcaucuucggcgccaucgccggcuucaucgagaacggcugggagggcaugguggacggcugguacggcuucagacaccagaacagcgagggcagaggccaggccgccgaccugaagagcacccaggccgccaucgaccagaucaacggcaagcugaacagacugaucggcaagaccaacgagaaguuccaccagaucgagaaggaguucagcgagguggagggcagaauccaggaccuggagaaguacguggaggacaccaagaucgaccuguggagcuacaacgccgagcugcugguggcccuggagaaccagcacaccaucgaccugaccgacagcgagaugaacaagcuguucgagaagaccaagaagcagcugagagagaacgccgaggacaugggcaacggcugcuucaagaucuaccacaagugcgacaacgccugcaucggcagcaucagaaacggcaccuacgaccacaacguguacagagacgaggcccugaacaacagauuccagaucaagggcguggagcugaagagcggcuacaaggacuggauccuguggaucagcuucgccaucagcugcuuccugcugugcguggcccugcugggcuucaucaugugggccugccagaagggcaacaucagaugcaacaucugcaucuga

SEQ ID NO: 171745 - RNA, 1701 nt, Artificial Sequence; identical to SEQ ID NO: 170083
  derived and/or modified CDS sequence (opt4) from hemagglutinin__InfluenzaA__AHL99297

SEQ ID NO: 171746 - RNA, 1701 nt, Artificial Sequence; identical to SEQ ID NO: 169928
  derived and/or modified CDS sequence (opt4) from hemagglutinin__InfluenzaA__AHL99309

SEQ ID NO: 171747 - RNA, 1701 nt, Artificial Sequence
  derived and/or modified CDS sequence (opt4) from hemagglutinin__InfluenzaA__AHL99321
augaagaccaucaucgcccugagcuacauccugugccugguguucacccagaagcugcccggcaacgacaacagcaccgccacccugugccugggccaccacgccgugcccaacggcaccaucgugaagaccaucaccaacgaccagaucgaggugaccaacgccaccgagcuggugcagaacagcagcaucggcgagaucugcgacagcccccaccagauccuggacggcgagaacugcacccugaucgacgcccugcugggcgacccccagugcgacggcuuccagaacaagaagugggaccuguucguggagagaagcaaggccuacagcaacugcuaccccuacgacgugcccgacuacgccagccugagaagccugguggccagcagcggcacccuggaguucaacaacgagagcuucaacugggccggcgugacccagaacggcaccagcagcgccugcaucagaggcagcaacagcagcuucuucagcagacugaacuggcugacccaccugaacuucaaguaccccgcccugaacgugaccaugcccaacaacgagcaguucgacaagcuguacaucuggggcgugcaccaccccggcaccgacaaggaccagaucuuccuguacgcccagagcagcggcagaaucaccgugagcaccaagagaagccagcaggccgugauccccaacaucggcagcagacccagaaucagaaacauccccagcagaaucagcaucuacuggaccaucgugaagcccggcgacauccugcugaucaacagcaccggcaaccugaucgcccccagaggcuacuucaagaucagaagcggcaagagcagcaucaugagaagcgacgcccccaucggcaagugcaagagcgagugcaucacccccaacggcagcauccccaacgacaagcccuuccagaacgugaacagaaucaccuacggcgccugccccagauacgugaagcagagcacccugaagcuggccaccggcaugagaaacgugcccgagaagcagaccagaggcaucuucggcgccaucgccggcuucaucgagaacggcugggagggcaugguggacggcugguacggcuucagacaccagaacagcgagggcagaggccaggccgccgaccugaagagcacccaggccgccaucgaccagaucaacggcaagcugaacagacugaucggcaagaccaacgagaaguuccaccagaucgagaaggaguucagcgagguggagggcagaauccaggaccuggagaaguacguggaggacaccaagaucgaccuguggagcuacaacgccgagcugcugguggcccuggagaaccagcacaccaucgaccugaccgacagcgagaugaacaagcuguucgagaagaccaagaagcagcugagagagaacgccgaggacaugggcaacggcugcuucaagaucuaccacaagugcgacaacgccugcaucggcagcaucagaaacggcaccuacgaccacgacguguacagagacgaggcccugaacaacagauuccagaucaagggcguggagcugaagagcggcuacaaggacuggauccuguggaucagcuucgccaucagcugcuuccugcugugcguggcccugcugggcuucaucaugugggccugccagaagggcaacaucagaugcaacaucugcaucuga

SEQ ID NO: 171748 - RNA, 1701 nt, Artificial Sequence
  derived and/or modified CDS sequence (opt4) from hemagglutinin__InfluenzaA__AHL99333
augaagaccaucaucgcccugagcuacauccugugccugguguucgcccaggagcugcccggcaacgacgacagcaccgccacccugugccugggccaccacgccgugcccaacggcaccaucgugaagaccaucaccaacgaccagaucgaggugaccaacgccaccgagcuggugcagagcagcagcaccggcgagaucugcaacagcccccaccagauccuggacggcgagaacugcacccugaucgacgcccugcugggcgacccccagugcgacggcuuccagaacaagaagugggaccuguucguggagagaagcaaggcccacagcaacugcuaccccuacgacgugcccgacuacgccagccugagaagccugguggccagcagcggcacccuggaguucaacaacgagagcuucaacuggaccggcgugacccagaacggcaccagcagcgccugcaucagaagaagcaacaacagcuucuucagcagacugaacuggcugacccaccugaacuucaaguaccccgcccugaacgugaccaugcccaacaacgagcaguucgacaagcuguacaucuggggcgugcaccaccccggcaccgacaaggaccagaucuuccuguacgcccaggccagcggcagaaucaccgugagcaccaagagaagccagcaggccgugauccccaacaucggcagcagacccagagugagaaacauccccagcagagugagcaucuacuggaccaucgugaagcccggcgacauccugcugaucaacagcaccggcaaccugaucgcccccagaggcuacuucaagaucagaagcggcaagagcagcaucaugagaagcgacgcccccaucggcaagugcaacagcgccugcaucacccccaacggcagcauccccaacgacaagcccuuccagaacgugaacagaaucaccuacggcgccugccccagauacgugaagcagaacacccugaagcuggccaccggcaugagaaacgugcccgagaagcagaccagaggcaucuucggcgccaucgccggcuucaucgagaacggcugggagggcaugguggacggcugguacggcuucagacaccagaacagcgagggcagaggccaggccgccgaccugaagagcacccaggccgccaucgaccagaucaacggcaagcugaacagacugaucggcaagaccaacgagaaguuccaccagaucgagaaggaguucagcgagguggagggcagaauccaggaccuggagaaguacguggaggacaccaagaucgaccuguggagcuacaacgccgagcugcugguggcccuggagaaccagcacaccaucgaccugaccgacagcgagaugaacaagcuguucgagaagaccaagaagcagcugagagagaacgccgaggacaugggcaacggcugcuucaagaucuaccacaagugcgacaacgccugcaucggcagcaucagaaacggcaccuacgaccacaacguguacagagacgaggcccugaacaacagauuccagaucaagggcguggagcugaagagcggcuacaaggacuggauccuguggaucagcuucgccaucagcugcuuccugcugugcguggcccugcugggcuucaucaugugggccugccagaagggcaacaucagaugcaacaucugcaucuga

SEQ ID NO: 171749 - RNA, 1701 nt, Artificial Sequence
  derived and/or modified CDS sequence (opt4) from hemagglutinin__InfluenzaA__AHL99356
augaaggccauccugguggugcugcuguacaccuucgccaccgccaacgccgacacccugugcaucggcuaccacgccaacaacagcaccgacaccguggacaccgugcuggagaagaacgugaccgugacccacagcgugaaccugcuggaggacaagcacaacggcaagcugugcaagcugagaggcguggccccccugcaccugggcaagugcaacaucgccggcuggauccugggcaaccccgagugcgagagccugagcaccgccagcagcuggagcuacaucguggagaccagcagcagcgacaacggcaccugcuaccccggcgacuucaucaacuacgaggagcugagagagcagcugagcagcgugagcagcuucgagagauucgagaucuuccccaagaccagcagcuggcccaaccacgacagcaacaagggcgugaccgccgccugcccccacgccggcgccaagagcuucuacaagaaccugaucuggcuggugaagaagggcaacagcuaccccaagcugagcaagagcuacaucaacgacaagggcaaggaggugcuggugcuguggggcauccaccaccccagcaccaccgccgaccagcagagccuguaccagaacgccgacgccuacguguucgugggcaccagcaaguacagcaagaaguucaagcccgagaucgccaucagacccaaggugagagaccaggagggcagaaugaacuacuacuggacccugaucgagcccggcgacaagaucaccuucgaggccaccggcaaccugguggugcccagauacgccuucgccauggagagaaacgccggcagcggcaucaucaucagcgacacccccgugcacgacugcaacaccaccugccagacccccgagggcgccaucaacaccagccugcccuuccagaacauccaccccaucaccaucggcaagugccccaaguacgugaagagcaccaagcugagacuggccaccggccugagaaacgugcccagcauccagagcagaggccuguucggcgccaucgccggcuucaucgagggcggcuggaccggcaugguggacggcugguacggcuaccaccaccagaacgagcagggcagcggcuacgccgccgaccugaagagcacccagaacgccaucgacaagaucaccaacaaggugaacagcgugaucgagaagaugaacacccaguucaccgccgugggcaaggaguucaaccaccuggagaagagaaucgagaaccugaacaagaagguggacgacggcuuccuggacaucuggaccuacaacgccgagcugcuggugcugcuggagaacgagagaacccuggacuaccacgacagcaacgugaagaaccuguacgagaaggugagaaaccagcugaagaacaacgccaaggagaucggcaacggcugcuucgaguucuaccacaagugcgacaacaccugcauggagagcgugaagaacggcaccuacgacuaccccaaguacagcgaggaggccaagcugaacagagagaagaucgacggcgugaagcuggagagcaccagaaucuaccagauccuggccaucuacagcaccguggccagcagccuggugcugguggugagccugggcgccaucagcuucuggaugugcagcaacggcagccugcagugcagaaucugcaucuga

SEQ ID NO: 171750 - RNA, 1701 nt, Artificial Sequence; identical to SEQ ID NO: 169943
  derived and/or modified CDS sequence (opt4) from hemagglutinin__InfluenzaA__AHL99367

SEQ ID NO: 171751 - RNA, 1701 nt, Artificial Sequence
  derived and/or modified CDS sequence (opt4) from hemagglutinin__InfluenzaA__AHL99379
augaaggccauccugguggugaugcuguacaccuucgccaccgccaacgccgacacccugugcaucggcuaccacgccaacaacagcaccgacaccguggacaccgugcuggagaagaacgugaccgugacccacagcgugaaccugcuggaggacaagcacaacggcaagcugugcaagcugagaggcguggccccccugcaccugggcaagugcaacaucgccggcuggauccugggcaaccccgagugcgagagccugagcaccgccagcagcuggagcuacaucguggagaccagcggcagcgacaacggcaccugcuaccccggcgacuucaucgacuacgaggagcugagagagcagcugagcagcgugagcagcuucgagagauucgagaucuuccccaagaccagcagcuggcccaaccacgacagcaacaagggcgugaccgccgccugcccccacgccggcgccaagggcuucuacaagaaccugaucuggcuggugaagaagggcaacagcuaccccaagcugagcaucagcuacaucaacgacaagggcaaggaggugcuggugcuguggggcauccaccaccccagcaccaccgccgaccagcagagccuguaccagaacgccgacaccuacguguucgugggcaccagcagauacagcaagaaguucaagcccgagaucgccaucagacccaaggugagagaccaggagggcagaaugaacuacuacuggacccugguggagcccggcgacaagaucaccuucgaggccaccggcaaccugguggugcccagauacgccuucgccauggagagaaacgccggcagcggcaucaucaucagcgacacccccgugcacgacugcaacaccaccugccagacccccaagggcgccaucaacaccagccugcccuuccagaacauccaccccaucaccaucggcaagugccccaaguacgugaagagcaccaagcugagacuggccaccggccugagaaacgugcccagcauccagagcagaggccuguucggcgccaucgccggcuucaucgagggcggcuggaccggcaugguggacggcugguacggcuaccaccaccagaacgagcagggcagcggcuacgccgccgaccugaagagcacccagaacgccaucgacaagaucaccaacaaggugaacagcgugaucgagaagaugaacacccaguucaccgccgugggcaaggaguucaaccaccuggagaagagaaucgagaaccugaacaagaagguggacgacggcuuccuggacaucuggaccuacaacgccgagcugcuggugcugcuggagaacgagagaacccuggacuaccacgacagcaacgugaagaaccuguacgagaaggugagaaaccagcugaagaacaacgccaaggagaucggcaacggcugcuucgaguucuaccacaagugcgacaacaccugcauggagagcgugaagaacggcaccuacgacuaccccaaguacagcgaggaggccaagcugaacagagagaagaucgacggcgugaagcuggagagcaccagaaucuaccagauccuggccaucuacagcaccgccgccagcagccuggugcugguggugagccugggcgccaucagcuucuggaugugcagcaacggcagccugcagugcagaaucugcaucuga

SEQ ID NO: 171752 - RNA, 1701 nt, Artificial Sequence; identical to SEQ ID NO: 171744
  derived and/or modified CDS sequence (opt4) from hemagglutinin__InfluenzaA__AHL99390

SEQ ID NO: 171753 - RNA, 1701 nt, Artificial Sequence; identical to SEQ ID NO: 169918
  derived and/or modified CDS sequence (opt4) from hemagglutinin__InfluenzaA__AHL99402

SEQ ID NO: 171754 - RNA, 1701 nt, Artificial Sequence
  derived and/or modified CDS sequence (opt4) from hemagglutinin__InfluenzaA__AHL99426
augaagaccaucaucgcccugagcuacauccugugccugguguucgcccagaagcugcccggcaacgacaacagcaccgccacccugugccugggccaccacgccgugcccaacggcaccaucgugaagaccaucaccaacgacagaaucgaggugaccaacgccaccgagcuggugcagaacagcagcaucggcgagaucugcgacagcccccaccagauccuggacggcgagaacugcacccugaucgacgcccugcugggcgacccccagugcgacggcuuccagaacaagaagugggaccuguucguggagagaagcaaggccuacagcaacugcuaccccuacgacgugcccgacuacgccagccugagaagccugguggccagcagcggcacccuggaguucaacaacgagagcuucaacuggaccggcgugacccagaacggcaccagcagcgccugcaucagaagaagcaacagcagcuucuucagcagacugaacuggcugacccaccugaacuucaaguaccccgcccugaacgugaccaugcccaacaacgagcaguucgacaagcuguacaucuggggcgugcaccaccccggcaccgacaaggaccagaucuuccuguacgcccagagcagcggcagaaucaccgugagcaccaagagaagccagcaggccgugauccccaacaucggcagcagacccagaaucagaaacauccccagcagaaucagcaucuacuggaccaucgugaagcccggcgacauccugcugaucaacagcaccggcaaccugaucgcccccagaggcuacuucaagaucagaagcggcaagagcagcaugaugagaagcgacgcccccaucggcaagugcaagagcgagugcaucacccccaacggcagcauccccaacgacaagcccuuccagaacgugaacagaaucaccuacggcgccugccccagauacgugaagcagagcacccugaagcuggccaccggcaugagaaacgugcccgagaagcagaccagaggcaucuucggcgccaucgccggcuucaucgagaacggcugggagggcaugguggacggcugguacggcuucagacaccagaacagcgagggcagaggccaggccgccgaccugaagagcacccaggccgccaucgaccagaucaacggcaagcugaacagacugaucggcaagaccaacgagaaguuccaccagaucgagaaggaguucagcgagguggagggcagaauccaggaccuggagaaguacguggaggacaccaagaucgaccuguggagcuacaacgccgagcugcugguggcccuggagaaccagcacaccaucgaccugaccgacagcgagaugaacaagcuguucgagaagaccaagaagcagcugagagagaacgccgaggacaugggcaacggcugcuucaagaucuaccacaagugcgacaacgccugcaucggcagcaucagaaacggcaccuacgaccacgacguguacagagacgaggcccugaacaacagauuccagaucaagggcguggagcugaagagcggcuacaaggacuggauccuguggaucagcuucgccaucagcugcuuccugcugugcguggcccugcugggcuucaucaugugggccugccagaagggcaacaucagaugcaacaucugcaucuga

SEQ ID NO: 171755 - RNA, 1701 nt, Artificial Sequence
  derived and/or modified CDS sequence (opt4) from hemagglutinin__InfluenzaA__AHL99438
augaagaccaucaucgcccugagcuacauccugugccugguguucgcccagaagcugcccggcaacgacaacagcaccgccacccugugccugggccaccacgccgugcccaacggcaccaucgugaagaccaucaccaacgacagaaucgaggugaccaacgccaccgagcuggugcagaacagcagcaucggcgagaucugcgacagcccccaccagauccuggacggcgagaacugcacccugaucgacgcccugcugggcgacccccagugcgacggcuuccagaacaagaagugggaccuguucguggagagaagcaaggccuacagcaacugcuaccccuacgacgugcccgacuacgccagccugagaagccugguggccagcagcggcacccuggaguucaacaacgagagcuucaacuggaccggcgugacccagaacggcaccagcagcgccugcaucagaagaagcaacagcagcuucuucagcagacugaacuggcugacccaccugaacuucaaguaccccgcccugaacgugaccaugcccaacaacgagcaguucgacaagcuguacaucuggggcgugcaccaccccggcaccgacaaggaccagaucuuccuguacgcccagagcagcggcagaaucaccgugagcaccaagagaagccagcaggccgugauccccaacaucggcagcagacccagaaucagaaacauccccagcagaaucagcaucuacuggaccaucgugaagcccggcgacauccugcugaucaacagcaccggcaaccugaucgcccccagaggcuacuucaagauccagagcggcaagagcagcaucaugagaagcgacgcccccaucggcaagugcaagagcgagugcaucacccccaacggcagcauccccaacgacaagcccuuccagaacgugaacagaaucaccuacggcgccugccccagauacgugaagcagagcacccugaagcuggccaccggcaugagaaacgugcccgagaagcagaccagaggcaucuucggcgccaucgccggcuucaucgagaacggcugggagggcaugguggacggcugguacggcuucagacaccagaacagcgagggcagaggccaggccgccgaccugaagagcacccaggccgccaucgaccagaucaacggcaagcugaacagacugaucggcaagaccaacgagaaguuccaccagaucgagaaggaguucagcgagguggagggcagaauccaggaccuggagaaguacguggaggacaccaagaucgaccuguggagcuacaacgccgagcugcugguggcccuggagaaccagcacaccaucgaccugaccgacagcgagaugaacaagcuguucgagaagaccaagaagcagcugagagagaacgccgaggacaugggcaacggcugcuucaagaucuaccacaagugcgacaacgccugcaucggcagcaucagaaacggcaccuacgaccacgacguguacagagacgaggcccugaacaacagauuccagaucaagggcguggagcugaagagcggcuacaaggacuggauccuguggaucagcuucgccaucagcugcuuccugcugugcguggcccugcugggcuucaucaugugggccugccagaagggcaacaucagaugcaacaucugcaucuga

SEQ ID NO: 171756 - RNA, 1701 nt, Artificial Sequence; identical to SEQ ID NO: 170054
  derived and/or modified CDS sequence (opt4) from hemagglutinin__InfluenzaA__AHL99450

SEQ ID NO: 171757 - RNA, 1701 nt, Artificial Sequence; identical to SEQ ID NO: 170527
  derived and/or modified CDS sequence (opt4) from hemagglutinin__InfluenzaA__AHL99462

SEQ ID NO: 171758 - RNA, 1701 nt, Artificial Sequence; identical to SEQ ID NO: 170057
  derived and/or modified CDS sequence (opt4) from hemagglutinin__InfluenzaA__AHL99474

SEQ ID NO: 171759 - RNA, 1701 nt, Artificial Sequence; identical to SEQ ID NO: 170083
  derived and/or modified CDS sequence (opt4) from hemagglutinin__InfluenzaA__AHL99486

SEQ ID NO: 171760 - RNA, 1701 nt, Artificial Sequence; identical to SEQ ID NO: 170054
  derived and/or modified CDS sequence (opt4) from hemagglutinin__InfluenzaA__AHL99498

SEQ ID NO: 171761 - RNA, 1701 nt, Artificial Sequence; identical to SEQ ID NO: 169918
  derived and/or modified CDS sequence (opt4) from hemagglutinin__InfluenzaA__AHL99510

SEQ ID NO: 171762 - RNA, 1701 nt, Artificial Sequence; identical to SEQ ID NO: 169918
  derived and/or modified CDS sequence (opt4) from hemagglutinin__InfluenzaA__AHL99522

SEQ ID NO: 171763 - RNA, 1701 nt, Artificial Sequence; identical to SEQ ID NO: 169943
  derived and/or modified CDS sequence (opt4) from hemagglutinin__InfluenzaA__AHL99534

SEQ ID NO: 171764 - RNA, 1701 nt, Artificial Sequence; identical to SEQ ID NO: 169918
  derived and/or modified CDS sequence (opt4) from hemagglutinin__InfluenzaA__AHL99546

SEQ ID NO: 171765 - RNA, 1701 nt, Artificial Sequence; identical to SEQ ID NO: 169918
  derived and/or modified CDS sequence (opt4) from hemagglutinin__InfluenzaA__AHL99558

SEQ ID NO: 171766 - RNA, 1701 nt, Artificial Sequence
  derived and/or modified CDS sequence (opt4) from hemagglutinin__InfluenzaA__AHL99570
augaagaccaucaucgcccugagcuacauccugugccugguguucgcccagaagcugcccggcaacgacaacagcaccgccacccugugccugggccaccacgccgugcccaacggcaccaucgugaagaccaucaccaacgacagaaucgaggugaccaacgccaccgagcuggugcagaacagcagcaucggcgagaucugcgacagcccccaccagauccuggacggcgagaacugcacccugaucgacgcccugcugggcgacccccagugcgacggcuuccagaacaagaagugggaccuguucguggagagaagcaaggccuacagcagcugcuaccccuacgacgugcccgacuacgccagccugagaagccugguggccagcagcggcacccuggaguucaacaacgagagcuucaacuggaccggcgugacccagaacggcaccagcagcgccugcaucagaagaagcaacagcagcuucuucagcagacugaacuggcugacccaccugaacuucaaguaccccgcccugaacgugaccaugcccaacaacgagcaguucgacaagcuguacaucuggggcgugcaccaccccggcaccgacaaggaccagaucuuccuguacgcccagagcagcggcagaaucaccgugagcaccaagagaagccagcaggccgugauccccaacaucggcagcagacccagaaucagaaacauccccagcagaaucagcaucuacuggaccaucgugaagcccggcgacauccugcugaucaacagcaccggcaaccugaucgcccccagaggcuacuucaagaucagaagcggcaagagcagcaucaugagaagcgacgcccccaucggcaagugcaagagcgagugcaucacccccaacggcagcauccccaacgacaagcccuuccagaacgugaacagaaucaccuacggcgccugccccagauacaucaagcagagcacccugaagcuggccaccggcaugagaaacgugcccgagaagcagaccagaggcaucuucggcgccaucgccggcuucaucgagaacggcugggagggcaugguggacggcugguacggcuucagacaccagaacagcgagggcagaggccaggccgccgaccugaagagcacccaggccgccaucgaccagaucaacggcaagcugaacagacugaucggcaagaccaacgagaaguuccaccagaucgagaaggaguucagcgagguggagggcagaauccaggaccuggagaaguacguggaggacaccaagaucgaccuguggagcuacaacgccgagcugcugguggcccuggagaaccagcacaccaucgaccugaccgacagcgagaugaacaagcuguucgagaagaccaagaagcagcugagagagaacgccgaggacaugggcaacggcugcuucaagaucuaccacaagugcgacaacgccugcaucggcagcaucagaaacggcaccuacgaccacgacguguacagagacgaggcccugaacaacagauuccagaucaagggcguggagcugaagagcggcuacaaggacuggauccuguggaucagcuucgccaucagcugcuuccugcugugcguggcccugcugggcuucaucaugugggccugccagaagggcaacaucagaugcaacaucugcaucuga

SEQ ID NO: 171767 - RNA, 1701 nt, Artificial Sequence; identical to SEQ ID NO: 169918
  derived and/or modified CDS sequence (opt4) from hemagglutinin__InfluenzaA__AHL99582

SEQ ID NO: 171768 - RNA, 1701 nt, Artificial Sequence
  derived and/or modified CDS sequence (opt4) from hemagglutinin__InfluenzaA__AHL99594
augaaggccauccugguggugaugcuguacaccuucgccaccgccaacgccgacacccugugcaucggcuaccacgccaacaacagcaccgacaccguggacaccgugcuggagaagaacgugaccgugacccacagcgugaaccugcuggaggacaagcacaacggcaagcugugcaagcugagaggcguggccccccugcaccugggcaagugcaacaucgccggcuggauccugggcaaccccgagugcgagagccugagcaccgccagcagcuggagcuacaucguggagaccagcggcagcgacaacggcaccugcuaccccggcgacuucaucgacuacgaggagcugagagagcagcugagcagcgugagcagcuucgagagauucgagaucuuccccaagaccagcagcuggcccaaccacgacagcaacaagggcgugaccgccgccugccccagagccggcgccaagggcuucuacaagaaccugaucuggcuggugaagaagggcaacagcuaccccaagcugagcaucagcuacaucaacgacaagggcaaggaggugcuggugcuguggggcauccaccaccccagcaccaccgccgaccagcagagccuguaccagaacgccgacaccuacguguucgugggcaccagcagauacagcaagaaguucaagcccgagaucgccaucagacccaaggugagagaccaggagggcagaaugaacuacuacuggacccugguggagcccggcgacaagaucaccuucgaggccaccggcaaccugguggugcccagauacgccuucgccauggagagaaacgccggcagcggcaucaucaucagcgacacccccgugcacgacugcaacaccaccugccagacccccaagggcgccaucaacaccagccugcccuuccagaacauccaccccaucaccaucggcaagugccccaaguacgugaagagcaccaagcugagacuggccaccggccugagaaacgugcccagcauccagagcagaggccuguucggcgccaucgccggcuucaucgagggcggcuggaccggcaugguggacggcugguacggcuaccaccaccagaacgagcagggcagcggcuacgccgccgaccugaagagcacccagaacgccaucgacaagaucaccaacaaggugaacagcgugaucgagaagaugaacacccaguucaccgccgugggcaaggaguucaaccaccuggagaagagaaucgagaaccugaacaagaagguggacgacggcuuccuggacaucuggaccuacaacgccgagcugcuggugcugcuggagaacgagagaacccuggacuaccacgacagcaacgugaagaaccuguacgagaaggugagaaaccagcugaagaacaacgccaaggagaucggcaacggcugcuucgaguucuaccacaagugcgacaacaccugcauggagagcgugaagaacggcaccuacgacuaccccaaguacagcgaggaggccaagcugaacagagaggagaucgacggcgugaagcuggagagcaccagaaucuaccagauccuggccaucuacagcaccgccgccagcagccuggugcugguggugagccugggcgccaucagcuucuggaugugcagcaacggcagccugcagugcagaaucugcaucuga

SEQ ID NO: 171769 - RNA, 1701 nt, Artificial Sequence; identical to SEQ ID NO: 170527
  derived and/or modified CDS sequence (opt4) from hemagglutinin__InfluenzaA__AHL99605

SEQ ID NO: 171770 - RNA, 1701 nt, Artificial Sequence; identical to SEQ ID NO: 170057
  derived and/or modified CDS sequence (opt4) from hemagglutinin__InfluenzaA__AHL99617

SEQ ID NO: 171771 - RNA, 1701 nt, Artificial Sequence; identical to SEQ ID NO: 169918
  derived and/or modified CDS sequence (opt4) from hemagglutinin__InfluenzaA__AHL99629

SEQ ID NO: 171772 - RNA, 1701 nt, Artificial Sequence
  derived and/or modified CDS sequence (opt4) from hemagglutinin__InfluenzaA__AHL99641
augaagaccaucaucgcccugagcuacauccugugccugguguucgcccagaagcugcccggcaacgacaacagcaccgccacccugugccugggccaccacgccgugcccaacggcaccaucgugaagaccaucaccaacgacagaaucgaggugaccaacgccaccgagcuggugcagaacagcagcaucggcgagaucugcgacagcccccaccagauccuggacggcgagaacugcacccugaucgacgcccugcugggcgacccccagugcgacggcuuccagaacaagaagugggaccuguucguggagagaagcaaggccuacagcaacugcuaccccuacgacgugcccgacuacgccagccugagaagccugguggccagcagcggcacccuggaguucaacaacgagagcuucaacuggaccggcgugacccagaacggcaccagcagcgccugcaucagaagaagcaacagcagcuucuucagcagacugaacuggcugacccaccugaacuucaaguaccccgcccugaacgugaccaugcccaacaacgagcaguucgacaagcuguacaucuggggcgugcaccaccccggcaccgacaaggaccagaucuuccuguacgcccagagcagcggcagaaucaccgugagcaccaagagaagccagcaggccguggugcccaacaucggcagcagacccagaaucagaaacauccccagcagaaucagcaucuacuggaccaucgugaagcccggcgacauccugcugaucaacagcaccggcaaccugaucgcccccagaggcuacuucaagaucagaagcggcaagagcagcaucaugagaagcgacgcccccaucggcaagugcaagagcgagugcaucacccccaacggcagcauccccaacgacaagcccuuccagaacgugaacagaaucaccuacggcgccugccccagauacgugaagcagagcacccugaagcuggccaccggcaugagaaacgugcccgagaagcagaccagaggcaucuucggcgccaucgccggcuucaucgagaacggcugggagggcaugguggacggcugguacggcuucagacaccagaacagcgagggcagaggccaggccgccgaccugaagagcacccaggccgccaucgaccagaucaacggcaagcugaacagacugaucggcaagaccaacgagaaguuccaccagaucgagaaggaguucagcgagguggagggcagaauccaggaccuggagaaguacguggaggacaccaagaucgaccuguggagcuacaacgccgagcugcugguggcccuggagaaccagcacaccaucgaccugaccgacagcgagaugaacaagcuguucgagaagaccaagaagcagcugagagagaacgccgaggacaugggcaacggcugcuucaagaucuaccacaagugcgacaacgccugcaucggcagcaucagaaacggcaccuacaaccacgacguguacagagacgaggcccugaacaacagauuccagaucaagggcguggagcugaagagcggcuacaaggacuggauccuguggaucagcuucgccaugagcugcuuccugcugugcguggcccugcugggcuucaucaugugggccugccagaagggcaacaucagaugcaacaucugcaucuga

SEQ ID NO: 171773 - RNA, 1701 nt, Artificial Sequence
  derived and/or modified CDS sequence (opt4) from hemagglutinin__InfluenzaA__AHL99665
augaagaccaucaucgcccugagcuacauccugugccugguguucgcccagaagcugcccggcaacgacaacagcaccgccacccugugccugggccaccacgccgugcccaacggcaccaucgugaagaccaucaccaacgacagaaucgaggugaccaacgccaccgagcuggugcagaacagcagcaucggcgagaucugcgacagcccccaccagauccuggacggcgagaacugcacccugaucgacgcccugcugggcgacccccagugcgacggcuuccagaacaagaagugggaccuguucguggagagaagcaaggccuacagcaacugcuaccccuacgacgugcccgacuacgccagccugagaagccugguggccagcagcggcacccuggaguucaacaacgagagcuucaacuggaccggcgugacccagaacggcaccagcagcgccugcaucagaagaagcaacagcagcuucuucagcagacugaacuggcugacccaccugaacuucaaguaccccgcccugaacgugaccaugcccaacaacgagcaguucgacaagcuguacaucuggggcgugcaccaccccggcaccgacaaggaccagaucuuccuguacgcccagagcagcggcagaaucaccgugagcaccaagagaagccagcaggccgugauccccaacaucggcagcagacccagaaucagaaacauccccagcagaaucagcaucuacuggaccaucgugaagcccggcgacauccugcugaucaacagcaccggcaaccugaucgcccccagaggcuacuucaagaucagaagcggcaagagcagcaucaugagaagcgacgcccccaucggcaagugcaagagcgagugcaucacccccaacggcagcauccccaacgacaagcccuuccagaacgugaacagaaucaccuacggcgccugccccagauacaucaagcagagcacccugaagcuggccaccggcaugagaaacgugcccgagaagcagaccagaggcaucuucggcgccaucgccggcuucaucgagaacggcugggagggcaugguggacggcugguacggcuucagacaccagaacagcgagggcagaggccaggccgccgaccugaagagcacccaggccgccaucgaccagaucaacggcaagcugaacagacugaucggcaagaccaacgagaaguuccaccagaucgagaaggaguucagcgagguggagggcagaauccaggaccuggagaaguacguggaggacaccaagaucgaccuguggagcuacaacgccgagcugcugguggcccuggagaaccagcacaccaucgaccugaccgacagcgagaugaacaagcuguucgagaagaccaagaagcagcugagagagaacgccgaggacaugggcaacggcugcuucaagaucuaccacaagugcgacaacgccugcaucggcagcaucagaaacggcaccuacgaccacgacguguacagagacgaggcccugaacaacagauuccagaucaagggcguggagcugaagagcggcuacaaggacuggauccuguggaucagcuucgccaucagcugcuuccugcugugcguggcccugcugggcuucaucaugugggccugccagaagggcaacaucagaugcaacaucugcaucuga

SEQ ID NO: 171774 - RNA, 1701 nt, Artificial Sequence; identical to SEQ ID NO: 169918
  derived and/or modified CDS sequence (opt4) from hemagglutinin__InfluenzaA__AHL99677

SEQ ID NO: 171775 - RNA, 1701 nt, Artificial Sequence; identical to SEQ ID NO: 169918
  derived and/or modified CDS sequence (opt4) from hemagglutinin__InfluenzaA__AHL99689

SEQ ID NO: 171776 - RNA, 1701 nt, Artificial Sequence
  derived and/or modified CDS sequence (opt4) from hemagglutinin__InfluenzaA__AHL99701
augaagaccaucaucgcccugagcuacauccugugccugguguucgcccagaagcugcccggcaacgacaacagcaccgccacccugugccugggccaccacgccgugcccaacggcaccaucgugaagaccaucaccaacgacagaaucgaggugaccaacgccaccgagcuggugcagaacagcagcaucggcgagaucugcgacagcccccaccagauccuggacggcgagaacugcacccugaucgacgcccugcugggcgacccccagugcgacggcuuccagaacaagaagugggaccuguucguggagagaagcaaggccuacagcaacugcuaccccuacgacgugcccgacuacgccagccugagaagccugguggccagcagcggcacccuggaguucaacaacgagagcuucaacugggccggcgugacccagaacggcaccagcagcgccugcaucagaggcagcaacagcagcuucuucagcagacugaacuggcugacccaccugaacuucaaguaccccgcccugaacgugaccaugcccaacaacgagcaguucgacaagcuguacaucuggggcgugcaccaccccggcaccgacaaggaccagaucuuccuguacgcccagagcagcggcagaaucaccgugagcaccaagagaagccagcaggccgugacccccaacaucggcagcagacccagaaucagaaacauccccagcagaaucagcaucuacuggaccaucgugaagcccggcgacauccugcugaucaacagcaccggcaaccugaucgcccccagaggcuacuucaagaucagaagcggcaagagcagcaucaugagaagcgacgcccccaucggcaagugcaagagcgagugcaucacccccaacggcagcauccccaacgacaagcccuuccagaacgugaacagaaucaccuacggcgccugccccagauacgugaagcagagcacccugaagcuggccaccggcaugagaaacgugcccgagaagcagaccagaggcaucuucggcgccaucgccggcuucaucgagaacggcugggagggcaugauggacggcugguacggcuucagacaccagaacagcgagggcagaggccaggccgccgaccugaagagcacccaggccgccaucgaccagaucaacggcaagcugaacagacugaucggcaagaccaacgagaaguuccaccagaucgagaaggaguucagcgagguggagggcagaauccaggaccuggagaaguacguggaggacaccaagaucgaccuguggagcuacaacgccgagcugcugguggcccuggagaaccagcacaccaucgaccugaccgacagcgagaugaacaagcuguucgagaagaccaagaagcagcugagagagaacgccgaggacaugggcaacggcugcuucaagaucuaccacaagugcgacaacgccugcaucggcagcaucagaaacggcaccuacgaccacgacguguacagagacgaggcccugaacaacagauuccagaucaagggcguggagcugaagagcggcuacaaggacuggauccuguggaucagcuucgccaucagcugcuuccugcugugcguggcccugcugggcuucaucaugugggccugccagaagggcaacaucagaugcaacaucugcaucuga

SEQ ID NO: 171777 - RNA, 1701 nt, Artificial Sequence
  derived and/or modified CDS sequence (opt4) from hemagglutinin__InfluenzaA__AHL99713
augaagaccaucaucgcccugagcuacauccugugccugguguucgcccagaagcugcccggcaacgacaacagcaccgccacccugugccugggccaccacgccgugcccaacggcaccaucgugaagaccaucaccaacgacagaaucgaggugaccaacgccaccgagcuggugcagaacagcagcaucggcgagaucugcgacagcccccaccagauccuggacggcgagaacugcacccugaucgacgcccugcugggcgacccccagugcgacggcuuccagaacaagaagugggaccuguucguggagagaagcaaggccuacagcaacugcuaccccuacgacgugcccgacuacaccagccugagaagccugguggccagcagcggcacccuggaguucaacaacgagagcuucaacuggaccggcgugacccagaacggcaccagcagcgccugcaucagaagaagcaacagcagcuucuucagcagacugaacuggcugacccaccugaacuucaaguaccccgcccugaacgugaccaugcccaacaacgagcaguucgacaagcuguacaucuggggcgugcaccaccccggcaccgacaaggaccagaucuuccuguacgcccagagcagcggcagaaucaccgugagcaccaagagaagccagcaggccgugauccccaacaucggcagcagacccagaaucagaaacauccccagcagaaucagcaucuacuggaccaucgugaagcccggcgacauccugcugaucaacagcaccggcaaccugaucgcccccagaggcuacuucaagaucagaagcggcaagagcagcaucaugagaagcgacgcccccaucggcaagugcaagagcgagugcaucacccccaacggcagcauccccaacgacaagcccuuccagaacgugaacagaaucaccuacggcgccugccccagauacgugaagcagagcacccugaagcuggccaccggcaugagaaacgugcccgagaagcagaccagaggcaucuucggcgccaucgccggcuucaucgagaacggcugggagggcaugguggacggcugguacggcuucagacaccagaacagcgagggcagaggccaggccgccgaccugaagagcacccaggccgccaucgaccagaucaacggcaagcugaacagacugaucggcaagaccaacgagaaguuccaccagaucgagaaggaguucagcgagguggagggcagaauccaggaccuggagaaguacguggaggacaccaagaucgaccuguggagcuacaacgccgagcugcugguggcccuggagaaccagcacaccaucgaccugaccgacagcgagaugaacaagcuguucgagaagaccaagaagcagcugagagagaacgccgaggacaugggcaacggcugcuucaagaucuaccacaagugcgacaacgccugcaucggcagcaucagaaacggcaccuacgaccacgacguguacagagacgaggcccugaacaacagauuccagaucaagggcguggagcugaagagcggcuacaaggacuggauccuguggaucagcuucgccaucaccugcuuccugcugugcguggcccugcugggcuucaucaugugggccugccagaagggcaacaucagaugcaacaucugcaucuga

SEQ ID NO: 171778 - RNA, 1701 nt, Artificial Sequence; identical to SEQ ID NO: 169918
  derived and/or modified CDS sequence (opt4) from hemagglutinin__InfluenzaA__AHL99725

SEQ ID NO: 171779 - RNA, 1701 nt, Artificial Sequence; identical to SEQ ID NO: 170120
  derived and/or modified CDS sequence (opt4) from hemagglutinin__InfluenzaA__AHL99737

SEQ ID NO: 171780 - RNA, 1701 nt, Artificial Sequence; identical to SEQ ID NO: 169918
  derived and/or modified CDS sequence (opt4) from hemagglutinin__InfluenzaA__AHL99748

SEQ ID NO: 171781 - RNA, 1701 nt, Artificial Sequence; identical to SEQ ID NO: 169918
  derived and/or modified CDS sequence (opt4) from hemagglutinin__InfluenzaA__AHL99760

SEQ ID NO: 171782 - RNA, 1701 nt, Artificial Sequence; identical to SEQ ID NO: 169928
  derived and/or modified CDS sequence (opt4) from hemagglutinin__InfluenzaA__AHL99772

SEQ ID NO: 171783 - RNA, 1701 nt, Artificial Sequence; identical to SEQ ID NO: 169943
  derived and/or modified CDS sequence (opt4) from hemagglutinin__InfluenzaA__AHL99784

SEQ ID NO: 171784 - RNA, 1701 nt, Artificial Sequence; identical to SEQ ID NO: 170083
  derived and/or modified CDS sequence (opt4) from hemagglutinin__InfluenzaA__AHL99796

SEQ ID NO: 171785 - RNA, 1701 nt, Artificial Sequence; identical to SEQ ID NO: 169918
  derived and/or modified CDS sequence (opt4) from hemagglutinin__InfluenzaA__AHL99808

SEQ ID NO: 171786 - RNA, 1701 nt, Artificial Sequence
  derived and/or modified CDS sequence (opt4) from hemagglutinin__InfluenzaA__AHL99820
augaagaccaucaucgcccugagcuacauccugugccugguguucgcccagaagcugcccggcaacgacaacagcaccgccacccugugccugggccaccacgccgugcccaacggcaccaucgugaagaccaucaccaacgacagaaucgaggugaccaacgccaccgagcuggugcagaacagcagcaucggcgagaucugcgacagcccccaccagauccuggacggcgagaacugcacccugaucgacgcccugcugggcgacccccagugcgacggcuuccagaacaagaagugggaccuguucguggagagaagcaaggccuacagcaacugcuaccccuacgacgugcccgacuacgccagccugagaagccugguggccagcagcggcacccuggaguucaacaacgagagcuucaacuggaccggcgugacccagaacggcaccagcagcgccugcaucagaagaagcaacagcagcuucuucagcagacugaacuggcugacccaccugaacuucaaguaccccgcccugaacgugaccaugcccaacaacgagcaguucgacaagcuguacaucuggggcgugcaccaccccggcaccgacaaggaccagaucuuccuguacgcccagagcagcggcagaaucaccgugagcaccaagagaagccagcaggccgugauccccaacaucggcagcagacccagaaucagaaacauccccagcagaaucagcaucuacuggaccaucgugaagcccggcgacauccugcugaucaacagcaccggcaaccugaucgcccccagaggcuacuucaagaucagaagcggcaagagcagcaucaugagaagcgacgcccccaucggcaagugcaagagcgagugcaucacccccaacggcagcauccccaacgacaagcccuuccagaacgugaacagaaucaccuacggcgccugccccagauacgugaagcagagcacccugaagcuggccaccggcaugagaaacgugcccgagaagcagaccagaggcaucuucggcgccaucgccggcuucaucgagaacggcugggagggcaugguggacggcugguacggcuucagacaccagaacagcgacggcagaggccaggccgccgaccugaagagcacccaggccgccaucgaccagaucaacggcaagcugaacagacugaucggcaagaccaacgagaaguuccaccagaucgagaaggaguucagcgagguggagggcagaauccaggaccuggagaaguacguggaggacaccaagaucgaccuguggagcuacaacgccgagcugcugguggcccuggagaaccagcacaccaucgaccugaccgacagcgagaugaacaagcuguucgagaagaccaagaagcagcugagagagaacgccgaggacaugggcaacggcugcuucaagaucuaccacaagugcgacaacgccugcaucggcagcaucagaaacggcaccuacgaccacgacguguacagagacgaggcccugaacaacagauuccagaucaagggcguggagcugaagagcggcuacaaggacuggauccuguggaucagcuucgccaucagcugcuuccugcugugcguggugcugcugggcuucaucaugugggccugccagaagggcaacaucagaugcaacaucugcaucuga

SEQ ID NO: 171787 - RNA, 1701 nt, Artificial Sequence; identical to SEQ ID NO: 169918
  derived and/or modified CDS sequence (opt4) from hemagglutinin__InfluenzaA__AHL99832

SEQ ID NO: 171788 - RNA, 1701 nt, Artificial Sequence; identical to SEQ ID NO: 169943
  derived and/or modified CDS sequence (opt4) from hemagglutinin__InfluenzaA__AHL99844

SEQ ID NO: 171789 - RNA, 1701 nt, Artificial Sequence; identical to SEQ ID NO: 169895
  derived and/or modified CDS sequence (opt4) from hemagglutinin__InfluenzaA__AHL99856

SEQ ID NO: 171790 - RNA, 1701 nt, Artificial Sequence
  derived and/or modified CDS sequence (opt4) from hemagglutinin__InfluenzaA__AHL99868
augaagaccaucaucgcccugagcuacauccugugccugguguucgcccaggagcugcccggcaacgacgacagcaccgccacccugugccugggccaccacgccgugcccaacggcaccaucgugaagaccaucaccaacgaccagaucgaggugaccaacgccaccgagcuggugcagagcagcagcaccggcgagaucugcaacagcccccaccagauccuggacggcgagaacugcacccugaucgacgcccugcugggcgacccccagugcgacggcuuccagaacaagaagugggaccuguucguggagagaagcaaggcccacagcaacugcuaccccuacgacgugcccgacuacgccagccugagaagccugguggccagcagcggcacccuggaguucaacaacgagagcuucaacuggaccggcgugacccagaacggcaccagcagcgccugcaucagaagaagcaacaacagcuucuucagcagacugaacuggcugacccaccugaacuucaaguaccccgcccugaacgugaccaugcccaacaacgagcaguucgacaagcuguacaucuggggcgugcaccaccccggcaccgacaaggaccagaucuuccuguacgcccaggccagcggcagaaucaccgugagcaccaagaagagccagcaggccgugauccccaacaucggcagcagacccagagugagaaacauccccagcagagugagcaucuacuggaccaucgugaagcccggcgacauccugcugaucaacagcaccggcaaccugaucgcccccagaggcuacuucaagaucagaagcggcaagagcagcaucaugagaagcgacgcccccaucggcaagugcaacagcgccugcaucacccccaacggcagcauccccaacgacaagcccuuccagaacgugaacagaaucaccuacggcgccugccccagauacgugaagcagaacacccugaagcuggccaccggcaugagaaacgugcccgagaagcagaccagaggcaucuucggcgccaucgccggcuucaucgagaacggcugggagggcaugguggacggcugguacggcuucagacaccagaacagcgagggcagaggccaggccgccgaccugaagagcacccaggccgccaucgaccagaucaacggcaagcugaacagacugaucggcaagaccaacgagaaguuccaccagaucgagaaggaguucagcgagguggagggcagaauccaggaccuggagaaguacguggaggacaccaagaucgaccuguggagcuacaacgccgagcugcugguggcccuggagaaccagcacaccaucgaccugaccgacagcgagaugaacaagcuguucgagaagaccaagaagcagcugagagagaacgccgaggacaugggcaacggcugcuucaagaucuaccacaagugcgacaacgccugcaucggcagcaucagaaacggcaccuacgaccacgacguguacagagacgaggcccugaacaacagauuccagaucaagggcguggagcugaagagcggcuacaaggacuggauccuguggaucagcuucgccaucagcugcuuccugcugugcguggcccugcugggcuucaucaugugggccugccagaagggcaacaucagaugcaacaucugcaucuga

SEQ ID NO: 171791 - RNA, 1701 nt, Artificial Sequence; identical to SEQ ID NO: 170057
  derived and/or modified CDS sequence (opt4) from hemagglutinin__InfluenzaA__AHL99880

SEQ ID NO: 171792 - RNA, 1701 nt, Artificial Sequence; identical to SEQ ID NO: 169918
  derived and/or modified CDS sequence (opt4) from hemagglutinin__InfluenzaA__AHL99892

SEQ ID NO: 171793 - RNA, 1701 nt, Artificial Sequence; identical to SEQ ID NO: 170054
  derived and/or modified CDS sequence (opt4) from hemagglutinin__InfluenzaA__AHL99904

SEQ ID NO: 171794 - RNA, 1701 nt, Artificial Sequence
  derived and/or modified CDS sequence (opt4) from hemagglutinin__InfluenzaA__AHL99916
augaagaccaucaucgcccugagcuacauccugugccugguguucgcccagaagcugcccggcaacgacaacagcaccgccacccugugccugggccaccacgccgugcccaacggcaccaucgugaagaccaucaccaacgacagaaucgaggugaccaacgccaccgagcuggugcagaacagcagcaucggcgagaucugcgacagcccccaccagauccuggacggcgagaacugcacccugaucgacgcccugcugggcgacccccagugcgacggcuuccagaacaagaagugggaccuguucguggagagaagcaaggccuacagcaacugcuaccccuacgacgugcccgacuacgccagccugagaagccugguggccagcagcggcacccuggaguucaacaacgagagcuucaacugggccggcgugacccagaacggcaccagcagcgccugcaucagaggcagcaacagcagcuucuucagcagacugaacuggcugacccaccugaacuucaaguaccccgcccugaacgugaccaugcccaacaacgagcaguucgacaagcuguacaucuggggcgugcaccaccccggcaccgacaaggaccagaucuuccuguacgcccagagcagcggcagaaucaccgugagcaccaagagaagccagcaggccgugauccccaacaucggcagcagacccagaaucagaaacauccccagcagaaucagcaucuacuggaccaucgugaagcccggcgacauccugcugaucaacagcaccggcaaccugaucgcccccagaggcuacuucaagaugagaagcggcaagagcagcaucaugagaagcgacgcccccaucggcaagugcaagagcgagugcaucacccccaacggcagcauccccaacgacaagcccuuccagaacgugaacagaaucaccuacggcgccugccccagauacgugaagcagagcacccugaagcuggccaccggcaugagaaacgugcccgagaagcagaccagaggcaucuucggcgccaucgccggcuucaucgagaacggcugggagggcaugauggacggcugguacggcuucagacaccagaacagcgagggcagaggccaggccgccgaccugaagagcacccaggccgccaucgaccagaucaacggcaagcugaacagacugaucggcaagaccaacgagaaguuccaccagaucgagaaggaguucagcgagguggagggcagaauccaggaccuggagaaguacguggaggacaccaagaucgaccuguggagcuacaacgccgagcugcugguggcccuggagaaccagcacaccaucgaccugaccgacagcgagaugaacaagcuguucgagaagaccaagaagcagcugagagagaacgccgaggacaugggcaacggcugcuucaagaucuaccacaagugcgacaacgccugcaucggcagcaucagaaacggcaccuacgaccacgacguguacagagacgaggcccugaacaacagauuccagaucaagggcguggagcugaagagcggcuacaaggacuggauccuguggaucagcuucgccaucagcugcuuccugcugugcguggcccugcugggcuucaucaugugggccugccagaagggcaacaucagaugcaacaucugcaucuga

SEQ ID NO: 171795 - RNA, 1701 nt, Artificial Sequence; identical to SEQ ID NO: 169943
  derived and/or modified CDS sequence (opt4) from hemagglutinin__InfluenzaA__AHL99928

SEQ ID NO: 171796 - RNA, 1701 nt, Artificial Sequence
  derived and/or modified CDS sequence (opt4) from hemagglutinin__InfluenzaA__AHL99940
augaagaccaucaucgcccugagcuacauccugugccugguguucgcccagaagcugcccggcaacgacaacagcaccgccacccugugccugggccaccacgccgugcccaacggcaccaucgugaagaccaucaccaacgacagaaucgaggugaccaacgccaccgagcuggugcagaacagcagcaucggcgagaucugcgacagcccccaccagauccuggacggcgagaacugcacccugaucgacgcccugcugggcgacccccagugcgacggcuuccagaacaagaagugggaccuguucguggagagaagcaaggccuacagcaacugcuaccccuacgacgugcccgacuacgccagccugagaagccugguggccagcagcggcacccuggaguucaacaacgagagcuucaacuggaccggcgugacccagaacggcaccagcagcgccugcaucagaagaagcaacagcagcuucuucagcagacugaacuggcugacccaccugaacuucaaguaccccgcccugaacgugaccaugcccaacaacgagcaguucgacaagcuguacaucuggggcgugcaccaccccggcaccgacaaggaccagaucuuccuguacgcccagagcagcggcagaaucaccgugagcaccaagagaagccagcaggccgugauccccaacaucggcagcagacccagaaucagaaacauccccagcagaaucagcaucuacuggaccaucgugaagcccggcgacauccugcugaucaacagcaccggcaaccugaucgcccccagaggcuacuucaagaucagaagcggcaagagcagcaucaugagaagcgacgcccccaucggcaagugcaagagcgagugcaucacccccaacggcagcauccccaacgacaagcccuuccagaacgugaacagaaucaccuacggcgccugccccagauacgugaagcagagcacccugaagcuggccaccggcaugagaaacgugcccgagaagcagaccagaggcaucuucggcgccaucgccggcuucaucgagaacggcugggagggcaugguggacggcugguacggcuucagacaccagaacagcgagggcagaggccaggccgccgaccugaagagcacccaggccgccaucgaccagaucaacggcaagcugaacagacugaucggcaagaccaacgagaaguuccaccagaucgagaaggaguucagcggcguggagggcagaauccaggaccuggagaaguacguggaggacaccaagaucgaccuguggagcuacaacgccgagcugcugguggcccuggagaaccagcacaccaucgaccugaccgacagcgagaugaacaagcuguucgagaagaccaagaagcagcugagagagaacgccgaggacaugggcaacggcugcuucaagaucuaccacaagugcgacaacgccugcaucggcagcaucagaaacggcaccuacgaccacgacguguacagagacgaggcccugaacaacagauuccagaucaagggcguggagcugaagagcggcuacaaggacuggauccuguggaucagcuucgccaucagcugcuuccugcugugcguggcccugcugggcuucaucaugugggccugccagaagggcaacaucagaugcaacaucugcaucuga

SEQ ID NO: 171797 - RNA, 1701 nt, Artificial Sequence; identical to SEQ ID NO: 169918
  derived and/or modified CDS sequence (opt4) from hemagglutinin__InfluenzaA__AHL99952

SEQ ID NO: 171798 - RNA, 1701 nt, Artificial Sequence; identical to SEQ ID NO: 169943
  derived and/or modified CDS sequence (opt4) from hemagglutinin__InfluenzaA__AHL99964

SEQ ID NO: 171799 - RNA, 1701 nt, Artificial Sequence; identical to SEQ ID NO: 169943
  derived and/or modified CDS sequence (opt4) from hemagglutinin__InfluenzaA__AHL99976

SEQ ID NO: 171800 - RNA, 1701 nt, Artificial Sequence; identical to SEQ ID NO: 169943
  derived and/or modified CDS sequence (opt4) from hemagglutinin__InfluenzaA__AHL99988

SEQ ID NO: 171801 - RNA, 1701 nt, Artificial Sequence; identical to SEQ ID NO: 169918
  derived and/or modified CDS sequence (opt4) from hemagglutinin__InfluenzaA__AHM00001

SEQ ID NO: 171802 - RNA, 1701 nt, Artificial Sequence; identical to SEQ ID NO: 169918
  derived and/or modified CDS sequence (opt4) from hemagglutinin__InfluenzaA__AHM00013

SEQ ID NO: 171803 - RNA, 1701 nt, Artificial Sequence; identical to SEQ ID NO: 169928
  derived and/or modified CDS sequence (opt4) from hemagglutinin__InfluenzaA__AHM00025

SEQ ID NO: 171804 - RNA, 1701 nt, Artificial Sequence; identical to SEQ ID NO: 169943
  derived and/or modified CDS sequence (opt4) from hemagglutinin__InfluenzaA__AHM00037

SEQ ID NO: 171805 - RNA, 1701 nt, Artificial Sequence; identical to SEQ ID NO: 169943
  derived and/or modified CDS sequence (opt4) from hemagglutinin__InfluenzaA__AHM00061

SEQ ID NO: 171806 - RNA, 1701 nt, Artificial Sequence; identical to SEQ ID NO: 169918
  derived and/or modified CDS sequence (opt4) from hemagglutinin__InfluenzaA__AHM00073

SEQ ID NO: 171807 - RNA, 1701 nt, Artificial Sequence; identical to SEQ ID NO: 169918
  derived and/or modified CDS sequence (opt4) from hemagglutinin__InfluenzaA__AHM00085

SEQ ID NO: 171808 - RNA, 1701 nt, Artificial Sequence
  derived and/or modified CDS sequence (opt4) from hemagglutinin__InfluenzaA__AHM00097
augaaggccauccugguggugcugcuguacaccuucgccaccgccaacgccgacacccugugcaucggcuaccacgccaacaacagcaccgacaccguggacaccgugcuggagaagaacgugaccgugacccacagcgugaaccugcuggaggacaagcacaacggcaagcugugcaagcugagaggcguggccccccugcaccugggcaagugcaacaucgccggcuggauccugggcaaccccgagugcgagagccugagcaccgccagcagcuggagcuacaucguggagaccagcagcagcgacaacggcaccugcuaccccggcgacuucaucgacuacgaggagcugagagagcagcugagcagcgugagcagcuucgagagauucgagaucuuccccaagaccagcagcuggcccaaccacgacagcaacaagggcgugaccgccgccugcccccacgccggcgccaagggcuucuacaagaaccugaucuggcuggugaagaagggcaacagcuaccccaagcugagcaacagcuacaucaacgacaagggcaaggaggugcuggugcuguggggcauccaccaccccagcaccaccgccgaccagcagagccuguaccagaacgccgacaccuacguguucgugggcaccagcagauacagcaagaaguucaagcccgagaucgccaucagacccaaggugagagaccaggagggcagaaugaacuacuacuggacccugguggagcccggcgacaagaucaccuucgaggccaccggcaaccugguggugcccagauacgccuucgccauggagagaaacgccggcagcggcaucaucaucagcgacaccaccgugcacgacugcaacaccaccugccagacccccaagggcgccaucaacaccagccugcccuuccagaacauccaccccaucaccaucggcaagugccccaaguacgugaagagcaccaagcugagacuggccaccggccugagaaacgugcccagcauccagagcagaggccuguucggcgccaucgccggcuucaucgagggcggcuggaccggcaugguggacggcugguacggcuaccaccaccagaacgagcagggcagcggcuacgccgccgaccugaagagcacccagaacgccaucgacaagaucaccaacaaggugaacagcgugaucgagaagaugaacacccaguucaccgccgugggcaaggaguucaaccaccuggagaagagaaucgagaaccugaacaagaagguggacgacggcuuccuggacaucuggaccuacaacgccgagcugcuggugcugcuggagaacgagagaacccuggacuaccacgacagcaacgugaagaaccuguacgagaaggugagaaaccagcugaagaacaacgccaaggagaucggcaacggcugcuucgaguucuaccacaagugcgacaacaugugcauggagagcgugaagaacggcaccuacgacuaccccaaguacagcgaggaggccaagcugaacagagagaagaucgacggcgugaagcuggagagcaccagaaucuaccagauccuggccaucuacagcaccguggccagcagccuggugcugguggugagccugggcgccaucagcuucuggaugugcagcaacggcagccugcagugcagaaucugcaucuga

SEQ ID NO: 171809 - RNA, 1701 nt, Artificial Sequence; identical to SEQ ID NO: 169943
  derived and/or modified CDS sequence (opt4) from hemagglutinin__InfluenzaA__AHM00108

SEQ ID NO: 171810 - RNA, 1701 nt, Artificial Sequence; identical to SEQ ID NO: 169943
  derived and/or modified CDS sequence (opt4) from hemagglutinin__InfluenzaA__AHM00120

SEQ ID NO: 171811 - RNA, 1701 nt, Artificial Sequence
  derived and/or modified CDS sequence (opt4) from hemagglutinin__InfluenzaA__AHM00132
augaagaccaucaucgcccugagcuacauccugugccugguguucgcccaggagcugcccggcaacgacgacagcaccgccacccugugccugggccaccacgccgugcccaacggcaccaucgugaagaccaucaccaacgaccagaucgaggugaccaacgccaccgagcuggugcagagcagcagcaccggcgagaucugcaacagcccccaccagauccuggacggcgagaacugcacccugaucgacgcccugcugggcgacccccagugcgacggcuuccagaacaagaagugggaccuguucguggagagaagcaaggcccacagcaacugcuaccccuacgacgugcccgacuacgccagccugagaagccugguggccagcagcggcacccuggaguucaacaacgagagcuucaacuggaccggcgugacccagaacggcaccagcagcgccugcaucagaagaagcaacaacagcuucuucagcagacugaacuggcugacccaccugaacuucaaguaccccgcccugaacgugaccaugcccaacaacgagcaguucgacaagcuguacaucuggggcgugcaccaccccggcaccgacaaggaccagaucagccuguacgcccaggccagcggcagaaucaccgugagcaccaagagaagccagcaggccgugauccccaacaucggcagcagacccagagugagaaacauccccagcagagugagcaucuacuggaccaucgugaagcccggcgacauccugcugaucaacagcaccggcaaccugaucgcccccagaggcuacuucaagaucagaagcggcaagagcagcaucaugagaagcgacgcccccaucggcaagugcaacagcgccugcaucacccccaacggcagcauccccaacgacaagcccuuccagaacgugaacagaaucaccuacggcgccugccccagauacgugaagcagaacacccugaagcuggccaccggcaugagaaacgugcccgagaagcagaccagaggcaucuucggcgccaucgccggcuucaucgagaacggcugggagggcaugguggacggcugguacggcuucagacaccagaacagcgagggcagaggccaggccgccgaccugaagagcacccaggccgccaucgaccagaucaacggcaagcugaacagacugaucggcaagaccaacgagaaguuccaccagaucgagaaggaguucagcgagguggagggcagaauccaggaccuggagaaguacguggaggacaccaagaucgaccuguggagcuacaacgccgagcugcugguggcccuggagaaccagcacaccaucgaccugaccgacagcgagaugaacaagcuguucgagaagaccaagaagcagcugagagagaacgccgaggacaugggcaacggcugcuucaagaucuaccacaagugcgacaacgccugcaucggcagcaucagaaacggcaccuacgaccacgacguguacagagacgaggcccugaacaacagauuccagaucaagggcguggagcugaagagcggcuacaaggacuggauccuguggaucagcuucgccaucagcugcuuccugcugugcguggcccugcugggcuucaucaugugggccugccagaagggcaacaucagaugcaacaucugcaucuga

SEQ ID NO: 171812 - RNA, 1701 nt, Artificial Sequence; identical to SEQ ID NO: 169918
  derived and/or modified CDS sequence (opt4) from hemagglutinin__InfluenzaA__AHM00144

SEQ ID NO: 171813 - RNA, 1701 nt, Artificial Sequence; identical to SEQ ID NO: 169943
  derived and/or modified CDS sequence (opt4) from hemagglutinin__InfluenzaA__AHM00156

SEQ ID NO: 171814 - RNA, 1701 nt, Artificial Sequence; identical to SEQ ID NO: 169918
  derived and/or modified CDS sequence (opt4) from hemagglutinin__InfluenzaA__AHM00168

SEQ ID NO: 171815 - RNA, 1701 nt, Artificial Sequence
  derived and/or modified CDS sequence (opt4) from hemagglutinin__InfluenzaA__AHM00180
augaagaccaucaucgcccugagcuacauccugugccugguguucgcccagaagcugcccggcaacgacaacagcaccgccacccugugccugggccaccacgccgugcccaacggcaccaucgugaagaccaucaccaacgacagaaucgaggugaccaacgccaccgagcuggugcagaacagcagcaucggcgagaucugcgacaacccccaccagauccuggacggcgagaacugcacccugaucgacgcccugcugggcgacccccagugcgacggcuuccagaacaagaagugggaccuguucguggagagaagcaaggccuacagcaacugcuaccccuacgacgugcccgacuacgccagccugagaagccugguggccagcagcggcacccuggaguucaacaacgagagcuucaacuggaccggcgugacccagaacggcaccagcagcgccugcaucagaagaagcaacagcagcuucuucagcagacugaacuggcugacccaccugaacuucaaguaccccgcccugaacgugaccaugcccaacaacgagcaguucgacaagcuguacaucuggggcgugcaccaccccggcaccgacaaggaccagaucuuccuguacgcccagagcagcggcagaaucaccgugagcaccaagagaagccagcaggccgugauccccaacaucggcagcagacccagaaucagaaacauccccagcagaaucagcaucuacuggaccaucgugaagcccggcgacauccugcugaucaacagcaccggcaaccugaucgcccccagaggcuacuucaagaucagaagcggcaagagcagcaucaugagaagcgacgcccccaucggcaagugcaagagcgagugcaucacccccaacggcagcauccccaacgacaagcccuuccagaacgugaacagaaucaccuacggcgccugccccagauacgugaagcagagcacccugaagcuggccaccggcaugagaaacgugcccgagaagcagaccagaggcaucuucggcgccaucgccggcuucaucgagaacggcugggagggcaugguggacggcugguacggcuucagacaccagaacagcgagggcagaggccaggccgccgaccugaagagcacccaggccgccaucgaccagaucaacggcaagcugaacagacugaucggcaagaccaacgagaaguuccaccagaucgagaaggaguucagcgagguggagggcagaauccaggaccuggagaaguacguggaggacaccaagaucgaccuguggagcuacaacgccgagcugcugguggcccuggagaaccagcacaccaucgaccugaccgacagcgagaugaacaagcuguucgagaagaccaagaagcagcugagagagaacgccgaggacaugggcaacggcugcuucaagaucuaccacaagugcgacaacgccugcaucggcagcaucagaaacggcaccuacgaccacaacguguacagagacgaggcccugaacaacagauuccagaucaagggcguggagcugaagagcggcuacaaggacuggauccuguggaucagcuucgccaucagcugcuuccugcugugcguggcccugcugggcuucaucaugugggccugccagaagggcaacaucagaugcaacaucugcaucuga

SEQ ID NO: 171816 - RNA, 1701 nt, Artificial Sequence; identical to SEQ ID NO: 169895
  derived and/or modified CDS sequence (opt4) from hemagglutinin__InfluenzaA__AHM00192

SEQ ID NO: 171817 - RNA, 1701 nt, Artificial Sequence; identical to SEQ ID NO: 169943
  derived and/or modified CDS sequence (opt4) from hemagglutinin__InfluenzaA__AHM00204

SEQ ID NO: 171818 - RNA, 1701 nt, Artificial Sequence; identical to SEQ ID NO: 169943
  derived and/or modified CDS sequence (opt4) from hemagglutinin__InfluenzaA__AHM00216

SEQ ID NO: 171819 - RNA, 1701 nt, Artificial Sequence; identical to SEQ ID NO: 169918
  derived and/or modified CDS sequence (opt4) from hemagglutinin__InfluenzaA__AHM00228

SEQ ID NO: 171820 - RNA, 1701 nt, Artificial Sequence; identical to SEQ ID NO: 169918
  derived and/or modified CDS sequence (opt4) from hemagglutinin__InfluenzaA__AHM00240

SEQ ID NO: 171821 - RNA, 1701 nt, Artificial Sequence; identical to SEQ ID NO: 169918
  derived and/or modified CDS sequence (opt4) from hemagglutinin__InfluenzaA__AHM00252

SEQ ID NO: 171822 - RNA, 1701 nt, Artificial Sequence; identical to SEQ ID NO: 169918
  derived and/or modified CDS sequence (opt4) from hemagglutinin__InfluenzaA__AHM00264

SEQ ID NO: 171823 - RNA, 1701 nt, Artificial Sequence; identical to SEQ ID NO: 169895
  derived and/or modified CDS sequence (opt4) from hemagglutinin__InfluenzaA__AHM00276

SEQ ID NO: 171824 - RNA, 1701 nt, Artificial Sequence; identical to SEQ ID NO: 169918
  derived and/or modified CDS sequence (opt4) from hemagglutinin__InfluenzaA__AHM00288

SEQ ID NO: 171825 - RNA, 1701 nt, Artificial Sequence; identical to SEQ ID NO: 169918
  derived and/or modified CDS sequence (opt4) from hemagglutinin__InfluenzaA__AHM00300

SEQ ID NO: 171826 - RNA, 1701 nt, Artificial Sequence; identical to SEQ ID NO: 169943
  derived and/or modified CDS sequence (opt4) from hemagglutinin__InfluenzaA__AHM00312

SEQ ID NO: 171827 - RNA, 1701 nt, Artificial Sequence; identical to SEQ ID NO: 169895
  derived and/or modified CDS sequence (opt4) from hemagglutinin__InfluenzaA__AHM00324

SEQ ID NO: 171828 - RNA, 1701 nt, Artificial Sequence; identical to SEQ ID NO: 169895
  derived and/or modified CDS sequence (opt4) from hemagglutinin__InfluenzaA__AHM00336

SEQ ID NO: 171829 - RNA, 1701 nt, Artificial Sequence; identical to SEQ ID NO: 169943
  derived and/or modified CDS sequence (opt4) from hemagglutinin__InfluenzaA__AHM00348

SEQ ID NO: 171830 - RNA, 1701 nt, Artificial Sequence
  derived and/or modified CDS sequence (opt4) from hemagglutinin__InfluenzaA__AHM00360
augaagaccaucaucgcccugagcuacauccugugccugguguucgcccagaagcugcccggcaacgacaacagcaccgccacccugugccugggccaccacgccgugcccaacggcaccaucgugaagaccaucaccaacgaccagaucgaggugaccaacgccaccgagcuggugcagaacagcagcaucggcgagaucugcgacagcccccaccagauccuggacggcgagaacugcacccugaucgacgcccugcugggcgacccccagugcgacggcuuccagaacaagaagugggaccuguucguggagagaagcaaggccuacagcaacugcuaccccuacgacgugcccgacuacgccagccugagaagccugguggccagcagcggcacccuggaguucaacaacgagagcuucaacuggaccggcgugacccagaacggcaccagcagcgccugcaucagaagaagcaacagcagcuucuucagcagacugaacuggcugacccaccugaacuucaaguaccccgcccugaacgugaccaugcccaacaacgagcaguucgacaagcuguacaucuggggcgugcaccaccccggcaccgacaaggaccagaucuuccuguacgcccagagcagcggcagaaucaccgugagcaccaagagaagccagcaggccgugauccccaacaucggcagcagacccagaaucagaaacauccccagcagaaucagcaucuacuggaccaucgugaagcccggcgacauccugcugaucaacagcaccggcaaccugaucgcccccagaggcuacuucaagaucagaagcggcaagagcagcaucaugagaagcgacgcccccaucggcaagugcaagagcgagugcaucacccccaacggcagcauccccaacgacaagcccuuccagaacgugaacagaaucaccuacggcgccugccccagauacgugaagcagagcacccugaagcuggccaccggcaugagaaacgugcccgagaagcagaccagaggcaucuucggcgccaucgccggcuucaucgagaacggcugggagggcaugguggacggcugguacggcuucagacaccagaacagcgagggcagaggccaggccgccgaccugaagagcacccaggccgccaucgaccagaucaacggcaagcugaacagacugaucggcaagaccaacgagaaguuccaccagaucgagaaggaguucagcgagguggagggcagaauccaggaccuggagaaguacguggaggacaccaagaucgaccuguggagcuacaacgccgagcugcugguggcccuggagaaccagcacaccaucgaccugaccgacagcgagaugaacaagcuguucgagaagaccaagaagcagcugagagagaacgccgaggacaugggcaacggcugcuucaagaucuaccacaagugcgacaacgccugcaucggcagcaucagaaacggcaccuacgaccacgacguguacagagacgaggcccugaacaacagauuccagaucaagggcguggagcugaagagcggcuacaaggacuggauccuguggaucagcuucgccaucagcugcuuccugcugugcguggcccugcugggcuucaucaugugggccugccagaagggcaacaucagaugcaacaucugcaucuga

SEQ ID NO: 171831 - RNA, 1701 nt, Artificial Sequence; identical to SEQ ID NO: 169943
  derived and/or modified CDS sequence (opt4) from hemagglutinin__InfluenzaA__AHM00372

SEQ ID NO: 171832 - RNA, 1701 nt, Artificial Sequence; identical to SEQ ID NO: 169943
  derived and/or modified CDS sequence (opt4) from hemagglutinin__InfluenzaA__AHM00395

SEQ ID NO: 171833 - RNA, 1701 nt, Artificial Sequence; identical to SEQ ID NO: 169918
  derived and/or modified CDS sequence (opt4) from hemagglutinin__InfluenzaA__AHM00407

SEQ ID NO: 171834 - RNA, 1701 nt, Artificial Sequence; identical to SEQ ID NO: 169918
  derived and/or modified CDS sequence (opt4) from hemagglutinin__InfluenzaA__AHM00419

SEQ ID NO: 171835 - RNA, 1701 nt, Artificial Sequence; identical to SEQ ID NO: 169918
  derived and/or modified CDS sequence (opt4) from hemagglutinin__InfluenzaA__AHM00443

SEQ ID NO: 171836 - RNA, 1701 nt, Artificial Sequence; identical to SEQ ID NO: 169943
  derived and/or modified CDS sequence (opt4) from hemagglutinin__InfluenzaA__AHM00455

SEQ ID NO: 171837 - RNA, 1701 nt, Artificial Sequence; identical to SEQ ID NO: 169943
  derived and/or modified CDS sequence (opt4) from hemagglutinin__InfluenzaA__AHM00467

SEQ ID NO: 171838 - RNA, 1701 nt, Artificial Sequence; identical to SEQ ID NO: 169943
  derived and/or modified CDS sequence (opt4) from hemagglutinin__InfluenzaA__AHM00479

SEQ ID NO: 171839 - RNA, 1701 nt, Artificial Sequence; identical to SEQ ID NO: 169943
  derived and/or modified CDS sequence (opt4) from hemagglutinin__InfluenzaA__AHM00491

SEQ ID NO: 171840 - RNA, 1701 nt, Artificial Sequence; identical to SEQ ID NO: 169918
  derived and/or modified CDS sequence (opt4) from hemagglutinin__InfluenzaA__AHM00503

SEQ ID NO: 171841 - RNA, 1701 nt, Artificial Sequence; identical to SEQ ID NO: 169918
  derived and/or modified CDS sequence (opt4) from hemagglutinin__InfluenzaA__AHM00515

SEQ ID NO: 171842 - RNA, 1701 nt, Artificial Sequence
  derived and/or modified CDS sequence (opt4) from hemagglutinin__InfluenzaA__AHM00527
augaagaccaucaucgcccugagcuacauccugugccugguguucgcccagaagcugcccggcaacgacaacagcaccgccacccugugccugggccaccacgccgugcccaacggcaccaucgugaagaccaucaccaacgacagaaucgaggugaccaacgccaccgagcuggugcagaacagccccaucggcgagaucugcgacagcccccaccagauccuggacggcgagaacugcacccugaucgacgcccugcugggcgacccccagugcgacggcuuccagaacaagaagugggaccuguucguggagagaagcaaggccuacagcaacugcuaccccuacgacgugcccgacuacgccagccugagaagccugguggccagcagcggcacccuggaguucaacaacgagagcuucaacuggaccggcgugacccagaacggcaccagcagcgccugcaucagaagaagcaacagcagcuucuucagcagacugaacuggcugacccaccugaacuucaaguaccccgcccugaacgugaccaugcccaacaacgagcaguucgacaagcuguacaucuggggcgugcaccaccccggcaccgacaaggaccagaucuuccuguacgcccagagcagcggcagaaucaccgugagcaccaagagaagccagcaggccgugauccccaacaucggcagcagacccagaaucagaaacauccccagcagaaucagcaucuacuggaccaucgugaagcccggcgacauccugcugaucaacagcaccggcaaccugaucgcccccagaggcuacuucaagaucagaagcggcaagagcagcaucaugagaagcgacgcccccaucggcaagugcaagagcgagugcaucacccccaacggcagcauccccaacgacaagcccuuccagaacgugaacagaaucaccuacggcgccugccccagauacgugaagcagagcacccugaagcuggccaccggcaugagaaacgugcccgagaagcagaccagaggcaucuucggcgccaucgccggcuucaucgagaacggcugggagggcaugguggacggcugguacggcuucagacaccagaacagcgagggcagaggccaggccgccgaccugaagagcacccaggccgccaucgaccagaucaacggcaagcugaacagacugaucggcaagaccaacgagaaguuccaccagaucgagaaggaguucagcgagguggagggcagaauccaggaccuggagaaguacguggaggacaccaagaucgaccuguggagcuacaacgccgagcugcugguggcccuggagaaccagcacaccaucgaccugaccgacagcgagaugaacaagcuguucgagaagaccaagaagcagcugagagagaacgccgaggacaugggcaacggcugcuucaagaucuaccacaagugcgacaacgccugcaucggcagcaucagaaacggcaccuacgaccacaacguguacagagacgaggcccugaacaacagauuccagaucaagggcguggagcugaagagcggcuacaaggacuggauccuguggaucagcuucgccaucagcugcuuccugcugugcguggcccugcugggcuucaucaugugggccugccagaagggcaacaucagaugcaacaucugcaucuga

SEQ ID NO: 171843 - RNA, 1701 nt, Artificial Sequence; identical to SEQ ID NO: 169895
  derived and/or modified CDS sequence (opt4) from hemagglutinin__InfluenzaA__AHM00539

SEQ ID NO: 171844 - RNA, 1701 nt, Artificial Sequence
  derived and/or modified CDS sequence (opt4) from hemagglutinin__InfluenzaA__AHM00543
augaagaccaucaucgcccugagcuacauccugugccugguguucgcccaggagcugcccggcaacgacgacagcaccgccacccugugccugggccaccacgccgugcccaacggcaccaucgugaagaccaucaccaacgaccagaucgaggugaccaacgccaccgagcuggugcagagcagcagcaccggcgagaucugcaacagcccccaccagauccuggacggcgagaacugcacccugaucgacgcccugcugggcgacccccagugcgacggcuuccagaacaagaagugggaccuguucguggagagaagcaaggcccacagcaacugcuaccccuacgacgugcccgacuacgccagccugagaagccugguggccagcagcggcaccauggaguucaacaacgagagcuucaacuggaccggcgugacccagaacggcaccagcagcgccugcaucagaagaagcaacaacagcuucuucagcagacugaacuggcugacccaccugaacuucaaguaccccgcccugaacgugaccaugcccaacaacgagcaguucgacaagcuguacaucuggggcgugcaccaccccggcaccgacaaggaccagaucuuccuguacgcccaggccagcggcagaaucaccgugagcaccaagagaagccagcaggccgugauccccaacaucggcagcagacccagagugagaaacauccccagcagagugagcaucuacuggaccaucgugaagcccggcgacauccugcugaucaacagcaccggcaaccugaucgcccccagaggcuacuucaagaucagaagcggcaagagcagcaucaugagaagcgacgcccccaucggcaagugcaacagcgccugcaucacccccaacggcagcauccccaacgacaagcccuuccagaacgugaacagaaucaccuacggcgccugccccagauacgugaagcagaacacccugaagcuggccaccggcaugagaaacgugcccgagaagcagaccagaggcaucuucggcgccaucgccggcuucaucgagaacggcugggagggcaugguggacggcugguacggcuucagacaccagaacagcgagggcagaggccaggccgccgaccugaagagcacccaggccgccaucgaccagaucaacggcaagcugaacagacugaucggcaagaccaacgagaaguuccaccagaucgagaaggaguucagcgagguggagggcagaauccaggaccuggagaaguacguggaggacaccaagaucgaccuguggagcuacaacgccgagcugcugguggcccuggagaaccagcacaccaucgaccugaccgacagcgagaugaacaagcuguucgagaagaccaagaagcagcugagagagaacgccgaggacaugggcaacggcugcuucaagaucuaccacaagugcgacaacgccugcaucggcagcaucagaaacggcaccuacgaccacgacguguacagagacgaggcccugaacaacagauuccagaucaagggcguggagcugaagagcggcuacaaggacuggauccuguggaucagcuucgccaucagcugcuuccugcugugcguggcccugcugggcuucaucaugugggccugccagaagggcaacaucagaugcaacaucugcaucuga

SEQ ID NO: 171845 - RNA, 1701 nt, Artificial Sequence; identical to SEQ ID NO: 169918
  derived and/or modified CDS sequence (opt4) from hemagglutinin__InfluenzaA__AHM00555

SEQ ID NO: 171846 - RNA, 1701 nt, Artificial Sequence
  derived and/or modified CDS sequence (opt4) from hemagglutinin__InfluenzaA__AHM00567
augaagaccaucaucgcccugagcuacauccugugccugguguucgcccagaagcugcccggcaacgacaacagcaccgccacccugugccugggccaccacgccgugcccaacggcaccaucgugaagaccaucaccaacgacagaaucgaggugaccaacgccaccgagcuggugcagaacagcagcaucggcgagaucugcgacagcccccaccagauccuggacggcgagaacugcacccugaucgacgcccugcugggcgacccccagugcgacggcuuccagaacaagaagugggaccuguucguggagagaagcaaggccuacagcaacugcuaccccuacgacgugcccgacuacgccagccugagaagccugguggccagcagcggcacccuggaguucaacaacgagagcuucaacuggaccggcgugacccagaacggcaccagcagcgccugcaucagaaagagcaacagcagcuucuucagcagacugaacuggcugacccaccugaacuucaaguaccccgcccugaacgugaccaugcccaacaacgagcaguucgacaagcuguacaucuggggcgugcaccaccccggcaccgacaaggaccagaucuuccuguacgcccagagcagcggcagaaucaccgugagcaccaagagaagccagcaggccgugauccccaacaucggcagcagacccagaaucagaaacauccccagcagaaucagcaucuacuggaccaucgugaagcccggcgacauccugcugaucaacagcaccggcaaccugaucgcccccagaggcuacuucaagaucagaagcggcaagagcagcaucaugagaagcgacgcccccaucggcaagugcaagagcgagugcaucacccccaacggcagcauccccaacgacaagcccuuccagaacgugaacagaaucaccuacggcgccugccccagauacgugaagcagagcacccugaagcuggccaccggcaugagaaacgugcccgagaagcagaccagaggcaucuucggcgccaucgccggcuucaucgagaacggcugggagggcaugguggacggcugguacggcuucagacaccagaacagcgagggcagaggccaggccgccgaccugaagagcacccaggccgccaucgaccagaucaacggcaagcugaacagacugaucggcaagaccaacgagaaguuccaccagaucgagaaggaguucagcgagguggagggcagaauccaggaccuggagaaguacguggaggacaccaagaucgaccuguggagcuacaacgccgagcugcugguggcccuggagaaccagcacaccaucgaccugaccgacagcgagaugaacaagcuguucgagaagaccaagaagcagcugagagagaacgccgaggacaugggcaacggcugcuucaagaucuaccacaagugcgacaacgccugcaucggcagcaucagaaacggcaccuacgaccacgacguguacagagacgaggcccugaacaacagauuccagaucaagggcguggagcugaagagcggcuacaaggacuggauccuguggaucagcuucgccaucagcugcuuccugcugugcguggcccugcugggcuucaucaugugggccugccagaagggcaacaucagaugcaacaucugcaucuga

SEQ ID NO: 171847 - RNA, 1701 nt, Artificial Sequence; identical to SEQ ID NO: 169918
  derived and/or modified CDS sequence (opt4) from hemagglutinin__InfluenzaA__AHM00579

SEQ ID NO: 171848 - RNA, 1701 nt, Artificial Sequence; identical to SEQ ID NO: 169943
  derived and/or modified CDS sequence (opt4) from hemagglutinin__InfluenzaA__AHM00591

SEQ ID NO: 171849 - RNA, 1701 nt, Artificial Sequence; identical to SEQ ID NO: 169918
  derived and/or modified CDS sequence (opt4) from hemagglutinin__InfluenzaA__AHM00603

SEQ ID NO: 171850 - RNA, 1701 nt, Artificial Sequence; identical to SEQ ID NO: 169918
  derived and/or modified CDS sequence (opt4) from hemagglutinin__InfluenzaA__AHM00615

SEQ ID NO: 171851 - RNA, 1701 nt, Artificial Sequence
  derived and/or modified CDS sequence (opt4) from hemagglutinin__InfluenzaA__AHM00627
augaagaccaccaucgcccugagcuacauccugugccugguguucgcccagaagcugcccggcaacgacaacagcaccgccacccugugccugggccaccacgccgugcccaacggcaccaucgugaagaccaucaccaacgacagaaucgaggugaccaacgccaccgagcuggugcagaacagcagcaucggcgagaucugcgacagcccccaccagauccuggacggcgagaacugcacccugaucgacgcccugcugggcgacccccagugcgacggcuuccagaacaagaagugggaccuguucguggagagaagcaaggccuacagcaacugcuaccccuacgacgugcccgacuacgccagccugagaagccugguggccagcagcggcacccuggaguucaacaacgagagcuucaacuggaccggcgugacccagaacggcaccagcagcgccugcaucagaagaagcaacagcagcuucuucagcagacugaacuggcugacccaccugaacuucaaguaccccgcccugaacgugaccaugcccaacaacgagcaguucgacaagcuguacaucuggggcgugcaccaccccggcaccgacaaggaccagaucuuccuguacgcccagagcagcggcagaaucaccgugagcaccaagagaagccagcaggccgugauccccaacaucggcagcagacccagaaucagaaacauccccagcagaaucagcaucuacuggaccaucgugaagcccggcgacauccugcugaucaacagcaccggcaaccugaucgcccccagaggcuacuucaagaucagaagcggcaagagcagcaucaugagaagcgacgcccccaucggcaagugcaagagcgagugcaucacccccaacggcagcauccccaacgacaagcccuuccagaacgugaacagaaucaccuacggcgccugccccagauacgugaagcagagcacccugaagcuggccaccggcaugagaaacgugcccgagaagcagaccagaggcaucuucggcgccaucgccggcuucaucgagaacggcugggagggcaugguggacggcugguacggcuucagacaccagaacagcgagggcagaggccaggccgccgaccugaagagcacccaggccgccaucgaccagaucaacggcaagcugaacagacugaucggcaagaccaacgagaaguuccaccagaucgagaaggaguucagcgagguggagggcagaauccaggaccuggagaaguacguggaggacaccaagaucgaccuguggagcuacaacgccgagcugcugguggcccuggagaaccagcacaccaucgaccugaccgacagcgagaugaacaagcuguucgagaagaccaagaagcagcugagagagaacgccgaggacaugggcaacggcugcuucaagaucuaccacaagugcgacaacgccugcaucggcagcaucagaaacggcaccuacgaccacaacguguacagagacgaggcccugaacaacagauuccagaucaagggcguggagcugaagagcggcuacaaggacuggauccuguggaucagcuucgccaucagcugcuuccugcugugcguggcccugcugggcuucaucaugugggccugccagaagggcaacaucagaugcaacaucugcaucuga

SEQ ID NO: 171852 - RNA, 1701 nt, Artificial Sequence; identical to SEQ ID NO: 169918
  derived and/or modified CDS sequence (opt4) from hemagglutinin__InfluenzaA__AHM00639

SEQ ID NO: 171853 - RNA, 1701 nt, Artificial Sequence; identical to SEQ ID NO: 169895
  derived and/or modified CDS sequence (opt4) from hemagglutinin__InfluenzaA__AHM00651

SEQ ID NO: 171854 - RNA, 1701 nt, Artificial Sequence; identical to SEQ ID NO: 170054
  derived and/or modified CDS sequence (opt4) from hemagglutinin__InfluenzaA__AHM00663

SEQ ID NO: 171855 - RNA, 1701 nt, Artificial Sequence; identical to SEQ ID NO: 169943
  derived and/or modified CDS sequence (opt4) from hemagglutinin__InfluenzaA__AHM00675

SEQ ID NO: 171856 - RNA, 1701 nt, Artificial Sequence; identical to SEQ ID NO: 171005
  derived and/or modified CDS sequence (opt4) from hemagglutinin__InfluenzaA__AHM00687

SEQ ID NO: 171857 - RNA, 1701 nt, Artificial Sequence
  derived and/or modified CDS sequence (opt4) from hemagglutinin__InfluenzaA__AHM00698
augaagaccaucaucgcccugagcuacauccugugccugguguucgcccaggagcugcccggcaacgacgacagcaccgccacccugugccugggccaccacgccgugcccaacggcaccaucgugaagaccaucaccaacgaccagaucgaggugaccaacgccaccgagcuggugcagagcagcagcaccggcgagaucugcaacagcccccaccagauccuggacggcgagaacugcacccugaucgacgcccugcugggcgacccccagugcgacggcuuccagaacaagaagugggaccuguucguggagagaagcaaggcccacagcaacugcuaccccuacgacgugcccgacuacgccagccugagaagccugguggccagcagcggcacccuggaguucaacaacgagagcuucaacuggaccggcgugacccagaacggcaccagcagcgccugcaccagaagaagcaacaacagcuucuucagcagacugaacuggcugacccaccugaacuucaaguaccccgcccugaacgugaccaugcccaacaacgagcaguucgacaagcuguacaucuggggcgugcaccaccccggcaccgacaaggaccagaucuuccuguacgcccaggccagcggcagaaucaccgugagcaccaagagaagccagcaggccgugauccccaacaucggcagcagacccagagugagaaacauccccagcagagugagcaucuacuggaccaucgugaagcccggcgacauccugcugaucaacagcaccggcaaccugaucgcccccagaggcuacuucaagaucagaagcggcaagagcagcaucaugagaagcgacgcccccaucggcaagugcaacagcgccugcaucacccccaacggcagcauccccaacgacaagcccuuccagaacgugaacagaaucaccuacggcgccugccccagauacgugaagcagaacacccugaagcuggccaccggcaugagaaacgugcccgagaagcagaccagaggcaucuucggcgccaucgccggcuucaucgagaacggcugggagggcaugguggacggcugguacggcuucagacaccagaacagcgagggcagaggccaggccgccgaccugaagagcacccaggccgccaucgaccagaucaacggcaagcugaacagacugaucggcaagaccaacgagaaguuccaccagaucgagaaggaguucagcgagguggagggcagaauccaggaccuggagaaguacguggaggacaccaagaucgaccuguggagcuacaacgccgagcugcugguggcccuggagaaccagcacaccaucgaccugaccgacagcgagaugaacaagcuguucgagaagaccaagaagcagcugagagagaacgccgaggacaugggcaacggcugcuucaagaucuaccacaagugcgacaacgccugcaucggcagcaucagaaacggcaccuacgaccacgacguguacagagacgaggcccugaacaacagauuccagaucaagggcguggagcugaagagcggcuacaaggacuggauccuguggaucagcuucgccaucagcugcuuccugcugugcguggcccugcugggcuucaucaugugggccugccagaagggcaacaucagaugcaacaucugcaucuga

SEQ ID NO: 171858 - RNA, 1701 nt, Artificial Sequence; identical to SEQ ID NO: 169918
  derived and/or modified CDS sequence (opt4) from hemagglutinin__InfluenzaA__AHM00710

SEQ ID NO: 171859 - RNA, 1701 nt, Artificial Sequence; identical to SEQ ID NO: 169918
  derived and/or modified CDS sequence (opt4) from hemagglutinin__InfluenzaA__AHM00722

SEQ ID NO: 171860 - RNA, 1701 nt, Artificial Sequence; identical to SEQ ID NO: 169918
  derived and/or modified CDS sequence (opt4) from hemagglutinin__InfluenzaA__AHM00734

SEQ ID NO: 171861 - RNA, 1701 nt, Artificial Sequence; identical to SEQ ID NO: 170053
  derived and/or modified CDS sequence (opt4) from hemagglutinin__InfluenzaA__AHM00746

SEQ ID NO: 171862 - RNA, 1701 nt, Artificial Sequence; identical to SEQ ID NO: 169918
  derived and/or modified CDS sequence (opt4) from hemagglutinin__InfluenzaA__AHM00758

SEQ ID NO: 171863 - RNA, 1701 nt, Artificial Sequence; identical to SEQ ID NO: 170086
  derived and/or modified CDS sequence (opt4) from hemagglutinin__InfluenzaA__AHM00770

SEQ ID NO: 171864 - RNA, 1701 nt, Artificial Sequence; identical to SEQ ID NO: 169895
  derived and/or modified CDS sequence (opt4) from hemagglutinin__InfluenzaA__AHM00782

SEQ ID NO: 171865 - RNA, 1701 nt, Artificial Sequence
  derived and/or modified CDS sequence (opt4) from hemagglutinin__InfluenzaA__AHM00794
augaagaccaucaucgcccugagcuacauccugugccugguguucacccagaagcugcccggcaacgacaacagcaccgccacccugugccugggccaccacgccgugcccaacggcaccaucgugaagaccaucaccaacgacagaaucgaggugaccaacgccaccgagcuggugcagaacagcagcaucggcgagaucugcgacagcccccaccagauccuggacggcgagaacugcacccugaucgacgcccugcugggcgacccccagugcgacggcuuccagaacaagaagugggaccuguucguggagagaagcaaggccuacagcaacugcuaccccuacgacgugcccgacuacgccagccugagaagccugguggccagcagcggcacccuggaguucaacaacgagagcuucaacuggaccggcgugacccagaacggcaccagcagcgccugcaucagaagaagcaacagcagcuucuucagcagacugaacuggcugacccaccugaacuucaaguaccccgcccugaacgugaccaugcccaacaacgagcaguucgacaagcuguacaucuggggcgugcaccaccccggcaccgacaaggaccagaucuuccuguacgcccagagcagcggcagaaucaccgugagcaccaagagaagccagcaggccgugauccccaacaucggcagcagacccagaaucagaaacauccccagcagaaucagcaucuacuggaccaucgugaagcccggcgacauccugcugaucaacagcaccggcaaccugaucgcccccagaggcuacuucaagaucagaagcggcaagagcagcaucaugagaagcgacgcccccaucggcaagugcaagagcgagugcaucacccccaacggcagcauccccaacgacaagcccuuccagaacgugaacagaaucaccuacggcgccugccccagauacgugaagcagagcacccugaagcuggccaccggcaugagaaacgugcccgagaagcagaccagaggcaucuucggcgccaucgccggcuucaucgagaacggcugggagggcaugguggacggcugguacggcuucagacaccagaacagcgagggcagaggccaggccgccgaccugaagagcacccaggccgccaucgaccagaucaacggcaagcugaacagacugaucggcaagaccaacgagaaguuccaccagaucgagaaggaguucagcgagguggagggcagaauccaggaccuggagaaguacguggaggacaccaagaucgaccuguggagcuacaacgccgagcugcugguggcccuggagaaccagcacaccaucgaccugaccgacagcgagaugaacaagcuguucgagaagaccaagaagcagcugagagagaacgccgaggacaugggcaacggcugcuucaagaucuaccacaagugcgacaacgccugcaucggcagcaucagaaacggcaccuacgaccacgacguguacagagacgaggcccugaacaacagauuccagaucaagggcguggagcugaagagcggcuacaaggacuggauccuguggaucagcuucgccaucagcugcuuccugcugugcguggcccugcugggcuucaucaugugggccugccagaagggcaacaucagaugcaacaucugcaucuga

SEQ ID NO: 171866 - RNA, 1701 nt, Artificial Sequence; identical to SEQ ID NO: 170086
  derived and/or modified CDS sequence (opt4) from hemagglutinin__InfluenzaA__AHM00806

SEQ ID NO: 171867 - RNA, 1701 nt, Artificial Sequence
  derived and/or modified CDS sequence (opt4) from hemagglutinin__InfluenzaA__AHM00818
augaagaccaucaucgcccugagcuacauccugugccugguguucgcccagaagcugcccggcaacgacaacagcaccgccacccugugccugggccaccacgccgugcccaacggcaccaucgugaagaccaucaccaacgacagaaucgaggugaccaacgccaccgagcuggugcagaacagcagcaucggcgagaucugcgacagcccccaccagauccuggacggcgagaacugcacccugaucgacgcccugcugggcgacccccagugcgacggcuuccagaacaagaagugggaccuguucguggagagaagcaaggccuacagcaacugcuaccccuacgacgugcccgacuacgccagccugagaagccugguggccagcagcggcacccuggaguucaacaacgagaacuucaacuggaccggcgugacccagaacggcaccagcagcgccugcaucagaagaagcaacagcagcuucuucagcagacugaacuggcugacccaccugaacuucaaguaccccgcccugaacgugaccaugcccaacaacgagcaguucgacaagcuguacaucuggggcgugcaccaccccggcaccgacaaggaccagaucuuccuguacgcccagagcagcggcagaaucaccgugagcaccaagagaagccagcaggccgugauccccaacaucggcagcagacccagaaucagaaacauccccagcagaaucagcaucuacuggaccaucgugaagcccggcgacauccugcugaucaacagcaccggcaaccugaucgcccccagaggcuacuucaagaucagaagcggcaagagcagcaucaugagaagcgacgcccccaucggcaagugcaagagcgagugcaucacccccaacggcagcauccccaacgacaagcccuuccagaacgugaacagaaucaccuacggcgccugccccagauacgugaagcagagcacccugaagcuggccaccggcaugagaaacgugcccgagaagcagaccagaggcaucuucggcgccaucgccggcuucaucgagaacggcugggagggcaugguggacggcugguacggcuucagacaccagaacagcgagggcagaggccaggccgccgaccugaagagcacccaggccgccaucgaccagaucaacggcaagcugaacagacugaucggcaagaccaacgagaaguuccaccagaucgagaaggaguucagcgagguggagggcagaauccaggaccuggagaaguacguggaggacaccaagaucgaccuguggagcuacaacgccgagcugcugguggcccuggagaaccagcacaccaucgaccugaccgacagcgagaugaacaagcuguucgagaagaccaagaagcagcugagagagaacgccgaggacaugggcaacggcugcuucaagaucuaccacaagugcgacaacgccugcaucggcagcaucagaaacggcaccuacgaccacgacguguacagagacgaggcccugaacaacagauuccagaucaagggcguggagcugaagagcggcuacaaggacuggauccuguggaucagcuucgccaucagcugcuuccugcugugcguggcccugcugggcuucaucaugugggccugccagaagggcaacaucagaugcaacaucugcaucuga

SEQ ID NO: 171868 - RNA, 1701 nt, Artificial Sequence; identical to SEQ ID NO: 169943
  derived and/or modified CDS sequence (opt4) from hemagglutinin__InfluenzaA__AHM00830

SEQ ID NO: 171869 - RNA, 1701 nt, Artificial Sequence; identical to SEQ ID NO: 169943
  derived and/or modified CDS sequence (opt4) from hemagglutinin__InfluenzaA__AHM00842

SEQ ID NO: 171870 - RNA, 1701 nt, Artificial Sequence; identical to SEQ ID NO: 171846
  derived and/or modified CDS sequence (opt4) from hemagglutinin__InfluenzaA__AHM00854

SEQ ID NO: 171871 - RNA, 1701 nt, Artificial Sequence; identical to SEQ ID NO: 171846
  derived and/or modified CDS sequence (opt4) from hemagglutinin__InfluenzaA__AHM00866

SEQ ID NO: 171872 - RNA, 1701 nt, Artificial Sequence; identical to SEQ ID NO: 169918
  derived and/or modified CDS sequence (opt4) from hemagglutinin__InfluenzaA__AHM00878

SEQ ID NO: 171873 - RNA, 1701 nt, Artificial Sequence; identical to SEQ ID NO: 169895
  derived and/or modified CDS sequence (opt4) from hemagglutinin__InfluenzaA__AHM00890

SEQ ID NO: 171874 - RNA, 1701 nt, Artificial Sequence; identical to SEQ ID NO: 169928
  derived and/or modified CDS sequence (opt4) from hemagglutinin__InfluenzaA__AHM00902

SEQ ID NO: 171875 - RNA, 1701 nt, Artificial Sequence; identical to SEQ ID NO: 169918
  derived and/or modified CDS sequence (opt4) from hemagglutinin__InfluenzaA__AHM00914

SEQ ID NO: 171876 - RNA, 1701 nt, Artificial Sequence; identical to SEQ ID NO: 169918
  derived and/or modified CDS sequence (opt4) from hemagglutinin__InfluenzaA__AHM00926

SEQ ID NO: 171877 - RNA, 1701 nt, Artificial Sequence; identical to SEQ ID NO: 169895
  derived and/or modified CDS sequence (opt4) from hemagglutinin__InfluenzaA__AHM00938

SEQ ID NO: 171878 - RNA, 1701 nt, Artificial Sequence
  derived and/or modified CDS sequence (opt4) from hemagglutinin__InfluenzaA__AHM00950
augaagaccaucaucgcccugagcuacauccugugccugguguucgcccagaagcugcccggcaacgacaacagcaccgccacccugugccugggccaccacgccgugcccaacggcaccaucgugaagaccaucaccaacgacagaaucgaggugaccaacgccaccgagcuggugcagaacagcagcaucggcgagaucugcgacagcccccaccagauccuggacggcgagaacugcacccugaucgacgcccugcugggcgacccccagugcgacggcuuccagaacaagaagugggaccuguucguggagagaagcaaggccuacagcaacugcuaccccuacgacgugcccgacuacgugagccugagaagccugguggccagcagcggcacccuggaguucaacaacgagagcuucaacuggaccggcgugacccagaacggcaccagcagcgccugcaucagaagaagcaacagcagcuucuucagcagacugaacuggcugacccaccugaacuucaaguaccccgcccugaacgugaccaugcccaacaacgagcaguucgacaagcuguacaucuggggcgugcaccaccccggcaccgacaaggaccagaucuuccuguacgcccagagcagcggcagaaucaccgugagcaccaagagaagccagcaggccgugauccccaacaucggcagcagacccagaaucagaaacauccccagcagaaucagcaucuacuggaccaucgugaagcccggcgacauccugcugaucaacagcaccggcaaccugaucgcccccagaggcuacuucaagaucagaagcggcaagagcagcaucaugagaagcgacgcccccaucggcaagugcaagagcgagugcaucacccccaacggcagcauccccaacgacaagcccuuccagaacgugaacagaaucaccuacggcgccugccccagauacgugaagcagagcacccugaagcuggccaccggcaugagaaacgugcccgagaagcagaccagaggcaucuucggcgccaucgccggcuucaucgagaacggcugggagggcaugguggacggcugguacggcuucagacaccagaacagcgagggcagaggccaggccgccgaccugaagagcacccaggccgccaucgaccagaucaacggcaagcugaacagacugaucggcaagaccaacgagaaguuccaccagaucgagaaggaguucagcgagguggagggcagaauccaggaccuggagaaguacguggaggacaccaagaucgaccuguggagcuacaacgccgagcugcugguggcccuggagaaccagcacaccaucgaccugaccgacagcgagaugaacaagcuguucgagaagaccaagaagcagcugagagagaacgccgaggacaugggcaacggcugcuucaagaucuaccacaagugcgacaacgccugcaucggcagcaucagaaacggcaccuacgaccacaacguguacagagacgaggcccugaacaacagauuccagaucaagggcguggagcugaagagcggcuacaaggacuggauccuguggaucagcuucgccaugagcugcuuccugcugugcguggcccugcugggcuucaucaugugggccugccagaagggcaacaucagaugcaacaucugcaucuga

SEQ ID NO: 171879 - RNA, 1701 nt, Artificial Sequence; identical to SEQ ID NO: 169895
  derived and/or modified CDS sequence (opt4) from hemagglutinin__InfluenzaA__AHM00962

SEQ ID NO: 171880 - RNA, 1701 nt, Artificial Sequence
  derived and/or modified CDS sequence (opt4) from hemagglutinin__InfluenzaA__AHM00974
augaagaccaucaucgcccugagcuacauccugugccugguguucgcccaggagcugcccggcaacgacgacagcaccgccacccugugccugggccaccacgccgugcccaacggcaccaucgugaagaccaucaccaacgaccagaucgaggugaccaacgccaccgagcuggugcagagcagcagcaccggcgagaucugcaacagcccccaccagauccuggacggcgagaacugcacccugaucgacgcccugcugggcgacccccagugcgacggcuuccagaacaagaagugggaccuguucguggagagaagcaaggcccacagcaacugcuaccccuacgacgugcccgacuacgccagccugagaagccugguggccagcagcggcacccuggaguucaacaacgagagcuucaacuggaccggcgugacccagaacggcaccagcagcgccugcaucagaagaagcaacaacagcuucuucagcagacugaacuggcugacccaccugaacuucaaguaccccgcccugaacgugaccaugcccaacaacgagcaguucgacaagcuguacaucuggggcgugcaccaccccggcaccgacaaggaccagaucuuccuguacgcccaggccagcggcggcaucaccgugagcaccaagagaagccagcaggccgugauccccaacaucggcagcagacccagagugagaaacauccccagcagagugagcaucuacuggaccaucgugaagcccggcgacauccugcugaucaacagcaccggcaaccugaucgcccccagaggcuacuucaagaucagaagcggcaagagcagcaucaugagaagcgacgcccccaucggcaagugcaacagcgccugcaucacccccaacggcagcauccccaacgacaagcccuuccagaacgugaacagaaucaccuacggcgccugccccagauacgugaagcagaacacccugaagcuggccaccggcaugagaaacgugcccgagaagcagaccagaggcaucuucggcgccaucgccggcuucaucgagaacggcugggagggcaugguggacggcugguacggcuucagacaccagaacagcgagggcagaggccaggccgccgaccugaagagcacccaggccgccaucgaccagaucaacggcaagcugaacagacugaucggcaagaccaacgagaaguuccaccagaucgagaaggaguucagcgagguggagggcagaauccaggaccuggagaaguacguggaggacaccaagaucgaccuguggagcuacaacgccgagcugcugguggcccuggagaaccagcacaccaucgaccugaccgacagcgagaugaacaagcuguucgagaagaccaagaagcagcugagagagaacgccgaggacaugggcaacggcugcuucaagaucuaccacaagugcgacaacgccugcaucggcagcaucagaaacggcaccuacgaccacgacguguacagagacgaggcccugaacaacagauuccagaucaagggcguggagcugaagagcggcuacaaggacuggauccuguggaucagcuucgccaucagcugcuuccugcugugcguggcccugcugggcuucaucaugugggccugccagaagggcaacaucagaugcaacaucugcaucuga

SEQ ID NO: 171881 - RNA, 1683 nt, Artificial Sequence
  derived and/or modified CDS sequence (opt4) from hemagglutinin__InfluenzaA__AHM24224
augaacacccagauccugguguucgcccugaucgccaucauccccaccaacgccgacaagaucugccugggccaccacgccgugagcaacggcaccaaggugaacacccugaccgagagaggcguggagguggugaacgccaccgagaccguggagagaaccaacauccccagaaucugcagcaagggcaagagaaccguggaccugggccagugcggccugcugggcaccaucaccggccccccccagugcgaccaguuccuggaguucagcgccgaccugaucaucgagagaagagagggcagcgacgugugcuaccccggcaaguucgugaaggaggaggcccugagacagauccugagagagagcggcggcaucgacaaggaggccaugggcuucaccuacagcggcaucagaaccaacggcgccaccagcgccugcagaagaagcggcagcagcuucuacgccgagaugaaguggcugcugagcaacaccgacaacgccgccuucccccagaugaccaagagcuacaagaacaccagaaagagccccgcccugaucguguggggcauccaccacagcgugagcaccgccgagcagaccaagcuguacggcagcggcaacaagcuggugaccgugggcagcagcaacuaccagcagagcuucgugcccagccccggcgccagaccccaggugaacggccugagcggcagaaucgacuuccacuggcugaugcugaaccccaacgacaccgugaccuucagcuucaacggcgccuucaucgcccccgacagagccagcuuccugagaggcaagagcaugggcauccagagcggcgugcagguggacgccaacugcgagggcgacugcuaccacagcggcggcaccaucaucagcaaccugcccuuccagaacaucgacagcagagccgugggcaagugccccagauacgugaagcagagaagccugcugcuggccaccggcaugaagaacgugcccgagauccccaagggcagaggccuguucggcgccaucgccggcuucaucgagaacggcugggagggccugaucgacggcugguacggcuucagacaccagaacgcccagggcgagggcaccgccgccgacuacaagagcacccagagcgccaucgaccagaucaccggcaagcugaacagacugaucgagaagaccaaccagcaguucgagcugaucgacaacgaguucaacgagguggagaagcagaucggcaacgugaucaacuggaccagagacagcaucaccgagguguggagcuacaacgccgagcugcugguggccauggagaaccagcacaccaucgaccuggccgacagcgagauggacaagcuguacgagagagugaagagacagcugagagagaacgccgaggaggacggcaccggcugcuucgagaucuuccacaagugcgacgacgacugcauggccagcaucagaaacaacaccuacgaccacagcaaguacagagaggaggccaugcagaacagaauccagaucgaccccgugaagcugagcagcggcuacaaggacgugauccugugguucagcuucggcgccagcugcuucauccugcuggccaucgugaugggccugguguucaucugcgugaagaacggcaacaugagaugcaccaucugcaucuga

SEQ ID NO: 171882 - RNA, 1683 nt, Artificial Sequence; identical to SEQ ID NO: 170048
  derived and/or modified CDS sequence (opt4) from hemagglutinin__InfluenzaA__AHM24236

SEQ ID NO: 171883 - RNA, 1683 nt, Artificial Sequence; identical to SEQ ID NO: 170048
  derived and/or modified CDS sequence (opt4) from hemagglutinin__InfluenzaA__AHM24248

SEQ ID NO: 171884 - RNA, 1701 nt, Artificial Sequence
  derived and/or modified CDS sequence (opt4) from hemagglutinin__InfluenzaA__AHM98309
augaaggccauccugguggugcugcuguacaccuucgccaccgccaacgccgacacccugugcaucggcuaccacgccaacaacagcaccgacaccguggacaccgugcuggagaagaacgugaccgugacccacagcgugaaccugcuggaggacaagcacaacggcaagcugugcaagcugagaggcguggccccccugcaccugggcaagugcaacaucgccggcuggauccugggcaaccccgagugcgagagccugagcaccgccagcagcuggagcuacaucguggagaccagcagcagcgacaacggcaccugcuaccccggcgacuucaucaacuacgaggagcugagagagcagcugagcagcgugagcagcuucgagagauucgagguguuccccaagaccagcagcuggcccaaccacgacagcaacaagggcgugaccgccgccugcccccacgccggcgccaagagcuucuacaagaaccugaucuggcuggugaagaagggcaacagcuaccccaagcugagcaagagcuacaucaacgacaagggcaaggaggugcuggugcuguggggcauccaccaccccagcaccaccgccgaccagcagagccuguaccagaacgccgacgccuacguguucgugggcaccagcagauacagcaagaaguucaagcccgagaucgccaucagacccaaggugagagaccaggagggcagaaugaacuacuacuggacccugguggagcccggcgacaagaucaccuucgaggccaccggcaaccugguggugcccagauacgccuucgccauggagagaaacgccggcagcggcaucaucaucagcgacacccccgugcacgacugcaacaccaccugccagacccccaagggcgccaucaacaccagccugcccuuccagaacauccaccccaucaccaucggcaagugccccaaguacgugaagagcaccaagcugagacuggccaccggccugagaaacgugcccagcauccagagcagaggccuguucggcgccaucgccggcuucaucgagggcggcuggaccggcaugguggacggcugguacggcuaccaccaccagaacgagcagggcagcggcuacgccgccgaccugaagagcacccagaacgccaucgacaagaucaccaacaaggugaacagcgugaucgagaagaugaacacccaguucaccgccgugggcaaggaguucaaccaccuggagaagagaaucgagaaccugaacaagaagguggacgacggcuuccuggacaucuggaccuacaacgccgagcugcuggugcugcuggagaacgagagaacccuggacuaccacgacagcaacgugaagaaccuguacgagaaggugagaaaccagcugaagaacaacgccaaggagaucggcaacggcugcuucgaguucuaccacaagugcgacaacaccugcauggagagcgugaagaacggcaccuacgacuaccccaaguacagcgaggaggccaagcugaacagagaggagaucgacggcgugaagcuggagagcaccagaaucuaccagauccuggccaucuacagcaccguggccagcagccuggugcugguggugagccugggcgccaucagcuucuggaugugcagcaacggcagccugcagugcagaaucugcaucuga

SEQ ID NO: 171885 - RNA, 1710 nt, Artificial Sequence
  derived and/or modified CDS sequence (opt4) from hemagglutinin__InfluenzaA__AHM98339
augaaggccauccugguggugcugcuguacaccuucgccaccgccaacgccgacacccugugcaucggcuaccacgccaacaacagcaccgacaccguggacaccgugcuggagaagaacgugaccgugacccacagcgugaaccugcuggaggacaagcacaacggcaagcugugcaagcugagaggcguggccccccugcaccugggcaagugcaacaucgccggcuggauccugggcaaccccgagugcgagagccugagcaccgccagcagcuggagcuacaucguggagaccagcagcagcgacaacggcaccugcuaccccggcgacuucaucgacuacgaggagcugagagagcagcugagcagcgugagcagcuucgagagauucgagaucuuccccaagaccagcagcuggcccaaccacgacagcaacaagggcgugaccgccgccugcccccacgccggcgccaagagcuucuacaagaaccugaucuggcuggugaagaagggcaacagcuaccccaagcugagcaagagcuacaucaacgacaagggcaaggaggugcuggugcuguggggcauccaccaccccagcaccaccgccgaccagcagagccuguaccagaacgccgacgccuacguguucgugggcaccagcagauacagcaagaaguucaagcccgagaucgccaucagacccaaggugagagaccaggagggcagaaugaacuacuacuggacccugguggagcccggcgacaagaucaccuucgaggccaccggcaaccugguggugcccagauacgccuucgccauggagagaaacgccggcagcggcaucaucaucagcgacacccccgugcacgacugcaacaccaccugccagacccccaagggcgccaucaacaccagccugaccagccugcccuuccagaacauccaccccaucaccaucggcaagugccccaaguacgugaagagcaccaagcugagacuggccaccggccugagaaacgugcccagcauccagagcagaggccuguucggcgccaucgccggcuucaucgagggcggcuggaccggcaugguggacggcugguacggcuaccaccaccagaacgagcagggcagcggcuacgccgccgaccugaagagcacccagaacgccaucgacaagaucaccaacaaggugaacagcgugaucgagaagaugaacacccaguucaccgccgugggcaaggaguucaaccaccuggagaagagaaucgagaaccugaacaagaagguggacgacggcuuccuggacaucuggaccuacaacgccgagcugcuggugcugcuggagaacgagagaacccuggacuaccacgacagcaacgugaagaaccuguacgagaaggugagaaaccagcugaagaacaacgccaaggagaucggcaacggcugcuucgaguucuaccacaagugcgacaacaccugcauggagagcgugaagaacggcaccuacgacuaccccaaguacagcgaggaggccaagcugaacagagaggagaucgacggcgugaagcuggagagcaccagaaucuaccagauccuggccaucuacagcaccguggccagcagccuggugcugguggugagccugggcgccaucagcuucuggaugugcagcaacggcagccugcagugcagaaucugcaucuga

SEQ ID NO: 171886 - RNA, 1701 nt, Artificial Sequence
  derived and/or modified CDS sequence (opt4) from hemagglutinin__InfluenzaA__AHM98350
augaaggccauccugguggugaugcuguacaccuucgccaccgccaacgccgacacccugugcaucggcuaccacgccaacaacagcaccgacaccguggacaccgugcuggagaagaacgugaccgugacccacagcgugaaccugcuggaggacaagcacaacggcaagcugugcaagcugagaggcguggccccccugcaccugggcaagugcaacaucgccggcuggauccugggcaaccccgagugcgagagccugagcaccgccagcagcuggagcuacaucguggagaccagcagcagcgacaacggcaccugcuaccccggcgacuucaucgacuacgaggagcugagagagcagcugagcagcgugagcagcuucgagagauucgagaucuuccccaagaccagcagcuggcccaaccacgacgccaacaagggcgugaccgccgccugcccccacgccggcgccaagggcuucuacaagaaccugaucuggcuggugaagaagggcaacagcuaccccaagcugagcaagagcuacaucaacgacaagggcaaggaggugcuggugcuguggggcauccaccaccccagcaccaccgccgaccagcagagccuguaccagaacgccgacaccuacguguucgugggcaccagcagauacagcaagaaguucaagcccgagaucgccaucagacccaaggugagagaccaggagggcagaaugaacuacuacuggacccugguggagcccggcgacaagaucaccuucgaggccaccggcaaccugguggugcccagauacgccuucgccauggagagaaacgccggcagcggcaucaucaucagcgacacccccgugcacgacugcaacaccaccugccagacccccaagggcgccaucaacaccagccugcccuuccagaacauccaccccaucaccaucggcaagugccccaaguacgugaagagcaccaagcugagacuggccaccggccugagaaacgugcccagcauccagagcagaggccuguucggcgccaucgccggcuucaucgagggcggcuggaccggcaugguggacggcugguacggcuaccaccaccagaacgagcagggcagcggcuacgccgccgaccugaagagcacccagaacgccaucgacaagaucaccaacaaggugaacagcgugaucgagaagaugaacacccaguucaccgccgugggcaaggaguucaaccaccuggagaagagaaucgagaaccugaacaagaagguggacgacggcuuccuggacaucuggaccuacaacgccgagcugcuggugcugcuggagaacgagagaacccuggacuaccacgacagcaacgugaagaaccuguacgagaaggugagaaaccagcugaagaacaacgccaaggagaucggcaacggcugcuucgaguucuaccacaagugcgacaacaccugcauggagagcgugaagaacggcaccuacgacuaccccaaguacagcgaggaggccaagcugaacagagaggagaucgacggcgugaagcuggagagcaccagaaucuaccagauccuggccaucuacagcaccguggccagcagccuggugcugguggugagccugggcgccaucagcuucuggaugugcagcaacggcagccugcagugcagaaucugcaucuga

SEQ ID NO: 171887 - RNA, 1701 nt, Artificial Sequence; identical to SEQ ID NO: 166514
  derived and/or modified CDS sequence (opt4) from hemagglutinin__InfluenzaA__AHM98361

SEQ ID NO: 171888 - RNA, 1701 nt, Artificial Sequence; identical to SEQ ID NO: 166927
  derived and/or modified CDS sequence (opt4) from hemagglutinin__InfluenzaA__AHM98372

SEQ ID NO: 171889 - RNA, 1701 nt, Artificial Sequence; identical to SEQ ID NO: 166927
  derived and/or modified CDS sequence (opt4) from hemagglutinin__InfluenzaA__AHM98383

SEQ ID NO: 171890 - RNA, 1701 nt, Artificial Sequence; identical to SEQ ID NO: 166884
  derived and/or modified CDS sequence (opt4) from hemagglutinin__InfluenzaA__AHM98394

SEQ ID NO: 171891 - RNA, 1701 nt, Artificial Sequence
  derived and/or modified CDS sequence (opt4) from hemagglutinin__InfluenzaA__AHM98405
augaaggccauccugguggugcugcuguacaccuucgccaccgccaacgccgacacccugugcaucggcuaccacgccaacaacagcaccgacaccguggacaccgugcuggagaagaacgugaccgugacccacagcgugaaccugcuggaggacaagcacaacggcaagcugugcaagcugagaggcguggccccccugcaccugggcaagugcaacaucgccggcuggauccugggcaaccccgagugcgagagccugagcaccgccagcagcuggagcuacaucguggagaccagcagcagcgacaacggcaccugcuaccccggcgacuucaucgacuacgaggagcugagagagcagcugagcagcgugagcagcuucaagagauucgagaucuuccccaagaccagcagcuggcccaaccacgacagcaacaagggcgugaccgccgccugcccccacgccggcgccaagggcuucuacaagaaccugaucuggcuggugaagaagggcaacagcuaccccaagcugagcaagagcuacaucaacgacaagggcaaggaggugcuggugcuguggggcauccaccaccccagcaccaccgccgaccagcagagccuguaccagaacgccgacaccuacguguucgugggcaccagcagauacagcaagaaguucaagcccgagaucgccaucagacccaaggugagagaccaggagggcagaaugaacuacuacuggacccugguggagcccggcgacaagaucaccuucgaggccaccggcaaccugguggugcccagauacgccuucgccauggagagaaacgccggcagcggcaucaucaucagcgacacccccgugcacgacugcaacaccaccugccagacccccaagggcgccaucaacaccagccugcccuuccagaacauccaccccaucaccaucggcaagugccccaaguacgugaagagcaccaagcugagacuggccaccggccugagaaacgugcccagcauccagagcagaggccuguucggcgccaucgccggcuucaucgagggcggcuggaccggcaugguggacggcugguacggcuaccaccaccagaacgagcagggcagcggcuacgccgccgaccugaagagcacccagaacgccaucgacaagaucaccaacaaggugaacagcgugaucgagaagaugaacacccaguucaccgccgugggcaaggaguucaaccaccuggagaagagaaucgagaaccugaacaagaagguggacgacggcuuccuggacaucuggaccuacaacgccgagcugcuggugcugcuggagaacgagagaacccuggacuaccacgacagcaacgugaagaaccuguacgagaaggugagaaaccagcugaagaacaacgccaaggagaucggcaacggcugcuucgaguucuaccacaagugcgacaacaccugcauggagagcgugaagaacggcaccuacgacuaccccaaguacagcgaggaggccaagcugaacagagaggagaucgacggcgugaagcuggagagcaccagaaucuaccagauccuggccaucuacagcaccguggccagcagccuggugcugguggugagccugggcgccaucagcuucuggaugugcagcaacggcagccugcagugcagaaucugcaucuga

SEQ ID NO: 171892 - RNA, 1701 nt, Artificial Sequence; identical to SEQ ID NO: 171891
  derived and/or modified CDS sequence (opt4) from hemagglutinin__InfluenzaA__AHM98416

SEQ ID NO: 171893 - RNA, 1701 nt, Artificial Sequence; identical to SEQ ID NO: 166884
  derived and/or modified CDS sequence (opt4) from hemagglutinin__InfluenzaA__AHM98427

SEQ ID NO: 171894 - RNA, 1701 nt, Artificial Sequence; identical to SEQ ID NO: 167102
  derived and/or modified CDS sequence (opt4) from hemagglutinin__InfluenzaA__AHM98438

SEQ ID NO: 171895 - RNA, 1701 nt, Artificial Sequence; identical to SEQ ID NO: 168246
  derived and/or modified CDS sequence (opt4) from hemagglutinin__InfluenzaA__AHM98449

SEQ ID NO: 171896 - RNA, 1701 nt, Artificial Sequence
  derived and/or modified CDS sequence (opt4) from hemagglutinin__InfluenzaA__AHM98460
augaaggccauccugguggugcugcugugcaccuucgccaccgccaacgccgacacccugugcaucggcuaccacgccaacaacagcaccgacaccguggacaccgugcuggagaagaacgugaccgugacccacagcgugaaccugcuggaggacaagcacaacggcaagcugugcaagcugagaggcguggccccccugcaccugggcaagugcaacaucgccggcuggauccugggcaaccccgagugcgagagccugagcaccgccagcagcuggagcuacaucguggagaccagcagcagcgacaacggcaccugcuaccccggcgacuucaucgacuacgaggagcugagagagcagcugagcagcgugagcagcuucgagagauucgagaucuuccccaagaccagcagcuggcccaaccacgacagcaacaagggcgugaccgccgccugcccccacgccggcgccaagggcuucuacaagaaccugaucuggcuggugaagaagggcaacagcuaccccaagcugagcaagagcuacaucaacgacaagggcaaggaggugcuggugcuguggggcauccaccaccccagcaccaccgccgaccagcagagccuguaccagaacgccgacaccuacguguucgugggcaccagcagauacagcaagaaguucaagcccgagaucgccaucagacccaaggugagagaccaggagggcagaaugaacuacuacuggacccugguggagcccggcgacaagaucaccuucgaggccaccggcaaccugguggugcccagauacgccuucgccauggagagaaacgccggcagcggcaucaucaucagcgacaccaccgugcacgacugcaacaccaccugccagacccccaagggcgccaucaacaccagccugcccuuccagaacauccaccccaucaccaucggcaagugccccaaguacgugaagagcaccaagcugagacuggccaccggccugagaaacgugcccagcauccagagcagaggccuguucggcgccaucgccggcuucaucgagggcggcuggaccggcaugguggacggcugguacggcuaccaccaccagaacgagcagggcagcggcuacgccgccgaccugaagagcacccagaacgccaucgacaagaucaccaacaaggugaacagcgugaucgagaagaugaacacccaguucaccgccgugggcaaggaguucaaccaccuggagaagagaaucgagaaccugaacaagaagguggacgacggcuuccuggacaucuggaccuacaacgccgagcugcuggugcugcuggagaacgagagaacccuggacuaccacgacagcaacgugaagaaccuguacgagaaggugagaaaccagcugaagaacaacgccaaggagaucggcaacggcugcuucgaguucuaccacaagugcgacaacaccugcauggagagcgugaagaacggcaccuacgacuaccccaaguacagcgaggaggccaagcugaacagagagaagaucgacggcgugaagcuggagagcaccagaaucuaccagauccuggccaucuacagcaccguggccagcagccuggugcugguggugagccugggcgccaucagcuucuggaugugcagcaacggcagccugcagugcagaaucugcaucuga

SEQ ID NO: 171897 - RNA, 1701 nt, Artificial Sequence; identical to SEQ ID NO: 166927
  derived and/or modified CDS sequence (opt4) from hemagglutinin__InfluenzaA__AHM98471

SEQ ID NO: 171898 - RNA, 1701 nt, Artificial Sequence
  derived and/or modified CDS sequence (opt4) from hemagglutinin__InfluenzaA__AHM98482
augaaggccauccugguggugcugcuguacaccuucgccaccgccaacgccgacacccugugcaucggcuaccacgccaacaacagcaccgacaccguggacaccgugcuggagaagaacgugaccgugacccacagcgugaaccugcuggaggacaagcacaacggcaagcugugcaagcugagaggcguggccccccugcaccugggcaagugcaacaucgccggcuggauccugggcaaccccgagugcgagagccugagcaccgccagcagcuggagcuacaucguggagaccagcagcagcgacaacggcaccugcuaccccggcgacuucaucgacuacgaggagcugagagagcagcugagcagcgugagcagcuucgagagauucgagaucuuccccaagaccagcagcuggcccaaccacgacagcaacaagggcgugaccgccgccugcccccacgccggcgccaagggcuucuacaagaaccugaucuggcuggugaagaagggcaacagcuaccccaagcugagcaagagcuacaucaacgacaagggcaaggaggugcuggugcuguggggcauccaccaccccagcaccaccgccgaccagcagagccuguaccagaacgccgacaccuacguguucgugggcaccagcagauacagcaagaaguucaagcccgagaucgccaucagacccaaggugagagaccaggagggcagaaugaacuacuacuggacccugguggagcccggcgacaagaucaccuucgaggccaccggcaaccugguggugcccagauacgccuucgccauggagagaaacgccggcagcggcaucaucaucagcgacacccccgugcacgacugcaacaccaccugccagacccccaagggcgccaucaacaccagccugcccuuccagaacauccaccccaucaccaucggcaagugccccaaguacgugaagagcaccaagcugagacuggccaccggccugagaaacgugcccagcauccagagcagaggccuguucggcgccaucgccggcuucaucgagggcggcuggaccggcaugguggacggcugguacggcuaccaccaccagaacgagcagggcagcggcuacgccgccgaccugaagagcacccagaacgccaucgacaagaucaccaacaaggugaacagcgugaucgacaagaugaacacccaguucaccgccgugggcaaggaguucaaccaccuggagaagagaaucgagaaccugaacaagaagguggacgacggcuuccuggacaucuggaccuacaacgccgagcugcuggugcugcuggagaacgagagaacccuggacuaccacgacagcaacgugaagaaccuguacgagaaggugagaaaccagcugaagaacaacgccaaggagaucggcaacggcugcuucgaguucuaccacaagugcgacaacaccugcauggagagcgugaagaacggcaccuacgacuaccccaaguacagcgaggaggccaagcugaacagagaggagaucgacggcgugaagcuggagagcaccagaaucuaccagauccuggccaucuacagcaccguggccagcagccuggugcugguggugagccugggcgccaucagcuucuggaugugcagcaacggcagccugcagugcagaaucugcaucuga

SEQ ID NO: 171899 - RNA, 1701 nt, Artificial Sequence
  derived and/or modified CDS sequence (opt4) from hemagglutinin__InfluenzaA__AHM98493
augaaggccauccugguggugcugcuguacaccuucgccaccgccaacgccgacacccugugcaucggcuaccacgccaacaacagcaccgacaccguggacaccgugcuggagaagaacgugaccgugacccacagcgugaaccugcuggaggacaagcacaacggcaagcugugcaagcugagaggcguggccccccugcaccugggcaagugcaacaucgccggcuggauccugggcaaccccgagugcgagagccugagcaccgccagcagcuggagcuacaucguggagaccagcagcagcgacaacggcaccugcuaccccggcgacuucaucaacuacgaggagcugagagagcagcugagcagcgugagcagcuucgagagauucgagaucuuccccaagaccagcagcuggcccaaccacgacagcaacaagggcgugaccgccgccugcccccacgccggcgccaagagcuucuacaagaaccugaucuggcuggugaagaagggcaacagcuaccccaagcugagcaagagcuacaucaacgacaagggcaaggaggugcuggugcuguggggcauccaccaccccagcaccagcgccgaccagcagagccuguaccagaacgccgacgccuacguguucgugggcaccagcaaguacagcaagaaguucaagcccgagaucgccgugagacccaaggugagagaccaggagggcagaaugaacuacuacuggacccugguggagcccggcgacaagaucaccuucgaggccaccggcaaccugcuggugcccagauacgccuucgccauggagagaaacgccggcagcggcaucaucaucagcgacacccccgugcacgacugcaacaccaccugccagacccccaagggcgccaucaacaccagccugcccuuccagaacauccaccccaucaccaucggcaaguaccccaaguacgugaagagcaccaagcugagacuggccaccggccugagaaacgugcccagcauccagagcagaggccuguucggcgccaucgccggcuucaucgagggcggcuggaccggcaugguggacggcugguacggcuaccaccaccagaacgagcagggcagcggcuacgccgccgaccugaagagcacccagaacgccaucgacaagaucaccaacaaggugaacagcgugaucgagaagaugaacacccaguucaccgccgugggcaaggaguucaaccaccuggagaagagaaucgagaaccugaacaagaagguggacgacggcuuccuggacaucuggaccuacaacgccgagcugcuggugcugcuggagaacgagagaacccuggacuaccacgacagcaacgugaagaaccuguacgagaaggugagaagccagcugaagaacaacgccaaggagaucggcaacggcugcuucgaguucuaccacaagugcgacaacaccugcauggagagcgugaagaacggcaccuacgacuaccccaaguacagcgaggaggccaagcugaacagagaggagaucgacggcgugaagcuggagagcaccagaaucuaccagauccuggccaucuacagcaccguggccagcagccuggugcugguggugagccugggcgccaucagcuucuggaugugcagcaacggcagccugcagugcagaaucugcaucuga

SEQ ID NO: 171900 - RNA, 1701 nt, Artificial Sequence
  derived and/or modified CDS sequence (opt4) from hemagglutinin__InfluenzaA__AHM98504
augaaggccauccugguggugcugcuguacaccuucgccaccgccaacgccgacacccugugcaucggcuaccacgccaacaacagcaccgacaccguggacaccgugcuggagaagaacgugaccgugacccacagcgugaaccugcuggaggacaagcacaacggcaagcugugcaagcugagaggcguggccccccugcaccugggcaagugcaacaucgccggcuggauccugggcaaccccgagugcgagagccugagcaccgccagcagcuggagcuacaucguggagaccagcagcagcgacaacggcaccugcuaccccggcgacuucaucaacuacgaggagcugagagagcagcugagcagcgugagcagcuucgagagauucgagaucuuccccaagaccagcagcuggcccaaccacgacagcaacaagggcgugaccgccgccugcccccacgccggcgccaagagcuucuacaagaaccugaucuggcuggugaagaagggcaacagcuaccccaagcugagcaagagcuacaucaacgacaagggcaaggaggugcuggugcuguggggcauccaccaccccagcaccaccgccgaccagcagagccuguaccagaacgccgacgccuacguguucgugggcaccagcagauacagcaagaaguucaagcccgagaucgccaucagacccaaggugagagaccaggagggcagaaugaacuacuacuggacccugguggagcccggcgacaagaucaccuucgaggccaccggcaaccugguggugcccagauacgccuucgccauggagagaaacgccggcagcggcaucaucaucagcgacacccccgugcacgacugcaacaccaccugccagacccccaagggcgccaucaacaccagccugcccuuccagaacauccaccccaucaccaucggcaagugccccaaguacgugaagagcaccaagcugagacuggccaccggccugagaaacgugcccagcauccagagcagaggccuguucggcgccaucgccggcuucaucgagggcggcuggaccggcaugguggacggcugguacggcuaccaccaccagaacgagcagggcagcggcuacgccgccgaccugaagagcacccagaacgccaucgacaagaucaccaacaaggugaacagcgugaucgagaagaugaacacccaguucaccgccgugggcaaggaguucaaccaccuggagaagagaaucgagaaccugaacaagaagguggacgacggcuuccuggacaucuggaccuacaacgccgagcugcuggugcugcuggagaacgagagaacccuggacuaccacgacagcaacgugaagaaccuguacgagaaggugagaaaccagcugaagaacaacgccaaggagaucggcaacggcugcuucgaguucuaccacaagugcgacaacaccugcauggagagcgugaagaacggcaccuacgacuaccccaaguacagcaaggaggccaagcugaacagagaggagaucgacggcgugaagcuggagagcaccagaaucuaccagauccuggccaucuacagcaccguggccagcagccuggugcugguggugagccugggcgccaucagcuucuggaugugcagcaacggcagccugcagugcagaaucugcaucuga

SEQ ID NO: 171901 - RNA, 1701 nt, Artificial Sequence; identical to SEQ ID NO: 166514
  derived and/or modified CDS sequence (opt4) from hemagglutinin__InfluenzaA__AHM98515

SEQ ID NO: 171902 - RNA, 1701 nt, Artificial Sequence
  derived and/or modified CDS sequence (opt4) from hemagglutinin__InfluenzaA__AHM98526
augaaggccauccugguggugcugcugcacaccuucgccaccgccaacgccgacacccugugcaucggcuaccacgccaacaacagcaccgacaccguggacaccgugcuggagaagaacgugaccgugacccacagcgugaaccugcuggaggacaagcacaacggcaagcugugcaagcugagaggcguggccccccugcaccugggcaagugcaacaucgccggcuggauccugggcaaccccgagugcgagagccugagcaccgccagcagcuggagcuacaucguggagaccagcagcagcgacaacggcaccugcuaccccggcgacuucaucgacuacgaggagcugagagagcagcugagcagcgugagcagcuucgagagauucgagaucuuccccaagaccagcagcuggcccaaccacgacagcaacaagggcgugaccgccgccugcccccacgccggcgccaagggcuucuacaagaaccugaucuggcuggugaagaagggcaacagcuaccccaagcugagcaagagcuacaucaacgacaagggcaaggaggugcuggugcuguggggcauccaccaccccagcaccaccgccgaccagcagagccuguaccagaacgccgacaccuacguguucgugggcaccagcagauacagcaagaaguucaagcccgagaucgccaucagacccaaggugagagaccaggagggcagaaugaacuacuacuggacccugguggagcccggcgacaagaucaccuucgaggccaccggcaaccugguggugcccagauacgccuucgccauggagagaaacgccggcagcggcaucaucaucagcgacacccccgugcacgacugcaacaccaccugccagacccccaagggcgccaucaacaccagccugcccuuccagaacauccaccccaucaccaucggcaagugccccaaguacgugaagagcaccaagcugagacuggccaccggccugagaaacgugcccagcauccagagcagaggccuguucggcgccaucgccggcuucaucgagggcggcuggaccggcaugguggacggcugguacggcuaccaccaccagaacgagcagggcagcggcuacgccgccgaccugagaagcacccagaacgccaucgacaagaucaccaacaaggugaacagcgugaucgagaagaugaacacccaguucaccgccgugggcaaggaguucaaccaccuggagaagagaaucgagaaccugaacaagaagguggacgacggcuuccuggacaucuggaccuacaacgccgagcugcugauccugcuggagaacgagagaacccuggacuaccacgacagcaacgugaagaaccuguacgagaaggugagaaaccagcugaagaacaacgccaaggagaucggcaacggcugcuucgaguucuaccacaagugcgacaacaccugcauggagagcgugaagaacggcaccuacgacuaccccaaguacagcgaggaggccaagcugaacagagaggagaucgacggcgugaagcuggagagcaccagaaucuaccagauccuggccaucuacagcaccguggccagcagccuggugcugguggugagccugggcgccaucagcuucuggaugugcagcaacggcagccugcagugcagaaucugcaucuga

SEQ ID NO: 171903 - RNA, 1701 nt, Artificial Sequence; identical to SEQ ID NO: 166514
  derived and/or modified CDS sequence (opt4) from hemagglutinin__InfluenzaA__AHM98537

SEQ ID NO: 171904 - RNA, 1701 nt, Artificial Sequence
  derived and/or modified CDS sequence (opt4) from hemagglutinin__InfluenzaA__AHM98548
augaaggccauccugguggugcugcuguacaccuucgccaccgccaacgccgacacccugugcaucggcuaccacgccaacaacagcaccgacaccguggacaccgugcuggagaagaacgugaccgugacccacagcgugaaccugcuggaggacaagcacaacggcaagcugugcaagcugagaggcguggccccccugcaccugggcaagugcaacaucgccggcuggauccugggcaaccccgagugcgagagccugagcaccgccagcagcuggagcuacaucguggagaccagcagcagcgacaacggcaccugcuaccccggcgacuucaucaacuacgaggagcugagagagcagcugagcagcgugagcagcuucgagagauucgagaucuuccccaagaccagcagcuggcccaaccacgacagcaacaagggcgugaccgccgccugcccccacgccggcgccaagagcuucuacaagaaccugaucuggcuggugaagaagggcaacagcuaccccaagcugagcaagagcuacaucaacgacaagggcaaggaggugcuggugcuguggggcauccaccaccccagcaccaccgccgaccagcagagccuguaccagaacgccgacgccuacguguucgugggcaccagcagauacagcaagaaguucaagcccgagaucgccaucagacccaaggugagagaccaggagggcagaaugaacuacuacuggacccugguggagcccggcgacaagaucaccuucgaggccaccggcaaccugguggugcccagauacgccuucgccauggagagaaacgccggcagcggcaucaucaucagcgacacccccgugcacgacugcaacaccaccugccagacccccaagggcgccaucaacaccagccugcccuuccagaacauccaccccgugaccaucggcaagugccccaaguacgugaagagcaccaagcugagacuggccaccggccugagaaacgugcccagcauccagagcagaggccuguucggcgccaucgccggcuucaucgagggcggcuggaccggcaugguggacggcugguacggcuaccaccaccagaacgagcagggcagcggcuacgccgccgaccugaagagcacccagaacgccaucgacaagaucaccaacaaggugaacagcgugaucgagaagaugaacacccaguucaccgccgugggcaaggaguucaaccaccuggagaagagaaucgagaaccugaacaagaagguggacgacggcuuccuggacaucuggaccuacaacgccgagcugcuggugcugcuggagaacgagagaacccuggacuaccacgacagcaacgugaagaaccuguacgagaaggugagaaaccagcugaagaacaacgccaaggagaucggcaacggcugcuucgaguucuaccacaagugcgacaacaccugcauggagagcgugaagaacggcaccuacgacuaccccaaguacagcgaggaggccaagcugaacagagaggagaucgacggcgugaagcuggagagcaccagaaucuaccagauccuggccaucuacagcaccguggccagcagccuggugcugguggugagccugggcgccaucagcuucuggaugugcagcaacggcagccugcagugcagaaucugcaucuga

SEQ ID NO: 171905 - RNA, 1701 nt, Artificial Sequence
  derived and/or modified CDS sequence (opt4) from hemagglutinin__InfluenzaA__AHM98559
augaaggccauccugguggugcugcuguacaccuucgccaccgccaaggccgacacccugugcaucggcuaccacgccaacaacagcaccgacaccguggacaccgugcuggagaagaacgugaccgugacccacagcgugaaccugcuggaggacaagcacaacggcaagcugugcaagcugagaggcguggccccccugcaccugggcaagugcaacaucgccggcuggauccugggcaaccccgagugcgagagccugagcaccgccagcagcuggagcuacaucguggagaccagcagcagcgacaacggcaccugcuaccccggcgacuucaucaacuacgaggagcugagagagcagcugagcagcgugagcagcuucgagagauucgagaucuuccccaagaccagcagcuggcccaaccacgacagcaacaagggcgugaccgccgccugcccccacgccggcgccaagagcuucuacaagaaccugaucuggcuggugaagaagggcaacagcuaccccaagcugagcaagagcuacaucaacgacaagggcaaggaggugcuggugcuguggggcauccaccaccccagcaccaccgccgaccagcagagccuguaccagaacgccgacgccuacguguucgugggcaccagcagauacagcaagaaguucaagcccgagaucgccaucagacccaaggugagagaccaggagggcagaaugaacuacuacuggacccugguggagcccggcgacaagaucaccuucgaggccaccggcaaccugguggugcccagauacgccuucgccauggagagaaacgccggcagcggcaucaucaucagcgacacccccgugcacgacugcaacaccaccugccagacccccaagggcgccaucaacaccagccugcccuuccagaacauccaccccaucaccaucggcaagugccccaaguacgugaagagcaccaagcugagacuggccaccggccugagaaacgugcccagcauccagagcagaggccuguucggcgccaucgccggcuucaucgagggcggcuggaccggcaugguggacggcugguacggcuaccaccaccagaacgagcagggcagcggcuacgccgccgaccugaagagcacccagaacgccaucgacaagaucaccaacaaggugaacagcgugaucgagaagaugaacacccaguucaccgccgugggcaaggaguucaaccaccuggagaagagaaucgagaaccugaacaagaagguggacgacggcuuccuggacaucuggaccuacaacgccgagcugcuggugcugcuggagaacgagagaacccuggacuaccacgacagcaacgugaagaaccuguacgagaaggugagaaaccagcugaagaacaacgccaaggagaucggcaacggcugcuucgaguucuaccacaagugcgacaacaccugcauggagagcgugaagaacggcaccuacgacuaccccaaguacagcgaggaggccaagcugaacagagaggagaucgacggcgugaagcuggagagcaccagaaucuaccagauccuggccaucuacagcaccguggccagcagccuggugcugguggugagccugggcgccaucagcuucuggaugugcagcaacggcagccugcagugcagaaucugcaucuga

SEQ ID NO: 171906 - RNA, 1701 nt, Artificial Sequence; identical to SEQ ID NO: 166884
  derived and/or modified CDS sequence (opt4) from hemagglutinin__InfluenzaA__AHM98570

SEQ ID NO: 171907 - RNA, 1701 nt, Artificial Sequence
  derived and/or modified CDS sequence (opt4) from hemagglutinin__InfluenzaA__AHM98581
augaaggccauccugguggugcugcuguacaccuucgccaccgccaacgccgacacccugugcaucggcuaccacgccaacaacagcaccgacaccguggacaccgugcuggagaagaacgugaccgugacccacagcgugaaccugcuggaggacaagcacaacggcaagcugugcaagcugagaggcguggccccccugcaccugggcaagugcaacaucgccggcuggauccugggcaaccccgagugcgagagccugagcaccgccagaagcuggagcuacaucguggagaccagcagcagcgacaacggcaccugcuaccccggcgacuucaucgacuacgaggagcugagagagcagcugagcagcgugagcagcuucaagagauucgagaucuuccccaagaccagcagcuggcccaaccacgacagcaacaagggcgugaccgccgccugcccccacgccggcgccaagggcuucuacaagaaccugaucuggcuggugaagaagggcaacagcuaccccaagcugagcaagagcuacaucaacgacaagggcaaggaggugcuggugcuguggggcauccaccaccccagcaccaccgccgaccagcagagccuguaccagaacgccgacaccuacguguucgugggcaccagcagauacagcaagaaguucaagcccgagaucgccaucagacccaaggugagagaccaggagggcagaaugaacuacuacuggacccugguggagcccggcgacaagaucaccuucgaggccaccggcaaccugguggugcccagauacgccuucgccauggagagaaacgccggcagcggcaucaucaucagcgacacccccgugcacgacugcaacaccaccugccagacccccaagggcgccaucaacaccagccugcccuuccagaacauccaccccaucaccaucggcaagugccccaaguacgugaagagcaccaagcugagacuggccaccggccugagaaacgugcccagcauccagagcagaggccuguucggcgccaucgccggcuucaucgagggcggcuggaccggcaugguggacggcugguacggcuaccaccaccagaacgagcagggcagcggcuacgccgccgaccugaagagcacccagaacgccaucgacaagaucaccaacaaggugaacagcgugaucgagaagaugaacacccaguucaccgccgugggcaaggaguucaaccaccuggagaagagaaucgagaaccugaacaagaagguggacgacggcuuccuggacaucuggaccuacaacgccgagcugcuggugcugcuggagaacgagagaacccuggacuaccacgacagcaacgugaagaaccuguacgagaaggugagaaaccagcugaagaacaacgccaaggagaucggcaacggcugcuucgaguucuaccacaagugcgacaacaccugcauggagagcgugaagaacggcaccuacgacuaccccaaguacagcgaggaggccaagcugaacagagaggagaucgacggcgugaagcuggagagcaccagaaucuaccagauccuggccaucuacagcaccguggccagcagccuggugcugguggugagccugggcgccaucagcuucuggaugugcagcaacggcagccugcagugcagaaucugcaucuga

SEQ ID NO: 171908 - RNA, 1701 nt, Artificial Sequence; identical to SEQ ID NO: 166884
  derived and/or modified CDS sequence (opt4) from hemagglutinin__InfluenzaA__AHM98592

SEQ ID NO: 171909 - RNA, 1701 nt, Artificial Sequence; identical to SEQ ID NO: 166927
  derived and/or modified CDS sequence (opt4) from hemagglutinin__InfluenzaA__AHM98603

SEQ ID NO: 171910 - RNA, 1701 nt, Artificial Sequence; identical to SEQ ID NO: 166514
  derived and/or modified CDS sequence (opt4) from hemagglutinin__InfluenzaA__AHM98614

SEQ ID NO: 171911 - RNA, 1701 nt, Artificial Sequence; identical to SEQ ID NO: 171891
  derived and/or modified CDS sequence (opt4) from hemagglutinin__InfluenzaA__AHM98625

SEQ ID NO: 171912 - RNA, 1701 nt, Artificial Sequence; identical to SEQ ID NO: 171891
  derived and/or modified CDS sequence (opt4) from hemagglutinin__InfluenzaA__AHM98636

SEQ ID NO: 171913 - RNA, 1701 nt, Artificial Sequence
  derived and/or modified CDS sequence (opt4) from hemagglutinin__InfluenzaA__AHM98647
augaaggccauccugguggugcugcuguacaccuucgccaccgccaaggccgacacccugugcaucggcuaccacgccaacaacagcaccgacaccguggacaccgugcuggagaagaacgugaccgugacccacagcgugaaccugcuggaggacaagcacaacggcaagcugugcaagcugagaggcguggccccccugcaccugggcaagugcaacaucgccggcuggauccugggcaaccccgagugcgagagccugagcaccgccagcagcuggagcuacaucguggagaccagcagcagcgacaacggcaccugcuaccccggcgacuucaucaacuacgaggagcugagagagcagcugagcagcgugagcagcuucgagagauucgagaucuuccccaagaccagcagcuggcccaaccacgacagcaacaagggcgugaccgccgccugcccccacgccggcgccaagagcuucuacaagaaccugaucuggcuggugaagaagggcaacagcuaccccaagcugagccagagcuacaucaacgacaagggcaaggaggugcuggugcuguggggcauccaccaccccagcaccaccgccgaccagcagagccuguaccagaacgccgacgccuacguguucgugggcaccagcagauacagcaagaaguucaagcccgagaucgccaucagacccaaggugagagaccaggagggcagaaugaacuacuacuggacccugguggagcccggcgacaagaucaccuucgaggccaccggcaaccugguggugcccagauacgccuucgccauggagagaaacgccggcagcggcaucaucaucagcgacacccccgugcacgacugcaacaccaccugccagacccccaagggcgccaucaacaccagccugcccuuccagaacauccaccccaucaccaucggcaagugccccaaguacgugaagagcaccaagcugagacuggccaccggccugagaaacgugcccagcauccagagcagaggccuguucggcgccaucgccggcuucaucgagggcggcuggaccggcaugguggacggcugguacggcuaccaccaccagaacgagcagggcagcggcuacgccgccgaccugaagagcacccagaacgccaucgacaagaucaccaacaaggugaacagcgugaucgagaagaugaacacccaguucaccgccgugggcaaggaguucaaccaccuggagaagagaaucgagaaccugaacaagaagguggacgacggcuuccuggacaucuggaccuacaacgccgagcugcuggugcugcuggagaacgagagaacccuggacuaccacgacagcaacgugaagaaccuguacgagaaggugagaaaccagcugaagaacaacgccaaggagaucggcaacggcugcuucgaguucuaccacaagugcgacaacaccugcauggagagcgugaagaacggcaccuacgacuaccccaaguacagcgaggaggccaagcugaacagagaggagaucgacggcgugaagcuggagagcaccagaaucuaccagauccuggccaucuacagcaccguggccagcagccuggugcugguggugagccugggcgccaucagcuucuggaugugcagcaacggcagccugcagugcagaaucugcaucuga

SEQ ID NO: 171914 - RNA, 1701 nt, Artificial Sequence; identical to SEQ ID NO: 166927
  derived and/or modified CDS sequence (opt4) from hemagglutinin__InfluenzaA__AHM98658

SEQ ID NO: 171915 - RNA, 1701 nt, Artificial Sequence; identical to SEQ ID NO: 166884
  derived and/or modified CDS sequence (opt4) from hemagglutinin__InfluenzaA__AHM98669

SEQ ID NO: 171916 - RNA, 1701 nt, Artificial Sequence; identical to SEQ ID NO: 168246
  derived and/or modified CDS sequence (opt4) from hemagglutinin__InfluenzaA__AHM98701

SEQ ID NO: 171917 - RNA, 1701 nt, Artificial Sequence; identical to SEQ ID NO: 168246
  derived and/or modified CDS sequence (opt4) from hemagglutinin__InfluenzaA__AHM98712

SEQ ID NO: 171918 - RNA, 1701 nt, Artificial Sequence
  derived and/or modified CDS sequence (opt4) from hemagglutinin__InfluenzaA__AHM98723
augaaggccauccugguggugcugcuguacaccuucgccaccgccaacgccgacacccugugcaucggcuaccacgccaacaacagcaccgacaccguggacaccgugcuggagaagaacgugaccgugacccacagcgugaaccugcuggaggacaagcacaacggcaagcugugcaagcugagaggcguggccccccugcaccugggcaacugcaacaucgccggcuggauccugggcaaccccgagugcgagagccugagcaccgccagcagcuggagcuacaucguggagaccagcagcagcgacaacggcaccugcuaccccggcgacuucaucaacuacgaggagcugagagagcagcugagcagcgugagcagcuucgagagauucgagauccugcccaagaccagcagcuggcccaaccacgacagcaacaagggcgugaccgccgccugcccccaggccggcgccaagagcuucuacaagaaccugaucuggcuggugaagaagggcaacagcuaccccaagcugagcaagagcuacaucaacgacaagggcaaggaggugcuggugcuguggggcauccaccaccccagcaccagcgccgaccagcagagccuguaccagaacgccgacgccuacguguucgugggcaccagcaaguacagcaagaaguucaagcccgagaucgccgugagacccaaggugagagaccaggagggcagaaugaacuacuacuggacccugaucgagcccggcgacaagaucaccuucgaggccaccggcaaccugcuggugcccagauacgccuucgccauggagagaaacgccggcagcggcaucaucaucagcgacacccccgugcacgacugcaacaccaccugccagacccccaagggcgccaucaacaccagccugcccuuccagaacauccaccccaucaccaucggcaagugccccaaguacgugaagagcaccaagcugagacuggccaccggccugagaaacgugcccagcauccagagcagaggccuguucggcgccaucgccggcuucaucgagggcggcuggaccggcaugguggacggcugguacggcuaccaccaccagaacgcccagggcagcggcuacgccgccgaccugaagagcacccagaacgccaucgacaagaucaccaacaaggugaacagcgugaucgagaagaugaacacccaguucaccgccgugggcaaggaguucaaccaccuggagaagagaaucgagaaccugaacaagaagguggacgacggcuuccuggacaucuggaccuacaacgccgagcugcuggugcugcuggagaacgagagaacccuggacuaccacgacagcaacgugaagaaccuguacgagaaggugagaagccagcugaagaacaacgccaaggagaucggcaacggcugcuucgaguucuaccacaagugcgacaacaccugcauggagagcgugaagaacggcaccuacgacuaccccagauacagcgaggaggccaagcugaacagagaggagaucgacggcgugaagcuggagagcaccagaaucuaccagauccuggccaucuacagcaccguggccagcagccuggugcugaucgugagccugggcgccaucagcuucuggaugugcagcaacggcagccugcagugcagaaucugcaucuga

SEQ ID NO: 171919 - RNA, 1701 nt, Artificial Sequence
  derived and/or modified CDS sequence (opt4) from hemagglutinin__InfluenzaA__AHM98734
augaaggccauccugguggugcugcuguacaccuucgccaccgccaacgccgacacccugugcaucggcuaccacgccaacaacagcaccgacaccguggacaccgugcuggagaagaacgugaccgugacccacagcgugaaccugcuggaggacaagcacaacggcaagcugugcaagcugagaggcguggccccccugcaccugggcaagugcaacaucgccggcuggauccugggcaaccccgagugcgagacccugagcaccgccagcagcuggagcuacaucguggagaccagcaacagcgacaacggcaccugcuaccccggcgacuucaucgacuacgaggagcugagagagcagcugagcagcgugagcagcuucgagagauucgagaucuuccccaagaccagcagcuggcccaaccacgacagcaacaagggcgugaccgccgccugcccccacgccggcagcaagggcuucuacaagaaccugaucuggcuggugaagaagggcaacagcuaccccaagcugagcaagagcuacaucaacgacaagggcaaggaggugcuggugcuguggggcauccaccaccccagcaccaccgccgaccagcagagccuguaccagaacgccgacaccuacguguucgugggcaccagcagauacagcaagaaguucaagcccgagaucgccaucagacccaaggugagagaccaggagggcagaaugaacuacuacuggacccugguggagcccggcgacaagaucaccuucgaggccaccggcaaccugguggugcccagauacgccuucgccauggagagagacgccggcagcggcaucaucaucagcgacacccccgugcacgacugcaacaccaccugccagacccccaagggcgccaucaacaccagccugcccuuccagaacauccaccccaucaccaucggcaagugccccaaguacgugaagagcaccaagcugagacuggccaccggccugagaaacgugcccagcauccagagcagaggccuguucggcgccaucgccggcuucaucgagggcggcuggaccggcaugguggacggcugguacggcuaccaccaccagaacgagcagggcagcggcuacgccgccgaccugaagagcacccagaacgccaucgacaagaucaccaacaaggugaacagcgugaucgagaagaugaacacccaguucaccgccgugggcaaggaguucaaccaccuggagaagagaaucgagaaccugaacaagaagguggacgacggcuuccuggacaucuggaccuacaacgccgagcugcuggugcugcuggagaacgagagaacccuggacuaccacgacagcaacgugaagaaccuguacgagaaggugagaaaccagcugaagaacaacgccaaggagaucggcaacggcugcuucgaguucuaccacaagugcgacaacaccugcauggagagcgugaagaacggcaccuacgacuaccccaaguacagcgaggaggccaagcugaacagagaggagaucgacggcgugaagcuggagagcaccagaaucuaccagauccuggccaucuacagcaccgccgccagcagccuggugcugguggugagccugggcgccaucagcuucuggaugugcagcaacggcagccugcagugcagaaucugcaucuga

SEQ ID NO: 171920 - RNA, 1701 nt, Artificial Sequence; identical to SEQ ID NO: 168246
  derived and/or modified CDS sequence (opt4) from hemagglutinin__InfluenzaA__AHM98745

SEQ ID NO: 171921 - RNA, 1701 nt, Artificial Sequence
  derived and/or modified CDS sequence (opt4) from hemagglutinin__InfluenzaA__AHM98756
augaaggccauccugguggugcugcuguacaccuucgccaccgccaacgccgacacccugugcaucggcuaccacgccaacaacagcaccgacaccguggacaccgugcuggagaagaacgugaccgugacccacagcgugaaccugcuggaggacaagcacaacggcaagcugugcaagcugagaggcguggccccccugcaccugggcaagugcaacaucgccggcuggauccugggcaaccccgagugcgagacccugagcaccgccagcagcuggagcuacaucguggagaccagcagcagcgacaacggcaccugcuaccccggcgacuucaucgacuacgaggagcugagagagcagcugagcagcgugagcagcuucgagagauucgagaucuuccccaagaccagcagcuggcccaaccacgacagcaacaagggcgugaccgccgccugcccccacgccggcgccaagggcuucuacaagaaccugaucuggcuggugaagaagggcaacagcuaccccaagcugagcaagagcuacaucaacgacaagggcaaggaggugcuggugcuguggggcauccaccaccccagcaccaccgccgaccagcagagccuguaccagaacgccgacaccuacguguucgugggcaccagcagauacagcaagaaguucaagcccgagaucgccaucagacccaaggugagagaccaggagggcagaaugaacuacuacuggacccugguggagcccggcgacaagaucaccuucgaggccaccggcaaccugguggugcccagauacgccuucgccauggagagagacgccggcagcggcaucaucaucagcgacacccccgugcacgacugcaacaccaccugccagacccccaagggcgccaucaacaccagccugcccuuccagaacauccaccccaucaccaucggcaagugccccaaguacgugaagagcaccaagcugagacuggccaccggccugagaaacgugcccagcauccagagcagaggccuguucggcgccaucgccggcuucaucgagggcggcuggaccggcaugguggacggcugguacggcuaccaccaccagaacgagcagggcagcggcuacgccgccgaccugaagagcacccagaacgccaucgacaagaucaccaacaaggugaacagcgugaucgugaagaugaacacccaguucaccgccgugggcaaggaguucaaccaccuggagaagagaaucgagaaccugaacaagaagguggacgacggcuuccuggacaucuggaccuacaacgccgagcugcuggugcugcuggagaacgagagaacccuggacuaccacgacagcaacgugaagaaccuguacgagaaggugagaaaccagcugaagaacaacgccaaggagaucggcaacggcugcuucgaguucuaccacaagugcgacaacaccugcauggagagcgugaagaacggcaccuacgacuaccccaaguacagcgaggaggccaagcugaacagagaggagaucgacggcgugaagcuggagagcaccagaaucuaccagauccuggccaucuacagcaccgccgccagcagccuggugcugguggugagccugggcgccaucagcuucuggaugugcagcaacggcagccugcagugcagaaucugcaucuga

SEQ ID NO: 171922 - RNA, 1701 nt, Artificial Sequence; identical to SEQ ID NO: 168246
  derived and/or modified CDS sequence (opt4) from hemagglutinin__InfluenzaA__AHM98767

SEQ ID NO: 171923 - RNA, 1701 nt, Artificial Sequence
  derived and/or modified CDS sequence (opt4) from hemagglutinin__InfluenzaA__AHM98778
augaaggccauccugguggugcugcuguacaccuucgccaccgccaacgccgacacccugugcaucggcuaccacgccaacaacagcaccgacaccguggacaccgugcuggagaagaacgugaccgugacccacagcgugaaccugcuggaggacaagcacaacagaaagcugugcaagcugagaggcguggccccccugcaccugggcaagugcaacaucgccggcuggauccugggcaaccccgagugcgagagccugagcaccgccagcagcuggagcuacaucguggagaccagcagcagcgacaacggcaccugcuaccccggcgacuucaucaacuacgaggagcugagagagcagcugagcagcgugagcagcuucgagagauucgagaucuuccccaagaccagcagcuggcccaaccacgacagcaacaagggcgugaccgccgccugccccagagccggcgccaagagcuucuacaagaaccugaucuggcuggugaagaagggcaacagcuaccccaagcugagcaagagcuacaucaacgacaagggcaaggaggugcuggugcuguggggcauccaccaccccagcaccaccgccgaccagcagagccuguaccagaacgccgacgccuacguguucgugggcaccagcagauacagcaagaaguucaagcccgagaucgccaucagacccaaggugagagaccaggagggcagaaugaacuacuacuggacccugguggagcccggcgacaagaucaccuucgaggccaccggcaaccugcuggugcccagauacgccuucgccauggagagaaacgccggcagcggcaucaucaucagcgacacccccgugcacgacugcaacaccaccugccagacccccaagggcgccaucaacaccagccugcccuuccagaacauccaccccaucaccaucggcaagugccccaaguacgugaagagcaccaagcugagacuggccaccggccugagaaacgugcccagcauccagagcagaggccuguucggcgccaucgccggcuucaucgagggcggcuggaccggcaugguggacggcugguacggcuaccaccaccagaacgagcagggcagcggcuacgccgccgaccugaagagcacccagaacgccaucgacaagaucaccaacaaggugaacagcgugaucgagaagaugaacacccaguucaccgccgugggcaaggaguucaaccaccuggagaagagaaucgagaaccugaacaagaagguggacgacggcuuccuggacaucuggaccuacaacgccgagcugcuggugcugcuggagaacgagagaacccuggacuaccacgacagcaacgugaagaaccuguacgagaaggugagaaaccagcugaagaacaacgccaaggagaucggcaacggcugcuucgaguucuaccacaagugcgacaacaccugcauggagagcgugaagaacggcaccuacgacuaccccaaguacagcgaggaggccaagcugaacagagaggagaucgacggcgugaagcuggagagcaccagaaucuaccagauccuggccaucuacagcaccguggccagcagccuggugcugguggugagccugggcgccaucagcuucuggaugugcagcaacggcagccugcagugcagaaucugcaucuga

SEQ ID NO: 171924 - RNA, 1701 nt, Artificial Sequence; identical to SEQ ID NO: 167110
  derived and/or modified CDS sequence (opt4) from hemagglutinin__InfluenzaA__AHM98798

SEQ ID NO: 171925 - RNA, 1701 nt, Artificial Sequence; identical to SEQ ID NO: 166884
  derived and/or modified CDS sequence (opt4) from hemagglutinin__InfluenzaA__AHM98809

SEQ ID NO: 171926 - RNA, 1701 nt, Artificial Sequence; identical to SEQ ID NO: 166884
  derived and/or modified CDS sequence (opt4) from hemagglutinin__InfluenzaA__AHM98820

SEQ ID NO: 171927 - RNA, 1701 nt, Artificial Sequence; identical to SEQ ID NO: 166884
  derived and/or modified CDS sequence (opt4) from hemagglutinin__InfluenzaA__AHM98831

SEQ ID NO: 171928 - RNA, 1701 nt, Artificial Sequence
  derived and/or modified CDS sequence (opt4) from hemagglutinin__InfluenzaA__AHM98836
augaaggccauccugguggugaugcuguacaccuucgccaccgccaacgccgacacccugugcaucggcuaccacgccaacaacagcaccgacaccguggacaccgugcuggagaagaacgugaccgugacccacagcgugaaccugcuggaggacaagcacaacggcaagcugugcaagcugagaggcguggccccccugcaccugggcaagugcaacaucgccggcuggauccugggcaaccccgagugcgagagccugagcaccgccagcagcuggagcuacaucguggagaccagcagcagcgacaacggcaccugcuaccccggcgacuucaucgacuacgaggagcugagagagcagcugagcagcgugagcagcuucgagagauucgagaucuuccccaagaccagcagcuggcccaaccacgacagcaacaagggcgugaccgccgccugcccccacgccggcgccaagggcuucuacaagaaccugaucuggcuggugaagaagggcaacagcuaccccaagcugagcaagagcuacaucaacgacaagggcaaggaggugcuggugcuguggggcauccaccaccccagcaccaccgccgaccagcagagccuguaccagaacgccgacaccuacguguucgugggcaccagcagauacagcaagaaguucaagcccgagaucgccaucagacccaaggugagagaccaggagggcagaaugaacuacuacuggauccugguggagcccggcgacaagaucaccuucgaggccaccggcaaccugguggugcccagauacgccuucgccauggagagaaacgccggcagcggcaucaucaucagcgacacccccgugcacgacugcaacaccaccugccagacccccaagggcgccaucaacaccagccugcccuuccagaacauccaccccaucaccaucggcaagugccccaaguacgugaagagcaccaagcugagacuggccaccggccugagaaacgugcccagcauccagagcagaggccuguucggcgccaucgccggcuucaucgagggcggcuggaccggcaugguggacggcugguacggcuaccaccaccagaacgagcagggcagcggcuacgccgccgaccugaagagcacccagaacgccaucgacaagaucaccaacaaggugaacagcgugaucgagaagaugaacacccaguucaccgccgugggcaaggaguucaaccaccuggagaagagaaucgagaaccugaacaagaagguggacgacggcuuccuggacaucuggaccuacaacgccgagcugcuggugcugcuggagaacgagagaacccuggacuaccacgacagcaacgugaagaaccuguacgagaaggugagaaaccagcugaagaacaacgccaaggagaucggcaacggcugcuucgaguucuaccacaagugcgacaacaccugcauggagagcgugaagaacggcaccuacgacuaccccaaguacagcgaggaggccaagcugaacagagaggagaucgacggcgugaagcuggagagcaccagaaucuaccagauccuggccaucuacagcaccguggccagcagccuggugcugguggugagccugggcgccaucagcuucuggaugugcagcaacggcagccugcagugcagaaucugcaucuga

SEQ ID NO: 171929 - RNA, 1701 nt, Artificial Sequence
  derived and/or modified CDS sequence (opt4) from hemagglutinin__InfluenzaA__AHM98847
augaaggccauccugguggugaugcuguacaccuucgccaccgccaacgccgacacccugugcaucggcuaccacgccaacaacagcaccgacaccguggacaccgugcuggagaagaacgugaccgugacccacagcgugaaccugcuggaggacaagcacgacggcaagcugugcaagcugagaggcguggccccccugcaccugggcaagugcaacaucgccggcuggauccugggcaaccccgagugcgagagccugagcaccgccagcagcuggagcuacaucguggagaccagcagcagcgacaacggcaccugcuaccccggcgacuucaucgacuacgaggagcugagagagcagcugagcagcgugagcagcuucgagagauucgagaucuuccccaagaccagcagcuggcccaaccacgacagcaacaagggcgugaccgccgccugcccccacgccggcgccaagggcuucuacaagaaccugaucuggcuggugaagaagggcaacagcuaccccaagcugagcaagagcuacaucaacgacaagggcaaggaggugcuggugcuguggggcauccaccaccccagcaccaccgccgaccagcagagccuguaccagaacgccgacaccuacguguucgugggcaccagcagauacagcaagaaguucaagcccgagaucgccaucagacccaaggugagagaccaggagggcagaaugaacuacuacuggacccugguggagcccggcgacaagaucaccuucgaggccaccggcaaccugguggugcccagauacgccuucgccauggagagaaacgccggcagcggcaucaucaucagcgacacccccgugcacgacugcaacaccaccugccagacccccaagggcgccaucaacaccagccugcccuuccagaacauccaccccaucaccaucggcaagugccccaaguacgugaagagcaccaagcugagacuggccaccggccugagaaacgugcccagcauccagagcagaggccuguucggcgccaucgccggcuucaucgagggcggcuggaccggcaugguggacggcugguacggcuaccaccaccagaacgagcagggcagcggcuacgccgccgaccugaagagcacccagaacgccaucgacaagaucaccaacaaggugaacagcgugaucgagaagaugaacacccaguucaccgccgugggcaaggaguucaaccaccuggagaagagaaucgagaaccugaacaagaagguggacgacggcuuccuggacaucuggaccuacaacgccgagcugcuggugcugcuggagaacgagagaacccuggacuaccacgacagcaacgugaagaaccuguacgagaaggugagaaaccagcugaagaacaacgccaaggagaucggcaacggcugcuucgaguucuaccacaagugcgacaacaccugcauggagagcgugaagaacggcaccuacgacuaccccaaguacagcgaggaggccaagcugaacagagaggagaucgacggcgugaagcuggagagcaccagaaucuaccagauccuggccaucuacagcaccguggccagcagccuggugcugguggugagccugggcgccaucagcuucuggaugugcagcaacggcagccugcagugcagaaucugcaucuga

SEQ ID NO: 171930 - RNA, 1701 nt, Artificial Sequence; identical to SEQ ID NO: 166884
  derived and/or modified CDS sequence (opt4) from hemagglutinin__InfluenzaA__AHM98858

SEQ ID NO: 171931 - RNA, 1701 nt, Artificial Sequence; identical to SEQ ID NO: 166927
  derived and/or modified CDS sequence (opt4) from hemagglutinin__InfluenzaA__AHM98877

SEQ ID NO: 171932 - RNA, 1701 nt, Artificial Sequence
  derived and/or modified CDS sequence (opt4) from hemagglutinin__InfluenzaA__AHM98898
augaaggccauccugguggugcugcuguacaccuucgccaccgccaacgccgacacccugugcaucggcuaccacgccaacaacagcaccgacaccguggacaccgugcuggagaagaacgugaccgugacccacagcgugaaccugcuggaggacaaccacaacggcaagcugugcaagcugagaggcguggccccccugcaccugggcaagugcaacaucgccggcuggauccugggcaaccccgagugcgagagccugagcaccgccagcagcuggagcuacaucguggagaccagcagcagcgacaacggcaccugcuaccccggcgacuucaucaacuacgaggagcugagagagcagcugagcagcgugagcagcuucgagagauucgagaucuuccccaagaccagcagcuggcccaaccacgacagcaacaagggcgugaccgccgccugcccccacgccggcgccaagagcuucuacaagaaccugaucuggcuggugaagaagggcaacagcuaccccaagcugagcaagagcuacaucaacgacaagggcaaggaggugcuggugcuguggggcauccaccaccccagcaccaccgccgaccagcagagccuguaccagaacgccgacgccuacguguucgugggcaccagcagauacagcaagaaguucaagcccgagaucgccaucagacccaaggugagagaccaggagggcagaaugaacuacuacuggacccugguggagcccggcgacaagaucaccuucgaggccaccggcaaccugguggugcccagauacgccuucgccauggagagaaacgccggcagcggcaucaucaucagcgacacccccgugcacgacugcaacaccaccugccagacccccaagggcgccaucaacaccagccugcccuuccagaacauccaccccaucaccaucggcaagugccccaaguacgugaagagcaccaagcugagacuggccaccggccugagaaacgugcccagcauccagagcagaggccuguucggcgccaucgccggcuucaucgagggcggcuggaccggcaugguggacggcugguacggcuaccaccaccagaacgagcagggcagcggcuacgccgccgaccugaagagcacccagaacgccaucgacaagaucaccaacaaggugaacagcgugaucgagaagaugaacacccaguucaccgccgugggcaaggaguucaaccaccuggagaagagaaucgagaaccugaacaagaagguggacgacggcuuccuggacaucuggaccuacaacgccgagcugcuggugcugcuggagaacgagagaacccuggacuaccacgacagcaacgugaagaaccuguacgagaaggugagaaaccagcugaagaacaacgccaaggagaucggcaacggcugcuucgaguucuaccacaagugcgacaacaccugcauggagagcgugaagaacggcaccuacgacuaccccaaguacagcgaggaggccaagcugaacagagaggagaucgacggcgugaagcuggagagcaccagaaucuaccagauccuggccaucuacagcaccguggccagcagccuggugcugguggugagccugggcgccaucagcuucuggaugugcagcaacggcagccugcagugcagaaucugcaucuga

SEQ ID NO: 171933 - RNA, 1701 nt, Artificial Sequence; identical to SEQ ID NO: 170510
  derived and/or modified CDS sequence (opt4) from hemagglutinin__InfluenzaA__AHM98909

SEQ ID NO: 171934 - RNA, 1701 nt, Artificial Sequence
  derived and/or modified CDS sequence (opt4) from hemagglutinin__InfluenzaA__AHM98932
augaaggccauccugguggugcugcuguacaccuucgccaccgccaacgccgacacccugugcaucggcuaccacgccaacaacagcaccgacaccguggacaccgugcuggagaagaacgugaccgugacccacagcgugaaccugcuggaggacaagcacaacggcaagcugugcaagcugggcggcguggccccccugcaccugggcaagugcaacaucgccggcuggauccugggcaaccccgagugcgagagccugagcaccgccagcagcuggagcuacaucguggagaccagcagcagcgacaacggcaccugcuaccccggcgacuucaucgacuacgaggagcugagagagcagcugagcagcgugagcagcuucgagagauucgagaucuuccccaagaccagcagcuggcccaaccacgacagcaacaagggcgugaccgccgccugcccccacgccggcgccaagagcuucuacaagaaccugaucuggcuggugaagaagggcgacagcuaccccaagcugagcaagagcuacaucaacgacaagggcaaggaggugcuggugcuguggggcauccaccaccccagcaccagcgccgaccagcagagccuguaccagaacgccgacgccuacguguucgugggcagcagcagauacagcaagaaguucaagcccgagaucgccaucagacccaaggugagagacagagagggcagaaugaacuacuacuggacccugguggagcccggcgacaagaucaccuucgaggccaccggcaaccugguggugcccagauacgccuucgccauggagagaaacgccggcagcggcaucaucaucagcgacacccccgugcacgacugcaacaccaccugccagacccccaagggcgccaucaacaccagccugcccuuccagaacauccaccccaucaccaucggcaagugccccaaguacgugaagagcaccaagcugagacuggccaccggccugagaaacgugcccagcauccagagcagaggccuguucggcgccaucgccggcuucaucgagggcggcuggaccggcaugguggacggcugguacggcuaccaccaccagaacgagcagggcagcggcuacgccgccgaccugaagagcacccagaacgccaucgacgagaucaccaacaaggugaacagcgugaucgagaagaugaacacccaguucaccgccgugggcaaggaguucaaccaccuggagaagagaaucgagaaccugaacaagaagguggacgacggcuuccuggacaucuggaccuacaacgccgagcugcuggugcugcuggagaacgagagaacccuggacuaccacgacagcaacgugaagaaccuguacgagaaggugagaagccagcugaagaacaacgccaaggagaucggcaacggcugcuucgaguucuaccacaagugcgacaacaccugcauggagagcgugaagaacggcaccuacgacuaccccaaguacagcgaggaggccaagcugaacagagaggagaucgacggcgugaagcuggagagcaccagaaucuaccagauccuggccaucuacagcaccguggccagcagccuggugcugguggugagccugggcgccaucagcuucuggaugugcagcaacggcagccugcagugcagaaucugcaucuga

SEQ ID NO: 171935 - RNA, 1701 nt, Artificial Sequence; identical to SEQ ID NO: 171934
  derived and/or modified CDS sequence (opt4) from hemagglutinin__InfluenzaA__AHM98940

SEQ ID NO: 171936 - RNA, 1701 nt, Artificial Sequence; identical to SEQ ID NO: 171934
  derived and/or modified CDS sequence (opt4) from hemagglutinin__InfluenzaA__AHM98951

SEQ ID NO: 171937 - RNA, 1701 nt, Artificial Sequence
  derived and/or modified CDS sequence (opt4) from hemagglutinin__InfluenzaA__AHM98975
augaaggccauccugguggugcugcuguacaccuucgccaccgccaacgccgacacccugugcaucggcuaccacgccaacaacagcaccgacaccguggacaccgugcuggagaagaacgugaccgugacccacagcgugaaccugcuggaggacaagcacaacggcaagcugugcaagcugagaggcguggccccccugcaccugggcaagugcaacaucgccggcuggauccugggcaaccccgagugcgagagccugagcaccgccagcagcuggagcuacaucguggagaccagcagcagcgacaacggcaccugcuaccccggcgacuucaucgacuacgaggagcugagagagcagcugagcagcgugagcagcuucgagagauucgagaucuuccccaagaccagcagcuggcccaaccacgagagcaacaagggcgugaccgccgccugcccccacgccggcgccaagagcuucuacaagaaccugaucuggcuggugaagaagggcaacagcuaccccaagcugagcaagagcuacaucaacgacaagggcaaggaggugcuggugcuguggggcauccaccaccccagcaccagcgccgaccagcagagccuguaccagaacgccgacgccuacguguucgugggcagcagcagauacagcaagaaguucaagcccgagaucgccaucagacccaaggugagagaccaggagggcagaaugaacuacuacuggacccugguggagcccggcgacaagaucaccuucgaggccaccggcaaccugguggugcccagauacgccuucgccauggagagaaacgccggcagcggcaucaucaucagcgacacccccgugcacgacugcaacaccaccugccagacccccaagggcgccaucaacaccagccugcccuuccagaacauccaccccaucaccaucggcaagugccccaaguacgugaagagcaccaagcugagacuggccaccggccugagaaacgugcccagcauccagagcagaggccuguucggcgccaucgccggcuucaucgagggcggcuggaccggcaugguggacggcugguacggcuaccaccaccagaacgagcagggcagcggcuacgccgccgaccugaagagcacccagaacgccaucgacgagaucaccaacaaggugaacagcgugaucgagaagaugaacacccaguucaccgccgugggcaaggaguucaaccaccuggagaagagaaucgagaaccugaacaagaagguggacgacggcuuccuggacaucuggaccuacaacgccgagcugcuggugcugcuggagaacgagagaacccuggacuaccacgacagcaacgugaagaaccuguacgagaaggugagaagccagcugaagaacaacgccaaggagaucggcaacggcugcuucgaguucuaccacaagugcgacaacaccugcauggagagcgugaagaacggcaccuacgacuaccccaaguacagcgaggaggccaagcugaacagagaggagaucgacggcgugaagcuggagagcaccagaaucuaccagauccuggccaucuacagcaccguggccagcagccuggugcugguggugagccugggcgccaucagcuucuggaugugcagcaacggcagccugcagugcagaaucugcaucuga

SEQ ID NO: 171938 - RNA, 1701 nt, Artificial Sequence
  derived and/or modified CDS sequence (opt4) from hemagglutinin__InfluenzaA__AHM98997
augaaggccauccugguggugcugcuguacaccuucgccaccgccaacgccgacacccugugcaucggcuaccacgccaacaacagcaccgacaccguggacaccgugcuggagaagaacgugaccgugacccacagcgugaaccugcuggaggacaagcacaacggcaagcugugcaagcugagaggcguggccccccugcaccugggcaagugcaacaucgccggcuggauccugggcaaccccgagugcgagagccugagcaccgccagcagcuggagcuacaucguggagaccagcagcagcgacaacggcaccugcuaccccggcgacuucaucgacuacgaggagcugagagagcagcugagcagcgugagcagcuucgagagauucgagaucuuccccaagaccagcagcuggcccaaccacgacagcaacaagggcgugaccgccgccugcccccacgccggcgccaagagcuucuacaagaaccugaucuggcuggugaagaagggcgacagcuaccccaagcugagcaagagcuacaucaacgacaagggcaaggaggugcuggugcuguggggcauccaccaccccagcaccagcgccgaccagcagagccuguaccagaacgccgacgccuacguguucgugggcagcagcagauacagcaagaaguucaagcccgagaucgccaucagacccaaggugagaggccaggagggcagaaugaacuacuacuggacccugguggagcccggcgacaagaucaccuucgaggccaccggcaaccugguggugcccagauacgccuucgccauggagagaaacgccggcagcggcaucaucaucagcgacacccccgugcacgacugcaacaccaccugccagacccccaagggcgccaucaacaccagccugcccuuccagaacauccaccccaucaccaucggcaagugccccaaguacgugaagagcaccaagcugagacuggccaccggccugagaaacgugcccagcauccagagcagaggccuguucggcgccaucgccggcuucaucgagggcggcuggaccggcaugguggacggcugguacggcuaccaccaccagaacgagcagggcagcggcuacgccgccgaccugaagagcacccagaacgccaucgacgagaucaccaacaaggugaacagcgugaucgagaagaugaacacccaguucaccgccgugggcaaggaguucaaccaccuggagaagagaaucgagaaccugaacaagaagguggacgacggcuuccuggacaucuggaccuacaacgccgagcugcuggugcugcuggagaacgagagaacccuggacuaccacgacagcaacgugaagaaccuguacgagaaggugagaagccagcugaagaacaacgccaaggagaucggcaacggcugcuucgaguucuaccacaagugcgacaacaccugcauggagagcgugaagaacggcaccuacgacuaccccaaguacagcgaggaggccaagcugaacagagaggagaucgacggcgugaagcuggagagcaccagaaucuaccagauccuggccaucuacagcaccguggccagcagccuggugcugguggugagccugggcgccaucagcuucuggaugugcagcaacggcagccugcagugcagaaucugcaucuga

SEQ ID NO: 171939 - RNA, 1701 nt, Artificial Sequence
  derived and/or modified CDS sequence (opt4) from hemagglutinin__InfluenzaA__AHM99019
augaaggccauccugguggugcugcuguacaccuucgccaccgccaacgccgacacccugugcaucggcuaccacgccaacaacagcaccgacaccguggacaccgugcuggagaagaacgugaccgugacccacagcgugaaccugcuggaggacaagcacaacggcaagcugugcaagcugaagggcguggccccccugcaccugggcaagugcaacaucgccggcuggauccugggcaaccccgagugcgagagccugagcaccgccagcagcuggagcuacaucguggagaccagcagcagcgacaacggcaccugcuaccccggcgacuucaucgacuacgaggagcugagagagcagcugagcagcgugagcagcuucgagagauucgagaucuuccccaagaccagcagcuggcccaaccacgacagcaacaagggcgugaccgccgccugcccccacgccggcgccaagagcuucuacaagaaccugaucuggcuggugaagaagggcgacagcuaccccaagcugagcaagagcuacaucaacgacaagggcaaggaggugcuggugcuguggggcauccaccaccccagcaccagcgccgaccagcagagccuguaccagaacgccgacgccuacguguucgugggcagcagcagauacagcaagaaguucaagcccgagaucgccaucagacccaaggugagaggccaggagggcagaaugaacuacuacuggacccugguggagcccggcgacaagaucaccuucgaggccaccggcaaccugguggugcccagauacgccuucgccauggagagaaacgccggcagcggcaucaucaucagcgacacccccgugcacgacugcaacaccaccugccagacccccaagggcgccaucaacaccagccugcccuuccagaacauccaccccaucaccaucggcaagugccccaaguacgugaagagcaccaagcugagacuggccaccggccugagaaacgugcccagcauccagagcagaggccuguucggcgccaucgccggcuucaucgagggcggcuggaccggcaugguggacggcugguacggcuaccaccaccagaacgagcagggcagcggcuacgccgccgaccugaagagcacccagaacgccaucgacgagaucaccaacaaggugaacagcgugaucgagaagaugaacacccaguucaccgccgugggcaaggaguucaaccaccuggagaagagaaucgagaaccugaacaagaagguggacgacggcuuccuggacaucuggaccuacaacgccgagcugcuggugcugcuggagaacgagagaacccuggacuaccacgacagcaacgugaagaaccuguacgagaaggugagaagccagcugaagaacaacgccaaggagaucggcaacggcugcuucgaguucuaccacaagugcgacaacaccugcauggagagcgugaagaacggcaccuacgacuaccccaaguacagcgaggaggccaagcugaacagagaggagaucgacggcgugaagcuggagagcaccagaaucuaccagauccuggccaucuacagcaccguggccagcagccuggugcugguggugagccugggcgccaucagcuucuggaugugcagcaacggcagccugcagugcagaaucugcaucuga

SEQ ID NO: 171940 - RNA, 1701 nt, Artificial Sequence; identical to SEQ ID NO: 171939
  derived and/or modified CDS sequence (opt4) from hemagglutinin__InfluenzaA__AHM99031

SEQ ID NO: 171941 - RNA, 1701 nt, Artificial Sequence; identical to SEQ ID NO: 171939
  derived and/or modified CDS sequence (opt4) from hemagglutinin__InfluenzaA__AHM99043

SEQ ID NO: 171942 - RNA, 1701 nt, Artificial Sequence; identical to SEQ ID NO: 171939
  derived and/or modified CDS sequence (opt4) from hemagglutinin__InfluenzaA__AHM99054

SEQ ID NO: 171943 - RNA, 1701 nt, Artificial Sequence; identical to SEQ ID NO: 171939
  derived and/or modified CDS sequence (opt4) from hemagglutinin__InfluenzaA__AHM99065

SEQ ID NO: 171944 - RNA, 1701 nt, Artificial Sequence
  derived and/or modified CDS sequence (opt4) from hemagglutinin__InfluenzaA__AHM99075
augaaggccauccugguggugcugcuguacaccuucgccaccgccaacgccgacacccugugcaucggcuaccacgccaacaacagcaccgacaccguggacaccgugcuggagaagaacgugaccgugacccacagcgugaaccugcuggaggacaagcacaacggcaagcugugcaagcugagaggcguggccccccugcaccugggcaagugcaacaucgccggcuggauccugggcaaccccgagugcgagagccugagcaccgccagcagcuggagcuacaucguggagaccagcagcagcgacaacggcaccugcuaccccggcgacuucaucgacuacgaggagcugagagagcagcugagcagcgugagcagcuucgagagauucgagaucuuccccaagaccagcagcuggcccaaccacgacagcaacaagggcgugaccgccgccugcccccacgccggcgccaagagcuucuacaagaaccugaucuggcuggugaagaagggcgacagcuaccccaagcugagcaagagcuacaucaacgacaagggcaaggaggugcuggugcuguggggcauccaccaccccagcaccagcgccgaccagcagagccuguaccagaacgccgacgccuacguguucgugggcagcagcagauacagcaagaaguucaagcccgagaucgccaucagacccaaggugagagaccaggagggcagaaugaacuacuacuggacccugguggagcccggcgacaagaucaccuucgaggccaccggcaaccugguggugcccagauacgccuucgccauggagagaaacgccggcagcggcaucaucaucagcgacacccccgugcacgacugcaacaccaccugccagacccccaagggcgccaucaacaccagccugcccuuccagaacauccaccccaucaccaucggcaagugccccaaguacgugaagagcaccaagcugagacuggccaccggccugagaaacgugcccagcauccagagcagaggccuguucggcgccaucgccggcuucaucgagggcggcuggaccggcaugguggacggcugguacggcuaccaccaccagaacgagcagggcagcggcuacgccgccgaccugaagagcacccagaacgccaucgacgagaucaccaacaaggugaacagcgugaucgagaagaugaacacccaguucaccgccgugggcaaggaguucaaccaccuggagaagagaaucgagaaccugaacaagaagguggacgacggcuuccuggacaucuggaccuacaacgccgagcugcuggugcugcuggagaacgagagaacccuggacuaccacgacagcaacgugaagaaccuguacgagaaggugagaagccagcugaagaacaacgccaaggagaucggcaacggcugcuucgaguucuaccacaagugcgacaacaccugcauggagagcgugaagaacggcaccuacgacuaccccaaguacagcgaggaggccaagcugaacagagaggagaucgacggcgugaagcuggagagcaccagaaucuaccagauccuggccaucuacagcaccguggccagcagccuggugcugguggugagccugggcgccaucagcuucuggaugugcagcaacggcagccugcagugcagaaucugcaucuga

SEQ ID NO: 171945 - RNA, 1701 nt, Artificial Sequence
  derived and/or modified CDS sequence (opt4) from hemagglutinin__InfluenzaA__AHN00717
augaaggccauccugcuggugcugcugugcaccuucgccgccaccaacgccgacacccugugcaucggcuaccacgccaacaacagcaccgacaccguggacaccgugcuggagaagaacgugaccgugacccacagcgugaaccugcuggaggacagacacaacggcaagcugugcaagcugggcggcaucgccccccugcaccugggcaagugcaacaucgccggcuggcugcugggcaaccccgagugcgagcugcuguucaccgugagcagcuggagcuacaucguggagaccagcaacagcgacaacggcaccugcuaccccggcgacuucaucaacuacgaggagcugagagagcagcugagcagcgugagcagcuucgagagauucgagaucuuccccaagaccagcagcuggcccaaccacgagaccaacagaggcgugaccgccgccugccccuacgccggcgccaacagcuucuacagaaaccugaucuggcuggugaagaagggcaacagcuaccccaagcugagcaagagcuacgugaacaacaagggcaaggaggugcuggugcuguggggcauccaccacccccccaccagcaccgaccagcagagccuguaccagaacgccgacgccuacguguucgugggcagcagcaaguacaacagaaaguucaagcccgagaucgccgccagacccaaggugagaggccaggccggcagaaugaacuacuacuggacccugaucgagcccggcgacaccaucaccuucgaggccaccggcaaccugguggugcccagauacgccuucgccaugaacagaggccccggcagcggcaucaucaucagcgacgcccccgugcacgacugcaacaccaccugccagacccccaagggcgccaucaacaccagccugcccuuccagaacauccaccccgugaccaucggcgagugccccaaguacgugaagagcaccaagcugagaauggccaccggccugagaaacauccccagcauccagagcagaggccuguucggcgccaucgccggcuucaucgagggcggcuggaccggcaugaucgacggcugguacggcuaccaccaccagaacgagcagggcagcggcuacgccgccgaccagaagagcacccagaacgccaucgacggcaucaccaacaaggugaacagcgugaucaagaagaugaacacccaguucaccgccgugggcaaggaguucaaccaccuggagaagagaaucgagaaccugaacaagaagguggacgacggcuuccuggacguguggaccuacaacgccgagcugcuggugcugcuggagaacgagagaacccuggacuuccacgacagcaacgugaagaaccuguacgagaaggugagaagccagcugagaaacaacgccaaggagaucggcaacggcugcuucgaguucuaccacaagugcgacgacaccugcauggagagcgugaagaacggcaccuacgacuaccccaaguacagcgaggagagcaagcugaacagagaggagaucgacggcgugaagcuggagagcaccagaaucuaccagauccuggccaucuacagcaccgccgccagcagccuggugcugcuggugagccugggcgccaucagcuucuggaugugcagcaacggcagccugcagugcagaaucugcaucuga

SEQ ID NO: 171946 - RNA, 1701 nt, Artificial Sequence
  derived and/or modified CDS sequence (opt4) from hemagglutinin__InfluenzaA__AHN00764
augaaggccauccugcuggugcugcugugcaccuucgccgccaccaacgccgacacccugugcaucggcuaccacgccaacaacagcaccgacaccguggacaccgugcuggagaagaacgugaccgugacccacagcgugaaccugcuggaggacaagcacaacggcaagcugugcaagcugggcggcaucgccccccugcaccugggcaagugcaacaucgccggcuggcugcugggcaaccccgagugcgagcugcuguucaccgugagcagcuggagcuacaucguggagaccagcaacagcgacaacggcaccugcuaccccggcgacuucaucaacuacgaggagcugagagagcagcugagcagcgugagcagcuucgagagauucgagaucuuccccaagaccagcagcuggcccaaccacgagaccaacagaggcgugaccgccgccugccccuacgccggcgccaacagcuucuacagaaaccugaucuggcuggugaagaagggcaacagcuaccccaagcugagcaagagcuacgugaacaacaagggcaaggaggugcuggugcuguggggcauccaccacccccccaccagcaccgaccagcagagccuguaccagaacgccgacgccuacguguucgugggcagcagcaaguacaacagaaaguucaagcccgagaucgccgccagacccaaggugagaggccaggccggcagaaugaacuacuacuggacccugaucgagcccggcgacaccaucaccuucgaggccaccggcaaccugguggugcccagauacgccuucgccaugaacagaggccccggcagcggcaucaucaucagcgacgcccccgugcacgacugcaacaccaccugccagacccccaagggcgccaucaacaccagccugcccuuccagaacauccaccccgugaccaucggcgagugccccaaguacgugaagagcaccaagcugagaauggccaccggccugagaaacauccccagcauccagagcagaggccuguucggcgccaucgccggcuucaucgagggcggcuggaccggcaugaucgacggcugguacggcuaccaccaccagaacgagcagggcagcggcuacgccgccgaccagaagagcacccagaacgccaucgacggcaucaccaacaaggugaacagcgugaucaagaagaugaacacccaguucaccgccgugggcaaggaguucaaccaccuggagaagagaaucgagaaccugaacaagaagguggacgacggcuuccuggacguguggaccuacaacgccgagcugcuggugcugcuggagaacgagagaacccuggacuuccacgacagcaacgugaagaaccuguacgagaaggugagaagccagcugagaaacaacgccaaggagaucggcaacggcugcuucgaguucuaccacaagugcgacgacaccugcauggagagcgugaagaacggcaccuacgacuaccccaaguacagcgaggagagcaagcugaacagagaggagaucgacggcgugaagcuggagagcaccagaaucuaccagauccuggccaucuacagcaccgccgccagcagccuggugcugcuggugagccugggcgccaucagcuucuggaugugcagcaacggcagccugcagugcagaaucugcaucuga

SEQ ID NO: 171947 - RNA, 1683 nt, Artificial Sequence
  derived and/or modified CDS sequence (opt4) from hemagglutinin__InfluenzaA__AHN96323
augaacacccagauccugguguucgcccugaucgccaucauccccaccaacgccgacaagaucugccugggccaccacgccgugagcaacggcaccaaggugaacacccugaccgagagaggcguggagguggugaacgccaccgagaccguggagagaaccaacauccccagaaucugcagcaagggcaagagaaccguggaccugggccagugcggccugcugggcaccaucaccggccccccccagugcgaccaguuccuggaguucagcgccgaccugaucaucgagagaagagagggcagcgacgugugcuaccccggcaaguucgugaacgaggaggcccugagacagauccugagagagagcggcggcaucgacaaggaggccaugggcuucaccuacagcggcaucagaaccaacggcgccaccagcgccugcagaagaagcggcagcagcuucuacgccgagaugaaguggcugcugagcaacaccgacaacgccgccuucccccagaugaccaagagcuacaagaacaccagaaagagccccgcccugaucguguggggcauccaccacagcgugagcaccgccgagcagaccaagcuguacggcagcggcaacaagcuggugaccgugggcagcagcaacuaccagcagagcuucgugcccagccccggcgccagaccccaggugaacggccugagcggcagaaucgacuuccacuggcugaugcugaaccccaacgacaccgugaccuucagcuucaacggcgccuucaucgcccccgacagagccagcuuccugagaggcaagagcaugggcauccagagcggcgugcagguggacgccaacugcgagggcgacugcuaccacagcggcggcaccaucaucagcaaccugcccuuccagaacaucgacagcagagccgugggcaagugccccagauacgugaagcagagaagccugcugcuggccaccggcaugaagaacgugcccgagauccccaagggcagaggccuguucggcgccaucgccggcuucaucgagaacggcugggagggccugaucgacggcugguacggcuucagacaccagaacgcccagggcgagggcaccgccgccgacuacaagagcacccagagcgccaucgaccagaucaccggcaagcugaacagacugaucgagaagaccaaccagcaguucgagcugaucgacaacgaguucaacgagguggagaagcagaucggcaacgugaucaacuggaccagagacagcaucaccgagguguggagcuacaacgccgagcugcugguggccauggagaaccagcacaccaucgaccuggccgacagcgagauggacaagcuguacgagagagugaagagacagcugagagagaacgccgaggaggacggcaccggcugcuucgagaucuuccacaagugcgacgacgacugcauggccagcaucagaaacaacaccuacgaccacagcaaguacagagaggaggccaugcagaacagaauccagaucgaccccgugaagcugagcagcggcuacaaggacgugauccugugguucagcuucggcgccagcugcuucauccugcuggccaucgugaugggccugguguucaucugcgugaagaacggcaacaugagaugcaccaucggcaucuga

SEQ ID NO: 171948 - RNA, 1701 nt, Artificial Sequence; identical to SEQ ID NO: 167042
  derived and/or modified CDS sequence (opt4) from hemagglutinin__InfluenzaA__AHN96442

SEQ ID NO: 171949 - RNA, 1701 nt, Artificial Sequence
  derived and/or modified CDS sequence (opt4) from hemagglutinin__InfluenzaA__AHN96443
augaagaccaucaucgcccugagcuacauccugugccugguguucgcccagaagcugcccggcaacgacaacagcaccgccacccugugccugggccaccacgccgugcccaacggcaccaucgugaagaccaucaccaacgaccagaucgaggugaccaacgccaccgagcuggugcagagcagcagcaccggcgagaucugcaacagcccccaccagauccuggacggcgagaacugcacccugaucgacgcccugcugggcgacccccagugcgacggcuuccagaacaagaagugggaccuguucguggagagaagcaaggcccacagcaacugcuaccccuacgacgugcccgacuacaccagccugagaagccugguggccagcagcggcacccuggaguucaacaacgagagcuucaacuggaccggcgugacccagaacggcaccagcagcgccugcaucagaagaagcaacaacagcuucuucagcagacugaacuggcugacccaccugaacuucaaguaccccgcccugaacgugaccaugcccaacaacgagcaguucgacaagcuguacaucuggggcgugcaccaccccggcaccgacaaggaccagaucuuccuguacgcccaggccagcggcagaaucaccgugagcaccaagagaagccagcaggccgugauccccaacaucggcagcagacccagagugagaaacauccccagcagagugagcaucuacuggaccaucgugaagcccggcgacauccugcugaucaacagcaccggcaaccugaucgcccccagaggcuacuucaagaucagaagcggcaagagcagcaucaugagaagcgacgcccccaucggcaagugcaacagcgccugcaucacccccaacggcagcauccccaacgacaagcccuuccagaacgugaacagaaucaccuacggcgccugccccagauacgugaagcagaacacccugaagcuggccaccggcaugagaaacgugcccgagaagcagaccagaggcaucuucggcgccaucgccggcuucaucgagaacggcugggagggcaugguggacggcugguacggcuucagacaccagaacagcgagggcagaggccaggccgccgaccugaagagcacccaggccgccaucgaccagaucaacggcaagcugaacagacugaucggcaagaccaacgagaaguuccaccagaucgagaaggaguucagcgagguggagggcagaauccaggaccuggagaaguacguggaggacaccaagaucgaccuguggagcuacaacgccgagcugcugguggcccuggagaaccagcacaccaucgaccugaccgacagcgagaugaacaagcuguucgagaagaccaagaagcagcugagagagaacgccgaggacaugggcaacggcugcuucaagaucuaccacaagugcgacaacgccugcaucggcagcaucagaaacggcaccuacgaccacgacguguacagagacgaggcccugaacaacagauuccagaucaagggcguggagcugaagagcggcuacaaggacuggauccuguggaucagcuucgccaucagcugcuuccugcugugcguggcccugcugggcuucaucaugugggccugccagaagggcaacaucagaugcaacaucugcaucuga

SEQ ID NO: 171950 - RNA, 1701 nt, Artificial Sequence
  derived and/or modified CDS sequence (opt4) from hemagglutinin__InfluenzaA__AHN96444
augaagaccaucaucgcccugagcuacauccugugccugguguucgcccagaagcugcccggcaacgacaacagcaccgccacccugugccugggccaccacgccgugcccaacggcaccaucgugaagaccaucaccaacgacagaaucgaggugaccaacgccaccgagcuggugcagaacagcagcaucggcgagaucugcgacagcccccaccagauccuggacggcgagaacugcacccugaucgacgcccugcugggcgacccccagugcgacggcuuccagaacaagaagugggaccuguucguggagagaagcaaggccuacagcaacugcuaccccuacgacgugcccgacuacgccagccugagaagccugguggccagcagcggcacccuggaguucaacaacgagagcuucaacuggaccggcgugacccagaacggcaccagcagcgccugcaucagaagaagcaacaacagcuucuucagcagacugaacuggcugacccaccugaacuucaaguaccccgcccugaacgugaccaugcccaacaaccagcaguucgacaagcuguacaucuggggcgugcaccaccccggcaccgacaaggaccagaucuuccuguacgcccagagcagcggcagaaucaccgugagcaccaagagaagccagcaggccgugauccccaacaucggcagcagacccagaaucagaaacauccccagcagaaucagcaucuacuggaccaucgugaagcccggcgacauccugcugaucaacagcaccggcaaccugaucgcccccagaggcuacuucaagaucagaagcggcaagagcagcaucaugagaagcgacgcccccaucggcaagugcaagagcgagugcaucacccccaacggcagcauccccaacgacaagcccuuccagaacgugaacagaaucaccuacggcgccugccccagauacgugaagcagagcacccugaagcuggccaccggcaugagaaacgugcccgagaagcagaccagaggcaucuucggcgccaucgccggcuucaucgagaacggcugggagggcaugguggacggcugguacggcuucagacaccagaacagcgagggcagaggccaggccgccgaccugaagagcacccaggccgccaucgaccagaucaacggcaagcugaacagacugaucggcaagaccaacgagaaguuccaccagaucgagaaggaguucagcgagguggagggcagaauccaggaccuggagaaguacguggaggacaccaagaucgaccuguggagcuacaacgccgagcugcugguggcccuggagaaccagcacaccaucgaccugaccgacagcgagaugaacaagcuguucgagaagaccaagaagcagcugagagagaacgccgaggacaugggcaacggcugcuucaagaucuaccacaagugcgacaacgccugcaucggcagcaucagaaacggcaccuacgaccacgacguguacagagacgaggcccugaacaacagauuccagaucaagggcaucgagcugaagagcggcuacaaggacuggauccuguggaucagcuucgccaucagcugcuuccugcugugcguggcccugcugggcuucaucaugugggccugccagaagggcaacaucagaugcaacaucugcaucuga

SEQ ID NO: 171951 - RNA, 1701 nt, Artificial Sequence
  derived and/or modified CDS sequence (opt4) from hemagglutinin__InfluenzaA__AHN96445
augaagaccaucaucgcccugagcuacauccugugccugguguucgcccagaagcugcccggcaacgacaacagcaccgccacccugugccugggccaccacgccgugcccaacggcaccaucgugaagaccaucaccaacgacagaaucgaggugaccaacgccaccgagcuggugcagaacagcagcaucggcgagaucugcgacagcccccaccagauccuggacggcgagaacugcacccugaucgacgcccugcugggcgacccccagugcgacggcuuccagaacaagaagugggaccuguucguggagagaagcaaggccuacagcaacugcuaccccuacgacgugcccgacuacgccagccugagaagccugguggccagcagcggcacccuggaguucaacaacgagagcuucaacuggaccggcgugacccagaacggcaccagcagcgccugcaucagaagaagcaacaacagcuucuucagcagacugaacuggcugacccaccugaacuucaaguaccccgcccugaacgugaccaugcccaacaaccagcaguucgacaagcuguacaucuggggcgugcaccaccccggcaccgacaaggaccagaucuuccuguacgcccagagcagcggcagaaucaccgugagcaccaagagaagccagcaggccgugauccccaacaucggcagcagacccagaaucagaaacauccccagcagaaucagcaucuacuggaccaucgugaagcccggcgacauccugcugaucaacagcaccggcaaccugaucgcccccagaggcuacuucaagauccugagcggcaagagcagcaucaugagaagcgacgcccccaucggcaagugcaagagcgagugcaucacccccaacggcagcauccccaacgacaagcccuuccagaacgugaacagaaucaccuacggcgccugccccagauacgugaagcagagcacccugaagcuggccaccggcaugagaaacgugcccgagaagcagaccagaggcaucuucggcgccaucgccggcuucaucgagaacggcugggagggcaugguggacggcugguacggcuucagacaccagaacagcgagggcagaggccaggccgccgaccugaagagcacccaggccgccaucgaccagaucaacggcaagcugaacagacugaucggcaagaccaacgagaaguuccaccagaucgagaaggaguucagcgagguggagggcagaauccaggaccuggagaaguacguggaggacaccaagaucgaccuguggagcuacaacgccgagcugcugguggcccuggagaaccagcacaccaucgaccugaccgacagcgagaugaacaagcuguucgagaagaccaagaagcagcugagagagaacgccgaggacaugggcaacggcugcuucaagaucuaccacaagugcgacaacgccugcaucggcagcaucagaaacggcaccuacgaccacgacguguacagagacgaggcccugaacaacagauuccagaucaagggcguggagcugaagagcggcuacaaggacuggauccuguggaucagcuucgccaucagcugcuuccugcugugcguggcccugcugggcuucaucaugugggccugccagaagggcaacaucagaugcaacaucugcaucuga

SEQ ID NO: 171952 - RNA, 1701 nt, Artificial Sequence
  derived and/or modified CDS sequence (opt4) from hemagglutinin__InfluenzaA__AHN96447
augaagaccaucaucgcccugagcuacauccugugccugguguucgcccagaagcugcccggcaacgacaacagcaccgccacccugugccugggccaccacgccgugcccaacggcaccaucgugaagaccaucaccaacgacagaaucgaggugaccaacgccaccgagcuggugcagaacagcagcaucggcgagaucugcgacagcccccaccagauccuggacggcgagaacugcacccugaucgacgcccugcugggcgacccccagugcgacggcuuccagaacaagaagugggaccuguucguggagagaagcaaggccuacagcaacugcuaccccuacgacgugcccgacuacgccagccugagaagccugguggccagcagcggcacccuggaguucaacaacgagagcuucaacugggccggcgugacccagaacggcaccagcagcgccugcaucagaggcagcaacagcagcuucuucagcagacugaacuggcugacccaccugaacuucaaguaccccgcccugaacgugaccaugcccaacaacgagcaguucgacaagcuguacaucuggggcgugcaccaccccggcaccgacaaggaccagaucuuccuguacgcccagagcagcggcagaaucaccgugagcaccaagagaagccagcaggccgugauccccaacaucggcagcagacccagaaucagaaacauccccagcagaaucagcaucuacuggaccaucgugaagcccggcgacauccugcugaucaacagcaccggcaaccugaucgcccccagaggcuacuucaagaucagaagcggcaagagcagcaucaugagaagcgacgcccccaucggcaagugcaagagcgagugcaucacccccaacggcagcauccccaacgacaagcccuuccagaacgugaacagaaucaccuacggcgccugccccagauacgugaagcagagcacccugaagcuggccaccggcaugagaaacgugcccgagaagcagaccagaggcaucuucggcgccaucgccggcuucaucgagaacggcugggagggcaugguggacggcugguacggcuucagacaccagaacagcgagggcagaggccaggccgccgaccugaagagcacccaggccgccaucgaccagaucaacggcaagcugaacagacugaucggcaagaccaacgagaaguuccaccagaucgagaaggaguucagcgagguggagggcagaauccaggaccuggagaaguacguggaggacaccaagaucgaccuguggagcuacaacgccgagcugcugguggcccuggagaaccagcacaccaucgaccugaccgacagcgagaugaacaagcuguucgagaagaccaagaagcagcugagagagaacgccgaggacaugggcaacggcugcuucaagaucuaccacaagugcgacaacgccugcaucggcagcaucagaaacggcaccuacgaccacgacguguacagagacgaggcccugaacaacagauuccagaucaagggcguggagcugaagagcggcuacaaggacuggauccuguggaucagcuucgccaucagcugcuuccugcugugcguggugcugcugggcuucaucaugugggccugccagaagggcaacaucagaugcaacaucugcaucuga

SEQ ID NO: 171953 - RNA, 1701 nt, Artificial Sequence
  derived and/or modified CDS sequence (opt4) from hemagglutinin__InfluenzaA__AHV83765
augaaggccauccugguggugcugcuguacaccuucgccaccgccaacgccgacacccugugcaucggcuaccacgccaacaacagcaccgacaccguggacaccgugcuggagaagaacgugaccgugacccacagcgugaaccugcuggaggacaagcacaacggcaagcugugcaagcugagaggcguggccccccugcaccugggcaagugcaacaucgccggcuggauccugggcaaccccgagugcgagagccugagcaccgccagcagcuggagcuacaucguggagaccagcagcagcgacaacggcaccugcuaccccggcgacuucaucaacuacgaggagcugagagagcagcugagcagcgugagcagcuucgagagauucgagaucuuccccaagaccagcagcuggcccaaccacgacagcaacaagggcgugaccgccgccugcccccacgccggcgccaagagcuucuacaagaaccugaucuggcuggugaagaagggcaacagcuaccccaagcugagccagagcuacaucaacgacaagggcaaggaggugcuggugcuguggggcauccaccaccccagcaccaccgccgaccagcagagccuguaccagaacgccgacgccuacguguucgugggcaccagcagauacagcaagaaguucaagcccgagaucgccaucagacccaaggugagagaccaggagggcagaaugaacuacuacuggacccugguggagcccggcgacaagaucaccuucgaggccaccggcaaccugguggugcccagauacgccuucaccauggagagaaacgccggcagcggcaucaucaucagcgacacccccgugcacgacugcaacaccaccugccagacccccgagggcgccaucaacaccagccugcccuuccagaacauccaccccaucaccaucggcaagugccccaaguacgugaagagcaccaagcugagacuggccaccggccugagaaacgugcccagcauccagagcagaggccuguucggcgccaucgccggcuucaucgagggcggcuggaccggcaugguggacggcugguacggcuaccaccaccagaacgagcagggcagcggcuacgccgccgaccugaagagcacccagaacgccaucgacaagaucaccaacaaggugaacagcgugaucgagaagaugaacacccaguucaccgccgugggcaaggaguucaaccaccuggagaagagaaucgagaaccugaacaagaagguggacgacggcuuccuggacaucuggaccuacaacgccgagcugcuggugcugcuggagaacgagagaacccuggacuaccacgacagcaacgugaagaaccuguacgagaaggugagaaaccagcugaagaccaacgccaaggagaucggcaacggcugcuucgaguucuaccacaagugcgacaacaccugcauggagagcgugaagaacggcaccuacgacuaccccaaguacagcgaggaggccaagcugaacagagagaagaucgacggcgugaagcuggagagcaccagaaucuaccagauccuggccaucuacagcaccguggccagcagccuggugcugguggugagccugggcgccaucagcuucuggaugugcagcaacggcagccugcagugcagaaucugcaucuga

SEQ ID NO: 171954 - RNA, 1701 nt, Artificial Sequence; identical to SEQ ID NO: 171081
  derived and/or modified CDS sequence (opt4) from hemagglutinin__InfluenzaA__AHV83766

SEQ ID NO: 171955 - RNA, 1701 nt, Artificial Sequence; identical to SEQ ID NO: 170100
  derived and/or modified CDS sequence (opt4) from hemagglutinin__InfluenzaA__AHV83767

SEQ ID NO: 171956 - RNA, 1701 nt, Artificial Sequence
  derived and/or modified CDS sequence (opt4) from hemagglutinin__InfluenzaA__AHV83768
augaaggccauccugguggugcugcuguacaccuucaccaccgccaacgccgacacccugugcaucggcuaccacgccaacaacagcaccgacaccguggacaccgugcuggagaagaacgugaccgugacccacagcgugaaccugcuggaggacaagcacaacggcaagcugugcaagcugagaggcguggccccccugcaccugggcaagugcaacaucgccggcuggauccugggcaaccccgagugcgagagccugagcaccgccagcagcuggagcuacaucguggagaccagcagcagcgacaacggcaccugcuaccccggcgacuucaucaacuacgaggagcugagagagcagcugagcagcgugagcagcuucgagagauucgagaucuuccccaagaccagcagcuggcccaaccacgacagcaacaagggcgugaccgccgccugcccccacgccggcgccaagagcuucuacaagaaccugaucuggcuggugaagaagggcaacagcuaccccaagcugagccagagcuacaucaacgacaagggcaaggaggugcuggugcuguggggcauccaccaccccagcaccaccgccgaccagcagagccuguaccagaacgccgacgccuacguguucgugggcaccagcagauacagcaagaaguucaagcccgagaucgccaucagacccaaggugagagaccaggagggcagaaugaacuacuacuggacccugcuggagcccggcgacaagaucaccuucgaggccaccggcaaccugguggugcccagauacgccuucaccauggagagaaacgccggcagcggcaucaucaucagcgacacccccgugcacgacugcaacaccaccugccagacccccgagggcgccaucaacaccagccugcccuuccagaacauccaccccaucaccaucggcaagugccccaaguacgugaagagcaccaagcugagacuggccaccggccugagaaacgugcccagcauccagagcagaggccuguucggcgccaucgccggcuucaucgagggcggcuggaccggcaugguggacggcugguacggcuaccaccaccagaacgagcagggcagcggcuacgccgccgaccugaagagcacccagaacgccaucgacaagaucaccaacaaggugaacagcgugaucgagaagaugaacacccaguucaccgccgugggcaaggaguucaaccaccuggagaagagaaucgagaaccugaacaagaagguggacgacggcuuccuggacaucuggaccuacaacgccgagcugcuggugcugcuggagaacgagagaacccuggacuaccacgacagcaacgugaagaaccuguacgagaaggugagaaaccagcugaagaacaacgccaaggagaucggcaacggcugcuucgaguucuaccacaagugcgacaacaccugcauggacagcgugaagaacggcaccuacgacuaccccaaguacagcgaggaggccaagcugaacagagagaagaucgacggcgugaagcuggagagcaccagaaucuaccagauccuggccaucuacagcaccguggccagcagccuggugcugguggugagccugggcgccaucagcuucuggaugugcagcaacggcagccugcagugcagaaucugcaucuga

SEQ ID NO: 171957 - RNA, 1701 nt, Artificial Sequence; identical to SEQ ID NO: 171058
  derived and/or modified CDS sequence (opt4) from hemagglutinin__InfluenzaA__AHV83770

SEQ ID NO: 171958 - RNA, 1701 nt, Artificial Sequence
  derived and/or modified CDS sequence (opt4) from hemagglutinin__InfluenzaA__AHV83771
augaaggccauccugguggugcugcuguacaccuucgccaccgccaacgccgacacccugugcaucggcuaccacgccaacaacagcaccgacaccguggacaccgugcuggagaagaacgugaccgugacccacagcgugaaccugcuggaggacaagcacaacggcaagcugugcaagcugagaggcguggccccccugcaccugggcaagugcaacaucgccggcuggauccugggcaaccccgagugcgagagccugagcaccgccagcagcuggagcuacaucguggagaccagcagcagcgacaacggcaccugcuaccccggcgacuucaucaacuacgaggagcugagagagcagcugagcagcgugagcagcuucgagagauucgagaucuuccccaagaccagcagcuggcccaaccacgacagcaacaagggcgugaccgccgccugcccccacgccggcgccaagagcuucuacaagaaccugaucuggcuggugaagaagggcaacagcuaccccaagcugagccagagcuacaucaacgacaagggcaaggaggugcuggugcuguggggcauccaccaccccagcaccaccaccgaccagcagagccuguaccagaacgccgacgccuacguguucgugggcaccagcagauacagcaagaaguucaagcccgagaucgccaucagacccaaggugagagaccaggagggcagaaugaacuacuacuggacccugguggagcccggcgacaagaucaccuucgaggccaccggcaaccugguggugcccagauacgccuucaccauggagagaaacgccggcagcggcaucaucaucagcgacacccccgugcacgacugcaacaccaccugccagacccccgagggcgccaucaacaccagccugcccuuccagaacauccaccccaucaccaucggcaagugccccaaguacgugaagagcaccaagcugagacuggccaccggccugagaaacgugcccagcauccagagcagaggccuguucggcgccaucgccggcuucaucgagggcggcuggaccggcaugguggacggcugguacggcuaccaccaccagaacgagcagggcagcggcuacgccgccgaccagaagagcacccagaacgccaucgacaagaucaccaacaaggugaacagcgugaucgagaagaugaacacccaguucaccgccgugggcaaggaguucaaccaccuggagaagagaaucgagaaccugaacaagaagguggacgacggcuuccuggacaucuggaccuacaacgccgagcugcuggugcugcuggagaacgagagaacccuggacuaccacgacagcaacgugaagaaccuguacgagaaggugagaaaccagcugaagaacaacgccaaggagaucggcaacggcugcuucgaguucuaccacaagugcgacaacaccugcauggagagcgugaagaacggcaccuacgacuaccccaaguacagcgaggaggccaagcugaacagagagaagaucgacggcgugaagcuggagagcaccagaaucuaccagauccuggccaucuacagcaccguggccagcagccuggugcugguggugagccugggcgccaucagcuucuggaugugcagcaacggcagccugcagugcagaaucugcaucuga

SEQ ID NO: 171959 - RNA, 1701 nt, Artificial Sequence; identical to SEQ ID NO: 170100
  derived and/or modified CDS sequence (opt4) from hemagglutinin__InfluenzaA__AHV83772

SEQ ID NO: 171960 - RNA, 1701 nt, Artificial Sequence; identical to SEQ ID NO: 170100
  derived and/or modified CDS sequence (opt4) from hemagglutinin__InfluenzaA__AHV83773

SEQ ID NO: 171961 - RNA, 1701 nt, Artificial Sequence; identical to SEQ ID NO: 170100
  derived and/or modified CDS sequence (opt4) from hemagglutinin__InfluenzaA__AHV83774

SEQ ID NO: 171962 - RNA, 1701 nt, Artificial Sequence
  derived and/or modified CDS sequence (opt4) from hemagglutinin__InfluenzaA__AHV83775
augaaggccauccugguggugcugcuguacaccuucgccaccgccaacgccgacacccugugcaucggcuaccacgccaacaacagcaccgacaccguggacaccgugcuggagaagaacgugaccgugacccacagcgugaaccugcuggaggacaagcacaacggcaagcugugcaagcugagaggcguggccccccugcaccugggcaagugcaacaucgccggcuggauccugggcaaccccgagugcgagagccugagcaccgccagcagcuggagcuacaucguggagaccagcagcagcgacaacggcaccugcuaccccggcgacuucaucaacuacgaggagcugagagagcagcugagcagcgugagcagcuucgagagauucgagaucuuccccaagaccagcagcuggcccaaccacgacagcaacaagggcgugaccgccgccugcccccacgccggcgccaagagcuucuacaagaaccugaucuggcuggugaagaagggcaacagcuaccccaagcugagccagagcuacaucaacgacaagggcaaggaggugcuggugcuguggggcauccaccaccccagcaccaccgccgaccagcagagccuguaccagaacgccgacgccuacguguucgugggcaccagcagauacagcaagaaguucaagcccgagaucgccaucagacccaaggugagagaccaggagggcagaaugaacuacuacuggacccugguggagcccggcgacaagaucaccuucgaggccaccggcaaccugguggugcccagauacgccuucaccauggagagaaacgccggcagcggcaucaucaucagcgacacccccgugcacgacugcaacaccaccugccagacccccgagggcgccaucaacaccagccugcccuuccagaacauccaccccaucaccaucggcaagugccccaaguacgugaagagcaccaagcugagacuggccaccggccugagaaacauccccagcauccagagcagaggccuguucggcgccaucgccggcuucaucgagggcggcuggaccggcaugguggacggcugguacggcuaccaccaccagaacgagcagggcagcggcuacgccgccgaccugaagagcacccagaacgccaucgacaagaucaccaacaaggugaacagcgugaucgagaagaugaacacccaguucaccgccgugggcaaggaguucaaccaccuggagaagagaaucgagaaccugaacaagaagguggacgacggcuuccuggacaucuggaccuacaacgccgagcugcuggugcugcuggagaacgagagaacccuggacuaccacgacagcaacgugaagaaccuguacgagaaggugagaaaccagcugaagaacaacgccaaggagaucggcaacggcugcuucgaguucuaccacaagugcgacaacaccugcauggagagcgugaagaacggcaccuacgacuaccccaaguacagcgaggaggccaagcugaacagagagaagaucgacggcgugaagcuggagagcaccagaaucuaccagauccuggccaucuacagcaccguggccagcagccuggugcugguggugagccugggcgccaucagcuucuggaugugcagcaacggcagccugcagugcagaaucugcaucuga

SEQ ID NO: 171963 - RNA, 1701 nt, Artificial Sequence; identical to SEQ ID NO: 170100
  derived and/or modified CDS sequence (opt4) from hemagglutinin__InfluenzaA__AHV83776

SEQ ID NO: 171964 - RNA, 1701 nt, Artificial Sequence
  derived and/or modified CDS sequence (opt4) from hemagglutinin__InfluenzaA__AHV83777
augaaggccauccugguggugcugcuguacaccuucgccaccgccaacgccgacacccugugcaucggcuaccacgccaacaacagcaccgacaccguggacaccgugcuggagaagaacgugaccgugacccacagcgugaaccugcuggaggacaagcacaacggcaagcugugcaagcugagaggcguggccccccugcaccugggcaagugcaacaucgccggcuggauccugggcaaccccgagugcgagagccugagcaccgccagcagcuggagcuacaucguggagaccagcagcagcgacaacggcaccugcuaccccggcgacuucaucaacuacgaggagcugagagagcagcugagcagcgugagcagcuucgagagauucgagaucuuccccaagaccagcagcuggcccaaccacgacagcaacaagggcgugaccgccgccugcccccacgccggcgccaagagcuucuacaagaaccugaucuggcuggugaagaagggcaacagcuaccccaagcugagccagagcuacaucaacgacaagggcaaggaggugcuggugcuguggggcauccaccaccccagcaccaccgccgaccagcagagccuguaccagaacgccgacgccuacguguucgugggcaccagcagauacagcaagaaguucaagcccgagaucgccaucagacccaaggugagagaccaggagggcagaaugaacuacuacuggacccugguggagcccggcgacaagaucaccuucgaggccaccggcaaccugguggugcccagauacgccuucaccauggagagaaacgccggcagcggcaucaucaucagcgacacccccgugcacgacugcaacaccaccugccagacccccgagggcgccaucaacaccagccugcccuuccagaacauccaccccaucaccaucggcaagugccccaaguacgugaagagcaccaagcugagacuggccaccggccugagaaacauccccagcauccagagcagaggccuguucggcgccaucgccggcuucaucgagggcggcuggaccggcaugguggacggcugguacggcuaccaccaccagaacgagcagggcagcggcuacgccgccgaccugaagagcacccagaacgccaucgacaagaucaccaacaaggugaacagcgugaucgagaagaugaacacccaguucaccgccgugggcaaggaguucaaccaccuggagaagagaaucgagaaccugaacaagaagguggacgacggcuuccuggacaucuggaccuacaacgccgagcugcuggugcugcuggagaacgagagaacccuggacuaccacgacagcaacgugaagaaccuguacgagaaggugagaaaccagcugaagaacaacgccaaggagaucggcaacggcugcuucgaguucuaccacaagugcgacaacaccugcauggagagcgugaagaacggcaccuacgacuaccccaaguacagcgaggaggccaagcugaacagagagaagaucgacggcgugaagcuggagagcaccagaaucuaccagauccuggccaucuacagcaccguggccagcagccuggugcugguggugagccugggcgccaucugcuucuggaugugcagcaacggcagccugcagugcagaaucugcaucuga

SEQ ID NO: 171965 - RNA, 1701 nt, Artificial Sequence
  derived and/or modified CDS sequence (opt4) from hemagglutinin__InfluenzaA__AHV83778
augaaggccauccugguggugcugcuguacaccuucaccaccgccaacgccgacacccugugcaucggcuaccacgccaacaacagcaccgacaccguggacaccgugcuggagaagaacgugaccgugacccacagcgugaaccugcuggaggacaagcacaacggcaagcugugcaagcugagaggcguggccccccugcaccugggcaagugcaacaucgccggcuggauccugggcaaccccgagugcgagagccugagcaccgccagcagcuggagcuacaucguggagaccagcagcagcgacaacggcaccugcuaccccggcgacuucaucaacuacgaggagcugagagagcagcugagcagcgugagcagcuucgagagauucgagaucuuccccaagaccagcagcuggcccaaccacgacagcaacaagggcgugaccgccgccugcccccacgccggcgccaagagcuucuacaagaaccugaucuggcuggugaagaagggcaacagcuaccccaagcugagccagagcuacaucaacgacaagggcaaggaggugcuggugcuguggggcauccaccaccccagcaccaccgccgaccagcagagccuguaccagaacgccgacgccuacguguucgugggcaccagcagauacagcaagaaguucaagcccgagaucgccaucagacccaaggugagagaccaggagggcagaaugaacuacuacuggacccugguggagcccggcgacaagaucaccuucgaggccaccggcaaccugguggugcccagauacgccuucaccauggagagaaacgccggcagcggcaucaucaucagcgacacccccguguacgacugcaacaccaccugccagacccccgagggcgccaucaacaccagccugcccuuccagaacauccaccccaucaccaucggcaagugccccaaguacgugaagagcaccaagcugagacuggccaccggccugagaaacgugcccagcauccagagcagaggccuguucggcgccaucgccggcuucaucgagggcggcuggaccggcaugguggacggcugguacggcuaccaccaccagaacgagcagggcagcggcuacgccgccgaccugaagagcacccagaacgccaucgacaagaucaccaacaaggugaacagcgugaucgagaagaugaacacccaguucaccgccgugggcaaggaguucaaccaccuggagaagagaaucgagaaccugaacaagaagguggacgacggcuuccuggacaucuggaccuacaacgccgagcugcuggugcugcuggagaacgagagaacccuggacuaccacgacagcaacgugaagaaccuguacgagaaggugagaaaccagcugaagaacaacgccaaggagaucggcaacggcugcuucgaguucuaccacaagugcgacaacaccugcauggagagcgugaagaacggcaccuacgacuaccccaaguacagcgaggaggccaagcugaacagagagaagaucgacggcgugaagcuggagagcaccagaaucuaccagauccuggccaucuacagcaccguggccagcagccuggugcugguggugagccugggcgccaucagcuucuggaugugcagcaacggcagccugcagugcagaaucugcaucuga

SEQ ID NO: 171966 - RNA, 1701 nt, Artificial Sequence
  derived and/or modified CDS sequence (opt4) from hemagglutinin__InfluenzaA__AHV83779
augaaggccauccugguggugcugcuguacaccuucgccaccaccaacgccgacacccugugcaucggcuaccacgccaacaacagcaccgacaccguggacaccgugcuggagaagaacgugaccgugacccacagcgugaaccugcuggaggacaagcacaacggcaagcugugcaagcugagaggcguggccccccugcaccugggcaagugcaacaucgccggcuggauccugggcaaccccgagugcgagagccugagcaccgccagcagcuggagcuacaucguggagaccagcagcagcgacaacggcaccugcuaccccggcgacuucaucaacuacgaggagcugagagagcagcugagcagcgugagcagcuucgagagauucgagaucuuccccaagaccagcagcuggcccaaccacgacagcaacaagggcgugaccgccgccugcccccacgccggcgccaagagcuucuacaagaaccugaucuggcuggugaagaagggcaacagcuaccccaagcugagccagagcuacaucaacgacaagggcaaggaggugcuggugcuguggggcauccaccaccccagcaccaccgccgaccagcagagccuguaccagaacgccgacgccuacguguucgugggcaccagcagauacagcaagaaguucaagcccgagaucgccaucagacccaaggugagagaccaggagggcagaaugaacuacuacuggacccugguggagcccggcgacaagaucaccuucgaggccaccggcaaccugguggugcccagauacgccuucaccauggagagaaacgccggcagcggcaucaucaucagcgacacccccgugcacgacugcaacaccaccugccagacccccgagggcgccaucaacaccagccugcccuuccagaacauccaccccaucaccaucggcaagugccccaaguacgugaagagcaccaagcugagacuggccaccggccugagaaacgugcccagcauccagagcagaggccuguucggcgccaucgccggcuucaucgagggcggcuggaccggcaugguggacggcugguacggcuaccaccaccagaacgagcagggcagcggcuacgccgccgaccugaagagcacccagaacgccaucgacaagaucaccaacaaggugaacagcgugaucgagaagaugaacacccaguucaccgccgugggcaaggaguucaaccaccuggagaagagaaucgagaaccugaacaagaagguggacgacggcuuccuggacaucuggaccuacaacgccgagcugcuggugcugcuggagaacgagagaacccuggacuaccacgacagcaacgugaagaaccuguacgagaaggugagaaaccagcugaagaacaacgccaaggagaccggcaacggcugcuucgaguucuaccacaagugcgacaacaccugcauggagagcgugaagaacggcaccuacgacuaccccaaguacagcgaggaggccaagcugaacagagagaagaucgacggcgugaagcuggagagcaccagaaucuaccagauccuggccaucuacagcaccguggccagcagccuggugcugguggugagccugggcgccaucagcuucuggaugugcagcaacggcagccugcagugcagaaucugcaucuga

SEQ ID NO: 171967 - RNA, 1701 nt, Artificial Sequence
  derived and/or modified CDS sequence (opt4) from hemagglutinin__InfluenzaA__AHV83780
augaaggccauccugguggugcugcuguacaccuucgccaccgccaacgccgacacccugugcaucggcuaccacgccaacaacagcaccgacaccguggacaccgugcuggagaagaacgugaccgugacccacagcgugaaccugcuggaggacaagcacaacggcaagcugugcaagcugagaggcguggccccccugcaccugggcaagugcaacaucgccggcuggauccugggcaaccccgagugcgagagccugagcaccgccagcagcuggagcuacaucguggagaccagcagcagcgacaacggcaccugcuaccccggcgacuucaucaacuacgaggagcugagagagcagcugagcagcgugagcagcuucgagagauucgagaucuuccccaagaccagcagcuggcccaaccacgacagcaacaagggcgugaccgccgccugcccccacgccggcgccaagagcuucuacaagaaccugaucuggcuggugaagaagggcaacagcuaccccaagcugagacagagcuacaucaacgacaagggcaaggaggugcuggugcuguggggcauccaccaccccagcaccaccaccgaccagcagagccuguaccagaacgccgacgccuacguguucgugggcaccagcagauacagcaagaaguucaagcccgagaucgccaucagacccaaggugagagaccaggagggcagaaugaacuacuacuggacccugguggagcccggcgacaagaucaccuucgaggccaccggcaaccugguggugcccagauacgccuucaccauggagagaaacgccggcagcggcaucaucaucagcgacacccccgugcacgacugcaacaccaccugccagacccccgagggcgccaucaacaccagccugcccuuccagaacauccaccccaucaccaucggcaagugccccaaguacgugaagagcaccaagcugagacuggccaccggccugagaaacgugcccagcauccagagcagaggccuguucggcgccaucgccggcuucaucgagggcggcuggaccggcaugguggacggcugguacggcuaccaccaccagaacgagcagggcagcggcuacgccgccgaccugaagagcacccagaacgccaucgacaagaucaccaacaaggugaacagcgugaucgagaagaugaacacccaguucaccgccgugggcaaggaguucaaccaccuggagaagagaaucgagaaccugaacaagaagguggacgacggcuuccuggacaucuggaccuacaacgccgagcugcuggugcugcuggagaacgagagaacccuggacuaccacgacagcaacgugaagaaccuguacgagaaggugagaaaccagcugaagaacaacgccaaggagaucggcaacggcugcuucgaguucuaccacaagugcgacaacaccugcauggagagcgugaagaacggcaccuacgacuaccccaaguacagcgaggaggccaagcugaacagagagaagaucgacggcgugaagcuggagagcaccagaaucuaccagauccuggccaucuacagcaccguggccagcagccuggugcugguggugagccugggcgccaucagcuucuggaugugcagcaacggcagccugcagugcagaaucugcaucuga

SEQ ID NO: 171968 - RNA, 1701 nt, Artificial Sequence; identical to SEQ ID NO: 170100
  derived and/or modified CDS sequence (opt4) from hemagglutinin__InfluenzaA__AHV83781

SEQ ID NO: 171969 - RNA, 1701 nt, Artificial Sequence
  derived and/or modified CDS sequence (opt4) from hemagglutinin__InfluenzaA__AHV83782
augaaggccauccugguggugcugcuguacacccuggccaccgccaacgccgacacccugugcaucggcuaccacgccaacaacagcaccgacaccguggacaccgugcuggagaagaacgugaccgugacccacagcgugaaccugcuggaggacaagcacaacggcaagcugugcaagcugagaggcguggccccccugcaccugggcaagugcaacaucgccggcuggauccugggcaaccccgagugcgagagccugagcaccgccagcagcuggagcuacaucguggagaccagcagcagcgacaacggcaccugcuaccccggcgacuucaucaacuacgaggagcugagagagcagcugagcagcgugagcagcuucgagagauucgagaucuuccccaagaccagcagcuggcccaaccacgacagcaacaagggcgugaccgccgccugcccccacgccggcgccaagagcuucuacaagaaccugaucuggcuggugaagaagggcaacagcuaccccaagcugagccagagcuacaucaacgacaagggcaaggaggugcuggugcuguggggcauccaccaccccagcaccaccgccgaccagcagagccuguaccagaacgccgacgccuacguguucgugggcaccagcagauacagcaagaaguucaagcccgagaucgccaucagacccaaggugagagaccaggagggcagaaugaacuacuacuggacccugguggagcccggcgacaagaucaccuucgaggccaccggcaaccugguggcccccagauacgccuucaccauggagagaaacgccggcagcggcaucaucaucagcgacacccccgugcacgacugcaacaccaccugccagacccccgagggcgccaucaacaccagccugcccuuccagaacauccaccccaucaccaucggcaagugccccaaguacgugaagagcaccaagcugagacuggccaccggccugagaaacgugcccagcauccagagcagaggccuguucggcgccaucgccggcuucaucgagggcggcuggaccggcaugguggacggcugguacggcuaccaccaccagaacgagcagggcagcggcuacgccgccgaccugaagagcacccagaacgccaucgacaagaucaccaacaaggugaacagcgugaucgagaagaugaacacccaguucaccgccgugggcaaggaguucaaccaccuggagaagagaaucgagaaccugaacaagaagguggacgacggcuuccuggacaucuggaccuacaacgccgagcugcuggugcugcuggagaacgagagaacccuggacuaccacgacagcaacgugaagaaccuguacgagaaggugagaaaccagcugaagaacaacgccaaggagaucggcaacggcugcuucgaguucuaccacaagugcgacaacaccugcauggagagcgugaagaacggcaccuacgacuaccccaaguacagcgaggaggccaagcugaacagagagaagaucgacggcgugaagcuggagagcaccagaaucuaccagauccuggccaucuacagcaccguggccagcagccuggugcugguggugagccugggcgccaucagcuucuggaugugcagcaacggcagccugcagugcagaaucugcaucuga

SEQ ID NO: 171970 - RNA, 1701 nt, Artificial Sequence
  derived and/or modified CDS sequence (opt4) from hemagglutinin__InfluenzaA__AHV83783
augaaggccauccugguggugcugcuguacaccuucgccaccgccaacgccgacacccugugcaucggcuaccacgccaacaacagcaccgacaccguggacaccgugcuggagaagaacaucaccgugacccacagcgugaaccugcuggaggacaagcacaacggcaagcugugcaagcugagaggcguggccccccugcaccugggcaagugcaacaucgccggcuggauccugggcaaccccgagugcgagagccugagcaccgccagcagcuggagcuacaucguggagaccagcagcagcgacaacggcaccugcuaccccggcgacuucaucaacuacgaggagcugagagagcagcugagcagcgugagcagcuucgagagauucgagaucuuccccaagaccagcagcuggcccaaccacgacagcaacaagggcgugaccgccgccugcccccacgccggcgccaagggcuucuacaagaaccugaucuggcuggugaagaagggcaacagcuaccccaagcugagacagagcuacaucaacgacaagggcaaggaggugcuggugcuguggggcauccaccaccccagcaccaccaccgaccagcagagccuguaccagaacgccgacgccuacguguucgugggcaccagcagauacagcaagaaguucaagcccgagaucgccaucagacccaaggugagagaccaggagggcagaaugaacuacuacuggacccugguggagcccggcgacaagaucaccuucgaggccaccggcaaccugguggugcccagauacgccuucaccauggagagaaacgccggcagcggcaucaucaucagcgacacccccgugcacgacugcaacaccaccugccagacccccgagggcgccaucaacaccagccugcccuuccagaacauccaccccaucaccaucggcaagugccccaaguacgugaagagcaccaagcugagacuggccaccggccugagaaacgugcccagcauccagagcagaggccuguucggcgccaucgccggcuucaucgagggcggcuggaccggcaugguggacggcugguacggcuaccaccaccagaacgagcagggcagcggcuacgccgccgaccugaagagcacccagaacgccaucgacaagaucaccaacaaggugaacagcgugaucgagaagaugaacacccaguucaccgccgugggcaaggaguucaaccaccuggagaagagaaucgagaaccugaacaagaagguggacgacggcuuccuggacaucuggaccuacaacgccgagcugcuggugcugcuggagaacgagagaacccuggacuaccacgacagcaacgugaagaaccuguacgagaaggugagaaaccagcugaagaacaacgccaaggagaucggcaacggcugcuucgaguucuaccacaagugcgacaacaccugcauggagagcgugaagaacggcaccuacgacuaccccaaguacagcgaggaggccaagcugaacagagagaagaucgacggcgugaagcuggagagcaccagaaucuaccagauccuggccaucuacagcaccguggccagcagccuggugcugguggugagccugggcgccaucagcuucuggaugugcagcaacggcagccugcagugcagaaucugcaucuga

SEQ ID NO: 171971 - RNA, 1701 nt, Artificial Sequence; identical to SEQ ID NO: 170100
  derived and/or modified CDS sequence (opt4) from hemagglutinin__InfluenzaA__AHV83784

SEQ ID NO: 171972 - RNA, 1701 nt, Artificial Sequence; identical to SEQ ID NO: 170100
  derived and/or modified CDS sequence (opt4) from hemagglutinin__InfluenzaA__AHV83785

SEQ ID NO: 171973 - RNA, 1701 nt, Artificial Sequence; identical to SEQ ID NO: 170100
  derived and/or modified CDS sequence (opt4) from hemagglutinin__InfluenzaA__AHV83787

SEQ ID NO: 171974 - RNA, 1701 nt, Artificial Sequence
  derived and/or modified CDS sequence (opt4) from hemagglutinin__InfluenzaA__AHV83788
augaaggccauccugguggugcugcuguacaccuucgccaccgccaacgccgacacccugugcaucggcuaccacgccaacaacagcaccgacaccguggacaccgugcuggagaagaacgugaccgugacccacagcgugaaccugcuggaggacaagcacaacggcaagcugugcaagcugagaggcgugagcccccugcaccugggcaagugcaacaucgccggcuggauccugggcaaccccgagugcgagagccugagcaccgccagcagcuggagcuacaucguggagaccagcagcagcgacaacggcaccugcuaccccggcgacuucgugaacuacgaggagcugagagagcagcugagcagcgugagcagcuucgagagauucgagaucuuccccaagaccagcagcuggcccaaccacgacagcaacaagggcgugaccgccgccugcccccacgccggcgccaagagcuucuacaagaaccugaucuggcuggugaagaagggcaacagcuaccccaagcugagccagagcuacaucaacgacaagggcaaggaggugcuggugcuguggggcauccaccaccccagcaccaccgccgaccagcagagccuguaccagaacgccgacgccuacguguucgugggcaccagcagauacagcaagaaguucaagcccgagaucgccaucagacccaaggugagagaccaggagggcagaaugaacuacuacuggacccugguggagcccggcgacaagaucaccuucgaggccaccggcaaccugguggugcccagauacgccuucaccauggagagaaacgccggcagcggcaucaucaucagcgacacccccgugcacgacugcaacaccaccugccagacccccgagggcgccaucaacaccagccugcccuuccagaacauccaccccaucaccaucggcaagugccccaaguacgugaagagcaccaagcugagacuggccaccggccugagaaacgugcccagcauccagagcagaggccuguucggcgccaucgccggcuucaucgagggcggcuggaccggcaugguggacggcugguacggcuaccaccaccagaacgagcagggcagcggcuacgccgccgaccugaagagcacccagaacgccaucgacaagaucaccaacaaggugaacagcgugaucgagaagaugaacacccaguucaccgccgugggcaaggaguucaaccaccuggagaagagaaucgagaaccugaacaagaagguggacgacggcuuccuggacaucuggaccuacaacgccgagcugcuggugcugcuggagaacgagagaacccuggacuaccacgacagcaacgugaagaaccuguacgagaaggugagaaaccagcugaagaacaacgccaaggagaucggcaacggcugcuucgaguucuaccacaagugcgacaacaccugcauggagagcgugaagaacggcaccuacgacuaccccaaguacagcgaggaggccaagcugaacagagagaagaucgacggcgugaagcuggagagcaccagaaucuaccagauccuggccaucuacagcaccguggccagcagccuggugcugguggugagccugggcgccaucagcuucuggaugugcagcaacggcagccugcagugcagaaucugcaucuga

SEQ ID NO: 171975 - RNA, 1701 nt, Artificial Sequence; identical to SEQ ID NO: 171962
  derived and/or modified CDS sequence (opt4) from hemagglutinin__InfluenzaA__AHV83789

SEQ ID NO: 171976 - RNA, 1701 nt, Artificial Sequence; identical to SEQ ID NO: 170100
  derived and/or modified CDS sequence (opt4) from hemagglutinin__InfluenzaA__AHV83790

SEQ ID NO: 171977 - RNA, 1701 nt, Artificial Sequence; identical to SEQ ID NO: 170100
  derived and/or modified CDS sequence (opt4) from hemagglutinin__InfluenzaA__AHV83791

SEQ ID NO: 171978 - RNA, 1701 nt, Artificial Sequence; identical to SEQ ID NO: 170100
  derived and/or modified CDS sequence (opt4) from hemagglutinin__InfluenzaA__AHV83792

SEQ ID NO: 171979 - RNA, 1701 nt, Artificial Sequence
  derived and/or modified CDS sequence (opt4) from hemagglutinin__InfluenzaA__AHV83793
augaaggccauccugguggugcugcuguacaccuucgccaccgccaacgccgacacccugugcaucggcuaccacgccaacaacagcaccgacaccguggacaccgugcuggagaagaacgugaccgugacccacagcgugaaccugcuggaggacaagcacaacggcaagcugugcaagcugagaggcguggccccccugcaccugggcaagugcaacaucgccggcuggauccugggcaaccccgagugcgagagccugagcaccgccagcagcuggagcuacaucguggagaccagcagcagcgacaacggcaccugcuaccccggcgacuucaucaacuacgaggagcugagagagcagcugagcagcgugagcagcuucgagaaguucgagaucuuccccaagaccagcagcuggcccaaccacgacagcaacaagggcgugaccgccgccugcccccacgccggcgccaagagcuucuacaagaaccugaucuggcuggugaagaagggcaacagcuaccccaagcugagccagagcuacaucaacgacaagggcaaggagauccuggugcuguggggcauccaccaccccagcaccaccgccgaccagcagagccuguaccagaacgccgacgccuacguguucgugggcaccagcagauacagcaagaaguucaagcccgagaucgccaucagacccaaggugagagaccaggagggcagaaugaacuacuacuggacccugguggagcccggcgacaagaucaccuucgaggccaccggcaaccugguggugcccagauacgccuucaccauggagagaaacgccggcagcggcaucaucaucagcgacacccccgugcacgacugcaacaccaccugccagacccccgagggcgccaucaacaccagccugcccuuccagaacauccaccccaucaccaucggcaagugccccaaguacgugaagagcaccaagcugagacuggccaccggccugagaaacgugcccagcauccagagcagaggccuguucggcgccaucgccggcuucaucgagggcggcuggaccggcaugguggacggcugguacggcuaccaccaccagaacgagcagggcagcggcuacgccgccgaccagaagagcacccagaacgccaucgacaagaucaccaacaaggugaacagcgugaucgagaagaugaacacccaguucaccgccgugggcaaggaguucaaccaccuggagaagagaaucgagaaccugaacaagaagguggacgacggcuuccuggacaucuggaccuacaacgccgagcugcuggugcugcuggagaacgagagaacccuggacuaccacgacagcaacgugaagaaccuguacgagaaggugagaaaccagcugaagaacaacgccaaggagaucggcaacggcugcuucgaguucuaccacaagugcgacaacaccugcauggagagcgugaagaacggcaccuacgacuaccccaaguacagcgaggaggccaagcugaacagagagaagaucgacggcgugaagcuggagagcaccagaaucuaccagauccuggccaucuacagcaccguggccagcagccuggugcugguggugagccugggcgccaucagcuucuggaugugcagcaacggcagccugcagugcagaaucugcaucuga

SEQ ID NO: 171980 - RNA, 1701 nt, Artificial Sequence
  derived and/or modified CDS sequence (opt4) from hemagglutinin__InfluenzaA__AHV83794
augaaggccauccugguggugcugcuguacaccuucgccaccgccaacgccgacacccugugcaucggcuaccacgccaacaacagcaccgacaccguggacaccgugcuggagaagaacgugaccgugacccacagcgugaaccugcuggaggacaagcacaacggcaagcugugcaagcugagaggcguggccccccugcaccugggcaagugcaacaucgccggcuggauccugggcaaccccgagugcgagagccugagcaccgccagcagcuggagcuacaucguggagaccagcagcagcgacaacggcaccugcuaccccggcgacuucaucaacuacgaggagcugagagagcagcugagcagcgugagcagcuucgagagauucgagaucuuccccaagaccagcagcuggcccaaccacgacagcaacaagggcgugaccgccgccugcccccacgccggcgccaagagcuucuacaagaaccugaucuggcuggugaagaagggcaacagcuaccccaagcugagccagagcuacaucaacgacaagggcaaggaggugcuggugcuguggggcauccaccaccccagcaccaccgccgaccagcagagccuguaccagaacgccgacgccuacguguucgugggcaccagcagauacagcaagaaguucaagcccgagaucgccaucagacccaaggugagagaccaggagggcagaaugaacuacuacuggacccugguggagcccggcgacaagaucaccuucgaggccaccggcaaccugguggugcccagauacgccuucaccauggagagaaacgccggcagcggcaucaucaucagcgacacccccgugcacgacugcaacaccaccugccagacccccgagggcgccaucaacaccagccugcccuuccagaacauccaccccaucaccaucggcaagugccccaaguacgugaagagcaccaagcugagacuggccaccggccugagaaacgugcccagcauccagagcagaggccuguucggcgccaucgccggcuucaucgagggcggcuggaccggcaugguggacggcugguacggcuaccaccaccagaacgagcagggcagcggcuacgccgccgaccagaagagcacccagaacgccaucgacaagaucaccaacaaggugaacagcgugaucgagaagaugaacacccaguucaccgccgugggcaaggaguucaaccaccuggagaagagaaucgagaaccugaacaagaagguggacgacggcuuccuggacaucuggaccuacaacgccgagcugcuggugcugcuggagaacgagagaacccuggacuaccacgacagcaacgugaagaaccuguacgagaaggugagaaaccagcugaagaacaacgccaaggagaucggcaacggcugcuucgaguucuaccacaagugcgacaacaccugcauggagagcgugaagaacggcaccuacgacuaccccaaguacagcgaggaggccaagcugaacagagagaagaucgacggcgugaagcuggagagcaccagaaucuaccagauccuggccaucuacagcaccguggccagcagccuggugcugguggugagccugggcgccaucagcuucuggaugugcagcaacggcagccugcagugcagaaucugcaucuga

SEQ ID NO: 171981 - RNA, 1701 nt, Artificial Sequence
  derived and/or modified CDS sequence (opt4) from hemagglutinin__InfluenzaA__AHV83795
augaaggccauccugguggugcugcuguacaccuucgccaccgccaacgccgacacccugugcaucggcuaccacgccaacaacagcaccgacaccguggacaccgugcuggagaagaacgugaccgugacccacagcgugaaccugcuggaggacaagcacaacggcaagcugugcaagcugagaggcguggccccccugcaccugggcaagugcaacaucgccggcuggauccugggcaaccccgagugcgagagccugagcgccgccagcagcuggagcuacaucguggagaccagcagcagcgacaacggcaccugcuaccccggcgacuucaucaacuacgaggagcugagagagcagcugagcagcgugagcagcuucgagagauucgagaucuuccccaagaccagcagcuggcccaaccacgacagcaacaagggcgugaccgccgccugcccccacgccggcgccaagagcuucuacaagaaccugaucuggcuggugaagaagggcaacagcuaccccaagcugagccagagcuacaucaacgacaagggcaaggaggugcuggugcuguggggcauccaccaccccagcaccaccgccgaccagcagagccuguaccagaacgccgacaccuacguguucgugggcaccagcagauacagcaagaaguucaagcccgagaucgccaucagacccaaggugagagaccaggagggcagaaugaacuacuacuggacccugguggagcccggcgacaagaucaccuucgaggccaccggcaaccugguggugcccagauacgccuucaccauggagagaaacgccggcagcggcaucaucaucagcgacacccccgugcacgacugcaacaccaccugccagacccccgagggcgccaucaacaccagccugcccuuccagaacauccaccccaucaccaucggcaagugccccaaguacgugaagagcaccaagcugagacuggccaccggccugagaaacgugcccagcauccagagcagaggccuguucggcgccaucgccggcuucaucgagggcggcuggaccggcaugguggacggcugguacggcuaccaccaccagaacgagcagggcagcggcuacgccgccgaccagaagagcacccagaacgccaucgacaagaucaccaacaaggugaacagcgugaucgagaagaugaacacccaguucaccgccgugggcaaggaguucaaccaccuggagaagagaaucgagaaccugaacaagaagguggacgacggcuuccuggacaucuggaccuacaacgccgagcugcuggugcugcuggagaacgagagaacccuggacuaccacgacagcaacgugaagaaccuguacgagaaggugagaaaccagcugaagaacaacgccaaggagaucggcaacggcugcuucgaguucuaccacaagugcgacaacaccugcauggagagcgugaagaacggcaccuacgacuaccccaaguacagcgaggaggccaagcugaacagagagaagaucgacggcgugaagcuggagagcaccaagaucuaccagauccuggccaucuacagcaccguggccagcagccuggugcugguggugagccugggcgccaucagcuucuggaugugcagcaacggcagccugcagugcagaaucugcaucuga

SEQ ID NO: 171982 - RNA, 1701 nt, Artificial Sequence; identical to SEQ ID NO: 171980
  derived and/or modified CDS sequence (opt4) from hemagglutinin__InfluenzaA__AHV83796

SEQ ID NO: 171983 - RNA, 1701 nt, Artificial Sequence; identical to SEQ ID NO: 170100
  derived and/or modified CDS sequence (opt4) from hemagglutinin__InfluenzaA__AHV83798

SEQ ID NO: 171984 - RNA, 1701 nt, Artificial Sequence; identical to SEQ ID NO: 170100
  derived and/or modified CDS sequence (opt4) from hemagglutinin__InfluenzaA__AHV83799

SEQ ID NO: 171985 - RNA, 1701 nt, Artificial Sequence
  derived and/or modified CDS sequence (opt4) from hemagglutinin__InfluenzaA__AHV83800
augaaggccauccugguggugcugcuguacaccuucgccaccgccaacgccgacacccugugcaucggcuaccacgccaacaacagcaccgacaccguggacaccgugcuggagaagaacgugaccgugacccacagcgugaaccugcuggaggacaagcacaacggcaagcugugcaagcugagaggcguggccccccugcaccugggcaagugcaacaucgccggcuggauccugggcaaccccgagugcgagagccugagcaccgccagcagcuggagcuacaucguggagaccagcagcagcgacaacggcaccugcuaccccggcgacuucaucaacuacgaggagcugagagagcagcugagcagcgugagcagcuucgagagauucgagaucuuccccaagaccagcagcuggcccaaccacgacagcaacaagggcgugaccgccgccugcccccacgccggcgccaagagcuucuacaagaaccugaucuggcuggugaagaagggcaacagcuaccccaagcugagccagagcuacaucaacgacaagggcaaggaggugcuggugcuguggggcauccaccaccccagcaccaccgccgaccagcagagccuguaccagaacgccgacgccuacguguucgugggcaccagcagauacagcaagaaguucaagcccgagaucgccaucagacccaaggugagagaccaggagggcagaaugaacuacuacuggacccugguggagcccggcgacaagaucaccuucgaggccaccggcaaccugguggugcccagauacgccuucaccauggagagaaacgccggcagcggcaucaucaucagcgacacccccgugcacgacugcaacaccaccugccagacccccgagggcgccaucaacaccagccugcccuuccagaacauccaccccaucaccaucggcaagugccccaaguacgugaagagcaccaagcugagacuggccaccggccugagaaacgugcccagcauccagagcagaggccuguucggcgccaucgccggcuucaucgagggcggcuggaccggcaugguggacggcugguacggcuaccaccaccagaacgagcagggcagcggcuacgccgccgaccugaagagcacccagaacgccaucgacaagaucaccaacaaggugaacagcgugaucgagaagaugaacacccaguucaccgccgugggcaaggaguucaaccaccuggagaagagaaucgagaaccugaacaagaagguggacgacggcuuccuggacaucuggaccuacaacgccgagcugcuggugcugcuggagaacgagaagacccuggacuaccacgacagcaacgugaagaaccuguacgagaaggugagaaaccagcugaagaacaacgccaaggagaucggcaacggcugcuucgaguucuaccacaagugcgacaacaccugcauggagagcgugaagaacggcaccuacgacuaccccaaguacagcgaggaggccaagcugaacagagagaagaucgacggcgugaagcuggagagcaccagaaucuaccagauccuggccaucuacagcaccguggccagcagccuggugcugguggugagccugggcgccaucagcuucuggaugugcagcaacggcagccugcagugcagaaucugcaucuga

SEQ ID NO: 171986 - RNA, 1701 nt, Artificial Sequence
  derived and/or modified CDS sequence (opt4) from hemagglutinin__InfluenzaA__AHV83801
augaaggccauccugguggugcugcuguacaccuucgccaccgccaacgccgacacccugugcaucggcuaccacgccaacaacagcaccgacaccguggacaccgugcuggagaagaacgugaccgugacccacagcgugaaccugcuggaggacaagcacaacggcaagcugugcaagcugagaggcguggccccccugcaccugggcaagugcaacaucgccggcuggauccugggcaaccccgagugcgagagccugagcaccgccagcagcuggagcuacaucguggagaccagcagcagcgacaacggcaccugcuaccccggcgacuucaucaacuacgaggagcugagagagcagcugagcagcgugagcagcuucgagagauucgagaucuuccccaagaccagcagcuggcccaaccacgacagcaacaagggcgugaccgccgccugcccccacgccggcgccaagagcuucuacaagaaccugaucuggcuggugaagaagggcaacagcuaccccaagcugagccagagcuacaucaacgacaagggcaaggaggugcuggugcuguggggcauccaccaccccagcaccaccgccgaccagcagagccuguaccagaacgccgacgccuacguguucgugggcaccagcagauacagcaagaaguucaagcccgagaucgccaucagacccaaggugagagaccaggagggcagaaugaacuacuacuggacccugguggagcccggcgacaagaucaccuucgaggccaccggcaaccugguggugcccagauacgccuucaccauggagagaaacgccggcagcggcaucaucaucagcgacacccccgugcacgacugcaacaccaccugccagacccccgagggcgccaucaacaccagccugcccuuccagaacauccaccccaucaccaucggcaagugccccaaguacgugaagagcaccaagcugagacuggccaccggccugagaaacgugcccagcauccagagcagaggccuguucggcgccaucgccggcuucaucgagggcggcuggaccggcaugguggacggcugguacggcuaccaccaccagaacgagcagggcagcggcuacgccgccgaccagaagagcacccagaacgccaucgacaagaucaccaacaaggugaacagcgugaucgagaagaugaacacccaguucaccgccgugggcaaggaguucaaccaccuggagaagagaaucgagaaccugaacaagaagguggacgacggcuuccuggacaucuggaccuacaacgccgagcugcuggugcugcuggagaacgagagaacccuggacuaccacgacagcaacgugaagaaccuguacgagaaggugagaaaccagcugaagaacaacgccaaggagaucggcaacggcugcuucgaguucuaccacaagugcgacaacaccugcauggagagcgugaagaacggcaccuacgacuaccccaaguacagcgaggaggccaagcugaacagagagaagaucgacggcgugaagcuggagagcaccaagaucuaccagauccuggccaucuacagcaccguggccagcagccuggugcugguggugagccugggcgccaucagcuucuggaugugcagcaacggcagccugcagugcagaaucugcaucuga

SEQ ID NO: 171987 - RNA, 1701 nt, Artificial Sequence
  derived and/or modified CDS sequence (opt4) from hemagglutinin__InfluenzaA__AHV83802
augaaggccauccugguggugcugcuguacaccuucgccaccgccaacgccgacacccugugcaucggcuaccacgccaacaacagcaccgacaccguggacaccgugcuggagaagaacgugaccgugacccacagcgugaaccugcuggaggacaagcacaacggcaagcugugcaagcugagaggcguggccccccugcaccugggcaagugcaacaucgccggcuggauccugggcaaccccgagugcgagagccugagcaccgccagcagcuggagcuacaucguggagaccagcagcagcgacaacggcaccugcuaccccggcgacuucaucaacuacgaggagcugagagagcagcugagcagcgugagcagcuucgagagauucgagaucuuccccaagaccagcagcuggcccaaccacgacagcaacaagggcgugaccgccgccugcccccacgccggcgccaagagcuucuacaagaaccugaucuggcuggugaagaagggcaacagcuaccccaagcugagccagagcuacaucaacgacaagggcaaggaggugcuggugcuguggggcauccaccaccccagcaccaccgccgaccagcagggccuguaccagaacguggacgccuacguguucgugggcaccagcagauacagcaagaaguucaagcccgagaucgccaucagacccaaggugagagaccaggagggcagaaugaacuacuacuggacccugguggagcccggcgacaagaucaccuucgaggccaccggcaaccugguggugcccagauacgccuucaccauggagagaaacgccggcagcggcaucaucaucagcgacacccccgugcacgacugcaacaccaccugccagacccccgagggcgccaucaacaccagccugcccuuccagaacauccaccccaucaccaucggcaagugccccaaguacgugaagagcaccaagcugagacuggccaccggccugagaaacgugcccagcauccagagcagaggccuguucggcgccaucgccggcuucaucgagggcggcuggaccggcaugguggacggcugguacggcuaccaccaccagaacgagcagggcagcggcuacgccgccgaccugaagagcacccagaacgccaucgacaagaucaccaacaaggugaacagcgugaucgagaagaugaacacccaguucaccgccgugggcaaggaguucaaccaccuggagaagagaaucgagaaccugaacaagaagguggacgacggcuuccuggacaucuggaccuacaacgccgagcugcuggugcugcuggagaacgagagaacccuggacuaccacgacagcaacgugaagaaccuguacgagaaggugagaaaccagcugaagaacaacgccaaggagaucggcaacggcugcuucgaguucuaccacaagugcgacaacaccugcauggagagcgugaagaacggcaccuacgacuaccccaaguacagcgaggaggccaagcugaacagagagaagaucgacggcgugaagcuggagagcaccagaaucuaccagauccuggccaucuacagcaccguggccagcagccuggugcugguggugagccugggcgccaucagcuucuggaugugcagcaacggcagccugcagugcagaaucugcaucuga

SEQ ID NO: 171988 - RNA, 1701 nt, Artificial Sequence; identical to SEQ ID NO: 170100
  derived and/or modified CDS sequence (opt4) from hemagglutinin__InfluenzaA__AHV83803

SEQ ID NO: 171989 - RNA, 1701 nt, Artificial Sequence; identical to SEQ ID NO: 170100
  derived and/or modified CDS sequence (opt4) from hemagglutinin__InfluenzaA__AHV83804

SEQ ID NO: 171990 - RNA, 1701 nt, Artificial Sequence; identical to SEQ ID NO: 170100
  derived and/or modified CDS sequence (opt4) from hemagglutinin__InfluenzaA__AHV83805

SEQ ID NO: 171991 - RNA, 1701 nt, Artificial Sequence; identical to SEQ ID NO: 171980
  derived and/or modified CDS sequence (opt4) from hemagglutinin__InfluenzaA__AHV83806

SEQ ID NO: 171992 - RNA, 1701 nt, Artificial Sequence
  derived and/or modified CDS sequence (opt4) from hemagglutinin__InfluenzaA__AHV83807
augaaggccauccugguggugcugcuguacaccuucgccaccgccaacgccgacacccugugcaucggcuaccacgccaacaacagcaccgacaccguggacaccgugcuggagaaggacgugaccgugacccacagcgugaaccugcuggaggacaagcacaacggcaagcugugcaagcugagaggcguggccccccugcaccugggcaagugcaacaucgccggcuggauccugggcaaccccgagugcgagagccugagcaccgccagcagcuggagcuacaucguggagaccagcagcagcgacaacggcaccugcuaccccggcgacuucaucaacuacgaggagcugagagagcagcugagcagcgugagcagcuucgagagauucgagaucuuccccaagaccagcagcuggcccaaccacgacagcaacaagggcgugaccgccgccugcccccacgccggcgccaagagcuucuacaagaaccugaucuggcuggugaagaagggcaacagcuaccccaagcugagccagagcuacaucaacgacaagggcaaggaggugcuggugcuguggggcauccaccaccccagcaccaccgccgaccagcagagccuguaccagaacgccgacgccuacguguucgugggcaccagcagauacagcaagaaguucaagcccgagaucgccaucagacccaaggugagagaccaggagggcagaaugaacuacuacuggacccugguggagcccggcgacaagaucaccuucgaggccaccggcaaccugguggugcccagauacgccuucaccauggagagaaacgccggcagcggcaucaucaucagcgacacccccgugcacgacugcaacaccaccugccagacccccgagggcgccaucaacaccagccugcccuuccagaacauccaccccaucaccaucggcaagugccccaaguacgugaagagcaccaagcugagacuggccaccggccugagaaacgugcccagcauccagagcagaggccuguucggcgccaucgccggcuucaucgagggcggcuggaccggcaugguggacggcugguacggcuaccaccaccagaacgagcagggcagcggcuacgccgccgaccugaagagcacccagaacgccaucgacaagaucaccaacaaggugaacagcgugaucgagaagaugaacacccaguucaccgccgugggcaaggaguucaaccaccuggagaagagaaucgagaaccugaacaagaagguggacgacggcuuccuggacaucuggaccuacaacgccgagcugcuggugcugcuggagaacgagagaacccuggacuaccacgacagcaacgugaagaaccuguacgagaaggugagaaaccagcugaagaacaacgccaaggagaucggcaacggcugcuucgaguucuaccacaagugcgacaacaccugcauggagagcgugaagaacggcaccuacgacuaccccaaguacagcgaggaggccaagcugaacagagagaagaucgacggcgugaagcuggagagcaccagaaucuaccagauccuggccaucuacagcaccguggccagcagccuggugcugguggugagccugggcgccaucagcuucuggaugugcagcaacggcagccugcagugcagaaucugcaucuga

SEQ ID NO: 171993 - RNA, 1701 nt, Artificial Sequence
  derived and/or modified CDS sequence (opt4) from hemagglutinin__InfluenzaA__AHV83808
augaaggccauccugguggugcugcuguacaccuucgccaccgccaacgccgacacccugugcaucggcuaccacgccaacaacagcaccgacaccguggacaccgugcuggagaagaacgugaccgugacccacagcgugaaccugcuggaggacaagcacaacggcaagcugugcaagcugagaggcguggccccccugcaccugggcaagugcaacaucgccggcuggauccugggcaaccccgagugcgagagccugagcaccgccagcagcuggagcuacaucguggagaccagcagcagcgacaacggcaccugcuaccccggcgacuucaucaacuacgaggagcugagagagcagcugagcagcgugagcagcuucgagagauucgagaucuuccccaagaccagcagcuggcccaaccacgacagcaacaagggcgugaccgccgccugcccccacgccggcgccaagagcuucuacaagaaccugaucuggcuggugaagaagggcaacagcuaccccaagcugagccagagcuacaucaacgacaagggcaaggaggugcuggugcuguggggcauccaccaccccagcaccaccgccgaccagcagagccuguaccagaacgccgaggccuacguguucgugggcaccagcagauacagcaagaaguucaagcccgagaucgccaucagacccaaggugagagaccaggagggcagaaugaacuacuacuggacccugguggagcccggcgacaagaucaccuucgaggccaccggcaaccugguggugcccagauacgccuucaccauggagagaaacgccggcagcggcaucaucaucagcgacacccccgugcacgacugcaacaccaccugccagacccccgagggcgccaucaacaccagccugcccuuccagaacauccaccccaucaccaucggcaagugccccaaguacgugaagagcaccaagcugagacuggccaccggccugagaaacgugcccagcauccagagcagaggccuguucggcgccaucgccggcuucaucgagggcggcuggaccggcaugguggacggcugguacggcuaccaccaccagaacgagcagggcagcggcuacgccgccgaccugaagagcacccagaacgccaucgacaagaucaccaacaaggugaacagcgugaucgagaagaugaacacccaguucaccgccgugggcaaggaguucaaccaccuggagaagagaaucgagaaccugaacaagaagguggacgacggcuuccuggacaucuggaccuacaacgccgagcugcuggugcugcuggagaacgagagaacccuggacuaccacgacagcaacgugaagaaccuguacgagaaggugagaaaccagcugaagaacaacgccaaggagaucggcaacggcugcuucgaguucuaccacaagugcgacaacaugugcauggagagcgugaagaacggcaccuacgacuaccccaaguacagcgaggaggccaagcugaacagagagaagaucgacggcgugaagcuggagagcaccagaaucuaccagauccuggccaucuacagcaccguggccagcagccuggugcugguggugagccugggcgccaucagcuucuggaugugcagcaacggcagccugcagugcagaaucugcaucuga

SEQ ID NO: 171994 - RNA, 1701 nt, Artificial Sequence; identical to SEQ ID NO: 170100
  derived and/or modified CDS sequence (opt4) from hemagglutinin__InfluenzaA__AHV83809

SEQ ID NO: 171995 - RNA, 1701 nt, Artificial Sequence; identical to SEQ ID NO: 171081
  derived and/or modified CDS sequence (opt4) from hemagglutinin__InfluenzaA__AHV83810

SEQ ID NO: 171996 - RNA, 1701 nt, Artificial Sequence
  derived and/or modified CDS sequence (opt4) from hemagglutinin__InfluenzaA__AHV83812
augaaggccauccugguggugcugcuguacaccuucaccaccgccaacgccgacacccugugcaucggcuaccacgccaacaacagcaccgacaccguggacaccgugcuggagaagaacgugaccgugacccacagcgugaaccugcuggaggacaagcacaacggcaagcugugcaagcugagaggcguggccccccugcaccugggcaagugcaacaucgccggcuggauccugggcaaccccgagugcgagagccugagcaccgccagcagcuggagcuacaucguggagaccagcagcagcgacaacggcaccugcuaccccggcgacuucaucaacuacgaggagcugagagagcagcugagcagcgugagcagcuucgagagauucgagaucuuccccaagaccagcagcuggcccaaccacgacagcaacaagggcgugaccgccgccugcccccacgccggcgccaagagcuucuacaagaaccugaucuggcuggugaagaagggcaacagcuaccccaagcugagccagagcuacaucaacgacaagggcaaggaggugcuggugcuguggggcauccaccaccccagcaccaccgccgaccagcagagccuguaccagaacgccgacgccuacguguucgugggcaccagcagauacagcaagaaguucaagcccgagaucgccaucagacccaaggugagagaccaggagggcagaaugaacuacuacuggacccugguggagcccggcgacaagaucaccuucgaggccaccggcaaccugguggugcccagauacgccuucaccauggagagaaacgccggcagcggcaucaucaucagcgacacccccgugcacgacugcaacaccaccugccagacccccgagggcgccaucaacaccagccugcccuuccagaacauccaccccaucaccaucggcaagugccccaaguacgugaagagcaccaagcugagacuggccaccggccugagaaacgugcccagcauccagagcagaggccuguucggcgccaucgccggcuucaucgagggcggcuggaccggcaugguggacggcugguacggcuaccaccaccagaacgagcagggcagcggcuacgccgccgaccugaagagcacccagaacgccaucgacaagaucaccaacaaggugaacagcgugaucgagaagaugaacacccaguucaccgccgugggcaaggaguucaaccaccuggagaagagaaucgagaaccugaacaagaagguggacgacggcuuccuggacaucuggaccuacaacgccgagcugcuggugcugcuggagaacgagagaacccuggacuaccacgacagcaacgugaagaaccuguacgagaaggugagaaaccagcugaagaacaacgccaaggagaucggcaacggcugcuucgaguucuaccacaagugcgacaacaccugcauggagagcgugaagaacggcaccuacgaguaccccaaguacagcgaggaggccaagcugaacagagagaagaucgacggcgugaagcuggagagcaccaagaucuaccagauccuggccaucuacagcaccguggccagcagccuggugcugguggugagccugggcgccaucagcuucuggaugugcagcaacggcagccugcagugcagaaucugcaucuga

SEQ ID NO: 171997 - RNA, 1701 nt, Artificial Sequence; identical to SEQ ID NO: 170100
  derived and/or modified CDS sequence (opt4) from hemagglutinin__InfluenzaA__AHV83813

SEQ ID NO: 171998 - RNA, 1701 nt, Artificial Sequence
  derived and/or modified CDS sequence (opt4) from hemagglutinin__InfluenzaA__AHV83814
augaaggccauccugguggugcugcuguacaccuucgccaccgccaacgccgacacccugugcaucggcuaccacgccaacaacagcaccgacaccguggacaccgugcuggagaagaacgugaccgugacccacagcgugaaccugcuggaggacaagcacaacggcaagcugugcaagcugagaggcguggccccccugcaccugggcaagugcaacaucgccggcuggauccugggcaaccccgagugcgagagccugagcaccgccagcagcuggagcuacaucguggagaccagcagcagcgacaacggcaccugcuaccccggcgacuucaucaacuacgaggagcugagagagcagcugagcagcgugagcagcuucgagagauucgagaucuuccccaagaccagcagcuggcccaaccacgacagcaacaagggcgugaccgccgccugcccccacgccggcgccaagagcuucuacaagaaccugaucuggcuggugaagaagggcaacagcuaccccaagcugagccagagcuacaucaacgacaagggcaaggaggugcuggugcuguggggcauccaccaccccagcaccaccgccgaccagcagagccuguaccagaacgccgacgccuacguguucgugggcaccagcagauacagcaagaaguucaagcccgagaucgccaucagacccaaggugagagaccaggagggcagaaugaacuacuacuggacccugguggagcccggcgacaagaucaccuucgaggccaccggcaaccugguggugcccagauacgccuucaccauggagagaaacgccggcagcggcaucaucaucagcgacacccccgugcacgacugcaacaccaccugccagacccccgagggcgccaucaacaccagccugcccuuccagaacauccaccccaucaccaucggcaagugccccaaguacgugaagagcaccaagcugagacuggccaccggccugagaaacgugcccagcauccagagcagaggccuguucggcgccaucgccggcuucaucgagggcggcuggaccggcaugguggacggcugguacggcuaccaccaccagaacgagcagggcagcggcuacgccgccgaccugaagagcacccagaacgccaucgacaagaucaccaacaaggugaacagcgugaucgagaagaugaacacccaguucaccgccgugggcaaggaguucaaccaccuggagaagagaaucgagaaccugaacaagaagguggacgacggcuuccuggacaucuggaccuacaacgccgagcugcuggugcugcuggagaacgagagaaaccuggacuaccacgacagcaacgugaagaaccuguacgagaaggugagaaaccagcugaagaccaacgccaaggagaucggcaacggcugcuucgaguucuaccacaagugcgacaacaccugcauggagagcgugaagaacggcaccuacgacuaccccaaguacagcgaggaggccaagcugaacagagagaagaucgacggcgugaagcuggagagcaccagaaucuaccagauccuggccaucuacagcaccguggccagcagccuggugcugguggugagccugggcgccaucagcuucuggaugugcagcaacggcagccugcagugcagaaucugcaucuga

SEQ ID NO: 171999 - RNA, 1701 nt, Artificial Sequence; identical to SEQ ID NO: 171081
  derived and/or modified CDS sequence (opt4) from hemagglutinin__InfluenzaA__AHV83815

SEQ ID NO: 172000 - RNA, 1701 nt, Artificial Sequence; identical to SEQ ID NO: 170100
  derived and/or modified CDS sequence (opt4) from hemagglutinin__InfluenzaA__AHV83816

SEQ ID NO: 172001 - RNA, 1701 nt, Artificial Sequence
  derived and/or modified CDS sequence (opt4) from hemagglutinin__InfluenzaA__AHV83817
augaaggccauccugguggugcugcuguacaccuucgccaccgccaacgccgacacccugugcaucggcuaccacgccaacaacagcaccgacaccguggacaccgugcuggagaagaacgugaccgugacccacagcgugaaccugcuggaggacaagcacaacggcaagcugugcaagcugagaggcguggccccccugcaccugggcaagugcaacaucgccggcuggauccugggcaaccccgagugcgagagccugagcaccgccagcagcuggagcuacaucguggagaccagcagcagcgacaacggcaccugcuaccccggcgacuucaucaacuacgaggagcugagagagcagcugagcagcgugagcagcuucgagagauucgagaucuuccccaagaccagcagcuggcccaaccacgacagcaacaagggcgugaccgccgccugcccccacgccggcgccaagagcuucuacaagaaccugguguggcuggugaagaagggcaacagcuaccccaagcugagccagagcuacaucaacgacaagggcaaggaggugcuggugcuguggggcauccaccaccccagcaccaccgccgaccagcagagccuguaccagaacgccgacgccuacguguucgugggcaccagcagauacagcaagaaguucaagcccgagaucgccaucagacccaaggugagagaccaggagggcagaaugaacuacuacuggacccugguggagcccggcgacaagaucaccuucgaggccaccggcaaccugguggugcccagauacgccuucaccauggagagaaacgccggcagcggcaucaucaucagcgacacccccgugcacgacugcaacaccaccugccagacccccgagggcgccaucaacaccagccugcccuuccagaacauccaccccaucaccaucggcaagugccccaaguacgugaagagcaccaagcugagacuggccaccggccugagaaacgugcccagcauccagagcagaggccuguucggcgccaucgccggcuucaucgagggcggcuggaccggcaugguggacggcugguacggcuaccaccaccagaacgagcagggcagcggcuacgccgccgaccugaagagcacccagaacgccaucgacaagaucaccaacaaggugaacagcgugaucgagaagaugaacacccaguucaccgccgugggcaaggaguucaaccaccuggagaagagaaucgagaaccugaacaagaagguggacgacggcuuccuggacaucuggaccuacaacgccgagcugcuggugcugcuggagaacgagagaacccuggacuaccacgacagcaacgugaagaaccuguacgagaaggugagaaaccagcugaagaacaacgccaaggagaucggcaacggcugcuucgaguucuaccacaagugcgacaacaccugcauggagagcgugaagaacggcaccuacgacuaccccaaguacagcgaggaggccaagcugaacagagagaagaucgacggcgugaagcuggagagcaccagaaucuaccagauccuggccaucuacagcaccguggccagcagccuggugcugguggugagccugggcgccaucagcuucuggaugugcagcaacggcagccugcagugcagaaucugcaucuga

SEQ ID NO: 172002 - RNA, 1701 nt, Artificial Sequence; identical to SEQ ID NO: 171980
  derived and/or modified CDS sequence (opt4) from hemagglutinin__InfluenzaA__AHV83818

SEQ ID NO: 172003 - RNA, 1701 nt, Artificial Sequence; identical to SEQ ID NO: 171962
  derived and/or modified CDS sequence (opt4) from hemagglutinin__InfluenzaA__AHV83819

SEQ ID NO: 172004 - RNA, 1701 nt, Artificial Sequence
  derived and/or modified CDS sequence (opt4) from hemagglutinin__InfluenzaA__AHV83821
augaaggccauccugguggugcugcuguacaccuucgccaccgccaacgccgacacccugugcaucggcuaccacgccaacaacagcaccgacaccguggacaccgugcuggagaagaacgugaccgugacccacagcgugaaccugcuggaggacaagcacaacggcaagcugugcaagcugagaggcgugagcccccugcaccugggcaagugcaacaucgccggcuggauccugggcaaccccgagugcgagagccugagcaccgccagcagcuggagcuacaucguggagaccagcagcagcgacaacggcaccugcuaccccggcgacuucgugaacuacgaggagcugagagagcagcugagcagcgugagcagcuucgagagauucgagaucuuccccaagaccagcagcuggcccaaccacgacagcaacaagggcgugaccgccgccugcccccacgccggcgccaagagcuucuacaagaaccugaucuggcuggugaagaagggcaacagcuaccccaagcugagccagagcuacaucaacgacaagggcaaggaggugcuggugcuguggggcauccaccaccccagcaccaccgccgaccagcagagccuguaccagaacgccgacgccuacguguucgugggcaccagcagauacagcaagaaguucaagcccgagaucgccaucagacccaaggugagagaccaggagggcagaaugaacuacuacuggacccugguggagcccggcgacaagaucaccuucgaggccaccggcaaccugguggugcccagauacgccuucaccauggagagaaacgccggcagcggcaucaucaucagcgacacccccgugcacaacugcaacaccaccugccagacccccgagggcgccaucaacaccagccugcccuuccagaacauccaccccaucaccaucggcaagugccccaaguacgugaagagcaccaagcugagacuggccaccggccugagaaacgugcccagcauccagagcagaggccuguucggcgccaucgccggcuucaucgagggcggcuggaccggcaugguggacggcugguacggcuaccaccaccagaacgagcagggcagcggcuacgccgccgaccugaagagcacccagaacgccaucgacaagaucaccaacaaggugaacagcgugaucgagaagaugaacacccaguucaccgccgugggcaaggaguucaaccaccuggagaagagaaucgagaaccugaacaagaagguggacgacggcuuccuggacaucuggaccuacaacgccgagcugcuggugcugcuggagaacgagagaacccuggacuaccacgacagcaacgugaagaaccuguacgagaaggugagaaaccagcugaagaacaacgccaaggagaucggcaacggcugcuucgaguucuaccacaagugcgacaacaccugcauggagagcgugaagaacggcaccuacgacuaccccaaguacagcgaggaggccaagcugaacagagagaagaucgacggcgugaagcuggagagcaccagaaucuaccagauccuggccaucuacagcaccguggccagcagccuggugcugguggugagccugggcgccaucagcuucuggaugugcagcaacggcagccugcagugcagaaucugcaucuga

SEQ ID NO: 172005 - RNA, 1701 nt, Artificial Sequence
  derived and/or modified CDS sequence (opt4) from hemagglutinin__InfluenzaA__AHV83822
augaaggccauccugguggugcugcuguacaccuucgccaccgccaacgccgacacccugugcaucggcuaccacgccaacaacagcaccgacaccguggacaccgugcuggagaagaacgugaccgugacccacagcgugaaccugcuggaggacaagcacaacggcaagcugugcaagcugagaggcgugagcccccugcaccugggcaagugcaacaucgccggcuggauccugggcaaccccgagugcgagagccugagcaccgccagcagcuggagcuacaucguggagaccagcagcagcgacaacggcaccugcuaccccggcgacuucgugaacuacgaggagcugagagagcagcugagcagcgugagcagcuucgagagauucgagaucuuccccaagaccagcagcuggcccaaccacgacagcaacaagggcgugaccgccgccugcccccacgccggcgccaagagcuucuacaagaaccugaucuggcuggugaagaagggcaacagcuaccccaagcugagccagagcuacaucaacgacaagggcaaggaggugcuggugcuguggggcauccaccaccccagcaccaccgccgaccagcagagccuguaccagaacgccgacgccuacguguucgugggcaccagcagauacagcaagaaguucaagcccgagaucgccaucagacccaaggugagagaccaggagggcagaaugaacuacuacuggacccugguggagcccggcgacaagaucaccuucgaggccaccggcaaccugguggugcccagauacgccuucaccauggagagaaacgccggcagcggcaucaucaucagcgacacccccgugcacgacugcaacaccaccugccagacccccgagggcgccaucaacaccagccugcccuuccagaacauccaccccaucaccaucggcaagugccccaaguacgugaagagcaccaagcugagacuggccaccggccugagaaacgugcccagcauccagagcagaggccuguucggcgccaucgccggcuucaucgagggcggcuggaccggcaugguggacggcugguacggcuaccaccaccagaacgagcagggcagcggcuacgccgccgaccugaagagcacccagaacgccaucgacaagaucaccaacaaggugaacagcaucaucgagaagaugaacacccaguucaccgccgugggcaaggaguucaaccaccuggagaagagaaucgagaaccugaacaagaagguggacgacggcuuccuggacaucuggaccuacaacgccgagcugcuggugcugcuggagaacgagagaacccuggacuaccacgacagcaacgugaagaaccuguacgagaaggugagaaaccagcugaagaacaacgccaaggagaucggcaacggcugcuucgaguucuaccacaagugcgacaacaccugcauggagagcgugaagaacggcaccuacgacuaccccaaguacagcgaggaggccaagcugaacagagagaagaucgacggcgugaagcuggagagcaccagaaucuaccagauccuggccaucuacagcaccguggccagcagccuggugcugguggugagccugggcgccaucagcuucuggaugugcagcaacggcagccugcagugcagaaucugcaucuga

SEQ ID NO: 172006 - RNA, 1701 nt, Artificial Sequence
  derived and/or modified CDS sequence (opt4) from hemagglutinin__InfluenzaA__AHV83823
augaaggccauccugguggugcugcuguacaccuucgccaccgccaacgccgacacccugugcaucggcuaccacgccaacaacagcaccgacaccguggacaccgugcuggagaagaacgugaccgugacccacagcgugaaccugcuggaggacaagcacaacggcaagcugugcaagcugagaggcguggccccccugcaccugggcaagugcaacaucgccggcuggauccugggcaaccccgagugcgagagccugagcaccgccagcagcuggagcuacaucguggagaccagcagcagcgacaacggcaccugcuaccccggcgacuucaucaacuacgaggagcugagagagcagcugagcagcgugagcagcuucgagagauucgagaucuuccccaagaccagcagcuggcccaaccacgacagcaacaagggcgugaccgccgccugcccccacgccggcgccaagagcuucuacaagaaccugaucuggcuggugaagaagggcaacagcuaccccaagaucagccagagcuacaucaacgacaagggcaaggaggugcuggugcuguggggcauccaccaccccagcaccaccgccgaccagcagagccuguaccagaacgccgacgccuacguguucgugggcaccagcagauacagcaagaaguucaagcccgagaucgccaucagacccaaggugagagaccaggagggcagaaugaacuacuacuggacccugguggagcccggcgacaagaucaccuucgaggccaccggcaaccugguggugcccagauacgccuucaccauggagagaaacaccggcagcggcaucaucaucagcgacacccccgugcacgacugcaacaccaccugccagacccccgagggcgccaucaacaccagccugcccuuccagaacauccaccccaucaccaucggcaagugccccaaguacgugaagagcaccaagcugagacuggccaccggccugagaaacgugcccagcauccagagcagaggccuguucggcgccaucgccggcuucaucgagggcggcuggaccggcaugguggacggcugguacggcuaccaccaccagaacgagcagggcagcggcuacgccgccgaccugaagagcacccagaacgccaucgacaagaucaccaacaaggugaacagcgugaucgagaagaugaacacccaguucaccgccgugggcaaggaguucaaccaccuggagaagagaaucgagaaccugaacaagaagguggacgacggcuuccuggacaucuggaccuacaacgccgagcugcuggugcugcuggagaacgagagaacccuggacuaccacgacagcaacgugaagaaccuguacgagaaggugagaaaccagcugaagaacaacgccaaggagaucggcaacggcugcuucgaguucuaccacaagugcgacaacaccugcauggagagcgugaagaacggcaccuacgacuaccccaaguacagcgaggaggccaagcugaacagagagaagaucgacggcgugaagcuggagagcaccagaaucuaccagauccuggccaucuacagcaccguggccagcagccuggugcugguggugagccugggcgccaucagcuucuggaugugcagcaacggcagccugcagugcagaaucugcaucuga

SEQ ID NO: 172007 - RNA, 1701 nt, Artificial Sequence
  derived and/or modified CDS sequence (opt4) from hemagglutinin__InfluenzaA__AHV83824
augaaggccauccugguggugcugcuguacaccuucgccaccgccaacgccgacacccugugcaucggcuaccacgccaacaacagcaccgacaccguggacaccgugcuggagaagaacgugaccgugacccacagcgugaaccugcuggaggacaagcacaacggcaagcugugcaagcugagaggcguggccccccugcaccugggcaagugcaacaucgccggcuggauccugggcaaccccgagugcgagagccugagcaccgccagcagcuggagcuacaucguggagaccagcagcagcgacaacggcaccugcuaccccggcgacuucaucaacuacgaggagcugagagagcagcugagcagcgugagcagcuucgagagauucgagaucuuccccaagaccagcagcuggcccaaccacgacagcaacaagggcgugaccgccgccugcccccacgccggcgccaagagcuucuacaagaaccugaucuggcuggugaagaagggcaacagcuaccccaagcugagacagagcuacaucaacgacaagggcaaggaggugcuggugcuguggggcauccaccaccccagcaccaccaccgaccagcagagccuguaccagaacgccgacgccuacguguucgugggcaccagcagauacagcaagaaguucaagcccgagaucgccaucagacccaaggugagagaccaggagggcagaaugaacuacuacuggacccugguggagcccggcgacaagaucaccuucgaggccaccggcaaccugguggugcccagauacgccuucaccauggagagaaacgccggcagcggcaucaucaucagcgacacccccgugcacgacugcaacaccaccugccagacccccgagggcgccaucaacaccagccugcccuuccagaacauccaccccaucaccaucggcaagugccccaaguacgugaagagcaccaagcugagacuggccaccggccugagaaacgugcccagcauccagagcagaggccuguucggcgccaucgccggcuucaucgagggcggcuggaccggcaugguggacggcugguacggcuaccaccaccagaacgagcagggcagcggcuacgccgccgaccugaagagcacccagaacgccaucgacaagaucaccaacaaggugaacagcgugaucgagaagaugaacacccaguucaccgccgugggcaaggaguucaaccaccuggagaagagaaucgagaaccugaacaagaagguggacgacggcuuccuggacaucuggaccuacaacgccgagcugcuggugcugcuggagaacgagagaaaccuggacuaccacgacagcaacgugaagaaccuguacgagaaggugagaaaccagcugaagaacaacgccaaggagaucggcaacggcugcuucgaguucuaccacaagugcgacaacaccugcauggagagcgugaagaacggcaccuacgacuaccccaaguacagcgaggaggccaagcugaacagagagaagaucgacggcgugaagcuggagagcaccagaaucuaccagauccuggccaucuacagcaccguggccagcagccuggugcugguggugagccugggcgccaucagcuucuggaugugcagcaacggcagccugcagugcagaaucugcaucuga

SEQ ID NO: 172008 - RNA, 1701 nt, Artificial Sequence; identical to SEQ ID NO: 171980
  derived and/or modified CDS sequence (opt4) from hemagglutinin__InfluenzaA__AHV83825

SEQ ID NO: 172009 - RNA, 1701 nt, Artificial Sequence
  derived and/or modified CDS sequence (opt4) from hemagglutinin__InfluenzaA__AHV83826
augaaggccauccugguggugcugcuguacaccuucgccaccgccaacgccgacacccugugcaucggcuaccacgccaacaacagcaccgacaccguggacaccgugcuggagaagaacgugaccgugacccacagcgugaaccugcuggaggacaagcacaacggcaagcugugcaagcugagaggcguggccccccugcaccugggcaagugcaacaucgccggcuggauccugggcaaccccgagugcgagagccugagcaccgccagcagcuggagcuacaucguggagaccagcagcagcgacaacggcaccugcuaccccggcgacuucaucaacuacgaggagcugagagagcagcugagcagcgugagcagcuucgagagauucgagaucuuccccaagaccagcagcuggcccaaccacgacagcaacaagggcgugaccgccgccugcccccacgccggcgccaagagcuucuacaagaaccugaucuggcuggugaagaagggcaacagcuaccccaagcugagccagagcuacuucaacgacaagggcaaggaggugcuggugcuguggggcauccaccaccccagcaccaccgccgaccagcagagccuguaccagaacgccgacgccuacguguucgugggcaccagcagauacagcaagaaguucaagcccgagaucgccaucagacccaaggugagagaccaggagggcagaaugaacuacuacuggacccugguggagcccggcgacaagaucaccuucgaggccaccggcaaccugguggugcccagauacgccuucaccauggagagaaacgccggcagcggcaucaucaucagcgacacccccgugcacgacugcaacaccaccugccagacccccgagggcgccaucaacaccagccugcccuuccagaacauccaccccaucaccaucggcaagugccccaaguacgugaagagcaccaagcugagacuggccaccggccugagaaacgugcccagcauccagagcagaggccuguucggcgccaucgccggcuucaucgagggcggcuggaccggcaugguggacggcugguacggcuaccaccaccagaacgagcagggcagcggcuacgccgccgaccugaagagcacccagaacgccaucgacaagaucaccaacaaggugaacagcgugaucgagaagaugaacacccaguucaccgccgugggcaaggaguucaaccaccuggagaagagaaucgagaaccugaacaagaagguggacgacggcuuccuggacaucuggaccuacaacgccgagcugcuggugcugcuggagaacgagagaacccuggacuaccacgacagcaacgugaagaaccuguacgagaaggugagaaaccagcugaagaacaacgccaaggagaucggcaacggcugcuucgaguucuaccacaagugcgacaacaccugcauggagagcgugaagaacggcaccuacgacuaccccaaguacagcgaggaggccaagcugaacagagagaagaucgacggcgugaagcuggagagcaccagaaucuaccagauccuggccaucuacagcaccgccgccagcagccuggugcugguggugagccugggcgccaucagcuucuggaugugcagcaacggcagccugcagugcagaaucugcaucuga

SEQ ID NO: 172010 - RNA, 1701 nt, Artificial Sequence; identical to SEQ ID NO: 170100
  derived and/or modified CDS sequence (opt4) from hemagglutinin__InfluenzaA__AHV83827

SEQ ID NO: 172011 - RNA, 1701 nt, Artificial Sequence; identical to SEQ ID NO: 170100
  derived and/or modified CDS sequence (opt4) from hemagglutinin__InfluenzaA__AHV83828

SEQ ID NO: 172012 - RNA, 1701 nt, Artificial Sequence
  derived and/or modified CDS sequence (opt4) from hemagglutinin__InfluenzaA__AHV83829
auggaggccauccugguggugcugcuguacaccuucgccaccgccaacgccgacacccugugcaucggcuaccacgccaacaacagcaccgacaccguggacaccgugcuggagaagaacgugaccgugacccacagcgugaaccugcuggaggacaagcacaacggcaagcugugcaagcugagaggcguggccccccugcaccugggcaagugcaacaucgccggcuggauccugggcaaccccgagugcgagagccugagcaccgccagcagcuggagcuacaucguggagaccagcagcagcgacaacggcaccugcuaccccggcgacuucaucaacuacgaggagcugagagagcagcugagcagcgugagcagcuucgagagauucgagaucuuccccaagaccagcagcuggcccaaccacgacagcaacaagggcgugaccgccgccugcccccacgccggcgccaagagcuucuacaagaaccugaucuggcuggugaagaagggcaacagcuaccccaagaucagccagagcuacaucaacgacaagggcaaggaggugcuggugcuguggggcauccaccaccccagcaccaccgccgaccagcagagccuguaccagaacgccgacgccuacguguucgugggcaccagcagauacagcaagaaguucaagcccgagaucgccaucagacccaaggugagagaccaggagggcagaaugaacuacuacuggacccugguggagcccggcgacaagaucaccuucgaggccaccggcaaccugguggugcccagauacgccuucaccauggagagaaacgccggcagcggcaucaucaucagcgacacccccgugcacgacugcaacaccaccugccagacccccgagggcgccaucaacaccagccugcccuuccagaacauccaccccaucaccaucggcaagugccccaaguacgugaagagcaccaagcugagacuggccaccggccugagaaacgugcccagcauccagagcagaggccuguucggcgccaucgccggcuucaucgagggcggcuggaccggcaugguggacggcugguacggcuaccaccaccagaacgagcagggcagcggcuacgccgccgaccugaagagcacccagaacgccaucgacaagaucaccaacaaggugaacagcgugaucgagaagaugaacacccaguucaccgccgugggcaaggaguucaaccaccuggagaagagaaucgagaaccugaacaagaagguggacgacggcuuccuggacaucuggaccuacaacgccgagcugcuggugcugcuggagaacgagagaacccuggacuaccacgacagcaacgugaagaaccuguacgagaaggugagaaaccagcugaagaacaacgccaaggagaucggcaacggcugcuucgaguucuaccacaagugcgacaacaccugcauggagagcgugaagaacggcaccuacgacuaccccaaguacagcgaggaggccaagcugaacagagagaagaucgacggcgugaagcuggagagcaccagaaucuaccagauccuggccaucuacagcaccguggccagcagccuggugcugguggugagccugggcgccaucagcuucuggaugugcagcaacggcagccugcagugcagaaucugcaucuga

SEQ ID NO: 172013 - RNA, 1701 nt, Artificial Sequence; identical to SEQ ID NO: 170100
  derived and/or modified CDS sequence (opt4) from hemagglutinin__InfluenzaA__AHV83830

SEQ ID NO: 172014 - RNA, 1701 nt, Artificial Sequence
  derived and/or modified CDS sequence (opt4) from hemagglutinin__InfluenzaA__AHV83831
augaaggccauccugguggugcugcuguacaccuucgccaccgccaacgccgacacccugugcaucggcuaccacgccaacaacagcaccgacaccguggacaccgugcuggagaagaacgugaccgugacccacagcgugaaccugcuggaggacaagcacaacggcaagcugugcaagcugagaggcguggccccccugcaccugggcaagugcaacaucgccggcuggauccugggcaaccccgagugcgagagccugagcaccgccagcagcuggagcuacaucguggagaccagcagcagcgacaacggcaccugcuaccccggcgacuucaucaacuacgaggagcugagagagcagcugagcagcgugagcagcuucgagagauucgagaucuuccccaagaccagcagcuggcccaaccacgacagcaacaagggcgugaccgccgccugcccccacgccggcgccaagagcuucuacaagaaccugaucuggcuggugaagaagggcaacagcuaccccaagcugagccagagcuacaucaacgacaagggcaaggaggugcuggugcuguggggcauccaccaccccagcaccaucgccgaccagcagagccuguaccagaacgccgacgccuacguguucgugggcaccagcagauacagcaagaaguucaagcccgagaucgccaucagacccaaggugagagaccaggagggcagaaugaacuacuacuggacccugguggagcccggcgacaagaucaccuucgaggccaccggcaaccugguggugcccagauacgccuucaccauggagagaaacgccggcagcggcaucaucgugagcgacacccccgugcacgacugcaacaccaccugccagacccccgagggcgccaucaacaccagccugcccuuccagaacauccaccccaucaccaucggcaagugccccaaguacgugaagagcaccaagcugagacuggccaccggccugagaaacgugcccagcauccagagcagaggccuguucggcgccaucgccggcuucaucgagggcggcuggaccggcaugguggacggcugguacggcuaccaccaccagaacgagcagggcagcggcuacgccgccgaccugaagagcacccagaacgccaucgacaagaucaccaacaaggugaacagcgugaucgagaagaugaacacccaguucaccgccgugggcaaggaguucaaccaccuggagaagagaaucgagaaccugaacaagaagguggacgacggcuuccuggacaucuggaccuacaacgccgagcugcuggugcugcuggagaacgagagaacccuggacuaccacgacagcaacgugaagaaccuguacgagaaggugagaaaccagcugaagaacaacgccaaggagaucggcaacggcugcuucgaguucuaccacaagugcgacaacaccugcauggagagcgugaagaacggcaccuacgacuaccccaaguacagcgaggaggccaagcugaacagagagaagaucgacggcgugaagcuggagagcaccagaaucuaccagauccuggccaucuacagcaccguggccagcagccuggugcugguggugagccugggcgccaucagcuucuggaugugcagcaacggcagccugcagugcagaaucugcaucuga

SEQ ID NO: 172015 - RNA, 1701 nt, Artificial Sequence; identical to SEQ ID NO: 171063
  derived and/or modified CDS sequence (opt4) from hemagglutinin__InfluenzaA__AHV83832

SEQ ID NO: 172016 - RNA, 1701 nt, Artificial Sequence; identical to SEQ ID NO: 170100
  derived and/or modified CDS sequence (opt4) from hemagglutinin__InfluenzaA__AHV83833

SEQ ID NO: 172017 - RNA, 1701 nt, Artificial Sequence; identical to SEQ ID NO: 171081
  derived and/or modified CDS sequence (opt4) from hemagglutinin__InfluenzaA__AHV83834

SEQ ID NO: 172018 - RNA, 1701 nt, Artificial Sequence
  derived and/or modified CDS sequence (opt4) from hemagglutinin__InfluenzaA__AHV83836
augaaggccauccugguggugcugcuguacaccuucgccaccgccaacgccgacacccugugcaucggcuaccacgccaacaacagcaccgacaccguggacaccgugcuggagaagaacgugaccgugacccacagcgugaaccugcuggaggacaagcacaacggcaagcugugcaagcugagaggcguggccccccugcaccugggcaagugcaacaucgccggcuggauccugggcaaccccgagugcgagagccugagcaccgccagcagcuggagcuacaucguggagaccagcagcagcgacaacggcaccugcuaccccggcgacuucaucaacuacgaggagcugagagagcagcugagcagcgugagcagcuucgagagauucgagaucuuccccaagaccagcagcuggcccaaccacgacagcaacaagggcgugaccgccgccugcccccacgccggcgccaagagcuucuacaagaaccugaucuggcuggugaagaaggagaacagcuaccccaagcugagacagagcuacaucaacgacaagggcaaggaggugcuggugcuguggggcauccaccaccccagcaccaccaccgaccagcagagccuguaccagaacgccgacgccuacguguucgugggcaccagcagauacagcaagaaguucaagcccgagaucgccaucagacccaaggugagagaccaggagggcagaaugaacuacuacuggacccugguggagcccggcgacaagaucaccuucgaggccaccggcaaccugguggugcccagauacgccuucaccauggagagaaacgccggcagcggcaucaucaucagcgacacccccgugcacgacugcaacaccaccugccagacccccgagggcgccaucaacaccagccugcccuuccagaacauccaccccaucaccaucggcaagugccccaaguacgugaagagcaccaagcugagacuggccaccggccugagaaacgugcccagcauccagagcagaggccuguucggcgccaucgccggcuucaucgagggcggcuggaccggcaugguggacggcugguacggcuaccaccaccagaacgagcagggcagcggcuacgccgccgaccugaagagcacccagaacgccaucgacaagaucaccaacaaggugaacagcgugaucgagaagaugaacacccaguucaccgccgugggcaaggaguucaaccaccuggagaagagaaucgagaaccugaacaagaagguggacgacggcuuccuggacaucuggaccuacaacgccgagcugcuggugcugcuggagaacgagagaacccuggacuaccacgacagcaacgugaagaaccuguacgagaaggugagaaaccagcugaagaacaacgccaaggagaucggcaacggcugcuucgaguucuaccacaagugcgacaacaccugcauggagagcgugaagaacggcaccuacgacuaccccaaguacagcgaggaggccaagcugaacagagagaagaucgacggcgugaagcuggagagcaccagaaucuaccagauccuggccaucuacagcaccguggccagcagccuggugcugguggugagccugggcgccaucagcuucuggaugugcagcaacggcagccugcagugcagaaucugcaucuga

SEQ ID NO: 172019 - RNA, 1701 nt, Artificial Sequence; identical to SEQ ID NO: 171967
  derived and/or modified CDS sequence (opt4) from hemagglutinin__InfluenzaA__AHV83837

SEQ ID NO: 172020 - RNA, 1701 nt, Artificial Sequence; identical to SEQ ID NO: 170100
  derived and/or modified CDS sequence (opt4) from hemagglutinin__InfluenzaA__AHV83838

SEQ ID NO: 172021 - RNA, 1701 nt, Artificial Sequence; identical to SEQ ID NO: 171063
  derived and/or modified CDS sequence (opt4) from hemagglutinin__InfluenzaA__AHV83839

SEQ ID NO: 172022 - RNA, 1701 nt, Artificial Sequence; identical to SEQ ID NO: 171081
  derived and/or modified CDS sequence (opt4) from hemagglutinin__InfluenzaA__AHV83840

SEQ ID NO: 172023 - RNA, 1701 nt, Artificial Sequence
  derived and/or modified CDS sequence (opt4) from hemagglutinin__InfluenzaA__AHV83841
augaaggccauccugguggugcugcuguacaccuucgccaccgccaacgccgacacccugugcaucggcuaccacgccaacaacagcaccgacaccguggacaccgugcuggagaagaacgugaccgugacccacagcgugaaccugcuggaggacaagcacaacggcaagcugugcaagcugagaggcguggccccccugcaccugggcaagugcaacaucgccggcuggauccugggcaaccccgagugcgagagccugagcaccgccagcagcuggagcuacaucguggagaccagcagcagcgacaacggcaccugcuaccccggcgacuucaucaacuacgaggagcugagagagcagcugagcagcgugagcagcuucgagagauucgagaucuuccccaagaccagcagcuggcccaaccacgacagcaacaagggcgugaccgccgccugcccccacgccggcgccaagagcuucuacaagaaccugaucuggcuggugaagaagggcaacagcuaccccaagcugagacagagcuacaucaacgacaagggcaaggaggugcuggugcuguggggcauccaccaccccagcaccaccaccgaccagcagagccuguaccagaacgccgacgccuacguguucgugggcaccagcagauacagcaagaaguucaagcccgagaucgccaucagacccaaggugagagaccaggagggcagaaugaacuacuacuggacccugguggagcccggcgacaagaucaccuucgaggccaccggcaaccugguggugcccagauacgccuucaccauggagagaaacgccggcagcggcaucaucaucagcgacacccccgugcacaacugcaacaccaccugccagacccccgagggcgccaucaacaccagccugcccuuccagaacauccaccccaucaccaucggcaagugccccaaguacgugaagagcaccaagcugagacuggccaccggccugagaaacgugcccagcauccagagcagaggccuguucggcgccaucgccggcuucaucgagggcggcuggaccggcaugguggacggcugguacggcuaccaccaccagaacgagcagggcagcggcuacgccgccgaccugaagagcacccagaacgccaucgacaagaucaccaacaaggugaacagcgugaucgagaagaugaacacccaguucaccgccgugggcaaggaguucaaccaccuggagaagagaaucgagaaccugaacaagaagguggacgacggcuuccuggacaucuggaccuacaacgccgagcugcuggugcugcuggagaacgagagaacccuggacuaccacgacagcaacgugaagaaccuguacgagaaggugagaaaccagcugaagaacaacgccaaggagaucggcaacggcugcuucgaguucuaccacaagugcgacaacaccugcauggagagcgugaagaacggcaccuacgacuaccccaaguacagcgaggaggccaagcugaacagagagaagaucgacggcgugaagcuggagagcaccagaaucuaccagauccuggccaucuacagcaccguggccagcagccuggugcugguggugagccugggcgccaucagcuucuggaugugcagcaacggcagccugcagugcagaaucugcaucuga

SEQ ID NO: 172024 - RNA, 1701 nt, Artificial Sequence; identical to SEQ ID NO: 170100
  derived and/or modified CDS sequence (opt4) from hemagglutinin__InfluenzaA__AHV83842

SEQ ID NO: 172025 - RNA, 1701 nt, Artificial Sequence; identical to SEQ ID NO: 170100
  derived and/or modified CDS sequence (opt4) from hemagglutinin__InfluenzaA__AHV83843

SEQ ID NO: 172026 - RNA, 1701 nt, Artificial Sequence; identical to SEQ ID NO: 170100
  derived and/or modified CDS sequence (opt4) from hemagglutinin__InfluenzaA__AHV83844

SEQ ID NO: 172027 - RNA, 1701 nt, Artificial Sequence
  derived and/or modified CDS sequence (opt4) from hemagglutinin__InfluenzaA__AHV83845
augaaggccauccugguggugcugcuguacaccuucgccaccgccaacgccgacacccugugcaucggcuaccacgccaacaacagcaccgacaccguggacaccgugcuggagaagaacgugaccgugacccacagcgugaaccugcuggaggacaagcacaacggcaagcugugcaagcugagaggcguggccccccugcaccugggcaagugcaacaucgccggcuggauccugggcaaccccgagugcgagagccugagcaccgccagcagcuggagcuacaucguggagaccagcagcagcgacaacggcaccugcuaccccggcgacuucaucaacuacgaggagcugagagagcagcugagcagcgugagcagcuucgagagauucgagaucuuccccaagaccagcagcuggcccaaccacgacagcaacaagggcgugaccgccgccugcccccacgccggcgccaagagcuucuacaagaaccugaucuggcuggugaagaagggcaacagcuaccccaagcugagccagagcuacaucaacgacaagggcaaggaggugcuggugcuguggggcauccaccacccccccaccaccgccgaccagcagagccuguaccagaacgccgacgccuacguguucgugggcaccagcagauacagcaagaaguucaagcccgagaucgccaucagacccaaggugagagaccaggagggcagaaugaacuacuacuggacccugguggagcccggcgacaagaucaccuucgaggccaccggcaaccugguggugcccagauacgccuucaccauggagagaaacgccggcagcggcaucaucaucagcgacacccccgugcacgacugcaacaccaccugccagacccccgagggcgccaucaacaccagccugcccuuccagaacauccaccccaucaccaucggcaagugccccaaguacgugaagagcaccaagcugagacuggccaccggccugagaaacgugcccagcauccagagcagaggccuguucggcgccaucgccggcuucaucgagggcggcuggaccggcaugguggacggcugguacggcuaccaccaccagaacgagcagggcagcggcuacgccgccgaccugaagagcacccagaacgccaucgacaagaucaccaacaaggugaacagcgugaucgagaagaugaacacccaguucaccgccgugggcaaggaguucaaccaccuggagaagagaaucgagaaccugaacaagaagguggacgacggcuuccuggacaucuggaccuacaacgccgagcugcuggugcugcuggagaacgagagaacccuggacuaccacgacagcaacgugaagaaccuguacgagaaggugagaaaccagcugaagaacaacgccaaggagaucggcaacggcugcuucgaguucuaccacaagugcgacaacaccugcauggagagcgugaagaacggcaccuacgacuaccccaaguacagcgaggaggccaagcugaacagagagaagaucgacggcgugaagcuggagagcaccagaaucuaccagauccuggccaucuacagcaccgccgccagcagccuggugcugguggugagccugggcgccaucagcuucuggaugugcagcaacggcagccugcagugcagaaucugcaucuga

SEQ ID NO: 172028 - RNA, 1701 nt, Artificial Sequence; identical to SEQ ID NO: 170100
  derived and/or modified CDS sequence (opt4) from hemagglutinin__InfluenzaA__AHV83846

SEQ ID NO: 172029 - RNA, 1701 nt, Artificial Sequence; identical to SEQ ID NO: 170100
  derived and/or modified CDS sequence (opt4) from hemagglutinin__InfluenzaA__AHV83847

SEQ ID NO: 172030 - RNA, 1701 nt, Artificial Sequence; identical to SEQ ID NO: 170100
  derived and/or modified CDS sequence (opt4) from hemagglutinin__InfluenzaA__AHV83848

SEQ ID NO: 172031 - RNA, 1701 nt, Artificial Sequence; identical to SEQ ID NO: 171953
  derived and/or modified CDS sequence (opt4) from hemagglutinin__InfluenzaA__AHV83849

SEQ ID NO: 172032 - RNA, 1701 nt, Artificial Sequence
  derived and/or modified CDS sequence (opt4) from hemagglutinin__InfluenzaA__AHV83850
augaaggccauccugguggugcugcuguacaccuucgccaccaccaacgccgacacccugugcaucggcuaccacgccaacaacagcaccgacaccguggacaccgugcuggagaagaacgugaccgugacccacagcgugaaccugcuggaggacaagcacaacggcaagcugugcaagcugagaggcguggccccccugcaccugggcaagugcaacaucgccggcuggauccugggcaaccccgagugcgagagccugagcaaggccagcagcuggagcuacaucguggagaccagcagcagcgacaacggcaccugcuaccccggcgacuucaucaacuacgaggagcugagagagcagcugagcagcgugagcagcuucgagagauucgagaucuuccccaagaccagcagcuggcccaaccacgacagcaacaagggcgugaccgccgccugcccccacgccggcgccaagagcuucuacaagaaccugaucuggcuggugaagaagggcaacagcuaccccaagcugagccagagcuacaucaacgacaagggcaaggaggugcuggugcuguggggcauccaccaccccagcaccaccgccgaccagcagagccuguaccagaacgccgacgccuacguguucgugggcaccagcagauacagcaagaaguucaagcccgagaucgccaucagacccaaggugagagaccaggagggcagaaugaacuacuacuggacccugguggagcccggcgacaagaucaccuucgaggccaccggcaaccugguggugcccagauacgccuucaccauggagagaaacgccggcagcggcaucaucaucagcgacacccccgugcacgacugcaacaccaccugccagacccccgagggcgccaucaacaccagccugcccuuccagaacauccaccccaucaccaucggcaagugccccaaguacgugaagagcaccaagcugagacuggccaccggccugagaaacgugcccagcauccagagcagaggccuguucggcgccaucgccggcuucaucgagggcggcuggaccggcaugguggacggcugguacggcuaccaccaccagaacgagcagggcagcggcuacgccgccgaccugaagagcacccagaacgccaucgacaagaucaccaacaaggugaacagcgugaucgagaagaugaacacccaguucaccgccgugggcaaggaguucaaccaccuggagaagagaaucgagaaccugaacaagaagguggacgacggcuuccuggacaucuggaccuacaacgccgagcugcuggugcugcuggagaacgagagaacccuggacuaccacgacagcaacgugaagaaccuguacgagaaggugagaaaccagcugaagaacaacgccaaggagaucggcaacggcugcuucgaguucuaccacaagugcgacaacaccugcauggagagcgugaagaacggcaccuacgacuaccccaaguacagcgaggaggccaagcugaacagagagaagaucgacggcgugaagcuggagagcaccagaaucuaccagauccuggccaucuacagcaccguggccagcagccuggugcugguggugagccugggcgccaucagcuucuggaugugcagcaacggcagccugcagugcagaaucugcaucuga

SEQ ID NO: 172033 - RNA, 1701 nt, Artificial Sequence; identical to SEQ ID NO: 170100
  derived and/or modified CDS sequence (opt4) from hemagglutinin__InfluenzaA__AHV83851

SEQ ID NO: 172034 - RNA, 1701 nt, Artificial Sequence; identical to SEQ ID NO: 170100
  derived and/or modified CDS sequence (opt4) from hemagglutinin__InfluenzaA__AHV83852

SEQ ID NO: 172035 - RNA, 1701 nt, Artificial Sequence
  derived and/or modified CDS sequence (opt4) from hemagglutinin__InfluenzaA__AHV83853
augaaggccauccugguggugcugcuguacaccuucgccaccgccaacgccgacacccugugcaucggcuaccacgccaacaacagcaccgacaccguggacaccgugcuggagaagaacgugaccgugacccacagcgugaaccugcuggaggacaagcacaacggcaagcugugcaagcugagaggcguggccccccugcaccugggcaagugcaacaucgccggcuggauccugggcaaccccgagugcgagacccugagcaccgccagcagcuggagcuacaucguggagaccagcagcagcgacaacggcaccugcuaccccggcgacuucaucgacuacgaggagcugagagagcagcugagcagcgugagcagcuucgagagauucgagaucuuccccaagaccagcagcuggcccaaccacgacagcaacaagggcgugaccgccgccugcccccacgccggcgccaagggcuucuacaagaaccugaucuggcuggugaagaagggcaacagcuaccccaagcugagcaagagcuacaucaacgacaagggcaaggaggugcuggugcuguggggcauccaccaccccagcaccaccgccgaccagcagagccuguaccagaacgccgacaccuacguguucgugggcaccagcagauacagcaagaaguucaagcccgagaucgccaucagacccaaggugagagaccaggagggcagaaugaacuacuacuggacccugguggagcccggcgacaagaucaccuucgaggccaccggcaaccugguggugcccagauacgccuucgccauggagagagacgccggcagcggcaucaucaucagcgacacccccgugcacgacugcaacaccaccugccagacccccaagggcgccaucaacaccagccugcccuuccagaacauccaccccaucaccaucggcaagugccccaaguacgugaagagcaccaagcugagacuggccaccggccugagaaacgugcccagcauccagagcagaggccuguucggcgccaucgccggcuucaucgagggcggcuggaccggcaugguggacggcugguacggcuaccaccaccagaacgagcagggcagcggcuacgccgccgaccugaagagcacccagaacgccaucgacaagaucaccaacaaggugaacagcgugaucgagaagaugaacacccaguucaccgccgugggcaaggaguucaaccaccuggagaagagaaucgagaaccugaacaagaagguggacgacggcuuccuggacaucuggaccuacaacgccgagcugcuggugcugcuggagaacgagagaacccuggacuaccacgacagcaacgugaagaaccuguacgagaaggugagaacccagcugaagaacaacgccaaggagaucggcaacggcugcuucgaguucuaccacaagugcgacaacaccugcauggagagcgugaagaacggcaccuacgacuaccccaaguacagcgaggaggccaagcugaacagagaggagaucgacggcgugaagcuggagagcaccagaaucuaccagauccuggccaucuacagcaccgccgccagcagccuggugcugguggugagccugggcgccaucagcuucuggaugugcagcaacggcagccugcagugcagaaucugcaucuga

SEQ ID NO: 172036 - RNA, 1701 nt, Artificial Sequence; identical to SEQ ID NO: 171962
  derived and/or modified CDS sequence (opt4) from hemagglutinin__InfluenzaA__AHV83855

SEQ ID NO: 172037 - RNA, 1701 nt, Artificial Sequence
  derived and/or modified CDS sequence (opt4) from hemagglutinin__InfluenzaA__AHV83856
augaaggccauccugguggugcugcuguacaccuucgccaccgccaacgccgacacccugugcaucggcuaccacgccaacaacagcaccgacaccguggacaccgugcuggagaagaacgugaccgugacccacagcgugaaccugcuggaggacaagcacaacggcaagcugugcaagcugagaggcguggccccccugcaccugggcaagugcaacaucgccggcuggauccugggcaaccccgagugcgagagccugagcaccgccagcagcuggagcuacaucguggagaccagcagcagcgacaacggcaccugcuaccccggcgacuucaucaacuacgaggagcugagagagcagcugagcagcgugagcagcuucgagagauucgagaucuuccccaagaccagcagcuggcccaaccacgacagcaacaagggcgugaccgccgccugcccccacgccggcgccaagagcuucuacaagaaccugaucuggcuggugaagaagggcaacagcuaccccaagcugagccagagcuacaucaacgacaagggcaaggaggugcuggugcuguggggcauccaccaccccagcaccaccgccgaccagcagagccuguaccagaacgccgacgccuacguguucgugggcaccagcagauacagcaagaaguucaagcccgagaucgccaucagacccaaggugagagaccaggagggcagaaugaacuacuacuggacccugguggagcccggcgacaagaucaccuucgaggccaccggcaaccugguggugcccagauacgccuucaccauggagagaaacgccggcagcggcaucaucaucagcgacacccccgugcacgacugcaacaccaccugccagacccccgagggcgccaucaacaccagccugcccuuccagaacauccaccccaucaccaucggcaagugccccaaguacgugaagagcaccaagcugagacuggccaccggccugagaaacgugcccagcauccagagcagaggccuguucggcgccaucgccggcuucaucgagggcggcuggaccggcaugguggacggcugguacggcuaccaccaccagaacgagcagggcagcggcuacgccgccgaccugaagagcacccagaacgccaucgacaagaucaccaacaaggugaacagcgugaucgagaagaugaacacccaguucaccgccgugggcaaggaguucaaccaccuggagaagagaaucgagaaccugaacaagaagguggacgacggcuuccuggacaucuggaccuacaacgccgagcugcuggugcugcuggagaacgagagaacccuggacuaccacgacagcaacgugaagaaccuguacgagaaggugagaaaccagcugaagaacaacgccaaggagaucggcaacggcugcuucgaguucuaccacaagugcgacaacaccugcauggagaucgugaagaacggcaccuacgacuaccccaaguacagcgaggaggccaagcugaacagagagaagaucgacggcgugaagcuggagagcaccagaaucuaccagauccuggccaucuacagcaccguggccagcagccuggugcugguggugagccugggcgccaucagcuucuggaugugcagcaacggcagccugcagugcagaaucugcaucuga

SEQ ID NO: 172038 - RNA, 1701 nt, Artificial Sequence; identical to SEQ ID NO: 171962
  derived and/or modified CDS sequence (opt4) from hemagglutinin__InfluenzaA__AHV83857

SEQ ID NO: 172039 - RNA, 1701 nt, Artificial Sequence
  derived and/or modified CDS sequence (opt4) from hemagglutinin__InfluenzaA__AHV83858
augaaggccauccugguggugcugcuguacaccuucgccaccgccaacaccgacacccugugcaucggcuaccacgccaacaacagcaccgacaccguggacaccgugcuggagaagaacgugaccgugacccacagcgugaaccugcuggaggacaagcacaacggcaagcugugcaagcugagaggcguggccccccugcaccugggcaagugcaacaucgccggcuggauccugggcaaccccgagugcgagagccugagcaccgccagcagcuggagcuacaucguggagaccagcagcagcgacaacggcaccugcuaccccggcgacuucaucaacuacgaggagcugagagagcagcugagcagcgugagcagcuucgagagauucgagaucuuccccaagaccagcagcuggcccaaccacgacagcaacaagggcgugaccgccgccugcccccacgccggcgccaagagcuucuacaagaaccugaucuggcuggugaagaagggcaacagcuaccccaagcugagccagagcuacaucaacgacaagggcaaggaggugcuggugcuguggggcauccaccaccccagcaccaccgccgaccagcagagccuguaccagaacgccgacgccuacguguucgugggcaccagcagauacagcaagaaguucaagcccgagaucgccaucagacccaaggugagagaccaggagggcagaaugaacuacuacuggacccugguggagcccggcgacaagaucaccuucgaggccaccggcaaccugguggugcccagauacgccuucaccauggagagaaacgccggcagcggcaucaucaucagcgacacccccgugcacgacugcaacaccaccugccagacccccgagggcgccaucaacaccagccugcccuuccagaacauccaccccaucaccaucggcaagugccccaaguacgugaagagcaccaagcugagacuggccaccggccugagaaacgugcccagcauccagagcagaggccuguucggcgccaucgccggcuucaucgagggcggcuggaccggcaugguggacggcugguacggcuaccaccaccagaacgagcagggcagcggcuacgccgccgaccagaagagcacccagaacgccaucgacaagaucaccaacaaggugaacagcgugaucgagaagaugaacacccaguucaccgccgugggcaaggaguucaaccaccuggagaagagaaucgagaaccugaacaagaagguggacgacggcuuccuggacaucuggaccuacaacgccgagcugcuggugcugcuggagaacgagagaacccuggacuaccacgacagcaacgugaagaaccuguacgagaaggugagaaaccagcugaagaacaacgccaaggagaucggcaacggcugcuucgaguucuaccacaagugcgacaacaccugcauggagagcgugaagaacggcaccuacgacuaccccaaguacagcgaggaggccaagcugaacagagagaagaucgacggcgugaagcuggagagcaccagaaucuaccagauccuggccaucuacagcaccguggccagcagccuggugcugguggugagccugggcgccaucagcuucuggaugugcagcaacggcagccugcagugcagaaucugcaucuga

SEQ ID NO: 172040 - RNA, 1701 nt, Artificial Sequence; identical to SEQ ID NO: 170100
  derived and/or modified CDS sequence (opt4) from hemagglutinin__InfluenzaA__AHV83859

SEQ ID NO: 172041 - RNA, 1701 nt, Artificial Sequence
  derived and/or modified CDS sequence (opt4) from hemagglutinin__InfluenzaA__AHV83861
augaaggccauccugguggugcugcuguacaccuucaccaccgccaacgccgacacccugugcaucggcuaccacgccaacaacagcaccgacaccguggacaccgugcuggagaagaacgugaccgugacccacagcgugaaccugcuggaggacaagcacaacggcaagcugugcaagcugagaggcguggccccccugcaccugggcaagugcaacaucgccggcuggauccugggcaaccccgagugcgagagccugagcaccgccagcagcuggagcuacaucguggagaccagcagcagcgacaacggcaccugcuaccccggcgacuucaucaacuacgaggagcugagagagcagcugagcagcgugagcagcuucgagagauucgagaucuuccccaagaccagcagcuggcccaaccacgacagcaacaagggcgugaccgccgccugcccccacgccggcgccaagagcuucuacaagaaccugaucuggcuggugaagaagggcaacagcuaccccaagcugagccagagcuacaucaacgacaagggcaaggaggugcuggugcuguggggcauccaccaccccagcaccaccgccgaccagcagagccuguaccagaacgccgacgccuacguguucgugggcaccagcagauacagcaagaaguucaagcccgagaucgccaucagacccaaggugagagaccaggagggcagaaugaacuacuacuggacccugguggagcccggcgacaagaucaccuucgaggccaccggcaaccugguggugcccagauacgccuucaccauggagagaaacgccggcagcggcaucaucaucagcgacacccccgugcacgacugcaacaccaccugccagacccccgagggcgccaucaacaccagccugcccuuccagaacauccaccccaucaccaucggcaagugccccaaguacgugaagagcaccaagcugagacuggccaccggccugagaaacgugcccagcauccagagcagaggccuguucggcgccaucgccggcuucaucgagggcggcuggaccggcaugguggacggcugguacggcuaccaccaccagaacgagcagggcagcggcuacgccgccgaccugaagagcacccagaacgccaucgacaagaucaccaacaaggugaacagcgugaucgagaagaugaacacccaguucaccgccgugggcaaggaguucaaccaccuggagaagagaaucgagaaccugaacaagaagguggacgacggcuuccuggacaucuggaccuacaacgccgagcugcuggugcugcuggagaacgagagaacccuggacuaccacgacagcaacgugaagaaccuguacgagaaggugagaaaccagcugaagaacaacgccaaggagaucggcaacggcugcuucgaguucuaccacaagugcgacaacaccugcauggagagcgugaagaacggcaccuacgacuaccccaaguacagcgaggaggccaagcugaacagagagaagaucgacggcgugaagcuggagagcaccagaaucuaccagauccuggccaucuacagcaccguggccagcagccuggugcugguggugagccugggcgccaucagcuucuggaugugcagcaacggcagccugcagugcagaaucugcaucuga

SEQ ID NO: 172042 - RNA, 1701 nt, Artificial Sequence; identical to SEQ ID NO: 172041
  derived and/or modified CDS sequence (opt4) from hemagglutinin__InfluenzaA__AHV83862

SEQ ID NO: 172043 - RNA, 1701 nt, Artificial Sequence; identical to SEQ ID NO: 170100
  derived and/or modified CDS sequence (opt4) from hemagglutinin__InfluenzaA__AHV83863

SEQ ID NO: 172044 - RNA, 1701 nt, Artificial Sequence; identical to SEQ ID NO: 170100
  derived and/or modified CDS sequence (opt4) from hemagglutinin__InfluenzaA__AHV83864

SEQ ID NO: 172045 - RNA, 1701 nt, Artificial Sequence
  derived and/or modified CDS sequence (opt4) from hemagglutinin__InfluenzaA__AHV83866
augaaggccauccugguggugcugcuguacaccuucgccaccgccaacgccgacacccugugcaucggcuaccacgccaacaacagcaccgacaccguggacaccgugcuggagaagaacgugaccgugacccacagcgugaaccugcuggaggacaagcacaacggcaagcugugcaagcugagaggcguggccccccugcaccugggcaagugcaacaucgccggcuggauccugggcaaccccgagugcgagagccugagcaccgccagcagcuggagcuacaucguggagaccagcagcagcgacaacggcaccugcuaccccggcgacuucaucaacuacgaggagcugagagagcagcugagcagcgugagcagcuucgagagauucgagaucuuccccaagaccagcagcuggcccaaccacgacagcaacaagggcgugaccgccgccugcccccacgccggcgccaagagcuucuacaagaaccugaucuggcuggugaagaagggcaacagcuaccccaagcugagccagagcuacaucaacgacaagggcaaggaggugcuggugcuguggggcauccaccaccccagcaccaccgccgaccagcagagccuguaccagaacgccgacgccuacguguucgugggcaccagcagauacagcaagaaguucaagcccgagaucgccaucagacccaaggugagagaccaggagggcagaaugaacuacuacuggacccugguggagcccggcgacaagaucaccuucgaggccaccggcaaccugguggugcccagauacgccuucaccauggagagaaacgccggcagcggcaucaucaucagcgacacccccauccacgacugcaacaccaccugccagacccccgagggcgccaucaacaccagccugcccuuccagaacauccaccccaucaccaucggcaagugccccaaguacgugaagagcaccaagcugagacuggccaccggccugagaaacgugcccagcauccagagcagaggccuguucggcgccaucgccggcuucaucgagggcggcuggaccggcaugguggacggcugguacggcuaccaccaccagaacgagcagggcagcggcuacgccgccgaccugaagagcacccagaacgccaucgacaagaucaccaacaaggugaacagcgugaucgagaagaugaacacccaguucaccgccgugggcaaggaguucaaccaccuggagaagagaaucgagaaccugaacaagaagguggacgacggcuuccuggacaucuggaccuacaacgccgagcugcuggugcugcuggagaacgagagaacccuggacuaccacgacagcaacgugaagaaccuguacgagaaggugagaaaccagcugaagaacaacgccaaggagaucggcaacggcugcuucgaguucuaccacaagugcgacgacaccugcauggagagcgugaagaacggcaccuacgacuaccccaaguacagcgaggaggccaagcugaacagagagaagaucgacggcgugaagcuggagagcaccagaaucuaccagauccuggccaucuacagcaccguggccagcagccuggugcugguggugagccugggcgccaucagcuucuggaugugcagcaacggcagccugcagugcagaaucugcaucuga

SEQ ID NO: 172046 - RNA, 1701 nt, Artificial Sequence
  derived and/or modified CDS sequence (opt4) from hemagglutinin__InfluenzaA__AHV83867
augaaggccauccugguggugcugcuguacaccuucgccaccgccaacgccgacacccugugcaucggcuaccacgccaacaacagcaccgacaccguggacaccgugcuggagaagaacgugaccgugacccacagcgugaaccugcuggaggacaagcacaacggcaagcugugcaagcugagaggcguggccccccugcaccugggcaagugcaacaucgccggcuggauccugggcaaccccgagugcgagagccugagcaccgccagcagcuggagcuacaucguggagaccagcagcagcgacaacggcaccugcuaccccggcgacuucaucaacuacgaggagcugagagagcagcugagcagcgugagcagcuucgagagauucgagaucuuccccaagaccagcagcuggcccaaccacgacagcaacaagggcgugaccgccgccugcccccacgccggcgccaagagcuucuacaagaaccugaucuggcuggugaagaagggcaacagcuaccccaagcugagccagagcuacaucaacgacaagggcaaggaggugcuggugcuguggggcauccaccaccccagcaccaccgccgaccagcagagccuguaccagaacgccgacgccuacguguucgugggcaccagcagauacagcaagaaguucaagcccgagaucgccaucagacccaaggugagagaccaggagggcagaaugaacuacuacuggacccugguggagcccggcgacaagaucaccuucgaggccaccggcaaccugguggugcccagauacgccuucaccauggagagaaacgccggcagcggcaucaucaucagcgacacccccgugcacgacugcaacaccaccugccagacccccgagggcgccaucaacaccagccugcccuuccagaacauccaccccaucaccaucggcaagugccccaaguacgugaagagcaccaagcugagacuggccaccggccugagaaacgugcccagcauccagagcagaggccuguucggcgccaucgccggcuucaucgagggcggcuggaccggcaugguggacggcugguacggcuaccaccaccagaacgagcagggcagcggcuacgccgccgaccugaagagcacccagaacgccaucgacaagaucaccaacaaggugaacagcgugaucgagaagaugaacacccaguucaccgccgugggcaaggaguucaaccaccuggagaagagaaucgagaaccugaacaagaagguggacgacggcuuccuggacaucuggaccuacaacgccgagcugcuggugcugcuggagaacgagagaacccuggacuaccacgacagcaacgugaagaaccuguacgagaaggugagaaaccagcugaagaacaacgccaaggagaucggcaacggcugcuucgaguucuaccacaagugcgacgacaccugcauggagagcgugaagaacggcaccuacgacuaccccaaguacagcgaggaggccaagcugaacagagagaagaucgacggcgugaagcuggagagcaccagaaucuaccagauccuggccaucuacagcaccguggccagcagccuggugcugguggugagccugggcgccaucagcuucuggaugugcagcaacggcagccugcagugcagaaucugcaucuga

SEQ ID NO: 172047 - RNA, 1701 nt, Artificial Sequence; identical to SEQ ID NO: 170100
  derived and/or modified CDS sequence (opt4) from hemagglutinin__InfluenzaA__AHV83868

SEQ ID NO: 172048 - RNA, 1701 nt, Artificial Sequence
  derived and/or modified CDS sequence (opt4) from hemagglutinin__InfluenzaA__AHV83869
augaaggccauccugguggugcugcuguacaccuucgccaccgccaacgccgacacccugugcaucggcuaccacgccaacaacagcaccgacaccguggacaccgugcuggagaagaacgugaccgugacccacagcgugaaccugcuggaggacaagcacaacggcaagcugugcaagcugagaggcguggccccccugcaccugggcaagugcaacaucgccggcuggauccugggcaaccccgagugcgagagccugagcaccgccagcagcuggagcuacaucguggagaccagcagcagcgacaacggcaccugcuaccccggcgacuucaucaacuacgaggagcugagagagcagcugagcagcgugagcagcuucgagagauucgagaucuuccccaagaccaacagcuggcccaaccacgacagcaacaagggcgugaccgccgccugcccccacgccggcgccaagagcuucuacaagaaccugaucuggcuggugaagaagggcaacagcuaccccaagcugagccagagcuacaucaacgacaagggcaaggaggugcuggugcuguggggcauccaccaccccagcaccaccgccgaccagcagagccuguaccagaacgccgacgccuacguguucgugggcaccagcagauacagcaagaaguucaagcccgagaucgccaucagacccaaggugagagaccaggagggcagaaugaacuacuacuggacccugguggagcccggcgacaagaucaccuucgaggccaccggcaaccugguggugcccagauacgccuucaccauggagagaaacgccggcagcggcaucaucaucagcgacacccccgugcacgacugcaacaccaccugccagacccccgagggcgccaucaacaccagccugcccuuccagaacauccaccccaucaccaucggcaagugccccaaguacgugaagagcaccaagcugagacuggccaccggccugagaaacgugcccagcauccagagcagaggccuguucggcgccaucgccggcuucaucgagggcggcuggaccggcaugguggacggcugguacggcuaccaccaccagaacgagcagggcagcggcuacgccgccgaccugaagagcacccagaacgccaucgacaagaucaccaacaaggugaacagcgugaucgagaagaugaacacccaguucaccgccgugggcaaggaguucaaccaccuggagaagagaaucgagaaccugaacaagaagguggacgacggcuuccuggacaucuggaccuacaacgccgagcugcuggugcugcuggagaacgagagaacccuggacuaccacgacagcaacgugaagaaccuguacgagaaggugagaaaccagcugaagaacaacgccaaggagaucggcaacggcugcuucgaguucuaccacaagugcgacaacaccugcauggagagcgugaagaacggcaccuacgacuaccccaaguacagcgaggaggccaagcugaacagagagaagaucgacggcgugaagcuggagagcaccagaaucuaccagauccuggccaucuacagcaccguggccagcagccuggugcugguggugagccugggcgccaucagcuucuggaugugcagcaacggcagccugcagugcagaaucugcaucuga

SEQ ID NO: 172049 - RNA, 1701 nt, Artificial Sequence; identical to SEQ ID NO: 170100
  derived and/or modified CDS sequence (opt4) from hemagglutinin__InfluenzaA__AHV83870

SEQ ID NO: 172050 - RNA, 1701 nt, Artificial Sequence; identical to SEQ ID NO: 170100
  derived and/or modified CDS sequence (opt4) from hemagglutinin__InfluenzaA__AHV83871

SEQ ID NO: 172051 - RNA, 1701 nt, Artificial Sequence; identical to SEQ ID NO: 170100
  derived and/or modified CDS sequence (opt4) from hemagglutinin__InfluenzaA__AHV83872

SEQ ID NO: 172052 - RNA, 1701 nt, Artificial Sequence
  derived and/or modified CDS sequence (opt4) from hemagglutinin__InfluenzaA__AHV83873
augaaggccauccugguggugcugcuguacaccuucgccaccaccaacgccgacacccugugcaucggcuaccacgccaacaacagcaccgacaccguggacaccgugcuggagaagaacgugaccgugacccacagcgugaaccugcuggaggacaagcacaacggcaagcugugcaagcugagaggcguggccccccugcaccugggcaagugcaacaucgccggcuggauccugggcaaccccgagugcgagagccugagcaccgccagcagcuggagcuacaucguggagaccagcagcagcgacaacggcaccugcuaccccggcgacuucaucaacuacgaggagcugagagagcagcugagcagcgugagcagcuucgagagauucgagaucuuccccaagaccagcagcuggcccaaccacgacagcaacaagggcgugaccgccgccugcccccacgccggcgccaagagcuucuacaagaaccugaucuggcuggugaagaagggcaacagcuaccccaagcugagccagagcuacaucaacgacaagggcaaggaggugcuggugcuguggggcauccaccaccccagcaccguggccgaccagcagagccuguaccagaacgccgacgccuacguguucgugggcaccagcagauacagcaagaaguucaagcccgagaucgccaucagacccaaggugagagaccaggagggcagaaugaacuacuacuggacccugguggagcccggcgacaagaucaccuucgaggccaccggcaaccugguggugcccagauacgccuucaccauggagagaaacgccggcagcggcaucaucaucagcgacacccccgugcacgacugcaacaccaccugccagacccccgagggcgccaucaacaccagccugcccuuccagaacauccaccccaucaccaucggcaagugccccaaguacgugaagagcaccaagcugagacuggccaccggccugagaaacgugcccagcauccagagcagaggccuguucggcgccaucgccggcuucaucgagggcggcuggaccggcaugguggacggcugguacggcuaccaccaccagaacgagcagggcagcggcuacgccgccgaccugaagagcacccagaacgccaucgacaagaucaccaacaaggugaacagcgugaucgagaagaugaacacccaguucaccgccgugggcaaggaguucaaccaccuggagaagagaaucgagaaccugaacaagaagguggacgacggcuuccuggacaucuggaccuacaacgccgagcugcuggugcugcuggagaacgagagaacccuggacuaccacgacagcaacgugaagaaccuguacgagaaggugagaaaccagcugaagaacaacgccaaggagaucggcaacggcugcuucgaguucuaccacaagugcgacaacaccugcauggagagcgugaagaacggcaccuacgacuaccccaaguacagcgaggaggccaagcugaacagagagaagaucgacggcgugaagcuggagagcaccagaaucuaccagauccuggccaucuacagcaccguggccagcagccuggugcugguggugagccugggcgccaucagcuucuggaugugcagcaacggcagccugcagugcagaaucugcaucuga

SEQ ID NO: 172053 - RNA, 1701 nt, Artificial Sequence; identical to SEQ ID NO: 170100
  derived and/or modified CDS sequence (opt4) from hemagglutinin__InfluenzaA__AHV83874

SEQ ID NO: 172054 - RNA, 1701 nt, Artificial Sequence; identical to SEQ ID NO: 170100
  derived and/or modified CDS sequence (opt4) from hemagglutinin__InfluenzaA__AHV83875

SEQ ID NO: 172055 - RNA, 1701 nt, Artificial Sequence; identical to SEQ ID NO: 170100
  derived and/or modified CDS sequence (opt4) from hemagglutinin__InfluenzaA__AHV83876

SEQ ID NO: 172056 - RNA, 1701 nt, Artificial Sequence
  derived and/or modified CDS sequence (opt4) from hemagglutinin__InfluenzaA__AHV83877
augaaggccauccugguggugcugcuguacaccuucgccaccgccaacgccgacacccugugcaucggcuaccacgccaacaacagcaccgacaccguggacaccgugcuggagaagaacgugaccgugacccacagcgugaaccugcuggaggacaagcacaacggcaagcugugcaagcugagaggcguggccccccugcaccugggcaagugcaacaucgccggcuggauccugggcaaccccgagugcgagagccugagcaccgccagcagcuggagcuacaucguggagaccagcagcagcgacaacggcaccugcuaccccggcgacuucaucaacuacgaggagcugagagagcagcugagcagcgugagcagcuucaagagauucgagaucuuccccaagaccagcagcuggcccaaccacgacagcaacaagggcgugaccgccgccugcccccacgccggcgccaagagcuucuacaagaaccugaucuggcuggugaagaagggcaacagcuaccccaagcugagccagagcuacaucaacgacaagggcaaggaggugcuggugcuguggggcauccaccaccccagcaccaccgccgaccagcagagccuguaccagaacgccgacgccuacguguucgugggcaccagcagauacagcaagaaguucaagcccgagaucgccaucagacccaaggugagagaccaggagggcagaaugaacuacuacuggacccugguggagcccggcgacaagaucaccuucgaggccaccggcaaccugguggugcccagauacgccuucaccauggagagaaacgccggcagcggcaucaucaucagcgacacccccgugcacgacugcaacaccaccugccagacccccgagggcgccaucaacaccagccugcccuuccagaacauccaccccaucaccaucggcaagugccccaaguacgugaagagcaccaagcugagacuggccaccggccugagaaacgugcccagcauccagagcagaggccuguucggcgccaucgccggcuucaucgagggcggcuggaccggcaugguggacggcugguacggcuaccaccaccagaacgagcagggcagcggcuacgccgccgaccugaagagcacccagaacgccaucgacaagaucaccaacaaggugaacagcgugaucgagaagaugaacacccaguucaccgccgugggcaaggaguucaaccaccuggagaagagaaucgagaaccugaacaagaagguggacgacggcuuccuggacaucuggaccuacaacgccgagcugcuggugcugcuggagaacgagagaacccuggacuaccacgacagcaacgugaagaaccuguacgagaaggugagaaaccagcugaagaacaacgccaaggagaucggcaacggcugcuucgaguucuaccacaagugcgacaacaccugcauggagagcgugaagaacggcaccuacgacuaccccaaguacagcgaggaggccaagcugaacagagagaagaucgacggcgugaagcuggagagcaccagaaucuaccagauccuggccaucuacagcaccguggccagcagccuggugcugguggugagccugggcgccaucagcuucuggaugugcagcaacggcagccugcagugcagaaucugcaucuga

SEQ ID NO: 172057 - RNA, 1701 nt, Artificial Sequence; identical to SEQ ID NO: 171967
  derived and/or modified CDS sequence (opt4) from hemagglutinin__InfluenzaA__AHV83878

SEQ ID NO: 172058 - RNA, 1701 nt, Artificial Sequence; identical to SEQ ID NO: 171967
  derived and/or modified CDS sequence (opt4) from hemagglutinin__InfluenzaA__AHV83879

SEQ ID NO: 172059 - RNA, 1701 nt, Artificial Sequence
  derived and/or modified CDS sequence (opt4) from hemagglutinin__InfluenzaA__AHV83881
augaaggccacccugguggugcugcuguacaccuucgccaccgccaacgccgacacccugugcaucggcuaccacgccaacaacagcaccgacaccguggacaccgugcuggagaagaacgugaccgugacccacagcgugaaccugcuggaggacaagcacaacggcaagcugugcaagcugagaggcguggccccccugcaccugggcaagugcaacaucgccggcuggauccugggcaaccccgagugcgagagccugagcaccgccagcagcuggagcuacaucguggagaccagcagcagcgacaacggcaccugcuaccccggcgacuucaucaacuacgaggagcugagagagcagcugagcagcgugagcagcuucgagagauucgagaucuuccccaagaccagcagcuggcccaaccacgacagcaacaagggcgugaccgccgccugcccccacgccggcgccaagagcuucuacaagaaccugaucuggcuggugaagaagggcaacagcuaccccaagcugagccagagcuacaucaacgacaagggcaaggaggugcuggugcuguggggcauccaccaccccagcaccaccgccgaccagcagagccuguaccagaacgccgacgccuacguguucgugggcaccagcagauacagcaagaaguucaagcccgagaucgccaucagacccaaggugagagaccaggagggcagaaugaacuacuacuggacccugguggagcccggcgacaagaucaccuucgaggccaccggcaaccugguggugcccagauacgccuucaccauggagagaaacgccggcagcggcaucaucaucagcgacacccccgugcacgacugcaacaccaccugccagacccccgagggcgccaucaacaccagccugcccuuccagaacauccaccccaucaccaucggcaagugccccaaguacgugaagagcaccaagcugagacuggccaccggccugagaaacgugcccagcauccagagcagaggccuguucggcgccaucgccggcuucaucgagggcggcuggaccggcaugguggacggcugguacggcuaccaccaccagaacgagcagggcagcggcuacgccgccgaccugaagagcacccagaacgccaucgacaagaucaccaacaaggugaacagcgugaucgagaagaugaacacccaguucaccgccgugggcaaggaguucaaccaccuggagaagagaaucgagaaccugaacaagaagguggacgacggcuuccuggacaucuggaccuacaacgccgagcugcuggugcugcuggagaacgagagaacccuggacuaccacgacagcaacgugaagaaccuguacgagaaggugagaaaccagcugaagaacaacgccaaggagaucggcaacggcugcuucgaguucuaccacaagugcgacaacaccugcauggagagcgugaagaacggcaccuacgacuaccccaaguacagcgaggaggccaagcugaacagagagaagaucgacggcgugaagcuggagagcaccagaaucuaccagauccuggccaucuacagcaccguggccagcagccuggugcugguggugagccugggcgccaucagcuucuggaugugcagcaacggcagccugcagugcagaaucugcaucuga

SEQ ID NO: 172060 - RNA, 1701 nt, Artificial Sequence; identical to SEQ ID NO: 171081
  derived and/or modified CDS sequence (opt4) from hemagglutinin__InfluenzaA__AHV83882

SEQ ID NO: 172061 - RNA, 1701 nt, Artificial Sequence; identical to SEQ ID NO: 171063
  derived and/or modified CDS sequence (opt4) from hemagglutinin__InfluenzaA__AHV83883

SEQ ID NO: 172062 - RNA, 1701 nt, Artificial Sequence; identical to SEQ ID NO: 170100
  derived and/or modified CDS sequence (opt4) from hemagglutinin__InfluenzaA__AHV83884

SEQ ID NO: 172063 - RNA, 1701 nt, Artificial Sequence
  derived and/or modified CDS sequence (opt4) from hemagglutinin__InfluenzaA__AHV83885
augaaggccauccugguggugcugcuguacaccuucgccaccgccaacgccgacacccugugcaucggcuaccacgccaacaacagcaccgacaccguggacaccgugcuggagaagaacgugaccgugacccacagcgugaaccugcuggaggacaagcacaacggcaagcugugcaagcugagaggcguggccccccugcaccugggcaagugcaacaucgccggcuggauccugggcaaccccgagugcgagagccugagcaccgccagcagcuggagcuacaucguggagaccagcagcagcgacaacggcaccugcuaccccggcgacuucaucaacuacgaggagcugagagagcagcugagcagcgugagcagcuucgagagauucgagaucuuccccaagaccagcagcuggcccaaccacgacagcaacaagggcgugaccgccgccugcccccacgccggcgccaagagcuucuacaagaaccugaucuggcuggugaagaagggcaacagcuaccccaagcugagccagagcuacaucaacgacaagggcaaggaggugcuggugcuguggggcauccaccaccccagcaccaccgccgaccagcagagccuguaccagaacgccgacgccuacguguucgugggcaccagcagauacagcaagaaguucaagcccgagaucgccaucagacccaaggugagagaccaggagggcagaaugaacuacuacuggacccugguggagcccggcgacaagaucaccuucgaggccaccggcaaccugguggugcccagauacgccuucaccauggagagaaacgccggcagcggcaucaucaucagcgacacccccguguacgacugcaacaccaccugccagacccccgagggcgccaucaacaccagccugcccuuccagaacauccaccccaucaccaucggcaagugccccaaguacgugaagagcaccaagcugagacuggccaccggccugagaaacgugcccagcauccagagcagaggccuguucggcgccaucgccggcuucaucgagggcggcuggaccggcaugguggacggcugguacggcuaccaccaccagaacgagcagggcagcggcuacgccgccgaccugaagagcacccagaacgccaucgacaagaucaccaacaaggugaacagcgugaucgagaagaugaacacccaguucaccgccgugggcaaggaguucaaccaccuggagaagagaaucgagaaccugaacaagaagguggacgacggcuuccuggacaucuggaccuacaacgccgagcugcuggugcugcuggagaacgagagaacccuggacuaccacgacagcaacgugaagaaccuguacgagaaggugagaaaccagcugaagaacaacgccaaggagaucggcaacggcugcuucgaguucuaccacaagugcgacaacaccugcauggagagcgugaagaacggcaccuacgacuaccccaaguacagcgaggaggccaagcugaacagagagaagaucgacggcgugaagcuggagagcaccagaaucuaccagauccuggccaucuacagcaccguggccagcagccuggugcugguggugagccugggcgccaucagcuucuggaugugcagcaacggcagccugcagugcagaaucugcaucuga

SEQ ID NO: 172064 - RNA, 1701 nt, Artificial Sequence; identical to SEQ ID NO: 171980
  derived and/or modified CDS sequence (opt4) from hemagglutinin__InfluenzaA__AHV83887

SEQ ID NO: 172065 - RNA, 1701 nt, Artificial Sequence; identical to SEQ ID NO: 170100
  derived and/or modified CDS sequence (opt4) from hemagglutinin__InfluenzaA__AHV83888

SEQ ID NO: 172066 - RNA, 1701 nt, Artificial Sequence
  derived and/or modified CDS sequence (opt4) from hemagglutinin__InfluenzaA__AHV83889
augaaggccauccugguggugcugcugcacacccuggccaccgccaacgccgacacccugugcaucggcuaccacgccaacaacagcaccgacaccguggacaccgugcuggagaagaacgugaccgugacccacagcgugaaccugcuggaggacaagcacaacggcaagcugugcaagcugagaggcguggccccccugcaccugggcaagugcaacaucgccggcuggauccugggcaaccccgagugcgagagccugagcaccgccagcagcuggagcuacaucguggagaccagcagcagcgacaacggcaccugcuaccccggcgacuucaucaacuacgaggagcugagagagcagcugagcagcgugagcagcuucgagagauucgagaucuuccccaagaccagcagcuggcccaaccacgacagcaacaagggcgugaccgccgccugcccccacgccggcgccaagagcuucuacaagaaccugaucuggcuggugaagaagggcaacagcuaccccaagcugagccagagcuacaucaacgacaagggcaaggaggugcuggugcuguggggcauccaccaccccagcaccaccgccgaccagcagagccuguaccagaacgccgacgccuacguguucgugggcaccagcagauacagcaagaaguucaagcccgagaucgccaucagacccaaggugagagaccaggagggcagaaugaacuacuacuggacccugguggagcccggcgacaagaucaccuucgaggccaccggcaaccugguggugcccagauacgccuucaccauggagagaaacgccggcagcggcaucaucaucagcgacacccccgugcacgacugcaacaccaccugccagacccccgagggcgccaucaacaccagccugcccuuccagaacauccaccccaucaccaucggcaagugccccaaguacgugaagagcaccaagcugagacuggccaccggccugagaaacgugcccagcauccagagcagaggccuguucggcgccaucgccggcuucaucgagggcggcuggaccggcaugguggacggcugguacggcuaccaccaccagaacgagcagggcagcggcuacgccgccgaccugaagagcacccagaacgccaucgacaagaucaccaacaaggugaacagcgugaucgagaagaugaacacccaguucaccgccgugggcaaggaguucaaccaccuggagaagagaaucgagaaccugaacaagaagguggacgacggcuuccuggacaucuggaccuacaacgccgagcugcuggugcugcuggagaacgagagaacccuggacuaccacgacagcaacgugaagaaccuguacgagaaggugagaaaccagcugaagaacaacgccaaggagaucggcaacggcugcuucgaguucuaccacaagugcgacaacaccugcauggagagcgugaagaacggcaccuacgacuaccccaaguacagcgaggaggccaagcugaacagagagaagaucgacggcgugaagcuggagagcaccagaaucuaccagauccuggccaucuacagcaccguggccagcagccuggugcugguggugagccugggcgccaucagcuucuggaugugcagcaacggcagccugcagugcagaaucugcaucuga

SEQ ID NO: 172067 - RNA, 1701 nt, Artificial Sequence; identical to SEQ ID NO: 170100
  derived and/or modified CDS sequence (opt4) from hemagglutinin__InfluenzaA__AHV83890

SEQ ID NO: 172068 - RNA, 1701 nt, Artificial Sequence; identical to SEQ ID NO: 170100
  derived and/or modified CDS sequence (opt4) from hemagglutinin__InfluenzaA__AHV83891

SEQ ID NO: 172069 - RNA, 1701 nt, Artificial Sequence; identical to SEQ ID NO: 170100
  derived and/or modified CDS sequence (opt4) from hemagglutinin__InfluenzaA__AHV83893

SEQ ID NO: 172070 - RNA, 1701 nt, Artificial Sequence; identical to SEQ ID NO: 170100
  derived and/or modified CDS sequence (opt4) from hemagglutinin__InfluenzaA__AHV83894

SEQ ID NO: 172071 - RNA, 1701 nt, Artificial Sequence
  derived and/or modified CDS sequence (opt4) from hemagglutinin__InfluenzaA__AHV83895
augaaggccauccugguggugcugcuguacaccuucgccaccgccaacgccgacacccugugcaucggcuaccacgccaacaacagcaccgacaccguggacaccgugcuggagaagaacgugaccgugacccacagcgugaaccugcuggaggacaagcacaacggcaagcugugcaagcugagaggcguggccccccugcaccugggcaagugcaacaucgccggcuggauccugggcaaccccgagugcgagagccugagcaccgccagcagcuggagcuacaucguggagaccagcagcagcgacaacggcaccugcuaccccggcgacuucaucaacuacgaggagcugagagagcagcugagcagcgugagcagcuucgagagauucgagaucuuccccaagaccagcagcuggcccaaccacgacagcaacaagggcgugaccgccgccugcccccacgccggcgccaagagcuucuacaagaaccugaucuggcuggugaagaagggcaacagcuaccccaagcugagccagagcuacaucaacgacaagggcaaggaggugcuggugcuguggggcauccaccaccccagcaccaccgccgaccagcagagccuguaccagaacgccgacgccuacguguucgugggcaccagcagauacagcaagaaguucaagcccgagaucgccaucagacccaaggugagagaccaggagggcagaaugaacuacuacuggacccugguggagcccggcgacaagaucaccuucgaggccaccggcaaccugguggugcccagauacgccuucaccauggagagaaacgccggcagcggcaucaucaucagcgacacccccgugcacgacugcaacaccaccugccagacccccgagggcgccaucaacaccagccugcccuuccagaacauccaccccaucaccaucggcaagugccccaaguacgugaagagcaccaagcugagacuggccaccggccugagaaacgugcccagcauccagagcagaggccuguucggcgccaucgccggcuucaucgagggcggcuggaccggcaugguggacggcugguacggcuaccaccaccagaacgagcagggcagcggcuacgccgccgaccugaagagcacccagaacgccaucgacaagaucaccaacaaggugaacagcgugaucgagaagaugaacacccaguucaccgccgugggcaaggaguucaaccaccuggagaagagaaucgagaaccugaacaagaagguggacgacggcuuccuggacaucuggaccuacaacgccgagcugcuggugcugcuggagaacgagagaacccuggacuaccacgacagcaacgugaagaaccuguacgagaaggugagaaaccagcugaagaacaacgccaaggagaucggcaacggcugcuucgaguucuaccacaagugcgacaacaccugcauggagagcgugaagaacggcaccuacgacuaccccaaguacagcgaggagaccaagcugaacagagagaagaucgacggcgugaagcuggagagcaccagaaucuaccagauccuggccaucuacagcaccguggccagcagccuggugcugguggugagccugggcgccaucagcuucuggaugugcagcaacggcagccugcagugcagaaucugcaucuga

SEQ ID NO: 172072 - RNA, 1701 nt, Artificial Sequence; identical to SEQ ID NO: 170100
  derived and/or modified CDS sequence (opt4) from hemagglutinin__InfluenzaA__AHV83896

SEQ ID NO: 172073 - RNA, 1701 nt, Artificial Sequence; identical to SEQ ID NO: 170100
  derived and/or modified CDS sequence (opt4) from hemagglutinin__InfluenzaA__AHV83897

SEQ ID NO: 172074 - RNA, 1701 nt, Artificial Sequence
  derived and/or modified CDS sequence (opt4) from hemagglutinin__InfluenzaA__AHV83898
augaaggccauccugguggugcugcuguacaccuucgccaccgccaacgccgacacccugugcaucggcuaccacgccaacaacagcaccgacaccguggacaccgugcuggagaagaacgugaccgugacccacagcgugaaccugcuggaggacaagcacaacggcaagcugugcaagcugagaggcguggccccccugcaccugggcaagugcaacaucgccggcuggauccugggcaaccccgagugcgagagccugagcaccgccagcagcuggagcuacaucguggagaccagcagcagcgacaacggcaccugcuaccccggcgacuucaucaacuacgaggagcugagagagcagcugagcagcgugagcagcuucgagagauucgagaucuuccccaagaccagcagcuggcccaaccacgacagcaacaagggcgugaccgccgccugcccccacgccggcgccaagagcuucuacaagaaccugaucuggcuggugaagaagggcaacagcuaccccaagcugagccagagcuacaucaacgacaagggcaaggaggugcuggugcuguggggcauccaccaccccagcaccaccgccgaccagcagagccuguaccagaacgccgacgccuacguguucgugggcaccagcagauacagcaagaaguucaagcccgagaucgccaucagacccaaggugagagaccaggagggcagaaugaacuacuacuggacccugguggagcccggcgacaagaucaccuucgaggccaccggcaaccugguggugcccagauacgccuucaccauggagagaaacgccggcagcggcaucaucaucagcgacacccccgugcacgacugcaacaccaccugccagacccccgagggcgccaucaacaccagccugcccuuccagaacauccaccccaucaccaucggcaagugccccaaguacgugaagagcaccaagcugagacuggugaccggccugagaaacgugcccagcauccagagcagaggccuguucggcgccaucgccggcuucaucgagggcggcuggaccggcaugguggacggcugguacggcuaccaccaccagaacgagcagggcagcggcuacgccgccgaccugaagagcacccagaacgccaucgacaagaucaccaacaaggugaacagcgugaucgagaagaugaacacccaguucaccgccgugggcaaggaguucaaccaccuggagaagagaaucgagaaccugaacaagaagguggacgacggcuuccuggacaucuggaccuacaacgccgagcugcuggugcugcuggagaacgagagaacccuggacuaccacgacagcaacgugaagaaccuguacgagaaggugagaaaccagcugaagaacaacgccaaggagaucggcaacggcugcuucgaguucuaccacaagugcgacaacaccugcauggagagcgugaagaacggcaccuacgacuaccccaaguacagcgaggaggccaagcugaacagagagaagaucgacggcgugaagcuggagagcaccagaaucuaccagauccuggccaucuacagcaccguggccagcagccuggugcugguggugagccugggcgccaucagcuucuggaugugcagcaacggcagccugcagugcagaaucugcaucuga

SEQ ID NO: 172075 - RNA, 1701 nt, Artificial Sequence; identical to SEQ ID NO: 170100
  derived and/or modified CDS sequence (opt4) from hemagglutinin__InfluenzaA__AHV83899

SEQ ID NO: 172076 - RNA, 1701 nt, Artificial Sequence; identical to SEQ ID NO: 170100
  derived and/or modified CDS sequence (opt4) from hemagglutinin__InfluenzaA__AHV83900

SEQ ID NO: 172077 - RNA, 1701 nt, Artificial Sequence; identical to SEQ ID NO: 170100
  derived and/or modified CDS sequence (opt4) from hemagglutinin__InfluenzaA__AHV83901

SEQ ID NO: 172078 - RNA, 1701 nt, Artificial Sequence; identical to SEQ ID NO: 170100
  derived and/or modified CDS sequence (opt4) from hemagglutinin__InfluenzaA__AHV83902

SEQ ID NO: 172079 - RNA, 1701 nt, Artificial Sequence; identical to SEQ ID NO: 170100
  derived and/or modified CDS sequence (opt4) from hemagglutinin__InfluenzaA__AHV83903

SEQ ID NO: 172080 - RNA, 1701 nt, Artificial Sequence; identical to SEQ ID NO: 170100
  derived and/or modified CDS sequence (opt4) from hemagglutinin__InfluenzaA__AHV83904

SEQ ID NO: 172081 - RNA, 1701 nt, Artificial Sequence
  derived and/or modified CDS sequence (opt4) from hemagglutinin__InfluenzaA__AHV83905
augaaggccauccugguggugcugcuguacacccugaccaccgccaacgccgacacccugugcaucggcuaccacgccaacaacagcaccgacaccguggacaccgugcuggagaagaacgugaccgugacccacagcgugaaccugcuggaggacaagcacaacggcaagcugugcaagcugagaggcguggccccccugcaccugggcaagugcaacaucgccggcuggauccugggcaaccccgagugcgagagccugagcaccgccagcagcuggagcuacaucguggagaccagcagcagcgacaacggcaccugcuaccccggcgacuucaucaacuacgaggagcugagagagcagcugagcagcgugagcagcuucgagagauucgagaucuuccccaagaccagcagcuggcccaaccacgacagcaacaagggcgugaccgccgccugcccccacgccggcgccaagagcuucuacaagaaccugaucuggcuggugaagaagggcaacagcuaccccaagcugagccagagcuacaucaacgacaagggcaaggaggugcuggugcuguggggcauccaccaccccagcaccaccgccgaccagcagagccuguaccagaacgccgacgccuacguguucgugggcaccagcagauacagcaagaaguucaagcccgagaucgccaucagacccaaggugagagaccaggagggcagaaugaacuacuacuggacccugguggagcccggcgacaagaucaccuucgaggccaccggcaaccugguggugcccagauacgccuucaccauggagagaaacgccggcagcggcaucaucaucagcgacacccccgugcacgacugcaacaccaccugccagacccccgagggcgccaucaacaccagccugcccuuccagaacauccaccccaucaccaucggcaagugccccaaguacgugaagagcaccaagcugagacuggccaccggccugagaaacgugcccagcauccagagcagaggccuguucggcgccaucgccggcuucaucgagggcggcuggaccggcaugguggacggcugguacggcuaccaccaccagaacgagcagggcagcggcuacgccgccgaccugaagagcacccagaacgccaucgacaagaucaccaacaaggugaacagcgugaucgagaagaugaacacccaguucaccgccgugggcaaggaguucaaccaccuggagaagagaaucgagaaccugaacaagaagguggacgacggcuuccuggacaucuggaccuacaacgccgagcugcuggugcugcuggagaacgagagaacccuggacuaccacgacagcaacgugaagaaccuguacgagaaggugagaaaccagcugaagaacaacgccaaggagaucggcaacggcugcuucgaguucuaccacaagugcgacaacaccugcauggagagcgugaagaacggcaccuacgacuaccccaaguacagcgaggaggccaagcugaacagagagaagaucgacggcgugaagcuggagagcaccagaaucuaccagauccuggccaucuacagcaccguggccagcagccuggugcugguggugagccugggcgccaucagcuucuggaugugcagcaacggcagccugcagugcagaaucugcaucuga

SEQ ID NO: 172082 - RNA, 1701 nt, Artificial Sequence; identical to SEQ ID NO: 170100
  derived and/or modified CDS sequence (opt4) from hemagglutinin__InfluenzaA__AHV83906

SEQ ID NO: 172083 - RNA, 1701 nt, Artificial Sequence; identical to SEQ ID NO: 170100
  derived and/or modified CDS sequence (opt4) from hemagglutinin__InfluenzaA__AHV83907

SEQ ID NO: 172084 - RNA, 1701 nt, Artificial Sequence
  derived and/or modified CDS sequence (opt4) from hemagglutinin__InfluenzaA__AHV83908
augaaggccauccugguggugcugcuguacaccuucgccaccgccaacgccgacacccugugcaucggcuaccacgccaacaacagcaccgacaccguggacaccgugcuggagaagaacgugaccgugacccacagcgugaaccugcuggaggacaagcacaacggcaagcugugcaagcugagaggcguggccccccugcaccugggcaagugcaacaucgccggcuggauccugggcaaccccgagugcgagccccugagcaccgccagcagcuggagcuacaucguggagaccagcagcagcgacaacggcaccugcuaccccggcgacuucaucaacuacgaggagcugagagagcagcugagcagcgugagcagcuucgagagauucgagaucuuccccaagaccagcagcuggcccaaccacgacagcaacaagggcgugaccgccgccugcccccacgccggcgccaagagcuucuacaagaaccugaucuggcuggugaagaagggcaacagcuaccccaagcugagccagagcuacaucaacgacaagggcaagaaggugcuggugcuguggggcauccaccaccccagcaccaccgccgaccagcagagccuguaccagaacgccgacgccuacguguucgugggcaccagcagauacagcaagaaguucaagcccgagaucgccaucagacccaaggugagagaccaggagggcagaaugaacuacuacuggacccugguggagcccggcgacaagaucaccuucgaggccaccggcaaccugguggugcccagauacgccuucaccauggagagaaacgccggcagcggcaucaucaucagcgacacccccgugcacgacugcaacaccaccugccagacccccgagggcgccaucaacaccagccugcccuuccagaacauccaccccaucaccaucggcaagugccccaaguacgugaagagcaccaagcugagacuggccaccggccugagaaacgugcccagcauccagagcagaggccuguucggcgccaucgccggcuucaucgagggcggcuggaccggcaugguggacggcugguacggcuaccaccaccagaacgagcagggcagcggcuacgccgccgaccugaagagcacccagaacgccaucgacaagaucaccaacaaggugaacagcgugaucgagaagaugaacacccaguucaccgccgugggcaaggaguucaaccaccuggagaagagaaucgagaaccugaacaagaagguggacgacggcuuccuggacaucuggaccuacaacgccgagcugcuggugcugcuggagaacgagagaacccuggacuaccacgacagcaacgugaagaaccuguacgagaaggugagaaaccagcugaagaacaacgccaaggagaucggcaacggcugcuucgaguucuaccacaagugcgacaacaccugcauggagagcgugaagaacggcaccuacgacuaccccaaguacagcgaggaggccaagcugaacagagagaagaucgacggcgugaagcuggagagcaccagaaucuaccagauccuggccaucuacagcaccguggccagcagccuggugcugguggugagccugggcgccaucagcuucuggaugugcagcaacggcagccugcagugcagaaucugcaucuga

SEQ ID NO: 172085 - RNA, 1701 nt, Artificial Sequence
  derived and/or modified CDS sequence (opt4) from hemagglutinin__InfluenzaA__AHV83911
augaaggccauccugguggugcugcuguacaccuucgccaccgccaacgccgacacccugugcaucggcuaccacgccaacaacagcaccgacaccguggacaccgugcuggagaagaacgugaccgugacccacagcgugaaccugcuggaggacaagcacaacggcaagcugugcaagcugagaggcguggccccccugcaccugggcaagugcaacaucgccggcuggauccugggcaaccccgagugcgagccccugagcaccgccagcagcuggagcuacaucguggagaccagcagcagcgacaacggcaccugcuaccccggcgacuucaucaacuacgaggagcugagagagcagcugagcagcgugagcagcuucgagagauucgagaucuuccccaagaccagcagcuggcccaaccacgacagcaacaagggcgugaccgccgccugcccccacgccggcgccaagagcuucuacaagaaccugaucuggcuggugaagaagggcaacagcuaccccaagcugagccagagcuacaucaacgacaagggcaaggaggugcuggugcuguggggcauccaccaccccagcaccaccgccgaccagcagagccuguaccagaacgccgacgccuacguguucgugggcaccagcagauacagcaagaaguucaagcccgagaucgccaucagacccaaggugagagaccaggagggcagaaugaacuacuacuggacccugguggagcccggcgacaagaucaccuucgaggccaccggcaaccugguggugcccagauacgccuucaccauggagagaaacgccggcagcggcaucaucaucagcgacacccccgugcacgacugcaacaccaccugccagacccccgagggcgccaucaacaccagccugcccuuccagaacauccaccccaucaccaucggcaagugccccaaguacgugaagagcaccaagcugagacuggccaccggccugagaaacgugcccagcauccagagcagaggccuguucggcgccaucgccggcuucaucgagggcggcuggaccggcaugguggacggcugguacggcuaccaccaccagaacgagcagggcagcggcuacgccgccgaccugaagagcacccagaacgccaucgacaagaucaccaacaaggugaacagcgugaucgagaagaugaacacccaguucaccgccgugggcaaggaguucaaccaccuggagaagagaaucgagaaccugaacaagaagguggacgacggcuuccuggacaucuggaccuacaacgccgagcugcuggugcugcuggagaacgagagaacccuggacuaccacgacagcaacgugaagaaccuguacgagaaggugagaaaccagcugaagaacaacgccaaggagaucggcaacggcugcuucgaguucuaccacaagugcgacaacaccugcauggagagcgugaagaacggcaccuacgacuaccccaaguacagcgaggaggccaagcugaacagagagaagaucgacggcgugaagcuggagagcaccagaaucuaccagauccuggccaucuacagcaccguggccagcagccuggugcugguggugagccugggcgccaucagcuucuggaugugcagcaacggcagccugcagugcagaaucugcaucuga

SEQ ID NO: 172086 - RNA, 1701 nt, Artificial Sequence; identical to SEQ ID NO: 170100
  derived and/or modified CDS sequence (opt4) from hemagglutinin__InfluenzaA__AHV83912

SEQ ID NO: 172087 - RNA, 1701 nt, Artificial Sequence; identical to SEQ ID NO: 170100
  derived and/or modified CDS sequence (opt4) from hemagglutinin__InfluenzaA__AHV83913

SEQ ID NO: 172088 - RNA, 1701 nt, Artificial Sequence; identical to SEQ ID NO: 170100
  derived and/or modified CDS sequence (opt4) from hemagglutinin__InfluenzaA__AHV83915

SEQ ID NO: 172089 - RNA, 1701 nt, Artificial Sequence; identical to SEQ ID NO: 170100
  derived and/or modified CDS sequence (opt4) from hemagglutinin__InfluenzaA__AHV83916

SEQ ID NO: 172090 - RNA, 1701 nt, Artificial Sequence; identical to SEQ ID NO: 172085
  derived and/or modified CDS sequence (opt4) from hemagglutinin__InfluenzaA__AHV83917

SEQ ID NO: 172091 - RNA, 1701 nt, Artificial Sequence; identical to SEQ ID NO: 171063
  derived and/or modified CDS sequence (opt4) from hemagglutinin__InfluenzaA__AHV83919

SEQ ID NO: 172092 - RNA, 1701 nt, Artificial Sequence; identical to SEQ ID NO: 171980
  derived and/or modified CDS sequence (opt4) from hemagglutinin__InfluenzaA__AHV83920

SEQ ID NO: 172093 - RNA, 1701 nt, Artificial Sequence; identical to SEQ ID NO: 171081
  derived and/or modified CDS sequence (opt4) from hemagglutinin__InfluenzaA__AHV83921

SEQ ID NO: 172094 - RNA, 1701 nt, Artificial Sequence
  derived and/or modified CDS sequence (opt4) from hemagglutinin__InfluenzaA__AHV83922
augaaggccauccugguggugcugcuguacaccuucgccaccgccaacgccgacacccugugcaucggcuaccacgccaacaacagcaccgacaccguggacaccgugcuggagaagaacgugaccgugacccacagcgugaaccugcuggaggacaagcacaacggcaagcugugcaagcugagaggcguggccccccugcaccugggcaagugcaacaucgccggcuggauccugggcaaccccgagugcgagagccugagcaccgccagcagcuggagcuacaucguggagaccagcagcagcgacaacggcaccugcuaccccggcgacuucaucaacuacgaggagcugagagagcagcugagcagcgugagcagcuucgagagauucgagaucuuccccaagaccagcagcuggcccaaccacgacagcaacaagggcgugaccgccgccugcccccacgccggcgccaagagcuucuacaagaaccugaucuggcuggugaagaagggcaacagcuaccccaagcugagccagagcuacaucaacgacaagggcaaggaggugcuggugcuguggggcauccaccaccccagcaccaccgccgaccagcagagccuguaccagaacgccgacgccuacguguucgugggcaccagcagauacagcaagaaguucaagcccgagaucgccaucagacccaaggugagagaccaggagggcagaaugaacuacuacuggacccugguggagcccggcgacaagaucaccuucgaggccaccggcaaccugguggugcccagauacgccuucaccauggagagaaacgccggcagcggcaucaucaucagcgacacccccgugcacgacugcaacaccaccugccagacccccgagggcgccaucaacaccagccugcccuuccagaacauccaccccaucaccaucggcaagugccccaaguacgugaagagcaccaagcugagacuggccaccggccugagaaacgugcccagcauccagagcagaggccuguucggcgccaucgccggcuucaucgagggcggcuggaccggcaugguggacggcugguacggcuaccaccaccagaacgagcagggcagcggcuacgccgccgaccugaagagcacccagaacgccaucgacaagaucaccaacaaggugaacagcgugaucgagaagaugaacacccaguucaccgccgugggcaaggaguucagccaccuggagaagagaaucgagaaccugaacaagaagguggacgacggcuuccuggacaucuggaccuacaacgccgagcugcuggugcugcuggagaacgagagaacccuggacuaccacgacagcaacgugaagaaccuguacgagaaggugagaaaccagcugaagaacaacgccaaggagaucggcaacggcugcuucgaguucuaccacaagugcgacaacaccugcauggagagcgugaagaacggcaccuacgacuaccccaaguacagcgaggaggccaagcugaacagagagaagaucgacggcgugaagcuggagagcaccagaaucuaccagauccuggccaucuacagcaccguggccagcagccuggugcugguggugagccugggcgccaucagcuucuggaugugcagcaacggcagccugcagugcagaaucugcaucuga

SEQ ID NO: 172095 - RNA, 1701 nt, Artificial Sequence; identical to SEQ ID NO: 171996
  derived and/or modified CDS sequence (opt4) from hemagglutinin__InfluenzaA__AHV83923

SEQ ID NO: 172096 - RNA, 1701 nt, Artificial Sequence; identical to SEQ ID NO: 171980
  derived and/or modified CDS sequence (opt4) from hemagglutinin__InfluenzaA__AHV83924

SEQ ID NO: 172097 - RNA, 1701 nt, Artificial Sequence; identical to SEQ ID NO: 171996
  derived and/or modified CDS sequence (opt4) from hemagglutinin__InfluenzaA__AHV83925

SEQ ID NO: 172098 - RNA, 1701 nt, Artificial Sequence; identical to SEQ ID NO: 171980
  derived and/or modified CDS sequence (opt4) from hemagglutinin__InfluenzaA__AHV83926

SEQ ID NO: 172099 - RNA, 1701 nt, Artificial Sequence; identical to SEQ ID NO: 172085
  derived and/or modified CDS sequence (opt4) from hemagglutinin__InfluenzaA__AHV83927

SEQ ID NO: 172100 - RNA, 1701 nt, Artificial Sequence
  derived and/or modified CDS sequence (opt4) from hemagglutinin__InfluenzaA__AHV83928
augaaggccauccugguggugcugcuguacaccuucaccaccgccaacgccgacacccugugcaucggcuaccacgccaacaacagcaccgacaccguggacaccgugcuggagaagaacgugaccgugacccacagcgugaaccugcuggaggacaagcacaacggcaagcugugcaagcugagaggcguggccccccugcaccugggcaagugcaacaucgccggcuggauccugggcaaccccgagugcgagagccugagcaccgccagcagcuggagcuacaucguggagaccagcagcagcgacaacggcaccugcuaccccggcgacuucaucaacuacgaggagcugagagagcagcugagcagcgugagcagcuucgagagauucgagaucuuccccaagaccagcagcuggcccaaccacgacagcaacaagggcgugaccgccgccugcccccacgccggcgccaagagcuucuacaagaaccugaucuggcuggugaagaagggcaacagcuaccccaagcugagccagagcuacaucaacgacaagggcaaggaggugcuggugcuguggggcauccaccaccccagcaccaccgccgaccagcagagccuguaccagaacgccgacgccuacguguucgugggcaccagcagauacagcaagaaguucaagcccgagaucgccaucagacccaaggugagagaccaggagggcagaaugaacuacuacuggacccugguggagcccggcgacaagaucaccuucgaggccaccggcaaccugguggugcccagauacgccuucaccauggagagaaacgccggcagcggcaucaucaucagcgacacccccgugcacgacugcaacaccaccugccagacccccgagggcgccaucaacaccagccugcccuuccagaacauccaccccaucaccaucggcaagugccccaaguacgugaagagcaccaagcugagacuggccaccggccugagaaacgugcccagcauccagagcagaggccuguucggcgccaucgccggcuucaucgagggcggcuggaccggcaugguggacggcugguacggcuaccaccaccagaacgagcagggcagcggcuacgccgccgaccagaagagcacccagaacgccaucgacaagaucaccaacaaggugaacagcgugaucgagaagaugaacacccaguucaccgccgugggcaaggaguucaaccaccuggagaagagaaucgagaaccugaacaagaagguggacgacggcuuccuggacaucuggaccuacaacgccgagcugcuggugcugcuggagaacgagagaacccuggacuaccacgacagcaacgugaagaaccuguacgagaaggugagaaaccagcugaagaacaacgccaaggagaucggcaacggcugcuucgaguucuaccacaagugcgacaacaccugcauggagagcgugaagaacggcaccuacgacuaccccaaguacagcgaggaggccaagcugaacagagagaagaucgacggcgugaagcuggagagcaccagaaucuaccagauccuggccaucuacagcaccguggccagcagccuggugcugguggugagccugggcgccaucagcuucuggaugugcagcaacggcagccugcagugcagaaucugcaucuga

SEQ ID NO: 172101 - RNA, 1701 nt, Artificial Sequence; identical to SEQ ID NO: 171980
  derived and/or modified CDS sequence (opt4) from hemagglutinin__InfluenzaA__AHV83929

SEQ ID NO: 172102 - RNA, 1701 nt, Artificial Sequence
  derived and/or modified CDS sequence (opt4) from hemagglutinin__InfluenzaA__AHV83930
augaaggccauccuggugauccugcuguacaccuucgccaccgccaacgccgacacccugugcaucggcuaccacgccaacaacagcaccgacaccguggacaccgugcuggagaagaacgugaccgugacccacagcgugaaccugcuggaggacaagcacaacggcaagcugugcaagcugagaggcguggccccccugcaccugggcaagugcaacaucgccggcuggauccugggcaaccccgagugcgagagccugagcaccgccagcagcuggagcuacaucguggagaccagcagcagcgacaacggcaccugcuaccccggcgacuucaucaacuacgaggagcugagagagcagcugagcagcgugagcagcuucgagagauucgagaucuuccccaagaccagcagcuggcccaaccacgacagcaacaagggcgugaccgccgccugcccccacgccggcgccaagagcuucuacaagaaccugaucuggcuggugaagaagggcaacagcuaccccaagcugagccagagcuacaucaacgacaagggcaaggaggugcuggugcuguggggcauccaccaccccagcaccaccgccgaccagcagagccuguaccagaacgccgacgccuacguguucgugggcaccagcagauacagcaagaaguucaagcccgagaucgccaucagacccaaggugagagaccaggagggcagaaugaacuacuacuggacccugguggagcccggcgacaagaucaccuucgaggccaccggcaaccugguggugcccagauacgccuucaccauggagagaaacgccggcagcggcaucaucaucagcgacacccccgugcacgacugcaacaccaccugccagacccccgagggcgccaucaacaccagccugcccuuccagaacauccaccccaucaccaucggcaagugccccaaguacgugaagagcaccaagcugagacuggccaccggccugagaaacgugcccagcauccagagcagaggccuguucggcgccaucgccggcuucaucgagggcggcuggaccggcaugguggacggcugguacggcuaccaccaccagaacgagcagggcagcggcuacgccgccgaccugaagagcacccagaacgccaucgacaagaucaccaacaaggugaacagcgugaucgagaagaugaacacccaguucaccgccgugggcaaggaguucaaccaccuggagaagagaaucgagaaccugaacaagaagguggacgacggcuuccuggacaucuggaccuacaacgccgagcugcuggugcugcuggagaacgagagaacccuggacuaccacgacagcaacgugaagaaccuguacgagaaggugagaaaccagcugaagaacaacgccaaggagaucggcaacggcugcuucgaguucuaccacaagugcgacaacaccugcauggagagcgugaagaacggcaccuacgacuaccccaaguacagcgaggaggccaagcugaacagagagaagaucgacggcgugaagcuggagagcaccagaaucuaccagauccuggccaucuacagcaccguggccagcagccuggugcugguggugagccugggcgccaucagcuucuggaugugcagcaacggcagccugcagugcagaaucugcaucuga

SEQ ID NO: 172103 - RNA, 1701 nt, Artificial Sequence; identical to SEQ ID NO: 171980
  derived and/or modified CDS sequence (opt4) from hemagglutinin__InfluenzaA__AHV83931

SEQ ID NO: 172104 - RNA, 1701 nt, Artificial Sequence; identical to SEQ ID NO: 170100
  derived and/or modified CDS sequence (opt4) from hemagglutinin__InfluenzaA__AHV83932

SEQ ID NO: 172105 - RNA, 1701 nt, Artificial Sequence
  derived and/or modified CDS sequence (opt4) from hemagglutinin__InfluenzaA__AHV83933
augaaggccauccugguggugcugcuguacaccuucgccaccgccaacgccgacacccugugcaucggcuaccacgccaacaacagcaccgacaccguggacaccgugcuggagaagaacgugaccgugacccacagcgugaaccugcuggaggacaagcacaacggcaagcugugcaagcugagaggcgugaccccccugcaccugggcaagugcaacaucgccggcuggauccugggcaaccccgagugcgagagccugagcaccgccagcagcuggagcuacaucguggagaccagcagcagcgacaacggcaccugcuaccccggcgacuucaucaacuacgaggagcugagagagcagcugagcagcgugagcagcuucgagagauucgagaucuuccccaagaccagcagcuggcccaaccacgacagcaacaagggcgugaccgccgccugcccccacgccggcgccaagagcuucuacaagaaccugaucuggcuggugaagaagggcaacagcuaccccaagcugagccagagcuacaucaacgacaagggcaaggaggugcuggugcuguggggcauccaccaccccagcaccaccgccgaccagcagagccuguaccagaacgccgacgccuacguguucgugggcaccagcagauacagcaagaaguucaagcccgagaucgccaucagacccaaggugagagaccaggagggcagaaugaacuacuacuggacccugguggagcccggcgacaagaucaccuucgaggccaccggcaaccugguggugcccagauacgccuucaccauggagagaaacgccggcagcggcaucaucaucagcgacacccccgugcacgacugcaacaccaccugccagacccccgagggcgccaucaacaccagccugcccuuccagaacauccaccccaucaccaucggcaagugccccaaguacgugaagagcaccaagcugagacuggccaccggccugagaaacgugcccagcauccagagcagaggccuguucggcgccaucgccggcuucaucgagggcggcuggaccggcaugguggacggcugguacggcuaccaccaccagaacgagcagggcagcggcuacgccgccgaccagaagagcacccagaacgccaucgacaagaucaccaacaaggugaacagcgugaucgagaagaugaacacccaguucaccgccgugggcaaggaguucaaccaccuggagaagagaaucgagaaccugaacaagaagguggacgacggcuuccuggacaucuggaccuacaacgccgagcugcuggugcugcuggagaacgagagaacccuggacuaccacgacagcaacgugaagaaccuguacgagaaggugagaaaccagcugaagaacaacgccaaggagaucggcaacggcugcuucgaguucuaccacaagugcgacaacaccugcauggagagcgugaagaacggcaccuacgacuaccccaaguacagcgaggaggccaagcugaacagagagaagaucgacggcgugaagcuggagagcaccagaaucuaccagauccuggcccuguacagcaccguggccagcagccuggugcugguggugagccugggcgccaucagcuucuggaugugcagcaacggcagccugcagugcagaaucugcaucuga

SEQ ID NO: 172106 - RNA, 1701 nt, Artificial Sequence; identical to SEQ ID NO: 171063
  derived and/or modified CDS sequence (opt4) from hemagglutinin__InfluenzaA__AHV83934

SEQ ID NO: 172107 - RNA, 1701 nt, Artificial Sequence; identical to SEQ ID NO: 170100
  derived and/or modified CDS sequence (opt4) from hemagglutinin__InfluenzaA__AHV83935

SEQ ID NO: 172108 - RNA, 1701 nt, Artificial Sequence; identical to SEQ ID NO: 170100
  derived and/or modified CDS sequence (opt4) from hemagglutinin__InfluenzaA__AHV83937

SEQ ID NO: 172109 - RNA, 1701 nt, Artificial Sequence
  derived and/or modified CDS sequence (opt4) from hemagglutinin__InfluenzaA__AHV83938
augaaggccauccugguggugcugcuguacaccuucgccaccgccaacgccgacacccugugcaucggcuaccacgccaacaacagcaccgacaccguggacaccgugcuggagaagaacgugaccgugacccacagcgugaaccugcuggaggacaagcacaacggcaagcugugcaagcugagaggcguggccccccugcaccugggcaagugcaacaucgccggcuggauccugggcaaccccgagugcgagagccugagcaccgccagcagcuggagcuacaucguggagaccagcagcagcgacaacggcaccugcuaccccggcgacuucaucaacuacgaggagcugagagagcagcugagcagcgugagcagcuucgagagauucgagaucuuccccaagaccagcagcuggcccaaccacgacagcaacaagggcgugaccgccgccugcccccacgccggcgccaagagcuucuacaagaaccugaucuggcuggugaagaagggcaacagcuaccccaagaucagccagagcuacaucaacgacaagggcaaggaggugcuggugcuguggggcauccaccaccccagcaccaccgccgaccagcagagccuguaccagaacgccgacgccuacguguucgugggcaccagcagauacagcaagaaguucaagcccgagaucgccaucagacccaaggugagagaccaggagggcagaaugaacuacuacuggacccugguggagcccggcgacaagaucaccuucgaggccaccggcaaccugguggugcccagauacgccuucaccauggagagaaacgccggcagcggcaucaucaucagcgacacccccgugcacgacugcaacaccaccugccagacccccgagggcgccaucaacaccagccugcccuuccagaacauccaccccaucaccaucggcaagugccccaaguacgugaagagcaccaagcugagacuggccaccggccugagaaacgugcccagcauccagagcagaggccuguucggcgccaucgccggcuucaucgagggcggcuggaccggcaugguggacggcugguacggcuaccaccaccagaacgagcagggcagcggcuacgccgccgaccagaagagcacccagaacgccaucgacaagaucaccaacaaggugaacagcgugaucgagaagaugaacacccaguucaccgccgugggcaaggaguucaaccaccuggagaagagaaucgagaaccugaacaagaagguggacgacggcuuccuggacaucuggaccuacaacgccgagcugcuggugcugcuggagaacgagagaacccuggacuaccacgacagcaacgugaagaaccuguacgagaaggugagaaaccagcugaagaacaacgccaaggagaucggcaacggcugcuucgaguucuaccacaagugcgacaacaccugcauggagagcgugaagaacggcaccuacgacuaccccaaguacagcgaggaggccaagcugaacagagagaagaucgacggcgugaagcuggagagcaccagaaucuaccagauccuggccaucuacagcaccguggccagcagccuggugcugguggugagccugggcgccaucagcuucuggaugugcagcaacggcagccugcagugcagaaucugcaucuga

SEQ ID NO: 172110 - RNA, 1701 nt, Artificial Sequence; identical to SEQ ID NO: 172109
  derived and/or modified CDS sequence (opt4) from hemagglutinin__InfluenzaA__AHV83939

SEQ ID NO: 172111 - RNA, 1701 nt, Artificial Sequence
  derived and/or modified CDS sequence (opt4) from hemagglutinin__InfluenzaA__AHV83940
augaaggccauccugguggugcugcuguacaccuucgccaccgccaacgccgacacccugugcaucggcuaccacgccaacaacagcaccgacaccguggacaccgugcuggagaagaacgugaccgugacccacagcgugaaccugcuggaggacaagcacaacggcaagcugugcaagcugagaggcguggccccccugcaccugggcaagugcaacaucgccggcuggauccugggcaaccccgagugcgagagccugagcaccgccagcagcuggagcuacaucguggagaccagcagcagcgacaacggcaccugcuaccccggcgacuucaucaacuacgaggagcugagagagcagcugagcagcgugagcagcuucgagagauucgagaucuuccccaagaccagcagcuggcccaaccacgacagcaacaagggcgugaccgccgccugcccccacgccggcgccaagagcuucuacaagaaccugaucuggcuggugaagaagggcaacagcuaccccaagcugagccagagcuacaucaacgacaagggcaaggaggugcuggugcuguggggcauccaccaccccagcaccaccgccgaccagcagagccuguaccagaacgccgacgccuacguguucgugggcaccagcagauacagcaagaaguucaagcccgagaucgccaucagacccaaggugagagaccaggagggcagaaugaacuacuacuggacccugguggagcccggcgacaagaucaccuucgaggccaccggcaaccugguggugcccagauacgccuucaccauggagagaaacgccggcagcggcaucaucaucagcgacacccccgugcacgacugcaacaccaccugccagacccccgagggcgccaucaacaccagccugcccuuccagaacauccaccccaucaccaucggcaagugccccaaguacgugaagagcaccaagcugagacuggccaccggccugagaaacgugcccagcauccagagcagaggccuguucggcgccaucgccggcuucaucgagggcggcuggaccggcaugguggacggcugguacggcuaccaccaccagaacgagcagggcagcggcuacgccgccgaccagaagagcacccagaacgccaucgacaagaucaccaacaaggugaacagcgugaucgagaagaugaacacccaguucaccgccgugggcaaggaguucaaccaccuggagaagagaaucgagaaccugaacaagaagguggacgacggcuucauggacaucuggaccuacaacgccgagcugcuggugcugcuggagaacgagagaacccuggacuaccacgacagcaacgugaagaaccuguacgagaaggugagaaaccagcugaagaacaacgccaaggagaucggcaacggcugcuucgaguucuaccacaagugcgacaacaccugcauggagagcgugaagaacggcaccuacgacuaccccaaguacagcgaggaggccaagcugaacagagagaagaucgacagagugaagcuggagagcaccagaaucuaccagauccuggccaucuacagcaccguggccagcagccuggugcugguggugagccugggcgccaucagcuucuggaugugcagcaacggcagccugcagugcagaaucugcaucuga

SEQ ID NO: 172112 - RNA, 1701 nt, Artificial Sequence; identical to SEQ ID NO: 170100
  derived and/or modified CDS sequence (opt4) from hemagglutinin__InfluenzaA__AHV83941

SEQ ID NO: 172113 - RNA, 1701 nt, Artificial Sequence
  derived and/or modified CDS sequence (opt4) from hemagglutinin__InfluenzaA__AHV83943
augaaggccauccugguggugcugcuguacaccuucgccaccgccaacgccgacacccugugcaucggcuaccacgccaacaacagcaccgacaccguggacaccgugcuggagaagaacgugaccgugacccacagcgugaaccugcuggaggacaagcacaacggcaagcugugcaagcugagaggcguggccccccugcaccugggcaagugcaacaucgccggcuggauccugggcaaccccgagugcgagagccugagcaccgccagcagcuggagcuacaucguggagaccagcagcagcgacaacggcaccugcuaccccggcgacuucaucaacuacgaggagcugagagagcagcugagcagcgugagcagcuucgagagauucgagaucuuccccaagaccagcagcuggcccaaccacgacagcaacaagggcgugaccgccgccugcccccacgccggcgccaagagcuucuacaagaaccugaucuggcuggugaagaagggcaacagcuaccccaagcugagccagagcuacaucaacgacaagggcaaggaggugcuggugcuguggggcauccaccaccccagcaccaccgccgaccagcagagccuguaccagaacgccgacgccuacguguucgugggcaccagcagauacagcaagaaguucaagcccgagaucgccaucagacccaaggugagagaccaggagggcagaaugaacuacuacuggacccugguggagcccggcgacaagaucaccuucgaggccaccggcaaccugguggugcccagauacgccuucaccauggagagaaacgccggcagcggcaucaucaucagcgacacccccgugcacgacugcaacaccaccugccagacccccgagggcgccaucaacaccagccugcccuuccagaacauccaccccaucaccaucggcaagugccccaaguacgugaagagcaccaagcugagacuggccaccggccugagaaacgugcccagcauccagagcagaggccuguucggcgccaucgccggcuucaucgagggcggcuggaccggcaugguggacggcugguacggcuaccaccaccagaacgagcagggcagcggcuacgccgccgaccugaagagcacccagaacgccaucgacaagaucaccaacaaggugaacagcgugaucgagaagaugaacacccaguucaccgccgugggcaaggaguucaaccaccuggagaagagaaucgagaaccugaacaagaagguggacgacggcuuccuggacaucuggaccuacaacgccgagcugcuggugcugcuggagaacgagagaacccuggacuaccacgacagcaacgugaagaaccuguacgagaaggugagaaaccagcugaagaacaacgccaaggagaucggcaacggcugcuucgaguucuaccacaagugcgacaacaugugcauggagagcgugaagaacggcaccuacgacuaccccaaguacagcgaggaggccaagcugaacagagagaagaucgacggcgugaagcuggagagcaccagaaucuaccagauccuggccaucuacagcaccguggccagcagccuggugcugguggugagccugggcgccaucagcuucuggaugugcagcaacggcagccugcagugcagaaucugcaucuga

SEQ ID NO: 172114 - RNA, 1701 nt, Artificial Sequence
  derived and/or modified CDS sequence (opt4) from hemagglutinin__InfluenzaA__AHV83944
augaaggccauccugguggugcugcuguacaccuucgccaccgccaacgccgacacccugugcaucggcuaccacgccaacaacagcaccgacaccguggacaccgugcuggagaagaacgugaccgugacccacagcgugaaccugcuggaggacgagcacaacggcaagcugugcaagcugagaggcguggccccccugcaccugggcaagugcaacaucgccggcuggauccugggcaaccccgagugcgagagccugagcaccgccagcagcuggagcuacaucguggagaccagcagcagcgacaacggcaccugcuaccccggcgacuucaucaacuacgaggagcugagagagcagcugagcagcgugagcagcuucgagagauucgagaucuuccccaagaccagcagcuggcccaaccacgacagcaacaagggcgugaccgccgccugcccccacgccggcgccaagagcuucuacaagaaccugaucuggcuggugaagaagggcaacagcuaccccaagcugagccagagcuacaucaacgacaagggcaaggaggugcuggugcuguggggcauccaccaccccagcaccaccgccgaccagcagagccuguaccagaacgccgacgccuacguguucgugggcaccagcagauacagcaagaaguucaagcccgagaucgccaucagacccaaggugagagaccaggagggcagaaugaacuacuacuggacccugguggagcccggcgacaagaucaccuucgaggccaccggcaaccugguggugcccagauacgccuucaccauggagagaaacgccggcagcggcaucaucaucagcgacacccccgugcacgacugcaacaccaccugccagacccccgagggcgccaucaacaccagccugcccuuccagaacauccaccccaucaccaucggcaagugccccaaguacgugaagagcaccaagcugagacuggccaccggccugagaaacgugcccagcauccagagcagaggccuguucggcgccaucgccggcuucaucgagggcggcuggaccggcaugguggacggcugguacggcuaccaccaccagaacgagcagggcagcggcuacgccgccgaccugaagagcacccagaacgccaucgacaagaucaccaacaaggugaacagcgugaucgagaagaugaacacccaguucaccgccgugggcaaggaguucaaccaccuggagaagagaaucgagaaccugaacaagaagguggacgacggcuuccuggacaucuggaccuacaacgccgagcugcuggugcugcuggagaacgagagaacccuggacuaccacgacagcaacgugaagaaccuguacgagaaggugagaaaccagcugaagaacaacgccaaggagaucggcaacggcugcuucgaguucuaccacaagugcgacaacaccugcauggagagcgugaagaacggcaccuacgacuaccccaaguacagcgaggaggccaagcugaacagagagaagaucgacggcgugaagcuggagagcaccagaaucuaccagauccuggccaucuacagcaccguggccagcagccuggugcugguggugagccugggcgccaucagcuucuggaugugcagcaacggcagccugcagugcagaaucugcaucuga

SEQ ID NO: 172115 - RNA, 1701 nt, Artificial Sequence
  derived and/or modified CDS sequence (opt4) from hemagglutinin__InfluenzaA__AHV83945
augaaggccauccugguggugcugcuguacaccuucgccaccgccaacgccgacacccugugcaucggcuaccacgccaacaacagcaccgacaccguggacaccgugcuggagaagaacgugaccgugacccacagcgugaaccugcuggaggacaagcacaacggcaagcugugcaagcugagaggcguggccccccugcaccugggcaagugcaacaucgccggcuggauccugggcaaccccgagugcgagagccugagcaccgccagcagcuggagcuacaucguggagaccagcagcagcgacaacggcaccugcuaccccggcgacuucaucaacuacgaggagcugagagagcagcugagcagcgugagcagcuucgagagauucgagaucuuccccaagaccagcagcuggcccaaccacgacagcaacaagggcgugaccgccgccugcccccacgccggcgccaagagcuucuacaagaaccugaucuggcuggugaagaagggcaacagcuaccccaagcugagccagagcuacaucaacgacaagggcaaggaggugcuggugcuguggggcauccaccaccccagcaccaccaccgaccagcagagccuguaccagaacgccgacgccuacguguucgugggcaccagcagauacagcaagaaguucaagcccgagaucgccaucagacccaaggugagagaccaggagggcagaaugaacuacuacuggacccugguggagcccggcgacaagaucaccuucgaggccaccggcaaccugguggugcccagauacgccuucaccauggagagaaacgccggcagcggcaucaucaucagcgacacccccgugcacgacugcaacaccaccugccagacccccgagggcgccaucaacaccagccugcccuuccagaacauccaccccaucaccaucggcaagugccccaaguacgugaagagcaccaagcugagacuggccaccggccugagaaacgugcccagcauccagagcagaggccuguucggcgccaucgccggcuucaucgagggcggcuggaccggcaugguggacggcugguacggcuaccaccaccagaacgagcagggcagcggcuacgccgccgaccugaagagcacccagaacgccaucgacaagaucaccaacaaggugaacagcgugaucgagaagaugaacacccaguucaccgccgugggcaaggaguucaaccaccuggagaagagaaucgagaaccugaacaagaagguggacgacggcuuccuggacaucuggaccuacaacgccgagcugcuggugcugcuggagaacgagagaacccuggacuaccacgacagcaacgugaagaaccuguacgagaaggugagaaaccagcugaagaacaacgccaaggagaucggcaacggcugcuucgaguucuaccacaagugcgacaacaccugcauggagagcgugaagaacggcaccuacgacuaccccaaguacagcgaggaggccaagcugaacagagagaagaucgacggcgugaagcuggagagcaccagaaucuaccagauccuggccaucuacagcaccguggccagcagccuggugcugguggugagccugggcgccaucagcuucuggaugugcagcaacggcagccugcagugcagaaucugcaucuga

SEQ ID NO: 172116 - RNA, 1701 nt, Artificial Sequence
  derived and/or modified CDS sequence (opt4) from hemagglutinin__InfluenzaA__AHV83947
augaaggccauccugguggugcugcuguacaccuucgccaccgccaacgccgacacccugugcaucggcuaccacgccaacaacagcaccgacaccguggacaccgugcuggagaagaacgugaccgugacccacagcgugaaccugcuggaggacaagcacaacggcaagcugugcaagcugagaggcguggccccccugcaccugggcaagugcaacaucgccggcuggauccugggcaaccccgagugcgagagccugagcaccgccagcagcuggagcuacaucguggagaccagcagcagcgacaacggcaccugcuaccccggcgacuucaucaacuacgaggagcugagagagcagcugagcagcgugagcagcuucgagagauucgagaucuuccccaagaccagcagcuggcccaaccacgacagcaacaagggcgugaccgccgccugcccccacgccggcgccaagagcuucuacaagaaccugaucuggcuggugaagaagggcaacagcuaccccaagcugagccagagcuacaucaacgacaagggcaaggaggugcuggugcuguggggcauccaccaccccagcaccaccgccgaccagcagagccuguaccagaacgccgacgccuacguguucgugggcaccagcagauacagcaagaaguucaagcccgagaucgccaucagacccaaggugagagaccaggagggcagaaugaacuacuacuggacccugguggagcccggcgacaagaucaccuucgaggccaccggcaaccugguggugcccagauacgccuucaccgugaagagaaacgccggcagcggcaucaucaucagcgacacccccgugcacgacugcaacaccaccugccagacccccgagggcgccaucaacaccagccugcccuuccagaacauccaccccaucaccaucggcaagugccccaaguacgugaagagcaccaagcugagacuggccaccggccugagaaacgugcccagcauccagagcagaggccuguucggcgccaucgccggcuucaucgagggcggcuggaccggcaugguggacggcugguacggcuaccaccaccagaacgagcagggcagcggcuacgccgccgaccagaagagcacccagaacgccaucgacaagaucaccaacaaggugaacagcgugaucgagaagaugaacacccaguucaccgccgugggcaaggaguucaaccaccuggagaagagaaucgagaaccugaacaagaagguggacgacggcuuccuggacaucuggaccuacaacgccgagcugcuggugcugcuggagaacgagagaacccuggacuaccacgacagcaacgugaagaaccuguacgagaaggugagaaaccagcugaagaacaacgccaaggagaucggcaacggcugcuucgaguucuaccacaagugcgacaacaccugcauggagagcgugaagaacggcaccuacgacuaccccaaguacagcgaggaggccaagcugaacagagagaagaucgacggcgugaagcuggagagcaccagaaucuaccagauccuggccaucuacagcaccguggccagcagccuggugcugguggugagccugggcgccaucagcuucuggaugugcagcaacggcagccugcagugcagaaucugcaucuga

SEQ ID NO: 172117 - RNA, 1701 nt, Artificial Sequence; identical to SEQ ID NO: 170100
  derived and/or modified CDS sequence (opt4) from hemagglutinin__InfluenzaA__AHV83948

SEQ ID NO: 172118 - RNA, 1701 nt, Artificial Sequence; identical to SEQ ID NO: 170100
  derived and/or modified CDS sequence (opt4) from hemagglutinin__InfluenzaA__AHV83949

SEQ ID NO: 172119 - RNA, 1701 nt, Artificial Sequence; identical to SEQ ID NO: 170100
  derived and/or modified CDS sequence (opt4) from hemagglutinin__InfluenzaA__AHV83950

SEQ ID NO: 172120 - RNA, 1701 nt, Artificial Sequence
  derived and/or modified CDS sequence (opt4) from hemagglutinin__InfluenzaA__AHV83953
augaagaccaucaucgcccugagcuacauccugugccugguguucgcccagaagcugcccggcaacgacaacagcaccgccacccugugccugggccaccacgccgugcccaacggcaccaucgugaagaccaucaccaacgacagaaucgaggugaccaacgccaccgagcuggugcagaacagcagcaucggcgagaucugcgacagcccccaccagauccuggacggcgagaacugcacccugaucgacgcccugcugggcgacccccagugcgacggcuuccagaacaagaagugggaccuguucguggagagaagcaaggccuacagcaacugcuaccccuacgacgugcccgacuacgccagccugagaagccugguggccagcagcggcacccuggaguucaacaacgagagcuucaacugggccggcgugacccagaacggcaccagcagcgccugcaucagaggcagcaacagcagcuucuucagcagacugaacuggcugacccaccugaacuucaaguaccccgcccugaacgugaccaugcccaacaacgagcaguucgacaagcuguacaucuggggcgugcaccaccccggcaccgacaaggaccagaucuuccuguacgcccagagcagcggcagaaucaccgugagcaccaagagaagccagcaggccgugauccccaacaucggcagcagacccagaaucagaaacauccccagcagaaucagcaucuacuggaccaucgugaagcccggcgacauccugcugaucaacagcaccggcaaccugaucgcccccagaggcuacuucaagaucagaagcggcaagagcagcaucaugagaagcgacgcccccaucggcaagugcaagagcgagugcaucacccccaacggcagcauccccaacgacaagcccuuccagaacgugaacagaaucaccuacggcgccugccccagauacgugaagcagagcacccugaagcuggccaccggcaugagaaacgugcccgagaagcagaccagaggcaucuucggcgccaucgccggcuucaucgagaacggcugggagggcaugauggacggcugguacggcuucagacaccagaacagcgagggcagaggccaggccgccgaccugaagagcacccaggccgccaucgaccagaucaacggcaagcugaacagacugaucggcaagaccaacgagaaguuccaccagaucgagaaggaguucagcgagguggagggcagaauccaggaccuggagaaguacguggaggacaccaagaucgaccuguggagcuacaacgccgagcugcugguggcccuggagaaccagcacaccaucgaccugaccgacagcgagaugaacaagcuguucgagaagaccaagaagcagcugagagagaacgccgaggaccugggcaacggcugcuucaagaucuaccacaagugcgacaacgccugcaucggcagcaucagaaacggcaccuacgaccacgacguguacagagacgaggcccugaacaacagauuccagaucaagggcguggagcugaagagcggcuacaaggacuggauccuguggaucagcuucgccaucagcugcuuccugcugugcguggcccugcugggcuucaucaugugggccugccagaagggcaacaucagaugcaacaucugcaucuga

SEQ ID NO: 172121 - RNA, 1701 nt, Artificial Sequence; identical to SEQ ID NO: 171952
  derived and/or modified CDS sequence (opt4) from hemagglutinin__InfluenzaA__AHV83954

SEQ ID NO: 172122 - RNA, 1701 nt, Artificial Sequence
  derived and/or modified CDS sequence (opt4) from hemagglutinin__InfluenzaA__AHV83956
augaagaccaucaucgcccugagcuacauccugugccugguguucgcccagaagcugcccggcaacgacaacagcaccgccacccugugccugggccaccacgccgugcccaacggcaccaucgugaagaccaucaccaacgacagaaucgaggugaccaacgccaccgagcuggugcagaacagcagcaucggcgagaucugcgacagcccccaccagauccuggacggcgagaacugcacccugaucgacgcccugcugggcgacccccagugcgacggcuuccagaacaagaagugggaccuguucguggagagaagcaaggccuacagcaacugcuaccccuacgacgugcccgacuacgccagccugagaagccugguggccagcagcggcacccuggaguucaacaacgagaacuucaacugggccggcgugacccagaacggcaccagcagcgccugcaucagaggcagcaacagcagcuucuucagcagacugaacuggcugacccaccugaacuucaaguaccccgcccugaacgugaccaugcccaacaacgagcaguucgacaagcuguacaucuggggcgugcaccaccccggcaccgacaaggaccagaucuuccuguacgcccagagcagcggcagaaucaccgugagcaccaagagaagccagcaggccgugauccccaacaucggcagcagacccagaaucagaaacauccccagcagaaucagcaucuacuggaccaucgugaagcccggcgacauccugcugaucaacagcaccggcaaccugaucgcccccagaggcuacuucaagaucagaagcggcaagagcagcaucaugagaagcgacgcccccaucggcaagugcaagagcgagugcaucacccccaacggcagcauccccaacgacaagcccuuccagaacgugaacagaaucaccuacggcgccugccccagauacgugaagcagagcacccugaagcuggccaccggcaugagaaacgugcaggagaagcagaccagaggcaucuucggcgccaucgccggcuucaucgagaacggcugggagggcaugaaggacggcugguacggcuucagacaccagaacagcgagggcagaggccaggccgccgaccugaagagcacccaggccgccaucgaccagaucaacggcaagcugaacagacugaucggcaagaccaacgagaaguuccaccagaucgagaaggaguucagcgagguggagggcagaauccaggaccuggagaaguacguggaggacaccaagaucgaccuguggagcuacaacgccgagcugcugguggcccuggagaaccagcacaccaucgaccugaccgacagcgagaugaacaagcuguucgagaagaccaagaagcagcugagagagaacgccgaggacaugggcaacggcugcuucaagaucuaccacaagugcgacaacgccugcaucggcagcaucagaaacggcaccuacgaccacgacguguacagagacgaggcccugaacaacagauuccagaucaagggcguggagcugaagagcggcuacaaggacuggauccuguggaucagcuucgccaucagcugcuuccugcugugcguggcccugcugggcuucaucaugugggccugccagaagggcaacaucagaugcaacaucugcaucuga

SEQ ID NO: 172123 - RNA, 1701 nt, Artificial Sequence
  derived and/or modified CDS sequence (opt4) from hemagglutinin__InfluenzaA__AHZ13523
augaagaccaucaucgcccugagcuacaucuucugccugguguucgcccagaagcugcccggcaacgacaacagcaccgccacccugugccugggccaccacgccgugcccaacggcacccuggugaagaccaucaccaacgaccagaucgaggugaccaacgccaccgagcuggugcagagcagcagcaccggcagaaucugcgacagcccccacagaauccuggacggcaagaacugcacccugaucgacgcccugcugggcgacccccacugcgacggcuuccagaacgagaagugggaccuguucguggagagaagcaaggccuucagcaacugcuaccccuacgacgugcccgacuacgccagccugagaagccugguggccagcagcggcacccuggaguucaucaacgagggcuucaacuggaccggcgugacccagagcggcggcagcuacgccugcaagagaggcagcgugaacagcuucuucagcagacugaacuggcuguacaagagcgagagcaaguaccccgugcugaacgugaccaugcccaacaacggcaaguucgacaagcuguacaucuggggcgugcaccaccccagcaccgacaaggagcagaccaaccuguacgugagagccagcggcagagugaccgugagcaccaagagaagccagcagaccgugauccccaacaucggcagcagacccugggugagaggccugagcagcagaaucagcaucuacuggaccaucgugaagcccggcgacauccugcugaucaacagcaccggcaaccugaucgcccccagaggcuacuucaagaucagaaccggcaagagcagcaucaugagaagcgacgcccccaucggcaccugcagcuacgagugcaucacccccaacggcagcauccccaacgacaagcccuuccagaacgugaacaagaucaccuacggcgccugccccagauacgugaagcagaacacccugaagcuggccaccggcaugagaaacgugcccgagaagcagaccagaggcaucuucggcgccaucgccggcuucaucgagaacggcugggagggcaugguggacggcugguacggcuucagacaccagaacagcgagggcaccggccaggccgccgaccugaagagcacccaggccgccaucgaccagaucaacggcaagcugaacagacugaucgagaagaccaacgagaaguuccaccagaucgagaaggaguucagcgagguggagggcagaauccaggaccuggagaaguacguggaggacaccaagaucgaccuguggagcuacaacgccgagcugcugguggcccuggagaaccagcacaccaucgaccugaccgacagcgagaugaacaagcuguucgagaagaccagaaagcagcugagagagaacgccgaggacaugggcaacggcugcuucaagaucuaccacaagugcgacaacgccugcaucggcagcaucagaaacggcaccuacaaccacgacguguacagagacgaggcccugaacaacagauuccagaucaagggcguggagcugaagagcggcuacaaggacuggauccuguggaucagcuucgccaucagcugcuuccugcugugcguggugcugcugggcuucaucaugugggccugccagaagggcaacaucagaugcaacaucugcaucuga

SEQ ID NO: 172124 - RNA, 1698 nt, Artificial Sequence; identical to SEQ ID NO: 163676
  derived and/or modified CDS sequence (opt4) from hemagglutinin__InfluenzaA__AHZ13582

SEQ ID NO: 172125 - RNA, 1701 nt, Artificial Sequence
  derived and/or modified CDS sequence (opt4) from hemagglutinin__InfluenzaA__AHZ35584
augaagaccaucaucgcccugagcuacauccugugccugaucuucgcccaggagauccccggcaacgacaacagcaccgccacccugugccugggccaccacgccgugcccaacggcaccaucgugaagaccaucaccaacgaccagaucgaggugaccaacgccaccgagcuggugcagagcagcagcaccggcgagaucugcaacagcccccaccagauccuggacggcgagaacugcacccugaucgacgcccugcugggcgacccccagugcgacgacuuccagaacaagaagugggaccuguucguggagagaagcaaggcccacagcaacugcuaccccuacgacgugcccgacuacgccagccugagaagccugguggccagcagcggcacccuggaguucaacaacgagagcuucaacuggaccggcgugacccagaacggcaccagcagcgccugcaucagaagaagcaacaacagcuucuucagcagacugaacuggcugacccaccugaacuucaaguaccccgcccugaacgugaccaugcccaacaacgagcaguucgacaagcuguacaucuggggcgugcaccaccccggcaccgacaaggaccagaucuuccuguacgcccaggccagcggcagaaucaccgugagcaccaagagaagccagcaggccgugauccccaacaucggcagcagacccagagugagaaacauccccagcagagugagcaucuacuggaccaucgugaagcccggcgacauccugcugaucaacagcaccggcaaccugaucgcccccagaggcuacuucaagaucagaagcggcaagagcagcaucaugagaagcgacgcccccaucggcaagugcaacagcgccugcaucacccccaacggcagcauccccaacgacaagcccuuccagaacgugaacagaaucaccuacggcgccugccccagauacgugaagcagaacacccugaagcuggccaccggcaugagaaacgugcccgagaagcagaccagaggcaucuucggcgccaucgccggcuucaucgagaacggcugggagggcaugguggacggcugguacggcuucagacaccagaacagcgagggcagaggccaggccgccgaccugaagagcacccaggccgccaucgaccagaucaacggcaagcugaacagacugaucggcaagaccaacgagaaguuccaccagaucgagaaggaguucagcgagguggagggcagaauccaggaccuggagaaguacguggaggacaccaagaucgaccuguggagcuacaacgccgagcugcugguggcccuggagaaccagcacaccaucgaccugaccgacagcgagaugaacaagcuguucgagaagaccaagaagcagcugagagagaacgccgaggacaugggcaacggcugcuucaagaucuaccacaagugcgacaacgccugcaucggcagcaucagaaacggcaccuacgaccacgacguguacagagacgaggcccugaacaacagauuccagaucaagggcguggagcugaagagcggcuacaaggacuggauccuguggaucagcuucgccaucagcugcuuccugcugugcguggcccugcugggcuucaucaugugggccugccagaagggcaacaucagaugcaacaucugcaucuga

SEQ ID NO: 172126 - RNA, 1701 nt, Artificial Sequence
  derived and/or modified CDS sequence (opt4) from hemagglutinin__InfluenzaA__AHZ35608
augaagaccaucaucgcccugagcuacauccugugccugaucuucgcccaggagauccccggcaacgacaacagcaccgccacccugugccugggccaccacgccgugcccaacggcaccaucgugaagaccaucaccaacgaccagaucgaggugaccaacgccaccgagcuggugcagagcagcagcaccggcgagaucugcaacagcccccaccagauccuggacggcgagaacugcacccugaucgacgcccugcugggcgacccccagugcgacgacuuccagaacaaggagugggaccuguucguggagagaagcaaggcccacagcaacugcuaccccuacgacgugcccgacuacgccagccugagaagccugguggccagcagcggcacccuggaguucaacaacgagagcuucaacuggaccggcgugacccagaacggcaccagcagcgccugcaucagaagaagcaacaacagcuucuucagcagacugaacuggcugacccaccugaacuucaaguaccccgcccugaacgugaccaugcccaacaacgagcaguucgacaagcuguacaucuggggcgugcaccaccccggcaccgacaaggaccagaucuuccuguacgcccaggccagcggcagaaucaccgugagcaccaagagaagccagcaggccgugauccccaacaucggcagcagacccagagugagaaacauccccagcagagugagcaucuacuggaccaucgugaagcccggcgacauccugcugaucaacagcaccggcaaccugaucgcccccagaggcuacuucaagaucagaagcggcaagagcagcaucaugagaagcgacgcccccaucggcaagugcaacagcgccugcaucacccccaacggcagcauccccaacgacaagcccuuccagaacgugaacagaaucaccuacggcaccugccccagauacgugaagcagaacacccugaagcuggccaccggcaugagaaacgugcccgagaagcagaccagaggcaucuucggcgccaucgccggcuucaucgagaacggcugggagggcaugguggacggcugguacggcuucagacaccagaacagcgagggcagaggccaggccgccgaccugaagagcacccaggccgccaucgaccagaucaacggcaagcugaacagacugaucggcaagaccaacgagaaguuccaccagaucgagaaggaguucagcgagguggagggcagaauccaggaccuggagaaguacguggaggacaccaagaucgaccuguggagcuacaacgccgagcugcugguggcccuggagaaccagcacaccaucgaccugaccgacagcgagaugaacaagcuguucgagaagaccaagaagcagcugagagagaacgccgaggacaugggcaacggcugcuucaagaucuaccacaagugcgacaacgccugcaucggcagcaucagaaacggcaccuacgaccacgacguguacagagacgaggcccugaacaacagauuccagaucaagggcguggagcugaagagcggcuacaaggacuggauccuguggaucagcuucgccaucagcugcuuccugcugugcguggcccugcugggcuucaucaugugggccugccagaagggcaacaucagaugcaacaucugcaucuga

SEQ ID NO: 172127 - RNA, 1701 nt, Artificial Sequence; identical to SEQ ID NO: 172125
  derived and/or modified CDS sequence (opt4) from hemagglutinin__InfluenzaA__AHZ35620

SEQ ID NO: 172128 - RNA, 1701 nt, Artificial Sequence; identical to SEQ ID NO: 172125
  derived and/or modified CDS sequence (opt4) from hemagglutinin__InfluenzaA__AHZ35632

SEQ ID NO: 172129 - RNA, 1701 nt, Artificial Sequence; identical to SEQ ID NO: 172125
  derived and/or modified CDS sequence (opt4) from hemagglutinin__InfluenzaA__AHZ35644

SEQ ID NO: 172130 - RNA, 1701 nt, Artificial Sequence; identical to SEQ ID NO: 172125
  derived and/or modified CDS sequence (opt4) from hemagglutinin__InfluenzaA__AHZ35656

SEQ ID NO: 172131 - RNA, 1701 nt, Artificial Sequence; identical to SEQ ID NO: 172125
  derived and/or modified CDS sequence (opt4) from hemagglutinin__InfluenzaA__AHZ35668

SEQ ID NO: 172132 - RNA, 1701 nt, Artificial Sequence; identical to SEQ ID NO: 172126
  derived and/or modified CDS sequence (opt4) from hemagglutinin__InfluenzaA__AHZ35680

SEQ ID NO: 172133 - RNA, 1701 nt, Artificial Sequence; identical to SEQ ID NO: 172125
  derived and/or modified CDS sequence (opt4) from hemagglutinin__InfluenzaA__AHZ35692

SEQ ID NO: 172134 - RNA, 1701 nt, Artificial Sequence; identical to SEQ ID NO: 172125
  derived and/or modified CDS sequence (opt4) from hemagglutinin__InfluenzaA__AHZ35716

SEQ ID NO: 172135 - RNA, 1701 nt, Artificial Sequence; identical to SEQ ID NO: 172126
  derived and/or modified CDS sequence (opt4) from hemagglutinin__InfluenzaA__AHZ35728

SEQ ID NO: 172136 - RNA, 1701 nt, Artificial Sequence; identical to SEQ ID NO: 172125
  derived and/or modified CDS sequence (opt4) from hemagglutinin__InfluenzaA__AHZ35740

SEQ ID NO: 172137 - RNA, 1701 nt, Artificial Sequence; identical to SEQ ID NO: 172125
  derived and/or modified CDS sequence (opt4) from hemagglutinin__InfluenzaA__AHZ35752

SEQ ID NO: 172138 - RNA, 1701 nt, Artificial Sequence; identical to SEQ ID NO: 172125
  derived and/or modified CDS sequence (opt4) from hemagglutinin__InfluenzaA__AHZ35764

SEQ ID NO: 172139 - RNA, 1701 nt, Artificial Sequence; identical to SEQ ID NO: 172125
  derived and/or modified CDS sequence (opt4) from hemagglutinin__InfluenzaA__AHZ35776

SEQ ID NO: 172140 - RNA, 1701 nt, Artificial Sequence
  derived and/or modified CDS sequence (opt4) from hemagglutinin__InfluenzaA__AHZ35823
augaaggccauccugguggugcugcuguacaccuucgccaucgccaacgccgacacccugugcaucggcuaccacgccaacaacagcaccgacaccguggacaccgugcuggagaagaacgugaccgugacccacagcgugaaccugcuggaggacaagcacaacggcaagcugugcaagcugagaggcguggccccccugcaccugggcaagugcaacaucgccggcuggauccugggcaaccccgagugcgagagccugagcaccgccagcagcuggagcuacaucguggagaccagcagcagcgacaacggcaccugcuaccccggcgacuucaucaacuacgaggagcugagagagcagcugagcagcgugagcagcuucgagagauucgagauguuccccaagaccagcagcuggcccaaccacgacagcaacaagggcgugaccgccgccugcccccacgccggcgccaagagcuucuacaagaaccugaucuggcuggugaagaagggcaacagcuaccccaagcugagcaagagcuacaucaacgacaagggcaaggaggugcuggugcuguggggcauccaccaccccagcaccaccgccgaccagcagagccuguaccagaacgccgacgccuacguguucgugggcaccagcagauacagcaagaaguucaagcccgagaucgccaucagacccaaggugagagaccaggagggcagaaugaacuacuacuggacccugguggagcccggcgacaagaucaccuucgaggccaccggcaaccugguggugcccagauacgccuucgccauggagagaaacgccggcagcggcaucaucaucagcgacacccccgugcacgacugcaacaccaccugccagacccccaagggcgccaucaacaccagccugcccuuccagaacauccaccccaucaccaucggcaagugccccaaguacgugaagagcaccaagcugagacuggccaccggccugagaaacgugcccagcauccagagcagaggccuguucggcgccaucgccggcuucaucgagggcggcuggaccggcaugguggacggcugguacggcuaccaccaccagaacgagcagggcagcggcuacgccgccgaccugaagagcacccagaacgccaucgacaagaucaccaacaaggugaacagcgugaucgagaagaugaacacccaguucaccgccgugggcaaggaguucaaccaccuggagaagagaaucgagaaccugaacaagaagguggacgacggcuuccuggacaucuggaccuacaacgccgagcugcuggugcugcuggagaacgagagaacccuggacuaccacgacagcaacgugaagaaccuguacgagaaggugagaaaccagcugaagaacaacgccaaggagaucggcaacggcugcuucgaguucuaccacaagugcgacaacaccugcauggagagcgugaagaacggcaccuacgacuaccccaaguacagcgaggaggccaagcugaacagagaggagaucgacggcgugaagcuggagagcaccagaaucuaccagauccuggccaucuacagcaccguggccagcagccuggugcugguggugagccugggcgccaucagcuucuggaugugcagcaacggcagccugcagugcagaaucugcaucuga

SEQ ID NO: 172141 - RNA, 1701 nt, Artificial Sequence; identical to SEQ ID NO: 172140
  derived and/or modified CDS sequence (opt4) from hemagglutinin__InfluenzaA__AHZ35834

SEQ ID NO: 172142 - RNA, 1701 nt, Artificial Sequence; identical to SEQ ID NO: 172140
  derived and/or modified CDS sequence (opt4) from hemagglutinin__InfluenzaA__AHZ35845

SEQ ID NO: 172143 - RNA, 1701 nt, Artificial Sequence; identical to SEQ ID NO: 172140
  derived and/or modified CDS sequence (opt4) from hemagglutinin__InfluenzaA__AHZ35856

SEQ ID NO: 172144 - RNA, 1701 nt, Artificial Sequence
  derived and/or modified CDS sequence (opt4) from hemagglutinin__InfluenzaA__AHZ35867
augaagaccaacaucgcccugagcuacauccugugccuggugagcgcccagaagcugcccggcaacgacaacagcaccgccacccugugccugggccaccacgccgugcccaacggcaccaucgugaagaccaucaccaacgaccagaucgaggugaccaacgccaccgagcuggugcagagcagcagcaccggcgagaucugcaacagcccccaccagauccuggacggcgagaacugcacccugaucgacgcccugcugggcgacccccagugcgacggcuuccagaacaagaagugggaccuguucguggagagaagcaaggcccacagcaacugcuaccccuacgacgugcccgacuacgccagccugagaagccugguggccagcagcggcacccuggaguucaacaacgagagcuucaacuggaccggcgugacccagaacggcaccagcagcgccugcaucagaagaagcaacaacagcuucuucagcagacugaacuggcugacccaccugaacuucaaguaccccgcccugaacgugaccaugcccaacaacgagcaguucgacaagcuguacaucuggggcgugcaccaccccggcaccgacaaggaccagaucuuccuguacgcccaggccgccggcagaaucaccgugagcaccaagagaagccagcaggccgugauccccaacaucggcagcagacccagagugagaaacauccccagcagagugagcaucuacuggaccaucgugaagcccggcgacauccugcugaucaacagcaccggcaaccugaucgcccccagaggcuacuucaagaucagaagcggcaagagcagcaucaugagaagcgacgcccccaucggcaagugcaacagcgccugcaucacccccaacggcagcauccccaacgacaagcccuuccagaacgugaacagaaucaccuacggcgccugccccagauacgugaagcagaacacccugaagcuggccaccggcaugagaaacgugcccgagaagcagaccagaggcaucuucggcgccaucgccggcuucaucgagaacggcugggagggcaugguggacggcugguacggcuucagacaccagaacagcgagggcagaggccaggccgccgaccugaagagcacccaggccgccaucgaccagaucaacggcaagcugaacagacugaucggcaagaccaacgagaaguuccaccagaucgagaaggaguucagcgagguggagggcagaauccaggaccuggagaaguacguggaggacaccaagaucgaccuguggagcuacaacgccgagcugcugguggugcuggagaaccagcacaccaucgaccugaccgacagcgagaugaacaagcuguucgagaagaccaagaagcagcugagagagaacgccgaggacaugggcaacggcugcuucaagaucuaccacaagugcgacaacgccugcaucggcagcaucagaaacggcaccuacgaccacgacguguacagagacgaggcccugaacaacagauuccagaucaagggcguggagcugaagagcggcuacaaggacuggauccuguggaucagcuucgccaucagcugcuuccugcugugcguggcccugcugggcuucaucaugugggccugccagaagggcaacaucagaugcaacaucugcaucuga

SEQ ID NO: 172145 - RNA, 1701 nt, Artificial Sequence
  derived and/or modified CDS sequence (opt4) from hemagglutinin__InfluenzaA__AHZ35879
augaagaccaacaucgcccugagcuacauccugugccuggugagcgcccagaagcugcccggcaacgacaacagcaccgccacccugugccugggccaccacgccgugcccaacggcaccaucgugaagaccaucaccaacgaccagaucgaggugaccaacgccaccgagcuggugcagagcagcagcaccggcgagaucugcaacagcccccaccagauccuggacggcgagaacugcacccugaucgacgcccugcugggcgacccccagugcgacggcuuccagaacaagaagugggaccuguucguggagagaagcaaggcccacagcaacugcuaccccuacgacgugcccgacuacgccagccugagaagccugguggccagcagcggcacccuggaguucaacaacgagagcuucaacuggaccggcgugacccagaacggcaccagcagcgccugcaucagaagaagcaacaacagcuucuucagcagacugaacuggcugacccaccugaacuucaaguaccccgcccugaacgugaccaugcccaacaacgagcaguucgacaagcuguacaucuggggcgugcaccaccccggcaccgacaaggaccagaucuuccuguacgcccaggccgccggcagaaucaccgugagcaccaagagaagccagcaggccgugauccccaacaucggcagcagacccagagugagaaacauccccagcagagugagcaucuacuggaccaucgugaagcccggcgacauccugcugaucaacagcaccggcaaccugaucgcccccagaggcuacuucaagaucagaagcggcaagagcagcaucaugagaagcgacgcccccaucggcaagugcaacagcgccugcaucacccccaacggcagcauccccaacgacaagcccuuccagaacgugaacagaaucaccuacggcgccugccccagauacgugaagcagaacacccugaagcuggccaccggcaugagaaacgugcccgagaagcagaccagaggcaucuucggcgccaucgccggcuucaucgagaacggcugggagggcaugguggacggcugguacggcuucagacaccagaacagcgagggcagaggccaggccgccgaccugaagagcacccaggccgccaucgaccagaucaacggcaagcugaacagacugaucggcaagaccaacgagaaguuccaccagaucgagaaggaguucagcgagguggagggcagaauccaggaccuggagaaguacguggaggacaccaagaucgaccuguggagcuacaacgccgagcugcugguggcccuggagaaccagcacaccaucgaccugaccgacagcgagaugaacaagcuguucgagaagaccaagaagcagcugagagagaacgccgaggacaugggcaacggcugcuucaagaucuaccacaagugcgacaacgccugcaucggcagcaucagaaacggcaccuacgaccacgacguguacagagacgaggcccugaacaacagauuccagaucaagggcguggagcugaagagcggcuacaaggacuggauccuguggaucagcuucgccaucagcugcuuccugcugugcguggcccugcugggcuucaucaugugggccugccagaagggcaacaucagaugcaacaucugcaucuga

SEQ ID NO: 172146 - RNA, 1701 nt, Artificial Sequence; identical to SEQ ID NO: 172140
  derived and/or modified CDS sequence (opt4) from hemagglutinin__InfluenzaA__AHZ35891

SEQ ID NO: 172147 - RNA, 1701 nt, Artificial Sequence; identical to SEQ ID NO: 172140
  derived and/or modified CDS sequence (opt4) from hemagglutinin__InfluenzaA__AHZ35902

SEQ ID NO: 172148 - RNA, 1710 nt, Artificial Sequence
  derived and/or modified CDS sequence (opt4) from hemagglutinin__InfluenzaA__AHZ35913
augaaggccauccugguggugcugcuguacaccuucgccaucgccaacgccgacacccugugcaucggcuaccacgccaacaacagcaccgacaccguggacaccgugcuggagaagaacgugaccgugacccacagcgugaaccugcuggaggacaagcacaacggcaagcugugcaagcugagaggcguggccccccugcaccugggcaagugcaacaucgccggcuggauccugggcaaccccgagugcgagagccugagcaccgccagcagcuggagcuacaucguggagaccagcagcagcgacaacggcaccugcuaccccggcgacuucaucaacuacgaggagcugagagagcagcugagcagcgugagcagcuucgagagauucgagauguuccccaagaccagcagcuggcccaaccacgacagcaacaagggcgugaccgccgccugcccccacgccggcgccaagagcuucuacaagaaccugaucuggcuggugaagaagggcaacagcuaccccaagcugagcaagagcuacaucaacgacaagggcaaggaggugcuggugcuguggggcauccaccaccccagcaccaccgccgaccagcagagccuguaccagaacgccgacgccuacguguucgugggcaccagcagauacagcaagaaguucaagcccgagaucgccaucagacccaaggugagagaccaggagggcagaaugaacuacuacuggacccugguggagcccggcgacaagaucaccuucgaggccaccggcaaccugguggugcccagauacgccuucgccauggagagaaacgccggcagcggcaucaucaucagcgacacccccgugcacgacugcaacaccaccugccagacccccaagggcgccaucaacaccagccugaccagccugcccuuccagaacauccaccccaucaccaucggcaagugccccaaguacgugaagagcaccaagcugagacuggccaccggccugagaaacgugcccagcauccagagcagaggccuguucggcgccaucgccggcuucaucgagggcggcuggaccggcaugguggacggcugguacggcuaccaccaccagaacgagcagggcagcggcuacgccgccgaccugaagagcacccagaacgccaucgacaagaucaccaacaaggugaacagcgugaucgagaagaugaacacccaguucaccgccgugggcaaggaguucaaccaccuggagaagagaaucgagaaccugaacaagaagguggacgacggcuuccuggacaucuggaccuacaacgccgagcugcuggugcugcuggagaacgagagaacccuggacuaccacgacagcaacgugaagaaccuguacgagagagugagaaaccagcugaagaacaacgccaaggagaucggcaacggcugcuucgaguucuaccacaagugcgacaacaccugcauggagagcgugaagaacggcaccuacgacuaccccaaguacagcgaggaggccaagcugaacagagaggagaucgacggcgugaagcuggagagcaccagaaucuaccagauccuggccaucuacagcaccguggccagcagccuggugcugguggugagccugggcgccaucagcuucuggaugugcagcaacggcagccugcagugcagaaucugcaucuga

SEQ ID NO: 172149 - RNA, 1701 nt, Artificial Sequence
  derived and/or modified CDS sequence (opt4) from hemagglutinin__InfluenzaA__AHZ35924
augaaggccauccugguggugcugcuguacaccuucgccaccgccaacgccgacacccugugcaucggcuaccacgccaacaacagcaccgacaccguggacaccgugcuggagaagaacgugaccgugacccacagcgugaaccugcuggaggacaagcacaacggcaagcugugcaagcugagaggcguggccccccugcaccugggcaagugcaacaucgccggcuggauccugggcaaccccgagugcgagagccugagcaccgccagcagcuggagcuacaucguggagaccagcagcagcgacaacggcaccugcuaccccggcgacuucaucaacuacgaggagcugagagagcagcugagcagcgugagcagcuucgagagauucgagaucuuccccaagaccagcagcuggcccaaccacgacagcaacaagggcgugaccgccgccugcccccaggccggcgccaagagcuucuacaagaaccugaucuggcuggugaagaagggcaacagcuaccccaagcugagcaagagcuacaucaacgacaagggcaaggaggugcuggugcuguggggcauccaccaccccagcaccagcgccgaccagcagagccuguaccagaacgccgacgccuacguguucgugggcaccagcaaguacagcaagaaguucaagcccgagaucgccgugagacccaaggugagagaccaggagggcagaaugaacuacuacuggacccugguggagcccggcgacaagaucaccuucgaggccaccggcaaccugcuggugcccagauacgccuucgccauggagagaaacgccggcagcggcaucaucaucagcgacacccccgugcacgacugcaacaccaccugccagacccccaagggcgccaucaacaccagccugcccuuccagaacauccaccccaucaccaucggcaagugccccaaguacgugaagagcaccaagcugagacuggccaccggccugagaaacgugcccagcacccagagcagaggccuguucggcgccaucgccggcuucaucgagggcggcuggaccggcaugguggacggcugguacggcuaccaccaccagaacgcccagggcagcggcuacgccgccgaccugaagagcacccagaacgccaucgacaagaucaccaacaaggugaacagcgugaucgagaagaugaacacccaguucaccgccgugggcaaggaguucaaccaccuggagaagagaaucgagaaccugaacaagaagguggacgacggcuuccuggacaucuggaccuacaacgccgagcugcuggugcugcuggagaacgagagaacccuggacuaccacgacagcaacgugaagaaccuguacgagaaggugagaagccagcugaagaacaacgccaaggagaucggcaacggcugcuucgaguucuaccacaagugcgacaacaccugcauggagagcgugaagaacggcaccuacgacuaccccaaguacagcgaggaggccaagcugaacagagaggagaucgacggcgugaagcuggagagcaccagaaucuaccagauccuggccaucuacagcaccguggccagcagccuggugcugguggugagccugggcgccaucagcuucuggaugugcagcaacggcagccugcagugcagaaucugcaucuga

SEQ ID NO: 172150 - RNA, 1701 nt, Artificial Sequence
  derived and/or modified CDS sequence (opt4) from hemagglutinin__InfluenzaA__AHZ35935
augaaggccauccugguggugcugcuguacaccuucgccaucgccaacgccgacacccugugcaucggcuaccacgccaacaacagcaccgacaccguggacaccgugcuggagaagaacgugaccgugacccacagcgugaaccugcuggaggacaagcacaacggcaagcugugcaagcugagaggcguggccccccugcaccugggcaagugcaacaucgccggcuggauccugggcaaccccgagugcgagagccugagcaccgccagcagcuggagcuacaucguggagaccagcagcagcgacaacggcaccugcuaccccggcgacuucaucaacuacgaggagcugagagagcagcugagcagcgugagcagcuucgagagauucgagauguuccccaagaccagcagcuggcccaaccacgacagcaacaagggcgugaccgccgccugcccccacgccggcgccaagagcuucuacaagaaccugaucuggcuggugaagaagggcaacagcuaccccaagcugagcaagagcuacaucaacgacaagggcaaggaggugcuggugcuguggggcauccaccaccccagcaccaccgccgaccagcagagccuguaccagaacgccgacgccuacguguucgugggcaccagcagauacagcaagaaguucaagcccgagaucgccaucagacccaaggugagagaccaggagggcagaaugaacuacuacuggacccugguggagcccggcgacaagaucaccuucgaggccaccggcaaccugguggugcccagauacgccuucgccauggagagaaacgccggcagcggcaucaucaucagcgacacccccgugcacgacugcaacaccaccugccagacccccaagggcgccaucaacaccagccugcccuuccagaacauccaccccaucaccaucggcaagugccccaaguacgugaagagcaccaagcugagacuggccaccggccugagaaacauccccagcauccagagcagaggccuguucggcgccaucgccggcuucaucgagggcggcuggaccggcaugguggacggcugguacggcuaccaccaccagaacgagcagggcagcggcuacgccgccgaccugaagagcacccagaacgccaucgacaagaucaccaacaaggugaacagcgugaucgagaagaugaacacccaguucaccgccgugggcaaggaguucaaccaccuggagaagagaaucgagaaccugaacaagaagguggacgacggcuuccuggacaucuggaccuacaacgccgagcugcuggugcugcuggagaacgagagaacccuggacuaccacgacagcaacgugaagaaccuguacgagaaggugagaaaccagcugaagaacaacgccaaggagaucggcaacggcugcuucgaguucuaccacaagugcgacaacaccugcauggagagcgugaagaacggcaccuacgacuaccccaaguacagcgaggaggccaagcugaacagagaggagaucgacggcgugaagcuggagagcaccagaaucuaccagauccuggccaucuacagcaccguggccagcagccuggugcugguggugagccugggcgccaucagcuucuggaugugcagcaacggcagccugcagugcagaaucugcaucuga

SEQ ID NO: 172151 - RNA, 1701 nt, Artificial Sequence; identical to SEQ ID NO: 172145
  derived and/or modified CDS sequence (opt4) from hemagglutinin__InfluenzaA__AHZ35946

SEQ ID NO: 172152 - RNA, 1701 nt, Artificial Sequence; identical to SEQ ID NO: 172140
  derived and/or modified CDS sequence (opt4) from hemagglutinin__InfluenzaA__AHZ35958

SEQ ID NO: 172153 - RNA, 1701 nt, Artificial Sequence; identical to SEQ ID NO: 172140
  derived and/or modified CDS sequence (opt4) from hemagglutinin__InfluenzaA__AHZ35980

SEQ ID NO: 172154 - RNA, 1701 nt, Artificial Sequence; identical to SEQ ID NO: 172140
  derived and/or modified CDS sequence (opt4) from hemagglutinin__InfluenzaA__AHZ35991

SEQ ID NO: 172155 - RNA, 1701 nt, Artificial Sequence; identical to SEQ ID NO: 172140
  derived and/or modified CDS sequence (opt4) from hemagglutinin__InfluenzaA__AHZ36002

SEQ ID NO: 172156 - RNA, 1701 nt, Artificial Sequence
  derived and/or modified CDS sequence (opt4) from hemagglutinin__InfluenzaA__AHZ36013
augaaggccauccugguggugcugcuguacaccuucgccaucgccaacgccgacacccugugcaucggcuaccacgccaacaacagcaccgacaccguggacaccgugcuggagaagaacgugaccgugacccacagcgugaaccugcuggaggacaagcacaacagaaagcugugcaagcugagaggcguggccccccugcaccugggcaagugcaacaucgccggcuggauccugggcaaccccgagugcgagagccugagcaccgccagcagcuggagcuacaucguggagaccagcagcagcgacaacggcaccugcuaccccggcgacuucaucaacuacgaggagcugagagagcagcugagcagcgugagcagcuucgagagauucgagauguuccccaagaccagcagcuggcccaaccacgacagcaacaagggcgugaccgccgccugcccccacgccggcgccaagagcuucuacaagaaccugaucuggcuggugaagaagggcaacagcuaccccaagcugagcaagagcuacaucaacgacaagggcaaggaggugcuggugcuguggggcauccaccaccccagcaccaccgccgaccagcagagccuguaccagaacgccgacgccuacguguucgugggcaccagcagauacagcaagaaguucaagcccgagaucgccaucagacccaaggugagagaccaggagggcagaaugaacuacuacuggacccugguggagcccggcgacaagaucaccuucgaggccaccggcaaccugguggugcccagauacgccuucgccauggagagaaacgccggcagcggcaucaucaucagcgacacccccgugcacgacugcaacaccaccugccagacccccaagggcgccaucaacaccagccugcccuuccagaacauccaccccaucaccaucggcaagugccccaaguacgugaagagcaccaagcugagacuggccaccggccugagaaacgugcccagcauccagagcagaggccuguucggcgccaucgccggcuucaucgagggcggcuggaccggcaugguggacggcugguacggcuaccaccaccagaacgagcagggcagcggcuacgccgccgaccugaagagcacccagaacgccaucgacaagaucaccaacaaggugaacagcgugaucgagaagaugaacacccaguucaccgccgugggcaaggaguucaaccaccuggagaagagaaucgagaaccugaacaagaagguggacgacggcuuccuggacaucuggaccuacaacgccgagcugcuggugcugcuggagaacgagagaacccuggacuaccacgacagcaacgugaagaaccuguacgagaaggugagaaaccagcugaagaacaacgccaaggagaucggcaacggcugcuucgaguucuaccacaagugcgacaacaccugcauggagagcgugaagaacggcaccuacgacuaccccaaguacagcgaggaggccaagcugaacagagaggagaucgacggcgugaagcuggagagcaccagaaucuaccagauccuggccaucuacagcaccguggccagcagccuggugcugguggugagccugggcgccaucagcuucuggaugugcagcaacggcagccugcagugcagaaucugcaucuga

SEQ ID NO: 172157 - RNA, 1701 nt, Artificial Sequence
  derived and/or modified CDS sequence (opt4) from hemagglutinin__InfluenzaA__AHZ36024
augaaggccauccugguggugcugcuguacaccuucgccaccgccaacgccgacacccugugcaucggcuaccacgccaacaacagcaccgacaccguggacaccgugcuggagaagaacgugaccgugacccacagcgugaaccugcuggaggacaagcacaacggcaagcugugcaagcugagaggcguggccccccugcaccugggcaagugcaacaucgccggcuggauccugggcaaccccgagugcgagagccugagcaccgccagcagcuggagcuacaucguggagaccagcagcagcgacaacggcaccugcuaccccggcgacuucaucaacuacgaggagcugagagagcagcugagcagcgugagcagcuucgagagauucgagaucuuccccaagaccagcagcuggcccaaccacgacagcaacaagggcgugaccgccgccugcccccacgccggcgccaagagcuucuacaagaaccugaucuggcuggugaagaagggcaacagcuaccccaagcugagcaagagcuacaucaacgacaagggcaaggaggugcuggugcuguggggcauccaccaccccagcaccaccgccgaccagcagagccuguaccagaacgccgacgccuacguguucgugggcaccagcagauacagcaagaaguucaagcccgagaucgccaucagacccaaggugagagaccaggagggcagaaugaacuacuacuggacccugguggagcccggcgacaagaucaccuucgaggccaccggcaaccugguggugcccagauacgccuucgccauggagagaaacgccggcagcggcaucaucaucagcgacacccccgugcacgacugcaacaccaccugccagacccccaagggcgccaucaacaccagccugcccuuccagaacauccaccccaucaccaucggcaagugccccaaguacgugaagagcaccaagcugagacuggccaccggccugagaaacgugcccagcauccagagcagaggccuguucggcgccaucgccggcuucaucgagggcggcuggaccggcaugguggacggcugguacggcuaccaccaccagaacgagcagggcagcggcuacgccgccgaccugaagagcacccagaacgccaucgacaagaucaccaacaaggugaacagcgugaucgagaagaugaacacccaguucaccgccgugggcaaggaguucaaccaccuggagaagagaaucgagaaccugaacaagaagguggacgacggcuuccuggacaucuggaccuacaacgccgagcugcuggugcugcuggagaacgagagaacccuggacuaccacgacagcaacgugaagaaccuguacgagaaggugagaaaccagcugaagaacaacgccaaggagaucggcaacggcugcuucgaguucuaccacaagugcgacaacaccugcauggagagcgugaagaacggcaccuacgacuaccccaaguacagcgaggaggccaagcugaacagagaggagaucgacggcgugaagcuggagagcaccagaaccuaccagauccuggccaucuacagcaccguggccagcagccuggugcugguggugagccugggcgccaucagcuucuggaugugcagcaacggcagccugcagugcagaaucugcaucuga

SEQ ID NO: 172158 - RNA, 1701 nt, Artificial Sequence
  derived and/or modified CDS sequence (opt4) from hemagglutinin__InfluenzaA__AHZ36035
augaagaccaucaucgcccugagcuacauccugugccugguguucgcccagaagcugcccggcaacgacaacagcaccgccacccugugccugggccaccacgccgugcccaacggcaccaucgugaagaccaucaccaacgaccagaucgaggugaccaacgccaccgagcugauccagagcagcagcaccggcgagaucugcaacagcccccaccagauccuggacggcgagaacugcacccugaucgacgcccugcugggcgacccccagugcgacggcuuccagaacaagaagugggaccuguucguggagagaagcaaggcccacagcaacugcuaccccuacgacgugcccgacuacgccagccugagaagccugguggccagcagcggcacccuggaguucaacaacgagagcuucaacuggaccggcgugacccagaacggcaccagcagcgccugcaucagaagaagcaacaacagcuucuucagcagacugaacuggcugacccaccugaacuucaaguaccccgcccugaacgugaccaugcccaacaacgagcaguucgacaagcuguacaucuggggcgugcaccaccccggcaccgacaaggaccagaucuuccuguacgcccaggccgccggcagaaucaccgugagcaccaagagaagccagcaggccgugauccccaacaucggcagcagacccagagugagaaacauccccagcagagugagcaucuacuggaccaucgugaagcccggcgacauccugcugaucaacagcaccggcaaccugaucgcccccagaggcuacuucaagaucagaagcggcaagagcagcaucaugagaagcgacgcccccaucggcaagugcaacagcgccugcaucacccccaacggcagcauccccaacgacaagcccuuccagaacgugaacagaaucaccuacggcgccugccccagauacgugaagcagaacacccugaagcuggccaccggcaugagaaacgugcccgagaagcagaccagaggcaucuucggcgccaucgccggcuucaucgagaacggcugggagggcaugguggacggcugguacggcuucagacaccagaacagcgagggcagaggccaggccgccgaccugaagagcacccaggccgccaucgaccagaucaacggcaagcugaacagacugaucggcaagaccaacgagaaguuccaccagaucgagaaggaguucagcgagguggagggcagaauccaggaccuggagaaguacguggaggacaccaagaucgaccuguggagcuacaacgccgagcugcugguggcccuggagaaccagcacaccaucgaccugaccgacagcgagaugaacaagcuguucgagaagaccaagaagcagcugagagagaacgccgaggacaugggcaacggcugcuucaagaucuaccacaagugcgacaacgccugcaucggcagcaucagaaacggcaccuacgaccacgacguguacagagacgaggcccugaacaacagauuccagaucaagggcguggagcugaagagcggcuacaaggacuggauccuguggaucagcuucgccaucagcugcuuccugcugugcguggcccugcugggcuucaucaugugggccugccagaagggcaacaucagaugcaacaucugcaucuga

SEQ ID NO: 172159 - RNA, 1701 nt, Artificial Sequence; identical to SEQ ID NO: 166915
  derived and/or modified CDS sequence (opt4) from hemagglutinin__InfluenzaA__AHZ36047

SEQ ID NO: 172160 - RNA, 1701 nt, Artificial Sequence; identical to SEQ ID NO: 172140
  derived and/or modified CDS sequence (opt4) from hemagglutinin__InfluenzaA__AHZ36059

SEQ ID NO: 172161 - RNA, 1701 nt, Artificial Sequence; identical to SEQ ID NO: 172157
  derived and/or modified CDS sequence (opt4) from hemagglutinin__InfluenzaA__AHZ36070

SEQ ID NO: 172162 - RNA, 1701 nt, Artificial Sequence; identical to SEQ ID NO: 172156
  derived and/or modified CDS sequence (opt4) from hemagglutinin__InfluenzaA__AHZ36081

SEQ ID NO: 172163 - RNA, 1701 nt, Artificial Sequence; identical to SEQ ID NO: 172157
  derived and/or modified CDS sequence (opt4) from hemagglutinin__InfluenzaA__AHZ36092

SEQ ID NO: 172164 - RNA, 1701 nt, Artificial Sequence; identical to SEQ ID NO: 172140
  derived and/or modified CDS sequence (opt4) from hemagglutinin__InfluenzaA__AHZ36103

SEQ ID NO: 172165 - RNA, 1701 nt, Artificial Sequence; identical to SEQ ID NO: 172157
  derived and/or modified CDS sequence (opt4) from hemagglutinin__InfluenzaA__AHZ36114

SEQ ID NO: 172166 - RNA, 1701 nt, Artificial Sequence; identical to SEQ ID NO: 172140
  derived and/or modified CDS sequence (opt4) from hemagglutinin__InfluenzaA__AHZ36125

SEQ ID NO: 172167 - RNA, 1701 nt, Artificial Sequence; identical to SEQ ID NO: 172140
  derived and/or modified CDS sequence (opt4) from hemagglutinin__InfluenzaA__AHZ36136

SEQ ID NO: 172168 - RNA, 1701 nt, Artificial Sequence; identical to SEQ ID NO: 166915
  derived and/or modified CDS sequence (opt4) from hemagglutinin__InfluenzaA__AHZ36147

SEQ ID NO: 172169 - RNA, 1701 nt, Artificial Sequence
  derived and/or modified CDS sequence (opt4) from hemagglutinin__InfluenzaA__AHZ36158
augaaggccauccugguggugcugcuguacaccuucgccaucgccaacgccgacacccugugcaucggcuaccacgccaacaacagcaccgacaccguggacaccgugcuggagaagaacgugaccgugacccacagcgugaaccugcuggaggacaagcacaacggcaagcugugcaagcugagaggcguggccccccugcaccugggcaagugcaacaucgccggcuggauccugggcaaccccgagugcgagagccugagcaccgccagcagcuggagcuacaucguggagaccagcagcagcgacaacggcaccugcuaccccggcgacuucaucaacuacgaggagcugagagagcagcugagcagcgugagcagcuucgagagauucgagauguuccccaagaccagcagcuggcccaaccacgacagcaacaagggcgugaccgccgccugcccccacgccggcgccaagagcuucuacaagaaccugaucuggcuggugaagaagggcaacagcuaccccaagcugagcaagagcuacaucaacgacaagggcaaggaggugcuggugcuguggggcauccaccaccccagcaccaccgccgaccagcagagccuguaccagaacgccgacgccuacguguucgugggcaccagcagauacagcaagaaguucaagcccgagaucgccaccagacccaaggugagagaccaggagggcagaaugaacuacuacuggacccugguggagcccggcgacaagaucaccuucgaggccaccggcaaccugguggugcccagauacgccuucgccauggagagaaacgccggcagcggcaucaucaucagcgacacccccgugcacgacugcaacaccaccugccagacccccaagggcgccaucaacaccagccugcccuuccagaacauccaccccaucaccaucggcaagugccccaaguacgugaagagcaccaagcugagacuggccaccggccugagaaacgugcccagcauccagagcagaggccuguucggcgccaucgccggcuucaucgagggcggcuggaccggcaugguggacggcugguacggcuaccaccaccagaacgagcagggcagcggcuacgccgccgaccugaagagcacccagaacgccaucgacaagaucaccaacaaggugaacagcgugaucgagaagaugaacacccaguucaccgccgugggcaaggaguucaaccaccuggagaagagaaucgagaaccugaacaagaagguggacgacggcuuccuggacaucuggaccuacaacgccgagcugcuggugcugcuggagaacgagagaacccuggacuaccacgacagcaacgugaagaaccuguacgagaaggugagaaaccagcugaagaacaacgccaaggagaucggcaacggcugcuucgaguucuaccacaagugcgacaacaccugcauggagagcgugaagaacggcaccuacgacuaccccaaguacagcgaggaggccaagcugaacagagaggagaucgacggcgugaagcuggagagcaccagaaucuaccagauccuggccaucuacagcaccguggccagcagccuggugcugguggugagccugggcgccaucagcuucuggaugugcagcaacggcagccugcagugcagaaucugcaucuga

SEQ ID NO: 172170 - RNA, 1701 nt, Artificial Sequence; identical to SEQ ID NO: 172140
  derived and/or modified CDS sequence (opt4) from hemagglutinin__InfluenzaA__AHZ36169

SEQ ID NO: 172171 - RNA, 1701 nt, Artificial Sequence
  derived and/or modified CDS sequence (opt4) from hemagglutinin__InfluenzaA__AHZ36180
augaaggccauccugguggugcugcuguacaccuucgccaucgccaacgccgacacccugugcaucggcuaccacgccaacaacagcaccgacaccguggacaccgugcuggagaagaacgugaccgugacccacagcgugaaccugcuggaggacaagcacaacggcaagcugugcaagcugagaggcguggccccccugcaccugggcaagugcaacaucgccggcuggauccugggcaaccccgagugcgagagccugagcaccgccagcagcuggagcuacaucguggagaccagcagcagcgacaacggcaccugcuaccccggcgacuucaucaacuacgaggagcugagagagcagcugagcagcgugagcagcuucgagagauucgagauguuccccaagaccagcagcuggcccaaccacgacagcaacaagggcgugaccgccgccugcccccacgccggcgccaagagcuucuacaagaaccugaucuggcuggugaagaagggcaacagcuaccccaagcugagcaagagcuacaucaacgacaagggcaaggaggugcuggugcuguggggcauccaccaccccagcaccaccgccgaccagcagagccuguaccagaacgccgacgccuacguguucgugggcaccagcagauacagcaagaaguucaagcccgagaucgccaucagacccaaggugagagaccaggagggcagaaugaacuacuacuggacccugguggagcccggcgacaagaucaccuucgaggccaccggcaaccugguggugcccagauacgccuucgccauggagagaaacgccggcagcggcaucaucaucagcgacacccccauccacgacugcaacaccaccugccagacccccaagggcgccaucaacaccagccugcccuuccagaacauccaccccaucaccaucggcaagugccccaaguacgugaagagcaccaagcugagacuggccaccggccugagaaacgugcccagcauccagagcagaggccuguucggcgccaucgccggcuucaucgagggcggcuggaccggcaugguggacggcugguacggcuaccaccaccagaacgagcagggcagcggcuacgccgccgaccugaagagcacccagaacgccaucgacaagaucaccaacaaggugaacagcgugaucgagaagaugaacacccaguucaccgccgugggcaaggaguucaaccaccuggagaagagaaucgagaaccugaacaagaagguggacgacggcuuccuggacaucuggaccuacaacgccgagcugcuggugcugcuggagaacgagagaacccuggacuaccacgacagcaacgugaagaaccuguacgagaaggugagaaaccagcugaagaacaacgccaaggagaucggcaacggcugcuucgaguucuaccacaagugcgacaacaccugcauggagagcgugaagaacggcaccuacgacuaccccaaguacagcgaggaggccaagcugaacagagaggagaucgacggcgugaagcuggagagcaccagaaucuaccagauccuggccaucuacagcaccguggccagcagccuggugcugguggugagccugggcgccaucagcuucuggaugugcagcaacggcagccugcagugcagaaucugcaucuga

SEQ ID NO: 172172 - RNA, 1701 nt, Artificial Sequence; identical to SEQ ID NO: 172145
  derived and/or modified CDS sequence (opt4) from hemagglutinin__InfluenzaA__AHZ36191

SEQ ID NO: 172173 - RNA, 1701 nt, Artificial Sequence; identical to SEQ ID NO: 166915
  derived and/or modified CDS sequence (opt4) from hemagglutinin__InfluenzaA__AHZ36203

SEQ ID NO: 172174 - RNA, 1701 nt, Artificial Sequence; identical to SEQ ID NO: 172140
  derived and/or modified CDS sequence (opt4) from hemagglutinin__InfluenzaA__AHZ36215

SEQ ID NO: 172175 - RNA, 1701 nt, Artificial Sequence; identical to SEQ ID NO: 166915
  derived and/or modified CDS sequence (opt4) from hemagglutinin__InfluenzaA__AHZ36226

SEQ ID NO: 172176 - RNA, 1701 nt, Artificial Sequence; identical to SEQ ID NO: 172140
  derived and/or modified CDS sequence (opt4) from hemagglutinin__InfluenzaA__AHZ36238

SEQ ID NO: 172177 - RNA, 1701 nt, Artificial Sequence; identical to SEQ ID NO: 172140
  derived and/or modified CDS sequence (opt4) from hemagglutinin__InfluenzaA__AHZ36249

SEQ ID NO: 172178 - RNA, 1701 nt, Artificial Sequence
  derived and/or modified CDS sequence (opt4) from hemagglutinin__InfluenzaA__AHZ36260
augaaggccauccugguggugcugcuguacaccuucgccaucgccaacgccgacacccugugcaucggcuaccacgccaacaacagcaccgacaccguggacaccgugcuggagaagaacgugaccgugacccacagcgugaaccugcuggaggacaagcacaacggcaagcugugcaagcugagaggcguggccccccugcaccugggcaagugcaacaucgccggcuggauccugggcaaccccgagugcgagagccugagcaccgccagcagcuggagcuacaucguggagaccuucagcagcgacaacggcaccugcuaccccggcgacuucaucaacuacgaggagcugagagagcagcugagcagcgugagcagcuucgagagauucgagauguuccccaagaccagcagcuggcccaaccacgacagcaacaagggcgugaccgccgccugcccccacgccggcgccaagagcuucuacaagaaccugaucuggcuggugaagaagggcaacagcuaccccaagcugagcaagagcuacaucaacgacaagggcaaggaggugcuggugcuguggggcauccaccaccccagcaccaccgccgaccagcagagccuguaccagaacgccgacgccuacguguucgugggcaccagcagauacagcaagaaguucaagcccgagaucgccaucagacccaaggugagagaccaggagggcagaaugaacuacuacuggacccugguggagcccggcgacaagaucaccuucgaggccaccggcaaccugguggugcccagauacgccuucgccauggagagaaacgccggcagcggcaucaucaucagcgacacccccgugcacgacugcaacaccaccugccagacccccaagggcgccaucaacaccagccugcccuuccagaacauccaccccaucaccaucggcaagugccccaaguacgugaagagcaccaagcugagacuggccaccggccugagaaacgugcccagcauccagagcagaggccuguucggcgccaucgccggcuucaucgagggcggcuggaccggcaugguggacggcugguacggcuaccaccaccagaacgagcagggcagcggcuacgccgccgaccugaagagcacccagaacgccaucgacaagaucaccaacaaggugaacagcgugaucgagaagaugaacacccaguucaccgccgugggcaaggaguucaaccaccuggagaagagaaucgagaaccugaacaagaagguggacgacggcuuccuggacaucuggaccuacaacgccgagcugcuggugcugcuggagaacgagagaacccuggacuaccacgacagcaacgugaagaaccuguacgagaaggugagaaaccagcugaagaacaacgccaaggagaucggcaacggcugcuucgaguucuaccacaagugcgacaacaccugcauggagagcgugaagaacggcaccuacgacuaccccaaguacagcgaggaggccaagcugaacagagaggagaucgacggcgugaagcuggagagcaccagaaucuaccagauccuggccaucuacagcaccguggccagcagccuggugcugguggugagccugggcgccaucagcuucuggaugugcagcaacggcagccugcagugcagaaucugcaucuga

SEQ ID NO: 172179 - RNA, 1701 nt, Artificial Sequence; identical to SEQ ID NO: 172125
  derived and/or modified CDS sequence (opt4) from hemagglutinin__InfluenzaA__AHZ36271

SEQ ID NO: 172180 - RNA, 1701 nt, Artificial Sequence; identical to SEQ ID NO: 172140
  derived and/or modified CDS sequence (opt4) from hemagglutinin__InfluenzaA__AHZ36283

SEQ ID NO: 172181 - RNA, 1701 nt, Artificial Sequence; identical to SEQ ID NO: 172125
  derived and/or modified CDS sequence (opt4) from hemagglutinin__InfluenzaA__AHZ36294

SEQ ID NO: 172182 - RNA, 1701 nt, Artificial Sequence
  derived and/or modified CDS sequence (opt4) from hemagglutinin__InfluenzaA__AHZ36306
augaaggccauccugguggugcugcuguacaccuucgccaucgccaacgccgacacccugugcaucggcuaccacgccaacaacagcaccgacaccguggacaccgugcuggagaagaacgugaccgugacccacagcgugaaccugcuggaggacaagcacaacggcaagcugugcaagcugagaggcguggccccccugcaccugggcaagugcaacaucgccggcuggauccugggcaaccccgagugcgagagccugagcaccgccagcagcuggagcuacaucguggagaccagcagcagcgacaacggcaccugcuaccccggcgacuucaucaacuacgaggagcugagagagcagcugagcagcgugagcagcuucgagagauucgagauguuccccaagaccagcagcuggcccaaccacgacagcaacaagggcgugaccgccgccugcccccacgccggcgccaagagcuucuacaagaaccugaucuggcuggugaagaagggcaacagcuaccccaagcugagcaagagcuacaucaacgacaagggcaaggaggugcuggugcuguggggcauccaccaccccagcaccaccgccgaccagcagagccuguaccagaacgccgacgccuacguguucgugggcaccagcagauacagcaagaaguucaagcccgagaucgccaucagacccaaggugagagaccaggagggcagaaugaacuacuacuggacccugguggagcccggcgacaagaucaccuucgaggccaccggcaaccugguggugcccagauacgccuucgccauggagagaaacgccggcagcggcaucaucaucagcgacacccccgugcacgacugcaacaccaccugccagacccccaagggcgccaucaacaccagccugcccuuccagaacauccaccccaucaccaucggcaagugccccaaguacgugaagagcaagaagcugagacuggccaccggccugagaaacgugcccagcauccagagcagaggccuguucggcgccaucgccggcuucaucgagggcggcuggaccggcaugguggacggcugguacggcuaccaccaccagaacgagcagggcagcggcuacgccgccgaccugaagagcacccagaacgccaucgacaagaucaccaacaaggugaacagcgugaucgagaagaugaacacccaguucaccgccgugggcaaggaguucaaccaccuggagaagagaaucgagaaccugaacaagaagguggacgacggcuuccuggacaucuggaccuacaacgccgagcugcuggugcugcuggagaacgagagaacccuggacuaccacgacagcaacgugaagaaccuguacgagaaggugagaaaccagcugaagaacaacgccaaggagaucggcaacggcugcuucgaguucuaccacaagugcgacaacaccugcauggagagcgugaagaacggcaccuacgacuaccccaaguacagcgaggaggccaagcugaacagagaggagaucgacggcgugaagcuggagagcaccagaaucuaccagauccuggccaucuacagcaccguggccagcagccuggugcugguggugagccugggcgccaucagcuucuggaugugcagcaacggcagccugcagugcagaaucugcaucuga

SEQ ID NO: 172183 - RNA, 1701 nt, Artificial Sequence; identical to SEQ ID NO: 172140
  derived and/or modified CDS sequence (opt4) from hemagglutinin__InfluenzaA__AHZ36317

SEQ ID NO: 172184 - RNA, 1701 nt, Artificial Sequence; identical to SEQ ID NO: 172140
  derived and/or modified CDS sequence (opt4) from hemagglutinin__InfluenzaA__AHZ36328

SEQ ID NO: 172185 - RNA, 1701 nt, Artificial Sequence
  derived and/or modified CDS sequence (opt4) from hemagglutinin__InfluenzaA__AHZ36339
augaaggccauccugguggugcugcuguacaccuucgccaucgccaacgccgacacccugugcaucggcuaccacgccaacaacagcaccgacaccguggacaccgugcuggagaagaacgugaccgugacccacagcgugaaccugcuggaggacaagcacaacggcaagcugugcaagcugagaggcguggccccccugcaccugggcaagugcaacaucgccggcuggauccugggcaaccccgagugcgagagccugagcaccgccagcagcuggagcuacaucguggagaccagcagcagcgacaacggcaccugcuaccccggcgacuucaucaacuacgaggagcugagagagcagcugagcagcgugagcagcuucgagagauucgagauguuccccaagaccagcagcuggcccaaccacgacagcaacaagggcgugaccgccgccugcccccacgccggcgccaagagcuucuacaagaaccugaucuggcuggugaagaagggcaacagcuaccccaagcugagcaagagcuacaucaacgacaagggcaaggaggugcuggugcuguggggcauccaccaccccagcaccaccgccgaccagcagagccuguaccagaacgccgacgccuacguguucgugggcaccagcagauacagcaagaaguucaagcccgagaucgccaucagacccaaggugagagaccaggagggcagaaugaacuacuacuggacccugguggagcccggcgacaagaucaccuucgaggccaccggcaaccugguggugcccagauacgccuucgccauggagagaaacgccggcagcggcaucaucaucagcgacacccccgugcacgacugcaacaccaccugccagacccccaagggcgccgugaacaccagccugcccuuccagaacauccaccccaucaccaucggcaagugccccaaguacgugaagagcaccaagcugagacuggccaccggccugagaaacgugcccagcauccagagcagaggccuguucggcgccaucgccggcuucaucgagggcggcuggaccggcaugguggacggcugguacggcuaccaccaccagaacgagcagggcagcggcuacgccgccgaccugaagagcacccagaacgccaucgacaagaucaccaacaaggugaacagcgugaucgagaagaugaacacccaguucaccgccgugggcaaggaguucaaccaccuggagagaagaaucgagaaccugaacaagaagguggacgacggcuuccuggacaucuggaccuacaacgccgagcugcuggugcugcuggagaacgagagaacccuggacuaccacgacagcaacgugaagaaccuguacgagaaggugagaaaccagcugaagaacaacgccaaggagaucggcaacggcugcuucgaguucuaccacaagugcgacaacaccugcauggagagcgugaagaacggcaccuacgacuaccccaaguacagcgaggaggccaagcugaacagagaggagaucgacggcgugaagcuggagagcaccagaaucuaccagauccuggccaucuacagcaccguggccagcagccuggugcugguggugagccugggcgccaucagcuucuggaugugcagcaacggcagccugcagugcagaaucugcaucuga

SEQ ID NO: 172186 - RNA, 1701 nt, Artificial Sequence
  derived and/or modified CDS sequence (opt4) from hemagglutinin__InfluenzaA__AHZ36362
augaaggccauccugguggugcugcuguacaccuucgccaucgccaacgccgacacccugugcaucggcuaccacgccaacaacagcaccgacaccguggacaccgugcuggagaagaacgugaccgugacccacagcaucaaccugcuggaggacaagcacaacggcaagcugugcaagcugagaggcguggccccccugcaccugggcaagugcaacaucgccggcuggauccugggcaaccccgagugcgagagccugagcaccgccagcagcuggagcuacaucguggagaccagcagcagcgacaacggcaccugcuaccccggcgacuucaucaacuacgaggagcugagagagcagcugagcagcgugagcagcuucgagagauucgagauguuccccaagaccagcagcuggcccaaccacgacagcaacaagggcgugaccgccgccugcccccacgccggcgccaagagcuucuacaagaaccugaucuggcuggugaagaagggcaacagcuaccccaagcugagcaagagcuacaucaacgacaagggcaaggaggugcuggugcuguggggcauccaccaccccagcaccaccgccgaccagcagagccuguaccagaacgccgacgccuacguguucgugggcaccagcagauacagcaagaaguucaagcccgagaucgccaucagacccaaggugagagaccaggagggcagaaugaacuacuacuggacccugguggagcccggcgacaagaucaccuucgaggccaccggcaaccugguggugcccagauacgccuucgccauggagagaaacgccggcagcggcaucaucaucagcgacacccccgugcacgacugcaacaccaccugccagacccccaagggcgccgugaacaccagccugcccuuccagaacauccaccccaucaccaucggcaagugccccaaguacgugaagagcaccaagcugagacuggccaccggccugagaaacgugcccagcauccagagcagaggccuguucggcgccaucgccggcuucaucgagggcggcuggaccggcaugguggacggcugguacggcuaccaccaccagaacgagcagggcagcggcuacgccgccgaccugaagagcacccagaacgccaucgacaagaucaccaacaaggugaacagcgugaucgagaagaugaacacccaguucaccgccgugggcaaggaguucaaccaccuggagagaagaaucgagaaccugaacaagaagguggacgacggcuuccuggacaucuggaccuacaacgccgagcugcuggugcugcuggagaacgagagaacccuggacuaccacgacagcaacgugaagaaccuguacgagaaggugagaaaccagcugaagaacaacgccaaggagaucggcaacggcugcuucgaguucuaccacaagugcgacaacaccugcauggagagcgugaagaacggcaccuacgacuaccccaaguacagcgaggaggccaagcugaacagagaggagaucgacggcgugaagcuggagagcaccagaaucuaccagauccuggccaucuacagcaccguggccagcagccuggugcugguggugagccugggcgccaucagcuucuggaugugcagcaacggcagccugcagugcagaaucugcaucuga

SEQ ID NO: 172187 - RNA, 1701 nt, Artificial Sequence
  derived and/or modified CDS sequence (opt4) from hemagglutinin__InfluenzaA__AHZ36385
augaagaccaucaucgcccugagcuacauccugugccugaucuucgcccaggagauccccggcaacgacaacagcaccgccacccugugccugggccaccacgccgugcccaacggcaccaucgugaagaccaucaccaacgaccagaucgaggugaccaacgccaccgagcuggugcagagcagcagcaccggcgagaucugcaacagcccccaccagauccuggacggcgagaacugcacccugaucgacgcccugcugggcgacccccagugcgacgacuuccagaacaagaagugggaccuguucguggagagaagcaaggcccacagcaacugcuaccccuacgacgugcccgacuacgccagccugagaagccugguggccagcagcggcacccuggaguucaacaacgagagcuucaacuggaccggcgugacccagaacggcaccagcagcgccugcaucagaagaagcaacaacagcuucuucagcagacugaacuggcugacccaccugaacuucaaguaccccgcccugaacgugaccaugcccaacaacgagcaguucgacaagcuguacaucuggggcgugcaccaccccggcaccgacaaggaccagaucuuccuguacgcccaggccagcggcagaaucaccgugagcaccaagagaagccagcaggccgugauccccaacaucggcagcagacccagagugagaaacauccccagcagagugagcaucuacuggaccaucgugaagcccggcgacauccugcugaucaacagcaccggcaaccugaucgcccccagaggcuacuucaagaucagaagcggcaagagcagcaucaugagaagcgacgcccccaucggcaagugcaacagcgccugcaucacccccaacggcagcauccccaacgacaagcccuuccagaacgugaacagaaucaccuacggcgccugccccagauacgugaagcagaacacccugaagcuggccaccggcaugagaaacgugcccgagaagcagaccagaggcaucuucggcgccaucgccggcuucaucgagaacggcugggagggcaugguggacggcugguacggcuucagacaccagaacagcgagggcagaggccaggccgccgaccugaagagcacccaggccgccaucgaccagaucaacggcaagcugaacagacugaucggcaagaccaacgagaaguuccaccagaucgagaaggaguucagcgagguggagggcagaauccaggaccuggagaaguacguggaggacaccaagaucgaccuguggagcuacaacgccgagcugcugguggcccuggagaaccagcacaccaucgaccugaccgacagcgagaugaacaagcuguucgagaagaccaagaagcagcugagagagaacgccgaggacaugggcaacggcugcuucaagaucuaccacaagugcgacaacgccugcaucggcagcaucagaaacggcaccuacgaccacgacguguacagagacgaggcccugaacaacagauucaagaucaagggcguggagcugaagagcggcuacaaggacuggauccuguggaucagcuucgccaucagcugcuuccugcugugcguggcccugcugggcuucaucaugugggccugccagaagggcaacaucagaugcaacaucugcaucuga

SEQ ID NO: 172188 - RNA, 1701 nt, Artificial Sequence
  derived and/or modified CDS sequence (opt4) from hemagglutinin__InfluenzaA__AHZ36397
augaagaccaucaucgcccugagcuacauccugugccugaucuucgcccaggagauccccggcaacgacaacagcaccgccacccugugccugggccaccacgccgugcccaacggcaccaucgugaagaccaucaccaacgaccagaucgaggugaccaacgccaccgagcuggugcagagcagcagcaccggcgagaucugcaacagcccccaccagauccuggacggcgagaacugcacccugaucgacgcccugcugggcgacccccagugcgacgacuuccagaacaagaagugggaccuguucguggagagaagcaaggcccacagcaacugcuaccccuacgacgugcccgacuacgccagccugagaagccugguggccagcagcggcacccuggaguucaacaacgagagcuucaacuggaccggcgugacccagaacggcaccagcagcgccugcaucagaagaagcaacaacagcuucuucagcagacugaacuggcugacccaccugaacuucaaguaccccgcccugaacgugaccaugcccaacaacgagcaguucgacaagcuguacaucuggggcgugcaccaccccggcaccgacaaggaccagaucuuccuguacgcccaggccagcggcagaaucaccgugagcaccaagagaagccagcaggccgugauccccaacaucggcagcagacccagagugagaaacauccccagcagagugagcaucuacuggaccaucgugaagcccggcgacauccugcugaucaacagcaccggcaaccugaucgcccccagaggcuacuucaagaucagaagcggcaagagcagcaucaugagaagcgacgcccccaucggcaagugcaacagcgccugcaucacccccaacggcagcauccccaacgacaagcccuuccagaacgugaacagaaucaccuacggcgccugccccagauacgugaagcagaacacccugaagcuggccaccggcaugagaaacgugcccgagaagcagaccagaggcaucuucggcgccaucgccggcuucaucgagaacggcugggagggcaugguggacggcugguacggcuucagacaccagaacagcgagggcagaggccaggccgccgaccugaagagcacccaggccgccaucgaccagaucaacggcaagcugaacagacugaucggcaagaccaacgagaaguuccaccagaucgagaaggaguucagcgagguggagggcagaauccaggaccuggagaaguacguggaggacaccaagaucgaccuguggagcuacaacgccgagcugcugguggcccuggagaaccagcacaccaucgaccugaccgacagcgagaugaacaagcuguucgagaagaccaagaagcagcugagagagaacgccgaggacaugggcaacggcugcuucaagaucuaccacaagugcgacaacgccugcaucggcagcaucagaaacggcaccuacgaccacaacguguacagagacgaggcccugaacaacagauucaagaucaagggcguggagcugaagagcggcuacaaggacuggauccuguggaucagcuucgccaucagcugcuuccugcugugcguggcccugcugggcuucaucaugugggccugccagaagggcaacaucagaugcaacaucugcaucuga

SEQ ID NO: 172189 - RNA, 1701 nt, Artificial Sequence; identical to SEQ ID NO: 172125
  derived and/or modified CDS sequence (opt4) from hemagglutinin__InfluenzaA__AHZ36409

SEQ ID NO: 172190 - RNA, 1701 nt, Artificial Sequence; identical to SEQ ID NO: 172126
  derived and/or modified CDS sequence (opt4) from hemagglutinin__InfluenzaA__AHZ36433

SEQ ID NO: 172191 - RNA, 1701 nt, Artificial Sequence
  derived and/or modified CDS sequence (opt4) from hemagglutinin__InfluenzaA__AHZ36445
augaagaccaucaucgcccugagcuacauccugugccugaucuucgcccaggagauccccggcaacgacaacagcaccgccacccugugccugggccaccacgccgugcccaacggcaccaucgugaagaccaucaccaacgaccagaucgaggugaccaacgccaccgagcuggugcagagcagcagcaccggcgagaucugcaacagcccccaccagauccuggacggcgagaacugcacccugaucgacgcccugcugggcgacccccagugcgacgacuuccagaacaagaagugggaccuguucguggagagaagcaaggcccacagcaacugcuaccccuacgacgugcccgacuacgccagccugagaagccugguggccagcagcggcacccuggaguucaacaacgagagcuucaacuggaccggcgugacccagaacggcaccagcagcgccugcaucagaagaagcaacaacagcuucuucagcagacugaacuggcugacccaccugaacuucaaguaccccgcccugaacgugaccaugcccaacaacgagcaguucgacaagcuguacaucuggggcgugcaccaccccggcaccgacaaggaccagaucuuccuguacgcccaggccagcggcagaaucaccgugagcaccaagagaagccagcaggccgugauccccaacaucggcagcagacccagagugagaaacauccccagcagagugagcaucuacuggaccaucgugaagcccggcgacauccugcugaucaacagcaccggcaaccugaucgcccccagaggcuacuucaagaucagaagcggcaagagcagcaucaugagaagcgacgcccccaucggcaagugcaacagcgccugcaucacccccaacggcagcauccccaacgacaagcccuuccagaacgugaacagaaucaccuacggcgccugccccagauacgugaagcagaacacccugaagcuggccaccggcaugagaaacgugcccgagaagcagaccagaggcaucuucggcgccaucgccggcuucaucgagaacggcugggagggcaugguggacggcugguacggcuucagacaccagaacagcgagggcagaggccaggccgccgaccugaagagcacccaggccgccaucgaccagaucaacggcaagcugaacagacugaucggcaagaccaacgagaaguuccaccagaucgagaaggaguucagcgagguggagggcagaauccaggaccuggagaaguacguggaggacaccaagaucgaccuguggagcuacaacgccgagcugcugguggcccuggagaaccagcacaccaucgaccugaccgacagcgagaugaacaagcuguucgagaagaccaagaagcagcugagagagaacgccgaggacaugggcaacggcugcuucaagaucuaccacaagugcgacgacgccugcaucggcagcaucagaaacggcaccuacgaccacgacguguacagagacgaggcccugaacaacagauuccagaucaagggcguggagcugaagagcggcuacaaggacuggauccuguggaucagcuucgccaucagcugcuuccugcugugcguggcccugcugggcuucaucaugugggccugccagaagggcaacaucagaugcaacaucugcaucuga

SEQ ID NO: 172192 - RNA, 1701 nt, Artificial Sequence; identical to SEQ ID NO: 172125
  derived and/or modified CDS sequence (opt4) from hemagglutinin__InfluenzaA__AHZ36457

SEQ ID NO: 172193 - RNA, 1701 nt, Artificial Sequence; identical to SEQ ID NO: 172125
  derived and/or modified CDS sequence (opt4) from hemagglutinin__InfluenzaA__AHZ36469

SEQ ID NO: 172194 - RNA, 1701 nt, Artificial Sequence
  derived and/or modified CDS sequence (opt4) from hemagglutinin__InfluenzaA__AHZ36481
augaagaccaucaucgcccugagcuacauccugugccugaucuucgcccaggagauccccggcaacgacaacagcaccgccacccugugccugggccaccacgccgugcccaacggcaccaucgugaagaccaucaccaacgaccagaucgaggugaccaacgccaccgagcuggugcagagcagcagcaccggcgagaucugcaacagcccccaccagauccuggacggcgagaacugcacccugaucgacgcccugcugggcgacccccagugcgacgacuuccagaacaagaagugggaccuguucguggagagaagcaaggcccacagcaacugcuaccccuacgacgugcccgacuacgccagccugagaagccugguggccagcagcggcacccuggaguucaacaacgagagcuucaacuggaccggcgugacccagaacggcaccagcagcgccugcaucagaagaagcaacaacagcuucuucagcagacugaacuggcugacccaccugaacuucaaguaccccgcccugaacgugaccaugcccaacaacgagcaguucgacaagcuguacaucuggggcgugcaccaccccggcaccgacaaggaccagaucuuccuguacgcccaggccagcggcagaaucaccgugagcaccaagagaagccagcaggccgugauccccaacaucggcagcagacccagagugagaaacauccccagcagagugagcaucuacuggaccaucgugaagcccggcgacauccugcugaucaacagcaccggcaaccugaucgcccccagaggcuacuucaagaucagaaacggcaagagcagcaucaugagaagcgacgcccccaucggcaagugcaacagcgccugcaucacccccaacggcagcauccccaacgacaagcccuuccagaacgugaacagaaucaccuacggcgccugccccagauacgugaagcagaacacccugaagcuggccaccggcaugagaaacgugcccgagaagcagaccagaggcaucuucggcgccaucgccggcuucaucgagaacggcugggagggcaugguggacggcugguacggcuucagacaccagaacagcgagggcagaggccaggccgccgaccugaagagcacccaggccgccaucgaccagaucaacggcaagcugaacagacugaucggcaagaccaacgagaaguuccaccagaucgagaaggaguucagcgagguggagggcagaauccaggaccuggagaaguacguggaggacaccaagaucgaccuguggagcuacaacgccgagcugcugguggcccuggagaaccagcacaccaucgaccugaccgacagcgagaugaacaagcuguucgagaagaccaagaagcagcugagagagaacgccgaggacaugggcaacggcugcuucaagaucuaccacaagugcgacaacgccugcaucggcagcaucagaaacggcaccuacgaccacgacguguacagagacgaggcccugaacaacagauuccagaucaagggcguggagcugaagagcggcuacaaggacuggauccuguggaucagcuucgccaucagcugcuuccugcugugcguggcccugcugggcuucaucaugugggccugccagaagggcaacaucagaugcaacaucugcaucuga

SEQ ID NO: 172195 - RNA, 1701 nt, Artificial Sequence; identical to SEQ ID NO: 172126
  derived and/or modified CDS sequence (opt4) from hemagglutinin__InfluenzaA__AHZ36493

SEQ ID NO: 172196 - RNA, 1701 nt, Artificial Sequence; identical to SEQ ID NO: 172126
  derived and/or modified CDS sequence (opt4) from hemagglutinin__InfluenzaA__AHZ36505

SEQ ID NO: 172197 - RNA, 1701 nt, Artificial Sequence; identical to SEQ ID NO: 172126
  derived and/or modified CDS sequence (opt4) from hemagglutinin__InfluenzaA__AHZ36517

SEQ ID NO: 172198 - RNA, 1701 nt, Artificial Sequence
  derived and/or modified CDS sequence (opt4) from hemagglutinin__InfluenzaA__AHZ36529
augaagaccaucaucgcccugagcuacauccugugccugaucuucgcccaggagauccccggcaacgacaacagcaccgccacccugugccugggccaccacgccgugcccaacggcaccaucgugaagaccaucaccaacgaccagaucgaggugaccaacgccaccgagcuggugcagagcagcagcaccggcgagaucugcaacagcccccaccagauccuggacggcgagaacugcacccugaucgacgcccugcugggcgacccccagugcgacgacuuccagaacaagaagugggaccuguucguggagagaagcaaggcccacagcaacugcuaccccuacgacgugcccgacuacgccagccugagaagccugguggccagcagcggcacccuggaguucaacaacgagagcuucaacuggaccggcgugacccagaacggcaccagcagcgccugcaucagaagaagcaacaacagcuucuucagcagacugaacuggcugacccaccugaacuucaaguaccccgcccugaacgugaccaugcccaacaacgagcaguucgacaagcuguacaucuggggcgugcaccaccccggcaccgacaaggaccagaucuuccuguacgcccaggccagcggcagaaucaccgugagcaccaagagaagccagcaggccgugauccccaacaucggcagcagacccagagugagaaacauccccagcagagugagcaucuacuggaccaucgugaagcccggcgacauccugcugaucaacagcaccggcaaccugaucgcccccagaggcuacuucaagaucagaagcggcaagagcagcaucaugagaagcgacgcccccaucggcaagugcaacagcagcugcaucacccccaacggcagcauccccaacgacaagcccuuccagaacgugaacagaaucaccuacggcgccugccccagauacgugaagcagaacacccugaagcuggccaccggcaugagaaacgugcccgagaagcagaccagaggcaucuucggcgccaucgccggcuucaucgagaacggcugggagggcaugguggacggcugguacggcuucagacaccagaacagcgagggcagaggccaggccgccgaccugaagagcacccaggccgccaucgaccagaucaacggcaagcugaacagacugaucggcaagaccaacgagaaguuccaccagaucgagaaggaguucagcgagguggagggcagaauccaggaccuggagaaguacguggaggacaccaagaucgaccuguggagcuacaacgccgagcugcugguggcccuggagaaccagcacaccaucgaccugaccgacagcgagaugaacaagcuguucgagaagaccaagaagcagcugagagagaacgccgaggacaugggcaacggcugcuucaagaucuaccacaagugcgacaacgccugcaucggcagcaucagaaacggcaccuacgaccacgacguguacagagacgaggcccugaacaacagauuccagaucaagggcguggagcugaagagcggcuacaaggacuggauccuguggaucagcuucgccaucagcugcuuccugcugugcguggcccugcugggcuucaucaugugggccugccagaagggcaacaucagaugcaacaucugcaucuga

SEQ ID NO: 172199 - RNA, 1701 nt, Artificial Sequence; identical to SEQ ID NO: 172125
  derived and/or modified CDS sequence (opt4) from hemagglutinin__InfluenzaA__AHZ36541

SEQ ID NO: 172200 - RNA, 1701 nt, Artificial Sequence
  derived and/or modified CDS sequence (opt4) from hemagglutinin__InfluenzaA__AHZ36553
augaagaccaucaucgcccugagcuacauccugugccugaucuucgcccaggagauccccggcaacgacaacagcaccgccacccugugccugggccaccacgccgugcccaacggcaccaucgugaagaccaucaccaacgaccagaucgaggugaccaacgccaccgagcuggugcagagcagcagcaccggcgagaucugcaacagcccccaccagauccuggacggcgagaacugcacccugaucgacgcccugcugggcgacccccagugcgacgacuuccagaacaaggagugggaccuguucguggagagaagcaaggcccacagcaacugcuaccccuacgacgugcccgacuacgccagccugagaagccugguggccagcagcggcacccuggaguucaagaacgagagcuucaacuggaccggcgugacccagaacggcaccagcagcgccugcaucagaagaagcaacaacagcuucuucagcagacugaacuggcugacccaccugaacuucaaguaccccgcccugaacgugaccaugcccaacaacgagcaguucgacaagcuguacaucuggggcgugcaccaccccggcaccgacaaggaccagaucuuccuguacgcccaggccagcggcagaaucaccgugagcaccaagagaagccagcaggccgugauccccaacaucggcagcagacccagagugagaaacauccccagcagagugagcaucuacuggaccaucgugaagcccggcgacauccugcugaucaacagcaccggcaaccugaucgcccccagaggcuacuucaagaucagaagcggcaagagcagcaucaugagaagcgacgcccccaucggcaagugcaacagcgccugcaucacccccaacggcagcauccccaacgacaagcccuuccagaacgugaacagaaucaccuacggcaccugccccagauacgugaagcagaacacccugaagcuggccaccggcaugagaaacgugcccgagaagcagaccagaggcaucuucggcgccaucgccggcuucaucgagaacggcugggagggcaugguggacggcugguacggcuucagacaccagaacagcgagggcagaggccaggccgccgaccugaagagcacccaggccgccaucgaccagaucaacggcaagcugaacagacugaucggcaagaccaacgagaaguuccaccagaucgagaaggaguucagcgagguggagggcagaauccaggaccuggagaaguacguggaggacaccaagaucgaccuguggagcuacaacgccgagcugcugguggcccuggagaaccagcacaccaucgaccugaccgacagcgagaugaacaagcuguucgagaagaccaagaagcagcugagagagaacgccgaggacaugggcaacggcugcuucaagaucuaccacaagugcgacaacgccugcaucggcagcaucagaaacggcaccuacgaccacgacguguacagagacgaggcccugaacaacagauuccagaucaagggcguggagcugaagagcggcuacaaggacuggauccuguggaucagcuucgccaucagcugcuuccugcugugcguggcccugcugggcuucaucaugugggccugccagaagggcaacaucagaugcaacaucugcaucuga

SEQ ID NO: 172201 - RNA, 1701 nt, Artificial Sequence; identical to SEQ ID NO: 172125
  derived and/or modified CDS sequence (opt4) from hemagglutinin__InfluenzaA__AHZ36565

SEQ ID NO: 172202 - RNA, 1701 nt, Artificial Sequence; identical to SEQ ID NO: 172125
  derived and/or modified CDS sequence (opt4) from hemagglutinin__InfluenzaA__AHZ36577

SEQ ID NO: 172203 - RNA, 1701 nt, Artificial Sequence; identical to SEQ ID NO: 172125
  derived and/or modified CDS sequence (opt4) from hemagglutinin__InfluenzaA__AHZ36589

SEQ ID NO: 172204 - RNA, 1701 nt, Artificial Sequence; identical to SEQ ID NO: 172200
  derived and/or modified CDS sequence (opt4) from hemagglutinin__InfluenzaA__AHZ36601

SEQ ID NO: 172205 - RNA, 1701 nt, Artificial Sequence
  derived and/or modified CDS sequence (opt4) from hemagglutinin__InfluenzaA__AHZ36613
augaagaccaucaucgcccugagcuacauccugugccugaucuucgcccaggagauccccggcaacgacaacagcaccgccacccugugccugggccaccacgccgugcccaacggcaccaucgugaagaccaucaccaacgaccagaucgaggugaccaacgccaccgagcuggugcagagcagcagcaccggcgagaucugcaacagcccccaccagauccuggacggcgagaacugcacccugaucgacgcccugcugggcgacccccagugcgacgacuuccagaacaaggagugggaccuguucguggagagaagcaaggcccacagcaacugcuaccccuacgacgugcccgacuacgccagccugagaagccugguggccagcagcggcacccuggaguucaacaacgagagcuucaacuggaccggcgugacccagaacggcaccagcagcgccugcaucagaagaagcaacaacagcuucuucagcagacugaacuggcugacccaccugaacuucaaguaccccgcccugaacgugaccaugcccaacaacgagcaguucgacaagcuguacaucuggggcgugcaccaccccggcaccgacaaggaccagaucuuccuguacgcccaggccagcggcagaaucaccgugagcaccaagagaagccagcaggccgugauccccaacaucggcagcagacccagagugagaaacauccccagcagagugagcaucuacuggaccaucgugaagcccggcgacauccugcugaucaacagcaccggcaaccugaucgcccccagaggcuacuucaagaucagaagcggcaagagcagcaucaugagaagcgacgcccccaucggcaagugcaacagcgccugcaucacccccaacggcagcauccccaacgacaagcccuuccagaacgugaacagaaucaccuacggcaccugccccagauacgugaagcagaacacccugaagcuggccaccggcaugagaaacgugcccgagaagcagaccagaggcaucuucggcgccaucgccggcuucaucgagaacggcugggagggcaugguggacggcugguacggcuucagacaccagaacagcgagggcagaggccaggccgccgaccugaagagcacccaggccgccaucgaccagaucaacggcaagcugaacagacugaucggcaagaccaacgagaaguuccaccagaucgagaaggaguucagcgagguggagggcagaauccaggaccuggagaaguacguggaggacaccaagaucgaccuguggagcuacaacgccgagcugcugguggcccuggagaaccagcacaccaucgaccugaccgacagcgagaugaacaagcuguucgagaagaccaagaagcagcugagagagaacgccgaggacaugggcaacggcugcuucaagaucuaccacaagugcgacaacgccugcaucggcagcaucagaaacggcaccuacgaccacgacguguacagagacgaggcccugaacaacagauuccagaucaagggcguggagcugaagagcggcuacaaggacuggauccuguggaucagcuucgccaccagcugcuuccugcugugcguggcccugcugggcuucaucaugugggccugccagaagggcaacaucagaugcaacaucugcaucuga

SEQ ID NO: 172206 - RNA, 1701 nt, Artificial Sequence; identical to SEQ ID NO: 172125
  derived and/or modified CDS sequence (opt4) from hemagglutinin__InfluenzaA__AHZ36625

SEQ ID NO: 172207 - RNA, 1701 nt, Artificial Sequence; identical to SEQ ID NO: 172126
  derived and/or modified CDS sequence (opt4) from hemagglutinin__InfluenzaA__AHZ36637

SEQ ID NO: 172208 - RNA, 1701 nt, Artificial Sequence; identical to SEQ ID NO: 172126
  derived and/or modified CDS sequence (opt4) from hemagglutinin__InfluenzaA__AHZ36649

SEQ ID NO: 172209 - RNA, 1701 nt, Artificial Sequence; identical to SEQ ID NO: 170054
  derived and/or modified CDS sequence (opt4) from hemagglutinin__InfluenzaA__AHZ36661

SEQ ID NO: 172210 - RNA, 1701 nt, Artificial Sequence; identical to SEQ ID NO: 170054
  derived and/or modified CDS sequence (opt4) from hemagglutinin__InfluenzaA__AHZ36673

SEQ ID NO: 172211 - RNA, 1701 nt, Artificial Sequence
  derived and/or modified CDS sequence (opt4) from hemagglutinin__InfluenzaA__AHZ36685
augaagaccaucaucgcccugagcuacauccugugccugguguucgcccagaagcugcccggcaacgacaacagcaccgccacccugugccugggccaccacgccgugcccaacggcaccaucgugaagaccaucaccaacgacagaaucgaggugaccaacgccaccgagcuggugcagaacagcagcaucggcgagaucugcgacagcccccaccagauccuggacggcgagaacugcacccugaucgacgcccugcugggcgacccccagugcgacggcuuccagaacaagaagugggaccuguucguggagagaagcaaggccuacagcaacugcuaccccuacgacgugcccgacuacgccagccugagaagccugguggccagcagcggcacccuggaguucaacaacgagagcuucaacugggccggcgugacccagaacggcaccagcagcgccugcaucagaggcagcaacagcagcuucuucagcagacugaacuggcugacccaccugaacuucaaguaccccgcccugaacgugaccaugcccaacaacgagcaguucgacaagcuguacaucuggggcgugcaccaccccggcaccgacaaggaccagaucuuccuguacgcccagagcagcggcagaaucaccgugagcaccaagagaagccagcaggccgugauccccaacaucggcagcagacccagaaucagaaacauccccagcagaaucagcaucuacuggaccaucgugaagcccggcgacauccugcugaucaacagcaccggcaaccugaucgcccccagaggcuacuucaagaucagaagcggcaagagcagcaucaugagaagcgacgcccccaucggcaagugcaagagcgagugcaucacccccaacggcagcauccccaacgacaagcccuuccagaacgugaacagaaucaccuacggcgccugccccagauacgugaagcagagcacccugaagcuggccaccggcaugagaaacgugcccgagaagcagaccagaggcaucuucggcgccaucgccggcuucaucgagaacggcugggagggcaugguggacggcugguacggcuucagacaccagaacagcgagggcagaggccaggccgccgaccugaagagcacccaggccgccaucgaccagaucaacggcaagcugaacagacugaucggcaagaccaacgagaaguuccaccagaucgagaaggaguucagcgagguggagggcagaauccaggaccuggagaaguacguggaggacaccaagaucgaccuguggagcuacaacgccgagcugcugguggcccuggagaaccagcacaccaucgaccugaccgacagcgagaugaacaagcuguucgagaagaccaagaagcagcugagagagaacgccgaggacaugggcaacggcugcuucaagaucuaccacaagugcgacaacgccugcaucggcagcaucagaaacggcaccuacgaccacgacguguacagagacgaggcccugaacaacagauuccagaucaagagaguggagcugaagagcggcuacaaggacuggauccuguggaucagcuucgccaucagcugcuuccugcugugcguggcccugcugggcuucaucaugugggccugccagaagggcaacaucagaugcaacaucugcaucuga

SEQ ID NO: 172212 - RNA, 1683 nt, Artificial Sequence; identical to SEQ ID NO: 170048
  derived and/or modified CDS sequence (opt4) from hemagglutinin__InfluenzaA__AHZ39698

SEQ ID NO: 172213 - RNA, 1683 nt, Artificial Sequence
  derived and/or modified CDS sequence (opt4) from hemagglutinin__InfluenzaA__AHZ39722
augaacacccagauccugguguucgcccugaucgccaucauccccaccaacgccgacaagaucugccugggccaccacgccgugagcaacggcaccaaggugaacacccugaccgagagaggcguggagguggugaacgccaccgagaccguggagagaaccaacauccccagaaucugcagcaagggcaagagaaccguggaccugggccagugcggccugcugggcaccaucaccggccccccccagugcgaccaguuccuggaguucagcgccgaccugaucaucgagagaagagagggcagcgacgugugcuaccccggcaaguucgugaacgaggaggcccugagacagauccugagagagagcggcggcaucgacaaggaggccaugggcuucaccuacagcggcaucagaaccgacggcgccaccagcgccugcagaagaagcggcagcagcuucuacgccgagaugaaguggcugcugagcaacaccgacgacgccgccuucccccagaugaccaagagcuacaagaacaccagaaagagccccgcccugaucguguggggcauccaccacagcgugagcaccgccgagcagaccaagcuguacggcagcggcaacaagcuggugaccgugggcagcagcaacuaccagcagagcuucgugcccagccccggcgccagaccccaggugaacggccugagcggcagaaucgacuuccacuggcugaugcugaaccccaacgacaccgugaccuucagcuucaacggcgccuucaucgcccccgacagagccagcuuccugagaggcaagagcaugggcauccagagcggcgugcagguggacgccaacugcgagggcgacugcuaccacagcggcggcaccaucaucagcaaccugcccuuccagaacaucgacagcagagccgugggcaagugccccagauacgugaagcagagaagccugcugcuggccaccggcaugaagaacgugcccgagauccccaagggcagaggccuguucggcgccaucgccggcuucaucgagaacggcugggagggccugaucgacggcugguacggcuucagacaccagaacgcccagggcgagggcaccgccgccgacuacaagagcacccagagcgccaucgaccagaucaccggcaagcugaacagacugaucgagaagaccaaccagcaguucgagcugaucgacaacgaguucaacgagguggagaagcagaucggcaacgugaucaacuggaccagagacagcaucaccgagguguggagcuacaacgccgagcugcugguggccauggagaaccagcacaccaucgaccuggccgacagcgagauggacaagcuguacgagagagugaagagacagcugagagagaacgccgaggaggacggcaccggcugcuucgagaucuuccacaagugcgacgacgacugcauggccagcaucagaaacaacaccuacgaccacagcaaguacagagaggaggccaugcagaacagaauccagaucgaccccgugaagcugagcagcggcuacaaggacgugauccugugguucagcuucggcgccagcugcuucauccugcuggccaucgugaugggccugguguucaucugcgugaagaacggcaacaugagaugcaccaucugcaucuga

SEQ ID NO: 172214 - RNA, 1683 nt, Artificial Sequence; identical to SEQ ID NO: 172213
  derived and/or modified CDS sequence (opt4) from hemagglutinin__InfluenzaA__AHZ39734

SEQ ID NO: 172215 - RNA, 1683 nt, Artificial Sequence
  derived and/or modified CDS sequence (opt4) from hemagglutinin__InfluenzaA__AHZ39746
augaacacccagauccugguguucgcccugaucgccaucauccccaccaacgccgacaagaucugccugggccaccacgccgugagcaacggcaccaaggugaacacccugaccgagagaggcguggagguggugaacgccaccgagaccguggagagaaccaacauccccagaaucugcagcaagggcaagagaaccguggaccugggccagugcggccugcugggcaccaucaccggccccccccagugcgaccaguuccuggaguucagcgccgaccugaucaucgagagaagagagggcagcgacgugugcuaccccggcaaguucgugaacgaggaggcccugagacagauccugagagagagcggcggcaucgacaaggaggccaugggcuucaccuacagcggcaucagaaccaacggcgccaccagcgccugcagaagaagcggcagcagcuucuacgccgagaugaaguggcugcugagcaacaccgacaacgccgccuucccccagaugaccaagagcuacaagaacaccagaaagagccccgcccugaucguguggggcauccaccacagcgugagcaccgccgagcagaccaagcuguacggcagcggcaacaagcuggugaccgugggcagcagcaacuaccagcagagcuucgugcccagccccggcgagagaccccaggugaacggccugagcggcagaaucgacuuccacuggcugaugcugaaccccaacgacaccgugaccuucagcuucaacggcgccuucaucgcccccgacagagccagcuuccugagaggcaagagcaugggcauccagagcggcgugcagguggacgccaacugcgagggcgacugcuaccacagcggcggcaccaucaucagcaaccugcccuuccagaacaucgacagcagagccgugggcaagugccccagauacgugaagcagagaagccugcugcuggccaccggcaugaagaacgugcccgagauccccaagggcagaggccuguucggcgccaucgccggcuucaucgagaacggcugggagggccugaucgacggcugguacggcuucagacaccagaacgcccagggcgagggcaccgccgccgacuacaagagcacccagagcgccaucgaccagaucaccggcaagcugaacagacugaucgagaagaccaaccagcaguucgagcugaucgacaacgaguucaacgagguggagaagcagaucggcaacgugaucaacuggaccagagacagcaucaccgagguguggagcuacaacgccgagcugcugguggccauggagaaccagcacaccaucgaccuggccgacagcgagauggacaagcuguacgagagagugaagagacagcugagagagaacgccgaggaggacggcaccggcugcuucgagaucuuccacaagugcgacgacgacugcauggccagcaucagaaacaacaccuacgaccacagcaaguacagagaggaggccaugcagaacagaauccagaucgaccccgugaagcugagcagcggcuacaaggacgugauccugugguucagcuucggcgccagcugcuucauccugcuggccaucgugaugggccugguguucaucugcgugaagaacggcaacaugagaugcaccaucugcaucuga

SEQ ID NO: 172216 - RNA, 1683 nt, Artificial Sequence; identical to SEQ ID NO: 172213
  derived and/or modified CDS sequence (opt4) from hemagglutinin__InfluenzaA__AHZ39758

SEQ ID NO: 172217 - RNA, 1683 nt, Artificial Sequence; identical to SEQ ID NO: 172213
  derived and/or modified CDS sequence (opt4) from hemagglutinin__InfluenzaA__AHZ39770

SEQ ID NO: 172218 - RNA, 1683 nt, Artificial Sequence; identical to SEQ ID NO: 172213
  derived and/or modified CDS sequence (opt4) from hemagglutinin__InfluenzaA__AHZ39782

SEQ ID NO: 172219 - RNA, 1701 nt, Artificial Sequence; identical to SEQ ID NO: 169943
  derived and/or modified CDS sequence (opt4) from hemagglutinin__InfluenzaA__AHZ39794

SEQ ID NO: 172220 - RNA, 1701 nt, Artificial Sequence; identical to SEQ ID NO: 170057
  derived and/or modified CDS sequence (opt4) from hemagglutinin__InfluenzaA__AHZ39806

SEQ ID NO: 172221 - RNA, 1701 nt, Artificial Sequence
  derived and/or modified CDS sequence (opt4) from hemagglutinin__InfluenzaA__AHZ39818
augaagaccaucaucgcccugagcuacauccugugccugguguucgcccagaagcugcccggcaacgacaacagcaccgccacccugugccugggccaccacgccgugcccaacggcaccaucgugaagaccaucaccaacgaccagaucgaggugaccaacgccaccgagcuggugcagagcagcagcaccggcgagaucugcaacagcccccaccagauccuggacggcgagaacugcacccugaucgacgcccugcugggcgacccccagugcgacggcuuccagaacaagaagugggaccuguucguggagagaagcaaggcccacagcaacugcuaccccuacgacgugcccgacuacgccagccugagaagccugguggccagcagcggcacccuggaguucaacaacgagagcuucaacuggaccggcgugacccagaacggcaccagcagcgccugcaucagaagaagcaacaacagcuucuucagcagacugaacuggcugacccaccugaacuucaaguaccccgcccugaacgugaccaugcccaacaacgagcaguucgacaagcuguacaucuggggcgugcaccaccccggcaccgacaaggaccagaccuuccuguacgcccaggccgccggcagaaucaccgugagcaccaagagaagccagcaggccgugauccccaacaucggcagcagacccagagugagaaacauccccagcagagugagcaucuacuggaccaucgugaagcccggcgacauccugcugaucaacagcaccggcaaccugaucgcccccagaggcuacuucaagaucagaagcggcaagagcagcaucaugagaagcgacgcccccaucggcaagugcaacagcgccugcaucacccccaacggcagcauccccaacgacaagcccuuccagaacgugaacagaaucaccuacggcgccugccccagauacgugaagcagaacacccugaagcuggccaccggcaugagaaacgugcccgagaagcagaccagaggcaucuucggcgccaucgccggcuucaucgagaacggcugggagggcaugguggacggcugguacggcuucagacaccagaacagcgagggcagaggccaggccgccgaccugaagagcacccaggccgccaucgaccagaucaacggcaagcugaacagacugaucggcaagaccaacgagaaguuccaccagaucgagaaggaguucagcgagguggagggcagaauccaggaccuggagaaguacguggaggacaccaagaucgaccuguggagcuacaacgccgagcugaucguggcccuggagaaccagcacaccaucgaccugaccgacagcgagaugaacaagcuguucgagaagaccaagaagcagcugagagagaacgccgaggacaugggcaacggcugcuucaagaucuaccacaagugcgacaacgccugcaucggcagcaucagaaacggcaccuacgaccacgacguguacagagacgaggcccugaacaacagauuccagaucaagggcguggagcugaagagcggcuacaaggacuggauccuguggaucagcuucgccaucagcugcuuccugcugugcguggugcugcugggcuucaucaugugggccugccagaagggcaacaucagaugcaacaucugcaucuga

SEQ ID NO: 172222 - RNA, 1701 nt, Artificial Sequence; identical to SEQ ID NO: 169943
  derived and/or modified CDS sequence (opt4) from hemagglutinin__InfluenzaA__AHZ39841

SEQ ID NO: 172223 - RNA, 1701 nt, Artificial Sequence; identical to SEQ ID NO: 169963
  derived and/or modified CDS sequence (opt4) from hemagglutinin__InfluenzaA__AHZ39853

SEQ ID NO: 172224 - RNA, 1701 nt, Artificial Sequence; identical to SEQ ID NO: 169943
  derived and/or modified CDS sequence (opt4) from hemagglutinin__InfluenzaA__AHZ39865

SEQ ID NO: 172225 - RNA, 1701 nt, Artificial Sequence
  derived and/or modified CDS sequence (opt4) from hemagglutinin__InfluenzaA__AHZ39877
augaagaccaucaucgcccugagcuacauccugugccugguguucgcccagaagcugcccggcaacgacaacagcaccgccacccugugccugggccaccacgccgugcccaacggcaccaucgugaagaccaucaccaacgacagaaucgaggugaccaacgccaccgagcuggugcagaacagcagcaucggcgagaucugcgacagcccccaccagauccuggacggcgagaacugcacccugaucgacgcccugcugggcgacccccagugcgacggcuuccagaacaagaagugggaccuguucguggagagaagcaaggccuacagcaacugcuaccccuacgacgugcccgacuacgccagccugagaagccugguggccagcagcggcacccuggaguucaacaacgagagcuucaacuggaccggcgugacccagaacggcaccagcagcgccugcaucagaagaagcaacagcagcuucuucagcagacugaacuggcugacccaccugaacuucaaguaccccgcccugaacgugaccaugcccaacaacgagcaguucgacaagcuguacaucuggggcgugcaccaccccggcaccgacaaggaccagaucuuccuguacgcccagagcagcggcagaaucaccgugagcaccaagagaagccagcaggccgugauccccaacaucggcagcagacccagaaucagaaacauccccagcagaaucagcaucuacuggaccaucgugaagcccggcgacauccugcugaucaacagcaccggcaaccugaucgcccccagaggcuacuucaagaucagaagcggcaagagcagcaucaugagaagcgacgcccccaucggcaagugcaagagcgagugcaucacccccaacggcagcauccccaacgacaagcccuuccagaacgugaacagaaucaccuacggcgccugccccagauacgugaagcagagcacccugaagcuggccaccggcaugagaaacgugcccgagaagcagaccagaggcaucuucggcgccaucgccggcuucaucgagaacggcugggagggcaugguggacggcugguacggcuucagacaccagaacagcgagggcagaggccaggccgccgaccugaagagcacccaggccgccaucgaccagaucaacggcaagcugaacagacugaucggcaagaccaacgagaaguuccaccagaucgagaaggaguucagcgagguggagggcagaauccaggaccuggagaaguacguggaggacaccaagaucgaccuguggagcuacaacgccgagcugcugguggcccuggagaaccagcacaccaucgaccugaccgacagcgagaugaacaagcuguucgagaagaccaagaagcagcugagagagaacgccgaggacaugggcaacggcugcuucaagaucuaccacaagugcgacaacgccugcaucggcagcaucagaaacggcaccuacgaccacaacguguacagagacgaggcccugaacaacagauuccagaucaagggcguggagcugaagagcggcuacaaggacuggauccuguggaucagcuucgccaccagcugcuuccugcugugcguggcccugcugggcuucaucaugugggccugccagaagggcaacaucagaugcaacaucugcaucuga
